United States Patent Application Publication US 2013/0129668 A1 - sequence listing, part 21

SEQ ID NO: 344895 - DNA, 122 bp, Homo sapiens
atgtattattatacttcagtttttaggaagtgcattagaagggcctgcaccagtcaaattcggggattaaagcttttaagcgggaagcgcgcgccccgtgctgtccctttaaagcgttgggc

SEQ ID NO: 344896 - DNA, 122 bp, Homo sapiens
taagaccaaacgaaatatcgtaacacaaggcgaggcaggcttgtgggaaccggtccccagcgggcggcggcagagcggggaggattggaggggccagggctgggggtggcacgggctcttgg

SEQ ID NO: 344897 - DNA, 122 bp, Homo sapiens
cacctcatggcaggcagagggcaatgaaactcatctttccggccatgcagggcgcatgcgcggtctgcctcccgcggcgggccgggtctccagggaggacctgagtttttcttcacccatgg

SEQ ID NO: 344898 - DNA, 122 bp, Homo sapiens
gtgcctgtggtctcagctacacagaagttgaagcaagaaggctgcttgagcccaggagatcgagactgcaagtgagatgtcttcaagccatttcactccagcctgagtgacagagcaagggc

SEQ ID NO: 344899 - DNA, 122 bp, Homo sapiens
cccaggtctgtaaatcagggggagctgggccttggagggaaaagggagagagagtttgggcggtgtgcatacataccttcttcgtccaggactaaggagctgaagctcttttggagggggta

SEQ ID NO: 344900 - DNA, 122 bp, Homo sapiens
gtggaccttccctgtgggaccccttggccaagcgcatgttcgggagaggcacgggttctccgtttgcgctgccctgagagggtcaaacggaatctaccaagcgcgtgtgccgcggctacgtt

SEQ ID NO: 344901 - DNA, 122 bp, Homo sapiens
caagaaatagaaattgtaaacctataattgtaaacctacgtaaccatgcccggttacggccgggcatggtggctcacgcttgtaatcccagcactttgggaggctgaggcgggcagatcacc

SEQ ID NO: 344902 - DNA, 122 bp, Homo sapiens
tggcccaattgagaggggaaaatgcagttgaaacttcagacagggttgataaagtgaggacgatcatagacatggagtacttagacatattaataaacaataaagactttacctgtctaatg

SEQ ID NO: 344903 - DNA, 122 bp, Homo sapiens
ttatttgaatcttatttttacttctagagtttatcttatgctttagtgtacttaggtgtacgggtataatcttaatctaattaacagtattttgtgacctgagacacctgtcaaagaccatt

SEQ ID NO: 344904 - DNA, 122 bp, Homo sapiens
gaatgggggtccagattagggctcactcacccaggttcttcagcaagcagcagctcagaacgagcagctttgatacttgtttcctcttcctcagcttcagccacctcaagtcggcttcgagt

SEQ ID NO: 344905 - DNA, 122 bp, Homo sapiens
ctaggaacgcacagcctgagtctcatcaggagggaatgtgagataaacaggaagggaggacggggaaccaggatgcatcaaaaatgtccatgtgacaaaagacaaaggcagagcaatcatcc

SEQ ID NO: 344906 - DNA, 122 bp, Homo sapiens
ggcaacagaaaggaacagactatgctactctcaaaacagggactaatctcaaaagcacaccgaacaaaagaagctacaaaaaacacgcactgtatgattccatttatagaacattccagaaa

SEQ ID NO: 344907 - DNA, 122 bp, Homo sapiens
cgcgtgcggcggggacgcggcgagtccggggcaggaagaacgcacgggtaattgcaccttcggcaggtgttgggcgggagcaagggggtcagactcgcgctgcagggggagggcgggggagg

SEQ ID NO: 344908 - DNA, 122 bp, Homo sapiens
tcagaggggcttatgacctgtgaagagccctgggggctgctgttgggcttagggatggcccgggcgaactccttgggctagaagaggaggcacgggagcggttggcgaccgctcttcgcagg

SEQ ID NO: 344909 - DNA, 122 bp, Homo sapiens
gggcagcccgtaggtaccctgggggggcttggagaagggcgggggcgactggggctcatacgggacgctgttgaccagcgaatgcatagagttcagatagccaccggctccggggggcacgg

SEQ ID NO: 344910 - DNA, 122 bp, Homo sapiens
tgggatgcgggggtcggaataggaggaggaaggacgcagaccgacgctgcccgtagcgtgcgctcccgcacccttccgccaggtcggcagcaagcagaggctgcgccaccagcacgggggcg

SEQ ID NO: 344911 - DNA, 122 bp, Homo sapiens
cttggtttgggaggtgaaaggggtgaagagtagcccaagggagaggcctcggtgatttcccgacctctcctgtgaagcctgattcggaactcttccagctgcgaagaacttggccgattcta

SEQ ID NO: 344912 - DNA, 122 bp, Homo sapiens
tctattgtgaaaggactgtcacagctcatggggacgacgtccctaaaaagagccagtcagcggggagggagtccacaggagaaagaaaggaaagaacagatttcaaagaggtctttaaacta

SEQ ID NO: 344913 - DNA, 122 bp, Homo sapiens
ccctcccagatggggcccgcccaacccggtaatcacgtctcaactttccccccaagtgcccgcctccggggcccttcccgccggaagaaagcttctccgctcactaatcactcggcggcttc

SEQ ID NO: 344914 - DNA, 122 bp, Homo sapiens
agttacttgagctgctgttgctgctaaaagatgtttgaagaggaggaggaaaagccatctcgatatgacaaggatttgtcacttgctgcaaagaaggcacgggattttttttttttccctgt

SEQ ID NO: 344915 - DNA, 122 bp, Homo sapiens
ggaacctgtgagaaatgccgagtctcggacccatccagagcgcccgaatggaaacctaggcgttacgaggccccaggttcagcgtctcacgggtcctgcaccacctgggacgccccgcaagc

SEQ ID NO: 344916 - DNA, 122 bp, Homo sapiens
aaaaacacaaaaagccatggaaccccaaagctacagtagggttgtttgtttccagaaagacgcccagcagtgcaggggtctgtttgaaacaagaacctgagccagctgagcaactaggccac

SEQ ID NO: 344917 - DNA, 122 bp, Homo sapiens
agcgttcatcacgttctcaaaccaaagaggtttaaaaaaattaccataggacctgctgcccgatgaaatagcgtttcttttcagtctttattcttgatgtagagtcaaaataacacttaagt

SEQ ID NO: 344918 - DNA, 122 bp, Homo sapiens
tccagctcctcgctgcaccttcctcacataatcttggcgaacgttcacatttccagtcagcgtggctcattttatttcccagatgtttttacactccgaggccaaaactaacacgaaatcgc

SEQ ID NO: 344919 - DNA, 122 bp, Homo sapiens
ttctaagctctttcttaggaagcggagagaggggcagaaaacgtgcacctcgccacccaccggacaagccgagaggaccttgtctttgcttgaaaagttttctagataaatcgctcgggtgg

SEQ ID NO: 344920 - DNA, 122 bp, Homo sapiens
aaggcagagggagggagcgcggggccggagcgccgcctgggagtgtgcccactgggtggccgcctgagggacccgggaacagagggcaaaaagtcctgtgaccggacagagcagagcgggga

SEQ ID NO: 344921 - DNA, 122 bp, Homo sapiens
tggaattatgggctgtacatcatttaattttatgtgctgactgctacatagccaaaggaacgtgaattaagatggttccacttttgaccaggagatggagctgtcatgtaagatgctgcctt

SEQ ID NO: 344922 - DNA, 122 bp, Homo sapiens
cctcattgcaccacaggatggggcagtcagagcagggcttcttacactttaacatgcatacgatcacctggttagcatgtggattctgatccagtaggtctgggatgaggcctgagattctg

SEQ ID NO: 344923 - DNA, 122 bp, Homo sapiens
gaactttgtttctcggccccctacctctggcaccctccgctctcactgggactcgccggccggccctacagggggaaggcggtcttgatttcttaatctcatgcttcagtctcctcacctgc

SEQ ID NO: 344924 - DNA, 122 bp, Homo sapiens
actattatgaataatgctgctaggaaagaacatttatatacaagtttttgtgtagtcactcgttttaatttctcttgggtatgggagtggccaatattctgaagaactgccaaatttcttcc

SEQ ID NO: 344925 - DNA, 122 bp, Homo sapiens
ccggggtgttttggcagcgagaacaagcgagctgcgcctgagaacggccttcaggcctggcgctaaataataagtcgttgttatgtgttatgtatttatgtggcatccaccacacgcctccg

SEQ ID NO: 344926 - DNA, 122 bp, Homo sapiens
cgaacctcctgcacctctccttgtttgcaactggcgggtcagactgagttctctccattacgaaacattttctcttatatttttaaagcacttgttagttgtcttagttctttataccaaca

SEQ ID NO: 344927 - DNA, 122 bp, Homo sapiens
agctaatgggcatcattccacagattctcattgttttcttccttgtcaaagagttcccatcggtatgcggaatatcacgtgcacttactacagaagaggcttcccgccctggggaaagagac

SEQ ID NO: 344928 - DNA, 122 bp, Homo sapiens
gccggagtctctgccagcactgcgcctgccgctcttccctcagccccatcggcaggaagtcggctctttaaagagttttaaatcagcagtaaatcacagtttctaaagctgtagcactgatt

SEQ ID NO: 344929 - DNA, 122 bp, Homo sapiens
tccggaaggactggaggggaggctccgaccttctccctgtctgggcaggtgtgctggtgccgggcaggaacggtgccttgggacagcctggccccggcctcacaacgggccccgggcgctca

SEQ ID NO: 344930 - DNA, 122 bp, Homo sapiens
aaccagaaggggtaacaccgtaccgcctatgggacccacacctttttatctcttgttagtcgcctgtccgtgggactagcgcagaatgcctgcagaatgaatcgtttctgttgtttcctttc

SEQ ID NO: 344931 - DNA, 122 bp, Homo sapiens
caggtccaaacctgggaagctccagatctgggacaagctccagatcaggcccaggctagccgtgtgacgttggagcagctgcttaactctgagcctgcccctcctgctgcacaagtccctgc

SEQ ID NO: 344932 - DNA, 122 bp, Homo sapiens
agaccctatcaaaaaaaaaattcgtagaagtctaagccctttttttctagtaacccaaaccgcgtgagttcctaagttctttttgttatttctcttctcttgaaacttaaactcttgcctga

SEQ ID NO: 344933 - DNA, 122 bp, Homo sapiens
agccatcactaggacatagcctcaccttcgggctggtactaggtttcctctgtgcagctccggagagcagccccagtgtcaaaagcatgaaattgatagaaattgatttcaatttttttgga

SEQ ID NO: 344934 - DNA, 122 bp, Homo sapiens
tcacacttaagaaatgtactgccttaaatgttgtatcttcattagagtgcatgatctttccgtgtttattttgttaaatattgttaactttcatacttttcacagaagtcttccaattactc

SEQ ID NO: 344935 - DNA, 122 bp, Homo sapiens
atccttctttaaccctcgcctaccaagccctggaagacagggacgcaagaagagctctagcgcggagggtctgcctgagtgctggtctttcccatacaagatgtagcagcagggatgggagg

SEQ ID NO: 344936 - DNA, 122 bp, Homo sapiens
gggaggggcggagccgtgtgcaggaatgagaggggcgggagagcccgatttcactgcttgcgcccttggatgctgcttgagcccggttgtgggttctcattctgttaggcagattgggcttg

SEQ ID NO: 344937 - DNA, 122 bp, Homo sapiens
tgctcagagcttgtagcggcgccacaatctctgtcctctcaggaacaggaactggcttgacgtccttttcctgccctatccaagcccctgttcttgcagcccttctgaagctcagcctggca

SEQ ID NO: 344938 - DNA, 122 bp, Homo sapiens
ccagtgaacatcatggagctctatcttggtgccaaggaatccaagagcttcaccttctaccggcgggacatggggctcacctccagcttcgagtcggctgcctacccgggctggttcctgtg

SEQ ID NO: 344939 - DNA, 122 bp, Homo sapiens
tcttcaaggacattgtggtgcccagcctgaacgtggccaagctgctcaagtagcctccgccggcctgccctgctcgcccctccacagcctcggtccctgcctttagaaacgcgggacagctg

SEQ ID NO: 344940 - DNA, 122 bp, Homo sapiens
acatagtgtggtactttgtcttgaggagatgtcctggactcacacggaaacttagggctacggaatgaaggtaaatttaaaataaaacaagcgggagtcacagatacactgtctgggaaagt

SEQ ID NO: 344941 - DNA, 122 bp, Homo sapiens
gtcttggtaacatttctagcctttattattatggtcttccctcttccggagatgttttgacggtgaaggaaaaacgttcttcctatagattagattcttccacttggttaaaaagctgcctc

SEQ ID NO: 344942 - DNA, 122 bp, Homo sapiens
cgtgttgccacgctgggaactggcgttctgtttacatatcttagagaacgatcagaaggacgtgctgtgtttgcagaagcccaaacttggaggtctctgtagtagtttcatcgccgagaatc

SEQ ID NO: 344943 - DNA, 122 bp, Homo sapiens
ctgccggcctggaagagcgaggttggggcgagaagccgccgggacccataactgggtcggcggtccgagccccgcctgccagcgcccgcggcctcaagggccgggtaggagcggcagggcgc

SEQ ID NO: 344944 - DNA, 122 bp, Homo sapiens
agcggaagctgtctagcggggatatggcggtggcagaagtgagggggctgaggggcggggcggactttagcaggaggatagaggggaatgtccttgtttcataaagctgaagtgtgcccaag

SEQ ID NO: 344945 - DNA, 122 bp, Homo sapiens
cagtagcaggcaccagccccaatcatcagtcctgccgccatccaacccacttcccgagcccggcccatgctcaagtctgtgccagccttggggcaggacaggagagggccttgctccacctg

SEQ ID NO: 344946 - DNA, 122 bp, Homo sapiens
aagccaacggcctttggcgggtgggattttgctgaagtcatttctttgtgactctgtgggcgaggcaagtatttgccaggtcactggggtcttgactttaaaaacgggcagtttttaaacta

SEQ ID NO: 344947 - DNA, 122 bp, Homo sapiens
gatttctattggcaaaaggcaaaaaaattacaataaatttagttgtaattttttacaactcgatcttgattgactttgtggttccattatcgggcaacactcagaacggggtctctgaggaa

SEQ ID NO: 344948 - DNA, 122 bp, Homo sapiens
cccattttccagtcctggtcaccagaggcgcagcgcacagcctttccggtggaaccagtgcgaaaacacccgaggaaatgaaaagaacaagaaagtgctaccttggcaaccacgggcgttta

SEQ ID NO: 344949 - DNA, 122 bp, Homo sapiens
agctgtaaagccagattcattttgcatccctaatgaaaccctctttggagggtgcctgtccgggcctgcctgatgcggagctccgctttctcctgcctcccgccgtctcttggatcagttcg

SEQ ID NO: 344950 - DNA, 122 bp, Homo sapiens
ctcctttatggccccgcccagcgggtatcccccgcccccgctggccgatcggcgatcgatcgcaatgtctgcgctctccgcgttcttccagcgctgtctttttagtaccacatgcgcaggca

SEQ ID NO: 344951 - DNA, 122 bp, Homo sapiens
gggagagggggttgtgactcagcagagcctggttcccggagagggcatgggcacagccaccggccaggctgccctaggctgcaagggtataagtgtgaattgcacagggaagcggcggcggt

SEQ ID NO: 344952 - DNA, 122 bp, Homo sapiens
acttcaggcctcggttcattccatgactcgatgcggctgcttcgctgtttattagctgcacgggcagactggatggatttacagagctacaggcctcaaggtcagatcacctctggcttctg

SEQ ID NO: 344953 - DNA, 122 bp, Homo sapiens
ccctccctgcagctggacagactcgggcgcccggcccaaagcccggcaggggcgtgtccgcgcgctcacctgctattggccaggtggggctgtcggctgccagcagtgcttatgctttaagt

SEQ ID NO: 344954 - DNA, 122 bp, Homo sapiens
aggaagtgcatgagttcaccagatgaaagaacttttgtagccaaggtgtgacattagacccgggacacaataaacagtgaatttaggtgcaggaagtgagactaggaggtggccagggacct

SEQ ID NO: 344955 - DNA, 122 bp, Homo sapiens
agagagaacaagaaatggcccgcccactcccggtgacagggagccggaaatgacgtagcacgttgacgcagcagcggcggcggtggcggcggaggggccgtgcggtgggtccgtactatctt

SEQ ID NO: 344956 - DNA, 122 bp, Homo sapiens
ccagtgtctgatccggagtgttgctcatttacatcatcctcaccgtctgaccctgaatcccgttcatcctgtactggggtagcaccaccatcatctgattaaaaacaaaacaaaaaccaact

SEQ ID NO: 344957 - DNA, 122 bp, Homo sapiens
ccctgtcgcttcattggctctggtgaccggcctcccgaaagtcggcttcctattggtcgtcgtggccgccgctctgcgcttttaccggggcacgcggcgagcgtgaccacgccccttacgtc

SEQ ID NO: 344958 - DNA, 122 bp, Homo sapiens
aatttatcactgctcattactgaacctttttataggtttatttttcaggaaaaagacaggcgtgtcctaattgggttttccagaccttggttataactctgattgctgtgatggcattttgg

SEQ ID NO: 344959 - DNA, 122 bp, Homo sapiens
aactgcagataagagggggaactacggtagacgccacccacccgttagtcacttgggagccgtctgggttatcagatcaactgtctgcaagtattgcattgtttgtgttcaaatcaccctta

SEQ ID NO: 344960 - DNA, 122 bp, Homo sapiens
cggagggcgtgtggccagcggcaaccaagagggtgggaaagatgggaccgtcgctctcgccgccgcggccaccacagacactgccgccgccggctcctctcagccacggaagctgcgggccc

SEQ ID NO: 344961 - DNA, 122 bp, Homo sapiens
ctatctctacaaaagggtcaataataggtgttatccagcgaccgaaacccagctttgggccgcgtggataaatacctgtcctccctaccaagtgcactgtgagcctggaggtgctgctaacg

SEQ ID NO: 344962 - DNA, 122 bp, Homo sapiens
aatacagctcttgccgtccggctgccggttgcgtgaccttgggtggtcacctagccacgtcgcacttcttagaatgaaatttgtgctcctagtagaaggagccgatacttgttctttaccta

SEQ ID NO: 344963 - DNA, 122 bp, Homo sapiens
agagctgggtgattttctggggttcagtctgttgcgggtgccacagattggcactcccctcggaattgccacaccttcacggagccagaacaggagggatacggagggaaagggccctttcc

SEQ ID NO: 344964 - DNA, 122 bp, Homo sapiens
ttatccggcagcactgttatcagttactcccccgttttacagatgagaaaacagatcatccggccagtgagtggtgaaaatgggatttttgtttaacacgctgtcacctcggggagtcgagg

SEQ ID NO: 344965 - DNA, 122 bp, Homo sapiens
cggcgccgccgcacaatcgccccggaatgcccgccagggcgcgcgtggggtgcggccgtccggccctgcaactcgagctgctgcccctggttaaaaataccccctgcccggccctccccctc

SEQ ID NO: 344966 - DNA, 122 bp, Homo sapiens
gctgtgagtccacccttcactcataggagccacatccagaaccttctcctggggccacagcgtgggcttccgatacctgtgtgaccccagctctgccccttcagggctgcgtggtgaagccc

SEQ ID NO: 344967 - DNA, 122 bp, Homo sapiens
gggcccccaccatcaaaggtgcgagggaggcagcccccaccatcgcagctgcgagggaggcggccccaccatcacaggtgccagggaggccggcccccagcatggcaggtgcgaaggaggcg

SEQ ID NO: 344968 - DNA, 122 bp, Homo sapiens
tattgggcaggacaccaccctgggcgatggtcactttaccaagcagcttgttgagctcctcgtcgttgcggatggccagctgcaagtggcgcgggatgatgcgggtcttcttgttgtcgcgg

SEQ ID NO: 344969 - DNA, 122 bp, Homo sapiens
aagaagaagaagaaatacagtaagtgtgatatgggtacaaagaaacgaacatgcagcttccgtgtgcctagacaggagccctgggacatgtgcactgggcctgcgtcatcgcctgccttcag

SEQ ID NO: 344970 - DNA, 122 bp, Homo sapiens
gtagactctttgtggctggggagggggttagcgtccgctcatgcgtggcctcacactccgcgtgcctcctgctccgaccccgaggagaaactcccgtctgctccgacgactggcccgggccc

SEQ ID NO: 344971 - DNA, 122 bp, Homo sapiens
gtagaggaggggatggacaccaaaaaggggatggagataaagccaaagagatgaagttggcgattggaagtggaagatgtcaaagaaagtaggtggctaaggatgaggtcagttaggggagg

SEQ ID NO: 344972 - DNA, 122 bp, Homo sapiens
actatctgaggcttagtggcttcctgcgcatgtaaccttgatgaccttacttttcctccccgtgcctcaattttttcacgtgtaaaacaaaagtgaaacaggaatcactagtagcacctctc

SEQ ID NO: 344973 - DNA, 122 bp, Homo sapiens
ctgtagaggcatcccaaatccactaacaaccgttttgttcttgtggaagaacatacaggacgctttactttctattcctttcctgggttctcagctcatgggtcccaaggagggcccctgtg

SEQ ID NO: 344974 - DNA, 122 bp, Homo sapiens
agccagtgggcaaaggcagtacaggcaggcaagcagtcatatattaaacagttaaacaaccgtgttgaagcatttgaatgcgaggactttaatctatggtggcagatatcatgaaaattatg

SEQ ID NO: 344975 - DNA, 122 bp, Homo sapiens
tcggtgccacagcctaggcttagcgaaaccacgaggataaaaataggcccttctgttctccgcaccgtgagctttgtgactgatccgaggcggcgagcgggggcactgcactgctgtggcgg

SEQ ID NO: 344976 - DNA, 122 bp, Homo sapiens
cgctgccgcctcctggtgctggggcgacgcggagaagccgccggggagcgtggccatgagcgtagaggtgagcgccatgccctgcgccaggctggagcagaagcctgtgggcaggctgggga

SEQ ID NO: 344977 - DNA, 122 bp, Homo sapiens
tgcgtgtccacctatctgactcgtaagaaccgaggctgaatccagacccacactctgtcacgtcgggagagcctgccgcggcgagcctctgcgagcgggcatttcttgggtggggaccaaaa

SEQ ID NO: 344978 - DNA, 122 bp, Homo sapiens
acagtgtcaggccaacgtcccatcaagcatgtaccagccaattatgtttgctttcatagacgttatctggccttaccattcctctctgacccaggtcccttagttcccatggtgactctgta

SEQ ID NO: 344979 - DNA, 122 bp, Homo sapiens
cacacagagccaaacgcagctcttcgagagggctgatgggaccaataaacgcgtggccgacgggcagaaagcaggagccttacacacggaagggagccctcgtgcagccaccgtggagatgg

SEQ ID NO: 344980 - DNA, 122 bp, Homo sapiens
gatggggcgggtggggctggggcacacgtcggtggccacatgctcctggatacaaatggtcgccttttccccgcaccgccggtgggggggtggtagaggcagcgcctccccgcccgggcacg

SEQ ID NO: 344981 - DNA, 122 bp, Homo sapiens
ccctccctagtgatcactcagtgcccctgagctcattcttttcagtaaattctctctctgcgtggtgagaaaacaggcctggagaggctctgcgacccgcttaggaccacagaactcggtac

SEQ ID NO: 344982 - DNA, 122 bp, Homo sapiens
tttttcatttcacagccctagaaacttaggccctataaaggttaagtgatttgcccacatcgatttcaaatagcaagggagaatatatgaggaacccatttccccaaacttaagtttccaag

SEQ ID NO: 344983 - DNA, 122 bp, Homo sapiens
cctgaaacctcccaggcagggaatcacctcttcacacacagtttgcatctctgcagttgacggcaggagcaaaaaatgtggccagccaggttggaagggtgacaactgatggaggcatggaa

SEQ ID NO: 344984 - DNA, 122 bp, Homo sapiens
cagggaccatagtacccagtaggtagtttttcaccctacgcccccttcccgccctccccacgctagtagtacgcttcggttactttgcacttctccgtagctgctttacatgtttgcgtttt

SEQ ID NO: 344985 - DNA, 122 bp, Homo sapiens
cggatgtccaaagaatattctaggtctctggaaaaaggataaactctggcatagcatatacgggaatttagggattgtagaaggcttcttttcatatgactgccaactcacttctgtgtttg

SEQ ID NO: 344986 - DNA, 122 bp, Homo sapiens
cctgcatcttctcagcttctgagggggcctcagggagctgccagtcgtggtggaaggcagcggggagccggcatcacatggtgagagagggagcgagagagaagggggaggtcccagacttt

SEQ ID NO: 344987 - DNA, 122 bp, Homo sapiens
ctccccggggcgctctcgtccgaggtctggggctggcaggttgtggcgagagctagagtgcgcgcgaggggggagggggaactcaaaagtgggtgggaggaaaaacatcaccgccctcacac

SEQ ID NO: 344988 - DNA, 122 bp, Homo sapiens
ttaacctaattatacatctgagttatctatcacagaagatgcacagaacggcctcagtatcgcaataccaccagtaagagaagtttaaaattattttcacagttcctcttgtccttggggtg

SEQ ID NO: 344989 - DNA, 122 bp, Homo sapiens
ctgttagggggtaaagatgcggaaggccacagcaccccttgagaaagtgacaccggggcacggggcgcatcttccgtgtcacgccctgcaacccagcaaggggccaccctctcctcctcccc

SEQ ID NO: 344990 - DNA, 122 bp, Homo sapiens
gagggcatcataacacactgacacagctacagttggagtgccatgccaggctgccagtggcgagactttgctcacagttggcagcagaggcacccaaggctgtgccacctaactgccaccca

SEQ ID NO: 344991 - DNA, 122 bp, Homo sapiens
gaaatcagtttcacagccgccgaatcctggcgataccaaaggatgggaattggtgtggctcgccaggcagccctagcaaaactggccgagccgagctaccgcgggtctggcaggcaggacac

SEQ ID NO: 344992 - DNA, 122 bp, Homo sapiens
agaaggttagctatgattttcccagtgttcttgccacccagggaaatggagagcacagatcgagtgtgattgagcttacacctctccaagaggcaacaacagcaagccatggaggcgttttt

SEQ ID NO: 344993 - DNA, 122 bp, Homo sapiens
gccgggtgtgccgcagtcaccacagggttctgagaacatttcacagaagtgcctgagacgcggagacatggctggtgttaaatggagctattcaatagcagtgacgcgctctcctcagccac

SEQ ID NO: 344994 - DNA, 122 bp, Homo sapiens
catataatttgtctcacgtctttcagtttatgtcagagctagattgtatcttgaaaataccgacattatctgatttgccattttttaagtcaatgcctctgaaaattactctttaatattag

SEQ ID NO: 344995 - DNA, 122 bp, Homo sapiens
ggtggcaggaggacccgtaggacagggaggtgcagagtgagggttagtgcacagttaccccggtatctggtcccatgggttcacagagtcacgtgactacagctccgacccctggctggaga

SEQ ID NO: 344996 - DNA, 122 bp, Homo sapiens
ggtcttaggggggcgggtccgtagtgaggcaggtcttagtggggcgggtccgtaatgaggcgggtcttaggcaggcccgtagtggggcgggtctgtagtggggcgggtctgtagtgaggcgg

SEQ ID NO: 344997 - DNA, 122 bp, Homo sapiens
caagtcctgcgccccgtccccgctctcatgaagccgtgacagagccggccgtctccaccccgctgtagccgcacagactgacaatctcggcacaaagaggagacagccaaggtccgggccag

SEQ ID NO: 344998 - DNA, 122 bp, Homo sapiens
tcctccgagcagcgcagcctggcaacacagagcgtgcggcagagcctgactcggaggaaccgcccggggtccccggcgccagacgtggcgtgggaaaccaggacggaatggacccggggctg

SEQ ID NO: 344999 - DNA, 122 bp, Homo sapiens
gggctgcctctatggggccagccgggagacttgcctgcagctgccttgggccctgagttccggctcctccgaaagcagcaggaggccctgggtctccttcacccgccaccaccccatctgca

SEQ ID NO: 345000 - DNA, 122 bp, Homo sapiens
agggcctctggctccaggtggcctggccgtcgacccgcagggaaagcactcagagtgtcacgagtcccctgggcttcctcctccgggagcagccacgggcaacacagccccgcccgtaggtg

SEQ ID NO: 345001 - DNA, 122 bp, Homo sapiens
gctggggcgcagtgacgggaaccaatgagctgccaactcgcgcgtctccggcgtgactgccgagattgacgtggaggacacgtcaaattgattcccgcacgctgcagcctcccggtcagacg

SEQ ID NO: 345002 - DNA, 122 bp, Homo sapiens
tccctctcagacctgtctttgaggacaaacagatttgtcagctgtcagggtgcagtgggacgtcagagactatgtggtccatcgccttcattgtgtaaatgaggacacagactggcttggtc

SEQ ID NO: 345003 - DNA, 122 bp, Homo sapiens
cccccgcccatgcactgcgggagcgggagcgggagcgggagcccgagccccgaggcgccgcggcctccgagcccctcaccctgctgctctggcagccccggaggccgcccggcccggatgct

SEQ ID NO: 345004 - DNA, 122 bp, Homo sapiens
cctgcaagtcacaaatacgaaggtatgagcattggccgaatcccaacagggaaacttcaccgggaaggtgaagacccctttccattaagataacaaacagaacctagaaggcccgtagcatg

SEQ ID NO: 345005 - DNA, 122 bp, Homo sapiens
gggaaaaaagagcctctcccaaggttaacagaagcgtgcggagcgtgagaagcagcacctcgcacgcagactcgcccgccggccgggtggcaccgctcagccgcccgcccgctagaaggcag

SEQ ID NO: 345006 - DNA, 122 bp, Homo sapiens
agatcttcagtctaacgctctcccaactgagctatttcggctgggcggcagagtcgctctcgccgggactccgtcccgcgctgcgccttccctgcgcaggcgcagtcgtttcgcgtcagcag

SEQ ID NO: 345007 - DNA, 122 bp, Homo sapiens
gacctggacagggtgtggtgtgagggagttgcttgctggttgaatagttttgaggactgccgggactagagacagtacacactttccttaagggaaaggtgaagaatgcataatgttgaagt

SEQ ID NO: 345008 - DNA, 122 bp, Homo sapiens
gagcggtcatcccacaggcacccagggctgtcaccaccaaggggtgccagcactttcctgcgggacacaggacctccccagtctggctgcagcttactttgaaactcctctgtcccctccag

SEQ ID NO: 345009 - DNA, 122 bp, Homo sapiens
cctgcgacatggtgcgtccggccgcggaccgcagcagcgagcaaagcgcccacatgcgcccgtctccaccaaaactgagaaagccgccggtcacctacgcccgcgtttcccgtgcaccacct

SEQ ID NO: 345010 - DNA, 122 bp, Homo sapiens
tgggggtctgagacttgctagttagcccagggctgtaggacttgaacgtccggtaggacccgctgctcacgatgctggaccacgtccctgtggacccagccttcccgcccacacattcacac

SEQ ID NO: 345011 - DNA, 122 bp, Homo sapiens
aaagggacggcctgctgttagaaggaccctggactccttaaaggggtggcctctttgagccggaggacttgagacacttttaaaggggaggtctgcgtttcggggcgagctttcggcccctt

SEQ ID NO: 345012 - DNA, 122 bp, Homo sapiens
gtcttcagttaatttagtgtgtcatttaatttcaaagacttgtaatcttactcatccagtcgattgtcaggtgacagatcacttggaactcagcattctgtgtgtcatcctgaaaactgtgt

SEQ ID NO: 345013 - DNA, 122 bp, Homo sapiens
gccatgagatacgccccgttctcatctgcaatcttccgtagccgggcatattccaggtttcgggagtagcagctggttcctgagacaggaaaggtgacacagctgcatcagagatgtccacc

SEQ ID NO: 345014 - DNA, 122 bp, Homo sapiens
tccccctgcggcgacaccactcagatctctactcgcactactttgggggtcttgcggaaacggtgctggtcgtcagatctatgtccaccttgctcaactatgactatgtgtgggatacggtc

SEQ ID NO: 345015 - DNA, 122 bp, Homo sapiens
cccccatcatgttgtttctaatatccaagtggggagaggatgatattactcccaatatcgcgggaggtgtacaccctttctgtgatattttatgtaatatccaaagaaggaaaggttgcttt

SEQ ID NO: 345016 - DNA, 122 bp, Homo sapiens
gaacagttttctttaggctttgggttgctccttttcctttttgctttcacaaccgaaatgcgtgctcagagtgatccaagatatttgaagaacagtggcagcttggaggtgtttaatcaccg

SEQ ID NO: 345017 - DNA, 122 bp, Homo sapiens
ggactgaaaagacggggggtgaacggctgtgtgggccggaggtgtctggaaagcagtctgcgagttaacaaggcggtttaataccagattctctcagggtccgccccttcccccccacctcc

SEQ ID NO: 345018 - DNA, 122 bp, Homo sapiens
ggtcttcttcgggtggtgcttaaaagccctccaggggcttaccctccaaggccggttacccggatctggacaccctgggctctgtggccagaaaatccaggtcttgatttcgcttgggccat

SEQ ID NO: 345019 - DNA, 122 bp, Homo sapiens
tactttgagagaatttcaatattctcttaatgttgtgtaattgattaggtaactaaaaagcgcaaattgttggcaggttttgctgcacattgttctatgtctttgttggctggtgtatttta

SEQ ID NO: 345020 - DNA, 122 bp, Homo sapiens
ccctgaccagaaaggaaaatgctggcagtgccctggactgacgacagccaggacatatcacgcttacctgggaagggcccatacacaaaggctcctggagaagcacagggcctgtcaccaag

SEQ ID NO: 345021 - DNA, 122 bp, Homo sapiens
aatggatgctgtccaggcctgagggttttttcccatcctgaattacacaagagaccagcacgcaaagatagacaaacattctcagggtcctatttcaatcacctgataccttcttgggtgca

SEQ ID NO: 345022 - DNA, 122 bp, Homo sapiens
tccttatttgtaaaataagaaatactttatttcccaaattttaaaggagtgttccttctccgacctgttgtgatggatttattctatagctatggaaatataccctgcttcactcttgtaca

SEQ ID NO: 345023 - DNA, 122 bp, Homo sapiens
ctgggcagtgtggggtgcagaatggggtgcctaggcctgagcgttgcctggagcctaggccgggggccgccctcgggcaggcgtgggtgagagccaagaccgcgtgggccgcggggtgctgg

SEQ ID NO: 345024 - DNA, 122 bp, Homo sapiens
aagtgccctacatcccaaggtcgcccaacagatccacacctggaagcaatctccgccaagcgcctatttacaggcacaggtgtgtgcctatcgggacagctgaggaacacacctaatttgat

SEQ ID NO: 345025 - DNA, 122 bp, Homo sapiens
gcggaggggcagtgcggacgcccgtgaatgagtgcaacccgggccgctgcctggaggaggcgcccccaaccccggggcagatggtggcagcaggtggctttgggatggagctggtgtcccag

SEQ ID NO: 345026 - DNA, 122 bp, Homo sapiens
agaatgggccagggctgggagacaaagacccagatggcgaggccgggacaggctggagtccggcttctccggtccaggatgcccgcttttgctttttcaaaagtctcatgccctgtgctttt

SEQ ID NO: 345027 - DNA, 122 bp, Homo sapiens
gccgagtcccaggaactgtggggtttgggacacaggctcttccggaagggcaaactgccacgtggagaagagagggaattgtctctccttggggtgacggtgggcccaggcacaggtggatg

SEQ ID NO: 345028 - DNA, 122 bp, Homo sapiens
ctcggacgtgcccttcggcgctgccaagacccgtcctggtacttgccgagccacggaccgcggcggctaccgcccggcctccctcgaccaccctccgcagcagcatcgcccgcggacgggat

SEQ ID NO: 345029 - DNA, 122 bp, Homo sapiens
cgtagtctgcgatagagacgtacacatctttgaggttattgtggatgaactgagacttctcgatgggcttggggcgcacaggggacacgggtatgctgttgcgctgggcgggcagtaggggt

SEQ ID NO: 345030 - DNA, 122 bp, Homo sapiens
ctgctgtgcctcagtccagtgcgcggtgggacggctgttctgctatgctgtagtgcaggacgcggtggggcagcagtaacccagagagcgccgtggcagggggtcctccagtgctggaatcc

SEQ ID NO: 345031 - DNA, 122 bp, Homo sapiens
tgccgttgctcactgagacaggccctcagctcataggggctgggcccgcaaatgccagttcgagcacagcaagcacccagcatccccgtccgtgactcagttgccccacagaaggctccggg

SEQ ID NO: 345032 - DNA, 122 bp, Homo sapiens
ggcgagatccgacctggggcttcggaaaatcctcttggctggagccaggagagtaagttgcgacctatcgaagttgtgttttccttcccgcgtcacccaggccccagcgcccttttctgtgg

SEQ ID NO: 345033 - DNA, 122 bp, Homo sapiens
gggtgccgaggtaggagggtgaggaacgggttcacaagcgcgagcccacaccctacagcacgtgggcagtgaccacacccggtgagcaccaccctccacgttctggaacatccagcgagggc

SEQ ID NO: 345034 - DNA, 122 bp, Homo sapiens
ggctttacacgtatcctttgagagtctgtacctgattcaaacacggagaaaccaggaccccgagcagtttgagtgtactggtaatggatgcagctttggccaactagctgagtgagaacaca

SEQ ID NO: 345035 - DNA, 122 bp, Homo sapiens
actgatgctccttaacaaatattcattcacaaatactttgcactaactgtatacaaaatccgacgttgtgaaagatagaaaaataaagaagatattaccttctctatgcccttaagcccaag

SEQ ID NO: 345036 - DNA, 122 bp, Homo sapiens
ctgccccgcccccgggccggctctccgaggagggggaactgctgtcgccgccgccgccgccgcctcagcttcccacagccgctgccgctgccgccgctctgcctggtccagccaccggccca

SEQ ID NO: 345037 - DNA, 122 bp, Homo sapiens
caggtgggtcaggcgtgcaagtacatgtgcacgtgtgctctccctgtggcacgtgtgtagcgcatatacatgtgcagatgtggaatatgtagagtgtatggcacgtgtgcagaatgtgcaca

SEQ ID NO: 345038 - DNA, 122 bp, Homo sapiens
gagggagaggagagataagagggacccaatcaggtgggacctccggggcccttgaaggcacgctgtcttttactctgagtcaactggggatccattgcaggatattgagcaaagaaagggta

SEQ ID NO: 345039 - DNA, 122 bp, Homo sapiens
acacgtgacatgacacgattcacacgactgacatgaccaacacatttgtgacactagacacgtgattgacaggattgaatcgcacaggtccaacatgtgactgacacgatacacatacgatt

SEQ ID NO: 345040 - DNA, 122 bp, Homo sapiens
tgaagccaagcaagaacctccagtcctctctgcggcagagaacagcagatgatagcggctcgccttcaactttgctctgaggacctctcgttagtatcccgcgattgtccttcctaacgcct

SEQ ID NO: 345041 - DNA, 122 bp, Homo sapiens
tgggctgtaatcatcttcagttcagtgtctcacacggtcctgttagacaggagatgcaggcgttcgagctgagggccgcgtcacggagcccatgctgccttcggtttctttttagtccgcaa

SEQ ID NO: 345042 - DNA, 122 bp, Homo sapiens
cttgcgtccacacccaggccagacaaaggcaagtctaagattagcctgctgcaggggggccgtctccaggctgggcccaaggaatggccgctgcggcgttcagaggccagggttggatcact

SEQ ID NO: 345043 - DNA, 122 bp, Homo sapiens
tcagttgtaacacacattggtgacttaacctctcagaacttatttctgataactttaaaacgtagtttgactgtaaatgttttagcgagatacccaataaaggtaaacaaatttatttcctt

SEQ ID NO: 345044 - DNA, 122 bp, Homo sapiens
agcatcgggagggcaggtccgggggctctgtgtccccactgggcccccagcactgcgcagcgcacacagtgggcgctcaccaagcgctcgctaagggcaacgcgtgaatccgtgtcccgcca

SEQ ID NO: 345045 - DNA, 122 bp, Homo sapiens
gtgcacgctggcgctctggccggtcagcaagcagctctaccgccgcctcaactgccgcctcgcctactcactctggagccgtgagtgtctgctgggccagtccctgccgcctggggctcccg

SEQ ID NO: 345046 - DNA, 122 bp, Homo sapiens
tgtgccgtataaacctttcttgcgcagccacactgcctggagtaggatgttctcagggcccgggttatttctcccgggttgccccaggagtgtgcagttcccagaaactcatggcaaagtcc

SEQ ID NO: 345047 - DNA, 122 bp, Homo sapiens
aatgcgtcccgcgcggcgatctgggatagctgcgcaggcgcagcttccggctctgtgtctcgggaattatttgacgccaccggttcagccccgtagaaagctctgattaggcgcaccgcgca

SEQ ID NO: 345048 - DNA, 122 bp, Homo sapiens
tggtgacctgcttttccttcctacttttcccccaacaagtagtataggaaggaggcagtgcgtgtatgccacatacattaaaagaccttgctcacagggtgacagttgcattccagtggtgt

SEQ ID NO: 345049 - DNA, 122 bp, Homo sapiens
agccaggagggaaacctagacccgggccaggggcgagccgatgaccgcatgcaaaggcggcgtgtggtaccggcactcggtggcttcagactcgctttcatcagacatcagccccctgcggt

SEQ ID NO: 345050 - DNA, 122 bp, Homo sapiens
ttggctgcggcggccgccgcggggtttctaggagagctggctccgggagggaaatgtcctcgaggtagtggcggccgcggcccaccaccaactgctcgccaccgaccccactactcgccacc

SEQ ID NO: 345051 - DNA, 122 bp, Homo sapiens
aacagtgtgcgtttggggtcagtgtgaccttgtctgtgtgggcacacaggtgagctgtggcgacggtggagggatgtgagtgactctgagtgtggaagctgagcccagggcagatggacaaa

SEQ ID NO: 345052 - DNA, 122 bp, Homo sapiens
gtctccgcctcacattatctgcccaagcacagtgctgttggccaagcctccagcagctgacgggacccagctgtagtgaggttgcagtgattgagtaggattggcctgcttcaaagcagagg

SEQ ID NO: 345053 - DNA, 122 bp, Homo sapiens
cctgcgcaggataacctctcccccaccacccgagtcccgtgctcgcgggcaggacttttccgaactggggctgtgtgcctagaaatacgtacatgggagcgctcagctcaaagccccagggt

SEQ ID NO: 345054 - DNA, 122 bp, Homo sapiens
ctggctgcccgctgccgctggaagtggtgccgcttgggggaacctgcgcacgggatgtgccgtaagcgtcagccggcatgtgcctccacccgctccacacacacacagaatgcctatgcccc

SEQ ID NO: 345055 - DNA, 122 bp, Homo sapiens
aattacctccctgtctccttctgctgatgcctctcaaccagtcagggctctcagctgaggcgaccagggtgctttgctagatgtagctcactcatgcactctccaaatacacactcagcact

SEQ ID NO: 345056 - DNA, 122 bp, Homo sapiens
gctggctgaggtgaaaacccagctaggaagctgctggagagcggggaatacgtatagctgcgcgccggctggcacttccgcttccggttgcgcacggcattaagtgtaggggccgagcccca

SEQ ID NO: 345057 - DNA, 122 bp, Homo sapiens
agcgtccttcgggcaggactagtgcggagccccgcggggagcaccccagcagggaagtcccgatcttcccacgtgctgggaagcctcccatgtgctggctcagtctcgccatcccactcacc

SEQ ID NO: 345058 - DNA, 122 bp, Homo sapiens
aacaactcggataaaacaaatgtaagttttaggttttaagaccagaagggtcaatttctacggttgggactactgagtcaatttcaaaagtggcaaccactatctggtttcaggttcattta

SEQ ID NO: 345059 - DNA, 122 bp, Homo sapiens
agcgttcagaccggcagactggggatctgatccttgtgcagaacctggaggggcctcagacgctggaggtggacgtcgacatgtcggaatacctggaccgctccttccaggccaaccacgtg

SEQ ID NO: 345060 - DNA, 122 bp, Homo sapiens
atccaccgcctactgcggggtaggggccgcagtggggaccgccagccctgtggtccctctcgcgctgactggcgtaaagttgtggccgaattcgcatctcttctggtgcttctcgcccgcca

SEQ ID NO: 345061 - DNA, 122 bp, Homo sapiens
gcctgagcttgttttcttataagaccgctttacttacgtcctttgtgccctataattacccgattccaaagttgaaaaagtagtttcccagcttttttggtctttgtatacatgctgtcaca

SEQ ID NO: 345062 - DNA, 122 bp, Homo sapiens
aagctcctatagctccagttaggaccttagagctatccttgaattctctatcttctcttacgtcagatcaatacaaagtcctcctcatccattcttaatatgtcttggatctgtctagacag

SEQ ID NO: 345063 - DNA, 122 bp, Homo sapiens
agggactctggcccaacgctcaccggctgttccacatcgatcacgtacttggggccctcccgcttcaccttgtaatgccggaccacgtgcgtcctgcaccaggagaaagcgagtgagtggct

SEQ ID NO: 345064 - DNA, 122 bp, Homo sapiens
gatgaggccccagaactgaaaaaaggacagtcaatggccaggaaccgaatgagttaaaaccgggccctatagccttcatccctggtgactctggctggcctcgttagcgcccgcgcagcacg

SEQ ID NO: 345065 - DNA, 122 bp, Homo sapiens
ccggctgggcagtgggggaggtggcctctcacaacccatgctgcagtgaatcacatggcccggcgcccgcctagtcagggcctgagtaattcctccgcctcttcttcagaaggtttttctct

SEQ ID NO: 345066 - DNA, 122 bp, Homo sapiens
aagaaaggctgggaggaggtggggctggaaacaccagagggcccagatgtccgttggcgacggtcttctgcaaacgacagagcgcaagccttgcccctggaattctagagccgccgcaaaga

SEQ ID NO: 345067 - DNA, 122 bp, Homo sapiens
atgtgaggagcacctctgcccggccgcgaccccgtctgggaggtgaggagcgtctctgcccggccgccccatctgagaagtgaggagaccctacgcccggcagccgccccatctgagaagtg

SEQ ID NO: 345068 - DNA, 122 bp, Homo sapiens
gtaacggctccattgtctggggtatataccctggttctttgtcatggccgagaaaattcacgacacagacacacgtgaggagtgggtttgggagtggaaagtttaatagaaaagaaaagaga

SEQ ID NO: 345069 - DNA, 122 bp, Homo sapiens
cactgtcagattgcagaattctcaattatctagaaacccatcacccaacacatgcttcctcgtccccatactataaaagaggctgactcctcggcagaagtgagtgggggagagagaggaga

SEQ ID NO: 345070 - DNA, 122 bp, Homo sapiens
ggcggcagaccaggtttaaagcatcgcatgttgcaatccggtgcgtgctgccccggcggccgccgctgaaccttgcagccagggtggctttctccagcagagagaacagaccctgctggatg

SEQ ID NO: 345071 - DNA, 122 bp, Homo sapiens
aaatgtaagtaaagtgctcctctgagttctgtgagctgctgcagcaaatttaattgaacccgagaagggtatcatgggaaccctgattcatagctggttggtcagaagcacaggtcacaacc

SEQ ID NO: 345072 - DNA, 122 bp, Homo sapiens
gctcagctgcctagctgctggactgcccccgcacagatcagggaagttcccagagcagcacgtgagacctgttttatgggatgttaccacacacagcttaagacacgttgatccagttcact

SEQ ID NO: 345073 - DNA, 122 bp, Homo sapiens
acgaaggccgaagttttggcttgatcagttgggaggccttggctcggcctgcgcgcaacacgtgtgggtgtagaagaggcctggtatcagtctgcttaacgttatttataaatgatcggaga

SEQ ID NO: 345074 - DNA, 122 bp, Homo sapiens
accgcggctgggacttccagaacgggagggttccaggatgggtggctatccctgggtgggcggagctcccacaatgaggagactccacaatgggcaaggttccttgggtgggtgtggtttcc

SEQ ID NO: 345075 - DNA, 122 bp, Homo sapiens
ctcgctgccgcattgcgattggtccgcacggcgagaggatttgcgcatgcactagctggccgcaagctcgcaaagacgctggctctaggtagccggttttcgcgagtttgtggcacagtgtt

SEQ ID NO: 345076 - DNA, 122 bp, Homo sapiens
cttttttcccccgtgttgtccattctattaataacctgcttcactttcacttttaggccacgttaattaatgttctgacccagtgtcggagaagggggttttctagtgccctcttctatatc

SEQ ID NO: 345077 - DNA, 122 bp, Homo sapiens
cggggaattagttgtgtaatggagacaaccaagcagtgtaaagtggtaagtgtttgggggcgattaagtctccttgtcactgtaactatcaggaagacccctcaaagaaggtaactttctag

SEQ ID NO: 345078 - DNA, 122 bp, Homo sapiens
aaaatgaagggacttaaaaattgctttgcaaaggagagaaaggggaagttcacagcagctcgcatgtacaaggcctgagagtctgagcaggctctaagttcagtgtgatctcacagttcagg

SEQ ID NO: 345079 - DNA, 122 bp, Homo sapiens
ccaaatttaagtgtaattctttatagaatatacctacacacacacgcacatacacatgcgcgtgcacgcacaaacatcccacccatgaatcagagatggcgtcagtactacctgagctacac

SEQ ID NO: 345080 - DNA, 122 bp, Homo sapiens
gggttttttcctttgtcctctctttcttggattgagtcctcacagcgcggcggactgcggcgtggtaggaactacaccacccagaatactgtgcgccgagcgtgccggggccttagaccaat

SEQ ID NO: 345081 - DNA, 122 bp, Homo sapiens
aacatagcaaaaccctgtctctatgaaaaatacaaaaatttggccaggcgtggtggctcacgcttataatcccagtactttgggaggccgaggcggggggatcacaaggtcaggagatcaag

SEQ ID NO: 345082 - DNA, 122 bp, Homo sapiens
tagcccaaggtcacactgcagtaactagcagtgcaattggctcactcaaatctcagcctacgtggatgacaaatttatactcttgccctactattaggttcatgcaaaactgattgtggttt

SEQ ID NO: 345083 - DNA, 122 bp, Homo sapiens
ttaaatcagaataagccaaacaccattatttaatactgtaatgaaatatactagtgccctcgatgattatggttacaaaggtggctttgagcattcgcccattctaggagatctcaaactgc

SEQ ID NO: 345084 - DNA, 122 bp, Homo sapiens
tacactccctcaacccagccccaagcccaggtcaggcttctccgtggccaaagaggtgcccggctgagccctgccgcctgctggtgtctcagctgcactgttcaagttcccctcccagcctg

SEQ ID NO: 345085 - DNA, 122 bp, Homo sapiens
gtctgctactgcctactgaggaatggcctctcgacatccttatgtcaaaccctgcactttcgggcccatctttaaaatccatcctaggccaggtgcggtggctcatgcctgtaatcccagca

SEQ ID NO: 345086 - DNA, 122 bp, Homo sapiens
ttttttttttttttaggtaaaatcacagtttatccctgcaccttcatagattatgttgctcgtcttagagaccaccaggcagcgaatggagtcaagcccttgcgctctccgagagtcctgcc

SEQ ID NO: 345087 - DNA, 122 bp, Homo sapiens
ttttaaaaagccttgcctctgtgctctctttttacttatctctttctttgaaatggatcacgtctagaatttgtgggtttcagggaaatctgccatcccaagggtccttctccaatgaaatt

SEQ ID NO: 345088 - DNA, 122 bp, Homo sapiens
tcctttcctcatcacaggggcagaggtctaaaggacagagctagctgcaatccaggcctgcgtggtaagaaagccagcccctggaacactgaatggctcacatccatgttcaccacagaaac

SEQ ID NO: 345089 - DNA, 122 bp, Homo sapiens
ggaccctgcaggaaggagcaaaccaagctgccagcctggcaggcttttccccaaagctcccggattttgctggagcctctcccaaggcaaaggcttcggcaggtgttcactggaaatctaca

SEQ ID NO: 345090 - DNA, 122 bp, Homo sapiens
tttttaaagtgataaaaactgtacaaatatttctggtgtgaaacacagtgttttgatgctcgcggactcttggattcgaggctgcggtagtacggacaaacaccgtgcagcggcatctcatc

SEQ ID NO: 345091 - DNA, 122 bp, Homo sapiens
gaggtaaggggctcacaggaacgcaaaagaaattcaggctgtaaatccagttggacgccccgctgccccatcccctccatccgggaccgcccgactcctctcccacctccttccccaggcct

SEQ ID NO: 345092 - DNA, 122 bp, Homo sapiens
aaaaagacaggaaaaacataaaatggtttctttgtcctacggctcgcattgaacccggcccgacgccctgggtggtgatatcttctctgaaaccgggcccgcaaacccggagcaccccccct

SEQ ID NO: 345093 - DNA, 122 bp, Homo sapiens
agcccacctgtttataccagaaatttggtagtgactagtttttaatatcatgtctctgaacgtttttttagaacttctctgcgtaaatatgccatttgagggattaacgttttctttttaag

SEQ ID NO: 345094 - DNA, 122 bp, Homo sapiens
agttaggagttagaggttctgaggttctgaggactcacccccggatgtcttttgatctgccggtagaagcgggccccaagactggctcctgccatatcgttgttttcccagtctggtcctct

SEQ ID NO: 345095 - DNA, 122 bp, Homo sapiens
tgaagtgagggcggcgatgagagcgaaagttgcgctcggctcgtcgctgggggcttgaagcggctccgcgctctgcccgtttgggcctcccccgactcggactcgcgcccgtgggctcccgc

SEQ ID NO: 345096 - DNA, 122 bp, Homo sapiens
tccttcttttgtaccttttacttgcattttttgaactctgcccctgaaactagctcaactcgtttcttagccagcttctcctgtcaagcttccaggctcctgccctcctttgaggctgagaa

SEQ ID NO: 345097 - DNA, 122 bp, Homo sapiens
ctggctcctgcgaggccgcaggtcctcacctgaaagcttgaagactcgtgaaaggctgttcgcggggctgagacccagactcgctccggaccaggttagcgttcccgcgcagagccctgcag

SEQ ID NO: 345098 - DNA, 122 bp, Homo sapiens
tcgggcgtggtaatgccgggacctgctgcttgctctgcttggcctgcacagtgtctggcccggagagcacaggtgagcaaggtaggacggctgtcacccacagacgagcagcggagaacttt

SEQ ID NO: 345099 - DNA, 122 bp, Homo sapiens
gacaacctgaaaaccaagtaaagattttccagcagagaaggagtgagaaactatgacaaacgctgcaggtagatctaatcagaagagaacttcatcattcggtttaatcatgtgagatcatt

SEQ ID NO: 345100 - DNA, 122 bp, Homo sapiens
ccctccccaccaaacttccgcaatcccgaggccctctaggttctggtcccgcctctgctccgggcacttccgatttcgtcatcagcacgcgcacccagtcaccagactcccttctctagcca

SEQ ID NO: 345101 - DNA, 122 bp, Homo sapiens
ccagaactcacagactccagggaacgcctcagaagtggacctcactgcatctgccacacccgggactgctgtctgggacctacctggactcgggggcctgctgacagccaggggccccggct

SEQ ID NO: 345102 - DNA, 122 bp, Homo sapiens
accagtgctcacacagaagctgggcctgagccctgtcccctcttcctccaggaattgcatcggacagagcttcgccatggccgagttgcgcgtggttgtggcactaacactgctacgtttcc

SEQ ID NO: 345103 - DNA, 122 bp, Homo sapiens
ttagatatggagaaaatagattaaaggcaaacttattttgctatttggccttggccctaacggtcagcctgtggttatctgttttctcctgtggtgtggtgaactgtgtgagtataagcacc

SEQ ID NO: 345104 - DNA, 122 bp, Homo sapiens
agagttaagtagactgtgtggcctgcaaagcctcaaatacttgctgttctgggccaggcgcggtggctcacacctgtaatcccagcactttgggaggccaaggtgggcggatcacccgaggt

SEQ ID NO: 345105 - DNA, 122 bp, Homo sapiens
ctgcaagaaggaatgaaagtgagtgtttgtgaaagcttactacattgtgccaggcgctctcgtcgtgctttacatgtcatttttttttccacaaataaatgatgtaggaactttcattatcc

SEQ ID NO: 345106 - DNA, 122 bp, Homo sapiens
ggaagtccgcgatctggccgccgatgggcacgatgatggtcatgaccaggtggggcagcgcggacaccaggcctacctgcgggaacaggtgtacagggacactagggttcggggccgccggc

SEQ ID NO: 345107 - DNA, 122 bp, Homo sapiens
cccgccttcttgttggccgcacccccgccccgcgcccgccccgcgcccggcccggcccggcgagaaagccttaattggtaaaattgcccaggagcccgggacgggtgcgtggggggcggggg

SEQ ID NO: 345108 - DNA, 122 bp, Homo sapiens
tggggtcaccttcgaagcaaagagtctgctggggaattaagcatgcaaatcacttctcaacgacgacacgccaagtgctcacagctcgtccccaggggaagcacaggcgcctaatttgtgtt

SEQ ID NO: 345109 - DNA, 122 bp, Homo sapiens
aagagtagtgtaccgggcgccccacaagtgtccctatcatgcgttgttgagtctaatttacgtatagggaaactgaagctaggatgaaggagaacagatcaagccaggactctaccgcttat

SEQ ID NO: 345110 - DNA, 122 bp, Homo sapiens
acacgtgtgtgctgcgggcaggtgccgttctaggggcttgtccaggcccgctgacccctccggctcactggagatgaccaggcagggctgccctcccctaagagacatgcctgcccccgtac

SEQ ID NO: 345111 - DNA, 122 bp, Homo sapiens
ggttaataaatagccaaatatgtcaaccattgaaatgaccaccaattttaagattaagcccgatttgcaacttttattgaaataaatgtcatctactaaaaacaaggttaatttataactgg

SEQ ID NO: 345112 - DNA, 122 bp, Homo sapiens
atcccggaagccgccctgtcctctcctgccccgtgcctgattggacggtttccagcccagcgtccctgattggataacttctaaggtcctgcccccgcaaaccctgaatgaaagatgtgatc

SEQ ID NO: 345113 - DNA, 122 bp, Homo sapiens
gagcattccaggatgagggagccccttgtaaagatcttgctgagtacctgaaactgaaaacgtggctggattaagggagcggcccaagataaggtctgaaaggtaggctggggctaggtcca

SEQ ID NO: 345114 - DNA, 122 bp, Homo sapiens
aacacatatattttggccctaaaaatagacagtgaaaaagagatgggattgcttctctttcgattgttggcagacctattgggtaacatttaatcattttgggctggacacggtggctcctg

SEQ ID NO: 345115 - DNA, 122 bp, Homo sapiens
gtcacctcttactcccagtactgtgacaggcggctggaagtgagccctgcccagctgccccgcattctctctccagtcctgtgagaaggtgtccccgctcagccagtaaccttcattggatg

SEQ ID NO: 345116 - DNA, 122 bp, Homo sapiens
actctgcccctggatggtgcggggtgctttctccacccccacactccctgctcagctcctcgtgctgccctgcatgcccaggcttgtgagccaagctgctttttggggcagggagtagcagc

SEQ ID NO: 345117 - DNA, 122 bp, Homo sapiens
ggaaggcggggaggtggccctggaggaggaagaggagggggaggcggaggagtgtccaggcgtgccacgagaacgcagagcgcagcaatggatataaatacaaatacagcagcaccagcctg

SEQ ID NO: 345118 - DNA, 122 bp, Homo sapiens
aagatctcgtaggtcttaatgatggagcagtggtttaacatggccagaatctcaatttcccggggaaggaatttctccaagaagtctgcgggggccttcttgcggtcgatgatcttgatcgc

SEQ ID NO: 345119 - DNA, 122 bp, Homo sapiens
cgacctgggtcggagccgcctcctcggcgcgcctcgctgcctccgcggccccagcgcgggcggccagaaacttctccagaagtcccgcccctgtgatccctccgggccgacgcccagcgagc

SEQ ID NO: 345120 - DNA, 122 bp, Homo sapiens
ttttaaagtcttcagactactgtattagtcatagcctctcagaaggagccacaggaacggcgggacaatggggattaaaggcctttcctttctcttccaggctgcccccaagtgtaactcca

SEQ ID NO: 345121 - DNA, 122 bp, Homo sapiens
gtggtttggttttagagatagtccctctccccaccgcaaagaatgttaggggaattctgacgataaaagcatcaaccatgttggccacctacgaacttgaacttagatatgtaaacttctcc

SEQ ID NO: 345122 - DNA, 122 bp, Homo sapiens
cggcaacggcacagatctcgcgagcttctcctacttctctagcgctgtggctcactgaagcgtactacgccggatgtcttaagatatcgcgagacctttacctctggtttcttacacatcct

SEQ ID NO: 345123 - DNA, 122 bp, Homo sapiens
taaggcctcccacagcccacggcgcgcttccaagtctactcctcagccgcaacgcaaacccgggctgtggctccgcacccacaggctcgccccggccccagcccctgccgccctccacctcc

SEQ ID NO: 345124 - DNA, 122 bp, Homo sapiens
caatgccaacccaagggagagaccctgtggccatttcatccccacccccaaattaggctccgcattgtgaccttgaaaggccagcttgtaagagagtgaagtgggaatttgatagcgcctag

SEQ ID NO: 345125 - DNA, 122 bp, Homo sapiens
tgcgcttgcagggtgcggggcctggtgggacgcccacgttgcccagacagaacccttgtgcggctgcgggcactccttgccctttccgcatttggtgatgactccttgtttcgtttcactga

SEQ ID NO: 345126 - DNA, 122 bp, Homo sapiens
tttaccccaaaagatatttctttgccctattttgaaatggctgcctcagggcccggagaccgatgaggccctgcaaatcagtcttttgtgggggaaatttccatttgttgccaggctttccc

SEQ ID NO: 345127 - DNA, 122 bp, Homo sapiens
tcggcaccaagccccctgcgcatccccggcgtggtccatgttgagggtgcggggggtcctcgtcccctgagtagatgctgattgtctgctctgaatggccactgaagcaaagcccagagagg

SEQ ID NO: 345128 - DNA, 122 bp, Homo sapiens
tctactttatttggtaaaactcagaaactaacaattcacatcctcccaccttcttctttccgaagaaggcagtttgcagagacaaaagggctgtggcgtggggatcatccaccatctccagg

SEQ ID NO: 345129 - DNA, 122 bp, Homo sapiens
ctcaggtggtcgcttcgggtaaagcgcttggagcagagcaggcaggtgaacttcttctcccgggtgtgagtgcgcacatgacgctccagctcatccgaacgagtgaacctcttgccgcagaa

SEQ ID NO: 345130 - DNA, 122 bp, Homo sapiens
tgtccccagatggacactctgcaattgcctggagatagcggcggattggacagtccaggtcgctgagtcaagctaaagcaccgttgttttgactcactctttgtgacgtaggtctttctcac

SEQ ID NO: 345131 - DNA, 122 bp, Homo sapiens
ctcggcacctccagcagctggcttcgccaacggcgttgaacaagggtcgcagctcaatgacgtcatatctccctacctacctccagggttccgcctcacgctctatgtcgcgcgcgcgcact

SEQ ID NO: 345132 - DNA, 122 bp, Homo sapiens
aggcgaggtccgtggctgcctgtggcccaggggtgacggtttggcccaaggccccacctccgccccgcccccggccccgcccctgttcttgtcctcccccacgggtctccataaagttcatt

SEQ ID NO: 345133 - DNA, 122 bp, Homo sapiens
gcaggggcagcaaggcgggcttgtggaagtgctgcaccagctccgcggacagcagcaccacgacacagcgggtgctgaggaaaaggcttaggtcctctgccgagaaggaggcctcggggccc

SEQ ID NO: 345134 - DNA, 122 bp, Homo sapiens
gttccgcccctggctacactcgataacagaaccacttactggcgattcacaggaggggaccgggcggcagggcggggcggggcctgcggggcgcggggccgcggcgcggagccggcgcagcg

SEQ ID NO: 345135 - DNA, 122 bp, Homo sapiens
accgactggccggggcggagggcagggcgcggctggcgcgcggcaggtggtcggagcagtcgggcgagggagagctgggcgctctccaggctgcgcctccgcagggggcgcccgtggcccgg

SEQ ID NO: 345136 - DNA, 122 bp, Homo sapiens
gacaaagaggcgggccgcgcacgctctcacgcttcggcagctcagatacctgttacctggcgttaattgcatttacagcgggagagagagcttgggctctcaccaggtaccaattgcacgtg

SEQ ID NO: 345137 - DNA, 122 bp, Homo sapiens
gggggtctgggagtacgagagaacccactggacctcgtctctcatgaatggggcttttctcgagcgcacacagagcccgattcacaggtctccgcgaggaaccagtttaaataaatacgggc

SEQ ID NO: 345138 - DNA, 122 bp, Homo sapiens
cggagcgaggcggggctctggccatataaacagagggacgcacgcccatgcggctgtagacgccatgatggatgtgtctggtgtgggtttcccaagcaaggttccttggaagaagatgtctg

SEQ ID NO: 345139 - DNA, 122 bp, Homo sapiens
ttccttcaattcctttgacctctggagactctgtccttaggaatgtgagatgagcactcacgatgttagcagcgagtagggcctcatggtagggactttgctaaagtactaattacagttgc

SEQ ID NO: 345140 - DNA, 122 bp, Homo sapiens
tgtccccgccgccagcgtttctgtctccggcttgggggactgcggggacgaggctgacctcggatgggtactgagccctcccagacccccggcacgcccggtctcggagggcacctctgggt

SEQ ID NO: 345141 - DNA, 122 bp, Homo sapiens
tgactgctccaaacccgttcggccctgtgcagaagtctgaagaacagaggtgccctctgacgcggccccaggcaaggactcactagagcccggccaagactggattaggggtcatctgacac

SEQ ID NO: 345142 - DNA, 122 bp, Homo sapiens
aggagaggttgtctattttagagagatagaaatgtcacaattacaatccaatgtgtgcagcgctataacagagataagtctgacgcctcgttatcacccacagtacctaacatcacacttgg

SEQ ID NO: 345143 - DNA, 122 bp, Homo sapiens
aggtgctcaattataatacatttttaatgaacgaatgaaataagttggacatgccctccacgtggtcccataccaacatattttagcacttatcttgtcatctctttactaacaacactccc

SEQ ID NO: 345144 - DNA, 122 bp, Homo sapiens
acacactagacaaaaataatgcaacacaagacaagaatgatttctgccttcacagggctccggtttagagggagagacagggacgtacacaagcaagagaatctgctgaataaggccatttc

SEQ ID NO: 345145 - DNA, 122 bp, Homo sapiens
cggaaagggaactccctgatcccttgcgattcccaagtgaggcaatgcctcaccctgcttcggctcatgcacggtgcgctcacccactgacctgcggccactgtctggcactccctagtgag

SEQ ID NO: 345146 - DNA, 122 bp, Homo sapiens
ctaaattgttattcaaggagtttgatttcagccctgcagaaacagccctgagcccagcatcgctgggacaaaggcagaaggggctatcttctgttcaagacctgctggctgacagttggaat

SEQ ID NO: 345147 - DNA, 122 bp, Homo sapiens
aaacagagtctgtgcctcattgtactccgccatggcttccacaaacttccgagacagcaccgaatgctaacaacacaggaaaactacattcgtatctgagggccatgccttctactgaaagt

SEQ ID NO: 345148 - DNA, 122 bp, Homo sapiens
agctagattctcccactcttaaactagtgccggacagacgaaggcctagcacatgggctacggagccctagtagattccagtccccacactgagccaggaggggtcgctgcccagggatacc

SEQ ID NO: 345149 - DNA, 122 bp, Homo sapiens
gtaaacatgatacaaaagtaaacacaaccaacagcatggggaccagcaattcagaaacaccgagcgggcgggctgcccagacctgggcttccccagcagggcccgcggagaccggccgtgag

SEQ ID NO: 345150 - DNA, 122 bp, Homo sapiens
ccccgatattgatggaaacccctgagtgcacgcccgtgctgggcgcaggggaaacagcgacgcacgggacaaaacaagcttgcagaacagcagggggcagagaggctgtaaacaagccaacg

SEQ ID NO: 345151 - DNA, 122 bp, Homo sapiens
tacacggcagcctggtaacaaaggagcaataaaagcagcccccaaatggagggctaaggacgcgtctgggagaaaatctgaaagcgagctagcagtcaccccaatttaaaataggaggggga

SEQ ID NO: 345152 - DNA, 122 bp, Homo sapiens
cttgggggctcctccgggcggatactgactctagcttctttgcccctcctcagctcagagcgcaacacaggcacttcctcggcccgccccccgcctcgccgagctatttgtcgctggtaatt

SEQ ID NO: 345153 - DNA, 122 bp, Homo sapiens
cagcagctctgccttcctcaggcataagccttctcagggcaggggaggcccagggagcggcgctcccatcccaggccgggctgctgagcaagcccctcccctttctcccctcatcctctgac

SEQ ID NO: 345154 - DNA, 122 bp, Homo sapiens
ggacggggggaggtgtgtcccggtaggtccctggtgagctcacccgtggcatcggggacccgcgggaacccaccgggcgcccactagagactcgggtcctaccctcccccacactactccac

SEQ ID NO: 345155 - DNA, 122 bp, Homo sapiens
gccgggcatcacctaccttcaggctgtcagccatgatgaccacgctggggtctgtcagagcgctgagcagctgccgtgtggcgcgcttcttctcctgccggtagttctccttctgcgcctgg

SEQ ID NO: 345156 - DNA, 122 bp, Homo sapiens
cttcccacttaaaggctggcctagtgcctcaatctcatacccctggtcgcttggttctggcggtcctactgcaagtaatatggccatggagtgagcactgagtggggaggtcaggaaaccca

SEQ ID NO: 345157 - DNA, 122 bp, Homo sapiens
tatttttagtagagatggggtttcactatgtttgtcaggcttttctcgaactcctcacctcgtgatccaccctcctcagcctcccaaagtgctgggattacaggtgtgagccactgcacccg

SEQ ID NO: 345158 - DNA, 122 bp, Homo sapiens
actttttaaagaaatcgagcatttccttccatcctggcggaatttggagcagcgacctaacgtgccgttctcttttgcaccactaggtggcccctggtgctctcagatgtcggccaggcttg

SEQ ID NO: 345159 - DNA, 122 bp, Homo sapiens
gctagttaggcccgggtggttcacacttcacatgcccagtgcccattaggatgcggggcccgcccacccatgcacaattgggaaaatctgaggatgaatggttgtcagagaccttcccagat

SEQ ID NO: 345160 - DNA, 122 bp, Homo sapiens
tgctcaggctcgggtttcctcatctgtgaaacgggaacggatgtggcttcttaaccattacgctgtgtccgtcacagtcattctcacttctcgagtacccagttggtgggagttccagtatg

SEQ ID NO: 345161 - DNA, 122 bp, Homo sapiens
aagcctgggtccccgggctgagccctggattgggtatcgtggggcaggtcaccctggccacgatgcccccggcacacccaggcccccttcattagtgccttgctttgggccctgcaggggga

SEQ ID NO: 345162 - DNA, 122 bp, Homo sapiens
ctggtacaaagtaaatgccagatcaatgttattaatgttaggtgtccgccacctatgccacgcagtgagttccttaggtatagggacagtctaatctccgaatccacactgcctagaacaaa

SEQ ID NO: 345163 - DNA, 122 bp, Homo sapiens
atttattaactttcaggcgggagctaaatgctctcttttgcttgaaaatgaagtaggctacggacttggaataattacaattttgtttttatggaattctgcagaactaaataattttgatg

SEQ ID NO: 345164 - DNA, 122 bp, Homo sapiens
atcggatgagggatgattaaagggcctgctccacctcgaccgttaccggggatagggtctcggggccaggcacggcgttcgaggcctcccacccagccgaccggccttggggacccttcccc

SEQ ID NO: 345165 - DNA, 122 bp, Homo sapiens
caacgtggccccaggggagccgcggcctggcaacgcgcgcatcctgtggtagttcaggagcgccacctgtcgtggagaaggagaaaagcagggcagggaagacattctacatttattctatt

SEQ ID NO: 345166 - DNA, 122 bp, Homo sapiens
gaagctaactcctgtgcttcagccgtcgcatgcccctgagtgcccctgagatcacaggcacgccgccggggaggtgtacagtgggtggtcagtcgctatcaacaaagaactcaaaccgtagc

SEQ ID NO: 345167 - DNA, 122 bp, Homo sapiens
tatgctttaagtgcggagcgggtggctgcggagccaggcgcggcgcaggatggtggacagcgtgtaccggacccgctccctgggggtggcggccgaagggctcccggaccagtacgcggacg

SEQ ID NO: 345168 - DNA, 122 bp, Homo sapiens
aatgtccaactccttggtgatcccaatttccagatcactgtcctagacacttgcccttctcgggttccctctacccctcagggactcaggcaaccaaccctctaagttcccctatcctcagg

SEQ ID NO: 345169 - DNA, 122 bp, Homo sapiens
tccttcagggctgagccatcccgcgtgtcttgcgctcggtggaaatgcccagccgagggacgcgaccagaggacagctctgtgctgatccccaccgacaattcgaccccacacaaggaggat

SEQ ID NO: 345170 - DNA, 122 bp, Homo sapiens
tgaatggtcctacagcactcagttccacaagactgtgaaggagaggtttgaatgtatacacggagccagcagctagtttatggaaagtattacagatgtgtttgagacaggcagctaataaa

SEQ ID NO: 345171 - DNA, 122 bp, Homo sapiens
tccggcaacgtgactgacagacattgtaaccaattacaaacttgaagtgaccttggctttcgctgtacgtcgctaccggagccagtaaaacagcatttcagacgctttttttttgcgacgga

SEQ ID NO: 345172 - DNA, 122 bp, Homo sapiens
gtgggtggagcaagaggggccgcagtattgggagtggaccacagggtacgccaaggccaacgcacagactgaccgagtggccctgaggaacctgctccgccgctacaaccagagcgaggctg

SEQ ID NO: 345173 - DNA, 122 bp, Homo sapiens
tgtactgtgcaaaaacatattgtcttatttcattttcccagcaaaatcatgaggaaagcacgaatattgtttcccattttgcagatgaagaaactgaggttagagaaaataagtacccatcc

SEQ ID NO: 345174 - DNA, 122 bp, Homo sapiens
gccccaagagagcgctgcccacagccccgggtgggttgggttcaactgcacggggcggggcgccaacagctcaggacttgggttgcaggctggttcttgcaccaaccagcggggcggcctcg

SEQ ID NO: 345175 - DNA, 122 bp, Homo sapiens
tctccggagccctggacccctgcagatgtgcctatcttcccctcctttccctcccagtgccgcatcttctcggagggtagaaactgggtgaaaggaaggagccagagacaacaggcgctcca

SEQ ID NO: 345176 - DNA, 122 bp, Homo sapiens
agctggattccggatcaattagaaccggcctctgctctccaggacctcagagaattgcagcgtagtgtaataagtacattactacgggggccacctaggagcagcacttagcatgatttgca

SEQ ID NO: 345177 - DNA, 122 bp, Homo sapiens
gagtcaaagggcaaagggtgagacctttccaccgatccagctggactctagcctcagggacgtcctgctcctgggggcaggtgtgtggccctggatgggcccccctgtggggctgttggagg

SEQ ID NO: 345178 - DNA, 122 bp, Homo sapiens
caggctggtttcggaaatgcccttacagcagcaggttagtgaccgggacggctcgggggccgccgacgccgcgggggcaccggattctgttgggggctgaagcggtgagggtaggcggttga

SEQ ID NO: 345179 - DNA, 122 bp, Homo sapiens
cttaaaattagactcatccatctcccccaactcaaaaatgaaacaaagatggagggagaacggaattgggaaggtaagtgtcagtttgagcagtaaacctcccaaaatcagctttatttctt

SEQ ID NO: 345180 - DNA, 122 bp, Homo sapiens
cgtgatccgcccgcctcggccttccaaagtgctgggattacagaagtaagccaccacgcccggccagaattttggatattttagctaaaatatattttagctgaagggggcaagacaaagaa

SEQ ID NO: 345181 - DNA, 122 bp, Homo sapiens
cagagtgacgccgagttgaggacgcgcctggaaatgttgcctgggttttgagccattgcacgaccccttcactttcttttccaggacctgcaaagaaccgaggtttcaaagcagtaggggcc

SEQ ID NO: 345182 - DNA, 122 bp, Homo sapiens
tacgcctgcgcagcggggctgagttggagaacgtcttagactacaagttccgggaatcagcgcggcgaggcctgagaagaagacgtttgcgcctgcgcgtcgcgggcggggcctctggggcg

SEQ ID NO: 345183 - DNA, 122 bp, Homo sapiens
ctcccagacggggtggcggtcgggcacagacactcctcagttcccagatggggtcacggccgggcagaggcgctcctcacatcccagatggggcggcagggcagaggcgctccccacatctc

SEQ ID NO: 345184 - DNA, 122 bp, Homo sapiens
tttatttcaagaactgcagtgtctcttaatcccacacaaagaaccaccccacagctgccccggctcataaatacagatgtgggaagaaaatgagtcaaaattatttcaaggcataaattata

SEQ ID NO: 345185 - DNA, 122 bp, Homo sapiens
ggttcatctcactagggagtgccagacagtgggcgcaggcccgtgtgtgtgcgcaccgtgcgcgagccgaagcagggcgaggcattgcctcacctgggaagcgcaaggggtcagggagttcc

SEQ ID NO: 345186 - DNA, 122 bp, Homo sapiens
gcttttcatctgtttcagaccaaaaccaataaacacattcacttatgtcttgagtgaggccggccccaagggctccgtgtggtcatggcgcacaaggacctttggagaaacctcatcgtgcc

SEQ ID NO: 345187 - DNA, 122 bp, Homo sapiens
atcaatgtttttgttccacttctacatccacttttatctaattctgttgtcttcttgacacgcatgccaaattgtcaattttatttgtcttaaatgtatttattaaagttacagattttctt

SEQ ID NO: 345188 - DNA, 122 bp, Homo sapiens
gagtcccaaaaacccacaggaggtgtgggtttggctgcccacagctgaggccaccagccacggcttcccttattttgtgtatctttataataaacccccatgaacatagcctcagtgtgccc

SEQ ID NO: 345189 - DNA, 122 bp, Homo sapiens
agggtcgagaaagttcctggggggcttcaggggctttccacagagggagcacggcgggggcggaggctccctgcagggagcagcgctgaggtagactggctctgaccttggctctctgaagg

SEQ ID NO: 345190 - DNA, 122 bp, Homo sapiens
tctccctcattgtaaagacagctcttccccctggcttacttttttagacatgctgagaagcgcatgtctccatcagggccctacctctgcttctccacagttggcctagaaccggaagcccc

SEQ ID NO: 345191 - DNA, 122 bp, Homo sapiens
tgctttcaccgcaacgcatcaaataaccattgaaacgatgatgaatgctggttgtgtagccgtgaggtgaatgattacaatgtacttgtgtacaaaaaaggaagtgccaagaactttatgaa

SEQ ID NO: 345192 - DNA, 122 bp, Homo sapiens
cctccgggccccgccaggactccgagagcacaggaagggacgtgtggctgccgagaggggcgcagtggggtggggcactgttctaaacagggaggccaggcagcactccactgtcagccagg

SEQ ID NO: 345193 - DNA, 122 bp, Homo sapiens
acccggacaccaggcatacgctaggggcagtcagctgtgccttctctttcggagttgttccgtgctcccacgtgcttccccttctccactggctgggatcccccgggctcggggcgcaggta

SEQ ID NO: 345194 - DNA, 122 bp, Homo sapiens
gatttatgactaagagtattggtaacagtgctcacctctgcacccaaggcttaccaacatcgtgtttttgtatatacaggctgaatacataacatgcaaccaggtggtaataaagaatgtta

SEQ ID NO: 345195 - DNA, 122 bp, Homo sapiens
ctgaaggaagactggggtggtggcttaaagagctgttcatgccggcttgttgatctgcggcgagtctggttgtgggatcagcatgagcaactcagtggactgtcaaaccctgcagagccggg

SEQ ID NO: 345196 - DNA, 122 bp, Homo sapiens
aaacccgaccgtctccggcggctccgcaggaacctgccctgctgcgcactgactcccctccgctccgccccaacccgactcccacgcacagcccgggtggcccccaaacgcagcgccggccg

SEQ ID NO: 345197 - DNA, 122 bp, Homo sapiens
tacaaacagcaatgtggcaatggacgaagaggacccagcatagaagagcacagctggccccggcgtttcatgaagtcagaaggcctggcagccatttcctggacgttgagaggattgtttat

SEQ ID NO: 345198 - DNA, 122 bp, Homo sapiens
gaaaacaaggttcctggtctcgggaagcttaccatgggggtgtctgtacgcgtgtgtgttcgtgcgctcagtggtggaagacaggacagaaaataaacggatcaacatccaaagcaacaagg

SEQ ID NO: 345199 - DNA, 122 bp, Homo sapiens
cgcgctgcgcggggctccagtttcgccaaccccggtgctatttaaaggtgtcaggtggctcggcagtggctcctggccccgggtcctggcggccgcagttggaagagccgaggcgagggcgc

SEQ ID NO: 345200 - DNA, 122 bp, Homo sapiens
gtcagaagatggaagatagtccatccgcatgccagcttactgtcccattcatttcagttgcgctgacaggcaataaagaatagcaggagaagctaacagatcatgtgcttactctgtgcttg

SEQ ID NO: 345201 - DNA, 122 bp, Homo sapiens
caatttattaaagagggctagtaatccctgctctaccaccttcaaagagtatttgtgaggcgaaatgaaacattttttttgtctccacctcctactttgatctggagatacaaaaatgaata

SEQ ID NO: 345202 - DNA, 122 bp, Homo sapiens
gaaggaaatattttgaagattaacctgaagaggatattcaactaagatgcattcctaccacggactgataactgtgtgacatcaaacagatatattattataggaatactaaggaaaaccca

SEQ ID NO: 345203 - DNA, 122 bp, Homo sapiens
tgcagaaggctgttctccgatgaacggttcagggatttgctgacgtgcgtcacactcggacgtgcccgccaagataaaggacaagcggtctcaccttgcgcctcttcccacgaggaaggaag

SEQ ID NO: 345204 - DNA, 122 bp, Homo sapiens
gacttctaaaaaatgtttttaaaacccagatcacaaatcctgaacatagggcctgaaaggcgaattcagccaccacggaggactcccgcaccgtggagccgggacgcagggactccatgctg

SEQ ID NO: 345205 - DNA, 122 bp, Homo sapiens
cgagcaaaatggtacctccttggcttcaattccagtatacaatatggagaaggaagtgggcgtttcaaggcgtgcttgccccaggtggtgcagctctcagaccctcccacttgtttacttcg

SEQ ID NO: 345206 - DNA, 122 bp, Homo sapiens
atctttagaaagaagatggttgtagaaactgctggggaaaagggtaagcttcctctttaccgccagaaggttcactgaaataaactgacaatagacaggttaaaaggagaaaaggcatccat

SEQ ID NO: 345207 - DNA, 122 bp, Homo sapiens
tgctcaggacattccgggacactctgagggcaggttatgtgccaggaggctgagtgagcccgccgggtcacagagagcctcagggccagccatcggcttctgcactgtgtttacagcaatgt

SEQ ID NO: 345208 - DNA, 122 bp, Homo sapiens
aaaccctcacctcatctattaaccaaaaactccagtgtgtttcatatgaagcctcccttccgaaagaaaataatcacaaacaacaacaacaacaacaacaacaacaacatatcttctaggac

SEQ ID NO: 345209 - DNA, 122 bp, Homo sapiens
acgccggctccgggacacacgtggaagccgggtcctgcagcaagaggaagtccaggatcgcggcgaggagacggcggggcccgggcgcctgggctgccgtcccggctctgggtgggtgggtg

SEQ ID NO: 345210 - DNA, 122 bp, Homo sapiens
ccctgctaattactgggaagtccctgaaagcagtggccacagctgtggtgtgtgcacacccggccatcagtcgctggagtattgattactgagcaattctagccgatcgggttcgggcgctt

SEQ ID NO: 345211 - DNA, 122 bp, Homo sapiens
agtaggctaagttttgagggccaattaagagttggccaggaggccgggcttggtggctcacgcctgtaatcccagcactttgggaggctgaggcgggtggatcacgaggtcaggagatcgag

SEQ ID NO: 345212 - DNA, 122 bp, Homo sapiens
ccgccatgcctgagcctccccgccccaccgtgggctcctatgcagcccgagcctccccgacgagcgccgccccctgctccacagcgcccagtcccatcgaccaccgaagggctgaggagtgc

SEQ ID NO: 345213 - DNA, 122 bp, Homo sapiens
agaggcatctggctgctaaaaataccctcctgaccaaatgttccctactccaactaaagccgaacaggattgttgcagttcagaacttagcacatacagatagcttctgcttgcaatggaac

SEQ ID NO: 345214 - DNA, 122 bp, Homo sapiens
atccgctctccctctggagtctttacagttatttcccagcccaaagcggggattgggtttcggcccccgctcctgggctataaataccaccccctacatgcacctctctcccctccccccaa

SEQ ID NO: 345215 - DNA, 122 bp, Homo sapiens
aggcggactgcccagagagacgtgggaggagccgcgaagtcaccagaccatctcccggcgcgggtggaattcccgcgatctgtctcattccctgcgccgccgagaaaagtgagatcccgcga

SEQ ID NO: 345216 - DNA, 122 bp, Homo sapiens
agatagtgataaaagctctgaagaaaaattatggaaaacacagggatagagagtgggaggcgctattttaaatagcgcgataaaagaaacctctcagaagctgtcattaacaggtaccagaa

SEQ ID NO: 345217 - DNA, 122 bp, Homo sapiens
ggccacacttcccctcgggcggcttcctgttttggccaaacaatgactcttgcagggacccggtgccagctggctgcagctgttgccaaggccttgacttcttgcatacagagaggtgagag

SEQ ID NO: 345218 - DNA, 122 bp, Homo sapiens
ctccctgtgcacaggcagggacagttgtccgagaggcgctgggctgtctctgccgagccccggccccagcacgcgctctcccggctggaactgttactacgcaggaggggaacatgcgtgtg

SEQ ID NO: 345219 - DNA, 122 bp, Homo sapiens
tctaataaagccgaagtgtgaattaaacttaaccgcaagaggagtcacctgcggtcacctcgtttcgcccacaacaaagatgtctgcgcatcgcttaccgtggagccgttccagtgcgtggg

SEQ ID NO: 345220 - DNA, 122 bp, Homo sapiens
aattacttcagatgctgataaagcattgggctcacatcccaactgaagttaactctgcagcgagacaatggggggttatgggaagctttgtggcacactaaaatgtgtatgaatgaccacta

SEQ ID NO: 345221 - DNA, 122 bp, Homo sapiens
gccactcggaccagagggcagaggcggcgccaagcccaacggcgcgctcacctgaccctgcgtgctcttagaaggacacgagggcatgagtgggaagaagccctaaggagaatctctgtgct

SEQ ID NO: 345222 - DNA, 122 bp, Homo sapiens
tcccaacccaacctggtatctaacaaatgcttctccttctagttcaaagcaaggctatgacgtcacagaatgaaccccaacctcaatgtctgcactaagggaagggtagagcagctttctct

SEQ ID NO: 345223 - DNA, 122 bp, Homo sapiens
cacggtggcgctgcggctctgccatagaaggctcctctcggtccaggagacaggcagggccggccacaggaccagcctccgacagcgatttcatccgcaccctgcggggcaacgtgggggcc

SEQ ID NO: 345224 - DNA, 122 bp, Homo sapiens
gcggcacggcctcacgtgcccgggagctcccgacgcagacggaaaaagaggagggagacccgcggatctcaagtcgcccggcccgccatcttcccgcatgcgcagtacaccgcccccctctg

SEQ ID NO: 345225 - DNA, 122 bp, Homo sapiens
tatttgattaaaaggtcttaacgtgggtaaaagcgggaatttctctgttgcgcatgtgcgcgctctccgcctgataggagttgtagttctgcgggtgaagctcggcgttactatcaagcaac

SEQ ID NO: 345226 - DNA, 122 bp, Homo sapiens
cagccagagcaccaagagccgctatgtccccaacgggaagctggcgtcctacacggtgcgcgacctgctgccgggacggcggtaccagctctctgtgatagcagtgcagagcacggagctcg

SEQ ID NO: 345227 - DNA, 122 bp, Homo sapiens
caggcgccgcgagaccccgcgtccccgctgccccgtcccccacgggggtcgtgtggtgagcgcccaactgcgatcgttcggcgactctgcctttcgccatggctgctgcaaggtgaagggag

SEQ ID NO: 345228 - DNA, 122 bp, Homo sapiens
ctgatcagcaaagcctggtttgacaccccttcccttgccttattcccagccctccaaatccgcaccagcaggaagagggctgtgaaggctggaaggactgcagaaagcacaagtttgccagt

SEQ ID NO: 345229 - DNA, 122 bp, Homo sapiens
acactcaccacagcatcctctctggcggttgtgatctcccgccctggtcatgacactaggcgaccccgctggctcttctgcggctgctatcgctgctgctgctctcgctgaggtgcttgtta

SEQ ID NO: 345230 - DNA, 122 bp, Homo sapiens
gcatctcagtctcaggccctgcaggcagcacgcagcccggctacggacacaccagctgcacggcggcctgggccagcgttcggagcccatcctcggagcccatccttagccccggccccgca

SEQ ID NO: 345231 - DNA, 122 bp, Homo sapiens
ctcagatggaaatgcagaaatcacccgtcttctgcgtcgctcacgctgggagctgtagaccggagctgttcctattcggccatcttgataaatgactatttcttaaaatttactttagagag

SEQ ID NO: 345232 - DNA, 122 bp, Homo sapiens
tcgagcgtctagtgtaaccgtcaggtttattattcccaataataattgaccacagacagccgccgttcgcgtccacctggcgcttctcagcaggagctggacctgtttctccgtcgggccgg

SEQ ID NO: 345233 - DNA, 122 bp, Homo sapiens
ttgagtgcagctgagcggcctggttgctaggcaacagcaaagccagagtgtgggaatgagcgcagcctggccctggggcggcctggtcactctggccctgctgggggcctgggactgcccca

SEQ ID NO: 345234 - DNA, 122 bp, Homo sapiens
cagccccacaccgctcattcttactctccagttctggggacagattttacagcccgttcgcgtcttcccaagcctcgctcagatctgggcacgtggcacaggaaaaagcgccgctgagcgga

SEQ ID NO: 345235 - DNA, 122 bp, Homo sapiens
ccctaccgcacctggctgccaacaccagttgaaagcagtcaaagtgaagggaggcggacgcggctcctggcaccgctccgattccagcacacaaaggcggatttttaaaatcgagaaagtca

SEQ ID NO: 345236 - DNA, 122 bp, Homo sapiens
gggcctgatcggggcggggtcttcgggggcggagtcggctggggatggagccgctcgggccgagccctccaccgcccaccatcaccgagtccggcccaggctcctagcgcggccgccggaag

SEQ ID NO: 345237 - DNA, 122 bp, Homo sapiens
ctccccccagatttcccgccagcaggagccgcgcggtagatgcggtgcttttaggagctccgtccgacagaacggttgggccttgccggctgtcggtatgtcgcgacagagcaccctgtaca

SEQ ID NO: 345238 - DNA, 122 bp, Homo sapiens
agaggggggaaagcagatctgtggaaggcaaatctaccatcagctgcctaaaaatagacccgccgcctcaccaccgtgcaaaacaggcgccggcccgctgctgtgcgctggttgcagcatga

SEQ ID NO: 345239 - DNA, 122 bp, Homo sapiens
tttcaacataaacatttaggggtacaggagacaaacattcagtctgtaacactgcactaccgagtacttagtacccttctgagctctcagcccagtaccctcatattccaagctttctctac

SEQ ID NO: 345240 - DNA, 122 bp, Homo sapiens
aaataagtcacttttgttttggagtcagaatcagggagcaccatggtggagcccggaaagcgatgaagacacaacagctctcctgagagttcccgacattcctacgaatgcggtttccccac

SEQ ID NO: 345241 - DNA, 122 bp, Homo sapiens
gaaaaacactgactcgagtagagagcatttctccggaaagtttcaagtgcagcaaaatagcgaacgtgcaaaactggccaaggggagacctctagtggttgaacgcgtcttttaagttcgga

SEQ ID NO: 345242 - DNA, 122 bp, Homo sapiens
ctcacgccacaacgcaacgaggcaggggctcctcctcctcccttggtatacggaaagaagcgtagggagcagagttgggatgctagtcagtacccccctgcacctagcccttgcccctccgt

SEQ ID NO: 345243 - DNA, 122 bp, Homo sapiens
aaaaagtctaatttgtttctggtggaaattcaaaacatacctgttttcctactttgcaaacgtttttccgtcagttaagtttccaacctggagaactctagtcccctaacatctcaactttt

SEQ ID NO: 345244 - DNA, 122 bp, Homo sapiens
acatccactctctaggtaccttgcccctcacccccttaccccgtaaatgtctttggtatccgaggagagcaagctaaagccctctcatatatacgactccctgaaggaagattgagaccagg

SEQ ID NO: 345245 - DNA, 122 bp, Homo sapiens
gaccaacgaagtggagattcgatacgtggactacggcggatataagagggtgaaagtagacgtgctccggcaaatcaggtgagcggagatgcctcaggcaggcctacgccctgcttgttctg

SEQ ID NO: 345246 - DNA, 122 bp, Homo sapiens
cctctctccaggggagagtcacagacaccaaaattgaaagatactagcatccaggttacacgtgtctgcctaagtctgtgctttttgctaagtcttagcctctctacaactagacttcaagt

SEQ ID NO: 345247 - DNA, 122 bp, Homo sapiens
gccgagggagcccgggagcagcgggcgtggggcggcgccaatgcgagtgcgagtggtgtccgccgcccgggagcgcccgggcccgagcggattaaccgccgcctcaggtgtcgtctcctgcc

SEQ ID NO: 345248 - DNA, 122 bp, Homo sapiens
caccatctttacctgtccccgttagcagggagcactctgcgagaagatggccaaaaggtccgccgccgccgctgtcccgggtaagttcatggccgagcctctgctttgggctgaccccgtcc

SEQ ID NO: 345249 - DNA, 122 bp, Homo sapiens
tgcccggacatgtctgagtttcacagggtcgctgattggattatgtccccttccccggaacgaatgcttttctgtcttccttaagggtagtatctctgtggcaccctgttctggctccttac

SEQ ID NO: 345250 - DNA, 122 bp, Homo sapiens
cgactacctgatcgaggaagtaagcgccgaggaggaggagctgctggggagcagcgggggcgctcctcctgaggagcctcctaaggaagggaacccggcagagatcaacgtggagcgggatg

SEQ ID NO: 345251 - DNA, 122 bp, Homo sapiens
tgcgatggcgaaggacggcgagggacggcgaaggactgaggccacacgacaaggaagctacgctcgtttcgcgccggcggaaatacagacgagagcgcgagctgcggcctagagcggtagga

SEQ ID NO: 345252 - DNA, 122 bp, Homo sapiens
ggcctcctggaaggtctctcggaagcggctggacatgaggctatagagcacggggttggccgccgagcccaggtagaagaagatgccggagatgacgtgcacgtgctggaaggccaggtgca

SEQ ID NO: 345253 - DNA, 122 bp, Homo sapiens
cagatgttttatcagtttcccatgttcaaaagttggagactgttattttactcctctattcggataaacatttgatttatttgcaagatatggcacttgaccccaaaaagtcaataacagac

SEQ ID NO: 345254 - DNA, 122 bp, Homo sapiens
ggactaggcacagagctgcgggagcaggcacagggagtgtggagcctggcggcgggacggcgggatccggtgggagccggagtcccgccgaggggggctggaggtggaggggcccggcgagg

SEQ ID NO: 345255 - DNA, 122 bp, Homo sapiens
tgacctagtgatccacccgcctcagcctcccaaagtgctgggattacaggcatgagccaccgcgcctggcctatccatgcttatctttcaaccagtgctgcaagaaggctctaaggccaaga

SEQ ID NO: 345256 - DNA, 122 bp, Homo sapiens
aaagcaagctcagaacaatttattcctatgtttgtttactgaaatagaaccaggaaggaccgatgaaggtctgaattaatgtaatttataagaagagaggctcccctccaaggcaatgaagt

SEQ ID NO: 345257 - DNA, 122 bp, Homo sapiens
aggatctctgcagatcttttttcttcaaactcagaaactacagaatcccagctgttcaaacgtctgatagaaataagggcttggacaagttccatctggctgaactttaacagcacaaacag

SEQ ID NO: 345258 - DNA, 122 bp, Homo sapiens
tggaaaacaaaatgcatttgtacgaacatttctgcttaggaccattgtaccaaattggcacgtgtattcttagggacccgttggccatttcagaagcacgctattatggaaaagaacatgtt

SEQ ID NO: 345259 - DNA, 122 bp, Homo sapiens
agctgcagccatgctcctgccaggctcctgataagattggaaatcacgtgcaacgctgagcgccatcagctgagatttggaccttaaagctgctccttatgctaacattttttttctcagca

SEQ ID NO: 345260 - DNA, 122 bp, Homo sapiens
aggtggccagaaaggatacagccagttacagactcttacatgctgcctcttaaacccacacggaatcgaagtctgggctcatcaggaaacagggagccgatgagggcctttgagaaggggga

SEQ ID NO: 345261 - DNA, 122 bp, Homo sapiens
tcactcaacgacgggaaatacgtcctgagaaatgacgggaatacgtcctacgacacacgtcggctatagagcccgtggctgccagcacagacctggatggtctagcctaggacacacgtcgg

SEQ ID NO: 345262 - DNA, 122 bp, Homo sapiens
ttaccttaaagtcagttttgccttttcagtaagcgactggcctccagaatggcctcgaagcgccagcctactggcaaggagctgacatgcagcccggagtcagctccctgcggatgggctga

SEQ ID NO: 345263 - DNA, 122 bp, Homo sapiens
cgcctataatccaagcactttgggaggccaatgcgggtggatcacctgacgtcaggagttcgagaccagcctgaccaacatggtaaaaccccgtctctactaaaaatacaaaaattagccag

SEQ ID NO: 345264 - DNA, 122 bp, Homo sapiens
ttcctaactctgcagtgctgttatattccatccacaacttcaaacaaagtgccacacggccgcagtcccaatcaattcaatgacaattgttagggacgtcctcgtcccgcccggcccgcgga

SEQ ID NO: 345265 - DNA, 122 bp, Homo sapiens
cggcccccccagccacgtgaaccccacaaagtgctgagtaacggtgaccgggaagtatctcggtgtgtacgtccttgcctcctctccggaatttaccgtgaccgttctcttctctgtaacct

SEQ ID NO: 345266 - DNA, 122 bp, Homo sapiens
ttcttgaaatattttttgaaaaccactgctctaattgatatcctttatgataaatcacctcgaggatcttcacagtgaggtgacatgggggatgcagaagccaggtcctcagccatggaagg

SEQ ID NO: 345267 - DNA, 122 bp, Homo sapiens
tcggcgcctcccaatgacaagcggcgcggagcattgtggtcccgtgcgcaagagcgaggccgagggcagaaaaagaaagcaaaagactagggcgagtcggtagagcgggccccgcgcatgcg

SEQ ID NO: 345268 - DNA, 122 bp, Homo sapiens
gtcaccggccctactgtctcagagggcggacccagctcgggctggtagtggggcgggggtcgcagggcgcgggccgggccctcagcgcgcatgcgcgacaagggggcggggccagggcgggg

SEQ ID NO: 345269 - DNA, 122 bp, Homo sapiens
gagagcctccgccagcggccaggcaccagccagacgacgccagcgaccccggcctctcggcggcaccgcgctaactcaggggctgcataggcacccagagccggtaaggaggcgcgcccggt

SEQ ID NO: 345270 - DNA, 122 bp, Homo sapiens
ctgactcccctcacttggagtgagttctcggcggccgggctgcagtctttctttctttcccggagggaggcgggggccgggggccagggagcgggctgggggtgggaaggaggtggagtggc

SEQ ID NO: 345271 - DNA, 122 bp, Homo sapiens
caggatgagtaccgggggcagccctgtgatcaacaactgctgcaagaggggccgtttgttcgactcactagtcttctgtggctctatgcggtactaaagagcagaagacagaagatacaaaa

SEQ ID NO: 345272 - DNA, 122 bp, Homo sapiens
cagatctggggctctcacctcaccactcctgcctccatctcttacaaacgctcagatgggcgactgtaactttctgacgacctaccgaggcaccgctctcattcaaaccccaccgcctaagg

SEQ ID NO: 345273 - DNA, 122 bp, Homo sapiens
acgttatcatgcctcgcccgacggaaaccagaatcgttttgggtctggtcgccaagatggcgtcctccgcctccgcccggactccggcagggaagcgagtgataaatcaggaagaattgcgg

SEQ ID NO: 345274 - DNA, 122 bp, Homo sapiens
aaacctgactgcgccctgaggagaacagcggagaaggtccaccgagcctggcgaaaggtccgctgagcgggctgtcgtccggagccactccgggctgcggagcacccagtggagaccgcgcc

SEQ ID NO: 345275 - DNA, 122 bp, Homo sapiens
gaagtctcagatcccgtgctgacaattacatgtccaaatggcatatccccctttcgggcacgcggaggagatcccccagccgggcgcgcgtgggggtgcgaggggggcgggcgcggcgcgcg

SEQ ID NO: 345276 - DNA, 122 bp, Homo sapiens
tgatcaacacatgtgactcgtgaccaacgtgaccagagcatgattgacacgtgactgacacgagattgacatgaatgacatgacacgtttgtgacatgtgacaagcgacttacacgattggc

SEQ ID NO: 345277 - DNA, 122 bp, Homo sapiens
atgggtttcatccagattggctttgtgctcagtttacaactcttcaatttaaaatacttgcgcatccctggaggaacagacaattctgagaaatcactttctgcaagatgctggggcaagaa

SEQ ID NO: 345278 - DNA, 122 bp, Homo sapiens
gttctcacttgtctgcttctctattcatatatgtttcattgttgttgctctcttctcatccgctctctggattttgcatatatctggtggtttatttgtttcatcgattccagagtccagtg

SEQ ID NO: 345279 - DNA, 122 bp, Homo sapiens
gaggtcacaggcccttacgaggtggggcaggcaggcgcggccgcagtgccttccagtcagcgcggaggcggtattgagttcagccgctccccacagccccggagcccctgggcggtggcggt

SEQ ID NO: 345280 - DNA, 122 bp, Homo sapiens
ccctttcctccgcccctccccacgcccggccttccgggccagcagggggcccgtgcgccacggccttgcgatcccaggaggttccccagattcccgcgccccgagcccagcactcctgggcc

SEQ ID NO: 345281 - DNA, 122 bp, Homo sapiens
actcgcgcgtctccggcgtgactgccgagattgacgtggaggacacgtcaaattgattcccgcacgctgcagcctcccggtcagacgaatttctcccaatcggatgaagttcaccctgggcc

SEQ ID NO: 345282 - DNA, 122 bp, Homo sapiens
ctgctccaggagcacatctcagctacagttgttttcagaaatgtgagttcaggatattaacgagtaatgctgagcaaagaaaatcacaagccaaccacctcttggatcacataagtggaact

SEQ ID NO: 345283 - DNA, 122 bp, Homo sapiens
agctcttacccagggagtcctgggcccggatgtcagctccatgctcaatgagcagccgcacgatctcctcactgttcacacaggcagcaaaggacaaagggtgctcccctgtggacacagag

SEQ ID NO: 345284 - DNA, 122 bp, Homo sapiens
caggcgactacaggtagcaggagggcggggacgagagccgttgcgccaccgctggcgcgccggttttgttgttattgcgaggattgtctggggcccctttaagccggaacaggcagggcgga

SEQ ID NO: 345285 - DNA, 122 bp, Homo sapiens
aattcaacattaagggccaaccctgaccacagctgagccgtgtgaagaggctgacagcggcgtggccaccacccaggatggagagaaaggcactgtgaggtgttaatggaaaaatccaactt

SEQ ID NO: 345286 - DNA, 122 bp, Homo sapiens
tgatcccgggtagagctgcagctggggactggtgcgccatgcaattgacatagcgctgctcgggcgaccaggaggcccttcagtgctccggaggcactttcagagcatcgtgactagataaa

SEQ ID NO: 345287 - DNA, 122 bp, Homo sapiens
cttctgggcagagtgcagggcctgccttaaatgttgtgggggttctgttctcaacaaaggcgtaagttgggagcgactgagccactccaggaggaggtgtgggcccacggcgtgttggaggt

SEQ ID NO: 345288 - DNA, 122 bp, Homo sapiens
gcgccggcgcgcgcgggcggggtgcgcgcgccgccgccgccgcgtcaccagcgtgcggcacgtgcccatgtttacgtccctcgtggagccgccgacgtcagcagtcgaatggcaacattgtg

SEQ ID NO: 345289 - DNA, 122 bp, Homo sapiens
ccaggacacctggagagacctgggccgggacgtacatcatccaggagcttcccctccacccgtagctcccaggaggcaatgctgccgtcggaatcctcagcatcaggcttcgcagggttaaa

SEQ ID NO: 345290 - DNA, 122 bp, Homo sapiens
cttgggtggtcgatgggactgggtgccatggagcagggagcagtgctcgttggggaggcgcgggctatgcaggagcccacggcaggagggcggggaggctcaggcatggcgggctgcaggtc

SEQ ID NO: 345291 - DNA, 122 bp, Homo sapiens
gaaatgagacagccattcctgccccctcccctgttggctgcaggcctgcaccgagatcgacgccatcagcgtggagaagaggcgcatcatgcagcaatgggccagcagcctggtgggcatga

SEQ ID NO: 345292 - DNA, 122 bp, Homo sapiens
ctgtacctagaaagtgctcaataaatgaaagctgctgttactacattggtgttggaagctcgggatgccacttgtgaagggggcacagaagaaaggtcagactgccaccataccctgagggc

SEQ ID NO: 345293 - DNA, 122 bp, Homo sapiens
atcttttgcaagctcggtgctgcagtgaggcaccatggaggaaatacaggccctacggggcggctgcacgagcatctgacatcagtcagctccccaactctctcagtgaggctttggaaccc

SEQ ID NO: 345294 - DNA, 122 bp, Homo sapiens
aatctctgtccccgggcctaggtgtgggccatcggcgagtacctgtcggtgacctacgatcggaggtgcaccgtggagcagatcaacaagttcttcgaagccctggaggctctgctattcga

SEQ ID NO: 345295 - DNA, 122 bp, Homo sapiens
cccacctgtttaccaaaaacatcacctctagcattaccagttttagagtcactgcctgcccggtgacatatgttcaacggccatggtatcctgaccgtgcaaaggtagcataatcgcttgtt

SEQ ID NO: 345296 - DNA, 122 bp, Homo sapiens
ggccagcttggcgccactagataggcttccgggcgtgattgggcgagcgggccagacttccggattcctgacaagccacgtgacccacccacctggaggagagagaagggatttgtagttta

SEQ ID NO: 345297 - DNA, 122 bp, Homo sapiens
gcaggcctcacagggacatctgttgaggttcctggtggcaccaaggacacagcgagctcccgtctggaaagggtttgaggaactggaaatcactggagagccaggaaagtccatccttatca

SEQ ID NO: 345298 - DNA, 122 bp, Homo sapiens
cgttttcctgtttccgaaagccctcctacttactgtcaagtgaacaaagttaggcgcccacgtgatcctccgagccaatggccgccccgcctgcgattcccggataaggaaatctgctcacc

SEQ ID NO: 345299 - DNA, 122 bp, Homo sapiens
agggaaaaggggcaggcttctgatcagtttaaatggaccgatgggagccatttctgattccggagtatggaagggatgggggaaagcagggctgaagtctaacagccccctcatcccctcta

SEQ ID NO: 345300 - DNA, 122 bp, Homo sapiens
ccctgcctctgccagtctcccctgctgttcccagcatggtcctccctggccctgggcattcggagatgtagaatgtgcttggatcccagctcagcctcccatccaatggtagttaagaacct

SEQ ID NO: 345301 - DNA, 122 bp, Homo sapiens
ccacggccgtcactggccccgctaagcctcatcaccacacggccaggccagaccagcacccgcggacgccagctccacccctgggccccgaggttcccacccgctgaggagccgggagctcc

SEQ ID NO: 345302 - DNA, 122 bp, Homo sapiens
gctgtcttgtgggttctgtggcacctgggttctgtctgggcaccttagacggctgtcttgcgggttctgtggtgcctgggttctgtctgggtgccttagacggctgtcttgcgggttctgtg

SEQ ID NO: 345303 - DNA, 122 bp, Homo sapiens
ctgcctgatttttgtatatttagtagagaccaggctttgccatgttagtcaggttggtctcgaactcctgacctcaggtgatccacccacctcagcctcctaaagtgttgggattacagatg

SEQ ID NO: 345304 - DNA, 122 bp, Homo sapiens
gcgcggccggaggaagcccgcgggccgacccaggcgctcaccttcacgtctccgcggccgcgacgcgagtcccaccactttgatctgcttttggctttagctgaggaccctcccgtgtcagc

SEQ ID NO: 345305 - DNA, 122 bp, Homo sapiens
tgccaataataaccatgcagagtgactaaacattttttccaacaaaggaaaaaatgcaaacgatcaaagtgcagaagcagcccttggcccgcgcaggctccggtttccgcctcccgccgccg

SEQ ID NO: 345306 - DNA, 122 bp, Homo sapiens
tcaatgcgcatgcgcaaggagagagccgcttctccccatcacagcgattcccagggttgtcgtagaaaccactccctgaggcttcgcaaagcaggagccctccgtagcagggcttcggtgtc

SEQ ID NO: 345307 - DNA, 122 bp, Homo sapiens
ttgtcctgcatgatcttcctggccatggggctcagcgacgagaagtaagtgaagcgctttcgctcccggtcgtccagaggccggttcccgctcatgaccgccgagcgcgaagccgcgatcgc

SEQ ID NO: 345308 - DNA, 122 bp, Homo sapiens
taggccgtgttagggccagttgtcatcaactctattacattttctggcaatgttttagagcgatgtgtctcgcgaatacctttcacgtcaaacaagaatgaatcgtagacaacaccagaatt

SEQ ID NO: 345309 - DNA, 122 bp, Homo sapiens
agctgtggctgcaggtgggaggtgcgggttggaggcacgtgcagggagagagacgcggtgcgcacgtgtgagctcagcccgtctgacccacgtgtgatgaccctgcagtgtttcccagcagt

SEQ ID NO: 345310 - DNA, 122 bp, Homo sapiens
tgggagagagatgcttttgtgagcacgggaaagtagcgctgccggagaacagctctgaggcgggatcaaaagccgccggcgaagccccgccgaggaacacggccgctgcccggggcggctcg

SEQ ID NO: 345311 - DNA, 122 bp, Homo sapiens
cggccaagtgggggggtttcttgtgaggaccagaggtggcacatccacgggcatgggggacgctggctcacgatgccccagtgatgccgtggttaggacactgctcacgcagctgcagcgca

SEQ ID NO: 345312 - DNA, 122 bp, Homo sapiens
atagggtgctatgtggaaatgacgtgaaatccgctcaacctgatttccaacatgtgcgttcgttttctccctattcaggtcatagtgattcatgagagagagaggcagagcgggaactgaag

SEQ ID NO: 345313 - DNA, 122 bp, Homo sapiens
cttcagtggacacggagaacaatgtctacatctctagaaaagtccatggaagccaagagacgagactacatgttgtaggccacatagatggggtctagctggtctgccaaaaacccgtctcg

SEQ ID NO: 345314 - DNA, 122 bp, Homo sapiens
gagaccgggacctgggtgttcaggcttccactgctgggctccctccactgttctccatgacgggcctggacccctggaagatccgttttgaacagaactggactagaatgggacagcacgat

SEQ ID NO: 345315 - DNA, 122 bp, Homo sapiens
gaaggggatcttgacaaacagtggagtcataagtcaggctccttgaaacacttttatgagcgccttaatgagggagatgagctgtcatcaggaactcatcccatccttcctgaccacaggaa

SEQ ID NO: 345316 - DNA, 122 bp, Homo sapiens
attccacaaatatgcattgggatcctacggagagccagaaatgagctcactggatccccacgacaaccctctgaggtccaagctgatattattcccatttgacagatggggacactgaggct

SEQ ID NO: 345317 - DNA, 122 bp, Homo sapiens
cggaatgcggccttgagcagcgcccatctcgctcctggggtgtgggggcaactctgggggcgctgggccttggggctccgtgggcacgagcctgcatttgtagtgatgggaaccaatttgtg

SEQ ID NO: 345318 - DNA, 122 bp, Homo sapiens
gggatccgggcctcgttgcggaggggacgcccgggctgagctgagctcacttgctggcggcggcagcccctgcagtcatggggtcaccggcttgtggagaggggctggcgctgttccttggc

SEQ ID NO: 345319 - DNA, 122 bp, Homo sapiens
ctcagagccactgttgtctataaaaggtataattaccctgctaacgctgtatatacggctcgcgcctaggctcgcttgcgcccagagagaaagtaaagccatgtcgaaactgtctagatttt

SEQ ID NO: 345320 - DNA, 122 bp, Homo sapiens
tggccacgtgggaatgagcactagtcgaggtctctgcccgcaggcccctcgcctacagcacgctggccgacctcgtgcaccatgtccgccagcacctgcccctcagcgacctctccctcgcc

SEQ ID NO: 345321 - DNA, 122 bp, Homo sapiens
gagagccgccggttgtgtctcctggcggggactcccattgggtcgcagctggacagagatcggatcgtcccccgcgcgactctcactgggccaggcccccaccgaggcccgcccctctctcc

SEQ ID NO: 345322 - DNA, 122 bp, Homo sapiens
catgactcagccacatactgaggtactgtgagggctgaggggtgcaggaaatagaggctccggaggtcattttggattgggacaatcaaattccacctgtagggaggaaatgaatgacataa

SEQ ID NO: 345323 - DNA, 122 bp, Homo sapiens
gcttggtgaattctgcttcacaatgataggaagagccgacatcgaaggatcaaaaagcgacgtcgctatgaacgcttggccgccacaagccagttatccctgtggtaacttttctgacacct

SEQ ID NO: 345324 - DNA, 122 bp, Homo sapiens
gagcagccacacatgttctgggcatcctaatgcatcccgggcatgggctgaatagaaatccgttcttggagtgactaaagagctggtcgtctgtcatttagggagcatggtaagaggagata

SEQ ID NO: 345325 - DNA, 122 bp, Homo sapiens
ttgatagggtttggctgtgtccccacccaaatttcatctccaattgtattccccacttgtcgggggaagggcctggtgggaggtgattgtatcatgggggcggagctccccctcccccttgc

SEQ ID NO: 345326 - DNA, 122 bp, Homo sapiens
cgccacccggaagcagatgccggcggcgcggcgtggcagggttgtggttccgggtcgggccgcgccgcagccagctctcggctcgcagccgcagcgccccgcccccgcgctccggacctggc

SEQ ID NO: 345327 - DNA, 122 bp, Homo sapiens
gagctgaactggagccgctcgtggccagaggtcccttcctgggaacagcagtggcggcagcggctgcgctgagcctggcaatttgttcaagagcaggggatgctcaggctgcgctcgccccc

SEQ ID NO: 345328 - DNA, 122 bp, Homo sapiens
agcggcagccatcttagaagagcagcgcgctgccgaggcagcgagtgggctgcagggcggcggcagcagcgccaacttccacccaggcctcggcggccgccggcgccgcgcagcgctgcgca

SEQ ID NO: 345329 - DNA, 122 bp, Homo sapiens
tagataaagaggaaggggtggagctagaactggacacctcgggggtttcctgctttatggcgaagggtgagtgaggatctgccggagggagggagacaacaaggagagaggggtgtgagatg

SEQ ID NO: 345330 - DNA, 122 bp, Homo sapiens
aggatggggcacttacaggcggcggctgagaccctccaccgagcgcccgcaggagggcaccgcgtagctcagcaggaacaccgcgacgctccactgctgaaccagtctccgctgcatcgtct

SEQ ID NO: 345331 - DNA, 122 bp, Homo sapiens
gaacaaagcactagtaatatactcaatgtccagagtagacaatttatgatccattctcaccgtgggggtttggcagccctttaaaagaatgaggcagctttggatgtagtgatgtagataga

SEQ ID NO: 345332 - DNA, 122 bp, Homo sapiens
aaagctgaaatccatacctactttgctctgtttcccatcagttactagagaactcagtcccgtcccttttgttgacaggttgccaggatacatccaggcaacaaagactgcggttcctgtta

SEQ ID NO: 345333 - DNA, 122 bp, Homo sapiens
catcagagaagaccctgcctgtcacctcaggtacagcccacgaagtaaggtggctgcaagcgcagatcctgcacctgcccaaggtgaaacaaatcagctcccggagcctgaggtgcaaaggg

SEQ ID NO: 345334 - DNA, 122 bp, Homo sapiens
tcctgcgccacccttccctacgtgggtaatctggggcagattcctttatccctctgatcccgtttcttcgtctgtaagacacagctccacaacttccttcactcagtggctgtgaaatcctg

SEQ ID NO: 345335 - DNA, 122 bp, Homo sapiens
actaggaaaggctgaggaaccaagacaaagctgctgtggctaaaaaggctataatgcaggcgatgaggccaaagtctctgctagggcttgtatgtgagagcaagttcgaattttattcttcg

SEQ ID NO: 345336 - DNA, 122 bp, Homo sapiens
cagcaaatggtttttggacccaggttctccctacatgctacatcctactgtaccacttctcggccacagatgagctctcctgttttaattctccttcctgcagatgatgagcatttttcagt

SEQ ID NO: 345337 - DNA, 122 bp, Homo sapiens
tgttcgcagtgctacttcgggtgggggtccccgcgtgcctgggatccagcaaaggtcccgcgtgtcccccactactgagttcatgcggctgaccatgaccgtttatttacctgtgtggctac

SEQ ID NO: 345338 - DNA, 122 bp, Homo sapiens
cggcaccctcgcctacccccctcgcagcacctgtcgcctccgcccctcactcggaccccgcgcatctggcgcagcccctcccgcactcccgcccagcgccccgcgtccccggcccccgctgt

SEQ ID NO: 345339 - DNA, 122 bp, Homo sapiens
ggccgccgcggaggccgactcagcgccgagcgctaagagaaaccgggctgatgcagcaggcgggaaacaagccgtagaaattcttgagacacgggttcgtcgccagcttcctggtgcaaaac

SEQ ID NO: 345340 - DNA, 122 bp, Homo sapiens
ctttcctgaagtgacaatttcctagttctgtctggattcaagcttcagttctggtccatacggccctctcatgaatagcttagacactgatacaattgcttttctcacactagtccccaaag

SEQ ID NO: 345341 - DNA, 122 bp, Homo sapiens
gtacacttgggcagcacagcttggccctggaggcgagtgccaggtgtggggggcgtcagtcgtgtgtgcgggccccaggtgtgcgtgtgtgggagccccaggtgcgtgcgtgtgtgggggcc

SEQ ID NO: 345342 - DNA, 122 bp, Homo sapiens
tgcaggggccagtgtctggatctgctcacatgacagtcttctgtttggcctggtttggggcgaggggcaacctctttcccaggatgccagccatgtgcagggcatactgaggattcaacagt

SEQ ID NO: 345343 - DNA, 122 bp, Homo sapiens
tccctcaatggacacaaaatttcctctggaatttacagagcagaaaccttaaacacacatcgccataagaaccagattacataatgtctccatcaccctcctgacagctacaattatgagtc

SEQ ID NO: 345344 - DNA, 122 bp, Homo sapiens
aaatacactgcaaatcaggtttggtaacacatccacttatattaacaatgccctgatgcacgttcaataattttgtcttttcaccctcaacaggtaaagaggagagagagggagagagaaag

SEQ ID NO: 345345 - DNA, 122 bp, Homo sapiens
ccgcttctgtggaccatgtgctgcaggagcatcgtgtggagctgcggcccaccacgctgtcggaggagcgggcactgcgggagctcgccctgccaggctgcacctcacgcatgctgaagtta

SEQ ID NO: 345346 - DNA, 122 bp, Homo sapiens
ggggggtgggttgttgtggaatcgggggagatcccagttattgtgctcttccctatcaagcgagataattctgtgaatggaactgtgcgtgagcatcttgtctggcggcgctgctggtgtgt

SEQ ID NO: 345347 - DNA, 122 bp, Homo sapiens
tatgcaaatgaggtatgaaagtacagcttttctattggctatctgactagcatttgctaccgaccaatcaaaaagtcggatttactccccaggaactacctataaaagcggccatgttttac

SEQ ID NO: 345348 - DNA, 122 bp, Homo sapiens
gggaagaacacagggtggcaggagcgcggcccgagaggaaaaccaggcagctgagacccgcgggctcgtttcctgcaaacacatcacctgcttcaggtggagagggtaagggtgccttctgg

SEQ ID NO: 345349 - DNA, 122 bp, Homo sapiens
tgccgttgccactgctaccgccgctgccatattgggttcttactgtacaggctgccgctacggtcatgtgaccgctcccgcgcggccgtcactactgtacgcagccggccgcgcgaacgagc

SEQ ID NO: 345350 - DNA, 122 bp, Homo sapiens
caccccctgtttacctagccttcaagatgatgaaacatgaaaagtctcagctagccagttcgcagaaagggggatctgagaaaatagttctgattcagatgttaacgacagccctagttccc

SEQ ID NO: 345351 - DNA, 122 bp, Homo sapiens
gcaggcaaacacctgggatactatctatggtcagtgccactttccactaaaataaattatcgttgttataaaatgtagccattgaattcatagtgataaattgctattagccactattagtg

SEQ ID NO: 345352 - DNA, 122 bp, Homo sapiens
agacatccgagtgggtggtgaagatcccatctttgagggactcgggggccatccagcgcacgggcagcagccccttcccacccttgcggtaatagtctgtctcatacacgtcccgagtcatc

SEQ ID NO: 345353 - DNA, 122 bp, Homo sapiens
gggaccagcacagctgcctgcggtcccaggacgcactgcaggccaggccagaggcttcaacggggcccacctctttgcatgggtctggccagagggaaggacgcctgtctgggagccaagca

SEQ ID NO: 345354 - DNA, 122 bp, Homo sapiens
atctccactaatttatagaattcctcaccccatcaagagacgcttccccactaagcttcccgggctcttcccgccgcgcgctgattctcccaggcgtcctctagcgctactgttctgctact

SEQ ID NO: 345355 - DNA, 122 bp, Homo sapiens
cccaagctgcagtcagctgaggacagtcatcatatggggttgggagtggaaggcagaggacggatctgcctgcaaatgcagctcagctcagctcagcttcaggaaaccttgctgtttccctg

SEQ ID NO: 345356 - DNA, 122 bp, Homo sapiens
cgttgtgggaagaggagcaaaactttcggggcactactgtcccggtgtacgctaggggaacgcgggaggcgaccgggataggtttcttctcttctgttgcttggtagctgccccctcctggc

SEQ ID NO: 345357 - DNA, 122 bp, Homo sapiens
ggattcgaaccgaggttgctgcggccacaacgcagagtactaaccactatacgatcacggcgagctaccggggacccgtaggggttggcttctgattatcctcttcaacagtcataggcctt

SEQ ID NO: 345358 - DNA, 122 bp, Homo sapiens
acaaatcctaactccctccccacctctcttttctcctgaaaacagaacatgaaaggctcccggagcagcgctgactcctccaggaaacactgaggcagacgtgtcggttccattccatttcc

SEQ ID NO: 345359 - DNA, 122 bp, Homo sapiens
cattagataaagcaggcgaaggttctgagtaatgagcagatgctgctaatgcagggacggcggagaccttgccaggactccatctgctccgtgcttgcctgcctttggcctcgtgccacagc

SEQ ID NO: 345360 - DNA, 122 bp, Homo sapiens
actcagcgccaacccctctcaggcgtcgggatcttcagtccggggccccagccctccgcgcggttctcctgcccagcgcaccgtgcgttgccacccccatcgcgttcctcagcctcccgggc

SEQ ID NO: 345361 - DNA, 122 bp, Homo sapiens
acaagtagggccctgaaaatatgttaattatgtgacttaagatcacctgggagtccttttcgttactgacttgtgcgacttgtgtggctcgtgtgctctcatgcttaattggattggtcttt

SEQ ID NO: 345362 - DNA, 122 bp, Homo sapiens
aaaaacaaactaaacccaacccgatggttaacctatgcaccaaactgccactgtcatctccgttcgtaacattctgcctctcggctgagagagttcttatccttgagaagaaagcaacagcg

SEQ ID NO: 345363 - DNA, 122 bp, Homo sapiens
taagcagatacctgcaggccccactgcagctttgggaggagactttctctccctctatctcgcaggcaggctgggaagattaaaggggagggcagaggagcacgggggaacggaatggaaca

SEQ ID NO: 345364 - DNA, 122 bp, Homo sapiens
tcccagtcatgcgcagactcttcattagatgcaagcaggaaacaatgaacagtacaagtccgtggactcagcgagtagagaaagagttaaagtttggtatgctaacatggtatgcaaaactg

SEQ ID NO: 345365 - DNA, 122 bp, Homo sapiens
gccgcccacactcgcgcacacacgggcgcgcacacacgcacaaaagtacaccggcccgggcgtccgcctcctggaaggctgccgagaccggccactgtgcccctaccagctgcgtccccacc

SEQ ID NO: 345366 - DNA, 122 bp, Homo sapiens
gaaggcgaagcgcccaagttccggaacccgggaggcgctggggtgccgagccagctgcggcgacctggacgcattcgtagacgagacagataggtggcactcgaagcccagaaaaaaggcga

SEQ ID NO: 345367 - DNA, 122 bp, Homo sapiens
ccccagggaacgcaggcttgaagtggaggctgagaatgcaatccgagtacagccataggccggtcaaaggtatggaggcggtgtgtagcaggggtgagcggggtaggagtggcttggatgtc

SEQ ID NO: 345368 - DNA, 122 bp, Homo sapiens
taaggaaccattctcaggctaggctgatgaagggagggatgtcattttctcacttgaggacgctttcaagacgtttcacatgacgagaagtcttcacaccaccaacttcccctttttttttt

SEQ ID NO: 345369 - DNA, 122 bp, Homo sapiens
tttcacatgacagtggaaatgaaatgccaaggaaaggttgttttccttttcagccccacccgagtggttcaggcctacctaagaccactttatcttacactccgaggcgtttcctcccacta

SEQ ID NO: 345370 - DNA, 122 bp, Homo sapiens
ctactgcactccagcctaagctggaaaaaacaaacaacaaaccctgtcaggtaggtatcacgattatactcattttataaataagaaaaaccgaggcacaaataggctaagtaacgtggctg

SEQ ID NO: 345371 - DNA, 122 bp, Homo sapiens
tccagatgtggtgcagcgccagcgcgcggggacacagtgtccgccaggagaaggaagggccgccctgcaccacaccaggccagcctctggtgttaatgagagcctatatttggaagtggcat

SEQ ID NO: 345372 - DNA, 122 bp, Homo sapiens
ccaaaaagaaaaggaaagcgccacaaactgggtttgcagaaagagtaatgcactagggagcgcaggttctggtctccttaagtaagaaactgcagaaccagctttttactgaccacctgggt

SEQ ID NO: 345373 - DNA, 122 bp, Homo sapiens
ccagctcctaaccgcgagtgatccgccagcctcggcctcccgaggtgccgggatggcagacggggtctcgttcactcagtgctcaatggtgccaaggctggagtgcagtggcgtgatctcgg

SEQ ID NO: 345374 - DNA, 122 bp, Homo sapiens
aacgcggggctgggggccggagacagacttcgcccaggtgacgggtagtaggggcggcgccgcttggcctcgtggggtgtaagacccacttgctgttgcccccggaccttgccgccacacca

SEQ ID NO: 345375 - DNA, 122 bp, Homo sapiens
gccatgcccggcctgcccgccgctcccggcccgcgccccgcccctcgctgtgcccgccctcgccccgccccgcgccacccggagccccgccccctccgggaaccccgccctgcaccgccgcg

SEQ ID NO: 345376 - DNA, 122 bp, Homo sapiens
ccagactagtgggtcgagggaaacactctacagctcaggtggaggttccgcagacacacccgcagctgtgcccgtaggttccggccgggcccggtgagccacgctcacttccggtccgctct

SEQ ID NO: 345377 - DNA, 122 bp, Homo sapiens
ttccttaggaaactttgagtatcttcgttttagcgtgggaggacatcttttgggatgaaccggctcagtccttgagctcaccccaaagatgatgaaattgaaactcagaggaaaggattttt

SEQ ID NO: 345378 - DNA, 122 bp, Homo sapiens
ccctggagcaccggggtggggatggcacgtgtgagccagctcagaggctgaactgtgtgccgtgctcctggggtggggtggggtggggagggcagtcctggctgtcgtgggctgtcggggga

SEQ ID NO: 345379 - DNA, 122 bp, Homo sapiens
cgtaactacctctacccgatctggtcaccatacgcctattacctttactgttacaagtaccggatcactctccgggagaagatgctgcctcgttgttataaaaggtacttgttttcatctct

SEQ ID NO: 345380 - DNA, 122 bp, Homo sapiens
cattagaaactggtgacttccattaacattgtatttccatgcccctaaatgttaaggaggcgttcataggctagtctaagaacctaaccactattttaaaaattgtctctctgggaaatttc

SEQ ID NO: 345381 - DNA, 122 bp, Homo sapiens
tattggaaatgtagtccttgtcctgccccgcgctattcatgcttgtcaatgctgtgaacacgagggggtgctgtggaggtggcggggaggatgctatagggcgtgttcttcacgcgagaaat

SEQ ID NO: 345382 - DNA, 122 bp, Homo sapiens
taggagaggaaatcagaacaaaactgcatcatctgttccataattgtccaatgttgttctcgttgcttaatctcgtgggttagaaacccagcatttgagctctggattcactacattctgag

SEQ ID NO: 345383 - DNA, 122 bp, Homo sapiens
cgtgtgcgcctgaggctgttggctgcggtcttgaaacgggctctgggagcttcctctgcgcggtcggccctggctgaggcgtcccgggctgcgcgcggggctcggcgctgcgcagtgtccgg

SEQ ID NO: 345384 - DNA, 122 bp, Homo sapiens
caaggataggccgggcacagtgggagcaagggctgcagagaggccaagtatggtggctcacgcctgtaatcccagcactttgggaggccaaagcgggttgattgcttgagcccatgagcgga

SEQ ID NO: 345385 - DNA, 122 bp, Homo sapiens
aggaccccctctccctgactccccaccctctagatcaggcagaatggctggcctgtgctgcgtctgcacacaggaagtcaccttcctttaatatattggcttgaggcctgcctgccctcccc

SEQ ID NO: 345386 - DNA, 122 bp, Homo sapiens
aagggaaagatttcacttgcattatattttcatcaatgcacttaaaacaacttctggaatcgccagagttccaggctccactcctctcttcagctccgccctgctcctttttaagtgagccc

SEQ ID NO: 345387 - DNA, 122 bp, Homo sapiens
ctactattaataggtattttaaactgtaatcattaaaaacagaagtgctacatcacctttcgccctgactctcgaagtgaacataaagacacaccaaaaggttgaaaacaaagctagctggg

SEQ ID NO: 345388 - DNA, 122 bp, Homo sapiens
gcacttctgcagctctcccagccacgtcagggtcaggaggcgtttacaggggcagggcggcgaggtggggggcggggggcacatgtgggcggagactaggggggcttcggggagagcagccc

SEQ ID NO: 345389 - DNA, 122 bp, Homo sapiens
tcggatggcagcaaggactcctgcaagggggacagtggaggcccacatgccacccactaccggggcacgtggtacctgacgggcatcgtcagctggggccagggctgcgcaaccgtgggcca

SEQ ID NO: 345390 - DNA, 122 bp, Homo sapiens
cccggtgactcaccggccgcctccgagtgcggctgcaagcgaaggggccggcgcgccaggcggggtccgtgcccttggggccacccccgcgcctgttattaataacccagcgcctggaggcg

SEQ ID NO: 345391 - DNA, 122 bp, Homo sapiens
aggttaaatccattactgattttctctatttcagctgcactagcattttgagtccatcctcgtgtgctgcttttataacaccttattcatctccccatatcacacacacaattaagaactaa

SEQ ID NO: 345392 - DNA, 122 bp, Homo sapiens
tacagtgggagtagttatctgaggcaagtgcattaaaaattagagagttgtaactggtaacggcattttgataaagggatattgaagagtttacttatgttaatggtattctgcaaatgttt

SEQ ID NO: 345393 - DNA, 122 bp, Homo sapiens
gtcaggccagcgtggatatgagtgcctcttccacatcccgggcagcccggcccgtgtcaccgccctgcgcttcaacagctccagcctgcagtgccagaattcctcggtgaggtggccagggc

SEQ ID NO: 345394 - DNA, 122 bp, Homo sapiens
aaagaaagcctgcttaatggtgtgcagtaattagttctgatcagcataatcctattatcccggggacactgaaaacctcgcagactgcatatgggcattttgggagctatccaaggcacttg

SEQ ID NO: 345395 - DNA, 122 bp, Homo sapiens
ctgcctccaaggttcaagtgattctcctgtctcagccttctgtgcagctgggatcacaggcgtgcaacaccacacctggctttttttttttttttttttttttttttttttttttctgagat

SEQ ID NO: 345396 - DNA, 122 bp, Homo sapiens
ctcaccatctcctggcctccagagagcctggcgtttcacttctggatctcccggtgcctgcgggtcacacgacctacggctagcaggggacacagagccgcggggacaggaagtggagctct

SEQ ID NO: 345397 - DNA, 122 bp, Homo sapiens
ctaaatgtttggatgaaaacgacagagcagaggagggctggtcagccagctgcagaggggcgccccttcggagcgttcgcatctgcctgaagaatatgtgtagtacgttttcctagaagcat

SEQ ID NO: 345398 - DNA, 122 bp, Homo sapiens
ggaggaaggtggagtaaggatgaggtggcccagactgcagctgaatctccggtccactgccgactgactcactttgtaatgtttcgcaagtctcttcacctcactttaccccttctataaaa

SEQ ID NO: 345399 - DNA, 122 bp, Homo sapiens
gtgtaccggcccaaccagaacggccgcggtgagtacggccccggcgcccctccggccgcgcgtacccctggccactggaaactgctccgggccccccgggcccctccttagaacttcctgga

SEQ ID NO: 345400 - DNA, 122 bp, Homo sapiens
ggccccaggacgaagccgagcatcagtgctgggaagggtctggtccactcaatgcccggccggtgggacctgcgcccctgctggagccagcaccggctgcacggctcacctgggaagggtct

SEQ ID NO: 345401 - DNA, 122 bp, Homo sapiens
gcaaatagattttttaaacaataggttttactattacttagggccagtactaagcaagaacgcagtttgttttccatgccctgttctctgcaccctgccatacccctgccaggccggccact

SEQ ID NO: 345402 - DNA, 122 bp, Homo sapiens
tttacttgcaaatgacatgatcatgtatagaaaatatcacaggacatgtacaaaaaaagccgttagagagccaggcgcggtggctcatgcatgaaatcccagcactttggcaggccgaggtg

SEQ ID NO: 345403 - DNA, 122 bp, Homo sapiens
aaaacacacagatccccaggcctgagagctgcccggggctgcgcgccggataaacgcaggcggcgtgaaccaggcttctcccaggagcgtggaagaaagtcactgattctgcatttgtcaaa

SEQ ID NO: 345404 - DNA, 122 bp, Homo sapiens
ccctccttgtgtttgtttgagttggtgtcaccagtggtgatccagtctgtgggtgagggccggctgtgggaatgcaggggggtggtggggggggacacagagcccagggcagtctagctttt

SEQ ID NO: 345405 - DNA, 122 bp, Homo sapiens
aaggcccaaggtcaccatcaggaggggcttcctgtcttaagctgcctccacccacctcaccgcagggtgtctaggtcacttcagggctctccacctaccgcagaaaatgccacgttcgctga

SEQ ID NO: 345406 - DNA, 122 bp, Homo sapiens
agtggcctcaagccacattctctctgaagaggaatgcgcaagacagtccacaggcatatgcgagggaaaaaataataaaacccgttcataattctcatctcatcctttaaaaattcttgttt

SEQ ID NO: 345407 - DNA, 122 bp, Homo sapiens
ggggatcttttttaatgaactcttacccagaatcttaatatataagcatatctgctctggcgaaattagagagaaaggaaaaccctccctctcttcccagacaagttcttggtgttggttag

SEQ ID NO: 345408 - DNA, 122 bp, Homo sapiens
aaagcataagatataaaaaagggaataacccagaaaagcccaacaccaataaccgttacacgaaacaaaggaagtaaagaaggagaagctgaattcacaccctttgaagaagggggacaatt

SEQ ID NO: 345409 - DNA, 122 bp, Homo sapiens
tcctcggccacttcatctaggccagaatacaaggtgctgtctgcaagaaatgctgagcgtcggggggtcgttcggtggccccagcctacagatcgcacacaagcccccgccccatccctcat

SEQ ID NO: 345410 - DNA, 122 bp, Homo sapiens
gcatttcctaagagtgagcaccagggggcaccacataccaaaggaaagtggtccagactgcgagaccgcggattagaccaaagagataacgttttttttttcttagactggggccctccaag

SEQ ID NO: 345411 - DNA, 122 bp, Homo sapiens
cctttgcatctctcaaaatctgccatgatgttcttctcatgtgcctttcacccagtgttacggagatgtctgcttaactgaatgaacatataaaacatatagggtccacttttatatcccaa

SEQ ID NO: 345412 - DNA, 122 bp, Homo sapiens
gtctgcttgggggaaggaactgagtcttgttcatcggaatcttccaccacacctagcctgcggacttcagcaaagcatttgtttgcttgctttgttttgtttttgttgtttcaactagagcc

SEQ ID NO: 345413 - DNA, 122 bp, Homo sapiens
tgtgtccctatggctggtaaagtgatcccgggcggccccagaactgccccagccagaggccgcccacacccccctgaacccagagtcgacaggcgcaccctcaactgcgccgtggggatggg

SEQ ID NO: 345414 - DNA, 122 bp, Homo sapiens
gccttacgcctctcaggttccgcccctaccccccgtcaaagaatacccatctgtcagcttcggaaatccactctcccacgccagtaccccagagcatcacttgggccccctgtccctttccc

SEQ ID NO: 345415 - DNA, 122 bp, Homo sapiens
agtttctgcttagctaggcagggccgggggacaacagcttctgcgagtctgcgattgtggcggccggtatattcggcggtttacggtaatgggcgggccccaaatccccatgtggtcccgac

SEQ ID NO: 345416 - DNA, 122 bp, Homo sapiens
tgcagcctgtgaccttttggggttggctgttttcaggcagtctaattccctcgggattcacgaagtctgtgcaccagccattccttcccttgtattgctaaggagcgttccatgatgggggc

SEQ ID NO: 345417 - DNA, 122 bp, Homo sapiens
ttgagccagacccgtgttggccgtggctggaggagtgccccgaaccggacccatgtcggacgtggctaggagactggcgagatccagacccttgtcggccgtggcccaaagactgacgggaa

SEQ ID NO: 345418 - DNA, 122 bp, Homo sapiens
ctcctgacttcttcccttcgcggggcaggctggggcatgtagttctccgtaggcgggaggcgcacggtgctgtcgggaaagttggtctcggaaaactacagccgccctcagcgcgccttccg

SEQ ID NO: 345419 - DNA, 122 bp, Homo sapiens
gacagccagattcgaaacatcaatatcagaacaaacttaggagataaggtgtctttcagacgagggcacggaggctctgtgtgggaggttgagggacttgcccaaagccatgccgtcagtaa

SEQ ID NO: 345420 - DNA, 122 bp, Homo sapiens
gccacaataggaaggccctgaacagaatagttaattgtgccagattgtgcaattccgttgcgatacctaatagacaaaaacaacagatttttatggtttgatttttatattgataatcagag

SEQ ID NO: 345421 - DNA, 122 bp, Homo sapiens
aaacagtgatggaagaagacctcaggctgtccacagaggttccggaaaaagccccagaatcgggcaccactcacttctgactgtgggcactccagtcccagcactggtcgtttaggatgctc

SEQ ID NO: 345422 - DNA, 122 bp, Homo sapiens
tagtctatccgcatctaggtgagagggcacctcgcctggggacagattacaaaagcgtcccgccagaggaatgcttcaggtagagctaggggtggattgcaagaagagtaccttctttcaat

SEQ ID NO: 345423 - DNA, 122 bp, Homo sapiens
gcggagcgtgcgagactgcgagcgcgagcgccagcagggcggagggcggggcgtgggcggcgcccggccttcccgctcccgcggcgctgcaactctgccgagcctccttaaaactctgccgt

SEQ ID NO: 345424 - DNA, 122 bp, Homo sapiens
acgtgttgagccagaaagtattgagcctatacaaagacttcagtgagggattccctaaaacgagtgataccaagccacttactgcaagtaatggatagttacatgaatgtaagaatagattt

SEQ ID NO: 345425 - DNA, 122 bp, Homo sapiens
ccgggcccggcccacctggcgccccctcccgcccgccaccgcccgctggcgcctgtcggtcgtctagacccgccgcccccgctccaccgctcagatccgcggccagagccggaagtggctcc

SEQ ID NO: 345426 - DNA, 122 bp, Homo sapiens
ccagagcagcccaggccatgaccctgccgagcacggtgtgtgatctttgctggccgcccacgcggagcacggcccgggccccttctgcctgtgctgccaactatgcgcagcattcggttcct

SEQ ID NO: 345427 - DNA, 122 bp, Homo sapiens
tggcctgattcacacggcgaagtggggacacgtccacagcctgtcgtctcacagtcccggcgcacccaatgcgtgtggagtcctcccggggaccactgttgatgatggcgttcaccaggacc

SEQ ID NO: 345428 - DNA, 122 bp, Homo sapiens
gagaccccactcccagccggtttccaggttcttggcaccttcagagcaagaatttagatgcgaaaagcagcagcttttgctgcaaagcgaaagcacacgcctaagtgagaagccaggcgagc

SEQ ID NO: 345429 - DNA, 122 bp, Homo sapiens
cccctgcgggtgaggcgggagcggcgagcaggagggctgactcagaaggtttatttgcagcgctggcggggcggacaattggcggcctcggggtgcggcgggtgcgggcgctcagcggctgg

SEQ ID NO: 345430 - DNA, 122 bp, Homo sapiens
tcccttcgccgcagccccctccccgccccgagggtggctgggcccggaggaggggcgccccgccccgtccgtgcatccggctccgccccttgctggaaaggctacgtattcagccctggagg

SEQ ID NO: 345431 - DNA, 122 bp, Homo sapiens
ttgcaaatggcagaatttccttctttcctaaggctgcatagttctccactgtgtgtgcaccgcactttctctatccactcatccatcggtgcgcgctcaggctgattccacagctgtgctgt

SEQ ID NO: 345432 - DNA, 122 bp, Homo sapiens
cttcgcttccgtctcagccaagttgcgtggacccgctctttcgccaccttccccagccgccggccgaaccgccgctcccactgacgctgctttcgcttcacccgaaccggggctgcggggcc

SEQ ID NO: 345433 - DNA, 122 bp, Homo sapiens
gatcagttctgggatgtgagggaaagaaaagagtcaaggataatctgaaaagttgtgacccgaacttctagagggacagagatgctcttaattgggatagggaagtctgcaggaggaacaga

SEQ ID NO: 345434 - DNA, 122 bp, Homo sapiens
tcccagccctgggccctgagccgggtccccttccgcaagcgcccaccgatccggaggctgcgggcagccgttatcccgtggtttaataaagctgccgcgcgctcaccaagtcctcttccgcg

SEQ ID NO: 345435 - DNA, 122 bp, Homo sapiens
aggttccagagtgaactgctggcctggaggcccaagtcagctctttttcaccagtgaggccgcccagccttctggaaaagagcattgtggtcctggagaaaaggcatggaggtctgggccct

SEQ ID NO: 345436 - DNA, 122 bp, Homo sapiens
ggtgactagcacccaccttggtctggtacagggcctcagcttcggccttgcttctctgagcgatatcctcatactgtgcacgaacttcagcaatgatgctgtccaggtccagggagcgatta

SEQ ID NO: 345437 - DNA, 122 bp, Homo sapiens
aggtgaggtgacagctggcagatagttagtgactcaccccggtggacgccgccccacagacgcgttttgaggggctgctaccaagggcacgtatcaagccaaagatgggaacccaggcttgg

SEQ ID NO: 345438 - DNA, 122 bp, Homo sapiens
agatcccaggacgacctgagactttgttagaaatgcaaatttgggaagctgacccggacccgctgaacccttaacacccggattgaagcccagcattttgttttaacaggccctccaaggta

SEQ ID NO: 345439 - DNA, 122 bp, Homo sapiens
cggggtgccgaactgccgcgggtgcacagggagagcatggggtgccctgggctctcctagcgggagagaaaagccacccacctggcgctgaatgtgcctctcgaccttttctatcatgtgct

SEQ ID NO: 345440 - DNA, 122 bp, Homo sapiens
ctccgccttcagcttgtccagcacccaggcatacttgaaggatcccttccccatctggagcgggtgagggtcacggctgagggcgggacccgggacccaggagtccctggtggtgcgagctg

SEQ ID NO: 345441 - DNA, 122 bp, Homo sapiens
aagaattgtctccttcttcctgccgaatggcccatgtctcatccacaccgagatggtgaacggctctttggggctgaccgacacgacgccatccgggatcctcactgcctgggtgccgttga

SEQ ID NO: 345442 - DNA, 122 bp, Homo sapiens
aggaggctttgtaaagtatcatgcctaacacacagaaggtgctcaacacttattacttatcgtttgataagctgtggtgggctaggtggatcttgtcactgacccctgcaggagagagacag

SEQ ID NO: 345443 - DNA, 122 bp, Homo sapiens
agctgcggccctcacccacctgcgagtagaaagcagccaagcgcaggcgtcgaatgggggcgaagaacaggggcggcacagcgatctcaattaggaaggtggccaccacgctgagcttgtgc

SEQ ID NO: 345444 - DNA, 122 bp, Homo sapiens
aaagctgggttgtaatgagctgcttttctgtagatgcctaaatgatgtgggttgagaaatcgtgatcttagcttttagtagtatatttttctgtttatgttaggtgagtcatcagtctgtct

SEQ ID NO: 345445 - DNA, 122 bp, Homo sapiens
tgggtgagaacacgctctcaacaacagcctcccttattggctgcagtatgccggcagccccgccctgtgtgcggtgtctaaggattccgtccccaagcaaggacaacatattatcttccccg

SEQ ID NO: 345446 - DNA, 122 bp, Homo sapiens
tcagttccgtcagtcgtggaggctgaggtgtgagttctcaactgtaaatgtagatctgcccgattctctgttcatcccagacacttctgcgtcctgggttttctaactgttatttggcttgt

SEQ ID NO: 345447 - DNA, 122 bp, Homo sapiens
gtgtgtgctgtgtgggtgtgtagtgagcgtgtgtgctgtgtgtgggtcgtgtgtagtgaacgtgtgtactctgcatatgttgtgtgtctctcccaagccccggacacactctgtcaactctg

SEQ ID NO: 345448 - DNA, 122 bp, Homo sapiens
ccacaagataatttagtgacttaggttttgtgaaactttaagctcatcgttcatgacatacgttggacccataagactcccctcaacaaaaaaaatacaaaaatctcctagtgccctaagtg

SEQ ID NO: 345449 - DNA, 122 bp, Homo sapiens
gaggaacaaaggatcatcaaggccggaaagggggaggctcagtacctgcaggaggaatgacgaagggaggaacaaaaggcccatggccaggaaaagagaaagcaagtaagaaaagtgtgtat

SEQ ID NO: 345450 - DNA, 122 bp, Homo sapiens
ataggcaccttctcagtggggtaggtaggttttcagcctaggggtcctgcccatcctgagcgcacacatgccagcccctctgcccctgcaggaggccgtggagtcctgcctgacccgggtca

SEQ ID NO: 345451 - DNA, 122 bp, Homo sapiens
taaaaagtggcccttaaacttgaacttgcagacagcctgcctcaaatggttgggctgcagcgggggcgtgtctccccacgtctcatacacttccaaggcctctcctactacctcccctacca

SEQ ID NO: 345452 - DNA, 122 bp, Homo sapiens
gcctttcacactccggttgcgggagaggccaagcgagaaaacccaaatctagatgaaaaccgggggaggggaggggagcacaggtaggcgatctggactgtggcatctctcccgccttccct

SEQ ID NO: 345453 - DNA, 122 bp, Homo sapiens
ctgcctcatcttactcctgattcttcagaaatttgaatgttaagcaaccagttaaaccaacgtcagtattaattttttcaagctgtcgaggggagcccttagaggggacaacttcttggagt

SEQ ID NO: 345454 - DNA, 122 bp, Homo sapiens
gatgtcacctgggccgacctgcccccgactcagcaccgaggctcctgtgtgcctcaaacccggctcccgccaggaattcgagtcagacaggtccctgggccctcgccatgccccaaactggc

SEQ ID NO: 345455 - DNA, 122 bp, Homo sapiens
tcagttgcaacatgagggcaatgagtccaggatttttagctcagcagggctgagatattgcgtcacagcgctcagtgtttgcaaatgtgctttgtcagctgtggagcctgaagcaaatgttc

SEQ ID NO: 345456 - DNA, 122 bp, Homo sapiens
ctctagaactttcccggaaacataagacacccagtgctcatcgttacacccttaggtctgcgcctgcgggtgggggccacgggctgtgccggagcgcatagccgcgggtgtgcccttaattt

SEQ ID NO: 345457 - DNA, 122 bp, Homo sapiens
agcctcagcaaggatgacttccggctatcgagtcgctgggtcgcacgcctagagagcctccgccgagcacaaaaattatttccggctcctcccggaagtgccgaagctggctactaagggaa

SEQ ID NO: 345458 - DNA, 122 bp, Homo sapiens
agagccgaaggtctcctcgctcctggctggggtcctgctcggtccccatcacgatggcgtcggccccctgcaggcttcctgtgtggacggagcgctcctgccagggctcccggggcagggcc

SEQ ID NO: 345459 - DNA, 122 bp, Homo sapiens
ggtcagaggtgaagctcgtggggagggcgagacccgggcgcaggtgctcacaggcgagggcggggttcaggttccagctgggctttgagttccggttcaggcttccatctgtggttccggtt

SEQ ID NO: 345460 - DNA, 122 bp, Homo sapiens
tccgttctcctctggaagctgttcagtccagcccaggctgtgtctcagccatccccagtccggagagctctgtggctaaacaaagatattaagtcattaaaatgcaataaccgaacttcaag

SEQ ID NO: 345461 - DNA, 122 bp, Homo sapiens
ccccgccccttccgaactggtggagcaggagctcccagggtgcagctgcagccaccttgccgcggctgtggacattttctgtgctctcagaggcccagcaaagtcccctgcccactgcaggc

SEQ ID NO: 345462 - DNA, 122 bp, Homo sapiens
ttttttctgaaggcttttttcctttgacattttctatttttctaactaaaagaccggctccgtgagtttaaaggattataatcttttgcatttgtatttttctgcatgcattgaagagcatt

SEQ ID NO: 345463 - DNA, 122 bp, Homo sapiens
gcggcggcggcggtgaaaagccccactcctccgcgtggaccgggatcctcaggggtgcggcgccaccccacgtgctgacgtatggcccagaagccgcctcatcgcaccgccccaccagcctg

SEQ ID NO: 345464 - DNA, 122 bp, Homo sapiens
gagttcccgagcagcctgtggacgtctccgtccgtcactgggtgctcagaaaacgctgcacgaatgagcactttccagacctgactttatgcaccagcttcaagtgtttcctcccacaaccg

SEQ ID NO: 345465 - DNA, 122 bp, Homo sapiens
atagccggacaattctgggaacccaggagctggggtctgtctggatccagctttccctcccgtcctccctctttcctcgagctcctgggtggttcaggccgcagcgctcggcgcgggcacct

SEQ ID NO: 345466 - DNA, 122 bp, Homo sapiens
agggcgcggcggcggcggcggcggccgaggactcgttcggctcctcgcacgactgctcttcgggcacctacttccccgagcagtcggacctggagccaccgctgttggagcttggctggccc

SEQ ID NO: 345467 - DNA, 122 bp, Homo sapiens
ctttcggtttcctctgaggccctatatagaggctccaggcccggactgtgcagaggtgcgcgcccacgccggcctcccggaccagcctgagctcggagcgcctctcgccctcaggtctctgc

SEQ ID NO: 345468 - DNA, 122 bp, Homo sapiens
ctgcccgccttgtgggtttctcggccagagtcggcggagcctagcgggacggtgcgactgcggggggcgcctccgagaaaagccagaggtgttgcggggaagctgctgggggacgctcgagc

SEQ ID NO: 345469 - DNA, 122 bp, Homo sapiens
accctgtgcccaggtaccagcggccaccgcctcccgcatcgttcctcaccacgccatctccgtgccctggctccatcgcgcccaccagcctgcccccccatggctccatcccacccacccgc

SEQ ID NO: 345470 - DNA, 122 bp, Homo sapiens
gtgtctttaaaaaaatgaatgaagccttgttgacccccaagtgtaaaagcttaagcttaccgcaaagatacaatttcagaaggatacagagaaaaggcaaaagtcactcataatagtgccac

SEQ ID NO: 345471 - DNA, 122 bp, Homo sapiens
gccggacccaacggagacgcttccctcacggggctccggcgtgaactggtttatctctaacgcaatcctcagcctcttgttttgcagagttctccgcgccacggcaacttgacgagctaggc

SEQ ID NO: 345472 - DNA, 122 bp, Homo sapiens
aaagtttcaggtagcatgaggatgtggtgaaaatccaggatgttaaatgactggagctttcgaaacacttccctatggaagtgtggaacctgcaccccaaatgccgaccagttctcagggtc

SEQ ID NO: 345473 - DNA, 122 bp, Homo sapiens
cggaagccgcagccgctcgagccacgcaccagtttcccctcggcgcgccgctccgagttccgtccacccaggaggctgccatgggccggccctgcctccgcccagtccgaggagggtcacgc

SEQ ID NO: 345474 - DNA, 122 bp, Homo sapiens
gcttgatgtaatagtgagctattgacagatctcagcagtcttgttatgaaagagcagtttcgctaagctcaagaaggaaagatgtttggctcacatgcataaaatgaggttaattagtagca

SEQ ID NO: 345475 - DNA, 122 bp, Homo sapiens
agaccaggcaggctgacgagcagggcgggcctggctcacgtgggcctgtaggcgggcccacgccaagtttcacttcccgccactgctgccagcgagagccgcgggagagtgtgcagccgagt

SEQ ID NO: 345476 - DNA, 122 bp, Homo sapiens
aatccactatggctagaaataaaggattaattcatatagttcctggcttatctgtcaagccgcagaaataaaactttggaagttctaaacatagcaggtgaaaaaaaattacttgaaggtat

SEQ ID NO: 345477 - DNA, 122 bp, Homo sapiens
ggaaggagttggcttcagacagaaaagacaagaaacccgggtgggaagatgggctttctgcgggtaggaatcgcacacttcgtcaactgtgacaaaagacagaattatcacacacacgctca

SEQ ID NO: 345478 - DNA, 122 bp, Homo sapiens
aaccggccctacattcttgctgtctctgcctccgagactcaggagccacttttcaagagccgagacaactcgttagagaggagccgtggcctgctctggccgaaaaccccttcctattaaca

SEQ ID NO: 345479 - DNA, 122 bp, Homo sapiens
aggaccggcccggctgttccaggaggactgcgaagggtagcatgggcccgtccgtggccacgcgtgggtcatggtcatccgacttgagcttcacacctttttctgagtcttgttttggaggt

SEQ ID NO: 345480 - DNA, 122 bp, Homo sapiens
aaacagcagctccattcctggccactcgtctcaccccagatgcgaggcgaagtgtgggagcggccccagaggccactgtggaaagggaactggttaccgagtgaggcgcaggggcctggcct

SEQ ID NO: 345481 - DNA, 122 bp, Homo sapiens
gttcatagttggaaaacttgtgcccttgtatagtgtccccatgggctcccactgcagcctcgagtgcccctgtcccacctggctccccctgctggtgtctagtgtttttttccctctcctgt

SEQ ID NO: 345482 - DNA, 122 bp, Homo sapiens
cctgccggtgcctgctgggctagatcagggaatgagcttgctctgggctgccagagtgcccgggctaggtgcagaaaagtcctgcagtgagtgacagtgagaggtgaagccagctgggcttc

SEQ ID NO: 345483 - DNA, 122 bp, Homo sapiens
tcttcttaatatgcatttgttgattactcctctttcaagtcctgcatgaatgcataatcacggcaaaccaacacataaaagacattggtctgttttcaaattgcaacattttttctttagcc

SEQ ID NO: 345484 - DNA, 122 bp, Homo sapiens
tcctgtgaaggctaggcccggggaggagagacgggccaagaccaggccgcagtccccagccgaccccgatttgaccactctaggttgaggcccagcctcagggccctcaaagggcgccagac

SEQ ID NO: 345485 - DNA, 122 bp, Homo sapiens
gcaccatgactgagtacaagatccaccagcgctggttcgccaagttgaagcgcaaggctgcggcaaagctgcgcgagatcgagcagagctggaagcacgagaaggcggtgcctggggaggtc

SEQ ID NO: 345486 - DNA, 122 bp, Homo sapiens
acacgcacacggacacacacatgcacacgcgcacacacacgtcacacgcacacagacacgcgcacacacaggcacacaagcaggagttcaaggctgcagtgagctgtgattgtgccactaca

SEQ ID NO: 345487 - DNA, 122 bp, Homo sapiens
ctgtacagaggcctggagacgcctccccctgctctatggtgcttggggtgtagggtagggcgcaggcctctggagctagagacgtggagcctcatcctcagggagcatctctgggaatcagc

SEQ ID NO: 345488 - DNA, 122 bp, Homo sapiens
gagtcagagtcaggcaggaagcaaatggcaacttcaccgcggtgactgaggaatgcttaacgaaggcgccgcccttgacaacggtgtgggttggtaaaaggaaacagccgggagccctgcag

SEQ ID NO: 345489 - DNA, 122 bp, Homo sapiens
ataatacacttggctgaaagtctagtggaatatagtagaaaaaatcctgaacttggagcccgaagacccaaatttgaatctggaccttttcatgatcatcagtgtggtttgggcaagttgct

SEQ ID NO: 345490 - DNA, 122 bp, Homo sapiens
gggtagggccataacccggagttgacggacaggaagggaagggctgactgccatcacttccgcgcaactcacctccgctcccgaacccacacagccgcaccgggcccgtccccagcctgtgg

SEQ ID NO: 345491 - DNA, 122 bp, Homo sapiens
tcatcctgtgatagattaccaacgcagccaatcaacaagcgatcttgggccgggcctacccgaaccccagccaattaagaggaagatgaagaattggggcggaggatggaaaacttgccacc

SEQ ID NO: 345492 - DNA, 122 bp, Homo sapiens
ctccctgtggggtgggtccggcatggaattaggtcaggagagcactggttgcataagggccgcgagcggcccgggtcgggcgcccctcccccgcgcgagcgggcgggattgtgtaaccgctg

SEQ ID NO: 345493 - DNA, 122 bp, Homo sapiens
tattaactgcaattccctcccgactgagcttcggtcatttgtctcgaggctctacgggggcgtttgatgagcagagaaacaaggagaaggggagaaaagcgtcgggttaatgagttgtagca

SEQ ID NO: 345494 - DNA, 122 bp, Homo sapiens
ccaccttcgggcctgtctttgaagaccagcccctcagtgtgctattcccagaggagtccacggaggagcaggtgttgctggcatgccgcgcccgggccagccctccagccacctatcggtaa

SEQ ID NO: 345495 - DNA, 122 bp, Homo sapiens
ttggggccccctgccttcaggaggcttgtagtttagaagggaagtaggcattaccatagacgactcctagaggacagtgctatgtaaaaatgtgtgtctataaatgtttatcatgcatgtat

SEQ ID NO: 345496 - DNA, 122 bp, Homo sapiens
aggcatccgcagcagtaaacaaagaaatcaagacacacgtgtgccccgggacacacatcccgtacagcaaggcactgtgtgcctcgaacagaaagaggcctgagctggtcctctgggtggcc

SEQ ID NO: 345497 - DNA, 122 bp, Homo sapiens
tcagtgtgcctccctacatcgttagtccgaggagagggtccctcggtgcccagcacagtgcgtggcacagtcggtgctcagggagcgatagctagatgaaaccgtacttttcgggatcctag

SEQ ID NO: 345498 - DNA, 122 bp, Homo sapiens
aggggctgcaggggtgtgacgtccaccctcccatccctctcgccgcagaaggcccctccccggctccccgtgactcctatccttgggctgcgaggctggaggtgacttgttcatcttattga

SEQ ID NO: 345499 - DNA, 122 bp, Homo sapiens
caagctgcagaactgtcttcaaatatttttggaagatacctactgcctctcaccagtttccgaatggtagccagaggtgggagggtcggatctggcatccattggatggtcactatttcccc

SEQ ID NO: 345500 - DNA, 122 bp, Homo sapiens
agggctgcggcgcctgctctgtccccatcccggtctctgtgtctcttgaactcactagggcgcatccaggtggggtgagctgggaatcacgtgctgaatgctaagggcctggatgatcacgg

SEQ ID NO: 345501 - DNA, 122 bp, Homo sapiens
caagtctcccagtctttgccaaaggactgtctatgagtattaaggcatgccttcaatgctcgggcaggcaatttacaactccatcttagcctctacttctttcttaaacagagtctcaaggt

SEQ ID NO: 345502 - DNA, 122 bp, Homo sapiens
gccttaaaagcccattttatttccgcagcgggcccgctggtgaaggcagaaggctcagtccgtccgcctccacctgctgccacggcagcgcgaaccgaccccacgcagcgatggccacgagc

SEQ ID NO: 345503 - DNA, 122 bp, Homo sapiens
gcagtggcctgtccctgagctctccgcaagtgcccggcagccccttctcctacccagccccgtcccctagcttgagcagtgggggcctccctcggacacctggccgggacttcagcttcaca

SEQ ID NO: 345504 - DNA, 122 bp, Homo sapiens
cttcttctttcccaccagcccacctgaggagctgaggggcgtggacccaatggcagggcacgtgggtttctggtctcagtgtaccaggggcccacaccctccctggccactgccttggctgc

SEQ ID NO: 345505 - DNA, 122 bp, Homo sapiens
gtgggggttgggaggctgcttgagcaagctagtcattgttcatgcaacacaaaacattcccgcccctaacgccagaatggagcttccagatccctttttttttttttccttgattgctaaat

SEQ ID NO: 345506 - DNA, 122 bp, Homo sapiens
atatcatgtgttaaataggctttgaagggctggccttgaaacctgacagctttgagccatcgtgtatccatgggagtaggcattctaggttccaaacagcacacttagaaatggactttgga

SEQ ID NO: 345507 - DNA, 122 bp, Homo sapiens
ccttcctaggcactgctgggggcggagccaggaaacggctcgccccgccattggctggggcgccggatttctttaaaaactccggcttccattggctcgtgcagtccctcctcgttctgccc

SEQ ID NO: 345508 - DNA, 122 bp, Homo sapiens
gcacttttagggttcgcccagcacacgggtcaaggccctctgggttcacctccacatgcacgaccccaccccgtgccgctccaggtacgccttccacagctcctcctggctggtggcgggga

SEQ ID NO: 345509 - DNA, 122 bp, Homo sapiens
gcggagaggaaaccaaggagtgaacggggatcgggcggcccaatgaggagggccggggggcggaggtgtgcaagttgggttgaagaaacaggaaatattcttaaaggtagagtgacggacag

SEQ ID NO: 345510 - DNA, 122 bp, Homo sapiens
ctgtttggcttctagggacaacgcccaggccctgggatttgaagactccaccttttctttcgtgtgtatatgtgctctgtcaaaatgtgtatcacatgaagttgatcgttgtgaccattttc

SEQ ID NO: 345511 - DNA, 122 bp, Homo sapiens
agccctgcactgggcgtgagcagggctcactcagcagggcccactcagcaagtgctaggtcgtcaacgacctgtggaataaatagccagccctcccaagcagctgcctgcctccctcctcaa

SEQ ID NO: 345512 - DNA, 122 bp, Homo sapiens
cgctcggccacgccctccaggttccacctcccaccacgtgccaagccacgtccccaagcccgcgccaccaggcagcacctgcacacccgcgggccacgggccctagcacacccgtcacctgc

SEQ ID NO: 345513 - DNA, 122 bp, Homo sapiens
gagtttagtcaaatggtcggaataactagcgacaatgcatacaaaggaatattcaacacgcgacctgggtgatgtgggctgttgaagtgactggactcaggtgatgcggctgcgggaggtgg

SEQ ID NO: 345514 - DNA, 122 bp, Homo sapiens
ccctgcccacggatacctggggccccatgccccgaaggaatggtgccttctgccctcccccgccccccaacatccgccacctcaccgaagcgcccggcaccttagcctcctctccaggaaag

SEQ ID NO: 345515 - DNA, 122 bp, Homo sapiens
cagtgggaatgtgaccatttaaaataatgagaattcattatcaagccctcttgcccctcccgtttgctggtaatgcaattcagtaggcaatttgtaggaacttttcaaaccaatttagttgc

SEQ ID NO: 345516 - DNA, 122 bp, Homo sapiens
ggagatgtggttacctagcaacaggctgcctggttctgtggccggcacgtggagtccaggcgctgccctctgccccctgccccctgcccccattggtcctccccttgctggggtcctgctct

SEQ ID NO: 345517 - DNA, 122 bp, Homo sapiens
caaggctggagtccttttggcgcccctggcggaggcggttagcagaggtgtctcccccgccggtggtggggctaaacgctactggcttcacggccacacctccgctgcctccgtctggttca

SEQ ID NO: 345518 - DNA, 122 bp, Homo sapiens
tgaggcggcacgcccgttactcctcacgcaggaagcgcagcaatgaaacaaaacgccgtgcgtttaacgcttcggtttcttgattttgagatgaccgcctgacagtcacatgctgtaaaaat

SEQ ID NO: 345519 - DNA, 122 bp, Homo sapiens
cagacatccttcaactggtgaccctccaaagtcagacatccttcaactggtcccctgctgcgagtgcatgccatgtgagtcaagagtggacatcttagtaaccatcaggctacacaaggtga

SEQ ID NO: 345520 - DNA, 122 bp, Homo sapiens
ttacagatgaggctgagaggtttcccgacctgcccaaagacacaaagcaagtagaatgtacgagtgaagactcgaacacaggtccgtgaatcaatctctgcgtggggatgggagcggttcca

SEQ ID NO: 345521 - DNA, 122 bp, Homo sapiens
ggacatcccgctccaggtccctctgtgcaaggatgtcagacccttccgcgttccctgcagcgtcccttccaaacaggtggtatccgtgttccaagcagcccaggcccaacctcggagcctgt

SEQ ID NO: 345522 - DNA, 122 bp, Homo sapiens
cagcaggctgcttgcatggcgggcagagctgggactgccatccttggctgtgctgcctttcgccacccatcttaattagacactgtcctagctaagacgcagtctcctttctgatgaatggg

SEQ ID NO: 345523 - DNA, 122 bp, Homo sapiens
gagtcgctgaactacaattcccatgatgcaccgcgagcctggcgctcccgcgcccctccccgtccccgcacgggagccagcgcccgaggaaccccgcagcccactgccctggcgtctccggc

SEQ ID NO: 345524 - DNA, 122 bp, Homo sapiens
tgtgacctggtcttcaacgggagaccagtgcgacctcatggcacctttgccaggaatcagcgattcccctgcagtcaccatttgatttattgctttctcgctcattctttctcataaagtta

SEQ ID NO: 345525 - DNA, 122 bp, Homo sapiens
tgtgcccagtaaacatggtcttactcattattgaaatactagcattcttctataatggttcgtacacagctgctgcccagagcactgaataacacatactaccaggtgtcaaacccagattt

SEQ ID NO: 345526 - DNA, 122 bp, Homo sapiens
agggaaaaaaaacagtcaaaggtgtggtttttgtctaaatctagcttttgtctgaccccacggggaactctggacaacagtaacaccacagagttatcttaactggagacaagagggccaga

SEQ ID NO: 345527 - DNA, 122 bp, Homo sapiens
tgggactcaaatctgaatctagagggaaaggggagggggcgtgccccagcctgtaggagacgaatcatcaccaccacagctccgactgtagacggtcccaccgtgtaaggaccccaggaaat

SEQ ID NO: 345528 - DNA, 122 bp, Homo sapiens
cgccccgcagagccacactagatggaagcaaggcgagtagccagggcagagcccaccccccgcacctccctccccacagcctgtgtagacacacaggccggcagagtcaccggggcagcagg

SEQ ID NO: 345529 - DNA, 122 bp, Homo sapiens
cctccatccccctgcaagaactcccggctccaatcagggaagtctccatgccatcctcaacgcgcagcagattcattcttccttcgtgcctttgctcatgctgttcccctccacctccccac

SEQ ID NO: 345530 - DNA, 122 bp, Homo sapiens
gcacttgttttctcttccagaaggataattccttttcttgggccaggcaggaagggatggcggcaccatgatcagtctgggggaatccattcaggtcacccttcagcttttagtagccccta

SEQ ID NO: 345531 - DNA, 122 bp, Homo sapiens
taccccctctgttatatggttcataacatacaagaggggagatgatggtactttcaatatcgcagtgggtgtaccccctctgtggtatgattcttgtagtataaaatgggggagaagactta

SEQ ID NO: 345532 - DNA, 122 bp, Homo sapiens
ggccagaagcaaagccgggcgtttctcccatgggaggtgctctgggtcctacggacagcccgctcccaggccagggggaggagctttctgctggcttcctagctccagtggtgcccgtgtaa

SEQ ID NO: 345533 - DNA, 122 bp, Homo sapiens
accaaacaaacctcaagcggttctgttggatcatgtcccacacagctctcccggaaccgtcggccttggccaaggtcaacacaggtgccggtcagtagtaacagctccctgtcatccaggac

SEQ ID NO: 345534 - DNA, 122 bp, Homo sapiens
ggaaagaaagtgatgttaggccctgactaaatattcttccttcattctgcttactactgacggcttgttttctttgccttttaccacatgagacacaagatatgagacggagcagagaaaaa

SEQ ID NO: 345535 - DNA, 122 bp, Homo sapiens
cccctaagtccaaagaggtgcctcagaggcctatttcctctgctggaccagtaaaccccacgcctgggcagatggcaacaaggatcatattattattattaatggcatccatctatagcact

SEQ ID NO: 345536 - DNA, 122 bp, Homo sapiens
gatgtgcctgagcctggaacaggattggtctcatgggacagagggacctgaagttcacggcgagaggcccaaggagaagcacttgtcaggactctcgggattctggaagggatggctgatct

SEQ ID NO: 345537 - DNA, 122 bp, Homo sapiens
ggcctgcgagaaaggtgtgacccgggagggttgtggggtcccgggaccttggccgggtgtcggtgacgggactgcctgaggccagaagataggttctaggtctcagtccacctggtgctgga

SEQ ID NO: 345538 - DNA, 122 bp, Homo sapiens
ggacaataaggccgactacaaacatgaccacatcatcaaggaatggtaccccacattcatcgacgcccggggggacctgggcggctccgccttctccacgtgcttcctcttttccaccttcc

SEQ ID NO: 345539 - DNA, 122 bp, Homo sapiens
ggaaacagcaaaggaactcacacctttcttctaaaggtatggccgggaagtgccccacatcgctttcacccaaacctcattgaccagaacttggttagctactacacttagctgcaaaggag

SEQ ID NO: 345540 - DNA, 122 bp, Homo sapiens
tggggtgttggtcccagctgccccatccctgcacgcggatgctgcaattacccaagagcacgaaacctggcttcccacctgactgagtcagctgagaacaaaaacacatctccaccgccaca

SEQ ID NO: 345541 - DNA, 122 bp, Homo sapiens
cagccgcctgggcgcgctaagagatcgtgggcagacctagcccttagggcagcctaagcgcgcttcactaaagaaaaaagactgttggtatattaaagaagtgtgtgtgtgagagagaaaga

SEQ ID NO: 345542 - DNA, 122 bp, Homo sapiens
atggtaagaatatgtttaattttataagaaaccactgatttcgatatactctggattcttcgggggatatgtatacacattcagaagtggaattgatggatcctatgataattccattttta

SEQ ID NO: 345543 - DNA, 122 bp, Homo sapiens
gggaatgctctgttttggcaaccagagggcccccgggtaaggggggcccgcaggacgccgcgtcatttgcatggcaacctcctccctccccgagctgcgcgctgctctgcggcaggcgggca

SEQ ID NO: 345544 - DNA, 122 bp, Homo sapiens
ggaaggccttggccgtttaaagtcttatttctgaaggtaagttacggctttgcctggtcgcgatgacagaaaacttgcagatcctttatccggggatggggtcgatgcctctagaaagagct

SEQ ID NO: 345545 - DNA, 122 bp, Homo sapiens
aaatagggtgaataccgtctaccccaattgcaatcagattagtttcctttattttgaaaacgattagaactagtagaggagttagatgtggcccactagggaacaaattttcatctccaagc

SEQ ID NO: 345546 - DNA, 122 bp, Homo sapiens
aattgtgcagtcctcctaaagcaccccctttgccgtggtgagatccgcagtgccgactctcgtcctggcactaagatagataagtcctaagagtgaaatcagtagacatgtgtctttttttt

SEQ ID NO: 345547 - DNA, 122 bp, Homo sapiens
gggcatagcgcaaggattgcaggtccgggctcttctccaggaaggtcttcttgaggcccacgccacccgcgtggaaatattgctggggaggacagggtggggagaggtgaggatggtgggaa

SEQ ID NO: 345548 - DNA, 122 bp, Homo sapiens
atttctcgctcaaatgaacaagcacgggcttgctactgggattccttctgtccctggacacgtctttctacccaacattttgtttttcttgtttccccacatagggagataaggttgaggga

SEQ ID NO: 345549 - DNA, 122 bp, Homo sapiens
atcacagctgtccgtccgcccgagcagattcttgtccaggtgtttttccacttgcagctccgcgctgggcagcttcaggcctgttacagcgacggtgcggcttccctgcctgggttgttggg

SEQ ID NO: 345550 - DNA, 122 bp, Homo sapiens
tgtctggagtttattccttctgatgttcggatgcgttcagtttcttccttctggtgggttcgtagtctcgctggctcaagagtgaagctgcagaccttcgcagtgactgttacagctcttaa

SEQ ID NO: 345551 - DNA, 122 bp, Homo sapiens
cgccccctgggtgtaaggccgcgctgtggagcaccctcgggggctccatgcaacagtcagcgccgactggccagtggggcatcagggcagactccagtccgcggagacggacggtgcgcacc

SEQ ID NO: 345552 - DNA, 122 bp, Homo sapiens
ggcgtacctgcggagcagttggaacgtgctggacgggctgttggtgctcatctccgtcatcgacattctggtgtccatggtctctgacagcggcaccaagatcctgggcatgctgagggtgc

SEQ ID NO: 345553 - DNA, 122 bp, Homo sapiens
gggctgctccaactggtcctgcaggctgctcgcggatgccagcgcgggatgccagcgcggcgccccagcgccttagcgcgcaattgttctggcagcctcgcgccgcctctcccccaaccccc

SEQ ID NO: 345554 - DNA, 122 bp, Homo sapiens
gatactcctttgaagttattcttgttaatttgcccccatttgtttgtagccatatatccacgtacccatgaaagtcactatgtgtgccctgaaccttgatcctcagccctccaggtcatgca

SEQ ID NO: 345555 - DNA, 122 bp, Homo sapiens
tccctccccgtctggttctgttagtgtaaagccaccagactgaccaggccgacggcggggcgcggaagtgggtgcgaaggcagccagcggccggccgaccagggctctccccaccgactgcc

SEQ ID NO: 345556 - DNA, 122 bp, Homo sapiens
taattgctcaagtaaatggagaatttcagcgttgacaagtattagtaaagagaagttcagcgtgctacaaccatgaataagcaagggacccaatctagtcttggggtcagggaagtgatcct

SEQ ID NO: 345557 - DNA, 122 bp, Homo sapiens
gtttggacgggaggctggagtggttccttcccggctgcggggtcggaggatgcagagattcgaaagaaggagaaacacagagactgtcaaatgaaaggagattctgtcttcggaatcgaccc

SEQ ID NO: 345558 - DNA, 122 bp, Homo sapiens
ggcggccctggggaccttgacgggacagctcagcagcaggggatgggggctcggcggccgcggagatgtaacacctccacctcgggcgaagacctcatagcctgcgggagatgggagtccgg

SEQ ID NO: 345559 - DNA, 122 bp, Homo sapiens
gggcaaagaatcaatttaactgtgactgaccgacgggcttgactgtattaattctgctaccgaaaaaaaaaaaaaaaaaaaagcaatgagccgcaagccttggactcgcagagctgccggtg

SEQ ID NO: 345560 - DNA, 122 bp, Homo sapiens
attttgggattagaaaaggagagtgaattagatggtatctacgtcgtaaagggtcaggcacgtgagcagtgctcagtacataggacctattattaaaatatgatgaaaatactggttatggt

SEQ ID NO: 345561 - DNA, 122 bp, Homo sapiens
acactcccagctcgagccgtccagctgcggtgggatctgagtatatctagggcgggtgggcgggtagcagtgctgggcctgtgtcttgagcctggagggagtctgctcctgccgccctctgc

SEQ ID NO: 345562 - DNA, 122 bp, Homo sapiens
gagaggcgagacaaagagggcaaaaatctttattgagctcttgggcgaggttcactggcccgcagggggagggccagggaagtcgcgctgtgccaaaggtgcagcgcgcttttatggatgct

SEQ ID NO: 345563 - DNA, 122 bp, Homo sapiens
ggcccagggatgggctctgaatggctggcgggtgggagggcactgcccaccacatagcggcggctgctggccggagagagggtctggggttgaggagagggcagcccagctgtttctggggt

SEQ ID NO: 345564 - DNA, 122 bp, Homo sapiens
ctggctcctccccgggccccggccccgccccagtcccaagccgcaccccttccccgtccccgcagggctaacgtcagcctccaatcctggctccgccctggaccccggcctcgccccgcccc

SEQ ID NO: 345565 - DNA, 122 bp, Homo sapiens
gtggccaccattgccaccaccccccagcagacagaaaggctaaaatgtcaaaagatgcgtcggttgcctctgacaaaagtgcagatcagatctgaaaggggataaatatgatagggggccca

SEQ ID NO: 345566 - DNA, 122 bp, Homo sapiens
ttttttttttttgtttagagcagacagcacctctctctcccagagtcccaaggcagagctcggtcatttcctctgagggcctttgatctgcatcctcccccaatcccgcctagccccatctg

SEQ ID NO: 345567 - DNA, 122 bp, Homo sapiens
attgtgcatcttttttctttccttgcagtctgagattgcctttgccaagttttttctcaccgaacctgaaagcccttctctcattttcccgttccctgcctccagccccattgaatccctgc

SEQ ID NO: 345568 - DNA, 122 bp, Homo sapiens
ttaggaggtggcgttagcaccgaggcctgaaggctaaagagcggggtgtggagaaccgagcgcctgccgtccgctggaccggacaggcctgcacagtgttcctaggtctagaaagaaggacg

SEQ ID NO: 345569 - DNA, 122 bp, Homo sapiens
ctcgtggtagatgagtggggaggccgctcagtctctctgcccctttgcacatgctgcacccgtttagtttgacgtcgtggagagctcctccaggcacgggctgtgtgaaagggtttaaaagt

SEQ ID NO: 345570 - DNA, 122 bp, Homo sapiens
atgttcagtcatctgcagagaatagagccactgtctttttctttcctaacctagggtagacgctttatttcactgcaagttccctgtgacattttgcactctcttgatttaatgcaccaaag

SEQ ID NO: 345571 - DNA, 122 bp, Homo sapiens
catgctcgttaagaatcatcaccactccctaatctcaagtacccagggacacaaacactgcggaaggccacagggtcctctgcctagaaaaaccagagacctttgttcacttgtttatctgc

SEQ ID NO: 345572 - DNA, 122 bp, Homo sapiens
agggggtccgaacgaagggcaggctgtgcaggaggccatgaccaaggcggtgggtctgcccgcagctgcggcagcgcggcccagaagatgcgttgtgtttccggtagttttctgtgaggatt

SEQ ID NO: 345573 - DNA, 122 bp, Homo sapiens
gctgtcgcagacctctgaacgttagtaacgcaacatgtgtttctccgcgactacagacctcgggagaggagcggtgggcaacgtgtctgtgctcggtcgaatgcgcacactccagttaggcc

SEQ ID NO: 345574 - DNA, 122 bp, Homo sapiens
gcacagggaggggcagggtgttggctccgagtgagagatttgcttaagccagatggtggccgatgaaggaggcccaggcaaccccttctggtcttccagacagcaccacaggtttgtgtggg

SEQ ID NO: 345575 - DNA, 122 bp, Homo sapiens
gcggcgggagcgcgaacggctggagctgggtgaggggcagtgccggcgcgggggcgggagcgggggcggagaggggcgcttctggaggggcggggtctacgcgaggggcggcccccctgacg

SEQ ID NO: 345576 - DNA, 122 bp, Homo sapiens
ggtccggggcgcgtgaagtgctggggatgtggctctggggacttggaggctcagcggctccggggctccggggttccggggctcgggagcgagtagtgagtgactgggcctgctgttcccac

SEQ ID NO: 345577 - DNA, 122 bp, Homo sapiens
ggacgccgcccagggcatagcacatgaggatgccgtccagggcatcgctaacgaggacgccgtccacggcgtcgctaaagaggtcgccgcccacggcgtcgctaacgaggatgccgcccacg

SEQ ID NO: 345578 - DNA, 122 bp, Homo sapiens
gacgtgccaatcaggctgcggttgccacagcaacagtttggcgcgaaggctgggggctgacgtcagggagtggccgtgagggaccccaaagccaggtctggaaaaggggggtgggttgggtg

SEQ ID NO: 345579 - DNA, 122 bp, Homo sapiens
cgctacttaaaagctgtaagataacgaattgatcagcaggtggcagtgtccgcggaggctcgcatcccgtcggccctggctctcaaggcggaaacacgcaccatggtgactttccggcctgc

SEQ ID NO: 345580 - DNA, 122 bp, Homo sapiens
acttcccagagggtcacggagggagtgggtggccaaggcaggaagaacagaagccaaccccgcccacagtgggaacccaggcgttaggtagagtcctcacgccggtgtaaactgactagcaa

SEQ ID NO: 345581 - DNA, 122 bp, Homo sapiens
aaacatccgactgaaagcccatctgtggcttcacagcttccagtcgaggatgtttacagtcgctcactgtcaacagcaatataccttctttagccttctgttgggttaacctgaagaagtaa

SEQ ID NO: 345582 - DNA, 122 bp, Homo sapiens
gtgtcaacactgtgggctcttatcactgtacctgcgagcccccactggtgctggatggctcgcagcgccgctgcgtctccaacgagagccagagcctcggtaaccccgcccacgccatccag

SEQ ID NO: 345583 - DNA, 122 bp, Homo sapiens
aggtataggtatgtggttacatttgaaagataatgaaaggctggaaatggcagttgaactcgggattccagaagtgagatgagcatccaagattactttcaggtatctgacttggcctgcca

SEQ ID NO: 345584 - DNA, 122 bp, Homo sapiens
aaatttgagattgtaggccaactgtattttcaagcttctgaacttaggcaaaatattcatcgcaaagtctctagcgtcatatttttctcacccaaattacgtttccacgagattatttatat

SEQ ID NO: 345585 - DNA, 122 bp, Homo sapiens
tagagaggttgagtaacttgcccaaggttgcacagccagcccaggcggaagtgggacacccgctgattgacgggtggggagggcggagcctgcagtccgccctgccccctcacctgagcgct

SEQ ID NO: 345586 - DNA, 122 bp, Homo sapiens
ccaaccccctaggtaggtgccagggccaccacaggaacctgactcgcaggagtcgtcctccgtctctacgcgaagcgccccctcgaggtgggcagggggtggcggcggcgacggtggcggag

SEQ ID NO: 345587 - DNA, 122 bp, Homo sapiens
atgaatgtggtaatactattaagtgtccggctcgatgaattcctccatgtgtacacagcccggaacgaccaccaggatcaagacgcaatgtttccagctttccataggttccctcgtgcccc

SEQ ID NO: 345588 - DNA, 122 bp, Homo sapiens
ggaagcttcctgtctgcaagagtcctgcagacagcaggcctgagacattgcacagagccacggaggagcggctgaagatgactgacaggaaggagtttagggatggggagtcaggaaagtcc

SEQ ID NO: 345589 - DNA, 122 bp, Homo sapiens
cacgggagctcgccgaagctgtcaagtccaactacagccccaccatcgtgaaagagtagccggcttcagtgcctgccttggggtgaggaagacacctctgccccagtggattagcaagtgtg

SEQ ID NO: 345590 - DNA, 122 bp, Homo sapiens
gccgcggcgcttctggtcccggagacttggggctcccgggcttctgagcggctcgggttccgcgctgccggcagggcttgggggcgccttagagccgaaccccgttttttcaggaaagggcg

SEQ ID NO: 345591 - DNA, 122 bp, Homo sapiens
agcgtggaggggtctccggtgttgctggagggcagctggagcctgcggagagcctcggcgcgctcctccctctcccccaccctccccccaccccgggcggggctccgcgtggggcggtggac

SEQ ID NO: 345592 - DNA, 122 bp, Homo sapiens
agggcaggcgtggtaaaaggtacaggtttgggaaggtcgctcggttccttccaatccaaacgagaggcttctgattgtttattctcacaccagagccgtgaccgagacccagaggtccgctt

SEQ ID NO: 345593 - DNA, 122 bp, Homo sapiens
gattctgggtcccgtgttgatacggggtggttcccctcctgcggtggagttagtgtctctcggggggtagggagctgaggaaactgctctatgccccagcccacccccaagggactcgccac

SEQ ID NO: 345594 - DNA, 122 bp, Homo sapiens
gcacttggccctggagagtcctgcaggattgcaggaggaaggcagggcacgacaagggggcgtctgcgccccgctgacctcagtggggagggcctccagttccttgcctcacctctggttcc

SEQ ID NO: 345595 - DNA, 122 bp, Homo sapiens
aacttagggcagtactccctgttctggggtgaccattcggtaactgatgttccagcatcccgagccctcagcgccgtcagctggatgatctcacagggaaggcgcagcacatcgttactata

SEQ ID NO: 345596 - DNA, 122 bp, Homo sapiens
gtgctcgtggtagagcttggaggcctcctgcgagggcagcatggtgcccggaggcggggccggcggcggcggcggctggcgggggccgccggcccgggacggagcgccgggctgccgggcgg

SEQ ID NO: 345597 - DNA, 122 bp, Homo sapiens
tacatggtagagccaagatctcagtccaggtctttctgagacaaaacacagcttcttatgcgtgaaatccacaaataagaacacaatgacctacatacaacacaaactgtacttccaattaa

SEQ ID NO: 345598 - DNA, 122 bp, Homo sapiens
agctgcgcgatgcggtggcggcagcgcttctggaaacctccaaccacgtggggtgaggggcgggggttggtcactgcggcccagaggcccgctcttccgctgaggcgccgcccgcgccgcct

SEQ ID NO: 345599 - DNA, 122 bp, Homo sapiens
gactgcgcccaggggcgaagagaccgcggaatggccgaggcaggaggccggccagggcaccggtccccgtcaggtgcccccgtgcccgggctgtatgggaggggaagggccacgggctccgc

SEQ ID NO: 345600 - DNA, 122 bp, Homo sapiens
agtaaatgccacttgtcttcagtcctagtgcttgagaatccatcctctgcttttccctgccgattccttgtcctttttctcctcaaagaacagagaaagaagcagaagcagagaaaatggtg

SEQ ID NO: 345601 - DNA, 122 bp, Homo sapiens
ggacagggccgagggatggaaggaaaacaaacccttgcagttcaacccacagggcggaggcggcagcgtgagaagcttcctgaatacaggactcgatgcctcgaggagaggagcgtggagca

SEQ ID NO: 345602 - DNA, 122 bp, Homo sapiens
acttgcatcctttgtgtccgtatgcaccccaggggcatgttcgcccaccctggagactaccgttttaagagatgggccacaaagggggcatgtgagccacagtctcctcttttccagggttc

SEQ ID NO: 345603 - DNA, 122 bp, Homo sapiens
gaccaaagaggttggacggggccccgggtactaggctgggtgggggttgggcgcctgggccggtcgcagttgtctgggggccctggggctctctgcgtcgagagcgctcgaagacccgggat

SEQ ID NO: 345604 - DNA, 122 bp, Homo sapiens
actccccgctcccattggtcacgaggatgaccaatgagcgctcggatcgaggtcctaccccgggcctgactcgaaagctcctgccaaaactttgggagtttttagagacgagtttttttttt

SEQ ID NO: 345605 - DNA, 122 bp, Homo sapiens
ggcgctctcggaagtggcggctgggtgcgcccggcctgcgcgccgttttgttccgctccgcggaaggcgtgtcccgggccacgccaaccagtgggctttgcacactgcaccactccagggct

SEQ ID NO: 345606 - DNA, 122 bp, Homo sapiens
gggacagagaggaggcgggtgaggaacaaacatcgcttgctgccttaaaacgcacagggacgctccccaagtcgtccaaaaagtctagcctagtccctctaccgcccacgcggcgccactgc

SEQ ID NO: 345607 - DNA, 122 bp, Homo sapiens
cgccccgcctcgggagaggcgggccgggcggggctgggagtatttgaggctcggagccaccgccccgccggcgcccgcagcacctcctcgccagcagccgtccggagccagccaacgagcgg

SEQ ID NO: 345608 - DNA, 122 bp, Homo sapiens
gtgaggcgacgctgagcgttcccccagtctccttcgtgactttagggggagaccccagaccggactgagttgagggaatggaaacgctgacggactctaactaggacaacgcgcaccccccc

SEQ ID NO: 345609 - DNA, 122 bp, Homo sapiens
gctcgctatggcgtcgctcaccgtgaaggcctaccttctgggcaaggaggacgcggcgcgcgagattcgccgcttcagcttctgctgcagccccgagcctgaggcggaagccgaggctgcgg

SEQ ID NO: 345610 - DNA, 122 bp, Homo sapiens
ccctccagtccctcacccctcccagcttccagcagcccaatcaccgtctataaatcccgtcgctggcatccggggtctcttaggcaacaatgtgtgggctcctgattggccgcgagatccag

SEQ ID NO: 345611 - DNA, 122 bp, Homo sapiens
ctccaccatgaacgtcgcgctgcaggagctgggagctggcagcaacgtgagtgggggccccgggctccacgggaggggactgggtggagggggacgaggcagaggggtcggccgcggagggg

SEQ ID NO: 345612 - DNA, 122 bp, Homo sapiens
ggagataaggaagtaaccaccacaggctgctccacagtagatacaacacattcctgaggacggctcaaaagacgtcactgcagaatgaatcaaccacgtctcagcaagccagggttgctccc

SEQ ID NO: 345613 - DNA, 122 bp, Homo sapiens
aaaaagagaagtgcatgaagacacttctacagcttctactctctactggattgtgcttttcgcaaagtttcctagcaagttagagtagtgagctctccagctgtgcttctgctccttcacat

SEQ ID NO: 345614 - DNA, 122 bp, Homo sapiens
tcgaccgtcatctgaaggaaaaaatgcatcctggtgaacacggccgcgtacgtggctgagcggcagacaaacagttaaaacagaggagtggggtaagtgatgacctaacccagccccgctgc

SEQ ID NO: 345615 - DNA, 122 bp, Homo sapiens
cagctgtcacccagccgcgagggagggcagcggggccgaagggagacctgaggtgagaagcggacgcacacgcacccctcgccctctgcgagctgtctgtcctcgctttgcttcactcgcgc

SEQ ID NO: 345616 - DNA, 122 bp, Homo sapiens
gtctcaggcttctcaggtgcggctgtgcgagcagcggcctctgcacgcaccgtggctctccgcctgtcagtgcagaaccaactctagagactgtgatgctgatgttgatatttatcgacggg

SEQ ID NO: 345617 - DNA, 122 bp, Homo sapiens
ctttgcggttccaaatgtgctgtgtaaccatactccgttttctcatctggaagatgggatcgtgagagtatatgcctcatagacctttgctgtaagcaggaaatgggccaaaggctgtaagc

SEQ ID NO: 345618 - DNA, 122 bp, Homo sapiens
gtagcttaaaacagtcatttattgttatgttccatttttctgggggttgacgaagctgagcgttactcacttttgtgtccttcaaatggttgcagaaatatgacagatgaggctggaattct

SEQ ID NO: 345619 - DNA, 122 bp, Homo sapiens
agatgagctcctgaacatttgcctgagtcttttcttctgtgttagctttaaggaccacaacgtttcatctctctggcttcaggaaggtagcagcttctgtgcattgttttaggaaatggtta

SEQ ID NO: 345620 - DNA, 122 bp, Homo sapiens
ataactttgggataaaattagccgacagtttgtggactctccagcatgcgcctgtttgctcggtgctgttctctcgataaatcacaacaaagcttccagagggagaggaaggatggacggca

SEQ ID NO: 345621 - DNA, 122 bp, Homo sapiens
cgctgaaggggaggcctccgcaccactgggcgacggggccagatgaatcccgcaggaatgcggattgccacggattaacacttaccgagaaggagatggctgccacctccgtaggcagcgcc

SEQ ID NO: 345622 - DNA, 122 bp, Homo sapiens
tggagccgctggaggttgaaggggatgccgaccatcaggtccagctcctctttgagctcccgcacggtcatgtcgccgcggcagtttgccactcggaacatctcccccgtctcctccagccg

SEQ ID NO: 345623 - DNA, 122 bp, Homo sapiens
atctctcagcctcaggacaccgccctctccacagtgcagcctgcgggcacagagggcgctcggctggggaagggcagtggctctgcccccaaagcggcctccccaggacacaccactgcctg

SEQ ID NO: 345624 - DNA, 122 bp, Homo sapiens
gagctatgaaccccgaggccccgcaggacgtccagcccggtgaggaccagggcacaggggcgggaagtggcagctgctccaactgagggcgctctggggaacacactgccattcgccaggcc

SEQ ID NO: 345625 - DNA, 122 bp, Homo sapiens
aaatgtggtaaaaactgcactgtgtaagcagcaatagcaacatgccctgtggtgcagggccggagagcctgcacaaaatttattctcacaacaaaggtggtttctaatctttaggtacaaaa

SEQ ID NO: 345626 - DNA, 122 bp, Homo sapiens
tatgaaactgacttatattttactaagtgtatctttcattagaagtaatcatgttctaatcgtggactttgggatagcttaacttcagcattccaggaagaaaggggtttgttttcacaata

SEQ ID NO: 345627 - DNA, 122 bp, Homo sapiens
gtgctggcactgctgggggatgggcacggccaaggaggtgccgaggcctttctggggagccgcagtgccccctggaggcccaaaggctggtctggactcctccctgcccacctgcacaggcc

SEQ ID NO: 345628 - DNA, 122 bp, Homo sapiens
acacttacagtcatatttctgtgcatatgcagtgcatgtctttgtcttcccaatagcagccgagaatattctggtcctttctgctccactccactccttattagtttcttttaaaatcaata

SEQ ID NO: 345629 - DNA, 122 bp, Homo sapiens
tccgctacctggtggtttctctggggtctgtggggggccggggccgctggggaccgggggcgcctcctgcagccactggagcacagggatccccggcagggtctgcgccaggagaaagggag

SEQ ID NO: 345630 - DNA, 122 bp, Homo sapiens
agaacttcagacattaggaaccagacgaggcgcgacatccctgcctccctgccaccctcccgccctccttgaagccctcccacgatgccctctcagaggaggccctttcaggtccccttggc

SEQ ID NO: 345631 - DNA, 122 bp, Homo sapiens
gggagccgagggagcggcagccgcgaccgcgggcaccgcgggagccccagcggcagcagccgccgccgagatgtcccggcgaaagcaaagcaaaccccggcagatcaaacgtaagtttgcgc

SEQ ID NO: 345632 - DNA, 122 bp, Homo sapiens
aatttgagtccttggagtggctccagggatgtgttcacggaccagaatcccacatttcctcgggggcatgctcataggtaggtccaggccttggcacaacagtcatttctagcctcttgagc

SEQ ID NO: 345633 - DNA, 122 bp, Homo sapiens
ggccatctggaaattcatgagacaagattaaaccgagtccctgcaagttggcatgcgctacggggtctgtgccttctgcatgtgcaatttatatttgcgagttgtgcattataaacacacaa

SEQ ID NO: 345634 - DNA, 122 bp, Homo sapiens
tctccggtgccggccgcggggccttgccggcaacggtcggtaacgggcagatcccaggagcgaagggccctcagagactaccccaccaacgcactccgactccgggggggcggcagggagcg

SEQ ID NO: 345635 - DNA, 122 bp, Homo sapiens
cagagagaactccacgtagcagtgtcccagcccctctgctctccgggactgtgccgggggcgacagccctagagcacgtcagctgagcagagaagttgtttcttggttatttggagagctcc

SEQ ID NO: 345636 - DNA, 122 bp, Homo sapiens
cattgaagaggaaggctttctaaagctttggcaaggagtgacacccgccatttacagacacgtaggtatttatcttgattctagctggtaagtttgttatgagttctgtgtttgtctcctgt

SEQ ID NO: 345637 - DNA, 122 bp, Homo sapiens
cttctggcttgcccagccctgtgccttcctcccactcatattcaggttcctatctaaggacgggtctgctttagagctaaattgctgagtggctctgcttcttaaaagaataaaaaaataca

SEQ ID NO: 345638 - DNA, 122 bp, Homo sapiens
caggcttggttcctgcagaggcttctagagcctggaatgaagaggaggaaaagggcttcccggtgggagattgacttggaccatctcaagaatagggaggaaagaacaaagcccagttcgaa

SEQ ID NO: 345639 - DNA, 122 bp, Homo sapiens
caagaattgaaacaactgatagatgctaagcaagcaatgaactcagcccagatggacacacgcttccagtcaaactgtaaatcgttaacagcctttctggaggtcagtttagtactaggtat

SEQ ID NO: 345640 - DNA, 122 bp, Homo sapiens
aggagcatccgcaccacctcgcactcgtccagcaggcacaggaaggggtacagtgagaaccggccctcgtacacctggcgctctaggcggttcttggtctcccgtagctcccggcacagtgc

SEQ ID NO: 345641 - DNA, 122 bp, Homo sapiens
aggaaggtccccttttagcccctctattttggttccatttgtcactgccttgccactcgtcgaagtttgtcttgggctctaaaagtggtagccgggaacggctgggaaggtctccacaggga

SEQ ID NO: 345642 - DNA, 122 bp, Homo sapiens
tgtatttcacatctttctgacaacagcaaaatgcacatgcattcactcagcaaatttattcgatcatttgaaaaattgttcttaacagaatagctgaaagaaaccacttgttcattcatgaa

SEQ ID NO: 345643 - DNA, 122 bp, Homo sapiens
gtaggcgggaaggccgcggcgggattaattaaagacccgatcaagcggcccgcagaggggcgtgaccttgtttcctcaggagtgtggcggtggtcttactactatgttcgttatagcgcggt

SEQ ID NO: 345644 - DNA, 122 bp, Homo sapiens
gaaatttgtttagggtccagttgatttgtgtatttttgttatcatttaatttgtaattttcgtttcagaagcaaatattcgtgttgtacaaatttctgattgccctaaatgtagagagactg

SEQ ID NO: 345645 - DNA, 122 bp, Homo sapiens
tttccaagccatacacaaacacatacacacgcggatgtaccccatggagtcacatacgaacgcacgtacaccacagccacgcatagtcacaggagcattgcaggcacgcacgtgcacacacc

SEQ ID NO: 345646 - DNA, 122 bp, Homo sapiens
ttggtattaacccgttttcccttttctggggtagggtgctatcgtggctgtgactggtgacggtgtgaatgactctccagctttgaagaaagcagacattggggttgctatggggattgctg

SEQ ID NO: 345647 - DNA, 122 bp, Homo sapiens
aaaatgctcctttctgagcctcagtttcctcatctggaaagcagagatacagggacctgtcgggtaggactgctgtaaaatattgtggtgtgctttccataagtgatggctgtttatgatta

SEQ ID NO: 345648 - DNA, 122 bp, Homo sapiens
tcgtctgatgtagaatcagaagatcctagattccatccccccagtagaagctcaggtcagcgctgctgtgagaggcccttctacctcgtgggtcctcctgacagtgtctgctgctcctctcc

SEQ ID NO: 345649 - DNA, 122 bp, Homo sapiens
agctcaggcaatccgcccaccttagcctcccaaagtgctaggattacaggcaagagccaccgcgctggcatgagtctttttaacattgtattttagggtgtatttacttctacattatgtag

SEQ ID NO: 345650 - DNA, 122 bp, Homo sapiens
gtagcctcaggaagttcaatagggaggagcctggcccctcctcttcctgtgtggaacctgcgatttcaagggccgacaggaagcctcgatcggggaactctgaccttgcggaggaaacttgt

SEQ ID NO: 345651 - DNA, 122 bp, Homo sapiens
catcaacgaccggaacacggtcaaggtaaccagcctggcggccattcttaagaaggggcccggaaacaaggggttggctaggggactgtgtagggttctcccagatagccaagttgtaggat

SEQ ID NO: 345652 - DNA, 122 bp, Homo sapiens
tcggccacctcctcccgcagccttccaaatcaagatggactcgcaggagactacaccctgcgtctgcagaacctcagaatacagaaccaccaggggttcctggcccatggccctgggaggat

SEQ ID NO: 345653 - DNA, 122 bp, Homo sapiens
gagcagctccacaggaaaatacgggaacgtggaagagcctgacttcccttcagcagcaggcgtataccgcggttatatacaggaggattcctgactgcatgttctgattggatgagaaaaac

SEQ ID NO: 345654 - DNA, 122 bp, Homo sapiens
agtttcagagacactacaggtgaaaataacagcgggctggctgtccaggcctgagtggagcgtgcccttgttagcttgaaagttctccctcgcagcccgtttggatgcgtgcgtctacagcc

SEQ ID NO: 345655 - DNA, 122 bp, Homo sapiens
gaggggagctgagaattagatgtaaattctgagggatgggaagggccctagattttagggcgttgtgcagaagagtaaccagatctgctctacgtttcaggaaaggaaaaaaaaattccctc

SEQ ID NO: 345656 - DNA, 122 bp, Homo sapiens
tttcaacatgagatttgaaggggacacatgtccatactatgtcactcacacacaaagaaacgcatacatgatcactcagacacacatatacgctggaacacatatggcacacacagtaacat

SEQ ID NO: 345657 - DNA, 122 bp, Homo sapiens
caaggctgggcggtctaagcctgcacggggctgcggcagcaggaccactgactgtcctgccggcctccccctggtttccctgccttcgtggtccagcgccccttcacgctgggcggggaccc

SEQ ID NO: 345658 - DNA, 122 bp, Homo sapiens
ctgattgtgccccatcccactccttctcttcctttctctgtgccaccaggaagctgattacgacagaatatactgccacatcacccacgctcccgtgtcagaggcttaccaccattgctggt

SEQ ID NO: 345659 - DNA, 122 bp, Homo sapiens
cggggcggggatgggaagcggggaccccgaggaaggcgctgagggaccaggatgcgcgtgcgggcggcgggaagccggcgccgagaccgaggcatcgggtgcgggcggcggggacgcgaact

SEQ ID NO: 345660 - DNA, 122 bp, Homo sapiens
ctcctggtaccgccaggagggcggcgcggtgtgcaactggctgcggaagccgcagccgctcgagccacgcaccagtttcccctcggcgcgccgctccgagttccgtccacccaggaggctgc

SEQ ID NO: 345661 - DNA, 122 bp, Homo sapiens
gcggctgctcttctctgctaggtggtgcctctgggcggggagcaggggcctcctccacaacgcggccagggtctaggagtgcggggcaggaggtccccctgggctggccagggtctaggagt

SEQ ID NO: 345662 - DNA, 122 bp, Homo sapiens
ccgccgcgccctgcccgccgaggccctggcagctggggggtgggcgctgttcggacgctgcgcgcgggaccacctctgctctcggtgcgtaaattcacagagaaacatgaatggatggcaac

SEQ ID NO: 345663 - DNA, 122 bp, Homo sapiens
agaggtggaggggagttcgagaacgtagaggcaggttcaaggacaaaggcccaccttgtgcgggccaaccaagtctccctagtcctcttcgctagggccccaggcccttggcgggcggatgg

SEQ ID NO: 345664 - DNA, 122 bp, Homo sapiens
agtcatggactcatggaaccctcacgcggcctttgcttagaaggttcccaaatttgggttcgttgaggcagtaagagggtctgctggaccctttcattgtttcagaagaccctaggaagcca

SEQ ID NO: 345665 - DNA, 122 bp, Homo sapiens
taacagacaaaataaaacaagaacttccgtcttaaaattgtagtggtggaattcatccttcgggatgtattaggtgattcccctaggacgacagctgagttacagggggctaaatataccct

SEQ ID NO: 345666 - DNA, 122 bp, Homo sapiens
ttcctctggcagtgtccctccggcgccctctactgagaaagcttaatattgtgctggctgcgaaggagaaccgcttaattcaatacagatcagttaagaggatggatttacggttgagaggc

SEQ ID NO: 345667 - DNA, 122 bp, Homo sapiens
caggcccctcaggacggccaccacctcccgcagcccccaccgccaccctacggccacaagcggtaccgccaaaagggcagggagggccactcgccactcaaggccccacacgctcagcctgc

SEQ ID NO: 345668 - DNA, 122 bp, Homo sapiens
aatagccaagggacttttatgtcttaatatccctcagaagtgctttatctcctagtgcaacgtgtatcatagtataaacaggaaatgaaacagccacagcatcaaagaagcgccaggccatg

SEQ ID NO: 345669 - DNA, 122 bp, Homo sapiens
atcacaaagatattctctggagggagactcagaggcggacagatggcggcagcagctgcacgggcgggaggggggcggtagcgcaggcggtggtggggttggcgggggttccagctgcggga

SEQ ID NO: 345670 - DNA, 122 bp, Homo sapiens
cagcatgggcaacagagcgaaactccgtccaaaaatagcaaaacaacaaacaaacaattacgataacattaaaagtgacagcagctaacacttatggagcgtctagtgtgttctcagctctt

SEQ ID NO: 345671 - DNA, 122 bp, Homo sapiens
tgcagggccagccctgtggcagggctatatagtggagtttctgggccacaccctgggccacgtgccaggcagatgatgccaacttcctggaggaggctgccatcctcatggccagatgaaat

SEQ ID NO: 345672 - DNA, 122 bp, Homo sapiens
tttatacacacagatttcaatcgagttctaatttacatttaatacaggcttataatatatcgtaggtggacagtttgataaattttgacaactgtgtagccaccaataaagaattagaacat

SEQ ID NO: 345673 - DNA, 122 bp, Homo sapiens
cttatccttctatctcccagggaaggggaaaccttctggctcctcctatgcagaattaatcgctcacccttgaagggtaccagtatatgccacctcaaactatctttagcatgtggattatt

SEQ ID NO: 345674 - DNA, 122 bp, Homo sapiens
cagttagctgaacttaggctccaggaataagatgttggtgaagcctgggaaaatgtcttccgtgagctgggggtggaaagttgttgtggaagtaaccctgaaggaaaaaagagttctctggc

SEQ ID NO: 345675 - DNA, 122 bp, Homo sapiens
agactgacccagcaggtgttctgcgagcctcacctgtgcccccgaggcgcgactcgatctcgatgcccggatactgctccttcacagcactggccagctccaggtaggtcgcctcgaagccg

SEQ ID NO: 345676 - DNA, 122 bp, Homo sapiens
acacgcagacgcgcacgcacacacacgcgcggacacacacacacacaatggctggcatgccggctgagaagctgacacccatattgctataaatcaagaaaaaggttggaggacagagggag

SEQ ID NO: 345677 - DNA, 122 bp, Homo sapiens
caggctggagtacaatggcgtgatctcggctcgctacaacctctgccttctgggttgaagcgattctctagctgcagcctcccaagtaacagagattacaggcgcctgccaccacaccctgc

SEQ ID NO: 345678 - DNA, 122 bp, Homo sapiens
aaagcttgcttcgccaagtcctactgtgtcttttcctaaggaggttagtgggcttccccacgactgcccttttccttgtgggaagggatttgtcagtgcacataggccgatctcagggaccc

SEQ ID NO: 345679 - DNA, 122 bp, Homo sapiens
cgtgcgtggccaggatcacatcgttggggtccatggtggtcttcagcaggcccctgtagacgcggtaatcgccgctagcgtccaggacgcctccagaggccagcgcggtgcggagctgcgcc

SEQ ID NO: 345680 - DNA, 122 bp, Homo sapiens
ctacctgctgtgatcgcagaatggctgcatcgatctcctccaccttctgagtgatggtgtcgctcactaatcggtagcgctcattgtcctcagctaccattttctcaagtccttctcttgcc

SEQ ID NO: 345681 - DNA, 122 bp, Homo sapiens
cgggggtggggccgtcggaaagacagcgcggacagccctcagcttgcagggggcggaggccgggcagcctgcgccctccgagccactgttctgcggcccaggcccatgatcaccctcctctc

SEQ ID NO: 345682 - DNA, 122 bp, Homo sapiens
ttcactttcctgggaaggaggaaaaggcatttaaggggctggtggcccgggggcctgtagcggtggccccgcggtcagaccctgggcccagtgcagaccacctagcaaaccctcggaaatgg

SEQ ID NO: 345683 - DNA, 122 bp, Homo sapiens
cccattcactttacacttttatctcttctaggaaaccaatacggacgcaaggtagaaaaacgagttcatccaagtttgtgcaaggcaaatctagaatttggaagaatcttcagagccgtaca

SEQ ID NO: 345684 - DNA, 122 bp, Homo sapiens
ttctttatcaatcttattccttgaaacaggaatcaaaaacacatatacactggccaggcgcggtggctcacgcctgtagtcccagcactttgggaggccaaggcgggtggatcacttaaggt

SEQ ID NO: 345685 - DNA, 122 bp, Homo sapiens
ttaggctcccttgcacgcggggcggcagcatgctctgggctccctgagttgctagaacgccgtggatgacgcagggaaggaggctggccccgctatcagggagattatgtcctagtggggtc

SEQ ID NO: 345686 - DNA, 122 bp, Homo sapiens
ggaggggcgtccccagcctcgccgctgccgccgccgccctccgcagccgcgcgccccgcccgctccagccgcccccggggccgccaccggcccatgagccccggcctcaaagtttgcggcgg

SEQ ID NO: 345687 - DNA, 122 bp, Homo sapiens
cgcgcggctccagggccacgttccagggtcgggtttggtggattcctcagtccctgccgccgcggggcgccctgggatagcggcggggcctcctggtgagcgcgcgccggggcggcctccgg

SEQ ID NO: 345688 - DNA, 122 bp, Homo sapiens
gccacacggccgcccggctgggcctctcaggtggccccgtgtgccccccggtcgtggccccgataccaggtggtgttaagagactccaccctctcgcaggtctgtggggacgggcacaggcg

SEQ ID NO: 345689 - DNA, 122 bp, Homo sapiens
gacaaggagaccgcggggccaggctctccagttagcgtcagcgcctgggcgggtcccggacgccttgggcgggccgggtaaggtccagccgtatccgcctccttcatgtcccgctgtgggag

SEQ ID NO: 345690 - DNA, 122 bp, Homo sapiens
tcttagctccactcttctttgagctttccgtcaaacaaatcctagggcccgtggccttttcgagcgctcctaaaggcgactctccaagacccgctctctaaggtgctcttcccctttaagac

SEQ ID NO: 345691 - DNA, 122 bp, Homo sapiens
cgccctagccgaggatgctgaggatgaagctgccgctgaagccaacgcaccccgcggagccgccgcccgaggcggaggagcccgaggcggacgcgcggccgggcgcgaaggcgccttcgcgc

SEQ ID NO: 345692 - DNA, 122 bp, Homo sapiens
tcaaggatctcagacagggtaatgacacagcctgatgttttagtgaaagttccccctggccgctgtgagagaagggagagttgcagtcatccagcagggaaatagtggtggcttagagctgg

SEQ ID NO: 345693 - DNA, 122 bp, Homo sapiens
aaaataaataagtaaaataaagtattccagtcatgtgctacataacatttcagccaatgacgaaccacatacacgatgatggtcccgtgagattataatattggctgggtgcaggggcttag

SEQ ID NO: 345694 - DNA, 122 bp, Homo sapiens
ggcagggggcgataagtgtggcatgggggcgggggcgggggcggccgcttcctccctcctcggctccccgctgggcgtcctggctcgggagccgccgggagtgctaggccgttgcgcccacc

SEQ ID NO: 345695 - DNA, 122 bp, Homo sapiens
taattgagagcttggaaagcaaaactaaggctaagtggaaatgactattcttcctttccccggaagtggggttgttgcgagttcctaaaccaccacctgattcttctgcttccacttcatct

SEQ ID NO: 345696 - DNA, 122 bp, Homo sapiens
gcctgcagccgctggagccggaatcctgccggctcgggttgatttgtaaacaatgggtgacgtcgcgccgggccctaccaccgcaccggggcgggggtgacgcgcgagcaggcacgggggca

SEQ ID NO: 345697 - DNA, 122 bp, Homo sapiens
cttagctgcggggtaaatgtcaaaggtcagccccatggcgaatctccctaagccccctgtcgcaaccgaagccgatggaatcaacaagacaaagatgctcctgacccactggctagaatcgt

SEQ ID NO: 345698 - DNA, 122 bp, Homo sapiens
gggagacttcacaggtgtctccagtcctgttgatgtggccagagagtgaatttcaaaggacgtgcgagcagccggcgtccacccggcaggctcccaccccggtgccccgcgtccacccggca

SEQ ID NO: 345699 - DNA, 122 bp, Homo sapiens
tttttttttccctttcctcctcggtcccgccctctcgctaccctttataccttcctctcacgctccgcgttgcacagccttgggggcctttaaaaggaaccggaagtgtcgtgagctaagac

SEQ ID NO: 345700 - DNA, 122 bp, Homo sapiens
tctaagaactcattcttggcgttcactgcaagctataagctctgcaagtggtgaccccgacgtgatcgccttgaagttacgcttgaaggaggaaaactcatcaattttcggggaatcccggt

SEQ ID NO: 345701 - DNA, 122 bp, Homo sapiens
aacagtttccactcagaatgccacccactaacgaacggtggggtctgaaacctgggcttccgacttgctgagcagcgctctccaccgtaatacggctgcctgcggaaccggctgaccggaag

SEQ ID NO: 345702 - DNA, 122 bp, Homo sapiens
gggttacaagttggtgtgagtggggcaagcgaatgcgtttttgtgagattggggccctctcgtttcagaagcagaggcttgcccagtgggtagctcagggtcatcaacgaacagctgaaggg

SEQ ID NO: 345703 - DNA, 122 bp, Homo sapiens
cctctcccggtcttgtccgttccagatcctccaggtcagggggtcgccaagtgagagctgcgcagcgtggatttcgggtacccagggctgggcggggtacagcagcggcgagctgggttccc

SEQ ID NO: 345704 - DNA, 122 bp, Homo sapiens
tcgcgggcagcgggtcggagtcggggcctcgggccggctgggggcggggcatgggcgcggcgcgcggggcccggaacgccgagacaatgcggcgcgcggcggccaggaacggctcggcgggc

SEQ ID NO: 345705 - DNA, 122 bp, Homo sapiens
tttaaactgtctataaatttctgcctagtcaaagttaagagtggcgccagggatttgaaccgcgctgacgaagtttggtgatccatcttccgagtatcgccgggatttcgaatcgcgatgat

SEQ ID NO: 345706 - DNA, 122 bp, Homo sapiens
actgctgtgactcggagcgttccccatggggtctccgtcttgggcgcctggctctgcagccgccgccgccgcctccccgcctcgacctgtcaacctccgacagcagctggcgggcggggacg

SEQ ID NO: 345707 - DNA, 122 bp, Homo sapiens
gctctggtgttggcgccgtcagggacagtgagccggagctttctgcccccgagggcggtgcggggagccgctggcgcaggagttccagcatgctgctctgctcactcctcttcagcccctga

SEQ ID NO: 345708 - DNA, 122 bp, Homo sapiens
aatgatggctgtgtttagcagtcaacttacaacattcctgaaaatttaaaaatcagctcccgtgagctgttaggagcaagttctagctcactactgctccccgccaccctctgtagctacat

SEQ ID NO: 345709 - DNA, 122 bp, Homo sapiens
tcagaagcttcctggtacctcagcagaagcagatgccggcgctgtgcttcctgtacagtccgcagaatgacccagcctcagggattcctttatagagacacaagaacggactaatacacctg

SEQ ID NO: 345710 - DNA, 122 bp, Homo sapiens
gccattagggaagatagcactgagcctattatctcaagcacaaaagttctaggcacctgacggactcatgtcggcttggattaggtgaggaatcaaggataacatgattgacatcctctatt

SEQ ID NO: 345711 - DNA, 122 bp, Homo sapiens
atgaagcgtcatcaacaccaaagtgaaacacgggcaggcagggccctaacaatggaacaacgctgcagcgggaccacgggctggggcacgggagcacggcgcctcatgattgatatgaccaa

SEQ ID NO: 345712 - DNA, 122 bp, Homo sapiens
taataggttgtgcagggcgaggacctgacattaaaataagtctcagatttcttcttgcaacggctgcagatttatgtcattttctgcaatgtagaatatggtcatattcccaagagctcaga

SEQ ID NO: 345713 - DNA, 122 bp, Homo sapiens
cctccctctctctctctttctttttctgagacagggtctccctctgtcacctgcaagctccgcctcccacgttcaaaagatctcatgcttcagctaactgagtagctgggattacaggcatg

SEQ ID NO: 345714 - DNA, 122 bp, Homo sapiens
gctatccaaagcctgggggaaaaaaataagtcactagtgctcaaactggtagcttcaaaccgctcacagttaaggaagtggtgctgaatgatttggtggccactgaggtgtgaatgtggttt

SEQ ID NO: 345715 - DNA, 122 bp, Homo sapiens
tcccctgacccatgaggctgtggccaccctcaggcacaatggaaaacacgttcttcaggacgagagaaaattaagatgcaaaggcaagctcccaggagagaagcaggctgtgtgtgccttgt

SEQ ID NO: 345716 - DNA, 122 bp, Homo sapiens
gtgcgtgcgtccgtgcctgggtgtggcgggtggtgaggctggcagagcgtcctgacccctcgggccccaggccttgtccctcttctccgtgtcccaatcttccttcaaccgcccgccccgcc

SEQ ID NO: 345717 - DNA, 122 bp, Homo sapiens
cctgctcctcagcacgcagctctattacatgggccggtggaaactgggtaagggcacgcccggggcagggcctgggggaggggtctggggggccttgggaacccggacgcacgggagacgct

SEQ ID NO: 345718 - DNA, 122 bp, Homo sapiens
atcttggcccagaaactcctaggaagtatttttgtttgaacttagcctttgctgctctgacgattcacaccgacccaaagggtattgtgtgaccagtgacttccctccatgcacctgggcct

SEQ ID NO: 345719 - DNA, 122 bp, Homo sapiens
cccccgcctggcggtgtagaacaaacggtctgagcgcttggcgggcgactgagagcggagcgggcgaggccgaggagcggaggctgaagccgtgaggagcggcccggcgagggcgaggggcg

SEQ ID NO: 345720 - DNA, 122 bp, Homo sapiens
agtgagtgagaacaattaaaggaaaggatatgggacagggttgaagttgagagagaaaaacgagatcatttaggaacagctgaagaatcaaaaacagcaaagcacaatgggtagaaattcca

SEQ ID NO: 345721 - DNA, 122 bp, Homo sapiens
gcattggtaacagggcagagcttcagcactcagaagctgcctgagaaatggggaggaggacgtagaaagtgagagattttctgaaaccattgatgagtatgagacctcagctttgctttacc

SEQ ID NO: 345722 - DNA, 122 bp, Homo sapiens
aaggctcaactccttctcaccaccgcactgactaagcaggttttcttcagccttaacatacgcactggttgtctggacctgagggcaggacgccgcattcattacactccttcttatcgtgt

SEQ ID NO: 345723 - DNA, 122 bp, Homo sapiens
ttgtatttttattgtaaatgtatgcgaagaagagccaattttctcaagataaatctggtgcgttttcaacattctagtagcttgggactgtgggagaaatacaaccgtctagtctcctttgt

SEQ ID NO: 345724 - DNA, 122 bp, Homo sapiens
gccttccctgtcagaagggggttgtggcaaaagccacattacaagctgccatcccctccccgtttcagtggaccctgtggccaggtgcttttccctatccacaggggtgtttgtgtgtgtgc

SEQ ID NO: 345725 - DNA, 122 bp, Homo sapiens
taatggattgcagtgagatttctgctgatgcgcagtgactctcaggctgccctgtagtgacgtccagccggtctcttgctcagtaagcagatctgtaaacatgactcaccgccgctaagcag

SEQ ID NO: 345726 - DNA, 122 bp, Homo sapiens
ggaggaaagagagagagaacgactgggtgagaggccagcctctccggagggccttccggccggatcctggaattgctgccctgtggtgggagagagggaggcagactcaggaagcttttcag

SEQ ID NO: 345727 - DNA, 122 bp, Homo sapiens
gcttatggagactgagctactctcccctcaggccaaatatcataaaagagcatgtctgaacgttctgaaagaagccaaaataatttttttttttccttgagacaaagtctcactctgtcacc

SEQ ID NO: 345728 - DNA, 122 bp, Homo sapiens
ttctgaggcaacgaatctctggcacggaagcttttcctggcgcgtttccggagaaccacgcgaactacaacgtccctcaccagaattcaatgaggcagagtccctgcatctgctccctgcct

SEQ ID NO: 345729 - DNA, 122 bp, Homo sapiens
gcaaagctacatttcagcttttattaatttgtatttgaactatttgcttacacagctctccgtcccacttaactgcagtttcttcaaagaaaggagccatattgtatacatctctgtgttct

SEQ ID NO: 345730 - DNA, 122 bp, Homo sapiens
ctgggtgctgcccgggctgcctgtcgcccagtactggcgcaggaagacgggtccgcgcagcgtctggcaacagtggcctgctccacgcctggaggcgaccaagttctgagttaaaggcgccg

SEQ ID NO: 345731 - DNA, 122 bp, Homo sapiens
agcctgaggtgggattgatgtgagcaaaccggcttgcaggcctgtctgctgcccccatcccgggcttcacattaaccacatggtgccaagcccaacctttccccagcccaactcaagcctga

SEQ ID NO: 345732 - DNA, 122 bp, Homo sapiens
gctttcttcatccaacttcctcccgttgctgttcctgagtccagtgcttggagggcagggcgtggggtgtgccagggacctcagtgttcctgtgggaagggactgagatgtttgctgtggaa

SEQ ID NO: 345733 - DNA, 122 bp, Homo sapiens
ccatgtctcctgtgttttagttggactcagaaaaaaaaaaaaaggtgatgagaattcctgcgctcggcctgatttcaaaatagcgggaagcctgacaaatgaggtgcgtcctccggcttcgg

SEQ ID NO: 345734 - DNA, 122 bp, Homo sapiens
cccgcacccccctccaccccctagcccgcggagcacgctgggatttggcgcccccctcctcggtgcaacctatataaggctcacagtctgcgctcctggtacacgcgcttcaacttcggttg

SEQ ID NO: 345735 - DNA, 122 bp, Homo sapiens
ggcaccacaggtgattcattcgtttccctgaaaaggcgcctggatgctgtttctagctcccgttatccccagcgatgctgcacctgccccaggacacacgctagggtggaaccgccgggcat

SEQ ID NO: 345736 - DNA, 122 bp, Homo sapiens
agaaggagaaggagaaggggaaggacaaaaatttcagataagttgactcctgggggctggcgcagctccacgggacgccctccacagctggtggcctcggcttctcctgaaaaatgcttcat

SEQ ID NO: 345737 - DNA, 122 bp, Homo sapiens
gccagcgggcgcggaagctggagtccggcagggtcgggaagaagtgagcacagacttccacgggtagaagagtcagattaaacagaaatgtgaaaagcaacccagggcagccaacggagccc

SEQ ID NO: 345738 - DNA, 122 bp, Homo sapiens
aacagcagctcttgtggtgtttcacagcatccccccaccgccgccaccagccagctccaccgaggaccccctggtgttcaacattgtggatccaagcagtctgctccacaggggatgccaaa

SEQ ID NO: 345739 - DNA, 122 bp, Homo sapiens
gctgcaccagccctgctgccaggccggggggctctgggtcggccctgggttcctggccctcgctggagatcggggatcccccttcatctgacacctcactctcgtctctgtcctccatcagg

SEQ ID NO: 345740 - DNA, 122 bp, Homo sapiens
gagctaaaatggctgaggagagagtcgcgacggtgagcgccgagattctctttagttgcccggccgcagggcaaggcaagctggcgggtggcttttgtcccatgcagcggttcctggagaga

SEQ ID NO: 345741 - DNA, 122 bp, Homo sapiens
agatactcgtagcattattcataatggccccaaactggaaacatcctgaatgtctatccacgggaacatggacagataaattgtagtatttccacacaagggactaccaggcagcaatgaaa

SEQ ID NO: 345742 - DNA, 122 bp, Homo sapiens
gtaaccacaaatggcagtcctctggaaaatactgagactgagaacattactttctgggaacgaattcctacttcacctgctggtagattttttcaagagaatgcctttggtaatccattaga

SEQ ID NO: 345743 - DNA, 122 bp, Homo sapiens
ttttcctttgacttatatgggcagcctattctcttttatgcttacaaggcttgaagatgacggtactgcactttcccctcaattgatatagagtaagtcaatgttctttctcaggcactgac

SEQ ID NO: 345744 - DNA, 122 bp, Homo sapiens
cgcagctgcgcagggaagggggccgggggcgggaccagggcgcgcgttccggtcccggggcgtggcctcccgcaggtgagtacgctgctccttcggtttccctgaaacctaacccgccctgg

SEQ ID NO: 345745 - DNA, 122 bp, Homo sapiens
ccagccctgcctgcgagagcctcggacccgttccaggggaccgtccccgcgcccgcccaccggcccggctccacccgccgctccccggcagagccccgggaccccctaattggctgcgggcg

SEQ ID NO: 345746 - DNA, 122 bp, Homo sapiens
tggtaactatttccttgaggaatagttctgtgcaggggtgtgcacggatgtgtgtggatgcgtgcgtttgtgtatttgtagccatacccacaacattagaattaaggcctttagattcagtt

SEQ ID NO: 345747 - DNA, 122 bp, Homo sapiens
gtggaccagtgtgaatctgccttccgcggcacacacacaacttctggagctaagaatgaccgcaatgtcaactcgtgggggtgctcggtagaacttttcttgaaaggatggtgttctgattt

SEQ ID NO: 345748 - DNA, 122 bp, Homo sapiens
gcggccccaggcgcgcacttccgcccggccttccaccggtccaggtctgcccctccgcagcgatagttcacgctctcggcggggctgtaccggaagttgcctctacttccgcccgttccggg

SEQ ID NO: 345749 - DNA, 122 bp, Homo sapiens
aactgatgctatccacatttgtcaagtacacgagtatgcctgccagtttgaaggtgctggcgcggcgctgttggccagagatctctatcaaccagggtcatctgccggcaatgccatagagg

SEQ ID NO: 345750 - DNA, 122 bp, Homo sapiens
ggccaaggtcaagtctctgaggtttagggacatcagatccccagcttaggttctgtacctcggcaaggtgaaagcgttggcgcccactgatgaggcctgctctgagattgtgggtgtgggtt

SEQ ID NO: 345751 - DNA, 122 bp, Homo sapiens
gccatggcgaatgctggagagagtccaggacgcgaaatagcctatcctctcccgggctttcgtgcaggaagagcaacacggacatccctggaaaccgggaccgcttggaatgggacttttca

SEQ ID NO: 345752 - DNA, 122 bp, Homo sapiens
catgagtgcagagctctggccaagaacaagttttaggatcctctctgcaggctctgtgcacgtcccagacccgagtcctgactgtcccatttcagtatttcctaaagagatctcccagacct

SEQ ID NO: 345753 - DNA, 122 bp, Homo sapiens
tggacgggaggtgcagcagacaaggctccgggcgggtgctggggtgtctggaggggtccccgcgggggggtcgggttgggtggggagtctaggtgagtcgggggtccccgggggcgctgggt

SEQ ID NO: 345754 - DNA, 122 bp, Homo sapiens
acagagtccaggctggtaaaagcgcatgtgtgtttcgtgtctggtttgtcccctgcccagcgggcgccgttggaagggccttcaggtgcttgagcacaggtggggacggagcagctggtgtc

SEQ ID NO: 345755 - DNA, 122 bp, Homo sapiens
gggctagggacaaggataagcaaggccaggtccgggcctccaagcagcgcgctgtggagtcgggtagagtagaccaagtgcaacaggcacctggctgcagccaggaaggaccgcacgccctt

SEQ ID NO: 345756 - DNA, 122 bp, Homo sapiens
gcctttgcagctctgcggaggccaggcgcctctgggagcctacggaagatcagggagccccggactcgcctcccaccgctcagctgccgtaaggctccgcaggtgaagacccaggacccgca

SEQ ID NO: 345757 - DNA, 122 bp, Homo sapiens
acctcgtgatccgccggcctcggcctcccaaagtgctgggattacaggcatgagccaccacgcccggccgacacggaattatatcttgaaaagttgtgtggagaaaagcaaagtgggattag

SEQ ID NO: 345758 - DNA, 122 bp, Homo sapiens
accttcctgcaacgatcccagacaccacccaagaggcattcaaaatccacccccccaccccgccactgacagcagcagaaatgaacaggcagaagtctccttggagactcgaagtatctgtg

SEQ ID NO: 345759 - DNA, 122 bp, Homo sapiens
ctgagccccggagctgggctgctcacatggggatggagccactaggctggcctggggctgcggggtagccggggcggtgccctgcacccaccgtcccctctaccccggagttgacccttgct

SEQ ID NO: 345760 - DNA, 122 bp, Homo sapiens
caaggcaaggggcttggcctctctgcgtcttggtttcttcacctgttaagagggagacgacgatggtcacctgtggctgctgcgcggagtgtgaagaactgaaggcacctggcccagggcgg

SEQ ID NO: 345761 - DNA, 122 bp, Homo sapiens
cattaccagcgaaatattcctagaataggacccataggaaggagaggattgactaaaaagcgaccatgagggaactctgtggagttaatataattgttttatttgttgattgcagtagttct

SEQ ID NO: 345762 - DNA, 122 bp, Homo sapiens
ggtgctgcctctgttttcttatctctagcagacttcgttgtaaccgaaggctggccaccccgggaagtctcggacaacgacgtgtttcttgaggtactttcttcctcatcggacaactcgga

SEQ ID NO: 345763 - DNA, 122 bp, Homo sapiens
cccatgctccatgatttattccctcattcctccccactattccaagtgctatcagcctaacgccagcaatgcccttagagggttatccgcaagggaacatgtagcttttccatctccagcat

SEQ ID NO: 345764 - DNA, 122 bp, Homo sapiens
acttaggcgtccctgtctggtcctgacctgagccctgggcctccctatcacatgctcacccgcctttgcttcatttgctggattgcagcctgtctctccatgacatgtctttccataatgtt

SEQ ID NO: 345765 - DNA, 122 bp, Homo sapiens
ggattttttgattcagaatttttgagtgtgtggtgggctgttcagagtgtcatcacttaccgtgactgacctgaatttgttcatgactattttcttctgtagcctgagacagctgccttgtg

SEQ ID NO: 345766 - DNA, 122 bp, Homo sapiens
ccttcttcctccgttttcccttccttctctttggggcggggtgggggagggggagcctcgcgtcctggaactccgggtgcttctgcctgggctgctgcttgagcagctgtgcccggagcctc

SEQ ID NO: 345767 - DNA, 122 bp, Homo sapiens
tcttcagtaattttcaaagtgtaaaaatgtcccaagactaaaacgcttaagacccaccggcgactacagcttggcacacgctggggtttctgcccatctgttgacacagccgaggccgccct

SEQ ID NO: 345768 - DNA, 122 bp, Homo sapiens
gaagcagtaagaaataagatagaggagggcctttgacaagatggcggcaggaggcagtggcgttggtgggaagcacagctcgaaaagcgataacgattctggtttcctggggctgcggccca

SEQ ID NO: 345769 - DNA, 122 bp, Homo sapiens
gttattagtcaaagcaagtcaggaggccaggccagattcaaagggtgaggaaacagactccgtctcttggtgaaaggagctccagagttaccttgcaaaaggacgtgacatggtctctcaca

SEQ ID NO: 345770 - DNA, 122 bp, Homo sapiens
taaggaactcgccctccggaaagacgcgggggaattctgggagtgcgcggccttggagcgcgcacatgcgcggcagctcccgctgctgaatagctgagaggcgcacccgggcggccagctgg

SEQ ID NO: 345771 - DNA, 122 bp, Homo sapiens
gggaaccaggcctggaagtccagctcctggagttctccggagccgcaagaccacggggtacgggacccggtaccggaaacccgaggccacagctccactgcttctcttctgggggtgacgtc

SEQ ID NO: 345772 - DNA, 122 bp, Homo sapiens
ggcagctgcgtctgcgatgcgctcagcccagacccgcccacctgcctagcaccgcccactcgcctagcaccgcccatgcacccttcaaggcccaactcctggggcacctcctctatgaagtc

SEQ ID NO: 345773 - DNA, 122 bp, Homo sapiens
ggggccgggggctagatcctgccgcggggtgcggggctggcaccctcctcccggctctcccgcccgtcccgtcgcaccttgtagacgtcgccataggtcccggcccccacgcgctgcagcag

SEQ ID NO: 345774 - DNA, 122 bp, Homo sapiens
gactctgcgcaggcgccaagctccggagcgcggccttggtgccttttctggtttggcaggcgcgcgcgcgcgggagggcggcaacctcggcgctgtgcgcaggcgcggcgggcagtgcgcag

SEQ ID NO: 345775 - DNA, 122 bp, Homo sapiens
ccaggggaaggggcgacttggaactgagctggaagggggtgcctgaaaatgggtttatggcgtggagccagagggaaaaagatgctgcctggaccccctctgagagtctctcccttccttcc

SEQ ID NO: 345776 - DNA, 122 bp, Homo sapiens
accaccacaacaactaccactcccccatccctttgtttttgaggtagagtcttgctctgtcgcccaggctggagtgcaatggcaccatcttggctcactgcaacctctgcctcctgggttta

SEQ ID NO: 345777 - DNA, 122 bp, Homo sapiens
ccctggggtctgcgccggtaggtcccggaggctgagattccgccctctgaggggccccctcgctaaaactcacagcctgtggacaaagcctttttggttttcaaatcggcctgtttcccgcg

SEQ ID NO: 345778 - DNA, 122 bp, Homo sapiens
cgggcagaacgcactgcgaagcggcttcttcagagcacgggctggaactggcaggcaccgcgagcccctagcacccgacaagctgagtgtgcaggacgagtccccaccacacccacaccaca

SEQ ID NO: 345779 - DNA, 122 bp, Homo sapiens
actaggagaaagaagacctcaaagataagctattgttcctaccccaagaatgcagtctgccgaggaaagcagccactacaagaaataatgacattagggtggtaattcaatcgttaaatcta

SEQ ID NO: 345780 - DNA, 122 bp, Homo sapiens
gcacctcggcccacagaggaaggatgcccagtacatctgtcggggcggcccgaggacaggcgacagattcccccgcagacatctgcctgctggaggaacgtgccgtgatgcagacgccgggg

SEQ ID NO: 345781 - DNA, 122 bp, Homo sapiens
tgatcagaaagtgttgagttccagccacactcccataactgaggtaacagcttagactcacgtagcctcagctctgggagtgtgacctttatctggacaccttaaaagcaaaagcttttttt

SEQ ID NO: 345782 - DNA, 122 bp, Homo sapiens
gaagctgcggatgtcggcgtcccggtagccttggttcttgccagactgttccagaatgatcgccttggcggcggtgtccatgcccacatgcacgacgagctgtgtgaacgggtaacagcaga

SEQ ID NO: 345783 - DNA, 122 bp, Homo sapiens
agggatggagagagcttcagagaaccctggggagggatcccgaggcttgtgggccaaccacgacctggtgggaactgtgttctctgtgccccacagggtcctcatgcagacctgtcacacag

SEQ ID NO: 345784 - DNA, 122 bp, Homo sapiens
gcaggcgcggtgtcgattcctagattccgaaggaagcttcggtctcggcagatagttcttcgcatttcagcttcgcaagctttattgacagagccaactgccgatgacagcatttttctgtt

SEQ ID NO: 345785 - DNA, 122 bp, Homo sapiens
aagaaaattgacaaattaaattttcaactcagcaaagaaggaataaatctttttttaaaccgcaacattcacgaaagaggtggcatcttaaaaggggataatgacatcaaaggcttttttaa

SEQ ID NO: 345786 - DNA, 122 bp, Homo sapiens
acctgggtaggagggtgaagtcaggttcacgctctgagtcagaggtgaagagcaagtgcccgggaaccagagctccagagtgggatataaaaataggagccggtggccgggcgcggtggctc

SEQ ID NO: 345787 - DNA, 122 bp, Homo sapiens
ctgtccagcttagcccaccccaggcagcccaagaagaacagtgcctctctgagcatgagtcgtccgcccccatccccaccccgcccctgtgagtcgtttcaggagacagtgtggtgtagtgg

SEQ ID NO: 345788 - DNA, 122 bp, Homo sapiens
ccggtctgctaagtagcgggtgcttttcctttgcattgatgctaccgctagaccacggtccgccagaccagggtccgccagaccacggtccacttggtaaccggcgtcttcccagacgctgg

SEQ ID NO: 345789 - DNA, 122 bp, Homo sapiens
cattgcctgaggctcggggagagcttcgagaagcggccgcgggcctccttccacactattcgttgtaagtcagcgctccccacggttcccttcggccgctccagccgccacatatcaacctt

SEQ ID NO: 345790 - DNA, 122 bp, Homo sapiens
tactatgagacctcttaaacatttcccagcccacacaggtggcagcctggtgggaagctacggttttagtaatctccactggtttcctgtaaaacaaaaaggttagatttttagaggctaga

SEQ ID NO: 345791 - DNA, 122 bp, Homo sapiens
cttcctaggtagccagtccctgttctcctcccgggcagcctctcttccatccaggtggggcgacccgggagccccccacctccggactcttcgggggacttgggcactcagtgtgtcacgaa

SEQ ID NO: 345792 - DNA, 122 bp, Homo sapiens
tcagtggcagagattgggaaaggcaccagcaagggcctgaaggcagggagcctcaaggtgcgcccagggagtggtgaatggaccagtttgactgctggggcgcaggatttgtcttgggaatc

SEQ ID NO: 345793 - DNA, 122 bp, Homo sapiens
catttagacgccctgctgtctcctagtctggtcatgaatgcttctgaggaggtctcaggacgcttgacgtcatcaggtggaaccgcgcacgcacttcctccctctgccagttctcaagtcag

SEQ ID NO: 345794 - DNA, 122 bp, Homo sapiens
taagtgggaaatagacatgggtctgctgggcagggccagcatgagcctgatgaaatcaaccggctttctgtgcacgtggaaagctgcttggaaggtgaagctgcgtgaggctcggggagcag

SEQ ID NO: 345795 - DNA, 122 bp, Homo sapiens
gatccattggctactaccgcaacatatacaaccccccggaaagcaacgcctccatcatcacggactacaacgaggaagggctgcttctacaaacagctttcttgggtacaagtcggagggtc

SEQ ID NO: 345796 - DNA, 122 bp, Homo sapiens
cataaacagattagaggcagcactggcctgagttgtgaaactcttcccagcctggtcctgcgattagctggctatatgaccttggacaagctgctttgcttctctgggccatggtttcatac

SEQ ID NO: 345797 - DNA, 122 bp, Homo sapiens
accagtgttctcgggtagcctgcagcaccagccacctacacatccttcctcatctttgcacgcagctcagtgcctcccgctttgcctgctatgaggggagagtgtgctggcaaatgctcaga

SEQ ID NO: 345798 - DNA, 122 bp, Homo sapiens
gttcccggctccgagggaccgcggggctctctgcctgggaaggaagcttgcgggcctcctcgggcctcgctgcagcccagctaggttaatcaatcagcagccgctcagtcacccatcccttc

SEQ ID NO: 345799 - DNA, 122 bp, Homo sapiens
cattcaggaaaaattgctccgagaaggccctgatctcagaccacgcagcatggtaagtcccggccgccggtgggcaggggagcatcagccctgctcaggctgaaggcatgtggccctgggct

SEQ ID NO: 345800 - DNA, 122 bp, Homo sapiens
taccactggtaagaatattaatgcacaatttctgtaggaaatttggcaatacagttgattcgtgaacaacacaggtttgaactgcatgggtccacttacaagagagtttttttcaataaata

SEQ ID NO: 345801 - DNA, 122 bp, Homo sapiens
ggctcacacggcctcatggggaccccgcggtcacagggccactgggagctgcaagatcctcgtccgagaaacggggatgcaggccccgggccgtgcagacagggccgtcagaggtgatggtg

SEQ ID NO: 345802 - DNA, 122 bp, Homo sapiens
tgcttcattttgccctgaagtttcatttcaagccaacattaaccccaacacggaacagctcgatcttttcttcccaggccctctcactgccccgagagaggattacaagtactcctcatttt

SEQ ID NO: 345803 - DNA, 122 bp, Homo sapiens
acctttaatgacttccaccagggtaaaaaccactgatcactgagttctattttgaaactacggacgtcgagtttcctctttcacccagaattttcagatcttgtttaaaaagttgggtgtgg

SEQ ID NO: 345804 - DNA, 122 bp, Homo sapiens
tggggtggggagacgcgtggccatgcgtgttggcgcctggtgtgtatggggtgggggacgcgtggccgtgcgtgttggcgcctggtgtgcatggggttggggacgcatgcagtagaacctgg

SEQ ID NO: 345805 - DNA, 122 bp, Homo sapiens
cttgaaagctccaggagccccaaggacggcgaagggcagcctggagttggggggcgtcagcgagggcgcgggcaggggagagaggcgcccctggaagtggagccggcctggacagaggcagg

SEQ ID NO: 345806 - DNA, 122 bp, Homo sapiens
gggaaagtcctctctaagcaaacatatggacacgtggatcagtctctgctcctccacgggcgcctcctaaggcagtgtgccctttaccaaaaacacaacgttttcacacctattttaatttt

SEQ ID NO: 345807 - DNA, 122 bp, Homo sapiens
ccctgcgggtcaggccccaagggccatccagcctccgccttccaatgccaaagtttacctcgtgtttctcacaacggggaaaacttagcgttcctcggagacttcagtctggcaataaaaga

SEQ ID NO: 345808 - DNA, 122 bp, Homo sapiens
tgattttaaaagccttttgctcttcccttctagaagacacagtggaggcaaactgtatggcggttttgataccagccacctaatttaaaagtgctacataagtaatccccacagagcaaagt

SEQ ID NO: 345809 - DNA, 122 bp, Homo sapiens
tgagatttgtttgaagcttctgaccctctctgcagcctctccaaattcagtttcagcctccgttcaccaagcacttgttatgtatcaggccctgtactaggtgtttccaagaaccttactga

SEQ ID NO: 345810 - DNA, 122 bp, Homo sapiens
cactggaactgagtcccccggtggccagatcgcacaggtatcagctgaccgcctgtgtcccgttttccttcacacgcggcgcagttaacaatggccgacagtcctcacagggggcccgggcc

SEQ ID NO: 345811 - DNA, 122 bp, Homo sapiens
aagtggtactaatctcagttcaggtttcaaagcctttgtgatgcaactctgggtctgtcccgtgtgtgcctctcaggggcagtggtttctagacttagttcagttcttatagctgttgctat

SEQ ID NO: 345812 - DNA, 122 bp, Homo sapiens
ttcctctccaaagagccatctgtagggccagaagccagcaaagcctaactcattactggacggcagttcctctgcctttcactgattcctaccttaccctggggttttacgtttcttgtctc

SEQ ID NO: 345813 - DNA, 122 bp, Homo sapiens
gtggcaccagaggaccctctccatgtttagggacctcctgggcctcaggagcgtggcgcccgcccctgggcggactccccccatccgcgggcgcgaatggtccgggccgcgtccgcagtgct

SEQ ID NO: 345814 - DNA, 122 bp, Homo sapiens
tatcaagtgatactaagaaaatatataatccaaatcatcactaagtaaaagtcctaaggccggttatttttttagcagcacatgaggttcttcacggcttcagtagaaaccagatttcttca

SEQ ID NO: 345815 - DNA, 122 bp, Homo sapiens
gggctgggctcgggctccgggggcggcgtcccccgcgccgggccccgggacgggcggcgacgctccaaccatggcccgtgcccaggcgctcgtgctggcactcaccttccagctctgcgcgc

SEQ ID NO: 345816 - DNA, 122 bp, Homo sapiens
gtttagtaaaaatgagttgtcgatttcaatgtttaacttaataagcacttatatagtgctcgctctgtgccaggtgctgttctaagttctctagacacataactcctttaattcccctaata

SEQ ID NO: 345817 - DNA, 122 bp, Homo sapiens
ccgcggcggtggtctaaattcttcgcctaaggaaccaccgcctaaggaacgatttgccatcggatttgtcctcggcaaatgtctcaccaagctgtagatggatgaatggatagatacatgat

SEQ ID NO: 345818 - DNA, 122 bp, Homo sapiens
cctcagctaaacaaggtggtcacgccgaggccagaggtgcatctgagacagggagggcagcgtatcttcccgcttcttcttcccaaggtgctggccccatgcttccctttccctgagaaagg

SEQ ID NO: 345819 - DNA, 122 bp, Homo sapiens
gcaacgcccccaagtcaggatcccttgctcgccgcccccaaccggtcaggatccctggctcgcgtccccaaccggttccgtgtctcacctgggtcctgcaggcgtccactggaggaagccgg

SEQ ID NO: 345820 - DNA, 122 bp, Homo sapiens
gcaggggagggggcgcggtggccgaataaggtggcccgcgagcaacgggacgattgggatcgcagccagtcgcggcctcccggacccttcccctcgggcagcccggccctcccatggcccgg

SEQ ID NO: 345821 - DNA, 122 bp, Homo sapiens
aagaaagcactccaaaaattgagaggacccagctgaatcaattctcaggccttcaggaaccgtggactcagggcttctgtttttcttctttctgatttttcagttacttttcctgctactgt

SEQ ID NO: 345822 - DNA, 122 bp, Homo sapiens
cccccaccccgcgcagcaccttagatttcgacacactctccatgctgctggagaggtcatcgatctccagcttgaactcgctcttctccttctccagcttctgcttgacccgctgcaggttg

SEQ ID NO: 345823 - DNA, 122 bp, Homo sapiens
aggcctgggaccctcttgatggtaaatggcgctgttgagccccgatgcgcagggactccgcgggcggcggacttgacaggaagctttgctgcggggcggcccagctgcggacgcgcgggacg

SEQ ID NO: 345824 - DNA, 122 bp, Homo sapiens
tcggccctgcagctgccttcccttcctccacctccctcccgcctccgaagccggcgcccccggccaagtggccgctctcaacctgttaccaagtcctagagagaatttctccaaaatatttc

SEQ ID NO: 345825 - DNA, 122 bp, Homo sapiens
aagtgacacgggtgggcggaaggcatcccggtccctgaaagtagggacccacctctctttcgagagagtggactagaccctggattctgtcaggaagggggcgggatgggatggtggatttt

SEQ ID NO: 345826 - DNA, 122 bp, Homo sapiens
ccacctgttacaaacccgtgtgctcaccattttccctgggagcattttcactactgtgttcgtagagaagagtggagttaggagagaagattctggttgggtcaagagatccttttcagtaa

SEQ ID NO: 345827 - DNA, 122 bp, Homo sapiens
cgtgtggggcgtgtcctggtcttcgccggctgcagggcccctcccaggcttggatgggggcgtgtccgcgccgctcgccgaggggaggcccggcccctgcccaccaacccttccctctcctg

SEQ ID NO: 345828 - DNA, 122 bp, Homo sapiens
gctgccgtcctcatttcgagctctttctagagcttggctcccgctgaagcgcaacttccgcgcccaaaccttgcttttacgacgggcggtccgcgtccaaaggtctcttacaggcctgccct

SEQ ID NO: 345829 - DNA, 122 bp, Homo sapiens
gagctgcccttacctgaaagtcccgctgctttcctgcccactccattctcacaccgcagccggctagggagcccagggcccccaaatccactggcttaagctccgatacctgctgcgagctt

SEQ ID NO: 345830 - DNA, 122 bp, Homo sapiens
aattaatagtttcaccatttataagaaagtaatgacaaccgaaccgtttctcaggctgtgcgaatcgaacagtgcgcgttggcgctttgcattaattataattaacattctttgagcgcttt

SEQ ID NO: 345831 - DNA, 122 bp, Homo sapiens
ttgagaccagcctgggcaacacggtgaaactccgtttctactaaaatacaaaaaattagccgggtgtggtggcgcgcgcctgtaatcccagctactcaggaggctgaggcaggagaattgct

SEQ ID NO: 345832 - DNA, 122 bp, Homo sapiens
cctgagccacatagcaagaccctggctcaattttttataataataaaattaaaggctgagcgtggtggctcacgcctgtaatcccagcactttgggagaccaaggcgggtggatcacgaggt

SEQ ID NO: 345833 - DNA, 122 bp, Homo sapiens
gctggggccagaactccagtcccccggtgcctcctgctccactccacacaccactccacacgacttatctgcaccattgaaggatgattccctgctgtaagtgatcagggtgaaactgggaa

SEQ ID NO: 345834 - DNA, 122 bp, Homo sapiens
aatgtaaactctctaacctaacggcaggacctcggtttttgctgcggtgcccccttcccccgggcacctaaaacagtgcccagaataaagtagggcctaaaaaaaaagttgatattgaatta

SEQ ID NO: 345835 - DNA, 122 bp, Homo sapiens
tggcccggccgcgcctcccccagggtagggctgccgtgccccgccccggcccccggcccccggcccccggtatattgtttttcaggactgagagaagagcctttgatgggaatcccacctgc

SEQ ID NO: 345836 - DNA, 122 bp, Homo sapiens
ttttttaacttttatttctgttttgggggtacatgtgaaggtttgttacataagtaaactcgtgtcttcggtgtttgttgtacagaatatttcatcacccaggtattatgccgagtacccaa

SEQ ID NO: 345837 - DNA, 122 bp, Homo sapiens
atctagttggggctccagagtggggaggagaaaggcactttgaaacttctctgcccttaccgtcttagccatcaaactctgagctggagatagtgacgatgtgacaggaactttccctgggc

SEQ ID NO: 345838 - DNA, 122 bp, Homo sapiens
gaaacagccaagaaaagtctgtgtcttgttcactcgctggcaggaaacatagagcaggcacggaaaggaaagggactcgaggaatgcgctgtaccgacaggaggcagcacccctttgcccga

SEQ ID NO: 345839 - DNA, 122 bp, Homo sapiens
ttgaatcaggaggttattaaggttgaagataaaggtgcccatcacagccttattgatcagcgaggcagttatccagcatctcccaagtgtcagccttgtgattttaaaaaagagaaacaaca

SEQ ID NO: 345840 - DNA, 122 bp, Homo sapiens
tctcattcttcaaaaggacacggcccacgccagggcgttgggaggcgcacctagtggagacgcagctctctgccctacaccaggagcttggcaatggggttccagcttggacgcgggtaccc

SEQ ID NO: 345841 - DNA, 122 bp, Homo sapiens
tatttcccaaccaaccgacagccaacaccacagctgggacatcagtgttcctggtatccacgtcacaccactggcttattcaaagcctgtgaccaactaaaatgcccagttcttttccaatg

SEQ ID NO: 345842 - DNA, 122 bp, Homo sapiens
ttctcgggcggagggctggagctggtcctggcagccttgacccggagacaggcagtcaggcgtgaccgcacggacccgtttctcgtaggctaggttttcctacccaaataaagctttcacgt

SEQ ID NO: 345843 - DNA, 122 bp, Homo sapiens
ttaggttctgcatggccattttctcattgccaacaaacaggtccccgccgcctgtgagatcgctcccatagttcaccgtgtgtctggagttggagatgcggatgccccggcctccagcaccc

SEQ ID NO: 345844 - DNA, 122 bp, Homo sapiens
ttcctgaacactagctacctacgcagctgtaatagtggacactgtgtcaacctttaagctcgcacacttatcaaacctcgttcttctatattaaaaagtgctagcttcccaacgggactatc

SEQ ID NO: 345845 - DNA, 122 bp, Homo sapiens
gaggagcggccggcggagtgctgggaacgggaggcttggactgggggcccgggcgaggcgcggcccgcggcgggtggaactgggcgggtgagcagcagccccggccccttccgtcgctcgga

SEQ ID NO: 345846 - DNA, 122 bp, Homo sapiens
ctagtgttagcccaaagttttaaaaaagggcaaactttttttattaaaaaagcgtttggccgtgttgccttgtacatgacttttggagccctcactaaaaagctgtttaccctaatttccca

SEQ ID NO: 345847 - DNA, 122 bp, Homo sapiens
aagttgaggctggaaaggatagagatactgggagggacagaggctggactgagaaccctgcgtttttgctcctaatcctaagtgtgccccctggtcccattaggtgaatggtgtcatagtgt

SEQ ID NO: 345848 - DNA, 122 bp, Homo sapiens
cagctccatcaagcgtctcgccaacctctcccttggggctcagtcaagggaatgaaaaaacgaggctagacacctgtccccaacggaaaaaccaagaacacacctggagagcagctcagaca

SEQ ID NO: 345849 - DNA, 122 bp, Homo sapiens
caaggaaggctgaggcttccgctgggaacgaagaaccaaaatgaaggatatggagtgaggcgacaagatggcgaccacatacggtttgagttctagctgtcaacgtcccgatgaattctttc

SEQ ID NO: 345850 - DNA, 122 bp, Homo sapiens
cggttcagagaagtggcccaatggcaggctgcccaagtccagtactccttctgcctcccacgtgcgttgcctgctctaggaacatctgtggttgccgcccgctgttgatgtctgcgcgctcc

SEQ ID NO: 345851 - DNA, 122 bp, Homo sapiens
agtgagcagcggaaagagaccgctgaatgggagcagggttttagcttagggtgacagaaacgttttggaactacatgtaggtgatggttgcacaatattgaggatgtacgaaatgccatgac

SEQ ID NO: 345852 - DNA, 122 bp, Homo sapiens
tcaactactcgcaggcggtcatgatagccctcacccacagccacgggagcctgctgaactcgcagcagctgggctacaccagccacagtggcatccccaacatcatcctcatagtgacagga

SEQ ID NO: 345853 - DNA, 122 bp, Homo sapiens
ctcatgacttttgtcattgtattcatttgtattcatttcccattgctgctagcaaattaccgcaaatggtttaaaacaaaacaatttattatcttacagtttggagatcagaagtccaaaat

SEQ ID NO: 345854 - DNA, 122 bp, Homo sapiens
ggggctggcttcccgcttgcacacactgcctctccctccaccacctcctcctgcctgtcacgccccctcccagaagcttggtcggagggccctgtcgtccaccccatccttccctggccctg

SEQ ID NO: 345855 - DNA, 122 bp, Homo sapiens
agtctgttggtattgaagtctgggcggcctgacagccctggcaggcagcccagaggccagcgccccaggcagacactctctctgccttatttatgcagcttcgcggccgctgcgattgggtg

SEQ ID NO: 345856 - DNA, 122 bp, Homo sapiens
gggtcgggtagatctgcccacggttgagggaaatgaaaaggtactgctaatgtgggcgagcggccagccctgagaggccatctgacgaagaggaaaagggatttgagtccggagggcgctgg

SEQ ID NO: 345857 - DNA, 122 bp, Homo sapiens
cgttttggttaggacaggaagcacaggctcccttcctgtctgtgttttcctaagagaaaacggtcttccctccttttttgcatatttggcaagtggttccacctttctctgcaccctggtgg

SEQ ID NO: 345858 - DNA, 122 bp, Homo sapiens
gccgccatctcctccacctcccctcacattccaccgatccttcccccaggataaaaaccacgcccagagaagctgcgcctctctagcacacccctcccagccccagcggccactagcgacaa

SEQ ID NO: 345859 - DNA, 122 bp, Homo sapiens
tccagtgaacccacagtcagtctaaaaatcttaggtcccaggtcgcttcctataggaggccgcctccaaaccccaggctgagtgcggtcccggtacccacccctccaggggtctcacagttc

SEQ ID NO: 345860 - DNA, 122 bp, Homo sapiens
gttctttcaaaatgctctcctcactgtatcctgcctcaagccaacggcaagcccgggggacggccacaccctcgagataaatgcactcagagaggttaggggacctgcctggggccacccac

SEQ ID NO: 345861 - DNA, 122 bp, Homo sapiens
aaaggattaatgagttctacctaggggtaggaaaggaggaccagcatgagcaaagcaacacgcacaacatgcaccatcttggagggcaatgtgcagtatctggtaaaattttaaatataccc

SEQ ID NO: 345862 - DNA, 122 bp, Homo sapiens
gtgacagagcactcatgccaggtatggtgctatgcactgtgtattcattggtaaacaaaacgtattccctgtcttatggagtcgactgtttagtgtggaggcagtgaagaaacaaaacatag

SEQ ID NO: 345863 - DNA, 122 bp, Homo sapiens
gcgtctccctgcacagcggcactcggcgctgtctgcagaatgagccggtgtgcagagacacgcgggccggccagcccctgagaatcgcccgggagcccggccgggtggtccccgcgcctccc

SEQ ID NO: 345864 - DNA, 122 bp, Homo sapiens
tcttcatgacttggtgaagttgctgggcaggtattgttagctctgctgcatggatgaaggcgtgaaggctcagggaagggaagcggctcccccagtcacccagctggtaagcagcagagtca

SEQ ID NO: 345865 - DNA, 122 bp, Homo sapiens
ccccgctgaggaaggcggctgctgagtcacccgcgaagggaagcgcggcccgggcgcccccgcctccccgcgccccaacccccgcgcacagccgcccgcccacggtgtctggggcctcccgg

SEQ ID NO: 345866 - DNA, 122 bp, Homo sapiens
gggccgcggctgcggcttcgtgttcggggcgacctgctgcttccgagtgttcctgggctgcgccttcttctcctacttgggcggccgcgccaagcgcagaggccgcgggcgctccggggcca

SEQ ID NO: 345867 - DNA, 122 bp, Homo sapiens
ctgtgaacttggggtgcccccctccacctcctcaagacccttttgtaggtgcggatctcccggatcccccactgagaatcacgccctgggggcctggggtctccagctgtggagggaggtga

SEQ ID NO: 345868 - DNA, 122 bp, Homo sapiens
gggtggagaggtgggctcttcctgcttcccactcatcttatagctttctttccccagatccgaattcgagatccaaaccaaggaggaaaggatatcacagaggagatcatgtctggggcccg

SEQ ID NO: 345869 - DNA, 122 bp, Homo sapiens
cccggtggccgcggcagcagcaaggccgctctggtgagtgcacgtggcccacgggcaggccgcgcgtccggccggcacaggaagtttggggcgctgggcagggaccgcggggtgacatttgg

SEQ ID NO: 345870 - DNA, 122 bp, Homo sapiens
ggttccgatgcctgggtcctggaggtccggggagtcgcggagggacctccctccggtaaccgacggattggggacaaatgctctgcccagtctgatcccagacatccttgtaacccaatata

SEQ ID NO: 345871 - DNA, 122 bp, Homo sapiens
gactaacaagcagatgtctcttgaaaacaataaccagatccatttaagcaatgaggtgtgcgtatatgtaaattccatttaaaataagaatgccttcttctttcttttttttttatgtctca

SEQ ID NO: 345872 - DNA, 122 bp, Homo sapiens
aaacaaccccacgcaaaatctaagtcttgcagttttcactcctcgcgtctccagtgtccacgcatccgcagtcctgtttttgtatttcgcccaagatacacccctgggcaacctcagggtgc

SEQ ID NO: 345873 - DNA, 122 bp, Homo sapiens
gataatcgtggagcccacgaagccagtgcaacgtaggtggcttcccttgctggaagtcaccgcaccgaggccagaagaaggtagccagcgcccaggcaagcgcttaaaactgcagcctcctc

SEQ ID NO: 345874 - DNA, 122 bp, Homo sapiens
aggccccgcctccgcgaccgttaccaccgccgggggagggcggccaatcgagcccgagcgcgtcgagggccagcccctctttggcctgcgaatgcccccaaacgattctctccagcctctcc

SEQ ID NO: 345875 - DNA, 122 bp, Homo sapiens
gaatgtatcccgtgtgttcactaacttagcaagttccagtaaacagtttaattgatcactcgttaagagaaggcaggaaacctccatgaaaagagaaatcagtgggtatttcctacagcatt

SEQ ID NO: 345876 - DNA, 122 bp, Homo sapiens
tttctgacatctggagccactagcagttatcctgttcattcctgggcgcctgcgaccttccgaaggaaacaagacttgcttggggaaagttgccttgccagtatagtggagcttggtagaaa

SEQ ID NO: 345877 - DNA, 122 bp, Homo sapiens
gcctccacttccttgttgctgctgtcacgactggagccgcctctcgccgacagcggggagcgcgagtgcgccagccatccccctcgtccagccgccgggccaagcgcctccgggaatgtgag

SEQ ID NO: 345878 - DNA, 122 bp, Homo sapiens
cggcaaccgcggaagagcagcatctcccctgcgcctgtggatacgccagtccagggatggcgagtgctttctcctccccagcttctccctcgctcttcgaggtgactcgtgggaccctgcgt

SEQ ID NO: 345879 - DNA, 122 bp, Homo sapiens
taacagacacatacctatagatacaagcttgtgcggactaataccacaagttcggatctacgggtttgtggcaacaggcctcaatatcttctctcttttggggctgtgacatgtctgaaaat

SEQ ID NO: 345880 - DNA, 122 bp, Homo sapiens
tcttaagagcgatgaagggggacaggagagtctgtggcctgctgtgcagggtgaccgaggcgcgatggcacagctgcagtcctttggttccaagaggagattgtccaggggaggaggacaca

SEQ ID NO: 345881 - DNA, 122 bp, Homo sapiens
gcaaacgccggcaaatagacactgggtctacccaacatggcgattcccacatcttcttgtcgacaggtgtgccaggtgtcatggccgcccccacataacaccatgtgttcaaaacgtcatgg

SEQ ID NO: 345882 - DNA, 122 bp, Homo sapiens
ctggttgttatgaccatggaatccagatgcagaatatgcccagtcatcaggaaaatctgacggtcttggcacagtttgaggacagaaagagagcaacagccaatagctgaggggagactcca

SEQ ID NO: 345883 - DNA, 122 bp, Homo sapiens
tgataaaattatccttatacccgtggagtatgacaacacagaacagagtcacctatccctcgtgatgaaggtgtgaaagaaaacaaggtgtgctgagagacgaatggggaggagattagtga

SEQ ID NO: 345884 - DNA, 122 bp, Homo sapiens
gctccctgggagctccacccaggctgccatggggaggggaaggaaggcctttatagtttccggctcacatctcaaggcagtcagtctgggaaatggccttggtcccctgccctaccctggca

SEQ ID NO: 345885 - DNA, 122 bp, Homo sapiens
tgagcagaggtgcacagacctgtgagacttgaaggcgttggagccatccccaccctctgacgtggtaatagggaggggtttaaaaacatgtctcatgtggacttttggtaatgatatttgaa

SEQ ID NO: 345886 - DNA, 122 bp, Homo sapiens
ttcattatggcagctctgtcaatgagcaccccagggtggtgtggccgcagcaccaggacccgcgctgaaggcccagagacctggcaggccgggaagaaattcctttcctttgggaagaacca

SEQ ID NO: 345887 - DNA, 122 bp, Homo sapiens
gtgggcgtcccaggcctggggtctctgccaagagggcagtgggcctgggcctgctgtggccgtgggagggggtgctagtgcatggcctcttgctgaggtcacatcctcttactgaccaggct

SEQ ID NO: 345888 - DNA, 122 bp, Homo sapiens
gccccggagcgtggagacggctgaggaaagttgggggtcggggccttggggcggggagcgcggaacccggcgccgatgcccgcgttcatgaatatgcacgagccacctccctccctccgtga

SEQ ID NO: 345889 - DNA, 122 bp, Homo sapiens
cgtgtctgcctgttagagactccttgttgatactcacagcttctgttctttgacactcagcgaaacagtcagtgggcttgttcctttcaagcacagattgtatttttttcccttaagaagtt

SEQ ID NO: 345890 - DNA, 122 bp, Homo sapiens
gacccgcgaggtttgtcgtgcgaccgttgctgcaggtggtccaggcttgggaccttgacgcgaggcgctgggtccgggcgctgcggcggagcccagtgaaagtggtgtttccttccggagag

SEQ ID NO: 345891 - DNA, 122 bp, Homo sapiens
taggttttatccatccatcaaggtccagctgaaaagcccacaaaatttcccaaatcctcccggctgagatttctccgggaagctgaatcacagtctttggtagacttttcacaaggtcatct

SEQ ID NO: 345892 - DNA, 122 bp, Homo sapiens
cacacagaaccccgttcttctctagactgagctgacctgtggtttccccagaaataaaaacgacgcgtgcaggtttctccctccccttgacgtcatttcgtttgatcctttgtaatgatttt

SEQ ID NO: 345893 - DNA, 122 bp, Homo sapiens
agaacgttggattaggcctttggatgagtagccctggaagacgcacatcagccctgggcacgaggagttcacaaggtgggcctgggagggtagacggggatagagtaggctcaggcatcggg

SEQ ID NO: 345894 - DNA, 122 bp, Homo sapiens
cctcaactcccagaaagctgcctgccaggtcacaagagccctgtgaggtcttcctatcgccgggacactgggaggcaggcgcggggcgggtccgccgggcgacgcgctgtgattgggcgccg

SEQ ID NO: 345895 - DNA, 122 bp, Homo sapiens
ggtctgcagcttcactcctgaagtcagtgagaccatgaggccaccagaaggaataaactccggacacatctgaacatgtgaaggaacgtactccagacacaccatctttaagaactgtaaca

SEQ ID NO: 345896 - DNA, 122 bp, Homo sapiens
catttgatccagatctcattgaacccttgtttaaaatgcaggtgcaaatataccagtgcccgggctttccctcgggactgactgaatcagaatctctggggagggagcccaggcgtggatgt

SEQ ID NO: 345897 - DNA, 122 bp, Homo sapiens
ctccagcaggtgtaggagtccatgggcctgacacctttgctggtctctgctggatcccgacgaagtcaggtcctttctggaaaggggttcgaagtccacatactctccgcactacccccagg

SEQ ID NO: 345898 - DNA, 122 bp, Homo sapiens
gggccgggcccgggggcgccggggagcccccagcaggcggggccagcaggatgtcatcgtcgtcctcctcctcctccagatcctccagctcgtcctccccggcgtacgagcgccgccgccgc

SEQ ID NO: 345899 - DNA, 122 bp, Homo sapiens
tcctgcttagactggcagtgagcaccgcccccttccgctctcctcccgggagcgccttcccgcctcccgaacccgccccggaccttccagggcgaggcagtcctggccaccccgcgccggga

SEQ ID NO: 345900 - DNA, 122 bp, Homo sapiens
ggtgcaaaatggaaggaatccccaacgcaaagcagaataaggagacttgcaatagttaagcgcattttatttcaatagtgttaacaagtgacaacagagagaacacgaacctcccattaggt

SEQ ID NO: 345901 - DNA, 122 bp, Homo sapiens
cgatggtccgggccaccttcttgtgaatgccggccaccctgagctcctccagattgaagccgcggccggcgcgcaccttcgtgtggtaccgaaccgtggggcagcacacgatgggccggatg

SEQ ID NO: 345902 - DNA, 122 bp, Homo sapiens
aagcaatgagatcctcgatgtctccatggccgtttcatttgaacacgtagctgtggaaaccgggttttaggtcgagttaatcaggagcatctacgtaggagaaagttcccaagcaggatgcc

SEQ ID NO: 345903 - DNA, 122 bp, Homo sapiens
gccacccagctaagaagctgcccaggagtgggcagaacctcagtgtagtcgcagtgccctcgcctgggagggtgtctccgggaggagattgaactcgaatgttaagaattagtaatcattag

SEQ ID NO: 345904 - DNA, 122 bp, Homo sapiens
tcccttcccaggctctacggggcgccgcggatccgcgaacagccgtgcccggctagcgggcggcccagcaagtgtcaagacccttcggaacgacactttggcactcctcctctcccccgact

SEQ ID NO: 345905 - DNA, 122 bp, Homo sapiens
tagaacaatttaataaaagttatgtgaatgtagtctctctcccaaaatatcttattgtaccgtcctgcgggtaatgaaaccacagaaagtgaaacctcagataaggggggactactgtatag

SEQ ID NO: 345906 - DNA, 122 bp, Homo sapiens
tcggtgccgaccgtacaggctgtcctacctggggccccaggaggttggtggtcggggttccgaggtgttcagccactggggtttcgtggtggtccatggagggggtttcgtggctttcggtg

SEQ ID NO: 345907 - DNA, 122 bp, Homo sapiens
ccaccaggagccccgtgggcgccatggcctggcggttggggggttgcggggagtccgggtcggtcccctcggcgcccgcgctctcggccgggactgggaacccgtttcccggcagggctggg

SEQ ID NO: 345908 - DNA, 122 bp, Homo sapiens
gtggggccgcggcggcgtgggtggctctgcctctatcctgtgcccatcctcgcccgctcccgctcgccccagcacacgcacttacactctgggtcggccggctgctgcaccgccggctgccg

SEQ ID NO: 345909 - DNA, 122 bp, Homo sapiens
agcgtgaaaaccgctagaaggacaggcggttccctgacaaacagcgtagcgtgttccatccgtgctggctttgcaggagggcatagagattgctcgggatacgccagagcccttaagcaacc

SEQ ID NO: 345910 - DNA, 122 bp, Homo sapiens
ccggtgccatgattcagagacgcacagaaaattccagggccaccgagaagggacacgttgcgcattctgccagcgcaggggaggaggggatggaggcgagatggaggacaggactttgccag

SEQ ID NO: 345911 - DNA, 122 bp, Homo sapiens
gaagggagggaacaccctccattggccttactcaactcagctcagtattggaggaggcctcggtgttcttcacagactaaagaaccaagagcagatttgggctgggcacagtagctcatgcc

SEQ ID NO: 345912 - DNA, 122 bp, Homo sapiens
gaacagagtgatggtcaggtgtctggcctgacggaggaaagaactgctgaacagactgaacgaagattacctacccaggctgagagaagaacttctgggcagattgatggtagactggctat

SEQ ID NO: 345913 - DNA, 122 bp, Homo sapiens
gtccctggcgtctgacgccgtggggagggcagcgaggccccaggtgagtgtgtctgcctgcgcggggctggggaggcgccgctgggcagatgtgcgcccttgctgtgcgcctttggaagcag

SEQ ID NO: 345914 - DNA, 122 bp, Homo sapiens
caagtgtctggtttgtgcccctagctctcggtgcaaagcgttcctgcagaattgcttccacgtaaagggaccttcgggaaatttcgctggataccggctggcattgacaaacccagcgtccc

SEQ ID NO: 345915 - DNA, 122 bp, Homo sapiens
ctgcaattcctcatacagttttatgctgtttgtcaatttctgtggctgggatgaacttaacgtagttctcatagaccagaatttgcatgtctctgtctagagcccggatctgctgcaccatg

SEQ ID NO: 345916 - DNA, 122 bp, Homo sapiens
ggtcattcttcccgcgcccccaccggcctctgcgctctctcaggaggcagagcgaccgcgcggtccggaggccccagcgtttcccgtcgttggcgactctgaaattgccttttggaacaaaa

SEQ ID NO: 345917 - DNA, 122 bp, Homo sapiens
actgaggccatgcccatcataaatgatgtcgatacattgtcaaaaaattggcaaaccaggcgcggtggctcatgcctgtaatcctaccactttaagaagcagaggcagacagatcaccagag

SEQ ID NO: 345918 - DNA, 122 bp, Homo sapiens
gccctgtagacactttcggtttatcttaggctctgagccgcgcgtcccatcctgctcagacgtcagccagggtaccagcaagcagagagaagtgtgatgcttagcaggagtgctggagaaag

SEQ ID NO: 345919 - DNA, 122 bp, Homo sapiens
catctttctgccacttttaaatgacctcacatttccaagtataaatttggagaaaagacccggatcagaggaatcctccatcaaaactggacgccactgtctgatggcgttaattatgtttt

SEQ ID NO: 345920 - DNA, 122 bp, Homo sapiens
tttcttggccttcttgcagctttggcattcccctggtgggagtgaaatgcaccattggtgcgttccagggacgccaagatccgtggggcccagcgcaggggctgctggtaaggcactttcgt

SEQ ID NO: 345921 - DNA, 122 bp, Homo sapiens
ggtgggcacctggaggccttgtgcctgctggcaggggcagtagccgggtgggagctgtcacgtggggctcaggcccagcaagactgtcacctgatgcttcagggcggccagaatccgggttt

SEQ ID NO: 345922 - DNA, 122 bp, Homo sapiens
ttcctctcacacgcttctccccatcccacctgggtcctgccgcctcctcccgagagcaaacgtggagctatttgtccaagcgtcatatgcgagccgcaggagacgctcataaatccctgccc

SEQ ID NO: 345923 - DNA, 122 bp, Homo sapiens
aaattgcaagcaaggaggccgcgaggcctgacgggatttgtagtcggcgctagacgccggcgcgcacgcgcagccggggccggggcggggcggcggcactgcggtgaaagccgaggcagcgg

SEQ ID NO: 345924 - DNA, 122 bp, Homo sapiens
tgattgctgaaaaacagctagcaggcgtcccacagagaggggccgcggagcacccagctccggcacagacagctctccctcacacgtgaacaggagcaaccgcaggctctcgtctgcaccca

SEQ ID NO: 345925 - DNA, 122 bp, Homo sapiens
tcctccctggctccatcctgggatgatgaatggaggtcagggcgctgtcaatggacgacgcggcaaaccctccccaaccgaccgagggggtcgggggaggctgcgttaaggcttccctgaga

SEQ ID NO: 345926 - DNA, 122 bp, Homo sapiens
accgtagtctgtgcctcctccgcctcttgcttgacacacacacacacatacacacacacacgcagctctccagttcaaaaccaggcaatgtgggtgtggattttcctgcaggttccttaact

SEQ ID NO: 345927 - DNA, 122 bp, Homo sapiens
gccgactcactcggaagcctaggcaggaccgtgtccctgtgcggggaggacagtggaagccgacttgctcggagcctaggcaggaccgtgtccctgtgcggggaggacagtggaagccgact

SEQ ID NO: 345928 - DNA, 122 bp, Homo sapiens
cttctgttacatctatcttagattacctgctgcagaatgaggcatatattggctgctcgacggaagtgtgactttcttctctttcattatataaagacttgaaattgccccagtaatggctt

SEQ ID NO: 345929 - DNA, 122 bp, Homo sapiens
tgtcaaaggaggagaaatgggtccctaggctcacagaaggttgttgaggaccaggacacacgtgccagcatcctgcagggagaagcacaatgggagaggaggtgagacacctggactctgat

SEQ ID NO: 345930 - DNA, 122 bp, Homo sapiens
gaccgtgtaacagctcggtcctaagtgggggatctttaccaggcatcggtgtgcccacggcggcatctggcactgtggcccaacacaatcagggccaatgacttttttttctttttgagaat

SEQ ID NO: 345931 - DNA, 122 bp, Homo sapiens
gcagaccgcccgctgcccacccagaacgcagaccgcccgcagctcccccagaacgcagaccgcccactgctcccccagaacgcagaccgcccgctgctcccccagaacgcagaccacttgct

SEQ ID NO: 345932 - DNA, 122 bp, Homo sapiens
agtgaaaccaattttccaccttccacggtgtggtctgcactgagctgcaggcagggcttccggggccacaaattgcttccccagctcagaacattgccctcttctcccctccctgctgccct

SEQ ID NO: 345933 - DNA, 122 bp, Homo sapiens
cattaatatggcgccaaaagattgggttctcgatctgtagcgaggagggagggaggcagccgctgagcgcagcgttactatcccaccagtaacttgggcattgccggggcgggggccggagg

SEQ ID NO: 345934 - DNA, 122 bp, Homo sapiens
ctgccaggccctaggcctagggccccaccctaggaatgttcagcccccaatcatcatcagcggcactggctagagagcaagtctaagggaagctggcctcagtgtttctggaaactcaggaa

SEQ ID NO: 345935 - DNA, 122 bp, Homo sapiens
actgctcccgaaccagctcctacacatacctcggacccggctcaaatgcccacttgtggtcggcagagcaatgcctcccacagacgtccacgtcctaatccccggaaactgtgactatgcta

SEQ ID NO: 345936 - DNA, 122 bp, Homo sapiens
ggaagttggggcagagtggtgagatgtcttttatccccttgggacctggtcggcttaaaccgcttctttgaaaatggaacgcgactttcagacaaggcgaacgtggacgccgaggcggaggc

SEQ ID NO: 345937 - DNA, 122 bp, Homo sapiens
ccgccgccctccagagtgacgccactaagcatccaataagttttggaaattccacatcttcgccagtccactcacgcggggggcgggacctgacaaggccgtgggcggggcggccgaagggc

SEQ ID NO: 345938 - DNA, 122 bp, Homo sapiens
cagcggcctgcttgctctgctccagctcctcacggtggcgtttctcggcagcggcctgctcggcctgcagctgctggcagaggtgcttagctggcagcagctcactcaccagggcctgtgtg

SEQ ID NO: 345939 - DNA, 122 bp, Homo sapiens
ttcatgaggggtgcatagctgcatagctccctcagcaacttgcctgcatcttgataatagcgatctcttcattctttcttgtgaatcccatgcaggatcctctcttagtcctctctgtctcc

SEQ ID NO: 345940 - DNA, 122 bp, Homo sapiens
caaggagggttttgctcagcccaggctcgcacctgcctgctccccgcgcgacattaaaggcgagactccgccgtctggatatcgcaggaccacggagaatcccaccggcccttgctgagtca

SEQ ID NO: 345941 - DNA, 122 bp, Homo sapiens
gcttggcctctcaacccagacagttctgcctctaccacttaatagtagagctatcctgaacgaactaatgattcacattcagtatcctcatctgtaaaatgggggataatagtactcacttc

SEQ ID NO: 345942 - DNA, 122 bp, Homo sapiens
aatatccaaccaaatgtttaatccacaacattaataatgatttttaccaggcagatggcacgtgcctgtagtcccagctacttggggagaccgaggtgggaagttacagtgagctatgattg

SEQ ID NO: 345943 - DNA, 122 bp, Homo sapiens
cctcctgctgctcttgggggccctggccctgaccgagacctgggccggtgagtgcggggtcgggagggaaagggcctctgcggggagaagcgagtggcccgcccggcccggggagccgcgcc

SEQ ID NO: 345944 - DNA, 122 bp, Homo sapiens
gctgacgcgcgcggattggccggaagttgtgccgggggcgggtcgggggtccgggctcggcgctcgctccgggagagttgacaaagccccgcagggaaggacgcctcgcggcgcggcgcccc

SEQ ID NO: 345945 - DNA, 122 bp, Homo sapiens
ccggcaaccacgcccgcccgcgcagctgcagaggccggaaaaggcccgctcgcccgcgctcggcaccacccagcccgcgctccgggcgataccaccctgggcggcccctccaaaggccggag

SEQ ID NO: 345946 - DNA, 122 bp, Homo sapiens
ccccatggcggtcacaacctgaggaggagatggaatgcggtccagggccaaggccagccccggagcacccccacccctgcaggagtccactggccacacccctgcccactccccctcatcac

SEQ ID NO: 345947 - DNA, 122 bp, Homo sapiens
gcacctcgctcacgcgccggcgcgctccttttgcaggctcgtggcggtcggtcagcggggcgttctcccacctgtagcgactcaggttactgaaaaggcgggaaaacgctgcgatggcggca

SEQ ID NO: 345948 - DNA, 122 bp, Homo sapiens
cgtccacgactcacttcaaggctgaaccaagaaaacacagtaaaggaacttgccggcggccgcgacggtagcgtcagttagaaatcaggtctccagtgttcccagttcccaccagtccaact

SEQ ID NO: 345949 - DNA, 122 bp, Homo sapiens
tgtttttaggccctggatctttagaagtttagtcataactaaggccaacgtgaaaccatgcgtcatcccaacttaccatttgcagaaagcttccatctcccgttgttccagccttctttttg

SEQ ID NO: 345950 - DNA, 122 bp, Homo sapiens
ccccagggcccaagccgccttccagagacccataggtttgggaagcaggggcttggtcaccggggtgcgcaggtccccgcgccaagttctgcccctgctctcttggtctttgctggactgca

SEQ ID NO: 345951 - DNA, 122 bp, Homo sapiens
agtgcagttcaggccttcaacaccaagcgagggccttggagaacgtgcgaataggctttccgggaggcatggttccaaaggcgccttgcccagcactgaccgaggccacaccaggtgccacg

SEQ ID NO: 345952 - DNA, 122 bp, Homo sapiens
gtggtcaagcacatccgggactacaagcaaggagaccctggcatctttgcctgggagatccgcgaccggctgctggccgacggcgtctgtgacaagtacaatgtgccttcggtgagctccat

SEQ ID NO: 345953 - DNA, 122 bp, Homo sapiens
cctcactggcgcactatttaacaggaaatggaattcattgtggcaggtctcacttagacccgcctcagagagttctgttatgaaagtagcagagacatctaatacagccaattcacccgtaa

SEQ ID NO: 345954 - DNA, 122 bp, Homo sapiens
aaatatattttgttttaccgtgcctatcacctgccgtcctctctctagtaaccttagtaacgcctcctcggaggatcctctcagagcagctcatcagcgcttcagatcagcctctccctcct

SEQ ID NO: 345955 - DNA, 122 bp, Homo sapiens
ctaccctgctaggctctggagctgtagaggcttcctgaactgggagcagggtagggctgtcgccttagatcccgcccaagcccctcattccctccttgcacagatgcatacactggggccca

SEQ ID NO: 345956 - DNA, 122 bp, Homo sapiens
gcctatcatgtagcagtgtgtgaggcactggggatgccacagtgactaaacagcctacaacgcccctgccccccccggacatgccgttccagagtccagtccagggaggattacactgtgct

SEQ ID NO: 345957 - DNA, 122 bp, Homo sapiens
ggcccgagactgaagcgcgctccacgcctaccaagtgccgctcaaccccaattctgctctcggggagagaagagaactcctgccagacccgagtgttttcagaagtttgtcagtttagactt

SEQ ID NO: 345958 - DNA, 122 bp, Homo sapiens
ggcaggaactttggtggaggccagctgggcggtttcctcccttctctgcttggagctcagcgtccttgaacccgtggcactcggtagagagagaggagatgatcggaaagtgcgtgggaaca

SEQ ID NO: 345959 - DNA, 122 bp, Homo sapiens
cagggtccggaccctgcagcctccaacagcctgtgcaggtgtggtggcgtggccagcagccggcagccggatctgtgctgcactatccagatgcacgggggtggggaggtcagattttaagc

SEQ ID NO: 345960 - DNA, 122 bp, Homo sapiens
ttaaagcatagacaaatccttgcttagggtcagccagaccgtgggcttgctttgggctcccgcgtggacgctgaaggctcttcatgatttctcagaaaccttggtgggccacccaaaaagtg

SEQ ID NO: 345961 - DNA, 122 bp, Homo sapiens
tttttcttataagctgtccagacctggcttgaaaacccatcccatggcaaggcagggattcgctggccgcggttggctctatcttgatctgagcaagccgctggacgtccctagttatcttc

SEQ ID NO: 345962 - DNA, 122 bp, Homo sapiens
cagcaggcttcactcagtggatcccacaccggggccgcaagtggagctgcctgccagtgccgcgccctgtgcccgcactcctcagcccttgggtggtcgatgggactgggcgccgtggagca

SEQ ID NO: 345963 - DNA, 122 bp, Homo sapiens
agaactgatctctttcggccactccaggaaacacaaacctggggacggactgacgtgttacgcctcttctaatgacatttttttctttttcttttctgtaggagagagacgagagaccctga

SEQ ID NO: 345964 - DNA, 122 bp, Homo sapiens
ggccactccccaggatacctcggtgagtgagcaatgggaagtcggcccaggcctggtgggcgggtaggagaaatcaaacctttctctcttccctcaggagccttctgtcctagcaccacccg

SEQ ID NO: 345965 - DNA, 122 bp, Homo sapiens
caggcataagccaccgcgcctggcctgagagagtgatttttatccccttgctggaaactccgaaacaggacagcatgtgcccctggccaggctaaggcctggggctgacctgaggctatgtg

SEQ ID NO: 345966 - DNA, 122 bp, Homo sapiens
tgcagcaaaattccttaaaaggaataatctaacactcagcatcttttgtttctctcctttcgttctctattaaacccactgcaatgtggcttttatccccatcccacaccaccaaaactgca

SEQ ID NO: 345967 - DNA, 122 bp, Homo sapiens
atacgaccggggggctgaggccaggtatgctttacggcactgccgggcaatgaagcagcccgcgctaggagctggggacgaccacgatgagaacagaaggacacggggtcgggagcctcgct

SEQ ID NO: 345968 - DNA, 122 bp, Homo sapiens
tcattttgtgtttgtcttactcagcacaatcaaatatgacttttaaaaattaaagtgggccgggcacggtggctcacacctgtaatcccagcactttgagaggccaaggtggatggatcacc

SEQ ID NO: 345969 - DNA, 122 bp, Homo sapiens
tagccgccccacccgagcgtgagcgtggcctccacggtagccgccccacccgagcgtgagcgtggcctccacggtagccgccccacccgagcgtgagcatggcctccacggtagctgcgcca

SEQ ID NO: 345970 - DNA, 122 bp, Homo sapiens
gttttgaaaataacacaggctctaaaaaccctaagaagcggtgcaacttttggcaggaatcggggttagcgggacctcaagggctcactgcggctaagtgaacgctgactggtcctccagcg

SEQ ID NO: 345971 - DNA, 122 bp, Homo sapiens
cgtggctgtggtttccacaagacaacctggctctgtgctgtcacacccagcctccaacagcgccttgacatccaaaaagcatggcagtttcccaagctcggctgcacagggaaaacacccgg

SEQ ID NO: 345972 - DNA, 122 bp, Homo sapiens
ccacgacgactcatacacagctacgggatacggccgggcccctggtggcctctctctacacgactacaaactcctgaaaccgagcctggcggtcaacctggccgacccctaccggagtctca

SEQ ID NO: 345973 - DNA, 122 bp, Homo sapiens
ccgtgaatacacggtgactccttatttggtttttaatactttcactatgtttcatgtcttcgggaaagcaaaagaacaacgtactgtgccaaaagcactaacttacgaaaaaccaatttaga

SEQ ID NO: 345974 - DNA, 122 bp, Homo sapiens
tcttctctgccctctttagggacacatcgccgtgcagattcagccaggtacttgtgggttcggttgataagactgagaattcctcgttcctcagtttcctcgtttgtaaaaatcgagcttgt

SEQ ID NO: 345975 - DNA, 122 bp, Homo sapiens
ccatcccatcccggcgatgcctgggaccctcactgctgctgccagggctgatcttggagccgggagtagagaggggaggaaagaggctgggcgcggtggtttatgcctgtaatcccagcact

SEQ ID NO: 345976 - DNA, 122 bp, Homo sapiens
ttcttgtttggtctctctgtgactggatgctcctctgccagtgtctgagctgagctccttcgctctgtaacccactttcccaggctggcgggcgggcgggcgagggagccggcaccaagcct

SEQ ID NO: 345977 - DNA, 122 bp, Homo sapiens
gttgggctttccagggttctatctcctttgctgcataggtgaatgcacctggtatcctgccgttcaacaccatctatacactttcaggtccccacttcatgtcaccagccagacctcgctgt

SEQ ID NO: 345978 - DNA, 122 bp, Homo sapiens
attatttattatttatttattatttatttatttacagatgaatgtatttatttgggagaccggggtatcctgggggacccaatgtaggagctgccttggctcagacatgttttccgtgaaaa

SEQ ID NO: 345979 - DNA, 122 bp, Homo sapiens
agtttgatcaaaagtcctagggctgggctctcttggcccgttggggtcatgttcctatctcggaatcagtcagtgggccaggagaatgtggggtgctcattggccaggctgcagtcatgtgc

SEQ ID NO: 345980 - DNA, 122 bp, Homo sapiens
gcttcccaggttcaagtgattctcctgcgttagcctcttgagtagctgggatttaaggcacgtgccaccacacctggctaatttttgtatttttagtagagacggggtttcaccatgttgag

SEQ ID NO: 345981 - DNA, 122 bp, Homo sapiens
ggcgggcgggtttgtgtgaacaggcacgcagctgcaggtaagagacgcttagggtatccgcgaagaagaccgcggagtcaccttagtcctatgtttcccagctggctgtggaagtaggcacg

SEQ ID NO: 345982 - DNA, 122 bp, Homo sapiens
agcagtcccagggagcccgctgccctgagccatttgaccagaggggtggcccggccagctcggcacagtgctgaattctggggacctcatcgctcctgccggtcccctaggggctcacagtg

SEQ ID NO: 345983 - DNA, 122 bp, Homo sapiens
acagctactgtgttttccggtgaaatgaggaccaggcaaatgtaaaggaataaggttcgtcggcagccaacatcagcaactacgacatcaaggcagccagcctgcacaacctgaagaaaaga

SEQ ID NO: 345984 - DNA, 122 bp, Homo sapiens
ttaagaactcctagctgcggccgtccggactctccctggtgctggtggaagtttctggggcgcactctcatgttgctgcctggggagtcttgcaccccacaagtgcgcctctctcctcccgc

SEQ ID NO: 345985 - DNA, 122 bp, Homo sapiens
ccacacccccaggaaccctgctcggggccggcgggtgaccttcctaggcactgctgggggcggagccaggaaacggctcgccccgccattggctggggcgccggatttctttaaaaactccg

SEQ ID NO: 345986 - DNA, 122 bp, Homo sapiens
agtagcttttcttgtactacttgtttgtcccttattctgaaattacatgtcgtgtgtgtgcgcgcctaagtatcctttttaaatggtagtgttaggaaatggtaattgtctcttaaatgtcc

SEQ ID NO: 345987 - DNA, 122 bp, Homo sapiens
caagatggcagcctcctggcaactccagtcactttataaatatggctgccacaggaagtacgtcacggaagagggtgggaaatctgcgcgcgcacgctgcaaaggggctttttgggacgcca

SEQ ID NO: 345988 - DNA, 122 bp, Homo sapiens
ggtatacaatttatgcagcctactcctctctttgctttaacttatcacctgacaggaacccgctgcagtggagccatgctgaaggggttaggaggagcagcggaccaggggtcatctccaag

SEQ ID NO: 345989 - DNA, 122 bp, Homo sapiens
ctgattgacaagatctacatccaatgcccagaaaacacatcctacacaggcacagtgaagcgtggagttgaagaattttccagtgagttccatcaaagtaaataaaccaacctagagcatca

SEQ ID NO: 345990 - DNA, 122 bp, Homo sapiens
aactgggcgggcagccggcctctgcgcccgtttatatcgctcctcacaaaatggcgcccgcgccacccggaaatgaaaccttctgattggcccaccgcgccccgcttcgtaacgaccctgcc

SEQ ID NO: 345991 - DNA, 122 bp, Homo sapiens
ggagagcggctggacccggaatatcaactatctgcgaagcccccccttctagcccaactccgccagcctccccgcccccgccggggaaaagtcggagtgcatttttacaaagatgagaggag

SEQ ID NO: 345992 - DNA, 122 bp, Homo sapiens
agtcagtggcagcaaggaaccgtccagcgcttgcagccttttggagccaggaaaaccacccgagagtttgccatcctatggcgaactcaactcttgtccaacaaaaacagccacagatgact

SEQ ID NO: 345993 - DNA, 122 bp, Homo sapiens
tcaatgcccttctgtggcccagttactcccggccatctgtgtgggagtctctgcaggttccggggaaccagggcgagcacaggccccaggctacagaggctcctgctgcctgccaggcgggg

SEQ ID NO: 345994 - DNA, 122 bp, Homo sapiens
ggacatgcaggccggaggtgcagagggcagagggcaggggagagtcttgcttaggcaacacgggggccacttctgaccctgctgcccgctcatgggatgtgtgaccttcagctgctccaaag

SEQ ID NO: 345995 - DNA, 122 bp, Homo sapiens
tctcccccgcagctagcagttctgcagggctcgcagtctcctgcagggttttgtccgcaccgccgaatctcgcgcccagcctccctcaagagccgccgtttgaatctgcgcacgcggccctg

SEQ ID NO: 345996 - DNA, 122 bp, Homo sapiens
tcaggtcagctgtcggccaccaggccagggtttgccactggcaagttggattttgtgttacgtgcctaaccaggagttgtcaccgcttgaggcttaacctggttctgggcggctcggtgtgt

SEQ ID NO: 345997 - DNA, 122 bp, Homo sapiens
cctgtccacgtgcgacctgcccccactgccgggtgcctcaatcacagcctttctgttccccgccaagctgtgctcaatggtttctaatgattctcacaccgcgttttctatgtcaaatacat

SEQ ID NO: 345998 - DNA, 122 bp, Homo sapiens
tttccctgatcctgtctgtttttctgttggttagaacagtccctgtactcagcacactgtcgttttgttgtcttctgtctcctcctttagcctcctaccttgcagggtttggtcttgttccc

SEQ ID NO: 345999 - DNA, 122 bp, Homo sapiens
gctgctccctctcagctggggagatggtaatgatctgatattgctgtaggagcagttcagcgtgctgcagagaggagggtgcaaattcactcatcccaattggccctgaggatatagagatt

SEQ ID NO: 346000 - DNA, 122 bp, Homo sapiens
ccacctccctttcctgctgcccacgctcctcctgctgctgcccctggctctccatcagcgcggcccgcagccgttccagctcattgcccatctgctctgcctcccgctccatagcctgcagc

SEQ ID NO: 346001 - DNA, 122 bp, Homo sapiens
ccaaagctcaaataagaggggccggcggcgcggggaagaggaggagccaggaggctcggccgctccattcactcagcagcccaagcccggccaggcagcgcgcgctgctccttgggggcgcc

SEQ ID NO: 346002 - DNA, 122 bp, Homo sapiens
gggcttcggccccagagttcggggaccgctgcacagccagagggagcgcgcgggaagagccgcgtcccgccagccccgtcgcctcgtgggcccccccgggcctggcagtcccccaaccccct

SEQ ID NO: 346003 - DNA, 122 bp, Homo sapiens
ctcagcctcctaaaggcatcacccccaggcacagggatggctctctgctcagtgctcccacggcactctggacatggctcatgtacagcagtgtcgcaggaaatctgctggatgcatctgcc

SEQ ID NO: 346004 - DNA, 122 bp, Homo sapiens
gggccctctcgcgaagccgcagccggcggcgccggaccctctccagcctcctccgcgcctcgcccacataggcagcctgggtcaacggctgtagccgctcggccagttccgcgcgcagcggc

SEQ ID NO: 346005 - DNA, 122 bp, Homo sapiens
caccatagctttgggccccccggccctctcgggctggtgttcacctgtaaatgctgcttccgctgttcaagcgctgatgctcctcgtcgctcacgggtgaacagctgctgcccacctccaag

SEQ ID NO: 346006 - DNA, 122 bp, Homo sapiens
gagaaagtaatattttgcagcacagtacagggtaaactgggtccaggtgggcgtagccgccgcgacaccttcacgtgaccgcggacagcttaaggaccccgcatccagtgcgcctgcgctgg

SEQ ID NO: 346007 - DNA, 122 bp, Homo sapiens
atgaaactggtgagcctccggaccctgagcagcgtccactcagagcaagtgtttgcactgcgtctgcaggacaaaaagctcccaccgctgctctctgagatctgggatgtgcacgaatgact

SEQ ID NO: 346008 - DNA, 122 bp, Homo sapiens
cgaaactgagtatgtgcagtaggatggatgtttgagcgacacacacgtgtaacactgcatcggatgcggggcgtggaggcaccgctgtattaaaggaagtggcagtgtcctgggaacaagcg

SEQ ID NO: 346009 - DNA, 122 bp, Homo sapiens
acagtgattcatgcacagaagcggaggtaccctgagccgtcccaccttggaacactagttcgttcccctccagcctggaaaatcagcatcacctctgacaggctggtttctccaccaggctc

SEQ ID NO: 346010 - DNA, 122 bp, Homo sapiens
agcctgtgtctctaaggggaatctggagggcaaagtggggaggaggttgaatcagtccttcgttccacagctgggtatgagacagacagagaaattagaagtgttttttcctttttcctcct

SEQ ID NO: 346011 - DNA, 122 bp, Homo sapiens
ttccaaaggattgttcttttcatttgcccgcctcatgtggttcttattcttgctgtcacccgggatcttatcgcaggcagggatgggcagttccgcggctcggaaaagctgagataaggagg

SEQ ID NO: 346012 - DNA, 122 bp, Homo sapiens
cctcctccgggggctcagcgcctgcagacggagaggtgcaccgtgcggagtacgctttctcggaaagccgcgccctgtggcacctttgctttgcagaggaggaacaaaagagctcctggacc

SEQ ID NO: 346013 - DNA, 122 bp, Homo sapiens
catacaccatgaaagtctaacctccccctctacgcagttaccccatcatgaaaggttgctcgtagacactcaacgttttctcacacaccatgaaaatcgatcctcccctctatgcagttacc

SEQ ID NO: 346014 - DNA, 122 bp, Homo sapiens
ctggatagtggcatttaatgcctgcagtgtcgggggtggcagcgctcgggccggacgtggcgaggccaagcgggcagcgctgctctggtgccggctcccggattgcaggcctaatcgatgca

SEQ ID NO: 346015 - DNA, 122 bp, Homo sapiens
ttccggaaaggggaagagcagccaacatggcggcggaacgcggcgcggggcagcaacagtcgcaggagatgatggagggtgagcggcccctgcgggcggcggcccaagggcccagcgggcgg

SEQ ID NO: 346016 - DNA, 122 bp, Homo sapiens
ttctcctgacccccctgcatagctggtaccgaggggacaaccccagcaagcccatgaacccgctggtcgctggggccttcggagccattgcaggcgcagccagtgtcttgggaaacgctcca

SEQ ID NO: 346017 - DNA, 122 bp, Homo sapiens
gaggtgccaggctctttttaacaaccaattcttgtgggaactgagtactcactcaccccccgacccccagggaggacattcatctattcatgaggatccacccacagaacccaaacatctca

SEQ ID NO: 346018 - DNA, 122 bp, Homo sapiens
gaggagtccaggcttacaactctgggactgccactttccattttaataagagttaactatcgctctccgggctggtctcccagaatagatgggtgggagggttgggtctccactgtccctgc

SEQ ID NO: 346019 - DNA, 122 bp, Homo sapiens
gtagactccacactcactgctgagctctagaggccctagggaggaatccagaggaagtcacggaagctgggagaagactgagcaggccgaggggtgccctccttggctcccccacctcagca

SEQ ID NO: 346020 - DNA, 122 bp, Homo sapiens
cgaggacgagagccgtacagtgcttcacgtgctgggggacaggacctattgcaaggcccccgggcctacccatggtaggtgcaggcctgtgcgcacaagggtacttaactccgacacatacc

SEQ ID NO: 346021 - DNA, 122 bp, Homo sapiens
ccaaaacagtgagctgtgatgctatgattgtgttaccgtactccaggctggatgatagagcgagactctgtctcaaaaaaaaaaaaaaaaaaagaagaaagaaaattatgagaagtgtctca

SEQ ID NO: 346022 - DNA, 122 bp, Homo sapiens
atgcctattttgctcacttccctattctggtgctttggttggtcctttgagcaagatccccggggctaagggtgtgacttcatcattcctttctctctctttccctctagggtcacatctcc

SEQ ID NO: 346023 - DNA, 122 bp, Homo sapiens
gcctcggagcgtcgcgcgtgcgcaattgggacacagccggctggggactgctgggagggccggaccctgcgagaacgggtgggcgtgtgcccggtgggcgcgggaggggcccgggctgcacg

SEQ ID NO: 346024 - DNA, 122 bp, Homo sapiens
actttctaagggagcggcgcgagggcttgtgggaaatgaagcgtgcactttctaagggagcggcgcgaggacttgtgggagatgtagtgtgcacttttcggcccccgtcgcgggagccgctt

SEQ ID NO: 346025 - DNA, 122 bp, Homo sapiens
ctggtagatgacagagacgggagaatccaggggtcaccggggcctgctggacgacagagacgggagaatccaggggtgagcagtggccaccccagaaacagccagcgacaccacaggggcca

SEQ ID NO: 346026 - DNA, 122 bp, Homo sapiens
atttaaaagagaaggttggggacagtgacacacacctggacttacagcactttgggaggccgaggcgggaagattgcttgaggccagaagttggataccagcctgggcaacataaggagacc

SEQ ID NO: 346027 - DNA, 122 bp, Homo sapiens
aagtttaaaacaatattcgctctctctaggctccccttctgttctctcgtttttttcgcccgcaggaacactccaagttccacagttaaagaggaccgggagggcaggaatgggtggggcct

SEQ ID NO: 346028 - DNA, 122 bp, Homo sapiens
gttttgggtggaacctcccggggaacagtgtacctctcccccaacccccgctctgggggccggtgatggatgtgtgctgccaggtcaggatccttagtcctcaagaccagcccccagccaga

SEQ ID NO: 346029 - DNA, 122 bp, Homo sapiens
tgccctggcgtcagccagacactggggtgctgctgggcgtcgagagggctgctgcggggccgggctaagcctggggggctgcaggtgtcggggtggatgtgggcatagcggggctgctgggc

SEQ ID NO: 346030 - DNA, 122 bp, Homo sapiens
agacagcactgcagatcgcagagcagacggcaccccttctgttactcaccgacccgactccggtttgaagaattttcagtccagaggtttcctccagtttgtctttgttgtcaactgttagg

SEQ ID NO: 346031 - DNA, 122 bp, Homo sapiens
agcgctccgttaccttgtcgcagtagagccccaccagctgcttcatccgccagtgtggggcggtgaagacgtccacttcttcaggaaagggcgccatcgccactgcctcagcctccgcctca

SEQ ID NO: 346032 - DNA, 122 bp, Homo sapiens
gccttgtttcagctgcgggatgagtcagtgcgagcaggaagcacccccagcacaggcctgcggtgagtcaggggaagcagaacccagaacagcagggagcggccacctggcagatggcccaa

SEQ ID NO: 346033 - DNA, 122 bp, Homo sapiens
ctagtatttttatcgtgaaaagtgttctttttggtgcaatgttttaacctttcctaaggacgtttgtagacaattgtgtagtttgtattttataccaaagcatagcaacattgccgccttgt

SEQ ID NO: 346034 - DNA, 122 bp, Homo sapiens
gatgcccacagaggaagccatgtgttgtatatctagcacagccgcagccttgcatggaaccggcacctgtgcctgcgcgtggaggtgcccacccgccgcagcagccagcatgcctggctctg

SEQ ID NO: 346035 - DNA, 122 bp, Homo sapiens
tcttccaccaaatgactgtgctggagtctctgtgaatctgctgtgtttctggggactctccgattcatgaatcgtttattgctcaactaaactcctttaaagtttttcttttaacagaacta

SEQ ID NO: 346036 - DNA, 122 bp, Homo sapiens
tcctcaggatttcgatatgcaaaaaatcaaatctctcatgacccgacaggtaagtcgcggcggctgaagcaaaggcttccttcatctcggaagtgagaggagccgagatgttctgtccccaa

SEQ ID NO: 346037 - DNA, 122 bp, Homo sapiens
aggtgcgctccttctccggctgcttgtagcactggtctcactgtccccgccgtcagccaccggttccttatccgtctcattccccattgtggcttggctgagccggtcgccaggcctcgctg

SEQ ID NO: 346038 - DNA, 122 bp, Homo sapiens
cctgggatatgcaccagatcacattcacaagagaacctaccatgggtgtgtccagcgtcacgcacaattctcagtgaaacagcttaatctccacacttttctgtctcacaagcaaattagga

SEQ ID NO: 346039 - DNA, 122 bp, Homo sapiens
gatctgaagttaattgttcgactggaaggaaacctgtgcgctccccggagcatgacgccacgccgcctccttggcgctgcagagccaaagccactggcgtctgccgggatggaccttccctg

SEQ ID NO: 346040 - DNA, 122 bp, Homo sapiens
aaaccaagctgtgctctgaccatcttgggctcacgtcttcaggacttcctgaggctgtgtcgcaggcacacatcctcaaccttggcaaaataaactctctaaattaactgacctgtctcaga

SEQ ID NO: 346041 - DNA, 122 bp, Homo sapiens
tgggtaccgggaggtgtgagtctggcaggtgcacacccaggcagggaaggctcacccgaccggctgtctctgaaagctgtcagaagcctgagtggcctgctagagcggtttcctagccccgc

SEQ ID NO: 346042 - DNA, 122 bp, Homo sapiens
gaccttccatgggtcctttggagccctgggttttggagcttgtccttcctcagtgccgcccgccgggacgtggctgcaccagggccacagcacctcgggggccttcatttcatttatgccca

SEQ ID NO: 346043 - DNA, 122 bp, Homo sapiens
agcgggccgttactcttcttcccgcccagctgaggctgcacagacaggcatgcaggcccacgatgatagcaattgacctgtttccaggtctgaggctgaggctgagaaggggaaactgaggc

SEQ ID NO: 346044 - DNA, 122 bp, Homo sapiens
aggtgggaatgtagttgttctaacctgtgaactatagttacctgtgctattgagatagcacgatatttccctgttctgctttttaaattaaaagatctcttattgtgagccaactcagaatg

SEQ ID NO: 346045 - DNA, 122 bp, Homo sapiens
aactgcagttaagcagtgacagctaccctctgtccaggctctgaggccagccttctgctccgtgagtcactgacagtgagtctctacagagactttttctttctgtagcagccaaggtaccc

SEQ ID NO: 346046 - DNA, 122 bp, Homo sapiens
tgctagggtaaactaaagcataaactaaacaaaacagaagaaaaaagtaacaaatcaaaacggggtatgctctccaatctcaacatggctacagagcatggttttagaaaatgagagagaag

SEQ ID NO: 346047 - DNA, 122 bp, Homo sapiens
gcacctgcttgccgtgccaaagccccggccccaccgtggggacctcctaaagccacgttgcgccaaagccccagccccactgtggggacctcctaaagccacgttgcctcggcatcccctgt

SEQ ID NO: 346048 - DNA, 122 bp, Homo sapiens
ccagcatacttttatattcatctcccctgcctcagattccttcctcgtcctctcacacagcggggtgcagggtgaggaggagagcttggatcatttgcacttagcatttaagcctctcttca

SEQ ID NO: 346049 - DNA, 122 bp, Homo sapiens
tcctgagttgtgtaaacgttgaaagttaggggaatgactgtacatctccgacactctccgcgagtccccatggggaaagctactgcctgataaatgattaccaaagggaacagctcttcctg

SEQ ID NO: 346050 - DNA, 122 bp, Homo sapiens
tcggcaccttctttccagggcatgcgacgtgatcattttcacgaatgcagcgtgttttcccggcactgcctgtgcgcatcgcgttctccagccaaatcaaaacatgctccgggcccagggtc

SEQ ID NO: 346051 - DNA, 122 bp, Homo sapiens
ggattggtaactccaaggagcccaagggaccagttcttctggtttccctatgtggagacccgggggccttggcccttggctgaaggtgggacattgatctcagccttacagcacaggctttc

SEQ ID NO: 346052 - DNA, 122 bp, Homo sapiens
cctttgctgcgcggaccccgcaggccgggaagtcacgcaggtggtagtagtccaggtggtcgtaaactcctcctcatagcttatgggtggcggcggctgggctgaagactgcggacaggaca

SEQ ID NO: 346053 - DNA, 122 bp, Homo sapiens
cagaagacattagcatttgaattggtggtaaaacaggtggccctctccaatgccagtgggcgtcgtccactgggttgaggggctgaatagaacaaaaaggcaaagaaaggttaattaatgct

SEQ ID NO: 346054 - DNA, 122 bp, Homo sapiens
tagtcaaatcaagccttctagacagaatagtttctatcacttggtatatatcagctaacacgggcagtgctggggctgcagggctgtcatggctctccctccgagacagaagggcagaacat

SEQ ID NO: 346055 - DNA, 122 bp, Homo sapiens
cccccacaatcctgtcaggggctccctgacagtcctgggggtggagaggccatcccggggcgtcccccgcgtctgtgtccttgctgccttcatcccctggggcctgtgaataaagctgcaga

SEQ ID NO: 346056 - DNA, 122 bp, Homo sapiens
aggctgtggcctgcaccagggagactggctcagggccacgcagggccttgcatgcccatgcgtgctgcctggctctgggtggtcccagcaggctgggtggaggagaagagctgggggggctt

SEQ ID NO: 346057 - DNA, 122 bp, Homo sapiens
aagcatacagaaagttctgatgtcagtgcagttttcaacagcacgcgccactgtctggtacgaacgtttcattcttagttgaaactaaattgtcaacataacacatgtcctaagcactatta

SEQ ID NO: 346058 - DNA, 122 bp, Homo sapiens
aaagccagccagtgagagccggaagcatcctccctgcggccaatggagtggggctctgggcgggcccccgagtgtttgtgttgtggttttgggggagggatgcggaggggaaagtttgttta

SEQ ID NO: 346059 - DNA, 122 bp, Homo sapiens
attctggcccgggcactgacgctgatcgcggaaattacctcaccgccccccgccccgccccgccctgccccgcctccagcgacagctcggcccccgctgcgagggaacctcgggaagcgcca

SEQ ID NO: 346060 - DNA, 122 bp, Homo sapiens
gtggcgggtcgggcccagggacgtgggtgggggctgggcgggcgaccagaccaactccctcgctcgcgcactctctcgcccgctcgctggctcactttgtgtttgcaaactgcccgcccgag

SEQ ID NO: 346061 - DNA, 122 bp, Homo sapiens
gtgttagggggaagctgagattaattttcacatcttaagaatataagttagtggcctggacgctggcagcagccggggaaaaaataaccttcataattactgtggcttcagggaaaggtttt

SEQ ID NO: 346062 - DNA, 122 bp, Homo sapiens
attccccctgcatctcaatgtatctcccaaacattccttcatattttggaaagaaccattcgacatttttttctcttgatattaaacattttatacatatttatcacaaagtgttagaaaag

SEQ ID NO: 346063 - DNA, 122 bp, Homo sapiens
catgcttgcagagtcatcttcagaatgagtcagctccgcttgtcccaggcaggagactcacgagttgatgtgaaatgcggattccctatgagacggaggacattgcatgtctcatcccatca

SEQ ID NO: 346064 - DNA, 122 bp, Homo sapiens
gggcggcgggcaggcgggcgggcggtctgacgaggcctcatgtgtcccactctctccctgcgcgggagccacgtgtgcagcagccactgcgtctctcgacagcccctgagggctcggggccg

SEQ ID NO: 346065 - DNA, 122 bp, Homo sapiens
ggtggggaaagagaggttccaggcaggtcagcagatcccacagctgccacttgaggtgcacggtggcacgggggatgcccctgggctgagacggaccagactggtctgagtcccagccctcc

SEQ ID NO: 346066 - DNA, 122 bp, Homo sapiens
aaagtccccagttccgttcttggtcagctagaccgcgaacccaccggaaggaataaattccggacacaagggggcgcgcggggcatgcgtaaaagcctgctccggggccgggcgtggtggct

SEQ ID NO: 346067 - DNA, 122 bp, Homo sapiens
gcctggactggcagagcgggctagggaagaagaggaaatgagaggacctcgaggttcaaccgagtgtctgaatggaaactaactcccgacagaccatgcacaacgtttcttccacagcaccc

SEQ ID NO: 346068 - DNA, 122 bp, Homo sapiens
ccagcaccagggcctccagctgagtttctcatagcaatgctggctgggcaaaaccatctgcgtgctctcccttgctgttcctggcaccaagggtaggcatctgcacaatggctggcccagat

SEQ ID NO: 346069 - DNA, 122 bp, Homo sapiens
acaaaacgccctgtggttttcctgcctggcttgtcccgggagttgtctgaagatgggcatcgccaggagggggcccctggccgagtcagcaggggtcccagcagtgggcgccccagacggcc

SEQ ID NO: 346070 - DNA, 122 bp, Homo sapiens
cactccttcggcctccgaagacggggttagcggagcccagggcggggtgaatgccgggtgcggctcatcaggcccgagagggcagggaggaaggcctggggccaggatctagttaggcactg

SEQ ID NO: 346071 - DNA, 122 bp, Homo sapiens
gggctagagttaagtccttaagctctttagccagtgtctcatctagcggctcagctcatccggctctgctgggtggggggtggggagtggacagggtgaggaatggttccgataactcaccc

SEQ ID NO: 346072 - DNA, 122 bp, Homo sapiens
caacattcccctctccctcaaaaaccccaaagaatcaccaaatcccagtatacaaggcaacgctctagcccacctacactattacaagtccaaactgtcctcgcccaggattcttcaccgct

SEQ ID NO: 346073 - DNA, 122 bp, Homo sapiens
accaaaaaagaacataagttgttccacagggctggttcttcgacacatagacacaaactgcgattctgtgaagtgttgctttataatattgggttaaggagaaggtcaaggctgcagtgagc

SEQ ID NO: 346074 - DNA, 122 bp, Homo sapiens
gaaaatacggcgcgctcggcatcgtccttctgaccggggactccagcatctcagtcatcgcgtcaccaagccccacgtgcaggttctggcatccatcatggcaaactggagaccgcggtgaa

SEQ ID NO: 346075 - DNA, 122 bp, Homo sapiens
ctttagtgcccagaactatacctggcacagtaagtgctcagtaaatatttgctgaatagacggagctagggactggcggttccactttggtgcctctaggagtgctcctctccccatgggaa

SEQ ID NO: 346076 - DNA, 122 bp, Homo sapiens
ttcaccacattggccaggctggtctcgaatttctgacccacctcggtctcccaaagtgcccggcctaaaggtttgatttttatccctggtcaccatttgtgggcctggcagatgtgggcaca

SEQ ID NO: 346077 - DNA, 122 bp, Homo sapiens
ctgtaatactgctctgtgcacacaggaattatgatgtgagctcagtaagacacaacctcacgattggacatgcggaggtgactcaggcccaagtcagggttacagctagcctcccggtaaac

SEQ ID NO: 346078 - DNA, 122 bp, Homo sapiens
tctgactttccacctgggctctttcatctataccatgacatctatcccagggacatgacccgctaccaccattacagaaacaccacagccacaggttccaaggcagaccagggcatttcttt

SEQ ID NO: 346079 - DNA, 122 bp, Homo sapiens
taaacggggttaaaccagggaatccgccattcaaattcctggcccaagtgtctccggggtcgcggtgcccaaaggagggtgggcgaggctccctgggcctgcgctgcggcggcctgacagcg

SEQ ID NO: 346080 - DNA, 122 bp, Homo sapiens
gaggtgggagggtcacttgagcccaggagttcgagaccagctgggtaacacaatgaaactcggtctctacaaaaataggaaaaattagccaggcacagtgtcacgtgcctgcagccctagct

SEQ ID NO: 346081 - DNA, 122 bp, Homo sapiens
acctgcacaggaagggtgcacggaaacacgtcatttagaacatcccgggcccgaacatcgcgggccctaacatccaggtatccgtgccacttctccgtaccggtccaaggaggccgcggtgt

SEQ ID NO: 346082 - DNA, 122 bp, Homo sapiens
tacctccctcccggacggggcggctggccgggcagagaaaaccagtcaggcgtggcggcgcgcacctgcaatcgcaggcactcggcaggctgaggcaggagaatcaggcagggaggttgcag

SEQ ID NO: 346083 - DNA, 122 bp, Homo sapiens
aaggcagtgacttctgagacaaggcatctgcctttctattcttttcagaggaaatctcggcgttactaccccacacgcctggccatcaatctctcatcaggtgtctctggagctgggggcac

SEQ ID NO: 346084 - DNA, 122 bp, Homo sapiens
gaggcacacaagcccggttccggcatctctgctcctattggctggatatttcgtattccccgagctcctaaaaacgaaccaataggaagagcggacagcgatctctaacgcgcaagcgcata

SEQ ID NO: 346085 - DNA, 122 bp, Homo sapiens
agagagcgagcctgtgtgctggcagcgctgctcttgggaggtgagtgacaagcacaattacgcgctgctgcaaaagcaccagggacagggatttacgaggctcctctgcagtggctgctctt

SEQ ID NO: 346086 - DNA, 122 bp, Homo sapiens
ggagcgccgcgggtcctttctggcgtctgcagagcgggcaggtgctggggacgcagacgccggagccagggagcgggcggttggagtcttaagtccaaccggttccccgcataggtggctgc

SEQ ID NO: 346087 - DNA, 122 bp, Homo sapiens
ttttatcatgacttggtggacattgatggaaggcttctcacatgcacatatggcatagaacgtggatagaaaaccagtaccctggaagacacaatcaggattccaaaagaagtaactggatg

SEQ ID NO: 346088 - DNA, 122 bp, Homo sapiens
gagtggttcctgagcccaggtctgcacgtgtccccggctggagtgagtgtttgctgagctcgggtctgtgtgcacgtccccggctggagtgagtgtttgctgagctcgggtctgtgtgcacg

SEQ ID NO: 346089 - DNA, 122 bp, Homo sapiens
cgctgccgcccccactgggcatgcccttgttctcctcgcgcattccgcagcccccagacgcgcagcggcccggataatccaccgttggccgtaaacttaacgacactcttcccttctttccc

SEQ ID NO: 346090 - DNA, 122 bp, Homo sapiens
gctagcagcctcgcgttccagggctgggggtgcgccgccgggatcctctctgatcgcccacgccccatctggggtccccattcagccgtcagccctgttttgtcctaaggtggtcctaacta

SEQ ID NO: 346091 - DNA, 122 bp, Homo sapiens
ttgtgcattcgttcattcacttacttgtcaagcatttactgagagctatcaatggcccgacgtttttctagggctgtggatatggcagggagcaaaacaaagtccctgctcccatgcttctt

SEQ ID NO: 346092 - DNA, 122 bp, Homo sapiens
gcacgcagccccaaactggtccgggccacttgggtcacagccgcggttcccgggagaaagcgctccctagccccggaacagccaatcctcggccctagccaggtatgagctcccaggcgagc

SEQ ID NO: 346093 - DNA, 122 bp, Homo sapiens
cccttcctaggaatttgctttgcttttaagaagcacccccaactcagaaatccaatactgcgaaagcatttggactgctcagtgttgctgcccgagggcagcaggctgaaactttaaagggc

SEQ ID NO: 346094 - DNA, 122 bp, Homo sapiens
gggaagagcaagtgtacaggattatgatgcaagcaagtctggaatgtttatggaagagcacgaaggccaatgaggctggaatgcaatgcaaaaataggaaagtagtaggagatgaggtcaga

SEQ ID NO: 346095 - DNA, 122 bp, Homo sapiens
ctgtacactgcaggggactctatagcagacgctgtacactgctggggactccatagcagacgctgtacactgcgggggactctgtaacagaagctgtacactgcgggggactccgtaacaga

SEQ ID NO: 346096 - DNA, 122 bp, Homo sapiens
atggagactgtgccgtaccagcccttccccacgcacttcaccgccaccaccatgatgccgcggctgcccaccctctccgctcagagctcccagccaccaggaaatgcccactttagtgtcta

SEQ ID NO: 346097 - DNA, 122 bp, Homo sapiens
tctccttcccaactaatgactaaactgctcttcctaacgtcaatctgatgtccctaacaccggcttccctgcctaccttcaaccctctacctgacgggcatctctgctgcacctgctgtggg

SEQ ID NO: 346098 - DNA, 122 bp, Homo sapiens
gtacccccaccccatcctgctcagctctgctctgtagccctttctggctcacagggactccgcctccagcctgtctgctctctccccggtacccctcctgcacatcctgccctgacacaact

SEQ ID NO: 346099 - DNA, 122 bp, Homo sapiens
cccgtagggttgaggagcgctccttgccctgggcttcctgggagctgcccatcaggctgccggcagccgcaccctgctgggcggccgatggttcccgctgccggctccccggagcgtctcca

SEQ ID NO: 346100 - DNA, 122 bp, Homo sapiens
tccatggccacgtcgtcgtccggggcactggtgaagcgcagcagcagctccggccactggcgtcccagcttgtagggctggttcttgggtttcagctgcacctccagcagaggggagaccag

SEQ ID NO: 346101 - DNA, 122 bp, Homo sapiens
atttattctggagtaaggagggatggctgagggaatctgtctgtgggtccaacatggcgccgtcctgctccttgtatgagcctcaaagatggggacaaccatttgggggcagacatgtttgt

SEQ ID NO: 346102 - DNA, 122 bp, Homo sapiens
accgcaccaggcgctggagggcgagctgctggagcacctgagtcccgggctggccctgggcgctatggcgggccccgacggcgctgtggtgtccacgccggctcacgcgccgcacatggcca

SEQ ID NO: 346103 - DNA, 122 bp, Homo sapiens
aactcccactcctctctgctagtggagaatagctgacagagggctgaacggggcttggatcgccttcaccttctctccatcttcaggagcacagaatctccctaaatgcaactaaatgggcc

SEQ ID NO: 346104 - DNA, 122 bp, Homo sapiens
ccccaggcaaaatgggcgcaccccctgcgggggcccgaggtgacctgctcgaggtccggtcgcccaggttccacctggagaagaaaatcttcgtaatttggctgggggaggggggatgcggg

SEQ ID NO: 346105 - DNA, 122 bp, Homo sapiens
cgctagggcgcgcggcggcgggagcctggaaccggcgctccggggcggcggcggcggcggcggcacccaggccggcgagcccaagacagcatcgcagtttatttacaagcccggtgccagcc

SEQ ID NO: 346106 - DNA, 122 bp, Homo sapiens
tggtctaggcctttcccaaactcacggtgcaccccgtctcccccgcagactggcgcgccccgcacaagttggaaagccactttccatgtgtcctgcatgactttctcagcaaggcgggggcg

SEQ ID NO: 346107 - DNA, 122 bp, Homo sapiens
ctgcacctgttgaatgaggaactcgagtcgggcccaggaccatcctggatgctgcttgttcgctttgaggataaaactgtgtgtgagctgagccggtcctaggacagtgacatttcaagaat

SEQ ID NO: 346108 - DNA, 122 bp, Homo sapiens
atgtcaagacagtacagaacactttagtgttggaaatgcttgtggaatagacagcattcgcgttctcttcaatgctgaggttatatgattcctctgctcacaataaaggaaaatcaaaagga

SEQ ID NO: 346109 - DNA, 122 bp, Homo sapiens
gctgcgcgcggagcttgccggccagctggagttcccggtgggaatgggcttggtgggcgccgcactgggagtggctggccggccctgctggccccaggcaatgaggggcttagcacctgggc

SEQ ID NO: 346110 - DNA, 122 bp, Homo sapiens
caacatggtgaaagcccattgctacaaaaaatacaaaaattagccaggcatggtggcacacgcccttagtcccagctattcaggactgaaggtaagaggatcgcctgagcctgggaggtaga

SEQ ID NO: 346111 - DNA, 122 bp, Homo sapiens
ccactgtggaaaggaggaccagaagggaggatgggatggaagagaagaaaaagcaatctgcgccaacccggcagccctaataaatcaaagggggagcgccagggcagcggggagacagaaac

SEQ ID NO: 346112 - DNA, 122 bp, Homo sapiens
gaggaattgacagggtgaactgcacccaggagggagctgctggaaccaggttcccagaaccgcgcgctcctcgaacccacccctgcgcccgcggcgcaccgagcgcacgggtcccccccagc

SEQ ID NO: 346113 - DNA, 122 bp, Homo sapiens
aagtgtctcagcagggttctggggccccggccagcggaatgaaaattagacactagtggccgggcgcggtggttcatgcctgtaatcccagcactttgggaggccgaggcgggcggatcaca

SEQ ID NO: 346114 - DNA, 122 bp, Homo sapiens
gagtccccggcctcctgtgcatgacagcctcacggggacacagcaggaagcgcagtgtgccggatgctcagtgctgcttgagagaaaaaagcagcgtggggggcgggggagagtctgggtgc

SEQ ID NO: 346115 - DNA, 122 bp, Homo sapiens
ggaaagcagcttgggaagggggctccagacttggtgcagtggaaccaataggtatggtcacgtgagaaatcagagtcagaaaaaaaagcagtggcaggggaaattgagaggagatagtttct

SEQ ID NO: 346116 - DNA, 122 bp, Homo sapiens
gggtaaggagatccacggaggcctctgcgcctaaactcaggtggccagacagagttggggcgggaggcgggtatacggaaaggacacccttcccctctatgggccccgcccgctgtgcaagg

SEQ ID NO: 346117 - DNA, 122 bp, Homo sapiens
gaaagagaaacaatatgaatggcttttaaaataacttgagttccagagggagtgaaagatcgtgtctatagctgggtgagtttggccacgaaagccctttctgggaatagctcaataatcca

SEQ ID NO: 346118 - DNA, 122 bp, Homo sapiens
gatcccagtctgattatctcagaatgagctctcagaatgagctcccagaggtagcattgccgggccccgggctgcctgtttttcgtctgaaaggcgggcggcggatgagtttcccggatgag

SEQ ID NO: 346119 - DNA, 122 bp, Homo sapiens
cttttacctccctgctaccttccattgctctgggcttattaagcaggcccccaaagttggcgggcagcggggcagggggcgccaagcggagaaagactccgtgcacgcaagtttaaaaggaa

SEQ ID NO: 346120 - DNA, 122 bp, Homo sapiens
tgaagccacctggctctcatctagttcaactgcatccattttcagaagaagaaacatacccggagagggaagtgacttgccttaagcaacaaagctaaattcaaggctaagaggagaggctg

SEQ ID NO: 346121 - DNA, 122 bp, Homo sapiens
tacgcgcgcgcgacttctcagtgcaattatgcggataaaccactttccttatgtgtgtaccgttaatcgtctttctcccctacgtttggtgaatgagattgtaaaactgccccactctgcct

SEQ ID NO: 346122 - DNA, 122 bp, Homo sapiens
cgcgcacccccacccagccccggctacgtgcggcgtcgttcccagggataccgcggcgagcgcctgtgcctgcgccctcagctgccagtgcgtcatttcggaaaacgagtcaccttactttg

SEQ ID NO: 346123 - DNA, 122 bp, Homo sapiens
tatttatttcgtttgcttggggttttgtttgcttttgctgagtccgacccctctacctgccgcctggcccttgcctcacgctccagtgccactgagatcaaggagagaacgaatttgccgct

SEQ ID NO: 346124 - DNA, 122 bp, Homo sapiens
actgcccccaaactcttctcagcagagataggctgaaagcagctcgcttttaggcggcgacgcaaacacacgtagccagctgagcgacagcaagcaaccaaatggctttgctggaggccccc

SEQ ID NO: 346125 - DNA, 122 bp, Homo sapiens
aacagcttgcaatgggatgaggcacatggtaaggtgctcaatatgtgtgaactattataacggtcatagttaccattaagggaagacctatctgtgctacattaatgggggataataattac

SEQ ID NO: 346126 - DNA, 122 bp, Homo sapiens
ctaggacgacaagcccagggcagcttcttcaccagggggagcaggacgtggccgccttggcgttcgtgggaaccctgggcggtgaccgcgccccctcacagacttggcaccgcccagagccc

SEQ ID NO: 346127 - DNA, 122 bp, Homo sapiens
ctggccaaaataagtcttaaaactgcttatgtcatatttggattttaagttcatgacattcggaacagcaaagccatatatgcaatgtttttatgccattaaatgtctgattccaattaaaa

SEQ ID NO: 346128 - DNA, 122 bp, Homo sapiens
gagtttccagagaaatgaacagcagacattcacagacataagaatgttttttttttcccccgcccaaggagtgtggttagtggttgtttttaaaactgtacattttactgtacatttttttt

SEQ ID NO: 346129 - DNA, 122 bp, Homo sapiens
ggagcactaagaccaccccgtaacgcggccacctcaggagcactaggaccaccccgtaaccgagtcacctcagcagcactaagaacaccacgtaacgcggccacctcaggagcactaggacc

SEQ ID NO: 346130 - DNA, 122 bp, Homo sapiens
ccaaaatttttctctaagtcagagaacacactcctaggtaaaccttcaaaaaaggtatttcgaaggaggcagcttctctgctgctagagaaggcattgccacctcccttcagacaggggatt

SEQ ID NO: 346131 - DNA, 122 bp, Homo sapiens
gcctactctgcagctgtggttctccaccacagagagaagaaaagggagggagatggagtgcgcaggtctgagaaggctttcattctggagcatctgcaggagcctgcaccatggcccagtag

SEQ ID NO: 346132 - DNA, 122 bp, Homo sapiens
gaggtgggatggccacctatataggcttctgctctggctattttgggaggtggcactccccgtagccccggccccctccccttccggtgtcaggtactccccaaccgtggtgctgggtgtct

SEQ ID NO: 346133 - DNA, 122 bp, Homo sapiens
agcagcggccgtggaggtggcgttggggactgttttctctcggaggccggagcggagccgcgtctgactgaggcgggcagcaagcggccccctcgctccctccctccctcctccgcgccctc

SEQ ID NO: 346134 - DNA, 122 bp, Homo sapiens
ccaatagcggtgcgccagtgggtaggtctagcagtggcgcagcaatagagcgctccggagcgtctcattggctggatcaaacccaagcgagccattgattggtcgacgcccccagagggtta

SEQ ID NO: 346135 - DNA, 122 bp, Homo sapiens
tagctgggcctttctgatacaggatgcttagaaatctgtaacaagcccttttttcagcagcgatttgaaatcctcttacactggaaatcccaactcataatatcaggaattttgcctatgtg

SEQ ID NO: 346136 - DNA, 122 bp, Homo sapiens
cccgccacactagaaggctgctgaggaagtcggcccaggagcggggccagacacctaccccgacgcctgcccgcgggccgcagccaccgcatttccgcgtttttcgcggtaggcgggaggtg

SEQ ID NO: 346137 - DNA, 122 bp, Homo sapiens
gccgcccgcgcccacgcagccccgcagcccggcctggacgccggcgggcgccccctcccacggccgcaaccaggtcccccttcgccgcccgccgcagccccctcgccagccgcgcttacccc

SEQ ID NO: 346138 - DNA, 122 bp, Homo sapiens
ggcttcgttaaaggcccggagaggggctgaggccaggcctgcggtgggagggttggatgtcggcctggctgcccctgctggatttccgccctgagcagtggaggggaaaccaggccgggccc

SEQ ID NO: 346139 - DNA, 122 bp, Homo sapiens
aaaatgttatcctgccaggatttgtatgacagatggagactagaaccttgggtaatctatcggtcttcatgaatgaaatcaattaagtttagagaagctatttattgtcagagagataaaaa

SEQ ID NO: 346140 - DNA, 122 bp, Homo sapiens
ctccccttctcacgacgcccggccattgcctctgaagctggatggtggctgggcacgccccgccaggacattcgttcaggggaggacgcccgaatctgtcagcaaagcatccctacctgcag

SEQ ID NO: 346141 - DNA, 122 bp, Homo sapiens
gtggaggcaggtgtccttgcagggagggcccgaagccaggctctgccttggaggatgctccggaaggaccacataagcagtgccctcgtttggattggtcctgcctgagcattgtccccaag

SEQ ID NO: 346142 - DNA, 122 bp, Homo sapiens
ctgccgggcgggccctggggggagctgcgtccagcagagctgctgggtggttgctcctcccgggctctcatctccggtatccgggccgacccccgcaccccctacttcccttgccctcgctg

SEQ ID NO: 346143 - DNA, 122 bp, Homo sapiens
ccagctcacctctctcttcttaaatttgtcccagaccttgcaccagcacacagactccgacggcttcaggatactgtgccatgattacacataatacataagcgaacgcgaaacgtgtaaat

SEQ ID NO: 346144 - DNA, 122 bp, Homo sapiens
ttttctgagtaagggcttgcctctaatcaagtcaaacagaagcctgtgtcactgtcctgacgctataagtagttaaagtcaggctgataaaaatatatggacaaggctatgaatgaaatagg

SEQ ID NO: 346145 - DNA, 122 bp, Homo sapiens
gcgccatggtgaggagtggttgcggggcgcgggcgacgcgacggtgggggtttcggcctgcgttcgggccgcagacagggcctgggcctgggcctgggcctgcgcctgcgcctgcgcctgcc

SEQ ID NO: 346146 - DNA, 122 bp, Homo sapiens
agaaatccaagcccaaaacagctctggcatcctaggtgcagagcactgggtggtgggtgtcggggcgcagtgtcacagccttcctcctcctggagagccactactcctgctcccattcctct

SEQ ID NO: 346147 - DNA, 122 bp, Homo sapiens
gactcagggaaagaaacaaaacaaagatacaaggaggtcagcatgaagcagcccttgctccggggctctatggcttagagaccccgtagcatgtgctggtcccagtgtctgctgcaagatgc

SEQ ID NO: 346148 - DNA, 122 bp, Homo sapiens
gctgggaaatgttccccgctcttgagacaaattatgtgtgcttgtgtgtgcacatgcacacgtgtgtgtaaattccaaatatctggcttacacatttcccctcttccttgctttgtgtttct

SEQ ID NO: 346149 - DNA, 122 bp, Homo sapiens
gaggaggaggtggacctggcttgcacacccaccgacgtgcgggacgtggacatctgagggcgccaggcaggcgggcgccaccgccacccgcagcgagggcggagccggccccaggtgctccc

SEQ ID NO: 346150 - DNA, 122 bp, Homo sapiens
cctcagtccctgctcccggccctgggccacaactgctttctgtcccgccagtttcgcctgcgccgagggcactgtatcgtgaaccacaggctgtgttgttttcatgcgtctggtttctttga

SEQ ID NO: 346151 - DNA, 122 bp, Homo sapiens
cgtcccctgcgctctcagagccgcagcctggccaacaagggtgagggttgggggcttggccgcccccgggatggggcgaggggttcccgagggcttgggagggcggcttgggagagagctcc

SEQ ID NO: 346152 - DNA, 122 bp, Homo sapiens
gaccttactcatcccaggggtgtgcagaggcccactgcaagaactggtgaactttcaaggcgtctttgcatatatgatgattttttattctattattcaagttttgcttggacaagattgtg

SEQ ID NO: 346153 - DNA, 122 bp, Homo sapiens
caaagtgatcaaaacagtcaagtgaaattttagatattctttacattactggccatgcatcgtacctgcgtgcatgtgtgtgtgtgtggtatttagcaatatttatttaattaggcactttt

SEQ ID NO: 346154 - DNA, 122 bp, Homo sapiens
aggtgggaggatgtggggaagggggaaagcggtgaggacgcagagtgcaggctgtggcctcggcatcccgcaggaggtccctagaacatgccgtttcatgtcacctgctacagctctccccc

SEQ ID NO: 346155 - DNA, 122 bp, Homo sapiens
ctgaatgtacctctatttagggtggtttctattatttcttcgcgtctaccctgtagttgccgcaccctgagccctcagccccgccgcttcgcacggagcggagctcagagggtgcgcgctcc

SEQ ID NO: 346156 - DNA, 122 bp, Homo sapiens
gctggaaaggtgctttagctcgaagtattgagtgatacgcgacgacacagtgcccttgcccgagccgggggcccccatgatcaccacacgcagcagccgcgaggacacccccgtggccgcag

SEQ ID NO: 346157 - DNA, 122 bp, Homo sapiens
atgtacttacactgagaataatagcaatacaaatataaattaggcttgctctttattctacgtacagaagtttctgggtatatagatggtttcgagactctgaaatatttatctggctctcc

SEQ ID NO: 346158 - DNA, 122 bp, Homo sapiens
agactaccccatctttaccaccccctagaaatgagctgcaataacaggaacatgagacttcgcaaatctctggaaaataatatccaaatgaaattaagtctcactgaacatttcaatcaaga

SEQ ID NO: 346159 - DNA, 122 bp, Homo sapiens
aaacaaagcaagtcagtgcgacttgccagtgcgacccctgaaagatgattctattatgtacgtgcacatattttacacatatgtatagatatttaataaaatataattgagataaaatgcaa

SEQ ID NO: 346160 - DNA, 122 bp, Homo sapiens
gagcacaggattccagccctggaggcagtcagctcctgacagcagctagacaagaggcagcgggcagacagaggtgggagagggaggctgagagaggaaatagctgtcagccccagtgcatg

SEQ ID NO: 346161 - DNA, 122 bp, Homo sapiens
gcccgagcagaaggccggaggctggggaagattcgcagccggtcggacggcaggggactccgttccagggctccggggctgggcgtccagagaatacgggggcgggggacgggggcctgcgt

SEQ ID NO: 346162 - DNA, 122 bp, Homo sapiens
ccactcagctctagaccaggactcccagtcttagtgcaaaatatatgcaggaaagagctgcgccgattggccggcacgccactgggaccgccccctactcccttccaggtcctcccgcttcc

SEQ ID NO: 346163 - DNA, 122 bp, Homo sapiens
ccagaagggactgccgtgtgagaatgtgagttccctgggaggaagttgttgcccaagccccgctggaaagccagactgccctgctctctgggggattctggtgggagagggaccaggcccct

SEQ ID NO: 346164 - DNA, 122 bp, Homo sapiens
taaagctttcgaggcttggaaacccacagcctctatttgatctggcaattcactttgtgacgaaaaacaaacagcacagcagggcagggagacaacagtaaaccctcctgcgatcgctggag

SEQ ID NO: 346165 - DNA, 122 bp, Homo sapiens
tttatgagatatcattccaagaacagaggataactgatatctgctttataagcatctcatcgctcagttacttttgcacccccaaatgccctctgcattcatctgcacgtgaagacaaaaac

SEQ ID NO: 346166 - DNA, 122 bp, Homo sapiens
ctatctcggctcccagctgggccccaaggggagctgaggggtgagctgcagccactccggcgcagagaaggacacaaaggctgagggctttccacgtccccctgacccaaggcgcatcctgt

SEQ ID NO: 346167 - DNA, 122 bp, Homo sapiens
gctgagtacattacttatctataggctgatgacagtcatttcagtgagcctcagcactcccgaacatataaaaatagtgcattcatgataagatcagatctctggggcagatttaaagggag

SEQ ID NO: 346168 - DNA, 122 bp, Homo sapiens
ggtgatctgcccgccttggcctctcaaagtgctggtattacaggcgtgaaccaccacgcccggccaagtgtgtctgattctcgtaagtgctgatgagaattattaaactggggcctttcctc

SEQ ID NO: 346169 - DNA, 122 bp, Homo sapiens
cggggtaccacgtggtcggaagcagcctcccacaagcggctctgactccgccctccgcttcggagcggctcacctggcctcagaggtgcagcgctaactccacctggggcttcgttctgagc

SEQ ID NO: 346170 - DNA, 122 bp, Homo sapiens
gcgcctgggctacacacccccggccgcccgtagacagtcggcgctcaataagtgcccgagcgactcctcgcgcacatgcgcacttgaacctgaccgagtggtgacccccccctccacacaca

SEQ ID NO: 346171 - DNA, 122 bp, Homo sapiens
cccagccgcctggtggcctcggcgaggcagctgtctcccaggtctgtgctgcatcttaaacgctctctctcctgcccagcataagcactggttcaattgataagaaaattaaaaatagacac

SEQ ID NO: 346172 - DNA, 122 bp, Homo sapiens
gtttgtcacagttggtgactggctagattctataaagatggggcaatacaagaataacttcgtggcagcagggtttacaacatttgacctgatttcaagaatgagcattgagtaagtgatac

SEQ ID NO: 346173 - DNA, 122 bp, Homo sapiens
gatttagaagagaattgcaagacattaacacagagcgtcctaagtgacaggatggtctggcgaccacatttcccggcagccctcgcacagccaggccgcttcgaggattggacttctccgca

SEQ ID NO: 346174 - DNA, 122 bp, Homo sapiens
tgtgattgtgagaacctaccttcacgtttgtgagtgtgtatgattgtgagtgtgtgaaaacgaaccttcacgtgtgtgtgtaagtgtgcatgcatgtgcctgggttgcatcatccgtcctgg

SEQ ID NO: 346175 - DNA, 122 bp, Homo sapiens
cataattcattcaaccatcaccctgagtctcccaacttattaacatttagcatagatcttcgtgcatatactacttcatgacctttcacttcagtgacagatttttagaagtgaggtttcta

SEQ ID NO: 346176 - DNA, 122 bp, Homo sapiens
tgtgtttcagccaatgagcggcggaagcggctccgaggggggcgggtccgggaggctgtgcgtgtcttgtgagagctcttgaaccaagtcagcgctggagtcggctaggcggctggaaacgg

SEQ ID NO: 346177 - DNA, 122 bp, Homo sapiens
ccttgtggggccggctcccacccctgcctagctggtgggaggaggtgtgtcagcctgccccggtgaccgctctgacgtggcgcatcactggagtcacctggcaaactcttaccctgactctg

SEQ ID NO: 346178 - DNA, 122 bp, Homo sapiens
aatcgtccgacatgatgatgacctcttcctgcgtggtgtgagggtttcaactgtagccaccgctggaggctgtggcagctacaggcagatcagcttttacagcaaggataaaacgatcttta

SEQ ID NO: 346179 - DNA, 122 bp, Homo sapiens
cgttgcaatccccgccagctcggcgggggccgcacggggctgggtctcccggatcccgcccggggattggagtctgaggctgaaatttgaaatcttgaagtggccccaagccacaaatacta

SEQ ID NO: 346180 - DNA, 122 bp, Homo sapiens
aagcatctataaaacaaggcaaacttcccccagatattacttatcttaggaacagacactcgtatatgagatgcaagataacacaggggataagagtacagatctagtattgaagcatttga

SEQ ID NO: 346181 - DNA, 122 bp, Homo sapiens
ctctcgctggctccctcgctcgctctcgtgtgcctgttctgcagctcagtcaagtacagccgccctcggaaagtgcaaagcagccacgagacagatcgggctttgttgctaatttcccaggg

SEQ ID NO: 346182 - DNA, 122 bp, Homo sapiens
aagtgagatggggaatcgatgaggcggagagaagcaggatggcaggagctgccgagaagtcggcttgtacttcgaagggaaaaagaggaaggaaaaggactgttaataaaataacaaaggca

SEQ ID NO: 346183 - DNA, 122 bp, Homo sapiens
cctgtgtggagccgagcacccagccggggtcagcgggtggcacccagaggcatcgtgtggcgcacacactgcaggaagccacccttcctcccaacccccgttccctggacgggagctgggcg

SEQ ID NO: 346184 - DNA, 122 bp, Homo sapiens
gcgatatatctttgggggatcccaaacgtttcccagggtccaactgtgttcgcctccttccgtgctgcgtggccacatggatggtggatgcaggggtgcaaggatgcacggtgcctgtggta

SEQ ID NO: 346185 - DNA, 122 bp, Homo sapiens
gagagcctcggggctgaaggccaggaccagccaggccgcgcggacctgaggttgaggaaccgggtgcaggcgagcacgatgggccggtcgtggctctggttgcagcagctcagacgagtgcg

SEQ ID NO: 346186 - DNA, 122 bp, Homo sapiens
agatggagcgcggccgccaaggcgcagtagcagggcgacgacgctccgagaggtccccatcgtcagacccctctggcttccatggcgcgtcttcaaacccggccgatcccggcgagtgtggc

SEQ ID NO: 346187 - DNA, 122 bp, Homo sapiens
atacagatgagaaatcaagcacagagaggttaaatcactcatcaaagcttagacagtaagcgctggggctggtcttgaaacccaagtgccctggccctggagcacatgcccttagccactgt

SEQ ID NO: 346188 - DNA, 122 bp, Homo sapiens
accacccacctggaggggactagaattcgaagtgcccgcgaaagaagcaaggttcatctccgcccggctttaggacccgggggctccggaaaaagtcattgaacttttttttttttttttcc

SEQ ID NO: 346189 - DNA, 122 bp, Homo sapiens
ctcatggctatggaatttccagcgtggccagaaaggacagcaaggagctgtgtgcagtggcggctggcactagatgacgatgacaacatcacggctactcaccagtttggtgatacccccgt

SEQ ID NO: 346190 - DNA, 122 bp, Homo sapiens
ttctctctgcccggtgaggtcacagcgtgaaggccctgtctacaagccaggaaacgccctcgccagaacctgaccatgccggaaccctgatctgcgactttcagcccccagatctgtgagaa

SEQ ID NO: 346191 - DNA, 122 bp, Homo sapiens
agcaacagcacagctatacattcctgtaaatttccaggcccatgtgaaggccgggacaggcgtgaatattccgctatgtcactcagctcccgtggttatttttgttcaccccatcatcttgt

SEQ ID NO: 346192 - DNA, 122 bp, Homo sapiens
ccccggaggagggaaaacacaaaacaaggcacaaaggcagaaggtgcagatgtagcacaacgatgagttaagattccgcacgcaggtaacaaggagggtatggtatatctctgccagaggta

SEQ ID NO: 346193 - DNA, 122 bp, Homo sapiens
tgtgtggactgtgtgctgggcgtcgtgcctgcccgtgtccttggcgccttggcgtctatgcgttctctgcacataggtaggtaccacgtgcacaccctgaatgtgagtgaactgcctgtgtg

SEQ ID NO: 346194 - DNA, 122 bp, Homo sapiens
ctcatctgcaccacaggcaccatagcaatgacctcacagggctgctctcagcactaaatgcgatcatgtggatgaggcatgtggcaaatgcctggcatgtgagtacaccgtaaatgttacat

SEQ ID NO: 346195 - DNA, 122 bp, Homo sapiens
gatacttagtgtagggcgcaatgtagcagacacttagaatggggacgggggtccctacctcgttcatctcctcgatgttggtgatcatgacaatgatgggcgtgtgctcctgccacaccatg

SEQ ID NO: 346196 - DNA, 122 bp, Homo sapiens
caggttctcgttgggaccggtctcaggcagggtgccacactgccgcggggagccaggtcacgcgcgccccggccaccagggctgccgccatcccccgccggctccctcctcctggcaaccca

SEQ ID NO: 346197 - DNA, 122 bp, Homo sapiens
ggagacacggaacaccaaggcccacgcacagactgacagaatgaacctgcagaccctgcgcggctactacaaccagagcgaggccagtgagtaactccggcccagggagcagatcacgaccc

SEQ ID NO: 346198 - DNA, 122 bp, Homo sapiens
aggccccgccatcctcgctgggctctccctgcaacccttgccgccatccttcgggctggccgatgtccctgccttgtctgtggctcgttcccagctgcgtggcctctgcatcctgcaagaag

SEQ ID NO: 346199 - DNA, 122 bp, Homo sapiens
ggcgcgcacgcctgcgggagccctctccaggcaacctagtgctgatcgctcgtgccggtgcggccgttaaccgcccttgccggagccctaggctcaaaagcagccccttacccttcctgggc

SEQ ID NO: 346200 - DNA, 122 bp, Homo sapiens
ccacacatggcagctcccagccgactaccctcaccctcctccagctcttgtccacagccccggcaggtccaagggaatagcagctctggcagtggttctgatccagtcccgcagaggccctc

SEQ ID NO: 346201 - DNA, 122 bp, Homo sapiens
ccgcaatagctccatagagcacagctcccgggggccgccatcttggtagtcgagtgacaacggccagagagtacgccttgttgcgtcactccacgaacgacggcggctggccggcaacatta

SEQ ID NO: 346202 - DNA, 122 bp, Homo sapiens
ttgagggacaggttgggagggtgggctgggggtccttcctctaggtgcatgccccagagtcgtgcacactcttccccacaccccaactcttctcacttgcgctcctgatgagctaagaggag

SEQ ID NO: 346203 - DNA, 122 bp, Homo sapiens
aaaacgagctcatggtcattaatttgtgaagtgcaaaaatactaatttttctcgcgttgtcgttttttctgggcttgccgaggcccctccccctcctgcctcgcttcccatccccctttcct

SEQ ID NO: 346204 - DNA, 122 bp, Homo sapiens
ccatgctccagcctcacagtcttctttctgcttctttcccagcctctgggcttttgcacacgctgaaccctctgcctgaacaccctccactgggctgagaacaactctctgagacctctctc

SEQ ID NO: 346205 - DNA, 122 bp, Homo sapiens
ttttcaaaaacacaggttatcacattttccaagggggatagacaagagaagggaggatgccgagaatagagtgtgagtttatttcacatagcaggtctcataaagattgcatccataaatgt

SEQ ID NO: 346206 - DNA, 122 bp, Homo sapiens
ggttaatgacccgaggggacagcggattctcgcctaagcaagatcccgcagatgggagggcgtaggaagaggttccccgggccggctccaggccccagcgggcgtgggcgttggcagtgagc

SEQ ID NO: 346207 - DNA, 122 bp, Homo sapiens
ggatcagtcctatccaacacacctctcaacctcagtgaggaaccctccccagcacactaacggaatgcacaaacaaggctggagacagggaggaggccaggcccccagtgacaaccatgatt

SEQ ID NO: 346208 - DNA, 122 bp, Homo sapiens
aggaacgagtctgggcagctccaccagcaggcattctctacctctgcatttccatggggacgtggtgcttaggaaggaagttagccgaaggcaactttcatccacacatcttagaggtggtt

SEQ ID NO: 346209 - DNA, 122 bp, Homo sapiens
cgggccctgcctctgagccgtgagcctatgagtgagcgctctgcggttaaaagttacaggcgctggccaggcaggcgcttcctgtgtgtggccgtctgtttgacgatgcccccctgcagggt

SEQ ID NO: 346210 - DNA, 122 bp, Homo sapiens
cgaggccccatcaaaacagagttcatgtgagcaaatggggactcattaatgggacagcgccggccgtggctcgtggtttgggggctgccagcgggtcttgaaggaaaagcttttgtgaggtg

SEQ ID NO: 346211 - DNA, 122 bp, Homo sapiens
ggttcctggcccatggtcacagagcttttcagtggcagcatccctacacacatctgggtccgttctgctcccactcaggcttgcagacaggctctgaaaacactccttaatgtcccttaggt

SEQ ID NO: 346212 - DNA, 122 bp, Homo sapiens
aggagaatgctgggaaggtcctggcgagagaccgagaagcctggagggctcaattcaccacgagtagctgtttggggctgaagagagatttgggtcaatctttagagaagacagcctctagg

SEQ ID NO: 346213 - DNA, 122 bp, Homo sapiens
gccttctgcggcagccgtaaagcaacctggaggcgcggtgctggcttttacgttctgagccgctcgccctgccgcttccctgcgcgccctctgcctcctacttcccgccagcttccctcggt

SEQ ID NO: 346214 - DNA, 122 bp, Homo sapiens
cttgaaactcaccagatcctcctctaaagttacttcctggtcctggtccgaaatttccaccgccaccacgtgaatccccaaagccaaagttgcctacaataaatgccccagttagaagcaag

SEQ ID NO: 346215 - DNA, 122 bp, Homo sapiens
gtggccaagtcagaaccacaaggcatcttatgctggaacctcagaagtcaggcagcatcacgttcctcatgttctagtcaccaaagcaagtcccagatccaaaaagggggattagcatcagc

SEQ ID NO: 346216 - DNA, 122 bp, Homo sapiens
tgcaaattcacactttgtggaaaattaacaggttcctcacaagacaccctccccagccaccgtgaaaccagatgctccttagcctccccagggtgagtcgaatgcgatcacatgaatattga

SEQ ID NO: 346217 - DNA, 122 bp, Homo sapiens
agggaacacttatacaccgttggggggactgcaaattagttcaaccattgtggaaagcctcgtggcaattcctcaacaagctaaaaacagaactaccatctgacccagcaatcccattacgg

SEQ ID NO: 346218 - DNA, 122 bp, Homo sapiens
ccttccaaaatgttttgactactggtggtaattgctttacaagtgaaaattagcctcctccgttctcagaatacttgtaatctgagcatatcacacctccacattttgcttgtgatgctctc

SEQ ID NO: 346219 - DNA, 122 bp, Homo sapiens
gggggtcaggatttgcaggcgagcaagggcagagaggagaaatcgtacaggtcggtgacgcgcctaattcacaaagcctgaaagtgctgtcaactttggggtcatcttatgctgggcaccgc

SEQ ID NO: 346220 - DNA, 122 bp, Homo sapiens
tgaggactcacccaccttggacagctggttgtccattccactaaaggattttcagattgacgtgtgcaaaggcataaatgggagaattaacacaaaatcaaaagagcaaagggactgaattc

SEQ ID NO: 346221 - DNA, 122 bp, Homo sapiens
tccgccatgcgcagcgcctcctgcaggtgtccggtgcgtgcagacctggccacgccggcacgggttttttagtgacgtggcggcctcacggtgagcagcactggtcttcccttttgttcccg

SEQ ID NO: 346222 - DNA, 122 bp, Homo sapiens
caagtttcaacaggccgctctccctgaggcgttgagaattctcccttgccgagatgtttgcgaagctttgcgtctctttggggccttatttgactttaacattttatagagcacattagaaa

SEQ ID NO: 346223 - DNA, 122 bp, Homo sapiens
agtctcctttctgcatcttcggcgttaaagactcaactcagagtcggtagctgtggctcacgcctgtaatcccagcgctttgggaggctgaggcgggcggatcccctgaggtcagaagttcg

SEQ ID NO: 346224 - DNA, 122 bp, Homo sapiens
cccctccttgatctctggcaccgtggaggaatcgaagaggaagagggtccccagggacagcgcatttcattcctgcctggctgaatagataaaagccaacacctgctggcgcagcgaggtgc

SEQ ID NO: 346225 - DNA, 122 bp, Homo sapiens
ccccggagtgttcccggcaggacgaaaccgccgcaaagttgctggctggccgcagccgggcgtgtttctgcctgcgtcagctgccgccccgccgccccccagagtgcagggatggggcagcc

SEQ ID NO: 346226 - DNA, 122 bp, Homo sapiens
gggagccaatggggaagtggctgagagcagtcagagcacagacccccaggcccttcaactcgaactccctgggcctgacacaataggcttctcttcgtgacagggatgtggaggaggaaggc

SEQ ID NO: 346227 - DNA, 122 bp, Homo sapiens
tgggaggcgtggaggcggggaagcgctcagtcctttccatttcaggcctctgtgacccagcggaaatagggcttgggcctccaggggtgaggtgttgaacctcgatgatggaattcaaatgc

SEQ ID NO: 346228 - DNA, 122 bp, Homo sapiens
tcctgactcatcacggagcttgttttcacagacaacaaaattcacctcagttgggctttgcgtaaatatagagtagtgtgatggggcctgcaaattgggtgaaggtggttcacggggatgcc

SEQ ID NO: 346229 - DNA, 122 bp, Homo sapiens
gtcttgtgggaaatctgtttttaactgtagtctccctgtcacccagccggcggagcttggcggcacggattccagtgctgcctccaccgctgggaggcaccacttgacatgacctgggacag

SEQ ID NO: 346230 - DNA, 122 bp, Homo sapiens
gggctcagaccattggccaaatagtgccacctaggggttctaggtctgcatgttcccaatcgccactgtgcttccccgggccacaggatgctgaggcctgggacccgtaggactgcagttcc

SEQ ID NO: 346231 - DNA, 122 bp, Homo sapiens
taagaatccattagctaacacaaatttttggcaagtttaataggagctcaaatctacattcggaggaaatgctccccaaagcctgtttcaagcttttacttctcaggccccctgcctccaac

SEQ ID NO: 346232 - DNA, 122 bp, Homo sapiens
aaagcggctgggctcggggttttttctctccattctcccaacacacaggaaataacagagcgtcaggtgacggcgcgcggccaatggggaggctccgggccgcggcgcgcgggcgggcggga

SEQ ID NO: 346233 - DNA, 122 bp, Homo sapiens
acccacgaaacccccaccactcactcatcttaaaactcaggtttaggagcatatgtttagcgttcggaactcatggccctctactggagaaaaggaaacctttttatacctgcttaacatgg

SEQ ID NO: 346234 - DNA, 122 bp, Homo sapiens
cagaagtgagagaagtgtgtgaaggaagaactgtcaaacacttataaaaccataagatctcgtgagaactcactcactatcacaagaacaccatggaggaaccgcccctgtgatccaatcac

SEQ ID NO: 346235 - DNA, 122 bp, Homo sapiens
ggagaaagagggggcggtggggaacagctgccggggtaggcgaggcgcaaggtggctccccgcggccccgcgccccgcggctctcggacgcaccaggcagccaatggctgcgcagaggtgta

SEQ ID NO: 346236 - DNA, 122 bp, Homo sapiens
cctggagccctgagaggcccctttgagtctccagaccttccagggataaataaaatctggcgacctgtgccaacgctgtgggccagttgcaaaggagaccgtccttgctggccacgcgcacc

SEQ ID NO: 346237 - DNA, 122 bp, Homo sapiens
atagctccatttccagctgctcttcaatttacactttatgctaatgcaatctgaactattcgcagtttgctaaaacacggcatgcagtttcgctcacactgttccccatgcctgtcattcat

SEQ ID NO: 346238 - DNA, 122 bp, Homo sapiens
aactgcctcgcccgagagctgcagagatccctctcgtaccggagcccagccaagccagtgcgtcaggaccgacacagcctctgggttccgggatctgaaaggctgcgatggattctacttgg

SEQ ID NO: 346239 - DNA, 122 bp, Homo sapiens
tgacagtttgaatttcatgttgttattcattaatgacagcttgaatttagtgttggtacacgacataatttcagtgtttaagacttgaaataacagcagctaagtgaatattttactgttat

SEQ ID NO: 346240 - DNA, 122 bp, Homo sapiens
acagctctgctggcgcggactaaggatcaggcagagcagtctccgggatgggtggcagagcgctcctgggcttgcatgggagggggcacgagggagcctctaagggctgggagttctctgga

SEQ ID NO: 346241 - DNA, 122 bp, Homo sapiens
cgggagctctcctgtgcattgtaggataattagcagtatccctggtggctacccaatagacgccagtagcaccccgaattgacaacccaaactctccagacatcaccaactgtcccctgcga

SEQ ID NO: 346242 - DNA, 122 bp, Homo sapiens
ggagaagatatacagattgcaaataagcacatgaaaagatgtttgataccattagggaaacgcttctttaaaccaggagatatcaccacgtgttagaatcaacaaaataaggccaggcatgg

SEQ ID NO: 346243 - DNA, 122 bp, Homo sapiens
catattaggaagcttcaagctgggggcaggagaggaacacattcatattccttgtagctgcggtttgctctcctggaagtgggagtgatgactaataacattgtctctatggggatgtggtc

SEQ ID NO: 346244 - DNA, 122 bp, Homo sapiens
tcctcttcctccgtctcctcagcctactcagtgtgaagacaaggatgaagacctttctgacgatccacttccacttaatgaatagttaatatattttcgcttctttatgattttcttaataa

SEQ ID NO: 346245 - DNA, 122 bp, Homo sapiens
atggggatcatagataaaacagcacggactcagcagtacccccacctccaccagcagaatcggacctgggcagtgtcatctgtggacaccgtcctcagtcccacgtctccaggcaacctgcc

SEQ ID NO: 346246 - DNA, 122 bp, Homo sapiens
tcagtggcctttctggtcacctccttttcctctctgggaggagccactcctggggtgtaacgcagtcagatcccctagcagtcccgctctgccccctcccttctgggggcctcagactccat

SEQ ID NO: 346247 - DNA, 122 bp, Homo sapiens
agaactttaatatagcagagcattgacactacacttaagattttgggtcaatagaacatccgctgtcttcaaagagcatttcctgggtgccttttggggcctagacctgcactggggaagtg

SEQ ID NO: 346248 - DNA, 122 bp, Homo sapiens
tccgcgccgccggcgcgtggggcgggggcggaggcggggtggggcgccccggcgcgcgcccggccccactccccgcccccgccagtcccgcaagcacccaccccgggggagccgcgggccgg

SEQ ID NO: 346249 - DNA, 122 bp, Homo sapiens
cagttgcctagagagagggtagagctggcctttaattaaggacttttttgctttttagagcgagcttccggggaagcatagcacagcaatagggccactttcctgccagagggggtgggtgc

SEQ ID NO: 346250 - DNA, 122 bp, Homo sapiens
ccttaggacagatcctgagggcggcagacatggggcggagaccgggcgagctctgggagacggattccgagtggcgggtgggaggtttaaaggctgggggtggttgggaaattggtggctgt

SEQ ID NO: 346251 - DNA, 122 bp, Homo sapiens
accctcagcccacgtgtgctgggtggtggtggctggggagggacaggatgtgaaactgagcgggacagagacaaaaacaaaatgagacagaggcagaaacatatgaaacagagacagggaaa

SEQ ID NO: 346252 - DNA, 122 bp, Homo sapiens
acagttaagtcctgaggtttattgtttgtacaggcttagatacattgtttgattcgtctgcgattcagtttattttatgtgaaagaggaataagaagccccacctatgttcttcatgcagtt

SEQ ID NO: 346253 - DNA, 122 bp, Homo sapiens
tatcatgagaaccctggtgacacagtgaattcaactgtcatggtaattcagcaaccaacacgtttaataattattgattaccaattgatattgattaccaataatatcacccctgtggatac

SEQ ID NO: 346254 - DNA, 122 bp, Homo sapiens
gggatgtgtgttcttgggcaagtgggctaatctctctaatcttctgtttgcctatctgtacgtgactaggattagatggctgtacatagaagcatccagcatagggccaggcttgcggtaga

SEQ ID NO: 346255 - DNA, 122 bp, Homo sapiens
ttgctcataaaataaatcaaactcgtgcctgcgcctccttgtggtgggaagggagcatgacgcggtgactggcccgggcgctgacagtttccttgctgtgatgtcagcccccgccgcagatg

SEQ ID NO: 346256 - DNA, 122 bp, Homo sapiens
gaggaccaaggccttgaatgccttgttcacgtctgcatccccaacacttaggatgacactcggggggccttgatctcaatgtgtgggaagaacaaatgcccccgttatagtactgtgttggc

SEQ ID NO: 346257 - DNA, 122 bp, Homo sapiens
ccttgtccttacccggcccctggaagagcttcttcaccaggcttgccctggggccgtcggcgcccgatcctcgcacgaattcgcatttctgccggtagatgatcagcgagtccggtctcaac

SEQ ID NO: 346258 - DNA, 122 bp, Homo sapiens
gagggaagaggaaagaaggctgtttccatggcaacccaggggataggcgctgtggctctccgggatatgcgggggtgacttcagggagaagaaaaggctccccggaaaagccacagggagga

SEQ ID NO: 346259 - DNA, 122 bp, Homo sapiens
tgggcaatgtgtgttttctgactctctcggctcaggcttctccacagactgtggcgctcacgcaggcgacggcggccgggcagcaggtgcagatgatccctgcagtgaccgcgactgcccag

SEQ ID NO: 346260 - DNA, 122 bp, Homo sapiens
ttggggcggggaggggcagtagggtggggggatgggtgggcaggatgggggtacagtgggcggctggggagggtttagccacagatgtgttgtattttttgaaagtgcaataatttggtatt

SEQ ID NO: 346261 - DNA, 122 bp, Homo sapiens
tctttcatttgcttttctttgtaaagccagggctcctcgactgcctcccaggaagtcctgcgctctggcgcgccgcacctcgcctgccgcagagcggcgcgggcagtaagccgggcgctagg

SEQ ID NO: 346262 - DNA, 122 bp, Homo sapiens
tagggctgttgctagggagagggaagagggagaccaaatgtcggggttggggtgggagggcgtcaggcagaggcaactgacttcatttgtgccacacgcatgggcattgcagccttgcgctg

SEQ ID NO: 346263 - DNA, 122 bp, Homo sapiens
aagggctgctcctgacagaagggacactctaagagcagcccaggaaccggtgcacttgggcggcctcggaagaagccggggctcctggaggcggaggcgaggcctgggacccaataagaagg

SEQ ID NO: 346264 - DNA, 122 bp, Homo sapiens
ggtgagcgctgaaaatctcaactataaaaaggtacaggttttcaggatactcagagtaaccgtgtgacctgtagtaagcaaagggccagttggctctattttaaatccaggcccagttagcc

SEQ ID NO: 346265 - DNA, 122 bp, Homo sapiens
ctacaaaagcgttcgtagactgctttagtccgcagcaatcctggctcgcatttgggttcccgcttagagacaggaagagtaaggctcagagtggcttgcccaagaaaaacacgtgggctgac

SEQ ID NO: 346266 - DNA, 122 bp, Homo sapiens
taacgagcaaaactcaaaagctgggaattgtgtcctgtgaaaagcaggccgtggggacaccggcgggtatggaacagaactgtaatgactaatagtcggaaataagggtagataggtaagta

SEQ ID NO: 346267 - DNA, 122 bp, Homo sapiens
gctggggcctctctcagcctgtcagggagggtcaggactgaggtgggctgtgggccagcacgcgcccatcagtccctgacagttacactggacagctaagctggagaagcatgtgggtcaca

SEQ ID NO: 346268 - DNA, 122 bp, Homo sapiens
actgaggagacaatatcaagagagactcctgacatttgtcccgctttaaaatcaggagaacggactacctgaaagtcagcttacgcgtctgttttaagcgttgagccagcactggcatctga

SEQ ID NO: 346269 - DNA, 122 bp, Homo sapiens
agcacgctgactccattcctttggagctggtgctcctgggtgggctgtcctcaaactctgcgcttgaattatctgtttaaattagattctgacctttttgattattttaggttgatagggcc

SEQ ID NO: 346270 - DNA, 122 bp, Homo sapiens
tgtttactagcttggcaatgtgactaatcagcataaaagatccagctggaaagtttttcccggtctcatgaaactcatattcttcattccatattggtggcttataatccacagactaagag

SEQ ID NO: 346271 - DNA, 122 bp, Homo sapiens
gaactcctggcctcaagggatccttccatctcagcctgccaaatgctgggattataggcacgagccactgcccccagctgcgatacagaatattttcatcatcacagaatgttttatttgac

SEQ ID NO: 346272 - DNA, 122 bp, Homo sapiens
agtctgtgacaagggtttacgcttggatagggtgggcttgatcacccggcagaaatgagacgagtgatcccagccttcccaaccaatctttccagtgacctgggtttacgcttcaccacaga

SEQ ID NO: 346273 - DNA, 122 bp, Homo sapiens
tctgcctgcctgctcagaatgctccttgttttcacactggttattgggcataggtaatatcgcttgagactgatacctaccggactaagctgaaccattcaattgtttgcagcttctctagg

SEQ ID NO: 346274 - DNA, 122 bp, Homo sapiens
ctggtgaaggagccgggccgtggggacaaggagcggctgtcaaggtaccttgtgtgtgtgcgtgcgtgtgtgtgcgtgtgtgtggtggcggtgaagtgtttgaccggattggataaaaataa

SEQ ID NO: 346275 - DNA, 122 bp, Homo sapiens
cccaccgctcggtggaggatggtggggagaacccttcccctaaacgcctcataaactgcccggctgcgctggaagcccggccaccttttactgctcagctcgattacacaccataaacccga

SEQ ID NO: 346276 - DNA, 122 bp, Homo sapiens
gggttgagaggatattacacccaatattgcaaagggtgcacactcccctgcgatataggtcgcagtatccagggggcgagagaatgttattattctcaatatcgcagggggtgcacacaccc

SEQ ID NO: 346277 - DNA, 122 bp, Homo sapiens
agctgttccacgtggagccaggcctgcagaggctgttctacaggggcaaacaggtacacccgccgccagcacctttgttctatgcctggtccaggcctcgcgcctctgcagccaccagccga

SEQ ID NO: 346278 - DNA, 122 bp, Homo sapiens
actctccccaaagcttcagattcactgatttttcatacaggaatgattaacaaaggcgtccgaagaaatcgttgttggaaggtgaccaaggtggaaagagacgttgctttggccctgcaagt

SEQ ID NO: 346279 - DNA, 122 bp, Homo sapiens
tcacccaagaagcactgatggagcacctgaccacgtgcttcccaggtaacgaggcgggaacgtagcactttccaggtggcggtgtgctgtggtcgctctaggactcacgtggactgttctgc

SEQ ID NO: 346280 - DNA, 122 bp, Homo sapiens
aagtagtctcaactttagcctttttgactcaaaatatcccagacctggcaatggaatgagcgggattatctgcctttttgtttcacggcagtccagtcattctgaatgttacctttggtgtt

SEQ ID NO: 346281 - DNA, 122 bp, Homo sapiens
ttaggtttaagttcttaatccaccttcttcttctttttttgagatggagtctcacactgtcgcccaggctggagtgcagtggcccaatctcggctcactgcaaactccatctcccgggttca

SEQ ID NO: 346282 - DNA, 122 bp, Homo sapiens
ctctggagccctcaactctctaaagtcaggaagcagctgagaaggctgttcaggctccaacgcaggcatattctcagtgttcactttagatgcaatcagagagtctactaggaaataaaaga

SEQ ID NO: 346283 - DNA, 122 bp, Homo sapiens
acctcccacgtttaccctcatgggaggatgcagtctcagtcacgcgcgtgggggtgatgtcgctaaggggtgattctcccctccctagagttacacacgctatctctcccgccaattgccgg

SEQ ID NO: 346284 - DNA, 122 bp, Homo sapiens
cctcagtctcatgtcacccagcggcgagaatggtcaccatgtgatagggaagtgagaactcgggcacactcacaccatccgtctgtccgtccgtccagtggctctgccgccctcctgcacgt

SEQ ID NO: 346285 - DNA, 122 bp, Homo sapiens
ggtatttatttttctttgcctgtgaaagccctgttttcgctcaggctgtgtagggcttcccgacactgccatgggtgcgcacatctgcacactctggggtgcctgccatgcagaggcatctg

SEQ ID NO: 346286 - DNA, 122 bp, Homo sapiens
gtcttttgagttttccatttccttcttaaggtcactgaaatgtgctccttggagccagcccgcaaatcacgcatttagaaaaacataactatacactcctaaccctaagtattagaagtgaa

SEQ ID NO: 346287 - DNA, 122 bp, Homo sapiens
gccatggcgcctcagctgctggcaggcacccacccaccagggtgcttccggggcagcgcgcgccacttccgacctgtgccggaaaagcccatagagaagccacctggctgctagagtgccgc

SEQ ID NO: 346288 - DNA, 122 bp, Homo sapiens
gagggcaaggaagctccatgctgcccacccccacaccttgtgatatggtttggctgtgtccgcacccaaatctcatcttgaattgtagttcctgtaatacccacatgttgtgggagggacag

SEQ ID NO: 346289 - DNA, 122 bp, Homo sapiens
ccacaacctagggggcaacctgggggaccccagagcccgggctgtctcagtgccccttggcggccgtgtggctcgctttctgcagtgccgcttcctctttgcggggccctggttactcttca

SEQ ID NO: 346290 - DNA, 122 bp, Homo sapiens
tggcacccccttcccatctccattacccttctccatttctggccttcttgctgagaggggcggaacactctccctttgcccacactggaagggagcttggccatcactgactgtttctttgt

SEQ ID NO: 346291 - DNA, 122 bp, Homo sapiens
ccgttctccaaggattttgcaaacctgctttctgacgcagctggtaaacttgccccggggcgaactgtcggaaggaggtgcggtcacctggagtttcccaatagatacttcgctgtctggtg

SEQ ID NO: 346292 - DNA, 122 bp, Homo sapiens
cggccggaggccgctagactaatcggcttcgccctgcgcgctgtaatgcgcatgcgcacgcgcacaagttcctgggcccgcccatcttccggacttgggcggggcgtaaaagccgggcgttc

SEQ ID NO: 346293 - DNA, 122 bp, Homo sapiens
ttcctcagctcgctcaccctcgagctcttcagcctccagaccgtggcgtagcctgcgcctcgggggcatagccagagccactctacttggcctgacctgcaggtcccttgccccgccagcca

SEQ ID NO: 346294 - DNA, 122 bp, Homo sapiens
tggccaacatgatgaaatcccgtctttaccaaaactacaaaattagctgggcgtggtggccgcgcctgtaatcccagctactcgggaggctgaggcaggagaatcacttgaacccgggaggc

SEQ ID NO: 346295 - DNA, 122 bp, Homo sapiens
tcacattagctgacactggcttggcacttcctagatgccgggtgcgttccgagttctctacgctgttaaccttggatcttcataacagccggaggagacaagcgctactattttcctttcca

SEQ ID NO: 346296 - DNA, 122 bp, Homo sapiens
aagccctccccaggccagtgatgagcccaaaagctcctctggaaaacgttgatctttgcacggcgcccatgcaggcttccaggccaccagggcatgggcaggactcagcccgccatgggcgc

SEQ ID NO: 346297 - DNA, 122 bp, Homo sapiens
cggcggactcggaggcgcagcggcgcctggtgggagcgctggctgaactgctacgggcagcgctgggcggcgggcgcgacgtgatcgtggacctgtgggaggggaggcacgtggcgcgcgtg

SEQ ID NO: 346298 - DNA, 122 bp, Homo sapiens
cccactcaggctctcccctggcctacccaccagtgcacccacaggagtcagcccagcaggcggcacaaagcccttctcaacagaggtgctagcaggcgcaggagcaaggctgggacccctca

SEQ ID NO: 346299 - DNA, 122 bp, Homo sapiens
attttgtgtctttacccacatggaaattcaacaaataatttagttcaattcagtaagtgccgatttattgagctcttaatatatgctagacacgtgggacatagagatgaaagagcctgttc

SEQ ID NO: 346300 - DNA, 122 bp, Homo sapiens
caacggatagaaagtgataggcaaagaactaagcactcagtataggggaaccaagcacaccgcgggtgagaaggagagggattgacaagagccaaggggcggacgtgggagggatccagatg

SEQ ID NO: 346301 - DNA, 122 bp, Homo sapiens
tattgattggcagggctgacagtgattggcagtggttgccgtggcaacgccacaacgacacgccacagaccaatagaaaagcgaaacaaaatgtttcaatgctgcactcactgtggatttag

SEQ ID NO: 346302 - DNA, 122 bp, Homo sapiens
tctattgtaggtttactgattgtcaggcactatggcgactctctggaatggttcattcctcgcaaatgaatagataggagatatctactatcaggaactacaaacacagtctccgtgctgtg

SEQ ID NO: 346303 - DNA, 122 bp, Homo sapiens
gggtctcctttgggccgacagagttgtctctaattgagtgcaggcagccccggagcccgccgagagctgaggctgggctgggctcccggggactcgggcagctatttcaggcagacgcgggg

SEQ ID NO: 346304 - DNA, 122 bp, Homo sapiens
ctcaataataataatagtaataatcatgctgcctgtgtcccctgatgagacagcactggccgcaggtggccgctaacctctcgaaatagggatggcccgaattgagacatatgcaagtcaac

SEQ ID NO: 346305 - DNA, 122 bp, Homo sapiens
cctctcactgcacgtgctccgctggagcggggctctcattaagagaggcaggctgcgtcacggcagggcagtgctaattggatgtggttgaaggctcaggaggggaagcagagacagttact

SEQ ID NO: 346306 - DNA, 122 bp, Homo sapiens
ctcaggccaaccctcctttgcctccaaaattcagtgttaactaaccaattacttaagagacggatccctcttccttctgtggatagttcatctgttaaggatccattatcacctgtctcact

SEQ ID NO: 346307 - DNA, 122 bp, Homo sapiens
gtttctcagggacgattttggacgcgaagcgtgccccgcacaaggatggttgccatgaaccggaagtaactggttgttttgctggctccagtttttccgcggggcggaaaaggcgtgtctgc

SEQ ID NO: 346308 - DNA, 122 bp, Homo sapiens
ttaaattactaaaacttcaaacctgtaaacagtgggaacgtctagttcccccacccccaccgcacccgaccccaccccccacatttctccccaggccttcccttctgaatctacaaggagag

SEQ ID NO: 346309 - DNA, 122 bp, Homo sapiens
aataaaaggcccttttgtttccttgagagtgcttaaaaggatacatattagcatgatgcccgagtatgcatggaacatgaaaatggaatgagtgatacatacagcatgataggtaggttctt

SEQ ID NO: 346310 - DNA, 122 bp, Homo sapiens
accgcctccgcccgctggccgcactccgagcctcgcgcctagctcccaccggtgccgcgacgacgaccacttccgtgtccacgtcaccttccgcgaccactgagatgggctgggccagagcg

SEQ ID NO: 346311 - DNA, 122 bp, Homo sapiens
ctaaagtgtagcgcggctaagtaacgtaggaagcatcaatcatgtttctggtcaaagaagcgaaccaagtcaattctcaggcagaagcagcggagattctccgcagccggcagcgcccaggg

SEQ ID NO: 346312 - DNA, 122 bp, Homo sapiens
cagaagcccccggcagccagggcttactcactttctttcaaataatacttctttgtctcacggtcgagcagctggggagaagacaccgtgaagtcaatctccttcaaattgttcaacttgtg

SEQ ID NO: 346313 - DNA, 122 bp, Homo sapiens
ctgtaagtctcctggcaatactgctctaaaatcccacttccagcccagtgcagggactcacgcctgtaatctcaacactctgggaggccgaggtgggaggatcacttgagcccgggagttcg

SEQ ID NO: 346314 - DNA, 122 bp, Homo sapiens
agtccgcggcacccctgtcccccaggacagcccccaggggccctggctcgggtgggccggcggctgtcaggggccagagccctgatggataagcgctgacggcccctctcccgcgccccgcg

SEQ ID NO: 346315 - DNA, 122 bp, Homo sapiens
cccccagcacccgcgcgccgctccccccgccgagctcgggtgggggccacagggggcgctcggtggctccccacacggccaggtgacaaacccaaggcagttaggaagtttggggagagtga

SEQ ID NO: 346316 - DNA, 122 bp, Homo sapiens
ccagagggcaaagagtgttttcaaatcacttccgcatcccggcaccctgcacagaacttgcgtagagtagtaagtactcggaattacggttgcatgggccaaagagagtgtgcgcagctgtg

SEQ ID NO: 346317 - DNA, 122 bp, Homo sapiens
gatgaatacaaatcttttatgtattttctgtgtgcaatgattagtatgagtaagtggtctcgatcactgaatacatggggtgtgcttgaagggtcaggccactgccttaaagcaaacagaga

SEQ ID NO: 346318 - DNA, 122 bp, Homo sapiens
gagcctcaggggcggagtcttagtgtccagaggggagtcagggcagctggaggtccagggcgggaaccattgaggctgggaccctacgagaaccccctaccccgtgcccttcggcctctctt

SEQ ID NO: 346319 - DNA, 122 bp, Homo sapiens
gtcctcacaaaaacctatacatgattgttcacagcagctttatttgtggtagctccaaaccggaaagaaccaaaatgtttctcagaatgtcccacgtcagcttcctagttttgatattgtac

SEQ ID NO: 346320 - DNA, 122 bp, Homo sapiens
aacagatcaggagtcgccggcattggggtaccaggaggacgcgagctgactacctgactccgggcggcgcaggacgcccgccgcgcgaggggcgggggctaagcgtatcgaggggcggtgct

SEQ ID NO: 346321 - DNA, 122 bp, Homo sapiens
ctcggcaaggaagaattccagcacttgcatattcctgtgattttaccgctcaccccagaacgatctgtatttctatcagtgctgcataagtgacggccttcggtgccaggaaagaattagac

SEQ ID NO: 346322 - DNA, 122 bp, Homo sapiens
ctctctctttcttgctctctcgctcacctgctaggccacctcccacctgcaccactttgtcggagtattccgcataacggaaggggttacaatgcagcatgcatggaatgacaatgctttaa

SEQ ID NO: 346323 - DNA, 122 bp, Homo sapiens
cgggaccttgccccatggctgtgtggttccaggccccaggcgaagctgctctgggccctgcgggtggcctcggcctccacctgctccttgggccgggctgtgctgtggtggacgtggtggtg

SEQ ID NO: 346324 - DNA, 122 bp, Homo sapiens
gtgcatctctgcttacgatgaagaactggccttctttggcctcatcccggaaatcatcggcgactgctgttatgaggagtacaaggatcgcaggcgagagaacgccgagcgcctgcaggacg

SEQ ID NO: 346325 - DNA, 122 bp, Homo sapiens
aatctgttttgctttccttgcacccagtgcaagcatctaggtgcggcgttccaggcgcctcgcagggggtcgggtccccagccttctgtcccaccgttccgtcccccgggcccggcccacct

SEQ ID NO: 346326 - DNA, 122 bp, Homo sapiens
gaggcacagcctgtgccagcaggaggtccggacgtcctaggtatcccaggtgggagtccacgcaggggtaagggcacactctccgggacacccctgcctccctcacttccacgcgcacggtg

SEQ ID NO: 346327 - DNA, 122 bp, Homo sapiens
tcccaggggcaagatgaagaggatcgccttccagttcacgccgtacagctgggttcgcttcgagtggaagccggcctccagcctgcgtcgctggctggccgtgtgcggcatcatcctggtgg

SEQ ID NO: 346328 - DNA, 122 bp, Homo sapiens
cggtggtggcgccgcgctgggaatccgctgcggagtgagttcgcctcgccccgttcgcttcggtccctgatcccagtcggggtggggctaagctgaccaccctgctgtggctccgcctcttt

SEQ ID NO: 346329 - DNA, 122 bp, Homo sapiens
agatatttaaagatatggctcattaagcaaacatttagtgatcatatctcactgcagcctcgaactcctgggctcaagtgatcctcctgcctcaattggcaaatgggcaaaagatatgaaca

SEQ ID NO: 346330 - DNA, 122 bp, Homo sapiens
gccatttcatttgccactgcaccatctatcggacactagctaggctcttccaggaccggacgcacctccgtccccaaggtgccacctgacagccaacaccgacggggtgatgcatgaataca

SEQ ID NO: 346331 - DNA, 122 bp, Homo sapiens
cccagggccagcccttaggggagggggccctgcgcaggcgtcgcgcggctcccaagcacgcggggagacctcaccgcagccagaccctctaccacagccccaggctgcccccatgcccctcg

SEQ ID NO: 346332 - DNA, 122 bp, Homo sapiens
cctgactcctgccgtcagcccccgaggtgggactgcagtggctgaggctggggagcaaagcgctgtctgttccataagcccctgtcgtgtgccctggctggtgccacgtccgctcctttgtt

SEQ ID NO: 346333 - DNA, 122 bp, Homo sapiens
tccctttccgtctcaattcaggtgaatggctcctccaatggcctatcagacttgcccgatcgccccgtcaccctttatctcacagaccttgcctgctctgcccttactctctctgccccacc

SEQ ID NO: 346334 - DNA, 122 bp, Homo sapiens
gggaacagtcagaagcagagtcccgcccctgctgtggtccctgtcagtcaaagctaggctcggctccgcctccttcccgtttcccgagcaacggctttagtacctcaggccccgattctcgc

SEQ ID NO: 346335 - DNA, 122 bp, Homo sapiens
ccagggagagaaaacacccttcccctgtacggtacctgggatgaagagcagggcagttgtcgccgagaagacgacccagtaggcaggatggtacatctcgacgctgcggtgctctcagctgc

SEQ ID NO: 346336 - DNA, 122 bp, Homo sapiens
acgccgctctccgaatgaagccggcgcgctctgattgggtgcttttaatctctgggagcccgccttctcctcccgcagccttccaactcctttccccagccccaccccccaccctccttcgg

SEQ ID NO: 346337 - DNA, 122 bp, Homo sapiens
acctggctcctcatcccgctactcgctgggccccagcctgcgccgggggcacgaggtgagcgaacgtgtgcagagcagtgagatgggcacatccgtgctcatcatgcagcccatcctgcgct

SEQ ID NO: 346338 - DNA, 122 bp, Homo sapiens
ctcaggccccgaaggcggtgtatggattggggagtcccagccttggggattccccaactccgcagtttcttttctccctctcccaacctacgtagggtccttcatcctggatactcacgacg

SEQ ID NO: 346339 - DNA, 122 bp, Homo sapiens
ccagggagacccaaggcacgggacagaaacagccacatcaaggcccctgtcccaggattccgcagtgaatcttcctagtgctaggagaccattttcacaacctaatcaatgatcccattatt

SEQ ID NO: 346340 - DNA, 122 bp, Homo sapiens
cccgcccgtgaccaccgtgcgctgccagaggggaggctgcgggaatggccagcgaggtctcgcagggggactggttgtcttttaggaaatcaaggggccagcgcccccagtgccggctggga

SEQ ID NO: 346341 - DNA, 122 bp, Homo sapiens
caagtggcggtgacgtgcggccgcgggaatgacgttggccgcggccccgcctcctgctttcgcggcacttgactggcttcccactatcagctgacggccgtgtgctcatactgcaccagatt

SEQ ID NO: 346342 - DNA, 122 bp, Homo sapiens
tcctagcagggaaaaaggcaagcacttccggctccggctcttttaaataaaataaagacacgtcaaaaaataatgccgcaaaaattctgagtatacatgttttaatagacaataataactag

SEQ ID NO: 346343 - DNA, 122 bp, Homo sapiens
ggaggctcacggagcgtcggtggaaggcgcacagaatggtaaagctttactaaggcctctcggaaggggaggcagcgggactccccgcggggcccgacctcctggaccgcactgatctgaac

SEQ ID NO: 346344 - DNA, 122 bp, Homo sapiens
gccgggatctagctcttgtctcattggggcaggaacgccggggcggggacacgcacgcttcgcccccaggaatgacctcatcgctccggagctccactcacagaccccacctaccacaggga

SEQ ID NO: 346345 - DNA, 122 bp, Homo sapiens
gaatgtccatatacaaaaaaaagtggaacctggattccagccaggaggggtctgcaaccacgtagaacaattggagacttaacaatctgtaatattcgtgttatattctataatattcactg

SEQ ID NO: 346346 - DNA, 122 bp, Homo sapiens
aaaatcatgcccttagggatgtgtgttcatgctgctttatttgtacaagacacccttccccggcccggccttctccgagccaccccagcgcgtcctcctagatgcgacgacgtgtttttcct

SEQ ID NO: 346347 - DNA, 122 bp, Homo sapiens
gccgccgcccgggaaggctttctgcggaggctgccaccaccgctccggctgtggtctgtgcgcccgccctagggcgacactggcgcgcccatggccgcgcagccgcctctcgccgccgcagc

SEQ ID NO: 346348 - DNA, 122 bp, Homo sapiens
gtacctgaaaggcaaaggtggcccaaaggcaaatcccatttcagcatttcaaccagctgacgaagccttggacccgtggcaatagggctgagctggaccagggactagaaaatcaaccaggg

SEQ ID NO: 346349 - DNA, 122 bp, Homo sapiens
ggtaattgaatcatgggggctggtcttccccgttattctcgtgatagtgagtaagtctcacgatacctggagggtttatcaagggttcctgcttttgctgcttcctcgttttcttttgctgc

SEQ ID NO: 346350 - DNA, 122 bp, Homo sapiens
ctcccgcaggacgtggcgcacctgagtactggatgcagcatacacgtgtgcaggtgggggcggcagcgacctgggggccgggcttggtgggcacagcgcactccacggggtatgcctccctg

SEQ ID NO: 346351 - DNA, 122 bp, Homo sapiens
aggtccccctgttaagactgactttaccgggaccctggggcctcagcaaagctctgtccccggaacctgcccgcagaatcgcacatctggttcctgcctcagtgcccagagcgcccagacac

SEQ ID NO: 346352 - DNA, 122 bp, Homo sapiens
aaaaaagcataattccttcatccagaagctcagataccaagtaaaattgaatggaattaccgtctaagctataaaattcagaattagctcagaggcctgaggcttcccatattgtctaagta

SEQ ID NO: 346353 - DNA, 122 bp, Homo sapiens
gcccatcagatttccagcctgtgccccttcccacagtgcaccaagagcttttcaaatgctcgagctctagaaatgcacctgaattcacacagtggtaaatgccccttttgtttcttctgttg

SEQ ID NO: 346354 - DNA, 122 bp, Homo sapiens
tgcaccgggagcgcatagtgtacagggacctgaagccaggaacatcttgctggatgaccacggccacatcctcgtctccgacctgggactggctgtgcacgtgcccgagggccagaccatca

SEQ ID NO: 346355 - DNA, 122 bp, Homo sapiens
ggtgtccggcacccagtgagagcctggaacaatcattaggatgtctgagtccttatcactcgtgcgcagcacaacacgaccgtgggcacagggttgaaggcggttccctacgcctagcctct

SEQ ID NO: 346356 - DNA, 122 bp, Homo sapiens
gcttaatatctctgtgggtgagcatttgcccggtcatgaattgcagtgtgaatgtggcgccgtgagaaaagccggggacctggagtctgggagacatgaggttcagtacacagtttcatcac

SEQ ID NO: 346357 - DNA, 122 bp, Homo sapiens
gccggccagaggagcgctggccgggcggtttctccactgtatgcaaaggccccccttccacgctgcattctaggaagaaagtcactatgggcagctcacatttcagagtaagaaggtacgtt

SEQ ID NO: 346358 - DNA, 122 bp, Homo sapiens
caagagaggctaatctaaggcctttttgcataccgcctgtgagatcttgtaccactggttcgcccttatctctaagcatccttaatctccacctctccttgcccctcccccacaatttcttc

SEQ ID NO: 346359 - DNA, 122 bp, Homo sapiens
gtccgaggcacacggcccgaaaagtcgctgggagaagcccagtggcggtggtaggcaattcggagtagtcaataaagtttattcaaaacaatgaggaagttgaggcggagaggggaggagaa

SEQ ID NO: 346360 - DNA, 122 bp, Homo sapiens
gaccgcctccgccaatctcagcagtcctcacaggtggtctcgctccgcagggcccgcagccgcctagaatggaagggcaagaggctcaaatatgcggccaaagaatccgcccgcgcccggcg

SEQ ID NO: 346361 - DNA, 122 bp, Homo sapiens
aagtgcaggtgtggttcaagaaccggggccgcttgctctgcggtagcaacggcacataaccgcagcgatgaccagggcagccaagccagcagccgggaccccgggatgctcttggcacatga

SEQ ID NO: 346362 - DNA, 122 bp, Homo sapiens
tctggtcttacggagacgcctctaagccatttgatcccgttccgggaacgaaaatggcagcggtgacggttgctccttttatggtctccctccggctgtccaggacggtctcctttttccct

SEQ ID NO: 346363 - DNA, 122 bp, Homo sapiens
ctagacgcctgggaatccgtgagcttaatccccgcttaaatcccaaacggaaaatcatagcgctttcttgtcggttaagggtgtcattcccataagaagctggacctggggaccgccaggga

SEQ ID NO: 346364 - DNA, 122 bp, Homo sapiens
attgctttttaattcttattgcggatatgaacatggctgctattccacatacacaatgttcgattattgtgccaacttgattcagcatagaagtgaaactgtttataatgagtgttaacatt

SEQ ID NO: 346365 - DNA, 122 bp, Homo sapiens
tactctatctgtagcttaaactaacaaacaacccacacaaatcacattttgttcttcaggcgattcaggaaggcctattaggcagggactgccattttctctctgagacaaacatcatgcca

SEQ ID NO: 346366 - DNA, 122 bp, Homo sapiens
ccggcgtcctacaggcctagtggactctgagcggagaatgttatgaccaccgggcatgcacgcttcagggccccggcgcacccttgcttttgcagcatttatacttgcatccacccttgcaa

SEQ ID NO: 346367 - DNA, 122 bp, Homo sapiens
gattcccagcaaaatagggtgtgcgtgtgtgtgcacgcgggcaggactgcctggtaagaccgcccacatcccacctgcagtgactgtggtcgctttgcagggatatgctggtctgattggac

SEQ ID NO: 346368 - DNA, 122 bp, Homo sapiens
ctgcgacacctgctcttgcagactctgctaggcgacagacacacctcccacggcttgtggcgccagtgttggcgacaaactgtaatgaacacaggcctggctcaacagccccttgcaggggg

SEQ ID NO: 346369 - DNA, 122 bp, Homo sapiens
gtaatcaagaaacagcaggattatgtaaagcaaagttggaaatcaaaaggtagtgaggcacggtggaccagacatccaaataaaggggagaggccccttaattacagaatgaaacttgagga

SEQ ID NO: 346370 - DNA, 122 bp, Homo sapiens
accacacaccacaggcaggcaacttggccctgggatcattacagtccagcacacatgtcccgtcaatcgcagatgtgctcaaaatagatgccgcttgtactcccctccctcccccttctgtg

SEQ ID NO: 346371 - DNA, 122 bp, Homo sapiens
gctttattatgggtgacagatttagggttcttaaatagcgatagcagtggctagaagaagcgcttcatccccacagtggagttctttgttgtgaggggagggaatgcaaggagtcatcagcg

SEQ ID NO: 346372 - DNA, 122 bp, Homo sapiens
tcacatcccagacggggtggcggggcagaggcgttccccacatctcagatgatgggcagccgggcagagaagctcctcacttcctagatgggatggcggccaagaagaggcactcctcactt

SEQ ID NO: 346373 - DNA, 122 bp, Homo sapiens
ttggcatccgctctgggccctctttggggctggcagaggctgaagccggcttcctctgctcgtggggaggtgtggagggagaggcgcgggtaggggccagcgctgcgcgcaggccttgtggc

SEQ ID NO: 346374 - DNA, 122 bp, Homo sapiens
aggggatgtgcgagcagtctccgccctcgcgcgggagctgggaggctgcgagatccctaccgcagtagccgcctctgccgccgcggagcttcccgaacctcttcagccgcccggagccgctc

SEQ ID NO: 346375 - DNA, 122 bp, Homo sapiens
gccggggccggctgcgcacggctggagctggagggagcgcggatgggggaaaggctgcaccgtcgccagggggcaccggaaaccgcctgcattcatttacaagtgtccatctcgaagaatgc

SEQ ID NO: 346376 - DNA, 122 bp, Homo sapiens
taaacagcacagttagtccacagggctagaggaccttggcacaggtgcagaggaccactacgtttgggttttgtagtccttggaagcatagtactgtttcagagaagttggacagcatgtac

SEQ ID NO: 346377 - DNA, 122 bp, Homo sapiens
gaacacgttggccagcgtctggccctggtcctccagctcctccacacgcagcagtccccgcggagctgagtcaaatacctggtacttgtctctggagatcagggagaagggcaggcgtgtca

SEQ ID NO: 346378 - DNA, 122 bp, Homo sapiens
tcctgtcgatcagggtctaaatgtgtggggcggagaaccccagccaatcagtggtgctagcgtgaaaactgcccaatcaggtgcgcagctagagaggaagaggcgggctcttcaatatggca

SEQ ID NO: 346379 - DNA, 122 bp, Homo sapiens
gggccagctggagttccgggtgggcatgggcttggcgggccccgcactcagagcagccggcgagcccttgctggccctgggcaatgaggaacttagcacccgggccagcggctgtggagggt

SEQ ID NO: 346380 - DNA, 122 bp, Homo sapiens
ggccaccccagccccccttccccgctagttaaggctctgtgttatccttccccttgctcccgctaggactgtgattcgacccagcgtcctcctgtcacctcctgcgaggtgaggggcagccc

SEQ ID NO: 346381 - DNA, 122 bp, Homo sapiens
tagggcatagttagaaaagatttaagatgtcctttcccaacattctttccaatccattagcgtagaataactccagttcctggatgttccagtattgtagtttcaaaaaatggtagaagtac

SEQ ID NO: 346382 - DNA, 122 bp, Homo sapiens
ggaaaggcgcgccgagtcctgcagctgctctcccggttcgggaaacgcgcggggcgggggcgtcgggcttgggacaggggaggataccagggccaccttccccaacccaggccgcgggggcc

SEQ ID NO: 346383 - DNA, 122 bp, Homo sapiens
aatgacaacctgcaaattagtatcatctatccctatttaggaggtgagagtgtctcagatcggttaagtaactggctcataatgatcagtgcttgtgggaaagctggaatatccacggagtt

SEQ ID NO: 346384 - DNA, 122 bp, Homo sapiens
cagagcgaacggtcatacagataattcctatcccaaaaaataaggagaccaggggtcaggcgataagtaaggaaagccaaacaggcaaccccagtagaaaactggggtctcccctgaccggg

SEQ ID NO: 346385 - DNA, 122 bp, Homo sapiens
taacctcactaccatctgtggtaacccctctcctaggggtcttgggtgtccctgagttttcgtctgggggtagagagagaagcatctgtggtaacttacgccaattggcctgaagctgtcct

SEQ ID NO: 346386 - DNA, 122 bp, Homo sapiens
ctcggctgccggctgccggggccggctctacctggtgggctccagcgcctgcaagtacaacgccctggccctgcagtgctacaaccctgtcacaggtgggtggggctcagggaccgaggata

SEQ ID NO: 346387 - DNA, 122 bp, Homo sapiens
aggtggacaaagggcccagacgtgagcaaaggatggcagcaagcccggacccaagcgacgcggcgaaagcacagcgaccccaccctcgccaggtgcagagccatttccgcctccgagtcctg

SEQ ID NO: 346388 - DNA, 122 bp, Homo sapiens
ccaaatattgcaaaacacgccatttgtgttctccttccctttgctacaacaccctctgtgcgccaacaaaaacaaaatgaatagacttgatgttgcagctgatatgaagttctgactcagtc

SEQ ID NO: 346389 - DNA, 122 bp, Homo sapiens
gcaaatctaaacttcctaaaatatacacggagcgcctccgggtttgcacacgcgcgcgcgcgggtacaccctggctcgagtacattagccccgctgggccggctcccagttgcagaacacat

SEQ ID NO: 346390 - DNA, 122 bp, Homo sapiens
agcaacaaaggcaaaaacgcggacgttggttatgaagggtgtggtctccctggtggagtacgtcggtgggttgggatggggagcggctggacagaccggtctcactccgtttggtgccactc

SEQ ID NO: 346391 - DNA, 122 bp, Homo sapiens
gggccgccgggactccctcttcatccccatccgggcccgcgagcgccggagcagctacagcggctacagcggctacagccagggcagccgctcctcgcgcatcttccccagcctgcggcgca

SEQ ID NO: 346392 - DNA, 122 bp, Homo sapiens
ggtcctcggccggcaggggcggggtcttcggccggcaggggcggggtcgggggcctggggcggggtcggggaccggggccaggagcgggggagctcggctgggagctacggctgccccttcg

SEQ ID NO: 346393 - DNA, 122 bp, Homo sapiens
agacgggccccgccctcccggtcgtcatcaggcgccgctctcgcgagagctggggcgccgcgagcctcgggcctcgcccacacgcccggcccgccccgcctccagatcatgccccgcccaca

SEQ ID NO: 346394 - DNA, 122 bp, Homo sapiens
ggggtcgggcccccactgcagagcctggaaaggcaaagacccccgaggctgcgctcccctcgcccttcgtgtcgggtcctgccccacccggcagctcctgggacccgctgtgcggcccaggg

SEQ ID NO: 346395 - DNA, 122 bp, Homo sapiens
cccaaaacagctgcttggaaggagccagcatgccagaggctgggcgcaggcgcagagcgccgcagagccaaattcaaatcactttcacactaagagccaaagatcagttttcaaaggagaga

SEQ ID NO: 346396 - DNA, 122 bp, Homo sapiens
attcagatttctctgcttagaagatcccccacacagtttgcctgactactgtctacccatcgttcgttaaaatgtgtttcagacagtcattcaacctttcaacctcttgatttttccatcta

SEQ ID NO: 346397 - DNA, 122 bp, Homo sapiens
aatctaggatatatcaaaatttgaactttgtgttagctttcaactgttaaaactagccagcgttgttacagatccacctctgagtgacactggtatgccactctttgctgaccactgaacaa

SEQ ID NO: 346398 - DNA, 122 bp, Homo sapiens
cgcccgggaccaggccgaccctccttgacggtggcgtagagggctggagcctgggtactgcgaggctcctcgcatggctgggcccgccgcgaggggttgcagagcggctcagggatcgattc

SEQ ID NO: 346399 - DNA, 122 bp, Homo sapiens
gttggctgaatccattgatgtggaacccatggatacagagggctaattgtatttaccatacgaccaaagaaatgaaaagttacatgcacacaaaaacctgaacaccaattttcatagaagct

SEQ ID NO: 346400 - DNA, 122 bp, Homo sapiens
atcccttctctctgtcttcagtagaacttggcagaactggacagccaggcccaaaggctccgctggctcctcttaccctcggggcctttgattctatacctggagcaattccttccatttac

SEQ ID NO: 346401 - DNA, 122 bp, Homo sapiens
ggccgtgcccgcccgagaaggcggcgctgggagccgctcagagcccagagaagcggcgcgcggccaggagcccccgctccgccactgccgtgcctgcctcccgcagctgtctgccatgcgct

SEQ ID NO: 346402 - DNA, 122 bp, Homo sapiens
cgccccgcccgcagcgcggaccggaagtgctgccgtaatctgcgctgagagtcgcgaaagcgctgttccccttagtgaccggcgacgcgggcaagatggcggcgctgggggtggcggaggcc

SEQ ID NO: 346403 - DNA, 122 bp, Homo sapiens
ggcttgagccaccgcgcccggccgccctgcggctttttaaggcgctccccagcccacgcacgggcggaagttttgtcatctacagctttcaagtcctccattgctaagtctacaacagcctg

SEQ ID NO: 346404 - DNA, 122 bp, Homo sapiens
tcatataaatctaaaagtgtgactataaaaaatgaacttttttgtgggactgatgtaatacgtgtcattaatcacacttggtgcacccatgaggcaagtgcaaatatcctttcatactccag

SEQ ID NO: 346405 - DNA, 122 bp, Homo sapiens
aggggatgggagggcggaggagtttgtgcgggaaaggcgctctggcgatgtgggtcgggccgaattagaacttccttcttccctctcccctccccttcttctggcctgcctcccctcccccc

SEQ ID NO: 346406 - DNA, 122 bp, Homo sapiens
ccgggttgccaagtggtttgggcagcagggccccctctgggcctcagtttccccgtgtctcgagtgggagcggctccttgcacctgtgaggtgtttaccgctgccagcgtaggtgctgccca

SEQ ID NO: 346407 - DNA, 122 bp, Homo sapiens
gctctgctcatgggaggagccctgcctctcttcagcttcccagcagtggtgggagacacacgtctcttctgcccacgggaggaagcgagacaaaagaaaaaagttgctatcacactctaaat

SEQ ID NO: 346408 - DNA, 122 bp, Homo sapiens
tggtccccggggagaagacgctgaggatcccattgctggtctgtggatggggacaggagacgcccgaggtaagaaggggtccgggttctttggaggaatcctggttggcgccttctctgcag

SEQ ID NO: 346409 - DNA, 122 bp, Homo sapiens
cgagccggaaacaaccaggagcactattcccggccgggtgggtccagcagccgcgggcttcgccccgccgggactcgcggccgcgcctcctctgtaccacagctcccaaggtccccccacgg

SEQ ID NO: 346410 - DNA, 122 bp, Homo sapiens
tagccagcccttcctcctcagtggcaggaaggtgcctgctgtttgcaagcttgtttagtacggtgtctccccacgccactggcggggtcctggctccctaccgacaactttgagggcctgtc

SEQ ID NO: 346411 - DNA, 122 bp, Homo sapiens
cagactgctggccccatgtgatccacccgccttgatctcccaaagtgctgggattacaagcgtgagccacttcgcccagccgcttcatgactttttaaaaacactcttgtggaatggtgacc

SEQ ID NO: 346412 - DNA, 122 bp, Homo sapiens
aaagaacatcaacgatggcttttgcgccaatgacatgttcaggtttgccctgcacaatttcggctgacctcctctcagccaggcactaatgctgtttcctcctcccttctcttcccaatact

SEQ ID NO: 346413 - DNA, 122 bp, Homo sapiens
ggctctcttctcctttctctcaagctcatgaggcaatgaagccaatgatttgttcattctcggagggaattttctttctttttttcatttcctgggtactgggttgctcagcactggcctct

SEQ ID NO: 346414 - DNA, 122 bp, Homo sapiens
atgtggtccatggactctggcagcatcaacaccacctggcaccttgtcaggcagaacttccggccctctccccgcccctaggcctatggaatcagaatatgcatgtcaacaagatctccagg

SEQ ID NO: 346415 - DNA, 122 bp, Homo sapiens
ggagacttgggaatagagattcctgggtctcacccaggctgctggggacagcaggatcatcgcacgggcctcttgactctacggcctgcgtgtaaagcctgcgctaagccccagtgtccttc

SEQ ID NO: 346416 - DNA, 122 bp, Homo sapiens
gacggtcactatgtctctgcgcaggcgcccgcttccccgctctggactctactgcgcaagcgccttcattcattgcctaacctaagtggctaggtgtcggcaggctttgtgacagggacact

SEQ ID NO: 346417 - DNA, 122 bp, Homo sapiens
gaatgcactgggttcttttttgcagttaatccccttctaactggtgtgttctgctcgccacgctgcattgcaattgtttatttatctgctgcctcttctactaaactggaagttatttgagg

SEQ ID NO: 346418 - DNA, 122 bp, Homo sapiens
gacgtgcggaacaacaggacgtcataaggtgtcgccgccgcctttgggagcgatgcgaaacgccgcgcttgccggagatagcattgagggcccttccgcggcccggcgtttcgtctcttggg

SEQ ID NO: 346419 - DNA, 122 bp, Homo sapiens
caccagccccgccccaccccgccccgcatacccgtgcgctgccgcgcatgctccgagccccgcccccgtgcgtcacagaatggcctcggacacccaggcagtccctgacgtgtcggggagga

SEQ ID NO: 346420 - DNA, 122 bp, Homo sapiens
tccattgcatgaaaccagccagagataaatatcacacccaaaagtgtataacctgggtgccgtgttatgggtcaggcgacagtgttgccaatacccagtagtgtctccctctggaggccccg

SEQ ID NO: 346421 - DNA, 122 bp, Homo sapiens
aacagaggagacgccacagcagaggagatttgtctttgccctgtgcatgggaggaggctgcggggaaagggagaaagtcaggagaagctgctcttacgtcttttttcatcccctttgtccag

SEQ ID NO: 346422 - DNA, 122 bp, Homo sapiens
gagcgctgggctggaggcctcctgatatctgcgaggctgactcacggtggagggagcagccggctgtgctgtcctcatgagcaggagtggccgtgataagggacagattttaaacgattaga

SEQ ID NO: 346423 - DNA, 122 bp, Homo sapiens
gcagtgattcatttttcttctgcaatcagctcactgctaaagtaaatctgactctcttcccgccattgcacaccaaaagttaactctaatgggtaggaggttaggtttgttgagagagcaat

SEQ ID NO: 346424 - DNA, 122 bp, Homo sapiens
gtggccatgggagggtctgtctgtgctgtgtgtgtgtcctgcgcgcgtcgggagctgctgcgccacacacaggcacgcagggtgtgggcacacctgtgcttctgagcccacgtgcccttgcc

SEQ ID NO: 346425 - DNA, 122 bp, Homo sapiens
gaaaacggccagcctgaggagctgctgcgagggtccgcttcgtctttcgagagtgactcccgcggtcccaaggctttccagagcgaacctgtgcggctgcaggcaccggcgtgttgagtttc

SEQ ID NO: 346426 - DNA, 122 bp, Homo sapiens
aacttatccacatattatacttcaaagtggaaaaacacaaagtactcttaactctatatgcgtgtttttatgcaaactaaatcattaagatacaaatgatttttctaatagctttcattacc

SEQ ID NO: 346427 - DNA, 122 bp, Homo sapiens
aagttgggcttatgcttcttgagctccaccataaggtggtgaatgttgatgagctcagcccgggcagggagggctcggagctgcggctgggacagcacccggtggaagcgatgatagagctg

SEQ ID NO: 346428 - DNA, 122 bp, Homo sapiens
aacggttcgtcccctgccccattgcatggctgggggctgggcttcaagagtgatggccaacgcagagccggccagcaaggtcatcccctgacccggggcggtcttcctgtggctggccgcac

SEQ ID NO: 346429 - DNA, 122 bp, Homo sapiens
aattttcatcaacaggctgtttcataaacggctttattttttatccaacaatccaccaagcgatctttctgtgcctggggattacaacaagctttcccctttttgacatctgcaaatacttc

SEQ ID NO: 346430 - DNA, 122 bp, Homo sapiens
aggcccggccaggtgtcctctgccggcgttgctgctgctccctttggcccagcatcgcagcggggaggcaccctccctgagcgctcacgccacagcgtcaggcctcagccggccagagcagg

SEQ ID NO: 346431 - DNA, 122 bp, Homo sapiens
gggaaaagccttgagacccacgagcggtgagccctaaggcaggctgggatctgggagcgccgtcgtgtcctgggagaagttcagtcccagcgggctccaccacccacacccgctccttcctc

SEQ ID NO: 346432 - DNA, 122 bp, Homo sapiens
gctgcccaagtggtggcgcctggctagactgcgtgtgggccccggagggatccgggggtgcggagcttgcgaggccgccaaagctgttgtctcaacaaggagagtctggggctagtccaaag

SEQ ID NO: 346433 - DNA, 122 bp, Homo sapiens
aaacggagtcagactctcaatctctgctggatacagggaaagaaatagaaagggaaggggcgtggctgcattaacagagattctttacagatgtaaaacttccccacttgagacagctttgc

SEQ ID NO: 346434 - DNA, 122 bp, Homo sapiens
acaagcatatcgaggctgaacaagccacagtccacgtttccaggagaattacaaagcaaacgcttggcctcgcctgccgcagactccgcccgcttctagaggcccgcaccctgactcctgca

SEQ ID NO: 346435 - DNA, 122 bp, Homo sapiens
cttcggacagaggtcacctccaagatgttccagaagacgaggactgggtcctttcacatccggcggggggaagtggtacgcctctgtgggggcagcggggtgggggataggcacagcgcccc

SEQ ID NO: 346436 - DNA, 122 bp, Homo sapiens
agaagatgttgcagctggaccactgcacctcagtacccagggtgatgaggctcattaggacggcagtctccacggtcctgtgcagacagccagggatgcgggcgccgttcagtggcttggag

SEQ ID NO: 346437 - DNA, 122 bp, Homo sapiens
caaagcaagcaaacaaaaaacaaacgcaagatatccaacccacgaaacgctctatgttcacgccagactcccatgcatgcaccctttgagtgctccttgttgggacccatccaccacccccc

SEQ ID NO: 346438 - DNA, 122 bp, Homo sapiens
ctaacatcatgttgcagcaaggttcatttcatttctttttatggctgaataatattccctcgtacagatggacagcaggtgttgacctattcatcggttgtctattcggcctccacaatcca

SEQ ID NO: 346439 - DNA, 122 bp, Homo sapiens
gggagcctggccatggtaggacgcagcgctgggggcagggcctgaggctggcgcggcagtcgacagtggtaagaggcctctggcagccagcccgccaggcaccgtgaaggctgaggagcacc

SEQ ID NO: 346440 - DNA, 122 bp, Homo sapiens
gctctgagtgtgagacgttctagtgccctgggctgcagaagcctgaggcatgcccagcctcgggaggccctagtggaccagcaagccaagagtgagtgtgggcagcacccccagccagaggg

SEQ ID NO: 346441 - DNA, 122 bp, Homo sapiens
tatgacttacaagatcatattgagaggtgacagcatgctggcagcccgcgcagcgtcgctcgctctcggtgcctcctcggcctcgccgtccattctggccgcgcttgaggagcccttcagcc

SEQ ID NO: 346442 - DNA, 122 bp, Homo sapiens
ctcttcccaggattgtacatggaaatgaaggatccacagattttgtggctataaaacacccggactaccgatcccagtgtgcaaagcctccaggcttaccttcccggaaactggcgcggtgc

SEQ ID NO: 346443 - DNA, 122 bp, Homo sapiens
taatcccagcactttgggaggctgaggtaggaggattgcttgaggccaggagttcgagaccggcatggacaaagtgagactccatctctgcaaaaactaaaaatgaaaaattagctgggtgt

SEQ ID NO: 346444 - DNA, 122 bp, Homo sapiens
gggagagccggggcgggccgcgtcgcctgtccccagtcccggtctctcttccccgctgcccggtcccgccaccccacgcccgtcccggtcaccaagccgggccctgtcgccgcgcgagcccc

SEQ ID NO: 346445 - DNA, 122 bp, Homo sapiens
tacaccattcaagaatagtaaacatttacaccctagatttttaatgatctgagacagcaccgaagtatataaaaaagttaggctcctgagcacttaattcttcaaggaaggggatggaggaa

SEQ ID NO: 346446 - DNA, 122 bp, Homo sapiens
tcttcagggcgtcttctgccctttaaagcgacttggctcgtctccagatctaaaggtgggcgagtctgctggacggacgctgggaccgtcttgcaggggatgtggaatagctgcccccaccc

SEQ ID NO: 346447 - DNA, 122 bp, Homo sapiens
aactcagcggaacaagtttttcttttcttcttttttttttttttctattgcttggcaagacgagggagggaaacacttaaaaaaaagtttccattgttagctaacaacaacaaaaaaggctt

SEQ ID NO: 346448 - DNA, 122 bp, Homo sapiens
cgcagctgtctgcgtgcgggagccgcagcggccgcctcccctcccgggctgtggacgcaccgggttattcctggcagcgcctccccgaacagaagttactaggaggagtgcgcggcgagggc

SEQ ID NO: 346449 - DNA, 122 bp, Homo sapiens
taaatgcattttccccatgtggcttaaagattgttaaagatctagaaatactttttgactcgtctgagcagacaggaagacagatggacttagagagtaatggttggcaagaacatgctgtt

SEQ ID NO: 346450 - DNA, 122 bp, Homo sapiens
tacaagggtggagtgaacagggtgaggcaggaagtggctgtagatgaggcaggagaggaacgctgtggccagtgacaaatggtcttgaataacacactaagaagtttgaggaagaacagtgg

SEQ ID NO: 346451 - DNA, 122 bp, Homo sapiens
cagtttttaatttccgttttcccatctggcggtcgcatgcactccttgaagcgtgaatctcggcagcacagccctgccctgcccggataccatgcgcatgcactggttacagcctcgctgac

SEQ ID NO: 346452 - DNA, 122 bp, Homo sapiens
cacacacacacacgtgcgcacacacaactgtgtgtgtcttcctttatgctaccactacctcgtgagagggccacagaatgaaaagggcaagggaggtataagacttgggtttgggccaggcg

SEQ ID NO: 346453 - DNA, 122 bp, Homo sapiens
agagcagttcgacgagcagggagccaaaaaggtagcaaatcccggaggccccccaagggtcgcggctccgagccccggccatgggacgatccctgcgcgagctcccagcgaatgcaagggaa

SEQ ID NO: 346454 - DNA, 122 bp, Homo sapiens
accgcgcccggcctctcccaatccattttcttttctgaaggttctttaaattaatttggtcgctgctgtgtgatatttttttcttaatttaaccatttgctctgccatgtgcatgtttcact

SEQ ID NO: 346455 - DNA, 122 bp, Homo sapiens
accactgtcaagtcatttaaacaagtagatttactcttcagttctgacatatcacatcagcgacagttggtacctctttacgaaataaaaaatgtttcctgcaactttaggttttacttgta

SEQ ID NO: 346456 - DNA, 122 bp, Homo sapiens
acagcagctcctgtggcagcatgaccatgtccaggagcatattgtccctgagctgtcactcgcagaacactcagtgaagtgcactaggagcccatggaaagtcaggaaggaatgaaaagggg

SEQ ID NO: 346457 - DNA, 122 bp, Homo sapiens
cagcccggcccgcgcggctggaaaaggatactcccgggtgcggaaggcctcctgagtgtgcgggatggtgaagagcggctcctctccgggcaacggcttcaccagcgggaagggcttgcggc

SEQ ID NO: 346458 - DNA, 122 bp, Homo sapiens
tgagaggaattgtaggcccttcaaaacgaaccatacagacagctgctgattctttacatacgctgcatcactcctgagcttagcaatgtttggaggctttatgcaaaggctcaagcagaatt

SEQ ID NO: 346459 - DNA, 122 bp, Homo sapiens
gtaaaggcgagaaggctgcaggagaccgagggggagccgggccggtggggccgccgccgccgccatgcaggaaatcatcgccagcgtggaccacatcaagtttgacttggagatcgcggtgg

SEQ ID NO: 346460 - DNA, 122 bp, Homo sapiens
cgactcctttcagtcctctgtagagagaatacgcacgatggctgcgcttctgaactctcccggggtggaagctgcagcctggcttttaaccggaattgcccagaccttgaaagtgtttcttt

SEQ ID NO: 346461 - DNA, 122 bp, Homo sapiens
agtgctggggttccagggtagggagagccgtgggcgccagactgggctgcgggaggtcttcggggtcagatcccgcaggcagccaagagcgagccaaagaaacaaagccgccgagggacgcg

SEQ ID NO: 346462 - DNA, 122 bp, Homo sapiens
agaaaaaaaaagtcccaagaaataaaacctggtggtaatgtttctcttcatactgttactcggaggcttgcaataattcagttagtgtgtggtttgcgatgtagaatttgcagtttttttca

SEQ ID NO: 346463 - DNA, 122 bp, Homo sapiens
accattgcacccgatgagagcttctcgcggctggatgccggccgtgtcaacaccaaggtgcgcagctttgggccactttccaaggctggcttctacctggccttccaggaccagggcgcctg

SEQ ID NO: 346464 - DNA, 122 bp, Homo sapiens
ctcctttgagtgcctcttaatctctcccttctctgctctataagtcattcattctccacacgtttactgaaataaactgtcagtgctaggcaatgctgggaaccacaggcgaatcagacagc

SEQ ID NO: 346465 - DNA, 122 bp, Homo sapiens
gtgctttcttccgcttccctgcaggtttcatctggaatgcagattttagctcctaaagcccgtgagggataacccacacgactggtttcagatgactgctgttttagctctgccctagctgt

SEQ ID NO: 346466 - DNA, 122 bp, Homo sapiens
ctttggcggggatggaggtttccctgcaggaaatgaaccaggactgaggggaacctgtgccgttcccctcatttgtcctgcgcctgaaacagctttgaagcacctggcttgtgacttaaaag

SEQ ID NO: 346467 - DNA, 122 bp, Homo sapiens
ggagggtgccggggcggggacaagaagtgtgcatgcggattggttcctcgcggctgggggcggggccgcgcgggccggcggaagcggcgggcttcgggaggggcactgcgacggcgttgact

SEQ ID NO: 346468 - DNA, 122 bp, Homo sapiens
ttgttttattttcccaaagcttggagattacttggcaaagtgtgatggtgctacacagcccgtaagaaatttgtaatcacccatctaacaagtacctaggctggatctgcaaactgcgtgga

SEQ ID NO: 346469 - DNA, 122 bp, Homo sapiens
tgaggatcatgcagatgagttctctgggggaaagccttccaggcagggtggaacaaccaacgcaaaggtcttggtgcaggaggctgcttggcatattcatgaacagtgttgagcctgaggga

SEQ ID NO: 346470 - DNA, 122 bp, Homo sapiens
cagtggcggcagtggcggcagtggcggcagcggcagcagttgcagcagtggtggccagagcggatgcttgcgggctccctgcggctccactagttttcttcgccccgcccagccgcccactc

SEQ ID NO: 346471 - DNA, 122 bp, Homo sapiens
cctgaccacggagactctgcttggggcacaggtgtgggagtcgcaaacttttctctgcgccgtccttttccgcgtggaatgggacggagcagccctcccaggcgctgcctggctgcggaggg

SEQ ID NO: 346472 - DNA, 122 bp, Homo sapiens
cctggcgcggggtggggagaggggccggggcggggccggggcgagggggcggggccggggcgtagagggccaccaggtccctccccacacgcccgctgtccacgcgctgcggccttggagta

SEQ ID NO: 346473 - DNA, 122 bp, Homo sapiens
agggccgtggagcgagaggctgggaaggtgcttcaagccaggggtgcatgctttctcccacggacgcggggagatggcctcgctttgtacccccatatccctactcccgctgtggtcggctg

SEQ ID NO: 346474 - DNA, 122 bp, Homo sapiens
ctcaggtgatcctcctacctcagcctcccaaagtgctgcgattacgggcgtgagccaccgcgcccggcgattttacaggtatcattacctagaatgaggtgaaaggacacggttaggatttt

SEQ ID NO: 346475 - DNA, 122 bp, Homo sapiens
agggtttttaaaaacacaaatgcctatgtctcactccctgaaattctcctttaattggtacgaggcggggctattctaggaactattttctatcccttggcaattagccatctgtatagtat

SEQ ID NO: 346476 - DNA, 122 bp, Homo sapiens
aagaatttggcgccatcttgagaaggtcaaagtgattcttcgattaaatgccttacttatcgcctagtgtgacctggcgcttgggtttactctccccagcaactgcgcctcaaacgcaaaga

SEQ ID NO: 346477 - DNA, 122 bp, Homo sapiens
atcagtgaaacattgtgacatagttgtaatacaaactcagccgccttgcactgcatcttgcggtaggaagtgtaatagcaacaaaaatcatttttcatctccaggcattattgggcgaaaaa

SEQ ID NO: 346478 - DNA, 122 bp, Homo sapiens
acagagtttgaggtgattcgggaaaggagtgtgatgagggaggctggcgccccggctttccgcagcctgcagcctccccgagagcaagtcgagagtgccccggcagcagctgggcttcgcgc

SEQ ID NO: 346479 - DNA, 122 bp, Homo sapiens
ctcgatctcctgatctcgtgatccgcccgccttggcctcccaaagtgctgggattacaggcgtgaaccaccgcgcccggcagtttaaatattttagtggctatcagaaacacatctcaaatt

SEQ ID NO: 346480 - DNA, 122 bp, Homo sapiens
caacagcagggcttccaggcagggatgatttagtctaaacagtctgagtagtcaggagttcgcttcctcagcctggaaacagaagatgaaaggactgattcccagcaattgcagtccctact

SEQ ID NO: 346481 - DNA, 122 bp, Homo sapiens
gatcctcccgagattaagggttatcgagtcacatcacacgtagggagggtgccagctgcccggcacaggctggagaactgagcgtcctgcgctacaggctctctttatactcatggggtccc

SEQ ID NO: 346482 - DNA, 122 bp, Homo sapiens
gtttgcgccgtcgaaaatggaaatcaaaggaacgcgatgctctaacggactcgaggaggccggctccgtcttggcattgttcagaaacatcccggcttcttctctgtttgatttccaacagg

SEQ ID NO: 346483 - DNA, 122 bp, Homo sapiens
gaaatcccccaaagcagtccaaagaacacaacgagagtcctaacatcccaggtggcggcgcgctggctccctggagcggggcgggacgcggccgcgcggactcacgtgcacaaccgcgcggg

SEQ ID NO: 346484 - DNA, 122 bp, Homo sapiens
ctgctttttgtcccccccgccgcggctttttgcccccgccccggcggctttcttccgccgcggctttttgccccgccgccgcccatttttgccgccgcggctttttgcccccgccgcctaag

SEQ ID NO: 346485 - DNA, 122 bp, Homo sapiens
gggagagaggggagctcagaggagcgcacagccgggcgggggccgaggctcgaggggcggcgccgagagaaacggggcgcggacccggagcgcggcggcggcgggggaggcgcggagggcgc

SEQ ID NO: 346486 - DNA, 122 bp, Homo sapiens
cttcagcccgggttaggtggcctgggctgggctccccaccccgatcgcgcgcagacggggcgtttcccctagtttccacctgggtggaatgctttgtgggagtctgggtctggattagtttc

SEQ ID NO: 346487 - DNA, 122 bp, Homo sapiens
gccgactcctgctctggaggggttgcgggtacctgatggccacagagggctctaggaggccgagcgtgtaagcggggtgggcgccatggaggcagagcagcggccggcggcgggggccagcg

SEQ ID NO: 346488 - DNA, 122 bp, Homo sapiens
attatattatttcttcctggtggtgggaaactctgggagtaaagagagccggcaggtgcccgtgtgcagtccgctgtctcaaactggagtctcccatgggtttgccaccctcagtggtgatt

SEQ ID NO: 346489 - DNA, 122 bp, Homo sapiens
ggatgagtcaggcccggagggctcggctgtgtccgcaatgaatggagtgccagctaggcgcgaggcagacagtagtaacagcgggggcgtgtgtgtacacacacgcacaggcacgcacaggg

SEQ ID NO: 346490 - DNA, 122 bp, Homo sapiens
caccgttcgagagagtggctacacagaggaggggaaatgcatccgacggagggaggctcacgctgtaacactggagaagtgacgaccgtacaaccagaattagcctcaaaacagccgaaatc

SEQ ID NO: 346491 - DNA, 122 bp, Homo sapiens
ttaggttaaggggatttgatctactctggacctggtggcattacaagcatggagaatggacgctgctctacaaggcagaaatgaactgcaactacataaaagcaggtcaagtgctaaatgga

SEQ ID NO: 346492 - DNA, 122 bp, Homo sapiens
gaaaaggaccccagaagacactgcctttgtataatccgtttgctatcccgaggtgattcacggagtttctggggattggcgcaggctggcgctgggaacccccgcgccggttacccctttcc

SEQ ID NO: 346493 - DNA, 122 bp, Homo sapiens
tccagggaccaatgtcaactcatctgtgaaattgcagaagtacatgtctagtctccaccccgtgagaggactgagcaaagggtgaagtgtgcgagcggtctactgataataatttctatcac

SEQ ID NO: 346494 - DNA, 122 bp, Homo sapiens
gtgctgtgagtcctgcccagcggccttccaccctgactgcctgaacatcgagatgcctgacggcagctggttctgcaatgactgcagggctgggaagaagctgcacttccaggatatcattt

SEQ ID NO: 346495 - DNA, 122 bp, Homo sapiens
caacacaggccggttctcctggagcgtccccatcggggggggcagcagggagggcagctgcggatggacgcggccaccacaggccccagtgtgggaggccgggatgccgccctgggacaggc

SEQ ID NO: 346496 - DNA, 122 bp, Homo sapiens
attggatccaggaagacaactttgtgaaaggaaaaggctgaggggcttaaatgctgctgtcgtcccagcttctagggaggctggggttacagcctccgccatgttgcagattctccaataag

SEQ ID NO: 346497 - DNA, 122 bp, Homo sapiens
ctggcttcttccccaacctgatgcccccttatgcatgcacacgcaacacacttatatgtgcgcgcacacacacacacacacacactccatgcaccctctggctggatgaagggctggatctt

SEQ ID NO: 346498 - DNA, 122 bp, Homo sapiens
ccaccacgacttccctcttccctggcgctccggaaatgcgtcagagaactgcctcgagcgcgttttccgcgcagatccgagaattcgcgagaatctccgcccagccagttcaggccagggcg

SEQ ID NO: 346499 - DNA, 122 bp, Homo sapiens
taaataacaaagtgtggtcttctgagcagtccgtggggttggtttacattcagacaaactcgaattttttagaggcctcaccagtacaaatgtgatgaaggtgcatgggaatttactggaga

SEQ ID NO: 346500 - DNA, 122 bp, Homo sapiens
agccctcagtcactcgtaggcgcactccgggccacatgttcatcacggcaatggccaaagcgttcacccgctccttacaacgctggcggggaataaaggagtcagtctccccaccaccaccc

SEQ ID NO: 346501 - DNA, 122 bp, Homo sapiens
ctatgtgccctcttctttctgacctcatctctctctggctactccttgctttgcttgtcccgttctagccataccagcttcctcttgttcctccaacaaccaaggatgcctggatgccacag

SEQ ID NO: 346502 - DNA, 122 bp, Homo sapiens
aataacaagtaacaaaaaagtgggtatcaagcagctcactgtgagagaagccttggcaaacggtagtaactagaacctagagagaagcctgctcccactccatccccacccagagggcaagg

SEQ ID NO: 346503 - DNA, 122 bp, Homo sapiens
tgcaggatgcgttgcagcgtgtctgtcccacggaggccctgctgtttcccggcagctccacgggctctcctgtgtccagcatgcgcagccgtctcctcgctgggctcccaccccgctccctt

SEQ ID NO: 346504 - DNA, 122 bp, Homo sapiens
ccttccagccttggctcccgaggacacgactccgggccctgccaccttctgataggctcgcgagaccgaggctgcaaagagagccgccccccattggccaaccggcgagtcccgcgcgccac

SEQ ID NO: 346505 - DNA, 122 bp, Homo sapiens
cattttctctccccctcccccacccccccacccccagtaggacttgtgtgtcggcagaggcgtctgacgaggggctaatttcgctttccttgtttacgatcgagaaaagcgcttggctctcc

SEQ ID NO: 346506 - DNA, 122 bp, Homo sapiens
ctctaaactggaagctccacctaatgtctggtgagacccaggttcaggtttttggaagagcgtatcgcagctggtgcctgtgcgtcacggtgctgccccgcaggaggtcacctactgggaat

SEQ ID NO: 346507 - DNA, 122 bp, Homo sapiens
gggagtctccagggacaatccaggagccagggatgctgtggtgcacccatgggtgggacccggaggtttctgggcccattctgccgtgggtggccgttggtggatcacatcccagggggtta

SEQ ID NO: 346508 - DNA, 122 bp, Homo sapiens
gtctggtgtttcctaggaagacggcagtggggtgtgtgggtggatgcagggaccagatagcgatttggcttgtgcaaatgtggcatgaattttgaaagccacatttccccaaggcctactcc

SEQ ID NO: 346509 - DNA, 122 bp, Homo sapiens
tcagtgagctgaatggaaaaaacattgaagacgtcattgcccagggtgagttgatgtggacgggctttcgtttgttttcatggtccatcctaatccctgccggtccatctgtggcctgccag

SEQ ID NO: 346510 - DNA, 122 bp, Homo sapiens
aggaccccgtggccactgaggacccaggaacctgcctctgctcgagtatccggcctctgtcgtgagtgccttgcgtggccagggccacttttccagagaaggctctgtggtgctgtgtggcc

SEQ ID NO: 346511 - DNA, 122 bp, Homo sapiens
ggctctgcgcctccagccaatcggggtgcccgtccttaatacaaccagccagtcagtgcccggcgcgcgacaccagcagccagtcaggaagccctgcgttcatgcttccagccattgtcgga

SEQ ID NO: 346512 - DNA, 122 bp, Homo sapiens
tgagcccaggaggttgaggttacagtgagctataattgcagcactgcactccagcctgggcgacagatccagaccctgtctcaaaaaaagaaaaaaaatggccgggcatggtggctcacacc

SEQ ID NO: 346513 - DNA, 122 bp, Homo sapiens
cggcaggggacagaaccgtgttcggaactaggaaatccactagggatacacagcctggaccggtccagggccgcagtgcctaaccccaggacaccgagcgagggcgcctccgcggtcctacg

SEQ ID NO: 346514 - DNA, 122 bp, Homo sapiens
tgtgaggctgggggacccacggggacatggatcccagacactggccctgacttgagtgggcgcagctgaggggtgctcgccccaggccttggggagggctctcttcccggtgacagtcgctc

SEQ ID NO: 346515 - DNA, 122 bp, Homo sapiens
gccccctcccctcacagccactctccaccacatcgccctgttttgtctcctttcttctctcggagcgatccttctggtgggtggctttgcctgtttggtctccagcttcctcccctagagtg

SEQ ID NO: 346516 - DNA, 122 bp, Homo sapiens
cgccgccgccgccgccgctggagtccgccgggcagagccggccgcggagcccggagcaggcggagggaagtgcccctagaaccagctcagccagcggcgcttgcacagagcggccggacgaa

SEQ ID NO: 346517 - DNA, 122 bp, Homo sapiens
gcccttgtcgctgcgctcagggcagcggcggaaaaggtgtgtgcggatgcggggcggggccgcacctggtggacagagcagggattcgggaagagaagccacggaagatgatcatgcagttt

SEQ ID NO: 346518 - DNA, 122 bp, Homo sapiens
gcaagtctgtgataaatgtaggaaatgattgttcttgtttccctgcagtagcagctgacgcgtgggtccaccatgaactggagtatctttgagggactcctgagtggggtcaacaagtactc

SEQ ID NO: 346519 - DNA, 122 bp, Homo sapiens
ttgacaggtgtgtggatatcatgggaaagggtacaggtagacctaaaagaacaaagccctcggtcagatgcccaggtgaagaaggaccagtctgtccaattccttgccttgagcagctttca

SEQ ID NO: 346520 - DNA, 122 bp, Homo sapiens
ggggtgattctgcttggaaaggttgccaggaaaccgcgagcataacgcagaaagataaaacgaaagccctaaacgccgccgtgggaatttaagtccaaggggcagagaaaacaggaggggaa

SEQ ID NO: 346521 - DNA, 122 bp, Homo sapiens
actctgggctggagtgtagtcccatgatcaaagctcactgcagccaggtgcggtggctcacgcctctaatcccagcactttgggaggctgaggcgggcagatcataaggtcaggagatccag

SEQ ID NO: 346522 - DNA, 122 bp, Homo sapiens
tccaggggctccgacccccagagaacttatgcacggagttgcaggtgttacttccagagccggacgagatcgggaggcggggagcgtgctgccggccgggaaccgtggggcgcggaaggcct

SEQ ID NO: 346523 - DNA, 122 bp, Homo sapiens
ccagactttttctgaagaaaatgtttcccccattctttcccacctcctacaagcctcagacgcccctggcagccttaggtgtggccgcccagttctcgattggcagccacagccccgggcgc

SEQ ID NO: 346524 - DNA, 122 bp, Homo sapiens
ggctacgacttcaggaagtcctgggacgcggagacttgggcagcctttgggtcctggcctcgcttgggaccctcgctgggcgcctggggacactgtcagtcattggtgctggctgggaggag

SEQ ID NO: 346525 - DNA, 122 bp, Homo sapiens
agagtccacagaggatccgaagaaaggccggggtccgaggaacgcgggatccagttctcacggtgcccgcgaaagggctgggattactgggatagagtcggtttttcgagaggtcgaagccg

SEQ ID NO: 346526 - DNA, 122 bp, Homo sapiens
gtgtatttgggttggaaaccaggctggctgccactacagcttccagaatcccgtgggcaacggtggagaatccctttccccgctctagtcagtgtagtgctcgggctcactgtctgcccatc

SEQ ID NO: 346527 - DNA, 122 bp, Homo sapiens
ctggcgaggcacagctgccacactgataatgttcttcttctttccagaaaccgatgacggcgtcccctgtgtcttccccttcatattcaatgggaagagctacgaggagtgcatcatagaga

SEQ ID NO: 346528 - DNA, 122 bp, Homo sapiens
ccaagctcattttagctttcctggaaccgtttttggatgcttgacacttctttcattcatcgttagttatatgattttcatttcctcctccatgtgttttctctgaatctgggattatttca

SEQ ID NO: 346529 - DNA, 122 bp, Homo sapiens
ataggatccggcttgccaaatttcgttttagggatattgctggcagattccacaatcactcgcagcatggttcttagctggtagaaagcaagtttcagcaaacgaagtggagactagggcgc

SEQ ID NO: 346530 - DNA, 122 bp, Homo sapiens
ctctcacaccctcactaaaggctgatttcagaattgactagcataagcattatgcgtttgcgctattgtgtaagcatacactagaccttcactctaagtacatttgtatagtaaggaatatg

SEQ ID NO: 346531 - DNA, 122 bp, Homo sapiens
aaacgcgatgtaagcaccaccaggtgcccagcgcggaggtggatgtgggcgaaccctggacgccccacaaaggacagctgcggcctgggaagggaaggagatggagcggggagagggggaag

SEQ ID NO: 346532 - DNA, 122 bp, Homo sapiens
aggcaaaggaagatgattgacttcttaattctttggctgaactgtagaaactgtaggcggcgagtgggcgagggagggcctgggaatagaggtggtgaaaatccccaggagagaaaatcctg

SEQ ID NO: 346533 - DNA, 122 bp, Homo sapiens
ctgttgtctttagtcccagagtagctcttttctgcttgttttttctgccaaacttctgaccgttctgctgttttgtttttatcagacctacaatctcctctcaattggtgtaggaaaaactg

SEQ ID NO: 346534 - DNA, 122 bp, Homo sapiens
ccctttcagagtctcgcaggttgaggtgatgtgagagaggaagcagaagcgaaggttacgcgaggaaagcccctcgttaaacttgggattttcacggggactcagtccagaggaagttgaga

SEQ ID NO: 346535 - DNA, 122 bp, Homo sapiens
ttttctctttgcagcgaggctggagggtgggcttttttttttttttttcctttttgcgcgcgtatgtatgtgtgtgcgcgcaaagtatctctatctagggaatgaaaaatgggcgctggcgg

SEQ ID NO: 346536 - DNA, 122 bp, Homo sapiens
ccccgctccagcctgcggcctgccctccccgcagaggagcccgaggggccaggccgcgctcggcgccccatggcgcccgaaaggggacccttcgccctacccgcctgctccgcgccggggct

SEQ ID NO: 346537 - DNA, 122 bp, Homo sapiens
ttctactatgccgccttgtgttgtgctgacccatccaaagtgcttcataaatttgtgggacgccaaatacaaagcattgtcctcccttctgtggacatattttccttgattgtggggtgccc

SEQ ID NO: 346538 - DNA, 122 bp, Homo sapiens
ttggcagagacagcggtctgagtgggcttattccttagccggcaagcctttggcttttcccggctgtcctggagctgcagagccttcagccggcctctccgaacgagtggtcgctggatccc

SEQ ID NO: 346539 - DNA, 122 bp, Homo sapiens
caagcggaggacacagatggcccagggaatcttgaagatcagggatgcagcctctgcttccgagacaccttcagccatcccctactcccctcagtgacaatgggacatacacagaaagtcaa

SEQ ID NO: 346540 - DNA, 122 bp, Homo sapiens
ggccgggtcggggcggccccagcgggaagcaccccccgccgcctccgctcccctacaccccgtccccctcaccgagcgtggtgaccaggtcccttaagtctggcgggcctgcgccgtccatg

SEQ ID NO: 346541 - DNA, 122 bp, Homo sapiens
gggtgtgtgtgggacaggatgtggtttgagttctgtgatcctcaccccgacctcatgcgtcgggaatccttgcagccctgtgactggcctgtgggggcttgggctaagtccctgccaagata

SEQ ID NO: 346542 - DNA, 122 bp, Homo sapiens
cgctggggccaatggaggtgcgaggcggggctcgggcgggggcaacggtcacctgatctgcggctgtcgaggccgctgaggcagtggaggctgaggctatgatggcggccatggcgacggct

SEQ ID NO: 346543 - DNA, 122 bp, Homo sapiens
tgtgtgtttatttagttttcttttgatctcccaccattttctcttagtttcaaaaagaggcggcgatgcagagtcgtttaggcaatcaaccctcccacgtcccctggctcagctaatgctgg

SEQ ID NO: 346544 - DNA, 122 bp, Homo sapiens
cctcccgggccgcccacgcgcggcacccctggaagaaggcgaccccacgccccccctgcccggctcgacccaactgacagcgaagcaggatgcagttggtgtcctcctggctggccacccag

SEQ ID NO: 346545 - DNA, 122 bp, Homo sapiens
gtcaactcctaggcccagttatcggaggacactcccaggccttacaaataacacggaaagcggaagagcagagctgacatcgtttccaaggcgcacccctcatcagtcctcctgccgtttcg

SEQ ID NO: 346546 - DNA, 122 bp, Homo sapiens
gccatctcccctgggcgcggccatgttggagaaaactgcactacatttcccatgagcccgcgggacaacgaacagcgctcccacagtcctcttcgcctcccagagcccgggagtgacccttt

SEQ ID NO: 346547 - DNA, 122 bp, Homo sapiens
gtcactgtggtgttggatctatttgggagatgtggcaaaatgctgagtttggcctcagaacgggcacagggtgagaagagaaactcccaggggatttcaggctcatgtgggtcaattggact

SEQ ID NO: 346548 - DNA, 122 bp, Homo sapiens
gcggcgcggcgctccactccggcctgactccgcaccggcttttgcgggcggccggcggcgcggggccctttggaaatagaatagccaatgtaatctgacacttcaacttgctcggctccggg

SEQ ID NO: 346549 - DNA, 122 bp, Homo sapiens
ggggcgggaataagaggcggggcagaagggcggaggagtgtgtcgggagatgtagttccgcgagtcccgacagcaaagctgtcccggctccgctaatagattgggaccactactcccaggag

SEQ ID NO: 346550 - DNA, 122 bp, Homo sapiens
gtttcttgcttaggttataagctctttcagagttcaaattacatcttaccctcctctgtacgcattttgaatagtacatagcacatgatatacaccagtgcttcccgaactttaatatacct

SEQ ID NO: 346551 - DNA, 122 bp, Homo sapiens
ccagaggcggagaagatattactgacaataacgtgaacaagctgtgtgaccaccgtggaccgtcatatccaggggggaggggggggtgatatgactgcccgcatcacgggggcctcacccct

SEQ ID NO: 346552 - DNA, 122 bp, Homo sapiens
ccaatcaccgcggcagctggccgcggtgggcgtggtctcccggcaagaaggtttaaagggcgcctccatggggggcgctcagctggagctaccgagcggtgccaggccaggtgtgtgcgtcc

SEQ ID NO: 346553 - DNA, 122 bp, Homo sapiens
ccctctcaaggctgacacatgttccttcccacccctcaggtctgaagctcatgggagccccggtgaagctgacagtgtctcaggggcagccggtgaagctcaactgcagtgtggaggggatg

SEQ ID NO: 346554 - DNA, 122 bp, Homo sapiens
accagaaggctcctgaggagagagctgcgcagttctgcacaaagaggtcctggtcccggtcgaaggtagagaacttctggccactgtggtaggacagggagtcacctggcagaggagagaag

SEQ ID NO: 346555 - DNA, 122 bp, Homo sapiens
gagtgaccataaataatttgctgtcagatctgtcttccgagcaatgctattcaacataaacgcaaagtgagccacatatgcaatttaaaatttcctagtggccatataaaaatagtctaaac

SEQ ID NO: 346556 - DNA, 122 bp, Homo sapiens
gcgcgccgcttctccagtgcagggaaaggcctgggtcggagactgagttctggcaagatgcgccagtgcctggacttgccttgagcaggaatcagtgttaggcttctccatcgaatcttctt

SEQ ID NO: 346557 - DNA, 122 bp, Homo sapiens
ggagcagggtccccggccaatgttgtctgtgtggggccccagcctgcaccgtggcagttgcgggtaggagacgcccagtgtcaccgagtggtctgacgcgcgcacctcccagtagtggtgcc

SEQ ID NO: 346558 - DNA, 122 bp, Homo sapiens
gaactggaaaggaaaactccacattcagggtgccctattttcttctggaaagatctctcccgaagccgtccgctcctcattctgcccttcgtacaggcttcccgggcctgagacggctggga

SEQ ID NO: 346559 - DNA, 122 bp, Homo sapiens
atacctatgaagacttgtttactcagggtgggagggactgtcatgatggcagggctacttcgtgcagttcagcaaacagtcataaaagacatcagttgagagaggaaggagaatataagaac

SEQ ID NO: 346560 - DNA, 122 bp, Homo sapiens
atctgttggtgtgctcccctcaacacccgctagtgtttgagcgacgttgtgtgtgaaacacgttggtgtttcaccgacgtcctcccctcaacacccgctagatgtccagccgcttgtcttct

SEQ ID NO: 346561 - DNA, 122 bp, Homo sapiens
ctacctctctggctacttcttattttctattcctaggatttcctctacctgtatcatagacgttggtgttcccaagaactatgacgtaaggtactcttttccttcttgagacatccaccccc

SEQ ID NO: 346562 - DNA, 122 bp, Homo sapiens
tcctcggtgagctggaagctcgtggggaagtcaaaggcagccgcagtgtgcagcagactccggcagcgctccccgtgcagcacgacgcggtcataggtgcagtgggtgctggcccgcactgt

SEQ ID NO: 346563 - DNA, 122 bp, Homo sapiens
tgtggaaaacagaagttgggtagcacgtgagagaaatgttgtgatcgtgtaggataggcacggctgaatttcagttaccagagtagttttataaacactccacatatgtgaatgcagacagt

SEQ ID NO: 346564 - DNA, 122 bp, Homo sapiens
ggcgccagccgccgcctgcgccaggaccgcctcggcttcgctcacgacgccttcccggctcgcctcccagcctcggggctcctcgccgcccggctgctagccgcccccttcccagtcccatc

SEQ ID NO: 346565 - DNA, 122 bp, Homo sapiens
atgggaaaatgtttctgagacaaatctctagtttatgatttaaaacagtacgttttcttacgtgacgaaaacaaaaagtgtgttaatttgttcccagtggttgaagttatttgccaacaatt

SEQ ID NO: 346566 - DNA, 122 bp, Homo sapiens
ttaatttctctcaatctccagccacaaatccgagacacaacgctcttcctccaaagaggtcgcgccttctctgtggtggttctcagggatccgccccagctccttctccgttcccagcccca

SEQ ID NO: 346567 - DNA, 122 bp, Homo sapiens
ggccctttaccggcagccgcttctgtgggttggggtcagaggctcacgggtggcctgtctcgccgagaggtaccacctggtgaagagcagcctccagccccagagagtgctcagggagggcc

SEQ ID NO: 346568 - DNA, 122 bp, Homo sapiens
cctcggtctccctcgtgtgagccgacctcggagagtagcggtggggtcctcggtctccctcgtgtgagccgacgtcggcgagtagctgtgggatccttggtctccctcgtgtgagccgacgt

SEQ ID NO: 346569 - DNA, 122 bp, Homo sapiens
taaactgccttctgaaacacatctagagtgctttcgtactgctttgagtaggatctgcagcgggataaaaacttgagttctgagattcatcccgacccaaattgcagttgccaggatatgcg

SEQ ID NO: 346570 - DNA, 122 bp, Homo sapiens
ggggggactccgggagagagcgctccaaagtgcccagcgcggcgccctgcgcgcagcgagcgccccagggaggggctggttatgacttggctggaccagctccatccctgtcgccccctccc

SEQ ID NO: 346571 - DNA, 122 bp, Homo sapiens
ttcttatatgaatactgcttccctgagcgtgctgctctgttacagattccagtgtttcagcgaggtggaagtgtgataccaataaagacaactgtaggaaaatccacaggctggatgactga

SEQ ID NO: 346572 - DNA, 122 bp, Homo sapiens
gcggcgtgctgcgggctgagtttctccggagctgtttgcaaccgtcccaagagcgagtctcggtttctccggcagcacgggcgacttcctgaacacctccaaactttagctttcccatcaga

SEQ ID NO: 346573 - DNA, 122 bp, Homo sapiens
gtcctctctggctctctacagcaaagatttgccaagccctgttatatgtcatactacttgcgcttcataattttatagttttacctagacagtctcccttttttccttccatattcagcata

SEQ ID NO: 346574 - DNA, 122 bp, Homo sapiens
taaaacgatcacactaaatgctaggaaggcagaagccctagcgtgccctgcaaatgtgggcgattaccgagcacatcggggggtatcctgcactctcaggctaaaggctcagagactttcac

SEQ ID NO: 346575 - DNA, 122 bp, Homo sapiens
catctgttgttaatccacatcccggtggaacggagatgccaacacgccttttattaggcacgtcgatcccataatgtcctttctccctgcctttgtcttctatcagagtccgtaatgggttc

SEQ ID NO: 346576 - DNA, 122 bp, Homo sapiens
agcgccccagcttccatgctaggcgattccatcctccagccgggttcgggtccccttgtgcgatctgggccctcagagatgccacaagcccaggccccctagaggggtccgctgccagcaat

SEQ ID NO: 346577 - DNA, 122 bp, Homo sapiens
tcggcggctcagccctttgcacacagaagctgagctgtccctgtgcgaggcagaaaatgtcggctcatgttcatcttgagtctatgcctgattacaggctccagactcggagacctcgaggg

SEQ ID NO: 346578 - DNA, 122 bp, Homo sapiens
ctgtaactacaccagtgtggtgatgtctttttccattctcatgtcctccaaatcgatgaccgacaaagttctggactacatcacctgcattgggctcagcgtctcaatcctaagcttggttc

SEQ ID NO: 346579 - DNA, 122 bp, Homo sapiens
ggtgcaccagccatctcccttgtttgctctagaagtttgctgtttggtgctggcgggagtcggggaggagcccaatgtgggtcaaatggcagagggacccattctggtctcccccacttctc

SEQ ID NO: 346580 - DNA, 122 bp, Homo sapiens
cccacgccagtacccccggcacgctcagtaccccacacacccacgccagtacccccggcacgctcagtaccccacacacccacgccagtacccccggcacgctcagtgccccacacacccac

SEQ ID NO: 346581 - DNA, 122 bp, Homo sapiens
cagccaagtctgatgcagaggcctgagcatcttagggttcatgaaatgcaccatcggccccgacctctgcaggggttcagcaaaatagctataaacagaaggacgataaaaacctctgacat

SEQ ID NO: 346582 - DNA, 122 bp, Homo sapiens
aagtttaaacataaaataacaaggtatactgtgggtactgcacgtcgctgtgaatgtgcacgcgtgcgcgtgtgcagatgtgcattcgcgatggagagaggaggcggttttctgagttttgc

SEQ ID NO: 346583 - DNA, 122 bp, Homo sapiens
gataatcggagcttggaattaccccttcgttctcaccattcagccactgataggagccatcgctgcaggtctggtgccaccttatgtctatatacctttttagggaggcttattttctcata

SEQ ID NO: 346584 - DNA, 122 bp, Homo sapiens
cgtgtactgcgtggagagcgacctgcccgaggcccccgcctcggagcagctctcgccgcccgcgtcgccacctggggctccgccagtgttgaaccctcccagcacccgctcttccttcccca

SEQ ID NO: 346585 - DNA, 122 bp, Homo sapiens
cagatgtacttggaggaaggtttgggccgggacagatgacgtgcccatgtgggagctggacggcccctctctgggtagctccctgggaactcccatgtccgcctcccgctgcctcctgatcc

SEQ ID NO: 346586 - DNA, 122 bp, Homo sapiens
gtcaggggcctcctcccaagtcctggagcagcgagcagggagtccgggtgcccttgaggacgagggggagcagccggcccctgaggaggacgagctggaggaagacgagctggggcagcaga

SEQ ID NO: 346587 - DNA, 122 bp, Homo sapiens
tccccgaatttctaacaaaattaatatctgaggagcttttgcatcactctaaatgagcggcggccgttcagggcatgtgacctcttttacctggcactgcagaacgttttatccagaaatca

SEQ ID NO: 346588 - DNA, 122 bp, Homo sapiens
cagtcattcttttttatgctcagacagtcacaactttggccattcaagaccctttcataccggatcttatgttcttataacacgacctgatgaatctttaaaagcgaccttgctttcctggt

SEQ ID NO: 346589 - DNA, 122 bp, Homo sapiens
aagaaccctagagaagtctcagtgactctatggaggcctgccaagtactattgccctagacggggcattttgaggaataaagagatgcagcgcaaacaacattaggggctcacaggctgaat

SEQ ID NO: 346590 - DNA, 122 bp, Homo sapiens
gtgtgtcaggcagcggagctgacactcccagaaagcaagatcttcgaactacagggtgcgcgcaggctctcgcttctctccaccatggggggccctgcagtactcgccaagagcgtagaatt

SEQ ID NO: 346591 - DNA, 122 bp, Homo sapiens
tgttttctcaacatgctgatccactttaagtaatgtaatgatgtgtgagaatgtgggttccgagtagaggggtaatctttttgaagggtcaatttagaacatttgaagtcaatctgcttctt

SEQ ID NO: 346592 - DNA, 122 bp, Homo sapiens
gggggcgccccggcagggagggacgtgcggctgggaagagctggcaggtggcacccgacccgcagcctggtgagcaaggtgccaactgtccgcccaatttcctgtccttgcagtaaaactgt

SEQ ID NO: 346593 - DNA, 122 bp, Homo sapiens
agcatcggtgcacaagtgcatgagctgagcaacacatacccagcacagccagagggtcagcggcccccgcggacggcttggttcctgtttagccgttgagttggaggaaacattcctcggcg

SEQ ID NO: 346594 - DNA, 122 bp, Homo sapiens
ggcagctgtggtctcctcaccgggagtcaccaccctgcccatgaacgtcgcggggatcagcgtggcgatcggtcagccacagaaggcagcaggtgcccgccccagcacaccctcccgtcctg

SEQ ID NO: 346595 - DNA, 122 bp, Homo sapiens
ttcttgtagccctcagctctccggtctctgctgatgaaatgggctccaggtggcagtgcccgggtcccaggtgccgtgtttactgcagcagtgggacctccgtgcccactcccccagctcag

SEQ ID NO: 346596 - DNA, 122 bp, Homo sapiens
tgaacctaatcttcacaatgcttctggaagaacagctgtgatggatcactcctctgttatcgtgaatctgcggtgctctcggtacacacactgtgacctttaacaaacggtttcatcagtgg

SEQ ID NO: 346597 - DNA, 122 bp, Homo sapiens
aggttcccgggggtgcagccaaatacacatcgccggcaaactgattaaccctgaaagtggcgccgaggcccggtctgtggctcttggtgttcccctccccctcacccctcttgggggagcca

SEQ ID NO: 346598 - DNA, 122 bp, Homo sapiens
agggtgaagctgtggatgggctggctgcctgtagccagctgctgtatgattcgtccatgccgagggagggctgtgagttgaaagtggagctcatttggtggcaggtcagcatctgctccatt

SEQ ID NO: 346599 - DNA, 122 bp, Homo sapiens
ccccccgccccccaccccggccgcctgcgacccgggccgtgcgtgctgccgcccgcgccccggccccgcgtcgctgcctagctcttatcctataccggctgcagccggtctccgccggcctc

SEQ ID NO: 346600 - DNA, 122 bp, Homo sapiens
agaatgaactcctgtgggacactcttatttacccaattcatgttaaatggttcaactcttcgttctctgaaatataagaagtcaggaagttaacaacacacttcctgattttgtcagctata

SEQ ID NO: 346601 - DNA, 122 bp, Homo sapiens
tccgcaggccccggagcgccccccgcccgcccctgggcggccgcgcccgcactcacatagcgcctcaacttcttctcgggaggcgatttcctcagccagccggtgcacaccacgtcgccgcc

SEQ ID NO: 346602 - DNA, 122 bp, Homo sapiens
aagaggcaggatccgggagacctctcctccaggggctggagttaggatctgtattcttcccggagacgacgaaggcctcccctctctgcctcccaacttccgccaggacaggctagggaaac

SEQ ID NO: 346603 - DNA, 122 bp, Homo sapiens
tacaaggcaggcttcaattctcaacaacttggaagcgtttatatcacacccattcaagttcgattccatgtacagtaaattgcataagaaagttgaacctttatagcagggtttggaccagg

SEQ ID NO: 346604 - DNA, 122 bp, Homo sapiens
tggtgctgctccggtcaagagacagggcctcctcctggtctttgttgtccaggaagtggccggggtccacctgctctgcctcaaagaagctggcgacctggccgctgggctggctgtcctcc

SEQ ID NO: 346605 - DNA, 122 bp, Homo sapiens
cgaccgccgaggcccaggaatccggcatcaggaacaagtctagcagttccagtcaaatcccggtggttggggtggtgacggaggacgatgaggcgcaggtatgagcaggtgtctgtgctttc

SEQ ID NO: 346606 - DNA, 122 bp, Homo sapiens
tgttgtcttcctgtccatggcgttgtcttcctgtctgcggtgtcgtcttcctgtccatggcggcctcctgtccgcggtgccctcctgtccatggtggcctcctgtccgctgtgccctcctgt

SEQ ID NO: 346607 - DNA, 122 bp, Homo sapiens
ctctggacagcagcacacacagcagcagcactgccacccagagcagggctaagatgaacacgcccgcaccgactccgagcacagtgccagccatcccgcggggaggcagcggcggccccccg

SEQ ID NO: 346608 - DNA, 122 bp, Homo sapiens
gccttatgtacaccagtggtgaaggggtcagggtgtggagtagaaacctttctggggcttcgtgacacagaagcacaatgcactgtgatttcaaaacctgttgataaagtcctaatggaggc

SEQ ID NO: 346609 - DNA, 122 bp, Homo sapiens
gatttgtaattccttgggtcgcttgacttcacgaggggcgaggtatgcattgtagcgacacggactacttgtgaagcctttgggcgggagtcgcttaaagattaactttctcgggtttccgt

SEQ ID NO: 346610 - DNA, 122 bp, Homo sapiens
ttcagcctttgaaattaacaagtacgcacggtggtccttaaaagtggttgggatcctgagcgggatgtaaagtatgtaaggaacttagggccacagtgtcaccccagagaccattactaaaa

SEQ ID NO: 346611 - DNA, 122 bp, Homo sapiens
ggaaatcattcctacacaggccaagtggcaagaggttaaagaagtactcctccagcagagcgtgatgggctaccaggtctggagcagtgcagttgtgaaagtgagtgatgtaatttcttatc

SEQ ID NO: 346612 - DNA, 122 bp, Homo sapiens
gtcactggcataatcccaagattaggtggccacaaagagccatgaatgaggtggtaattgcgttcaagggaaaaagaatttaagaaaaaaagactttactttctcacaagattcgtgaaaga

SEQ ID NO: 346613 - DNA, 122 bp, Homo sapiens
tacaggaaagtatacaaacaaaagtaagactcactggcatctcatcttggtggtatctcccgtcatctctctgtgtggtgtatcgaggcataaaggcagacgtggtttaacaagggggtcat

SEQ ID NO: 346614 - DNA, 122 bp, Homo sapiens
ggctctaagtggccctggggtccaggctcgccggaggcaccagcgtgtgcaggcccggagcgccgtcttctgggcgaggagtgtcattagtaacactttatgttgcggataggtgaaagaaa

SEQ ID NO: 346615 - DNA, 122 bp, Homo sapiens
cccgcccaagccaaagagggaccccaacacccggctgagtgcttcctatgaggctgtgagcgcctgcctctccgcggccagggaagcggccaacgaaggtcagccctggggagggacccagc

SEQ ID NO: 346616 - DNA, 122 bp, Homo sapiens
tctagttattaaggtcacaatgtgtaaattcttttgacctgcacctaatcaaagattcaccggccctttcaaatccgaatggggaggaggggagagattccctcccataaacccagcaaact

SEQ ID NO: 346617 - DNA, 122 bp, Homo sapiens
tctagtatggggcctgagattctgcagctcaaagaagctcccagctgatgccaatgcaaccggtccaaggagcttagagagcatctagttccacccgctccccacacagagaagacagtgga

SEQ ID NO: 346618 - DNA, 122 bp, Homo sapiens
cacagcgaacagaggctctgaggtcagacgtcacaaagtgactgaggacgggacccagggcgctggcacagggagaggcagaggtgcatggagtaggcggcaccaaaacccccgcggactcc

SEQ ID NO: 346619 - DNA, 122 bp, Homo sapiens
ctctgtttctgtccttttcattagcacccaaaatactatgtatagttcagagaaacaaaacgcatattagaacgggtgaaaattttgagtaaggaaacttacatggatcaaaacattgagaa

SEQ ID NO: 346620 - DNA, 122 bp, Homo sapiens
ccccacgctctcaccacggccgccgcttcatccaagaccggccgcaaaccagcaagatggcgtccggccggcagtgacgtcacagggacccacgccccgcccctcccgctgcaagccctggg

SEQ ID NO: 346621 - DNA, 122 bp, Homo sapiens
cagcccaggtgtctgtcctctcagtaagatcctcatgggcaaaaagcacagcctctcttccgtccctcatcctaaagctgcctatgtctgtaatgatttccttctcttacagacgctggttc

SEQ ID NO: 346622 - DNA, 122 bp, Homo sapiens
ccccagccctgcgtgaaggcgctggaaaacacgcagggcaggttgggcagcaagaagccccgcacaaagtcggcgtaggagaaggcgcccggctccgagacgaaggctacccggcccggagc

SEQ ID NO: 346623 - DNA, 122 bp, Homo sapiens
tcccggatctgctcaccccagctcccagctcaaaggccctaacttctaaactctccggtccgtttcttgcactcagagcacacaccttgcctacaagtgggtagtactgccgctctgcacaa

SEQ ID NO: 346624 - DNA, 122 bp, Homo sapiens
ctcttgcttcagctcgagcaggggcggctcctcctgctgttgctccggcttggtcaggggcggctcctcctgctgttgctccggctcgtggccgccgccaccctcacggtcttggtcgtccg

SEQ ID NO: 346625 - DNA, 122 bp, Homo sapiens
tgctcagcggagtttctgcctgcgaggagagcgctgggcgtgaggccgaacgcactgggccgagcgacggaggcgcgcgcagagggagggtcccgcgcactagcggaaggcccggcctggcc

SEQ ID NO: 346626 - DNA, 122 bp, Homo sapiens
gcacgagccaggaaggcatcgagaaacaccaagaacaggagcacctgtccgggacgtgcacgccagtttccatcagtcgccggctgctctcctctcccacaccctgcccgtcatttaaccca

SEQ ID NO: 346627 - DNA, 122 bp, Homo sapiens
agactgactctgcccaggagcctcctcctccaccccatccaaagcccttcgcaccaatttcgggaaattcttggatgctgatgccagcaggcagtttgggagtgcccacatgcaggcccttg

SEQ ID NO: 346628 - DNA, 122 bp, Homo sapiens
ccccttcactcgcagaagcgtccgagcttagacagcaggttccacggccactccaacatgcggtctcaaacccagggcctgcaactcccgccatgtgccccgttctgcttgtcacccgcctc

SEQ ID NO: 346629 - DNA, 122 bp, Homo sapiens
atgaactgagaaccatgtctctccccacccccggaaacctttcagtctctactagaagcgcggagagaactctgttcccatggcctcgagcagctgccaagctcagaaacgcatctgcaccc

SEQ ID NO: 346630 - DNA, 122 bp, Homo sapiens
ggtttgtgtgctttagactattgactattcacacaagagcaaggtgcatgtgtgcacacacgagcccaaatatgtgtttgcctgcgtgtttgtgagcatgcgtgtatggtgcacatgtgcac

SEQ ID NO: 346631 - DNA, 122 bp, Homo sapiens
acgggtgccccggggcctggcggaacgctcagggaactacatttcccgtgaagctctgggcgcagagggccgcgggggctgccgggaaaggcatacgtgcttaatcctggtgcagggggcga

SEQ ID NO: 346632 - DNA, 122 bp, Homo sapiens
cacaggacgctggaggcccagaacagctcaggtgctcccgctgggccggcccgggccgggcgcttcctgggagggggaccaaactcccggccttcagctcttgccctccgggtctccgggct

SEQ ID NO: 346633 - DNA, 122 bp, Homo sapiens
gggggggagagttaaatgaaaatttccggctttcgctgaaactgtagtagggggatcctgcgactaaaataagcggcattagtgggagagagtgggacgtgtcgtcgggagtcggcggagtt

SEQ ID NO: 346634 - DNA, 122 bp, Homo sapiens
gccatcgcgtggcagatgttcagtagaacattacagtaatttctgttacaggtccatgggcgcaggtccctgagcccacagcttcgcgggggtctggccgagcatgcgtcacaacctacgcg

SEQ ID NO: 346635 - DNA, 122 bp, Homo sapiens
tgccctcccttttcaagccgcccttttttccagtgaaccagaggatactccaaatgtgcccgacacagacctgtgaggggacttctccacctgggtctcacacgctccacttaaactacctc

SEQ ID NO: 346636 - DNA, 122 bp, Homo sapiens
gaaaacacctagctaggtggtgatggtgtgtcccaagatgagtaggaccggaaggctgagcggtgcccctgaggagttcactgtttggtgggggacacgtgcagaaagataggatactttgc

SEQ ID NO: 346637 - DNA, 122 bp, Homo sapiens
acctcccgcgcagagcggggtgcggggcatcctgcccctcccagctgcggagagggtgggcggaggagacctgagacctccgagactccgcggggagctaagagcagggctgcccgacaggt

SEQ ID NO: 346638 - DNA, 122 bp, Homo sapiens
ggtggcctcgggctatgtagccctcacggggaggtcctgtcttcagccccgtcaggatgacgaggattcggctgcactgactcccggctaatcactgtggatgatgctgcccgctccccctt

SEQ ID NO: 346639 - DNA, 122 bp, Homo sapiens
ccccggttccgcccatttttcttgcctagcgagtgacgggcccacggcagaggggtggggcggggaggctggagcgagagtagtggcggggcgggcggggcggggcgagtgggggaggggcg

SEQ ID NO: 346640 - DNA, 122 bp, Homo sapiens
cctgggtcctccgcagaatgccgagtccctttctgccctgtccaatcatgctctgatacccgaccagacatgcgtgtgcaaccctcactatcaggagaacgtgtctgtgaagctgaggaacg

SEQ ID NO: 346641 - DNA, 122 bp, Homo sapiens
cacctgtacttgccccacctcgctgcggccgggacttgaatcgagggacggcgtgacaggcgggactaaaggcaggatgtagtggcttcctgtgagcaggtctcaaaacacaatcacccagc

SEQ ID NO: 346642 - DNA, 122 bp, Homo sapiens
gcggaggtcggcctggtcccaggaaggatttgcaggcctgtggctgggtaacccagagtccggtagcgctgaggcgagttgtgccaagacttgagtctgttgtgccaagttcctttccacgg

SEQ ID NO: 346643 - DNA, 122 bp, Homo sapiens
cctgcactgccgccgcgcagccacctccgattccacaactacaaccaattctgtgccatccgggcggtgagactgaaggggaagcctccagaaatacacatgtgctatgcaagagcccccgg

SEQ ID NO: 346644 - DNA, 122 bp, Homo sapiens
catgtgtctttgtgtccctacctagactctggcatactgcagggtagagactgtatctttcgcctgtggactgacaaatgcaccgagtactggtctaggatgagagttggtaaaagaccatt

SEQ ID NO: 346645 - DNA, 122 bp, Homo sapiens
cattggacagttggcctaatttgtttctttttcgcggggtggggggagcagccgcgcccgcgccccctggctcccagcagccctgtgcaaagcagatgttccgccgcagacgcggagctgcg

SEQ ID NO: 346646 - DNA, 122 bp, Homo sapiens
acctgccccctttccgcgggtgccccggcctgcgcctcgcgcggttctctcacccctgcccgccttcgacctctcttggccaaagggttaagtctcaggggagttggagaggagcgggctcc

SEQ ID NO: 346647 - DNA, 122 bp, Homo sapiens
tcccaatcggccaactgacaacccttccctcgccccagatttgctaggatggtctgggaccgccgggcggcccctctacctgccccttcagctttagtcccgagcctctcggggtttcaatt

SEQ ID NO: 346648 - DNA, 122 bp, Homo sapiens
ggttgaaccgaaacctggccgttggctgagcgagcgcggggtgtttgggatgcggcacggcgagggggagcaggcttggctcgggcgtagggaattggtttttttgttttagctatccaggt

SEQ ID NO: 346649 - DNA, 122 bp, Homo sapiens
gcacccagcggccagcaggctcggcgcagcacatctccccaccccacccccacacacccccgtggggtgcgtcgatcctgtagctcagagggagaagctacttagaacttcgtgaagcacag

SEQ ID NO: 346650 - DNA, 122 bp, Homo sapiens
gaccattcagggctggcttagcgagcgagcgcagggcccgcattcacaggcacaaaacctcgctggtggcactgggcacgcagcccttcctgtcgccagacgagacttcctcgacattgctc

SEQ ID NO: 346651 - DNA, 122 bp, Homo sapiens
ctcaggcagcagcgcctcgcggaccaggagggagaaaaacaaatagggagagggcggcggcgcagatcctggggaccctcgcactacccattgtgtctccccaagacccccgccccggacgg

SEQ ID NO: 346652 - DNA, 122 bp, Homo sapiens
cgcccggtatccccgggtgtccacctgtgcgtggggggctgtttcccgtctgtccagccgcgcccacttctcaggcccaaaggccagcaggaagggtcccggaggtggctgggggcgtccac

SEQ ID NO: 346653 - DNA, 122 bp, Homo sapiens
cccattgaacagcactgaatggggccaacccatgtggagtatttacggctgtgctttactcgatgtccacactcacccctgcttgcattcccttttgtcctgaccaccacctactgttgaca

SEQ ID NO: 346654 - DNA, 122 bp, Homo sapiens
aacggggccgtggaaaacgggcagccggacaggaagccgccggccctgccgcgccccatccgcaacctggaggtcaagttcaccaaggtgaggcgggcgcccctcccacccgacggccgcgg

SEQ ID NO: 346655 - DNA, 122 bp, Homo sapiens
cccccttcctgtgggattctctggtcctcaaactctcctcactcttggtcactccccctgcgggtaggtggcccacatctcatgcccaggactaatagttttccccaagtatcagttatctt

SEQ ID NO: 346656 - DNA, 122 bp, Homo sapiens
tcctgcacccccacagcgagatgaagatgctgagaatctcggcaacttcgtcatgttccccgccaacggcaacatcgacctcatgtacttcccctactatggcaaaaagttccacgtaagtc

SEQ ID NO: 346657 - DNA, 122 bp, Homo sapiens
cacgctagatgggctccggtttgagcttctctgctaggaagtcattcacaaaggcctccacgatggcgggggtgatctcctccacgtccatcacgtacttggcccgggctgacatgtccagg

SEQ ID NO: 346658 - DNA, 122 bp, Homo sapiens
gaaccccgctttgagcccggcccatggtggagctggtccagccttcaacttccgagcgagcgcggagcccccgacaaatgaagctgagaagctacagaaaccttccaactgcttgcaagctt

SEQ ID NO: 346659 - DNA, 122 bp, Homo sapiens
ctttcagcttccctttccccagcctgccccggctcccgtgcccttgcgccccttccgtgtcgaaacacttgaatcaggatgctgtccagccaggtacccgccggcaacttgcggtcccccgc

SEQ ID NO: 346660 - DNA, 122 bp, Homo sapiens
gatctgttaactgagatcaaaaacagtatggtatgtcggggcgggcggggggcaggtagccggtcagtcttataccttgaattctagaacaactgtgtttatggggggaggcaatagggaga

SEQ ID NO: 346661 - DNA, 122 bp, Homo sapiens
ctgtgctatctcagccaatcacaagccgggctgtgctcctacaccatccgaagagcgaatcgtgcagagaccgtgtctacgattggcctctccctgacaaggatttaattttgaatttttct

SEQ ID NO: 346662 - DNA, 122 bp, Homo sapiens
acagaccactccacaagattctctgtcccaaattgttaatagtgctgctgttgagaaacccgccccagaggtaaatgctgtaatgtcctcaccatttcacagattaagaaactgaggcacca

SEQ ID NO: 346663 - DNA, 122 bp, Homo sapiens
gcaggcagcgcggggcctcgcggtgaacttggccgccggcgaggctgggcttctcgggcgcgggagccccagatcctgacagagccaggctgccggctcagcgttgtgttgtgacagaaaag

SEQ ID NO: 346664 - DNA, 122 bp, Homo sapiens
catgccacttagctggggtcagcgtgggcctggggtgtggaatgtcccaccagggtatgacgggctgtagcttgcctggcaggcctgttggggctttcccagagcacagctcctggaaggag

SEQ ID NO: 346665 - DNA, 122 bp, Homo sapiens
tttactgtgttcttttaaaaaccagaccatgggcttggaaatgccatgatctttactgaccgagttgtatattgggcctagccctagccctgttaaggggcactgtgtggaaatgcccaggc

SEQ ID NO: 346666 - DNA, 122 bp, Homo sapiens
agggaaatgaacgaatgaatgaacgaacgaaagtggagtggtggagaggaccacagaagacgcggtcatccagcgcgtgaaccttcaccactgctgggctgtggaccctcacttccgccgcc

SEQ ID NO: 346667 - DNA, 122 bp, Homo sapiens
cttgagagagatgtacggcgtgtgccagttttggggccagatccaccccgccactccatacggctggctagacagcagttacaacacggtaacagacagagcaaacacgtgctacacagctg

SEQ ID NO: 346668 - DNA, 122 bp, Homo sapiens
aaaagcctatattaacaagctgcatcatcttggacatttgtttagcctttgtttggcatccgtggcagggtttggacaaggtgaggaatggcagccacaggttaaacctattgggcatctta

SEQ ID NO: 346669 - DNA, 122 bp, Homo sapiens
tgcgcaggcgcaccgggcacccgcccgctgcgcgcggggccccgagggccaccgcgcaggcgtcaaggttagagccccagctagcgccagctagcgcatcggggcttccacattccctttca

SEQ ID NO: 346670 - DNA, 122 bp, Homo sapiens
ctcagcggaacctgtagaagcgtcgggggttgccccgcttctgcgaaccgccctgggatgcgaggttcagcgtcactatctcatcctgggaaaggatgagatccgggtgggccgaggctgcg

SEQ ID NO: 346671 - DNA, 122 bp, Homo sapiens
tgacctcgtgatccgccagccttggcttcccaaagtgctgggattacaggcgtgagccaccgcacccggtcaatagtaattatttttgagacagagtctcactctatcgctagactggagtg

SEQ ID NO: 346672 - DNA, 122 bp, Homo sapiens
ggcggcggcggcagctgcggcggcggcggcggcaaacgggtagccctcgtggtgcaccaccgggtggtggggaaaaccacctaccagactcatttcgccctccgcgcccctccacgcgcccc

SEQ ID NO: 346673 - DNA, 122 bp, Homo sapiens
cagaattagaattggattaagaagacgcgttttggcatcacgctgactactcctcatctccgtcctcggggagggtgatgccagcgtgggactctttggaaggcctatcaatcacaggtgcg

SEQ ID NO: 346674 - DNA, 122 bp, Homo sapiens
gtcgtagaccgcgtgtttgttttgaggctatatttagtttcctctttgctctctctgccacgcttgaacaacttgccaaggatgccatctctcttacgtccgccgtggtgctccggattctg

SEQ ID NO: 346675 - DNA, 122 bp, Homo sapiens
acaggaagcaccatgcaggcggcgttgtcgtccgatggtctccacctgtggccgtagcaccgggtgcgctgtggactgggacacttccatgtcactccacacgtgtgccccgctgtggcact

SEQ ID NO: 346676 - DNA, 122 bp, Homo sapiens
ctcggtccaaaaggatcggagccccctggccgatccgcaggcctgcagggagccacagagcgcagcggccggcccagcgttcaagcccaagcacaggcctgcaagaactttcttccaactgc

SEQ ID NO: 346677 - DNA, 122 bp, Homo sapiens
ggccaggaaagacctatgtcccagctcaaataagttgggcagcaggaattctctcttcctcgacaaagggtcaatctttttattctattcaggccttaaactgattggatgaggaccactca

SEQ ID NO: 346678 - DNA, 122 bp, Homo sapiens
tgatcattattgatttcctcaggtatttattgtcacaatattaatcatgatgacctcgctcggtattaatatgcatgtcccaactagttcttgcagtgattaattgcacaattattttaagg

SEQ ID NO: 346679 - DNA, 122 bp, Homo sapiens
tttaaagttttgagcagtgttctgtggaaacgggtacctagaacacaaccacaaggttctcggtggagcaagatggtggcagcagcattgattttgaatttcctccatagcctctcacaaaa

SEQ ID NO: 346680 - DNA, 122 bp, Homo sapiens
cagaattcccggggctgtggaagagaccatagactcaacaggagggggagtcctgggtagcgcgccggtctaaatcgttacttggcggaaagttcccatgagtctttgccagcgtccccctc

SEQ ID NO: 346681 - DNA, 122 bp, Homo sapiens
aggctgtggacatttaatgccaaaaccaggaatatccggggcaaagcaggctgtgttgttcgcctttgtggagccaggcagtgtgtggcccagggaaagctgcgtttcatggaggcttccag

SEQ ID NO: 346682 - DNA, 122 bp, Homo sapiens
ctactgaagaatctccttctactccctgtcctcagctttccattccatagtaactagacccgagatttcagagcacagtattgaagctgctgtgctgcataagtatctcacacccaaagact

SEQ ID NO: 346683 - DNA, 122 bp, Homo sapiens
gagggtgccgagatccgacggcaggcccaccgcgggcaggctgcgggtggcgggcgtctccgggactctgaagccgttctccagaggctgcccccagttagcccccggcacggcagccccca

SEQ ID NO: 346684 - DNA, 122 bp, Homo sapiens
gggcctgaggtctagtccagcttctggcagtcctgccctgtgacccagggccttgggttccgcatcctcaaagcaaggctgttggtcttcttgtcatgtaagggcccccccatccccgaccc

SEQ ID NO: 346685 - DNA, 122 bp, Homo sapiens
cagcagctctgactggaatgcacacaacttcccatagtgcatctactgcagtgagtgaggcgaagcctggtgggtccctggtgccgtgggaaatcttcctcatcaccctggtctcggttgtg

SEQ ID NO: 346686 - DNA, 122 bp, Homo sapiens
acaggaccaggagaggttccacgtgcggaccaaccagcggcagccccgctgcggcgcaggcgcctgtgccagatcgcagggctggcgccgcctaccagctcacagcgccacctgccggccgg

SEQ ID NO: 346687 - DNA, 122 bp, Homo sapiens
aggaaggcaggaggaaggcgggacccaaagcacagcgaacacccagaaaggacgaggcggcgggggagagacctggtccaaaacgccgacggtgtcctgttctccctgcaggaaggcagacg

SEQ ID NO: 346688 - DNA, 122 bp, Homo sapiens
gtactccaatgtgcctttctccctcgctgtgtgaagttgcgctttgagccggggactcagcggaggaatttcgacgacagattcctgaggattgcggtcattaagcttggtggtaagtttgg

SEQ ID NO: 346689 - DNA, 122 bp, Homo sapiens
gtccttcttgtgctaacattctgcgagctaggactccaaactgcactcatcatgctgccccggccagaggcactgctaatttcgatgagtataattaaaagattccctccattgagagccgc

SEQ ID NO: 346690 - DNA, 122 bp, Homo sapiens
ggagcttgtgttactaaaagacatgcaaacgcccttaaccgctaagctcctgaggggtaacggtatgctacaaaagtgcttctgagctactactcctggaggcttggtccgagtgaccgcag

SEQ ID NO: 346691 - DNA, 122 bp, Homo sapiens
ggactcggcgggcgccggcgggtccgggagtggcgcggagggcagcggatctctggagcccgcctcccgggcccgccgccaccggcgcttccgccgcaactttcccagccacctcttggccg

SEQ ID NO: 346692 - DNA, 122 bp, Homo sapiens
cgcctctgcgtcgcagtgacaacgcggggatgccgaccacaggtggttggaaggagacagcgagattctgaggggaaagaataaggagagaagcagcatcttttgggcagaaggcccgtttc

SEQ ID NO: 346693 - DNA, 122 bp, Homo sapiens
ccgtcaggtttcccctgggatcctgggacggtatcaggcggggaatctgtgcggccgcggcgaggtaggtgaggtgaggcggggcgaggtgggcgaggggggcgaggtgaggcggggcgagg

SEQ ID NO: 346694 - DNA, 122 bp, Homo sapiens
tttgcaaggctactgtaaatcactaatttccatattgttgtaaataaaaccagataaagacggagtgagggctgagcagtttataagccctaccagaattataactttgttacttttgccta

SEQ ID NO: 346695 - DNA, 122 bp, Homo sapiens
cacgttgaggccctggaatttctaggaccatctttagctaatcgcgatcatctcagaggccgccctgagttcagttttctttcgtataatatagtaaattgtcggaacggaatctccactcc

SEQ ID NO: 346696 - DNA, 122 bp, Homo sapiens
gggcggcggccctgggctgctttggctaacttggctgcggggcaggcgcgaggagcggcgcgccgaccgggccgagcggagaggccgcccattggccggccagcgccacgtggccgcccccg

SEQ ID NO: 346697 - DNA, 122 bp, Homo sapiens
cagcactaagaccacactgtgacccggccacgtcaggagcactaagaccaccccgtaacgcggccacctcaggagcactaggaccaccccgtaaccgagtcacctcagcagcactaagaaca

SEQ ID NO: 346698 - DNA, 122 bp, Homo sapiens
gggcactgcggctcctccaacaatgctcagcaaagagccacagcctctcccgctgctcctcgaggcccagctgtggctggtgtgcttcaccaacactatatcaggccactgtgccagctttt

SEQ ID NO: 346699 - DNA, 122 bp, Homo sapiens
taagtagatttttccaaaggagatgattcctaaaataagaaccaaaggacaaatagaaaccgactttgctgggagtggaagaagtctggccaattggctcaaccaaggcccaagactgagat

SEQ ID NO: 346700 - DNA, 122 bp, Homo sapiens
tagatctcaggacaagtcagtcactataatgagaacagcacccaggggaaaccgccctcacgatccagtcacctctcaccaggctccacctccagcactggggattccagttccaattcaac

SEQ ID NO: 346701 - DNA, 122 bp, Homo sapiens
aaacccatccctcttttgggaacttggcaggcaatgaggatagggccttaattaagtggacgcccagtatgtgtatttcacgtgcgttattccactggggcctcacccattatcaggacacc

SEQ ID NO: 346702 - DNA, 122 bp, Homo sapiens
agtcgagaagccctggtctggaaaccacgctaagcgatctttacccggcagtgcggaccacgctccctgtggaagccttggtgggtcttgctcatgtagattaacagccccactaactgcaa

SEQ ID NO: 346703 - DNA, 122 bp, Homo sapiens
accccagttgatggtggatcccaggctgaggagaacaaaaataagcatggccagaaattccgctgtgactgctttccagaaagcttgagtccagacccctttgaaagccaccatgatgttct

SEQ ID NO: 346704 - DNA, 122 bp, Homo sapiens
tgagattgtaggaaattcagagttatattttccagcctctccagccagaagtctccactacgtcgtgggaaacatatatcaaatggagttgaaaggcaaaaggaagtgagcaaatactgggc

SEQ ID NO: 346705 - DNA, 122 bp, Homo sapiens
ccgcaagcctggctatcatgggcgtctgcaagacctcccagcagggctgcggagggcgagcggcccaggaaggctccttccagcacctgaagggggaacggcacagcatgcaggtgctctgc

SEQ ID NO: 346706 - DNA, 122 bp, Homo sapiens
ggtcttggagagctcgcggcacgcggctcccaggcgggtcttccacttgggaagggagcgcgaacagagccaggaggtagctcctctcgcagggccctgcatggccaaagagaggaaggcca

SEQ ID NO: 346707 - DNA, 122 bp, Homo sapiens
gtccgacagggtcaactgagtcgacgatcacttgacttggactaacggcctctgggagggcggggcctgctcgagtgaggccgggagcggaccgcagcccgctggaggtgccgggggcgaaa

SEQ ID NO: 346708 - DNA, 122 bp, Homo sapiens
aagctttccagtccttttactttgtgccacctgagactttcctccctactctcttcacctcgctgtcttccacaaaaaaaaagaaaaagggcccagagggaccacatgtcttggaggggcac

SEQ ID NO: 346709 - DNA, 122 bp, Homo sapiens
catcaccctgttgcttccttcacagcatgtctcaccatctgcaaccatctttctgtttgtcgtcttgttgatttgctgcctccacactgtcagctccttgggaacagagattggtttgttta

SEQ ID NO: 346710 - DNA, 122 bp, Homo sapiens
ggggttgggcgggcggagggcgcgtcccgtgctgtgttgcggggttgggcgggcggagggcgcgtcccgttctgtgttgcggggttgggcgggcggagggcgcgtcccgttctgtgttgcgg

SEQ ID NO: 346711 - DNA, 122 bp, Homo sapiens
tggctttcctcagataaaagggcaggggtgagtgtttcataagcagaatttcaagagtggcgggacccccgtgatgacccaatttctttcagatgctcaacacagactctggccactttgtc

SEQ ID NO: 346712 - DNA, 122 bp, Homo sapiens
tgttctatttctgttaggaatacactaggttagaccacgctttcaaaggccaattcaatgcgtttgaaatatgctcctatctctttcacataaaaataaaattggttaaccttactcctacc

SEQ ID NO: 346713 - DNA, 122 bp, Homo sapiens
tttattatgataatttaccagtagatggcagtaaaatgccttgttatttcagaatctgttcgttgtaacaattttcagatatatggaaataaaatgccttgaggagggggtcacttgtgctt

SEQ ID NO: 346714 - DNA, 122 bp, Homo sapiens
tgtccagtctcaatcaggacagaccaccgtgcgacacccaggaggctctcggatggggcgcgcctgcgccctcagaacgtgtgggaaggagggggcgtggacaggacacgggaccttgccag

SEQ ID NO: 346715 - DNA, 122 bp, Homo sapiens
ttccgcttccgggctatcctttgccggaagcagtatgtgaatgacgtagaagtattgcgccgttggtgattacggaagaaccaggagtttggcgtgaccatggtgagagaagacggtccaag

SEQ ID NO: 346716 - DNA, 122 bp, Homo sapiens
ctcccctccatgccgggggccaaggctgtcaccacataaaagctccggcagagaagtgctcgctgtgtccccgccgcggggggtacaagcagccgctccgcgccgcgactacccggcccgcc

SEQ ID NO: 346717 - DNA, 122 bp, Homo sapiens
aagtagttccttctgctgccctgtcgcgtgtgctgccccggctcctggaggccgtggtctcgggagtgcaagtgggaacagagctgaggaagattgtccatgagtctgtacttggtactcag

SEQ ID NO: 346718 - DNA, 122 bp, Homo sapiens
aaaattccacaagacagccccgtgaacttggcgtagacagagatgggacttcagggaaaacgaacgggtgtgagacacagccagggcccttcgcagacagcactcgcccagggccacggctg

SEQ ID NO: 346719 - DNA, 122 bp, Homo sapiens
caaggactataccagcccagagaattagtctttttcaggacccctttcaccctggtccctcgggtagcgcctccactatctcagccctaagggacccccgaaggtagcagctccaatcccag

SEQ ID NO: 346720 - DNA, 122 bp, Homo sapiens
aacgcaaacgcaggcgccccaccacgccgggctcccacgcggcacacacgcacgcctccgcgacacttcgcacacctacgtccctgcgtcacgccacccagacacacccggacccgcccaca

SEQ ID NO: 346721 - DNA, 122 bp, Homo sapiens
agtcatagatcgagtctttggtaatagttttggccatggaagggatttctgaaatgccaacgtagttttttttggccatccttgaacttgttgtgatagtataggcattgcttcggtaacat

SEQ ID NO: 346722 - DNA, 122 bp, Homo sapiens
ttgatttcttgttgcaaggctggtttttgaaaattcgacacttactatccaatttttttgcgacgtcagcacctcgggctcaggggggagggggtaaaattttggaggaaaaaaaataaaac

SEQ ID NO: 346723 - DNA, 122 bp, Homo sapiens
acggtctgtgccctagcgctcacttgttcagtggagagaccgctttgtgctgggctttgacgcctgggcgtggaagacggagcagttctgaggatctgtctcctcaaggagcttccagtctt

SEQ ID NO: 346724 - DNA, 122 bp, Homo sapiens
ggaagcgacctctttgtgacgtctgcgacctctttgtgacgtcggcccttgccggtgccccgcacagcagccagcagctcccagcccaggcaggaggtgcactggcctcccggcggcctttt

SEQ ID NO: 346725 - DNA, 122 bp, Homo sapiens
ttctctctctcactccctctcccccttggttgggctttgccaacatatcgagatgcttttcgccggcttccatcactaacctcccggaggtcatcaagccaaatttatgagtggccgctcga

SEQ ID NO: 346726 - DNA, 122 bp, Homo sapiens
gaggctttctcttcccagtcacagcctttgtggtccccagagaagtcttaggcccggcaccgcctcctcctcctcaaagttaatccctaaatttcacaatgtgttgttctgtgggcgcagag

SEQ ID NO: 346727 - DNA, 122 bp, Homo sapiens
gtcaggggccgcacatccgcgtggacggcgtctccggaggtaacgctccgttccgggagtcgttccaagacctttcccgagcttgcgctggaatggaggtcctggaggtgggggtgggcggc

SEQ ID NO: 346728 - DNA, 122 bp, Homo sapiens
tatccctggtgcatttgttgaaaacaatcagttgcaactgtttaacatcacagatacctgcggtggtgaaactgtttggtactaacaagaagctaaccaaaaaagttaaaaaaaaatgggca

SEQ ID NO: 346729 - DNA, 122 bp, Homo sapiens
cttctaccaaaatgtaactccttttaactgtgtttaaatcgattatgggcatcttgagcacgaattgaagaatgtgaagcccaggaaatgaggctaaccttgggaaacatggcgaggggaac

SEQ ID NO: 346730 - DNA, 122 bp, Homo sapiens
tgtagaccctagattatggtttgaaaaggggagaagatccaaataaattacgttgatatccgccattgtgtcttttgattctatgagagaaaaaatggaacagcagctgtccttgggttggt

SEQ ID NO: 346731 - DNA, 122 bp, Homo sapiens
gggcggtcagcctggcacgcacagcgccggcgtgcagggggccttgggtgccaccgagtccgggaggaaatctaggccgccatccgtccggagactggcacctgtgaccaccacccaacatg

SEQ ID NO: 346732 - DNA, 122 bp, Homo sapiens
ccagcttttcttcacccccaaaatgccgtgaggaagtatttactctgaggtatcagaattcgcatcagaagccttcacaagccatctcttactccctgctgccacagttggttcagtttctt

SEQ ID NO: 346733 - DNA, 122 bp, Homo sapiens
tgcacagtcattacaggagctcatcattgaggatgaggtgtgggattctgggcagagagccgctgactcagaggaagtacttcaggacagcttcctggagatgatcaaatggttattatacg

SEQ ID NO: 346734 - DNA, 122 bp, Homo sapiens
tgtggtagggctctcaggggtgaggaggaagcctggcagcccccacatctataaatgctgcgtctaccttaccctctgacttggaggcagagacccaagcagctggaggctctgtgtgtggg

SEQ ID NO: 346735 - DNA, 122 bp, Homo sapiens
cgcggctagggggcgaggtcgaagggcgggcacctgcgggtggggcggggcctgaattagcgggagcgcccgggaggggcggggccggggcctgcgtgagcgggtcggggagggggcggagc

SEQ ID NO: 346736 - DNA, 122 bp, Homo sapiens
gcaggggccagggggcaggcggtggtggtggcagggcctggggcagcactgaggggccagcggcccagcaaggcccgactctctctccttataaaggcttcaagtcagcctaaccattttta

SEQ ID NO: 346737 - DNA, 122 bp, Homo sapiens
ccaatcccggcttcaacaggttctccccagaacccaaacttgggtgaagtttcaccccctcgcggggcgcgggctggccgggtgcgcccggagtcctggagccgcgccgctcagtccgtgga

SEQ ID NO: 346738 - DNA, 122 bp, Homo sapiens
ttcccacccgatccggcgacccgccacccccactccgcgtctctgcctgcggggactccacggagttcgataattacctagagctccaccgcgccgccattacaccggacgtacgtcacttc

SEQ ID NO: 346739 - DNA, 122 bp, Homo sapiens
tgttgtaaggagatgggggctgcggtgactcgcgggatcaggaatttcaagagaaccgagcggaaagggaaatccgcaacatgaagccctctctcgctcccaggcacccctctaccagcagc

SEQ ID NO: 346740 - DNA, 122 bp, Homo sapiens
aatgacaacagtgcgattagcaaacttcttgcttctactagaggaaatcgaagacatgggcggaaaggcatcaactaaacaaataggaaaactgtaagtaaagagctccaacaggagctgga

SEQ ID NO: 346741 - DNA, 122 bp, Homo sapiens
ggcaggctgaggcaggagaatcgcccactgcagggaggttgcagcgagccaagatcatggcggtacagtccaggctccgcaagagagggagaccttagaaagagggagacgagggagaggga

SEQ ID NO: 346742 - DNA, 122 bp, Homo sapiens
tgtggagggatctgtaatctcaactgagcctctctccaagacaaggtgtgtgggccacaacgtgtgtgggcggcaagccgtccaggtgccgaggcaagagaccgagggcacgagctggtcca

SEQ ID NO: 346743 - DNA, 122 bp, Homo sapiens
gcaagggccatgagaaaccaggccttcactctatgctcttcactcgtgcgccttaggaatcggtgaactccctcattctctccttctccgctagcaccaggggcctgggccttgcagcccag

SEQ ID NO: 346744 - DNA, 122 bp, Homo sapiens
ttcagggctctcccggaacctttgcacccggggaagacaggtgcgggggaactctagtctcgaaggacctagggctgcagggggacgtttcacctgaaggactgcctcgtttcaacaacaac

SEQ ID NO: 346745 - DNA, 122 bp, Homo sapiens
cacccgcccacgcaccaccagcgcgtagtaggccgtgctgtagacgacaggcaccgaggccgcctcctccagcgtcctggggatgcagcaggtgggtcagcacaggcctggccgccatccac

SEQ ID NO: 346746 - DNA, 122 bp, Homo sapiens
gactgccattctactcgcgaggtccaaggaccccagggctccatgagggtgttttggcctcgctgggaggggcggggagaatgcggccggggcgctccgtatgcatccatgttcggccgggc

SEQ ID NO: 346747 - DNA, 122 bp, Homo sapiens
gaggatgtatatttggcatgaacaggcaggcttcctctccaaactggggctgatagacagcgaggctctgggttatcccaaaccagatacaggtcaatggcttcctctttaggggtgcaggg

SEQ ID NO: 346748 - DNA, 122 bp, Homo sapiens
gcttttaaaaagggatctgcactgggatgatttccaggctctgcagcatgtgtctgtccacgtggaggatgtttcccttctcagctcctgctccggggatgttacctcggctggcatctagc

SEQ ID NO: 346749 - DNA, 122 bp, Homo sapiens
attttttaaagcctcataacgtggtaacagaatactttgcacattacaaaattcagaacacggaaacaagaagctcgcttttttttcccccctatttcggtttggccctttagatttcccct

SEQ ID NO: 346750 - DNA, 122 bp, Homo sapiens
ttctgccatagtcttcactggttccccacatattactgtggtctacctacaagccacaatcgtctttttttttttttttttttttttttttttgagatggagtctcactctcgttgcccagg

SEQ ID NO: 346751 - DNA, 122 bp, Homo sapiens
tgaacaacggtgatctagaagcccgctgtccctgggtagcagggagtgattaggcaggcacgggcatggcaagacaatagctagctgaggaaagaagcattttaaaacagagcgagaccctg

SEQ ID NO: 346752 - DNA, 122 bp, Homo sapiens
tcaggatctcagggcacacaccctagacgcaaagtcagttgctcagtgttgctctgactccgatccaaccaaccctcaaagattcgcaccgcgcggcacgcacccagcaggttccagcgtaa

SEQ ID NO: 346753 - DNA, 122 bp, Homo sapiens
gaggtggggggagtggagaagacccattggtcactcagccttcctatggctggaggccagcgatacagctggagggcagctatacagctcctgctcccagaaggacaacactcccagaatgt

SEQ ID NO: 346754 - DNA, 122 bp, Homo sapiens
ggccaggctcggagcaggcttctcaaactgcagggtccacgccacccatcgggggtctggcggtctagggtggggcccgagactccaaactaggctgccgtgaggaccacaccgggaggcgc

SEQ ID NO: 346755 - DNA, 122 bp, Homo sapiens
gccgaggcctgtggtttgtggagtcgaatttccctgccaccagtgcccggttagcaggggcgccagcctgggcgcctgcgcggacggcgggcgtcgtcaccatggcagcatccgctggaggc

SEQ ID NO: 346756 - DNA, 122 bp, Homo sapiens
cccggggcaccccatctaaattgcacacacgctcaggccctaaattaaaatgtcacaggccggttggggaggctcgggtttcctggccacagaacatgagcctgcttgataaaacaattttg

SEQ ID NO: 346757 - DNA, 122 bp, Homo sapiens
ctcaccatgggtgggggactaggggactttggagacaaatgggctgctgcagtgctgcagcgggcctggatattcctggaatgcaaatgtagaaaacatctgagtctaagagagaaggggac

SEQ ID NO: 346758 - DNA, 122 bp, Homo sapiens
caggccccttcggggggctgccctgggactggaaactcagtggctggaagagcgggctgccgggccccgtggagaagggcaggaggggcctggctggggtggtggtggggatgagaggggag

SEQ ID NO: 346759 - DNA, 122 bp, Homo sapiens
acacccagcttacgcctggttaactcttaatgaccaaaatcaaagtatggatgaaaaagacgagaatctgggaagtcacattgctgaggtctgagagtcatgactccactgtcaccggggag

SEQ ID NO: 346760 - DNA, 122 bp, Homo sapiens
gaaggcctcaccacccacagtgtgaatcctgaggtgccgccattggcggttctgctgcttcgctgcagggataaggtggagctaccgaacagctgattcatatgccaagaatttggagtctt

SEQ ID NO: 346761 - DNA, 122 bp, Homo sapiens
accccggcacatttagtcatgagcagcctttgttccagcatgttgtcgggaggcagcatccgacattaactgggcttggaatctgctcctgtaggaagtgcatgtgtgtggtgcggggtgcg

SEQ ID NO: 346762 - DNA, 122 bp, Homo sapiens
gtggccctggaggaggaagaggagggggaggcggaggagtgtccaggcgtgccacgagaacgcagagcgcagcaatggatataaatacaaatacagcagcaccagcctgtcttcttggctcc

SEQ ID NO: 346763 - DNA, 122 bp, Homo sapiens
ccagcaccccttctgccccgcccctaccagacggagccgtaggcgccggagcccaccgggcgcagcccctgcagccgctgcggcacctcccacacggtcttgttcagctcctgccggtagaa

SEQ ID NO: 346764 - DNA, 122 bp, Homo sapiens
ggggattctgcaattcttagaggccacgtgggcagagagcggcgctttacccggagctaacgctgtgaccaccagcgcctctcacccggcagcgcctaacctgcagaaaaccggcgcgagta

SEQ ID NO: 346765 - DNA, 122 bp, Homo sapiens
ccacggccgaaggggggactcctctctgagaccgcagaacggggctgaggccctgaaccccgtgtgctcgtcctaaaactaggacgaatgtaccagacgacaagcagcctttgtgtgtagga

SEQ ID NO: 346766 - DNA, 122 bp, Homo sapiens
ttgggctttttctttcatctcctcctttgtttcagcctgccttcttcactctgggacactcgtgactggagtcattaggagaaaggaatctgcagtcctggtttggagctttgcagggtttg

SEQ ID NO: 346767 - DNA, 122 bp, Homo sapiens
cgtggatgtcagaccaaattgccttctcacaggacatcttggtgcatccgcgttctcaagcggaaaggacattttgcttttctgttggcaggattagtagccacgcgggtcgtccgcagcag

SEQ ID NO: 346768 - DNA, 122 bp, Homo sapiens
cgatctcccggatcttgtagatgtcggagaacatctcatcgtctgccggatacacagagccgcccatcaccgtgcgcctggcgccgccatttcccgcatttcccgcgccggcggccgcacgc

SEQ ID NO: 346769 - DNA, 122 bp, Homo sapiens
gttccgtttgtaaagagcaaggctgcacagacctgtctgctccgttgagacagtgaaggccgtctcacaaccgcaccttgggactcgcttccacataacacctcttctgttcctctcacggt

SEQ ID NO: 346770 - DNA, 122 bp, Homo sapiens
gaatattctgaagtcccgcagcgccgtccaagtgtaagggtcattactaggctgagctcccggcgggaccctggagggaaaggctcggtggttgccggggagtagacggcgtaggggctgag

SEQ ID NO: 346771 - DNA, 122 bp, Homo sapiens
gcctctgcaggaagcctgccttcagggaaacctcattgccatctgcctggagcagctcaacgacccgcaccccttgctgcgccagtgggtggccatctgcctcggcaggatctggcagaact

SEQ ID NO: 346772 - DNA, 122 bp, Homo sapiens
aagccagaggcagcactgcctccgaataatgcagacacatccttctgacctttcaaaaaacgttcaatgcttttcaaagttgagccaccagactctgccaagccctcaactgcccgctttat

SEQ ID NO: 346773 - DNA, 122 bp, Homo sapiens
gtttagctttccctggccttggcttattctcagttacaggcaggacccagattgcacacacgctagggccccacccccagctccttgcaagcagatgtcattgttccaacattgattgatat

SEQ ID NO: 346774 - DNA, 122 bp, Homo sapiens
gctgcgcgcgttgcttgtgggccagcgcgcgttccaggtggctgtgggctccgtgggccccgcactcggagcagcggcggaccccgccggccctagggcagtgaggggcttagcagttgggc

SEQ ID NO: 346775 - DNA, 122 bp, Homo sapiens
aacattggcctcccaaagtgcttggctcccaaagtgctggattacaggcatgaggcaccacgcccggtggcatgttgagtctttgaattaaaggaaattaaaagggtctcagaaagaagcct

SEQ ID NO: 346776 - DNA, 122 bp, Homo sapiens
tcaaaggcgaggtgacccactcccacctctccccgcccaggtacccccacccccactctgcgtcttatgcaggccttgggcagtcaaggcctggcggagccccaccctgcacagctgcaaat

SEQ ID NO: 346777 - DNA, 122 bp, Homo sapiens
ggaggagggcaagtgccactgaggatttcccaagggccttaaggtgggccccaaaaccagcgaggagagaggagggcaggagacccaaaaagaaagttagtggagcagagctgaggaaccca

SEQ ID NO: 346778 - DNA, 122 bp, Homo sapiens
tactgcatcatcccacatcctgattctgaccctgaggtcaagccatgtgggcaggggcagcgccagggtgacatttccctcatttccacatcatttcctccactggaccatgtgtcgtttgg

SEQ ID NO: 346779 - DNA, 122 bp, Homo sapiens
tactgcaactccacaccattcttggtgctggggtgtgttaagctttaccattaaacacaacgtttctctaaacccctgtctgtgcctctgtcctttgaccttcaggagggccttggtagaag

SEQ ID NO: 346780 - DNA, 122 bp, Homo sapiens
catgggagtggagaccttcaagatccacaagtcctatctcagtaatttgcagatgaggcacggaggcccagaaagagggaggttcttgttcaaggtcacacaagagcagttgcaggggaagc

SEQ ID NO: 346781 - DNA, 122 bp, Homo sapiens
gcaactaaagtttgtcaatttacaaaaagaatttaaaaatcaaataaaatgggccaggtgcgatggctcatgcctataatcccagaatttagggagggtgaggtgggcggatcacttgaggt

SEQ ID NO: 346782 - DNA, 122 bp, Homo sapiens
ttctcgccggagcaggtggccagcgtctgtgagacgctggaggagacgggcgacatcgagcggctgggccgcttcctctggtcgctgcccgtggcccccggggcgtgcgaggccatcaacaa

SEQ ID NO: 346783 - DNA, 122 bp, Homo sapiens
gggggctggacaggatgatgtcttcagagcccacagcggggagggcatgttgtgggcactcgctggccggctgccgtcatagccgtgcaccaggagcagcgttggcttgtggcacaggcctc

SEQ ID NO: 346784 - DNA, 122 bp, Homo sapiens
cctgtcatcattcaggtctcacttgtcatttcctgaccatggtacttataaaagcagtgccgtctgccccatccatgtcacctcgttcatctccttcacctccgaaatgatctcgcttttgg

SEQ ID NO: 346785 - DNA, 122 bp, Homo sapiens
gcaaacttgtgggaactatggatcggcctcagaggtgcaggcatccaggtactgctacggcggattggacttaagcatcactttcccaccgcctgcgccttccaactctctccacggggtag

SEQ ID NO: 346786 - DNA, 122 bp, Homo sapiens
cggcgacgggacgggaggcgcgaggttgcggggtggcccggccatggttcgggactggcccggtggcggcgacggcggcggcagcgctttgtctcctgggcggccgggccggcgcagccgcg

SEQ ID NO: 346787 - DNA, 122 bp, Homo sapiens
tgctccgggagtcgcatccaggctgctgagaaaccggcaccacgcactggtggcttagggcggcagcgtgggtcggtcgggcggtacagccgcgtcctctttccctagaaaagggcagaaaa

SEQ ID NO: 346788 - DNA, 122 bp, Homo sapiens
aaggctgtcaccaccagagttgatttactgggctccctgtgggacccaggtcccaagatgcgatgcctccgtgtaatcctgaagcgacctgccacaccttccaccctccagactagagatct

SEQ ID NO: 346789 - DNA, 122 bp, Homo sapiens
cagacggggtttcaccatcttggcaaggctggtctggacctcttgacctcatgatctacccgcgttggcctcccaaagtgctgggattacaggcgtgagccactgcgcccagccaaaaataa

SEQ ID NO: 346790 - DNA, 122 bp, Homo sapiens
agtgtcaactattccccactgggaacagacaacaataaaaccagtcaagcattacacagccgagcctgccaaatgtcattagagtggagaaaaaaggaaaggaacatggtagggaaagaagc

SEQ ID NO: 346791 - DNA, 122 bp, Homo sapiens
aaccagcagcgaggggcctgccatcccccaagtgacaaggccctacagaggaactcccatcgctcaaggcagggcacttgcccctctcagttctcagggagggattgcatcaaagtcagggg

SEQ ID NO: 346792 - DNA, 122 bp, Homo sapiens
gagcagggacaacttggagccttctgaccccttcaccaagcaggggagaagcggcaacggcgagccctccgcctgggaagtaatcagggttggaaaagcccccaagtcccaggcagcagctg

SEQ ID NO: 346793 - DNA, 122 bp, Homo sapiens
cagggggcagtgcagtccccgcagcccgggcggcgccccctcccgcactggcggaggacgcggccgttggaggcgacacctccacaagcagcgtggaggcgacacctccacaagcagcgtta

SEQ ID NO: 346794 - DNA, 122 bp, Homo sapiens
agatcccccaccccagagcagcgtgcccaggacaccctgtggacgctcaagagccccaggcggagaactcagataaatgcacagtggaggcgcagtctccatagcaattgtcttttagtgtg

SEQ ID NO: 346795 - DNA, 122 bp, Homo sapiens
cctgggtgggtcctctctgagcctcagtgtctcctcctgtgaagtgggaatggccggacacgctgccctgcatggctgtcttgggccttggctgaacagagcacctgctgcaggtgtggcgg

SEQ ID NO: 346796 - DNA, 122 bp, Homo sapiens
ctgcgatcaccgcgcagtgaccggaaggagagctcattctcacagagggcgatgacgtgccggacacagggacccttgcgcaacaaggtccaccacacagagggattgaagccgtgcgttct

SEQ ID NO: 346797 - DNA, 122 bp, Homo sapiens
ggtaatccacccgtctcagcctcccaaagtgctgggattacaggcatgagccaccatgcccggcctacctttcagtgcccacttaactccattggttcagaggcactcagtgtatcagctga

SEQ ID NO: 346798 - DNA, 122 bp, Homo sapiens
tgcgcgagtcgggggcgcggggaccgcgaaggaaagtgagagcgccgcgggagccccgagcgccctgtgcccattagggcatttgagataaagcgtttgagataaagcgatgagaagggtga

SEQ ID NO: 346799 - DNA, 122 bp, Homo sapiens
ggggacggatctgggtcgcgggaagcggcggctgggaggaggtcacgtgtctgcgggagtcgcgtctcctccccgactccaggagcagcccgggccgcggcggccgctcgcgctgctgcagt

SEQ ID NO: 346800 - DNA, 122 bp, Homo sapiens
cctccttctgtgctgagcctcctcccgggcagaagcacttcccagggccaggggcagaggcggggctcttcccaggtcacccctctgcccctcccctctcatttctgccttttttgtccctc

SEQ ID NO: 346801 - DNA, 122 bp, Homo sapiens
cgtccaggcgcggacaggcagcctcaatcaagacaacggactcaaggggttaccgggaggcggatccgccaagtgtttggccacgcccggatccaccagaagtttctgagaccaagattctt

SEQ ID NO: 346802 - DNA, 122 bp, Homo sapiens
tgtatagaagtcaatgccttcataaagtgaatcaatttctaggttggcctgggtgctggacgacagggtcctcttggccctctcgcaggcggtgcgcagccgcctcacggctcgcttgttct

SEQ ID NO: 346803 - DNA, 122 bp, Homo sapiens
atggttctactggagaagggttgggtgtccccagcagccctccaggcagggtcagaatctcgccacctcgcggcacatctcctcatagcctggaggctccccagctccccccgccacactat

SEQ ID NO: 346804 - DNA, 122 bp, Homo sapiens
cccggtgcccgctcgcacctccaggcaccaacaacaggaagcccggcacgaagaagatggcgctggagacacctgcgggagggaccagagcccggtcagggcgagggggcggaggcttcgag

SEQ ID NO: 346805 - DNA, 122 bp, Homo sapiens
aacaggagctggtgaggcgcgaccccgagagtcggcgaaggaggctgcggggctgagtcacggcggctccgcaggcctcaggcccgacacccaactaccccaccgcgccagggagagggcgg

SEQ ID NO: 346806 - DNA, 122 bp, Homo sapiens
ggggggaaggaaacgaaagcggagtagggcagtcagaactccggggtctcccagatgcctcggggtctcgctgccgccaacttcgcaaactgactcaccggtgccaaaagatgaatgctgcc

SEQ ID NO: 346807 - DNA, 122 bp, Homo sapiens
aaaggggagaggaagagaaaagccccagaagcctgtccaccgggtgctgggggcacagggcggtgtcccccactctctccgggcccttcctggcggggccgcacggcagtccccccctcgtt

SEQ ID NO: 346808 - DNA, 122 bp, Homo sapiens
cacacaaaatatgaggcccacagggactgcgcgcacaaattatgagtcccacggggaccgcgcacacaaaatatgaggcccgccatctaagggctctactggcttcacaagtcaagtttgat

SEQ ID NO: 346809 - DNA, 122 bp, Homo sapiens
atacctaggtctgataaactccaaagttgttttaactatcagaatataccttctttcttacgtgtggtgtggaagagtctgaaaaactttattccattgcgtcataacctattatgaaagac

SEQ ID NO: 346810 - DNA, 122 bp, Homo sapiens
agccgctttcctttcagtcgggagggctccaactcagccaagttctttggatgccatccgcgcggtgtcccataactttcctggccggtgggcacactgcctgcgtgagtgtttgttctctg

SEQ ID NO: 346811 - DNA, 122 bp, Homo sapiens
tgcagttttgaaaactgaaatctctggacaatttcaactagtcataacttggaaccacaccgaccatgggaagtccttgtcaaccggcacagatcaaaatgtcactccttgactctcaaagc

SEQ ID NO: 346812 - DNA, 122 bp, Homo sapiens
atcgtacacgagaccttttgtgtctgacttctttcacctgcgtcgttctcgaggttcatccgtgccgtagcgtgagccagggctgcgttccaccttatggctgaatcatactccaccccatg

SEQ ID NO: 346813 - DNA, 122 bp, Homo sapiens
ctaatcttctccattgttagatgcacaatttaagaaatgtagggcattcatatttcatgccggaagtgtgttcagggtaacagtgttgaagaccttgcagacgaattctgaaaagattatag

SEQ ID NO: 346814 - DNA, 122 bp, Homo sapiens
gcgcggtgagtgggattggggcacttggggcgctcggggcctgcgtcggatactcgggtccgctcgggagcgcgctggccgcaacgagggcggcgcgggcccgggcgatggcgtggcttgcg

SEQ ID NO: 346815 - DNA, 122 bp, Homo sapiens
ggaactcagaggggagaccaaaatgggaggccatcgtggagcggacatgcgatatgggcccggtgggtctccccgaagtacagggagtcccccaataatttctggccccagggggacccctt

SEQ ID NO: 346816 - DNA, 122 bp, Homo sapiens
aaggcgcagaaagaggaccgcatgactgttttcaggcgaaggttgccatggataaagaagcgctttgcattggctgtgtaatgcggcacagcaagttagcacgaattagaggcttaaagcag

SEQ ID NO: 346817 - DNA, 122 bp, Homo sapiens
aggcgttggggggacgccctgtgagtgtgagagacctccaagagcggctggagtctgaggcgctggccgggcttcgtgaattagacctttatcctaagctccttccctctgccgggcactcg

SEQ ID NO: 346818 - DNA, 122 bp, Homo sapiens
gagggggcgactcgaattcggggagcgatcctgggagaccctggagagtcctgggcgccacgcagccgagcccccgaaatagatcccggttccggggttccgggagctgtccagcctcgcgg

SEQ ID NO: 346819 - DNA, 122 bp, Homo sapiens
ataagttgactcctgggggctggcgcagctccacgggacgccctccacagctggtggcctcggcttctcctgaaaaatgcttcattcactccggcagctgtgccctcgggggctgccacgtg

SEQ ID NO: 346820 - DNA, 122 bp, Homo sapiens
atggagatggagccgccgccaccgccgcctctgagcgcccgggtcctggctccggcccggcgactgccgccgcctcagtgaccccactccccccgcactgggccgcccgggccagagtgggg

SEQ ID NO: 346821 - DNA, 122 bp, Homo sapiens
ccttcctggactaccggacttacgccgtgcgcgtgctcttcccgggcatcgaggcccacccggtgctcaaggagctggatgtgagcctctgcctggcctgccccccaccattcccttcaggg

SEQ ID NO: 346822 - DNA, 122 bp, Homo sapiens
ccatttttggtaacaattacaagcagacataaactcattatcttacaagggtaaaaatcacgtatttatcttggttttcctatataaactgtactcctaagtaacctaacagagaagagtca

SEQ ID NO: 346823 - DNA, 122 bp, Homo sapiens
tcttccccggctcctggttgccaccaaccttaaaccccaataaaaggagagcaacttggtcgagccttgtataggcaaaagagtgttttccagcgcaggctggcctctgtgtgctgacaaga

SEQ ID NO: 346824 - DNA, 122 bp, Homo sapiens
ccagccctgcagtcctactctgccaccccaaggggcttgggcttcagtgggggcagcgtgcggggcgtggagagggagacgtgtaaagccctgagaggctctgcagccacagtcccgcagtc

SEQ ID NO: 346825 - DNA, 122 bp, Homo sapiens
agacatttgggggacaaattgaagaaatttgaacataaactggatatgaaatgatactcacggaatttgttaattttcttaggtgtgtaaatagcgttacagttacgcaggacactgttgct

SEQ ID NO: 346826 - DNA, 122 bp, Homo sapiens
ccctgcccgcatcctggggagaagcagccgctaaggcggcaggatagcccggatgggagccgatggaactcgaacgccacagaaactcacctctgcggctgcagggtccggtaccggggctg

SEQ ID NO: 346827 - DNA, 122 bp, Homo sapiens
tcataaactcgaggtcactcacaaatgcttgtttttaatgccacctcagtattgaccgctcgcccgagtctctgagcaatcaccagctgcccccttaccattagaacagggtgaagagctgc

SEQ ID NO: 346828 - DNA, 122 bp, Homo sapiens
tgaatctagcagccagctccaccagcctccttcgtgataggactaactggggtctgtctgcggacgggcgcctcctccgcgggcggagggccgcagcgggaactgggtttcggcagcgcccc

SEQ ID NO: 346829 - DNA, 122 bp, Homo sapiens
cttaggtttccagtaacgagtggaaagtcatagggaaggagctgctaaggcccagaaagacgtttctctacagactgtcactccatagggcagccctgcatatagcacccacattcaacagc

SEQ ID NO: 346830 - DNA, 122 bp, Homo sapiens
tctctctacggaagctggtagggctgtgggtgcttcactatggcgacggtgggggctccgcggcacttctgccgctgcgcctgcttctgcaccgataacttgtacgtggcgcgctatgggct

SEQ ID NO: 346831 - DNA, 122 bp, Homo sapiens
gctcctcagcctcttaccgcgagagctcacaatgcgaagaggcgaggccagcagcgttctcgcgagaacggtgctctccgcccaggggtgggcggggcaccgaaggagaaggcagttgaggg

SEQ ID NO: 346832 - DNA, 122 bp, Homo sapiens
ctttatcttgttaccctgcaggcattcacctcaacccctcccgtcccctctgggatgagccgggccacagataaaggcctcttagcggagctacgaaaaggatcactttagcccttctggga

SEQ ID NO: 346833 - DNA, 122 bp, Homo sapiens
aggacccagctgaggcccgagaatccactgctgcaatcactccatgctggaacttgaaggcgagcgtggtggtgccatgggccatctcaatctgaacgttcctttctccgtccccacccagg

SEQ ID NO: 346834 - DNA, 122 bp, Homo sapiens
catccccgggtgctgggaccagggctgcgtggtccctgaacgcgatgttcatttcctccccgcatccccgggtgcggggaccagggctgcgtgctccttggacgcgatgctcatttccttcc

SEQ ID NO: 346835 - DNA, 122 bp, Homo sapiens
ccctcgccacgtgctcgacgaccccagagccccgagtttcttctcccgaaccgcttgccacgtgtccaagccaaagctgacgtgtttcagcagggcgccgccccctcccaggccccgccccg

SEQ ID NO: 346836 - DNA, 122 bp, Homo sapiens
agtcatccaaaaccaaactcactaaaattattatgagacagggtctcgctctgtcacgcacgctggagtgccgtggtgcaatcttggctcactgcaacctccacctcccaggttcaaacgat

SEQ ID NO: 346837 - DNA, 122 bp, Homo sapiens
agggcttctggctggggcgaagagggcttgagggctcagtcgggatgctgtgatcgcacgcggtaaacctccagtagatcaagaagctgtacaaagtgcccgacttcccctcgaaacgcctg

SEQ ID NO: 346838 - DNA, 122 bp, Homo sapiens
cctgggaggcgcctgcatcttcttggccttttctcctgctgactcttaacagtgcactgccgtgtttgatcttgtttttcagaaattgcccaggttattgcctcatacaccgccaccggccc

SEQ ID NO: 346839 - DNA, 122 bp, Homo sapiens
tataggtcattacgattgcccaagttctaacaagctcaagaggtagagagtctccagcagcgcccctgcttgtagaaagcggcattaagatcccattcagcttggtggtgaactagagcaga

SEQ ID NO: 346840 - DNA, 122 bp, Homo sapiens
ccaagaggtaagttcacgcatcactactgaccctctccctgtgaaagcagaaagtcagcacgcatcctaccccagaccagaccagccacacctgtagattcaaggtcctgggggaacagtat

SEQ ID NO: 346841 - DNA, 122 bp, Homo sapiens
gcaagatccaggagactccaataaagactcaaagggcttggtggctcatgcctgtaatcccggaaatttgggagtctgaggtgggaggatcacttgggcccaggagttcgagaccagcctgg

SEQ ID NO: 346842 - DNA, 122 bp, Homo sapiens
acaggcggggagaccgcggcggcgcccgggacctgctggaggaggcctgcgaccagtgcgcgtcccagctggaaaaggtaggggagcgcctgcccctgcggccacccatgcagccccgggct

SEQ ID NO: 346843 - DNA, 122 bp, Homo sapiens
cccgccccgccgtcgccgccgccgcagccaggagccgctgcaccatgccccgcatagatgcggacctcaagctcgacttcaaggatgtcctgctccgacctaagcggagcagcctcaagagc

SEQ ID NO: 346844 - DNA, 122 bp, Homo sapiens
ctcatcttttctcatccccccaccccccaattcccagaggaaacaaacaaacaaacaacgcgaaacagcccctggatgaagcacactcgggcaaattgataatagtaattataggaagccca

SEQ ID NO: 346845 - DNA, 122 bp, Homo sapiens
gaccacagtaatttttctcctggtttccaatcactctgtgagccttcaacttgggaaactcgaactgcacattgagggccacactgcctaccccaccctttaagctgccaccgagttgtttg

SEQ ID NO: 346846 - DNA, 122 bp, Homo sapiens
tctttttaaaggactctcttgcttaactttgcccttttcttcctttcacttcccaacagacgttttagtccagccccaaattttgcctctgagcaagattcccaggacctcattggagcagt

SEQ ID NO: 346847 - DNA, 122 bp, Homo sapiens
caccaagctccactggaaacagaatcttccgtcttgaaaatctgcatcttcagttccctccgtgaaggagcgggctctgatctgagaaaccagtggttcaagagctccaccatgaggaaagc

SEQ ID NO: 346848 - DNA, 122 bp, Homo sapiens
gcgtttcctactgagctacacgggcgattttctgagaatatctgaactcaatgcatcgaacgtgagctctgttggcgcccagcggacacctgttggttgaaataatacctgcctccaactac

SEQ ID NO: 346849 - DNA, 122 bp, Homo sapiens
ttccccaacattccgctctcctaacagaggagctgtggggaccacgggcaagcaggagagcgcacctcctccctcatcacctgcgggatacacacgcacctcggctctggcctccggtggtc

SEQ ID NO: 346850 - DNA, 122 bp, Homo sapiens
cgtacccagggcccgcaggagggacaggacgaggatggtgcccacagcgcgctggaggcacgccagagcctggaggggcaggcaggggcggtggagcggggccggaagtgaggctagcggag

SEQ ID NO: 346851 - DNA, 122 bp, Homo sapiens
gtcggcgctgcctctggattgcctgcgtgtgggagtacaactctgcctctccaaggagaacgggttgtgaccactgaacaaaacttgcccattgaaagcaaacccggaacagctggataatg

SEQ ID NO: 346852 - DNA, 122 bp, Homo sapiens
ccccagtgcccacccacccgttctccgtgtgcccgagggccggtcctgggctaggctccgcgccccagccccaaaccgggtccccagccccttccagagagaaagctcccgacgcgggatgc

SEQ ID NO: 346853 - DNA, 122 bp, Homo sapiens
caggctggagcgggcgtgttacaggattgtgggcttggggtagacggtggaattgggccgcgtggcctgggcagatgatgcggggtgtgcggcccagagtggctcggccggggtgcggtcag

SEQ ID NO: 346854 - DNA, 122 bp, Homo sapiens
agaggctgaggcgggaggatcgctcgagtcctggacgtcgaggctgcaatgagccgatttcgcgccattgcgctccagcctgggcgacagcgcgagactccttctcaaatatagaattttaa

SEQ ID NO: 346855 - DNA, 122 bp, Homo sapiens
taattcactccaaaatggcgcagtggtccagggtttatgctgttagagcggtgatggtagcgttttgccacactgctgtcacctctcggttttgctatcctgtccacttactttgtcactac

SEQ ID NO: 346856 - DNA, 122 bp, Homo sapiens
tccacaacctagttcagattcctcttcttttctcaagggaacgtctaaagctctcaagtccgttttggcagggcgattttgtaagtctgaaacatttcagtgtgtctctcgatctcaggcag

SEQ ID NO: 346857 - DNA, 122 bp, Homo sapiens
tgacgctgtccctgtccctgtctttgcaggacggctgtcctcagcgaggggccgtgcacccgctcctgagcagcgccatgggcctgctggccttcctgaagacccagttcgtgctgcacctg

SEQ ID NO: 346858 - DNA, 122 bp, Homo sapiens
agaatagagcaataaatcagaagcactccagaaaatcttgggtataaaatgaacttcccccgcccttttctggggcacagctttgattaaaacctgttaggaatgataattacccccttctc

SEQ ID NO: 346859 - DNA, 122 bp, Homo sapiens
ccccctggccccggatggtgactggtggtggtgctgcacctcccgggactgtcactgagccgcttcccagtgtgattgtgctgagcgcaggccggaagatggcggctgcggctgcggcggcc

SEQ ID NO: 346860 - DNA, 122 bp, Homo sapiens
agcttccggcgtgcaagctgagggcggattttagagtaacacccgaggccctcgcatttccgttcctcatgacagaggcttggactccccttacccagagaacggagatttaggagaagcca

SEQ ID NO: 346861 - DNA, 122 bp, Homo sapiens
agagcaagacccccccaaaggtggaatcacatccccctcactcagcaggctccccagacacgagaccaggcctgtccctcaggtcatggttcccccaagacagggccatgtctccttttcag

SEQ ID NO: 346862 - DNA, 122 bp, Homo sapiens
gcttcgaccgagtcctgatccctctgctgctgcttctgctgctggggctgctgctgctgtcgctgctgcccgaagctggggccggcccgctccatggttggcaccgcgcgcctcggaggctc

SEQ ID NO: 346863 - DNA, 122 bp, Homo sapiens
tccaagaaccccttggtaattctccaggtaattaatgaggactctgggggacactgggaacgcctttggaatgttaaacaaagtggcttttattctggctgccttgctgcggcttcttcctc

SEQ ID NO: 346864 - DNA, 122 bp, Homo sapiens
gcagaccttgccctcgtgtggctgaagagcgcgggtctggggctccgcggacctgggcagcggccagagggtggaaggctggggcggtgggggcccatgagaaggggcctgtgggctcgggg

SEQ ID NO: 346865 - DNA, 122 bp, Homo sapiens
cctccgaggtggacctgagagcccctcatgggcttcctgggttatttgtaaaccccaggccgttttccccggaagcctgtcttccagtggttcctgcggagtgggaacgagaaggccgacca

SEQ ID NO: 346866 - DNA, 122 bp, Homo sapiens
tatattcctgtcagccccactaaaatgtcagttcagtggccgggtgtggtagctcacgaccgtaatcccagcactttgggaggccgaggcagatggatcacctgagaggtcagaagttcgag

SEQ ID NO: 346867 - DNA, 122 bp, Homo sapiens
cagacgcccgaacccaggggaaggctgcgactccgcgatgagtgacatgcgggcttgagacgttctaaaggaacgtggaccgagttagggaacgtaactgaagctcattttgtcttagttat

SEQ ID NO: 346868 - DNA, 122 bp, Homo sapiens
gcaagaggattctgctggcctgggcgatggagatgctgccccttcccacagcatccacagcgcccccagatgttgcctctctacagatcctccatgcagctccccgcactcagtggtggctg

SEQ ID NO: 346869 - DNA, 122 bp, Homo sapiens
agcttgctcgcaaggcgagacgttccgtggaggcggagtttacgatgtatccaagtctgacggccccagaaacgggtgtgcagggcgcccattgggtccgcggtatgactgcagaaagagcc

SEQ ID NO: 346870 - DNA, 122 bp, Homo sapiens
gttttaagtcccgcatgcattagctatttgtcctaatgctctccctccccttgacccccacgcaaccaaagatggttttaaggcttctaggactggagatgattactttcagaaatgaatag

SEQ ID NO: 346871 - DNA, 122 bp, Homo sapiens
ataaataaatcctccaggagctcagttcaccctcaccgagccctctgaagcagccactgtcgtcctcccctgttagagatgctaatatggggccagcaagcccttggtcaggcagcagggct

SEQ ID NO: 346872 - DNA, 122 bp, Homo sapiens
agcgggcagcggcggcggggggcgctccgcgcgggggttggggcgcgggggttggggaggcgggggcgcccgggccgcgcttcccttcgcgggtgactcagcagccgccttcctcagcgggg

SEQ ID NO: 346873 - DNA, 122 bp, Homo sapiens
aagtttgattgtgtctttttttcttccttcttcttctttttttttttccccctccaaagacgttgagcagcagggctaatggatccccagcagggtgcaaagacagcagaaagtgcaggaat

SEQ ID NO: 346874 - DNA, 122 bp, Homo sapiens
aacgccgctccacgctgactgcatccgtgccaggctcattcctctcagggcgccaattcccggcttggagaccagctgacaaatcttgttaaaaaccttccagcccagtgcatctctcggag

SEQ ID NO: 346875 - DNA, 122 bp, Homo sapiens
tcccgcccagcagcccggaacccaaggtgtccgacccttgctttcctccgggtacacggccgaactggaaggccgcaaagcattgtgggagttgcagtttcttagtgcgcaggctgtcgtgg

SEQ ID NO: 346876 - DNA, 122 bp, Homo sapiens
acctcaggtgatccgccagcctcagtctcccaaagtgctgggattacaggcatgagtcaccgcgcccggcaggttttcccaaattaaaggtcaccatgaggtcaaacaagccctggctcatg

SEQ ID NO: 346877 - DNA, 122 bp, Homo sapiens
ttgctgctcccattgaaagggtaattacgttccgtgggctctttcccaaacctttggtgacgacactgcgtgtaaactccaggccagcagacgacccctccccttccctcctcccccttttt

SEQ ID NO: 346878 - DNA, 122 bp, Homo sapiens
ttgcgtgggttcgcacctgtgtccagcgttgtgtagctttgcacctgtacccggacctgccggtgacacataggtttgcacctgtgtccagcatcgtgtaggtttgcacctgtgtccagcgt

SEQ ID NO: 346879 - DNA, 122 bp, Homo sapiens
aatttggcttcctacaacagtagtcctacaggagcgaacagtttagaatgaatgaaatgacggggatagagaggtgatgtctctattgtcaaccaaatcagtgacctgacataacctgttcc

SEQ ID NO: 346880 - DNA, 122 bp, Homo sapiens
cacgcgtaacagggagataagatctgtaacaggttgtgaaggtctctcatcctactgttgcgaggaagtgactactgaaatgagaacgaacacacagaaattaatttggagaagtcagaagg

SEQ ID NO: 346881 - DNA, 122 bp, Homo sapiens
gctctgtggtgttggacaccttatttagcttcttgaagtctcagctccctatctggcagccgatacttccctgtaaggattaaagtgagacagtgaataaaagggtttagcttattgcctgg

SEQ ID NO: 346882 - DNA, 122 bp, Homo sapiens
aatttcaggttggtttcgctgaacaattgtttgtttcacgcaatccctgggggggttttgcggggggtgtgggggaggaagagacaaaggaggccgaaagaaaccgatcacactggggcttg

SEQ ID NO: 346883 - DNA, 122 bp, Homo sapiens
gccatgggaggtggaagggagcccaggcctgaaagccaccctctcccaggtgtacgcctacgcctcctccgtgttccggaaggcaggagtgccggaagcgaagatccagtacgcgatcatcg

SEQ ID NO: 346884 - DNA, 122 bp, Homo sapiens
atcaacaaggtgcgagcaacgcctgcgcagctctgggagacaccgcctccgcctcccaggcgccgcccgctccgcccccagctcggcctccgcctcccgcagctcccgcggcccggcaggct

SEQ ID NO: 346885 - DNA, 122 bp, Homo sapiens
atgatattgttccccttttgaagacttccttttccttcccttccccctgaaagcagccaccgctggagggaaacattttaagacagctgttcaccggaataacacaagagcaacaataataa

SEQ ID NO: 346886 - DNA, 122 bp, Homo sapiens
ggagtcggagtcgcagggcgagggcccagatcggggctggaagccacaggcctctcacctcgcttggccgagcggccgggactccgggcccgcagcggatggaagcgggcgctgccctgccc

SEQ ID NO: 346887 - DNA, 122 bp, Homo sapiens
agaactctgcagtggtcaaagcccctatggtcatcccaagtgttctgcaagcctgtttcccgtccacccctgaagctgtcgtttgctcactgtgtcttgaactccccaggcatggttctgtg

SEQ ID NO: 346888 - DNA, 122 bp, Homo sapiens
gctcaaaggcaggaagacagataagatcggatttcaggattttcgtctgccccccatctccgcccccaacttttgacaaccaagaacttttccccaccaggagtgggtatatttcaacttct

SEQ ID NO: 346889 - DNA, 122 bp, Homo sapiens
acagttccccaggcacaccgaggcaggtctgaaccccagggatgggcccagctgaggctccgtgtgggatccctgctatcatcatcaacaacaacctttgttttaaaattaggccaaaaaaa

SEQ ID NO: 346890 - DNA, 122 bp, Homo sapiens
gagctgccgggcgggtggccgaggggcgaggaaggaggagttggaggtggggcaggctgccgggaccccagacccggagactgacacccagtcctcgggaagctcctggatcccacggtcta

SEQ ID NO: 346891 - DNA, 122 bp, Homo sapiens
ctgcccgcaggcggaaccttagagcttcagccatggaaattaacctcttccggttggggccggaagtccctccgagaggggcggctccgcgtcatgtgactggagtccgcgtaggaggggtc

SEQ ID NO: 346892 - DNA, 122 bp, Homo sapiens
cagaaatgattgggctgctctgagctctgaagcattcggccgctgtgtgtgtgcaaggggcgcaaggacggagagacagcatcaataatacaatattaacaggagcacttgtccagagctta

SEQ ID NO: 346893 - DNA, 122 bp, Homo sapiens
agggaactccctgacctcttgcgcttcccaagtgaggcaatgcctcaccctgcttcggctcgcgcacgttgcgcgcacccacttaactgcgcccactgtctggcactccctagtgagatgaa

SEQ ID NO: 346894 - DNA, 122 bp, Homo sapiens
tgcccagaaaaggctcgtgctggggtagggagccagtacaccgggggaagcctcagcctgcggttctgtgcgggccggggctcatcagaacaaccactttggcttaattggggagggaagga

SEQ ID NO: 346895 - DNA, 122 bp, Homo sapiens
gtggaaccttctattctgcaaccttgcctgcagcactcttttgagaaagattctggattacgtgataaattagtgatgtctgtcatggaggggtgaggggcagtttttagacatatagccta

SEQ ID NO: 346896 - DNA, 122 bp, Homo sapiens
cctggtctcgggacctccgcgcatccaagattcccgcggacccgttgcaccgtatgcccgcgccagagacgctctgcgcccgcgctgggttccacccgccccggccacctgctgctttccgc

SEQ ID NO: 346897 - DNA, 122 bp, Homo sapiens
gtggtgggctggaggtgggaagggttgtgtgtgcaggtggtgggtagtgcccctgccacacgtacagatccagggcatctcctctggacccctcccagggactgtaaaactttactatggga

SEQ ID NO: 346898 - DNA, 122 bp, Homo sapiens
caaaacatgcctctactcaacggcttaatgtctgagcacttacctcccccgctgctctgccgttgggagcactggtctctgggtgagggacttccagcaagaagtattcacaaatgaaacaa

SEQ ID NO: 346899 - DNA, 122 bp, Homo sapiens
tcagcacagagggcggccctgtgcctccctcccagacagccttggtgacccgaaggccatcgggttcctgcccaagcacctggattagaaggaaattccttaaggacaggaactacttctca

SEQ ID NO: 346900 - DNA, 122 bp, Homo sapiens
atacctacaatggctgtgttgtaccagctcttctaactttgataagggctaatgtactagcgccaggcagacaggaagtcaatggtctcaaaatttctctcatcctcttctatcttctagct

SEQ ID NO: 346901 - DNA, 122 bp, Homo sapiens
ccgagccacagccggccagctccgcgcagggatgggcagcgcgctctgaaagtttatgaccgccgcagccaactcctggccggagctggagacgcagcgagcgatcggccggcctcgaaccc

SEQ ID NO: 346902 - DNA, 122 bp, Homo sapiens
gtgcagccaggcgcgacactctagcgcagctgggccatctgccgggtgggactgcttagccggagtcctgagtcccgcactgctccccagtaggagggcttgcaggtgttttttaaagtgtg

SEQ ID NO: 346903 - DNA, 122 bp, Homo sapiens
ttttatctctattactttggctatgctataggcctcagtttcctcatctctaacaaatgacgctgaaattgaatgatctcaaagcttccttccaactctaatgctatatagtttgaactctg

SEQ ID NO: 346904 - DNA, 122 bp, Homo sapiens
gatcaagtgggcatgcccttttagccttggcacgaaatggagcagaaaaagagccggatgcggattactgtggtgccctaggctcagattctgctgagtcactgtgactgcggatttggaag

SEQ ID NO: 346905 - DNA, 122 bp, Homo sapiens
aaggaaagggaagaggcggagcgtgggagcgcacagtgtcaggaatacaatagtgctccgcgccgcctcagccgccgccgccgcccaaccgcctgcccagcgctgaggcctgacgggccggg

SEQ ID NO: 346906 - DNA, 122 bp, Homo sapiens
cagggtcagcaagagaagcaggcggcctgggttgggggccccgggaccacacacggaaggcgccgcgttgccttctcacccggcaccagcagccccaggcagcttaacccaggaggtcacgc

SEQ ID NO: 346907 - DNA, 122 bp, Homo sapiens
tcttttcctaagttcaagtgatcctcctgcttcaggctcccaaagtgctgagattacaggcgtgagcaactgtgcccagcccactgtaattttatggggaccaaacttctggacatgtggag

SEQ ID NO: 346908 - DNA, 122 bp, Homo sapiens
tgacggccttttcccccttggcgtacaagtattgagtcccgcgccctgggagggagacggcgctcagcaaatttagatgaatgcaacgcttcaacgtgggctctcgacctctggtcccccat

SEQ ID NO: 346909 - DNA, 122 bp, Homo sapiens
agatgatgcagcatttacctcctgtgatgatggctgttgccccacaaggacagggattctcgtcagtttcagttcccagatgttccccagcatggtaaatgtctggcacagagcatacacag

SEQ ID NO: 346910 - DNA, 122 bp, Homo sapiens
acctcccggcccagcagcggcaggatgagccccttaagctggctcaggctctggttgatgcgcgcgcgccggcgcttctccagcagcggcttcaggctctgcggacgggcggcgcggtggtt

SEQ ID NO: 346911 - DNA, 122 bp, Homo sapiens
ctggttctcaggcaccctgagccccttgaagatcgaggacccagctgggagctcaggtgtcggggccgcaccatagacgcggccgctgatgcagcacttgttgaaggtcaagatgttctgcg

SEQ ID NO: 346912 - DNA, 122 bp, Homo sapiens
tctgagtcactgggtgggcgcgtcggaaagaccagggcgcctcagtctggagctcgcagtcgtatggagagggcaggaccagccggggaggagggcggcgcgcgcgagggtcgccttcttcc

SEQ ID NO: 346913 - DNA, 122 bp, Homo sapiens
atgacaccatgaaactagagcattctgaaggatgctgacaagaggaaaatggaatgaaagcgtccatatgtacctgactcatgcatgagtcatgttcagtattcaccagtagagggaggacc

SEQ ID NO: 346914 - DNA, 122 bp, Homo sapiens
tatttggggatccctcagtgacaacatagtacctctgtgagcgtgccttttctatctctccgaagagggcattagcatcctgtcttatgagtcagtatgcactttagtatggttagtgaccc

SEQ ID NO: 346915 - DNA, 122 bp, Homo sapiens
aaccggggctgtgcctggtgcttgcaggccagcgcaagttccgggtggacatgggctccgcggacccgggcggacccggcactcggagcagccagccggccccaccggccccgggcagtgag

SEQ ID NO: 346916 - DNA, 122 bp, Homo sapiens
tagagatcattaaagagccagtttgaagtttagaatgaagtctgggtgaaaaatcaaatgcgattagtgggaagtctcttagaggttaacctatactttttatcaaaacataggaatttatt

SEQ ID NO: 346917 - DNA, 122 bp, Homo sapiens
aacgtgcgcccccaagtccccaccaggcaacttccgcagggcgcagtgatgaaccgagggcgccctctgctgctgtcccagaactcccactccagtgagcagctcggctcccggaggcgctg

SEQ ID NO: 346918 - DNA, 122 bp, Homo sapiens
ctgacgtgtagcgggagcttcagaaagcgtggccgaatctgcagctcttaacaaatggctcgttcccaaaccttagcctcaactccttctgagcgataggggcatgctaccagcacgggggg

SEQ ID NO: 346919 - DNA, 122 bp, Homo sapiens
acactagacggcacgtgctctccacgctctttctccagcgccccttgctcacccgccccccgttggagtggcccatcctctccgcttagacacctgcagtcactgtcactagctgaactgcg

SEQ ID NO: 346920 - DNA, 122 bp, Homo sapiens
tccctccacccctttccttttaatacaccagtgacctaatctcttctgcatagaatgtggcgattcttgtaggtctctttgcctttcccatgtagctgttgtttttaacaatgcatgccaga

SEQ ID NO: 346921 - DNA, 122 bp, Homo sapiens
atctacgccgggagtgttactctcaggacactcactatggaaataagagctgaaacagaacggtgttctcattgcttacatactaggccacttgatggcatggaacgggaagtcaactcagt

SEQ ID NO: 346922 - DNA, 122 bp, Homo sapiens
cggctgtgcggggatacggacaaaagccgctttgtggaagactgtgggaccgtccaacggcgccaccgtgtggcggcgccgggcagcggcagacagcgcatcccggttctcacacacacctg

SEQ ID NO: 346923 - DNA, 122 bp, Homo sapiens
tgaacaaggctggaaggacggggctctgcccctgccgaagagggctgtgaccatcagcagcgcctccccacgcacttccctgtatgggttacaaagcaggtgcacatccacagggctctttt

SEQ ID NO: 346924 - DNA, 122 bp, Homo sapiens
gtcaaattccatacacttttataaccgtagtcgatttttctttcgtgtgaatatggttttcgtgtcattagtttgcgatttgatttgcttacgtatccagcctggaaaatcttcatcacagg

SEQ ID NO: 346925 - DNA, 122 bp, Homo sapiens
gcgtatcaaacaaacggactgaagaaggtctccccaggactcgggtaaaagggcagccctcggtcctctcctccccgctgcccataaccgacccacagccgggaggcggcgtattcccaggc

SEQ ID NO: 346926 - DNA, 122 bp, Homo sapiens
gtcaggctccagagctgggggtgcccggactagtacatcatctatactgtagtgtctcatcgcaaacttacagtatatgatgatatcccagccagggccccactgggggcacaggaagcatg

SEQ ID NO: 346927 - DNA, 122 bp, Homo sapiens
gggggaggaggggagtctcggacagtggcctggagtgccccagggcccttgcagtggttccgggggtgccctgggcatccccacaccgccccccacacacagcccgaattcccctccacgaa

SEQ ID NO: 346928 - DNA, 122 bp, Homo sapiens
ggtggctgacctgtggtgagaggcgccgggtcctcaagaagaagccgaggaggcagcccacgatgacagacagcacagacaggatgaggagtccattccgcctgcacacgtccctcccccgt

SEQ ID NO: 346929 - DNA, 122 bp, Homo sapiens
cacagggtaaagacaaagagaaagacagtaaccctatatactgtaagcatcagtcaactacgccatgccattcagagcatctagcacctgtacaactctggacccagccctaggaccacaga

SEQ ID NO: 346930 - DNA, 122 bp, Homo sapiens
tgatttattttaggtttgtgtactgcccaaattgcatggcttgacatcatttcttaatgtcgtttttattttaagtcagagcaccataacatggtgtgggaagtgaagacaaatcagatgcc

SEQ ID NO: 346931 - DNA, 122 bp, Homo sapiens
cccttctcctgagagctcccaggactgcaggcaacttgctgaagaacttgggtaatttcccggaggccggctcacctgtttccagcccatcagtgatcttgaaacttacaaatactcagact

SEQ ID NO: 346932 - DNA, 122 bp, Homo sapiens
tggcgacttatgtccagatgggattcggaaaaagtcaaccaccatccgattcacctgcagcgagagccaagtggtaagggactgttcctgcaccttctgctgttgcagctttgggaattgag

SEQ ID NO: 346933 - DNA, 122 bp, Homo sapiens
aacgtccaggcctctacccgaacccagtcttacctacggtggcggagtgaccagaagaagcgggccgaagtaaaaggcggggctcaagatggccgccggggcctcgcctcagccccgcccat

SEQ ID NO: 346934 - DNA, 122 bp, Homo sapiens
cacacttgtaatcccagcactgtgggaggccatggcgggcagatcacgaggtcaggaattcgagaccagcctggccaacacagtgaaaccccatctctactacaaatacgaaaattagctgg

SEQ ID NO: 346935 - DNA, 122 bp, Homo sapiens
cccctgcaggttctggatgccgaaggccaatcgaaagacttagatcccctggaaggcgggcgccttggtttaggggggtccaatcggtttcaaggggttgcagcggggcggggagatgggcg

SEQ ID NO: 346936 - DNA, 122 bp, Homo sapiens
ttctctcttcttcagtgtctctggatctggttgcaagctcagtgccagtggcctctagcccgctgccgaggcgccaccttcagtactgcggccaggagagtggcgctcccctcttataccgt

SEQ ID NO: 346937 - DNA, 122 bp, Homo sapiens
ttgttttgggaaactgaatctcctaacgcgatggactcgctctttatctccagcattgcccgctgccttggtgtctgctttgtttattacacagtgatgctaactttcttttatttagtgtt

SEQ ID NO: 346938 - DNA, 122 bp, Homo sapiens
gtccctgacgtctaccaggtgaggtgtgggcttgtcaggtgggcctggccctctgcccgtcgtgggcccctccccgcccggcgacgccagcctcccaccctcctgcttgtggccctgctact

SEQ ID NO: 346939 - DNA, 122 bp, Homo sapiens
tgcaggagaacacaccaggagctcggggcctggcattcccctgggcatgggtgtcgagggcggagacttccgggactcccacctccttgcgcgggtgagattcgagagatgggggacaggcc

SEQ ID NO: 346940 - DNA, 122 bp, Homo sapiens
aaacggggtgcagcctcctctcctggaagtcaggaaaggggtctctccaccaaccaggggcgggaggcagagcctgcgctgccggatttagcctggaagttaaaatcgctgaagcagtttat

SEQ ID NO: 346941 - DNA, 122 bp, Homo sapiens
gagacccctcttctcccaaagctcaccggggccccgcccctgactccgcccaccagagcccggtcctccagtcccgccccatcccgggccccacccaccagccgggctccgcctacccggaa

SEQ ID NO: 346942 - DNA, 122 bp, Homo sapiens
cctctgccccactgctgccacccccacccacctcagcactgtcctccatagcctccactacggcagccagcagtgcccacgccaagacaggcagcaaggacagcagcacacagactgacaag

SEQ ID NO: 346943 - DNA, 122 bp, Homo sapiens
acaagaatctaagcaaagggggagccacgcagagttaagggccagtgaagtcatttccttcggacacttctagggggccacttggggctgatggaagctcgggtttactcacacgctcacag

SEQ ID NO: 346944 - DNA, 122 bp, Homo sapiens
ccgaagcgtcgaggtgtgggcggggcgccgctgccgtgaagtgaaaggtgacggaggctccgcgagtcgcggatacacctgcctgggaaggaggcagaacagcctcccgcgcagcctgaaaa

SEQ ID NO: 346945 - DNA, 122 bp, Homo sapiens
atggcgaaggacggcgagggacggcgaaggactgaggccacacgacaaggaagctacgctcgtttcgcgccggcggaaatacagacgagagcgcgagctgcggcctagagcggtaggaaccg

SEQ ID NO: 346946 - DNA, 122 bp, Homo sapiens
cattgccccatcccctccgcctgcaaagcctgcgctacttgctgacccaccgccagtcctcgccgcctgtcgcgtgctcattaccctctagtttgccatgagtacctgcgggccctcaaagg

SEQ ID NO: 346947 - DNA, 122 bp, Homo sapiens
gaggggctgggccgacgaaggctcagcgctgaggaccctctgcagcgcccccgtccaccccgccccagtcccacagcaccccgggcgacgtggaccagccagcgaggcaccttggggctcag

SEQ ID NO: 346948 - DNA, 122 bp, Homo sapiens
ttctaagggtagaatttggtctcaccaacaagtgaggatatagccttatctcatggaggacgagctccgtatttactcaggagcagtcagggtacattacataaaacaatggaggatgcctc

SEQ ID NO: 346949 - DNA, 122 bp, Homo sapiens
taaagtatctgaatttcaaaggcacgtgcagaggtacaagggccgcgcctgtgagaacaccgagcagcactgcatgatggctggaggctggggagccactttccttccctcacgcatccgcc

SEQ ID NO: 346950 - DNA, 122 bp, Homo sapiens
tggataaaccatctgatatggcatattactcatcatcttcatatatataataatagaaaacgtgtcaattaaaaaaatatttgattttcttcagtcctcattagagaaccaagttttctctc

SEQ ID NO: 346951 - DNA, 122 bp, Homo sapiens
ctaagcccctcactgcccggggcgggcggggccggccagctgctccgagtgcggggccgccgatcccacgcccacccggaactcgcgctggcccacaagcaccgcgcgcagccccggttccg

SEQ ID NO: 346952 - DNA, 122 bp, Homo sapiens
acataccaaatactctgccaagcactgacaggtagtgagtatgttgcaatggagagacaccgtgttttttgtttttgtttttgttttttgagatggagtctcacactgtcacccaggctgaa

SEQ ID NO: 346953 - DNA, 122 bp, Homo sapiens
tgctgcggcgtctgcggggtccgtgggttcaaggacatgaagacttgggagactcagaagcggagaatgaagcaaaaggtaattgtgcacctcaaaagaagccaatttgggtggatgaagaa

SEQ ID NO: 346954 - DNA, 122 bp, Homo sapiens
cggacgcaaaagagtacacagcgtgtgataccgttccatgtacagtcatacgttgcttaacgacgggctgtgttctgagaaatgtgtccttaggctattttgtcatcgagtggccgtcatag

SEQ ID NO: 346955 - DNA, 122 bp, Homo sapiens
gcttcaggggtggaggaaaaaaatctgcaacttattgttatcctatattcacacaatatacgctgtgtgcctactacaaactggaaaccgttctcagctgtaagatccatcaatgcggagtt

SEQ ID NO: 346956 - DNA, 122 bp, Homo sapiens
tccgcacggagtctgcgccgagcactggacccttcctcatctgtgacctccttagagcttcgtcctctgggtctagagagcaggcatcattaatctgagcagttggggaaactgaggccaga

SEQ ID NO: 346957 - DNA, 122 bp, Homo sapiens
ttgtccggaggccggcccgggtctctgcaggcgggcttcgcccggccaagtcaggcggcgcggggcgctctgcagaccccgggtactacttgttgcatttctgtataaaactgtttctccgg

SEQ ID NO: 346958 - DNA, 122 bp, Homo sapiens
tgatgcgcctgaagccatccgcgccatcttggttgaggacgagtgccaggcctggaggggcggggccgggcgctgcccggtagggcttgtggctggaaccccaggctaggcctttggggaaa

SEQ ID NO: 346959 - DNA, 122 bp, Homo sapiens
gatctctcggcggcgccgggttttctcggggctgccgtccaggatgtgtgtaagcagctccgggttgaagctggcggaatcccgctccctgcgcaggtccgggttcatggcgacgaccagct

SEQ ID NO: 346960 - DNA, 122 bp, Homo sapiens
gcaggctggagccttcgggcatggcgggctttggggggcattcgctgggggaggagaccccgtttgacccctgacctccgggccctgctgacgtcaggaacttctgacccccgggcccgagt

SEQ ID NO: 346961 - DNA, 122 bp, Homo sapiens
accgacattagcgtggcattgctgggatgcggtgtctcctggtgaagggaggagagtccgcggtggacagagcacccagcccaggagagccttggacaccgctgggaggctcagcctgaggg

SEQ ID NO: 346962 - DNA, 122 bp, Homo sapiens
ccattctcagtcaaatcggcctgtttaattttttgcaagatggttatcactgtctgaaatcgtctagggtcaggcatagtcgttcacgcctgtaatcccagcactttgggaggctgaggtgg

SEQ ID NO: 346963 - DNA, 122 bp, Homo sapiens
cctccggtccagggacctcaaatacgcggaccagaagtctcctctcaaggccgcgtctaccgatggccgccccgttatcctggctctagaaaatcttcctgactgaggcaacattgaaataa

SEQ ID NO: 346964 - DNA, 122 bp, Homo sapiens
cgccagcccggcccctcgcccgcggcccgcccgggctgtgacacatcagcaccgccctcgcggctggggccccgtattgtcctccgccgcctcccaccgcatgcccagcctcgcgtctactc

SEQ ID NO: 346965 - DNA, 122 bp, Homo sapiens
acacttcattaggacagattcacttcgccctaaagtcctccagagtgttttctgtgcacacgtgagtgaacactgaatgttcagtcatttaaatttaactttggtcttttaggggtcccagg

SEQ ID NO: 346966 - DNA, 122 bp, Homo sapiens
gaagacttttaatacttcaatgacgatgatactaataataatatgcaaagtttgttccaacgcatttagaggtgatcgcgacaagacatgaagccaatccctccctttctggggcaggggag

SEQ ID NO: 346967 - DNA, 122 bp, Homo sapiens
ggaggtgacccagtgtgaggccgaagctctttcccagagccccacaggccagtggagggtcgtgtttgtgctctgggcatcaccgtcttgggtctcggtcccctgcgactgcagctgctaca

SEQ ID NO: 346968 - DNA, 122 bp, Homo sapiens
tattgacaataccttaatgacatgtttctctcaacctgtccaaccgagatgcaaagtgaacggctaaagggagagagggaaccaatcccgttccaagggggcgggccctcccttgtcccctc

SEQ ID NO: 346969 - DNA, 122 bp, Homo sapiens
aagagattccgttgtgcaaacacctggtctatggtgcttcgtcctcgcagatgcggcaagcgggtccagccaagaataaatgcgaggtgggcagcagcggaatcacttctcactggggtggg

SEQ ID NO: 346970 - DNA, 122 bp, Homo sapiens
ggggcgggactcgaacctgcgatgctcaggtccgggtctcaggcttggggctgtaccgcccgcccgccaggggcccgcgccggccgctcgcttcgccagccactcttagtccgccagcgcgt

SEQ ID NO: 346971 - DNA, 122 bp, Homo sapiens
gcttaaaatagcccaggtctggaggccttcccctggacaagaagacctcccctctaatggcggaaagtgagagatgcatgggggacacagggtgttcaaatggccctgaacccatttcagag

SEQ ID NO: 346972 - DNA, 122 bp, Homo sapiens
tgtcgtgcaacagtgtgacagcgtgaggctgaccaaacgcaggattgtgggcaaacgagacgcataaagcctccaaagggagcagcagtcgtgagtgtgagaacgcgtccgccttccacagg

SEQ ID NO: 346973 - DNA, 122 bp, Homo sapiens
cctggcgttggggcctggctgagcgcaggattctgcagagttgggtccgggagcgccctgcgccgtctttgtccttcgggagcatgtttcgttcccgggaggtcggaaccctgagctttcct

SEQ ID NO: 346974 - DNA, 122 bp, Homo sapiens
catgagaggcagatccacggtactggatggaaggcccagtgtggccggcgtggcgggacgcggagcctggagcccctgcctggggtgttgccggccctacgagcgatggccactcgggtccc

SEQ ID NO: 346975 - DNA, 122 bp, Homo sapiens
ttctgttcagaaaagacagtctgcatgtatctcctaactggattttgctgtgaaaatacgcggccctggtggggacaacacatgcttccctcctcctttctgagtcctgctttcgcgtgcgg

SEQ ID NO: 346976 - DNA, 122 bp, Homo sapiens
gtacctgctctgtgcaaggcaacatattatgcatgataaagaataagtcctggccaggcacgggggctcatgcctataatcccagcaccttgggaggccacagcaggtgggttgcttgagcc

SEQ ID NO: 346977 - DNA, 122 bp, Homo sapiens
agctaaatgtgccacttttacagtgccgcttcctctgtcctggggcacacattctgagtccgggtgggaggcagcgggtcggcctaagggcgcccctcctcgcatcttcaccttcaatggcc

SEQ ID NO: 346978 - DNA, 122 bp, Homo sapiens
cttggcagggtcagtatctgctaaggcaaccagtgcatgtggaagggacaggcttggagtcgggggaacctgtgccgcctttgctctgtcccatactagctgggagaccttgaaccagccac

SEQ ID NO: 346979 - DNA, 122 bp, Homo sapiens
cctacagcaaacgggtgtctttcgactctgcttgtagaaaccatttgcacatattctgtacgagcctcgctgtctccctagagccagggccctgcggatttggagaagggagcggggcagga

SEQ ID NO: 346980 - DNA, 122 bp, Homo sapiens
ctgtcctcagagaacgtacatctcctgctgtctcttaagaagtttctttgggtacaagaccgagagctcattgagggcaggaattatttcttttcatcttgtgtagcacttcacaaatatcc

SEQ ID NO: 346981 - DNA, 122 bp, Homo sapiens
gtccaggaacgtttccagtctctctcctccccagactggaggaaaatatgtacatcaatgcgcaccagtgatcagaaaacccccaggaacccaagcaagtgggaactgagggggccggctcc

SEQ ID NO: 346982 - DNA, 122 bp, Homo sapiens
gattggggtgtggggatctgtgaaggcgcagtatgagcagtaaggacttgtcaaccagcccgacgcaacttcaccgagggcgaggaaaggagctctgaggaaggggttactcccgggcagga

SEQ ID NO: 346983 - DNA, 122 bp, Homo sapiens
cgcctgctgcggaggacagggctccctcttagtgattatgttcgctgtttgtgtagtctgcggcatgtgcagtagaaggctgatcggtttgctttaattaagcttcaaaagagaacccaagc

SEQ ID NO: 346984 - DNA, 122 bp, Homo sapiens
gctggcttcacctagtggatcctgcacccgggttgcaggtggagctccctgccagtcctgcgccgtgcgctcgcattcctcagcccttgggtggtcgatgggactgggcaccgtggagcagg

SEQ ID NO: 346985 - DNA, 122 bp, Homo sapiens
cggctaaacctttgccgcaggatcccggagccggcgtccttcaaggagcacagagggccccgtagcacgccccttgcccagcgccaccgacccttaagcagcgtcaaggaaggagtcccgat

SEQ ID NO: 346986 - DNA, 122 bp, Homo sapiens
ggttacaattttgttttaaatgtgtttaaaagataacatttaagggttttgggaaaataacgttttgtttagaattcacaacacttgtcattttaggctgtaatttttctgagtatgtttat

SEQ ID NO: 346987 - DNA, 122 bp, Homo sapiens
cgtggccgacgggcagaaagcaggagccttacacacggaagggagccctcgtgcagccaccgtggagatggaaaatggcatgttaagaatatcttttgccaggaaatttggtagcttaggca

SEQ ID NO: 346988 - DNA, 122 bp, Homo sapiens
cacaaaaagttatttttaaaggcagttgatttgttgggcaggaatcctaagttgcaaactcgttctgattcgtcagttaacgaggctactcccagctgaaagatgctgaaggctggtggaca

SEQ ID NO: 346989 - DNA, 122 bp, Homo sapiens
ctgaagatcacatggagcagaaaacacacacacacacacacacacacacacacacacacacggacacacactgccacactgccactgatcagattcgacatgaacaggaaaggcactactat

SEQ ID NO: 346990 - DNA, 122 bp, Homo sapiens
agcagtattcccaccttaagattcccagcatccctgtgctgtcccggctctcattcatgccgaagggcccaacccattggctgtgttctgtttgaagatttggggggcgccttctctttctt

SEQ ID NO: 346991 - DNA, 122 bp, Homo sapiens
actttaggccactgttggatccaagttccggttaggcacccaagcaagctattagaactacgtccagctgcacaaggtaacccatgaaatccagaagctctagaaagcgcactcatgccagt

SEQ ID NO: 346992 - DNA, 122 bp, Homo sapiens
ttcatcccctccttgatgttttggcttcccctcagctcaacctgtcccaaattaaaccatcgattctaccacccaacccaaatcaggactgaaatttaactcctttagtttaatttcctatc

SEQ ID NO: 346993 - DNA, 122 bp, Homo sapiens
agcagattccaattcaaccccgacccgcaaggcctggccacccccatggccccaaactcacgcctttcggaatcagatacccgccaataaccaggtcttcctgggtgacccggccgttccct

SEQ ID NO: 346994 - DNA, 122 bp, Homo sapiens
gtcaagggggaagacggttgggaagagaggaagccactgggtgcaggggtcccggggcggcgacagacctcggcccccatccaggagccctcaccacgcaaacgagcagaaggcagcgccaa

SEQ ID NO: 346995 - DNA, 122 bp, Homo sapiens
acctcagttgatccatccgcctcagcctcccaaagtgctgggattacaggcgtgagccaccgtgccctgccctaataatgtttagtgtggcaggtttggaacatcatgtattctttcttttt

SEQ ID NO: 346996 - DNA, 122 bp, Homo sapiens
cgcctgtcgtccgcccgcgctcccttcggccggaggtcggcggccccgggcagagcgcgccgtctgccccagtatcgggaggccagttccgcgctgggcccacgccctcctcgcccgccgct

SEQ ID NO: 346997 - DNA, 122 bp, Homo sapiens
agcaaacattatatgcttagcctttgaaatttcatttgtaggctatctgccaaagaacaccgaagtcactatctgccaaagaacaccaaagttgaggttgggaaggcagcagaaggtgatta

SEQ ID NO: 346998 - DNA, 122 bp, Homo sapiens
gtgagtgttacaacttttaaaggcagtacgtctggagttgttccttccttccagtgggttcgtggtctcgctggactttggagtgaagctgcagaccttcgcagtgagtgttacagttcata

SEQ ID NO: 346999 - DNA, 122 bp, Homo sapiens
aatgttatactattccaggacatgagtaaagctataggaaggagagcttaataatgatctcgatgccttccttagggccccactgtttcatcgttcctgtccgggatgaaaacggaagcttg

SEQ ID NO: 347000 - DNA, 122 bp, Homo sapiens
cgcttgatacagctgaggagatgacatcgaggttgaaatggattggtaatgcacgccatacgcatgtatttgaggaccctgtgaagtattgcacgagagtgttaggtacgtcagtacttgct

SEQ ID NO: 347001 - DNA, 122 bp, Homo sapiens
ttcacagggctcgttctcactgcttatgttcttcgggattctgggagccaccactctatccgtctccattctgctttgggcgacccagcgccgaaaagccaagacttcatgaactacatagg

SEQ ID NO: 347002 - DNA, 122 bp, Homo sapiens
ctgcccgggagccgctgccgcacgggcctggggccagtggccaaaccagcccaaccagcgcgcagagccccggagccccagagccttggggactcttcggagcgtccaccgccctcaaggtt

SEQ ID NO: 347003 - DNA, 122 bp, Homo sapiens
atcttgaaaacgcaaaccacttccggcgtgagcgggctggggtcccgcccccctccccaccggaagtggagtcccgatcgtagcaagccaccatcttagtcttaaagggagagtgcaccatt

SEQ ID NO: 347004 - DNA, 122 bp, Homo sapiens
gctcctcccaggaaagcagacaggccatttcaataccagcccagagacacgcagagaagccgccccctcgccgcccacagcctcccattaactcttccagtattctttctaagaacagagaa

SEQ ID NO: 347005 - DNA, 122 bp, Homo sapiens
cgcccgcggggacacatttctgtcggagtgagcagctacggtttgggatatgaaatcgcccggggagcggtggaattcaaagaatctgcgtttctctctgccgcgtcctgcagaggagagag

SEQ ID NO: 347006 - DNA, 122 bp, Homo sapiens
acccgcctggtagtaagttccctgccaccatttgggatagataaacttagccattcacatcggtccccttaccctgtctcgacccagccagtattcaatcagaacacacactgtttgccaca

SEQ ID NO: 347007 - DNA, 122 bp, Homo sapiens
agtgagaacagcaggagaagccctctgggcagtcactgctctccagggtgcctttcgggtcgggaaccgcagaggtcggagaaaagattttaggcccttccagaggagctccgagcagaatc

SEQ ID NO: 347008 - DNA, 122 bp, Homo sapiens
ccaggaagaagagtgagacagcacaggtaaagccccaaacacacagaagttgccagttcccgcaggactcaggccttgtgacccagcacccaccttcagcccccagccctgcagaagtggaa

SEQ ID NO: 347009 - DNA, 122 bp, Homo sapiens
atttggcttttagctaccaaggtgcattcactacagttttcctcaccacgctttgcatgtcgttctgggaatatggttcctttttgcctgccctgcttcaggccccttactgtattcggggg

SEQ ID NO: 347010 - DNA, 122 bp, Homo sapiens
agtctttttccaaggttctgttagccatactctcaggaagctgtgaagtagggagatctacgtgggggtctctttgtactgagactcatcagcatctcggaaagcagaagggcctgaattat

SEQ ID NO: 347011 - DNA, 122 bp, Homo sapiens
ggctgccaatgtacacggccaggtttatctaagggctggagagctcctctcttaaattcccggcgaggtggggatgatgtggcacaggaagggaccgggagcgctccccggggagcccaggc

SEQ ID NO: 347012 - DNA, 122 bp, Homo sapiens
ggtgcatattgaaaagaaagggatcattagcacgcgaccctcgcctaggagtatataaaccgcagcacgactttcggatcacaaaggcagagaaaagaacacattgaaggcttttgctcact

SEQ ID NO: 347013 - DNA, 122 bp, Homo sapiens
ttaaatttcttcatttattcagtaaatatttgcttcatatttactccattccaagccccacgagaagaaattatggctttgttaaataaagaaggcagcttgcttcttatactagctaagtt

SEQ ID NO: 347014 - DNA, 122 bp, Homo sapiens
tgtgttgcaggaggtgagacctaccaggactcagacacgaggccaacttagggggcaggacggagagagctgaggggtgtggagcgggcagggcagggcaggcaggaccccaggcaggtttt

SEQ ID NO: 347015 - DNA, 122 bp, Homo sapiens
gaatactcccattgagacagaatcccactgtaaaattaatttagttgttagaattgaacacgtagacctgctagggcatgcaacactggagctgggaatgctggccttgggggtagggacta

SEQ ID NO: 347016 - DNA, 122 bp, Homo sapiens
caggacaggtcggccctaagcagacaatgcagggtgcgtctccttactgggtgagaagagcgagggcaggggggctgggtccttgccctgactctgtctcaaacctgctgtgtgaccttaga

SEQ ID NO: 347017 - DNA, 122 bp, Homo sapiens
ttgaaaataacacccaagcagactaaaataatggagcattgtttttacaagacaactcatcgccttaaaattccccaagtatggcacaaaaagaatggggtccactgaccccattctaaaaa

SEQ ID NO: 347018 - DNA, 122 bp, Homo sapiens
aagccaaagcgaacaggattttgtgctgcgcgtctgtggccgggatgagtacctggtgggcgaaacgcccatcaaaaacttccagtgggtgaggcactgcctcaagaacggagaagagattc

SEQ ID NO: 347019 - DNA, 122 bp, Homo sapiens
atgccacgtgtaagttagcaatcatcggctctattaaaacggttccatatcttccagccccgcactcatgattcacagtaatgcctagtgttagcactcactaatcgacaatttgatgggga

SEQ ID NO: 347020 - DNA, 122 bp, Homo sapiens
gcggaggcggcagagtaaaagagcaagcttttgtgagataatcgaagaacttttctcccccgtttgtttgttggagtggtgccaggtactggttttggagaacttgtctacaaccagggatt

SEQ ID NO: 347021 - DNA, 122 bp, Homo sapiens
gactcgtgggtaacttgcttttgggagccagcggtatggcgtcgggctgcaagattggcccgtccatcctcaacagcgacctggccaatttaggggccgagtgcctccggatgctagactct

SEQ ID NO: 347022 - DNA, 122 bp, Homo sapiens
tagtggctgtaagccaagtatgagcttacacaaacaggttatataacaagtggagtggtgcgcctgcgttccaaactcgctgagtcacgctggcctgcatatctgcctcggcctattcttga

SEQ ID NO: 347023 - DNA, 122 bp, Homo sapiens
cctgccggatggatcgctctttgagagcgtacactcccgcgtgcgcgacaccaggcggcccgtaggttccaggtgccgagcacactacctcctcagtttacctaagtgccctaccagtatca

SEQ ID NO: 347024 - DNA, 122 bp, Homo sapiens
tcagcagcgtgtttgtcaagggcacttactcaggcccaaggccgttggaacgctgcccttcgaccctgtccgcccactcggattcccagtagctgagcgcaggacgtgacctcgagtcgaag

SEQ ID NO: 347025 - DNA, 122 bp, Homo sapiens
tttggggaaaccgagtcatggggcatggttcgaacatacagcgctgggagtgcagtcagacgtcagatcatgacaggccttgtacatcagtgttgtttccatcttacactgaggcgatgggc

SEQ ID NO: 347026 - DNA, 122 bp, Homo sapiens
ttaccttttctttttaagccgtgaaaatttgcgattcagggcaaatgattctccgacagacgctgggctccacatcccacccctcccagcccgcgccccctccggtcctcgcgctccccggc

SEQ ID NO: 347027 - DNA, 122 bp, Homo sapiens
catgccaccaggtgccttcgctggaacgtggccgccagccgtgagtggccgggcccatcccgtccaaagacaaatgtctggagtgcttccgctcatctttaaaaggcggccaggcccgttta

SEQ ID NO: 347028 - DNA, 122 bp, Homo sapiens
gttgagcgcgtaatggtgcgaaaatcaaaaggttgggaagaaacaagaaactcagataaacgcttccgtcggctgtgacaggttctgaggcgcccagatctactggacatagcgcggctcag

SEQ ID NO: 347029 - DNA, 122 bp, Homo sapiens
agaatatcctggcccactggctttatgaacctgtccctggacagtattgttagccttgaccggggtctgacaagcaagcagctttttcacgttgttatggtgtcttctcacaactgtcgcag

SEQ ID NO: 347030 - DNA, 122 bp, Homo sapiens
ccacctcctgcgcccccgccccctcccgccgtcctccagtcccctcagctgccgcgcgcgcgtcaccgccgcccgcaccgccgctgccgccgctactgagcatgcccagaggccgtccaacg

SEQ ID NO: 347031 - DNA, 122 bp, Homo sapiens
ccccgatccatccagaatcctaggcattcccatcccgatactggccaaatccagccaccccgcagcctgggtgcctggcaccatctgcccagcctgccaaatttcaccccatcttcaagagt

SEQ ID NO: 347032 - DNA, 122 bp, Homo sapiens
cccgtcattggcatcatcctctctctcttcgtcatgggtggtgtctattttgtgtgccagcgcgtggtgtgccagcgctatgcgggggccaacgggcccttcccgcacgagtatgtcagcgg

SEQ ID NO: 347033 - DNA, 122 bp, Homo sapiens
gctgggagaaattgtgtctgtctgaagtatctcacggcctgggaaaatcaaagcgaatcacgttgacgcaggtacttggtacgccctgaatcaccgcccctggttacccacaggagcgtcta

SEQ ID NO: 347034 - DNA, 122 bp, Homo sapiens
aactcccctggcctggcagcttcacatctgcaccccattgcacactggtcctcgggcacccggacaggactttgccccatgcacacagccagtagatgctcagaaacacggggctgcagcag

SEQ ID NO: 347035 - DNA, 122 bp, Homo sapiens
ttgtcacattttatacttttctacagtttcacactagtataatttttttatgtatagaaacgttggaggtgttgggaacagcactgtcacatctttcaggtttgcagggttcctcttcagca

SEQ ID NO: 347036 - DNA, 122 bp, Homo sapiens
ccttcaggggtctcagactatttagggtgccccagcttaccagcccattcaggcatctcccggacaagtgatgcaacaacttgggcaggagggcagggaaaattcaaaattcaggagaggaa

SEQ ID NO: 347037 - DNA, 122 bp, Homo sapiens
cctccctccaggccctgcacagaccagctctctctttcctcccggctcctgctcactccacggtctgctcttctagttttgcaaatgtctggagggtggtgcatccactccaagaatgcaga

SEQ ID NO: 347038 - DNA, 122 bp, Homo sapiens
cccggcaggacctgggcgggggagtccatggggtcccagacccgactctggacttggcctcggcgggagggccgtggggtctgacctctggcattagctcgagccgtgggctgtgggctcca

SEQ ID NO: 347039 - DNA, 122 bp, Homo sapiens
taccacatctattagcaagtgatagagctaatcaggatgtgttgcctttgcttgctctatcgcacattccctgacaaagatatcaatgacaatggaaagggataacctggaggagggaataa

SEQ ID NO: 347040 - DNA, 122 bp, Homo sapiens
gaatcgaatgcttggttttatcagaggaggcacggaacaggtgcttgcctagagatcagacgccaagccatggccatacctgttcttcccagtggactctggcacccaccaatgtgggcgtt

SEQ ID NO: 347041 - DNA, 122 bp, Homo sapiens
acaacgccggtgggtaaatcaagcatgaattcttcatagctgctggcttcctttgcagcccgcatcctttactgcggaaggtttgcctatttgttgctctcgttttgcacttaaatgttcaa

SEQ ID NO: 347042 - DNA, 122 bp, Homo sapiens
aaaagaataatgataacatctcataacgacacagcccgttacaactcaaaaatatgttcacgctcattatctgtgtaactccccacaacagtgaggtaggtattcctctcaaccccatttga

SEQ ID NO: 347043 - DNA, 122 bp, Homo sapiens
tggcatgacgtgagctggtgtgtacctgccgtgaagtgtccctcaaaattttttcctcttcggtcttctccacacttgagaaaatgactacatgtttgttgtttctcagagatttgacctca

SEQ ID NO: 347044 - DNA, 122 bp, Homo sapiens
gcgcatgtgcacaaatacggatggaagaaatgcacagcagcaactgtttcccaattcaaacgctggggacattaccgagctgtacatgcagccgaatcccagcttcataaaaatatttgttt

SEQ ID NO: 347045 - DNA, 122 bp, Homo sapiens
gattacaggctgagccaccgcgcctggccagaggccttcttgaggtgtctggtggtccttcgctttctgcacatctgtaacagccagttctgagaaccgatcggcacgttgtgtgtgtggac

SEQ ID NO: 347046 - DNA, 122 bp, Homo sapiens
attttccctctcagctaggagagccctgtcaagataggctgctggtgttcacatctccctcgcagcgaaccccaaagccgccctgggaggagaacccggtgaccaagaggaccgactcagag

SEQ ID NO: 347047 - DNA, 122 bp, Homo sapiens
cttcccctggcagatctaggaggcatgtgaacagggggacggtttcccccaggaggaggccgaggtcctgaaaggcaggtgggggccttgagacaagaaagcgagaaggttcgagggtcatc

SEQ ID NO: 347048 - DNA, 122 bp, Homo sapiens
catttgaaagtctttctggtagcatcagttctcccttaaagccataagaaatgccgtttgcgacttatcacacatattgtggtgtagtgtcaccgaattaggagctcttgaataccggcagg

SEQ ID NO: 347049 - DNA, 122 bp, Homo sapiens
tctccctctgggtgggcgggacagggagcacctctgctggccctcaccacgctgtgtctccgcagccaaggccgccgcgatgccgcacttcctggactggttcgtgccggtctacttggtca

SEQ ID NO: 347050 - DNA, 122 bp, Homo sapiens
cactccagcaagaacatgtctaaaaaaatttaaataataaaaaattggggccagccgccccgtccgggagggaggtgggggggtcagccccccgcccggccagccgccccgtccgggaggtg

SEQ ID NO: 347051 - DNA, 122 bp, Homo sapiens
ggcggcggcggcggcgggggtggggtgcggtgggaggggccgcggctggcccagccagcccgcgcctgcaggttggtgcagtgaggagccgccgccgcccctcccgccgcgcccaggcccgg

SEQ ID NO: 347052 - DNA, 122 bp, Homo sapiens
cgtgtgtggctggtgggggtgggatttaatgggatttggcgggttctaaggtaggcgcgacgcacaggtggaggtagaggaagtgaagagtttaatatttaaaaggacctaaaaattgacta

SEQ ID NO: 347053 - DNA, 122 bp, Homo sapiens
ccccgccggccccagtcccttctactgcgagggcacggagcccgggagccaggcgtggagcgcgagagctggcaccgcgagctgggagacggcggcagcccagcggccggaccagctggagg

SEQ ID NO: 347054 - DNA, 122 bp, Homo sapiens
gccggctccctggaccccgggctcctccagagtttctggtctctgtggaagcctctcacccgatccactgagcactgagaccacggccagacgccttcccgggctccacagcggccctcacc

SEQ ID NO: 347055 - DNA, 122 bp, Homo sapiens
ttcccaaatctgccggatttcgaatttagggagctttctaaatgatgtaacttaactgcccggccccgcctggaccgtgatttcggtcgtcatccaaaactcatgtctgggttgactgtcac

SEQ ID NO: 347056 - DNA, 122 bp, Homo sapiens
tcttcctcgactgcctctccactgcctggaggtcatcaaatgcccctggaccacctcctacgtgccacacgctgtgttggccatccaaggttccatattgagcataaaacagccctctgccc

SEQ ID NO: 347057 - DNA, 122 bp, Homo sapiens
taaaaatggtctctcaacaccctggtcggtacatggggccagacatagacctcttgtccccgggcagctggtgctgaggtgggcgccctgccctggtgagtccatgtcccgtggacctgtgg

SEQ ID NO: 347058 - DNA, 122 bp, Homo sapiens
gactggatgatgcaggccgcttggcgtgcctggaggaaccgcctgcgggcctgccacattcgaacctgtgcctgcaccttcaccaccgcccactcctggcaggtatagagtcttagtgccag

SEQ ID NO: 347059 - DNA, 122 bp, Homo sapiens
ggagagccagtgtactgcgccctcgtctcgctgctctggtactttgtggtcagtgggaggcgccagccgcggtgtctgagctgcggaaaggcgacccagagactcacgtgaaggagcagggg

SEQ ID NO: 347060 - DNA, 122 bp, Homo sapiens
ccaagatggcggcggcggcagggcaaagggcggggttagacgctgtcagcctgtccagaccgttcctctgttttcgcttgttcctactaacagcgagcttccgccaatacttgttctcgttc

SEQ ID NO: 347061 - DNA, 122 bp, Homo sapiens
cacgaggccgtgctcgggggtgggattgggggatccggacctagacggtcgtgcgcggggcgggggtgggctctggccctgactcctgcgcccggtgtgggaaggtgggaggccttttctaa

SEQ ID NO: 347062 - DNA, 122 bp, Homo sapiens
tacacctgttgtttgaaagctctcagcgggacaatgctgacccaggtgagacctggggcccggctgggtacctctatctgaatgagacgcttctggacgcggccgaggtggcgagggagggt

SEQ ID NO: 347063 - DNA, 122 bp, Homo sapiens
catccaagtgacttgctttaattccctggatggggcaggtgggacccaagaccccctctgcgcagactttccctacttaggtcccttcttgctctcagttgcttgccctatggggcagggtg

SEQ ID NO: 347064 - DNA, 122 bp, Homo sapiens
gcggcggcggctgcaggtgggtcctcagcccggactctgcacctgtcacggcgtggtacacgcgggagacccggctgcgccgcgcagagcgctcagctgcagcctgggccgcgccgccgccc

SEQ ID NO: 347065 - DNA, 122 bp, Homo sapiens
tcagatggcttctataacagccctgacctgctggcagacagctaccctctgggaggtttgcgcagaggtggaagctgagctggagagaaaaggaagtagaaatgggagagatctgagaatga

SEQ ID NO: 347066 - DNA, 122 bp, Homo sapiens
gtcccggccgccattctgcagagactcctgagtccgtgaagtggatccagggcctccaaccgccccagctgatctgccaggaaaggggtccctgctgcccgggggctgcctcggctggcgcc

SEQ ID NO: 347067 - DNA, 122 bp, Homo sapiens
gtgccatggtctttcttcctgtgccctggataattggataaaaaaaattggatttagtgccgtggtagacaggaggtgcaaatggaccccaaaaaggaagagatcaagaagtcttcccagag

SEQ ID NO: 347068 - DNA, 122 bp, Homo sapiens
gcaaccacactttaaaatagccctgaagaccccacatttacgttcttgaagtggcaactccgcctaccttgcaggtaacttctttatacttccaaccgtgctttggagaatggggcttttta

SEQ ID NO: 347069 - DNA, 122 bp, Homo sapiens
cagtggctgatctctgctcaggtgtgaggggtgtggccatgtgctgggcttgagcctgcccggcccagcccctcctcacttccctggactcttcacggtgtccacaggcccttacacaatct

SEQ ID NO: 347070 - DNA, 122 bp, Homo sapiens
tgagacccgggcacggcgacggccgctctgcgtcgctcctgctctcactcccgtcccctgcgcggctctgacgctgctctgtctcccgtgtccagtctctagctctcttcctcacgcactag

SEQ ID NO: 347071 - DNA, 122 bp, Homo sapiens
cctcccaccccttccccagtgcatccacagggacctggctgcccgcaatgtgctggtgaccgaggacaacgtgatgaagatcgcagacttcgggctggcccgggacgtgcacaacctcgact

SEQ ID NO: 347072 - DNA, 122 bp, Homo sapiens
ccattctcgcctcctcgctccgccgcgggtacggcccccgccgcgcagaaccgcctcccgcgcctccgtccgcaacccgcgcccccgcctcgagcgcatacagacacccaggctggcgcgcg

SEQ ID NO: 347073 - DNA, 122 bp, Homo sapiens
ccgccgcagggggcgaagttgggaaaacttggagtgctgctcgccttacttttgctttctcgctccttccaggccgcgccgggagcccccgcttctcccgcccgccgggtccccaagcccgg

SEQ ID NO: 347074 - DNA, 122 bp, Homo sapiens
ttggaagggcccaggtttgatatttttacaaatgttttaaaggctctctagcataatccccggtggatatatctcagtgtgaatatggcgtattctctacttgtcggcaaatctatcgttat

SEQ ID NO: 347075 - DNA, 122 bp, Homo sapiens
cgggttccctgacgtgccagtcaggccttctccttttccgcagaccgtgtgtttctttaccgctctcccccgagaccttttaagggttgtttggagtgtaagtggaggaatatacgtagtgt

SEQ ID NO: 347076 - DNA, 122 bp, Homo sapiens
gtccttccctggtcctccgggttatctttgctccccaggagcagcatatttcacctttaacggaggcgtgcccgggagtcgttgggagagggaacggggtgaatccctgcagagagcctgac

SEQ ID NO: 347077 - DNA, 122 bp, Homo sapiens
tctctcggcgggcagttaaaggctgggataggctcccctagctcctagttgtggggcctgcgttagcagaggacttggcgagcgctgagtccggtctcagagaaggtaaatttgttcaaact

SEQ ID NO: 347078 - DNA, 122 bp, Homo sapiens
ttcctcaatgtgggatatggaaagaagcagttgctcctgttattttgagctagtacctgacgctatgagaaattctaaaagagcgaatcagatcatgcaacatgaataactatggaggctga

SEQ ID NO: 347079 - DNA, 122 bp, Homo sapiens
tctaatgattgttccctgagcttttcacaccaaaataatggtaactggctagtgtgtgcccgttacgctcactactcccactcgagatcattcctattaatgactctgaggcttcacctaac

SEQ ID NO: 347080 - DNA, 122 bp, Homo sapiens
cccgcggggccatgagatcatgagatgccggcgctcgccgaggagtcgatttgttgggagcgcggggacagccggccgcccgacgcggtgatctcatccgggcccgggggaggaggaggcag

SEQ ID NO: 347081 - DNA, 122 bp, Homo sapiens
gcaacggcgaaggacccccctccatccccgcctgcgtttgcttctgcaccccgtggacaccgattatcctaacctgtcatgtgtaattctggccccgaagccgcctggaaacattggcttta

SEQ ID NO: 347082 - DNA, 122 bp, Homo sapiens
ccgaccgccgggctgggccccctggatggtggccaggggcggctagagctgggccaagaccgacggcggagcgggcgccccgaggtgctttgctctcctcgaccctctcctgtctctcggtc

SEQ ID NO: 347083 - DNA, 122 bp, Homo sapiens
gtttgtttaattgataattgttctgaattatgccggctcctgccagccccctcacgctcacgaattcagtcccagggcaaattctaaaggtgaagggacgtctacacccccaacaaaaccaa

SEQ ID NO: 347084 - DNA, 122 bp, Homo sapiens
aggaagacgcaagtggcccctccgacctagtggacggcgagttgaggtacagttaatgcccgggccaaggagacaactgtcgccgccttggtgacggatgccccctccctgggcccccgccc

SEQ ID NO: 347085 - DNA, 122 bp, Homo sapiens
gggagctgggagccgggagcccagagttcggaacctagagttcggagccggctagggagccggcgttgtcgcggcgaggaggtgggcgcgctggagcaggagcggggccggaactggagccg

SEQ ID NO: 347086 - DNA, 122 bp, Homo sapiens
ccttgatggtctccatgggacataggaccaccacggcctcggccacgctagctcactggccgcaccgctgcccgccttgctgttcaccagtccctgggcatcccgcatctggttgctgagga

SEQ ID NO: 347087 - DNA, 122 bp, Homo sapiens
cagggggttctggaaggcctggccggacccgttgcacagagaattccagccagggagggccgggcgcttgtgagccgacctgctccagagcagctgtcggtgctgtccgtgggtcccgctgc

SEQ ID NO: 347088 - DNA, 122 bp, Homo sapiens
gggcacacgggcagccacgaaagcagcagcgagggtggtgcaaacacctcaaaactacaccgaatccagtagcgcctggcgcccccggcgcgcaaggtacgctttggggcggtcctgtgtga

SEQ ID NO: 347089 - DNA, 122 bp, Homo sapiens
ttgagcagacaaatctttattcctgaggctaaaatatgcaccagttccctccctgtaccgcgccactgccagcctgactgcatgcaggccctgtcccagacctggagcgctgaacttggagt

SEQ ID NO: 347090 - DNA, 122 bp, Homo sapiens
ttcacctcttccctgacaaacacgaagtgagagtcaccccctctgccaagacagaggggtcgcgcccaggcctctgctccaagcagcaatgtcaggaaggtctgggctgtggcagctgaggg

SEQ ID NO: 347091 - DNA, 122 bp, Homo sapiens
agccgtatatctctcccccctcaccaccgccccatctctctgaacccacaggagagaccgcgcagacccttgacccgaagaatacttcttattttatggtgatgaactagcctcgataatag

SEQ ID NO: 347092 - DNA, 122 bp, Homo sapiens
cacactctagtttgttaccctgctatttggcaagacccccaacattgaaaactacatcaacgacgggatctaatgggggcaggtggctaccacaccagtacttcttgtggctgaaattttat

SEQ ID NO: 347093 - DNA, 122 bp, Homo sapiens
gttgccttgcgaatttgtttccgtccgaggcagccatgcctcattgcatagccgaaggtccgccggcgtttctagatctttaacgcctgcacaattaaccaatcgtgttacgtaatgtgttc

SEQ ID NO: 347094 - DNA, 122 bp, Homo sapiens
aggggcgagagacagagccggtgactcgctgggcgctgacaggacccgcaagggttggttcgtcagtatccaccacccccttcctctcgctgatgctgctctgaatctgacactgtggattg

SEQ ID NO: 347095 - DNA, 122 bp, Homo sapiens
ggaggaagaggtggcgaaaaatcaactgccctgctggatttgtctttctcagcaccttggcgaagccttgggtttctttcttaaaggactgatttttagaactccacatttgaggtgtgtgg

SEQ ID NO: 347096 - DNA, 122 bp, Homo sapiens
gcctcagtctcccgacctgtcaaagaggacggtgggccagccatgggtgacacgcccgtgcgcctctccaatagtgcacctcgggcaagccgggcggcgggcacagcctggacggtgccggc

SEQ ID NO: 347097 - DNA, 122 bp, Homo sapiens
gcgcccacgaaacgccagctctagtggcgtccggagcgccggctccaccggctaggcggtcggcggagttctaggacgacaactactcacaagggctgggcgatcacctcccacgccacggg

SEQ ID NO: 347098 - DNA, 122 bp, Homo sapiens
gtttagaccagccagggcaacatagtaagacctcatgtctattttttttaaagggctaggcgtggggaaactatgccagtaatcccaacacattaggttcatgcctgttatcctaacacttt

SEQ ID NO: 347099 - DNA, 122 bp, Homo sapiens
agactttgtcttatccctgccacatccccggcagctagcacagagaagggagcaaatgtccggtgagagaattatgagtgtgaccctgacatgggctgtgtcttactgtctgtgccacgccg

SEQ ID NO: 347100 - DNA, 122 bp, Homo sapiens
acacagcagccagcgcctgagtttttatctagggagttagtttcggtttcttttctccaccgcgaggccttttcgatttccgcagttttctggaggtagaatataggtctgcattggtttac

SEQ ID NO: 347101 - DNA, 122 bp, Homo sapiens
ctatctatgtttttcttctcttccaccagcctaggtcttaggcctacacataagtgcccccggcattgctgagcctccatgatgacactcaagatgcctgctgcaagtcaataaaattgtta

SEQ ID NO: 347102 - DNA, 122 bp, Homo sapiens
ccgggatggagacggctaagccgcgagaagtttaccttctaccacagcgtccacagtacccggcttggcctcaggcctcgggtcccgacgtcctccccagagcacaaacctactacaggtta

SEQ ID NO: 347103 - DNA, 122 bp, Homo sapiens
tggagagttgactcaagaacaattgagcaacctccaaatcctgcttcatttctcagctgccgcctaaaggttcacattctgtttctccagtgtgttgtagggacttgaatctattgacatgc

SEQ ID NO: 347104 - DNA, 122 bp, Homo sapiens
ctgaattattaagcgtggggagggctccggagcacatgctgagcggagcggctggggctgcgcggcgtggcggagcagcgctcgctccctcgctcactcgctcgctcgcagggacacacgca

SEQ ID NO: 347105 - DNA, 122 bp, Homo sapiens
tagaatcaggcagcagtccagaccaaaaatggttcagaatgatctgccacacaacatgtgcgggttatatttatagccagagaaaaaaagtgacatacagaagacagaagtgaggtatagag

SEQ ID NO: 347106 - DNA, 122 bp, Homo sapiens
aactcccggagtgaccttggggaaacctctctctaggcctgtttcgttatctttaagaggcgacctgaagtccctttacattaactctattccaacttccagtgattcgaaacaggctttag

SEQ ID NO: 347107 - DNA, 122 bp, Homo sapiens
atagtacctccactgtcaaccactgctgatgtcattgttattccctgaggaagcttcaaacgctattaatcaatgaaattaaaggttcactgatggttgccagtgttataggtttgcattat

SEQ ID NO: 347108 - DNA, 122 bp, Homo sapiens
ctctgggcagctctgcacccgcaatcccgagtatttcccgggttgttcagggaagacaggcgggtcatcggcagaatccccactcggtgtatgcgttggaggggctgctgcccgtggggtct

SEQ ID NO: 347109 - DNA, 122 bp, Homo sapiens
ggggaagcagttccggtgaccccctcccgcccctctctcatcaaccccgccccctgggcccgccccgtcccgcccggctactcactggattcgcttcccacataacggtgacaaaatcgagc

SEQ ID NO: 347110 - DNA, 122 bp, Homo sapiens
agattgttggggtggtaaaggaagagagataatatgaagcttgctctgtccagaggcctgcgggataaggtgggaaccaaggtcagtatttccttggaaagtcagtacttttcaaacttaaa

SEQ ID NO: 347111 - DNA, 122 bp, Homo sapiens
cccctgcgcatacgaactgggatcttgctgaaggcatcacacatggtctcatccccaaagcggccacgaaggccagtttcctagaaccactttccagccgagctgacttaggggcttcctca

SEQ ID NO: 347112 - DNA, 122 bp, Homo sapiens
ttagttaccatgaagtttttcatttacttacttgcttcgtagttactttgaagagtaaaacgtagatgagatgcagtatactgttaaggttttctaataccacggggagcgtttcatttgtt

SEQ ID NO: 347113 - DNA, 122 bp, Homo sapiens
agaaaaaaacgctggtgtctttgaacacctctgccagttcttctgtgctcctaaagcctacggctttggaaagaaggctatgtttgtataggcacttgaacttcacttctgcaaatcatttt

SEQ ID NO: 347114 - DNA, 122 bp, Homo sapiens
cggtcagaacctggggcccttttgaactttgattcctcagcaattttgtcagccctggctcgggctgagaagcccctgtgaagccagagagggaaagggacctgtccagggtcacacaggaa

SEQ ID NO: 347115 - DNA, 122 bp, Homo sapiens
agggagaagccgccgcggagaggcctggggaggcggctgtggcctcgtcgccttccaaagcgaacggacaggtaaattctacctgtggttgtggtcatttatttcgtgtctttctctccttc

SEQ ID NO: 347116 - DNA, 122 bp, Homo sapiens
actcacacaaggacgccaaccccacctagatgcaaagcaggattcaaaagaacatctttgcgttttctaccggctccccatcatcgtactagggaggaagaagcgggtgagaaacaaaactt

SEQ ID NO: 347117 - DNA, 122 bp, Homo sapiens
ctgtgcatgcagggccagctggcagaagcttgtagggcctggctggctaccaggactgctcgtttaccttgccctccctgggggaggtgtgacggcagagttgcatttttatggtatgcccc

SEQ ID NO: 347118 - DNA, 122 bp, Homo sapiens
ctattatttgtgcgcctgcggcttttactgtgtttacacagtagcaaagccgggatcccccgcagatatcccctgagatttgtacttgttcttaccctaccagctcaaatgacctccaacct

SEQ ID NO: 347119 - DNA, 122 bp, Homo sapiens
atcttttcctgacagggttcaataaggctggtccaaaagaagaaaccaccactcagcttccgaaactcttcctgaccgagccctgagaggggcgataaagtgcgagtctggaggggtggagg

SEQ ID NO: 347120 - DNA, 122 bp, Homo sapiens
ggcgcggagagtgcgggggcaggggccaggggaggtaaagctgccggctggaaggagcagcgtgttcaaaggctccttgtacaggccttggagggagagaatcgagtggccaaggtagcgcc

SEQ ID NO: 347121 - DNA, 122 bp, Homo sapiens
acaatgagcccaggggttgacaaaggaacttaatctttatgaacttgggctctccgggatcgcgccgttgcactccagcctgagcaacaagagggaaactccgtctccaaaaaaaaaaaaac

SEQ ID NO: 347122 - DNA, 122 bp, Homo sapiens
taaattcattaagaaactcatcaccgagcacaccttagaaatcccaccttttgtgctcaacgtggccgggtccccggggacgccgttggcagctctccatggagcaacagtgccacccagtg

SEQ ID NO: 347123 - DNA, 122 bp, Homo sapiens
gccccagccccagatcccacacacctgtgtgcatttagggcggtgaggactctacaaagccggcaccgagacaagacaaagtcaggtggcggcgcagcagatgagggaaggtccccgggctg

SEQ ID NO: 347124 - DNA, 122 bp, Homo sapiens
cgtttgttcatgtttgtattttccacagctctgggaacaacagggcctttccttcccaggcgcacagtcaatatttgctgatttggagtaattgcctgttctaaactgggccctggccgagg

SEQ ID NO: 347125 - DNA, 122 bp, Homo sapiens
ggggcttcagggcatggatccagagggtttgaaattgtgtgtcaagtgacagggttaccacgtcttggtttttcagaattgatgcaggggaatacaaattcttttgcccagtctttcaacag

SEQ ID NO: 347126 - DNA, 122 bp, Homo sapiens
tgcaacatgcagctggtgatgccctgtggcatctgcctcctgccctcggacatgctggcccgccctccctgagtcttgcagggcccagccgctgtgcctctgtgtggcctccccaccttacc

SEQ ID NO: 347127 - DNA, 122 bp, Homo sapiens
caaaagccaggctcggtggctcacgcctgtaatcccagcattttgggaggctgaggcaggcggatcacctgaagtcaggagccagaaaagaggaagagattgatggaacgttgagggaaatg

SEQ ID NO: 347128 - DNA, 122 bp, Homo sapiens
ggcgggggcggctgtctccaagtggtttcgagccgctcgggacaggagggcaagtgtaggcgatgggggagggggctgtgtttcgaggaccctctgtgggaacccacgaaggcgcacggagc

SEQ ID NO: 347129 - DNA, 122 bp, Homo sapiens
ttccttccatgccggtaaatatgacagatccgtcccccggattggaaagagaaatcggagcggtgcatgagaagacaagaagggaatgtgtggctttggaaggctacctcccagggttatat

SEQ ID NO: 347130 - DNA, 122 bp, Homo sapiens
cttaatctctgtgctaggcttggctctgcacagggttcattttaaccttctggtgtgtaacgttacgtcaatttataaattgtgcacgcgcgcgcgcacacacacagacacacttgttcaca

SEQ ID NO: 347131 - DNA, 122 bp, Homo sapiens
atcaaatttccctgagacatatgaggcaggcaaaggatgcgtttcttggctctaaattgccggacaaccacttcttcacctgctccatcccagccgcagctgttccttttactcacagatga

SEQ ID NO: 347132 - DNA, 122 bp, Homo sapiens
ctatagatgcagttctcaaaagtctgctaaatgaaagatttttttttcagctgattaggccgcctggctgcttacagctgggttttctatttaggatcctttggaaaccctttctgccctct

SEQ ID NO: 347133 - DNA, 122 bp, Homo sapiens
acactttgagacgaatttaagagtcctttatcagccggcgaccaagagacggctaacgctcgaaattctctcggccccttggaaggggcttgattttcctttatgctttggtttaggaaggg

SEQ ID NO: 347134 - DNA, 122 bp, Homo sapiens
ccccgtctctgccggccccttagcatgagcgagggggacccagccgggtgacattgtgcccgttggcggattctcgatttcccctcttccccgtcctcgtcctcctcctcccccatgaagtg

SEQ ID NO: 347135 - DNA, 122 bp, Homo sapiens
taaagaatttttttttttttaatgcaagttagacatggagttagagggtcagataaataacgaagagaattaagttagcgatagaaagatctaaggatactagctcctgggcacctagggtg

SEQ ID NO: 347136 - DNA, 122 bp, Homo sapiens
tagacagatactcaataatcaaacagtaattgtgggatttaatgaacaaatcaatatcatcgtgattactatccttgttctaatgcagcctacagagtgggtatttaatttttaaacaaatg

SEQ ID NO: 347137 - DNA, 122 bp, Homo sapiens
accggcaccggccagccgctcctagtgcgtggccctccgagcttacgcccacccggaactcgtgctggcctgggagcatggcacgcagactcggttcccacccgtgcctctccctgcacgcc

SEQ ID NO: 347138 - DNA, 122 bp, Homo sapiens
aatggcacctcgcctggaacgatgtctgcgccgaccagtgataacaatcgaaatagcaggcgtggctgaccgtgtgccgaggctcggcgtgccgcactggccagccgtgatttcatctcagc

SEQ ID NO: 347139 - DNA, 122 bp, Homo sapiens
ggcggggcggggccggctgggggcggggctgagctggcgggggcggcaggctacaaagcccgggggcggtgccggggcgcagagtccccgcagcgccggtcgggagcgcagcgcggcgcacg

SEQ ID NO: 347140 - DNA, 122 bp, Homo sapiens
aagaagaccgagagtcaccacaaggccaagggcaagtgatttgacaggtatctgagctcccggaaacgctatcaaacccaaaggctcttttcagagcccccctaccgtttcaaaggaagagc

SEQ ID NO: 347141 - DNA, 122 bp, Homo sapiens
ggcctcttagacattctccttggtcctcgttcagctgcccactgtagtatccacagtgcccgagttctcgctggttttggcaattaaacctccttcctactggtttagactacacttacaac

SEQ ID NO: 347142 - DNA, 122 bp, Homo sapiens
ttttgaagattctacatgtttggattgccaccaaaacaaaaagtgccaaaatagcactgtcgtacacagctttgttacctaagagactgaaatgtagctcaagtgtccagcttgtttcttta

SEQ ID NO: 347143 - DNA, 122 bp, Homo sapiens
tggtccgtcagctccacatggagcaaaggcacagccagccacgcctatcacagcgtgtcacggatggtttcatcggcgcgtttaactctctcacatacatgatgtcctttcatcatgagatt

SEQ ID NO: 347144 - DNA, 122 bp, Homo sapiens
cttagaagtgatttaggtaataaacaaatgtgttttgtgatacaagaaccacggagatgacgctgaaatttctaacttcaaaaagatgcactcctaagagaaaacaggcacgaaattcccat

SEQ ID NO: 347145 - DNA, 122 bp, Homo sapiens
gagcaaacactccgggccgcccgccccgccaccagctggctccgaccggcgcaccgctggcgatcccccaggcaattcggcgtcatgagaaccggcaccccgagactcggcgccctgccctc

SEQ ID NO: 347146 - DNA, 122 bp, Homo sapiens
tgacagcgcatttctgggaaactgagggcttgagagacataccctgggtcccacatttaccggagctaggcccccattaccccccctgccttcctcccaggccaggagaagcagctgtgcct

SEQ ID NO: 347147 - DNA, 122 bp, Homo sapiens
acgtgacccgtgtcggtctccgcgctgggtgcccttccggagccggcactggaaggttagcgcctctgaaatcagataaaggacgtcaagccacagctgtgtttgttttataaattaaaggg

SEQ ID NO: 347148 - DNA, 122 bp, Homo sapiens
cagttccctaccttactgttatgcaaaagcacagaaaggctctgatgcaggatttctaaacggcgaggcctaaggaatacatgggatcctgaagtggaactatgactcactagcatgcaggt

SEQ ID NO: 347149 - DNA, 122 bp, Homo sapiens
ccacggaaacagagaggcgaggcatgacggccgggggtggagttaggctaaaccgggcctcgggattggggcagctcccagactcttcgggcttgggggcggagtctggcgaggggtggagc

SEQ ID NO: 347150 - DNA, 122 bp, Homo sapiens
cgccatcacctcagaggaggagcatggagggaagagagagaggccgacccgtggtcgccacgatctgtctacaggggaaaagagtttgagggtcttaggtgggaagagttacaggtaatgag

SEQ ID NO: 347151 - DNA, 122 bp, Homo sapiens
ccccatcctcctgacctcctgctgccggcgaccccaagcccgggagccctcacggcggggcgcacccctgcacctcctgtctgcccaatgtcactgcccagagcaccctgcggaacagccca

SEQ ID NO: 347152 - DNA, 122 bp, Homo sapiens
gtgcgtttccgtgtggttgggatgtcagccggcagccctggcgacaggagccctgggaggcggcagctacctctcgggtttagcattacgtcatcccttctagacccaaatttatctcggct

SEQ ID NO: 347153 - DNA, 122 bp, Homo sapiens
ccgccgcgcgcccacgcgcctcgcttgctgcgcgctgccggcgctccttcctcctcggctcgcgtctcactcagtgtaccttctagtcccgccatggccgctctcacccgggacccccagtt

SEQ ID NO: 347154 - DNA, 122 bp, Homo sapiens
cgacgcagcctcccgcccggctgcacaggagtttctttaaggagtttccccggtgtgcctcggcagccttgcgctgctctaatggtccggacttccgtgtgtgagtttcccccgtgcgcccc

SEQ ID NO: 347155 - DNA, 122 bp, Homo sapiens
taggctgaaagtggacttcccactgctgagccacccaagaggcacactgagcattagtgacgggtgagccacataagaataatgtttaaaaaagagaggacttgaagtagctatgcgaaaat

SEQ ID NO: 347156 - DNA, 122 bp, Homo sapiens
cagagcaggagcaagagtgagaaaagggaggtaccacacagtttaaacaaacagatctcacgagagctcactatcatgatgacactaccaagggggatggtgttaaaccagggaaaccaccc

SEQ ID NO: 347157 - DNA, 122 bp, Homo sapiens
tttctccaccagcctccgacagaaaccctgcagagcttccattctgcgttcagccaccatcgcctcccacccagtggtttctaaacaatctctgagcaagattttggttttatcagcctatt

SEQ ID NO: 347158 - DNA, 122 bp, Homo sapiens
gggccctgctgctcactccgcaccgcccccaacttcagccctgccttccccggcaacccgcgcctctctgctaccggtggggtgcctcgttcggcctacagcctgagtgccagacccgccat

SEQ ID NO: 347159 - DNA, 122 bp, Homo sapiens
agcaggtccctcagccgttggaacgtccttgggcttctgaactagtgcccatgtgtgcctcggcctttcccaagggccagcttcttcctggtagtgcttttgtgtacttgtctggttgggac

SEQ ID NO: 347160 - DNA, 122 bp, Homo sapiens
gtggcaaaggagctgggatagtgagacctgtggggcctgagtccaggctgggtgcctgcgcgggtggtttggcctctctagcctcatgttcctcttctgtgaaatggggacgataacaggcc

SEQ ID NO: 347161 - DNA, 122 bp, Homo sapiens
atgatggcacgagtggaaggctggttgggtgtgttttccccattggagttgggacggggtcggggggcagagggattgaaagagcacttccagatctcagtctgcattggttgagcacccag

SEQ ID NO: 347162 - DNA, 122 bp, Homo sapiens
aagaaaacatgtaaagcttttcgataaattcttgcaattatggccgggaactctagacgccgcagttcagctggcggcaaaagaaatgctgtcctaatcagtcagccctgcttcttttcttt

SEQ ID NO: 347163 - DNA, 122 bp, Homo sapiens
tatcagatacctgagtttgaaatcacttaggggtttcctgcatgctgctcagtgaagcagcggtgagtttgtaatcacattttaagaaattgggacttacagggccagtctcaaagtgtcac

SEQ ID NO: 347164 - DNA, 122 bp, Homo sapiens
ctccccgagctctaaaagccggatttgactcctctcgggcaagggtggcgggggggacggcgggcaaggggggacgggggactcgcgcgtcccgcggtcgtctgcggccccgagccggcggc

SEQ ID NO: 347165 - DNA, 122 bp, Homo sapiens
aggcccagggcccttgcgtgagctccacgaagtctgcgccgggccttggcactgaccctgcggggcctgcaacccaaactcaccggtttctgggagctggtgaggggctgcgctggggctgg

SEQ ID NO: 347166 - DNA, 122 bp, Homo sapiens
agggagcaccaggcgaaggccaggctgggggctcgggtccaagggctgcagctgtgcgggcggaggccgggggtgcgggcgggagtggtgtccccttgtgtcctgcccgggtctggctccgg

SEQ ID NO: 347167 - DNA, 122 bp, Homo sapiens
gagcggcgcgggagcgtggctggggttcccgaggtgggagatatcgtcgggctgtgccaccggttcgtgcagaagttccagcgagggtgtccgtgtgttcctgagaagccaccgagggaggg

SEQ ID NO: 347168 - DNA, 122 bp, Homo sapiens
agatctgaaaatatctttggaccacgagacggggtgggtgcgggccggaagtcttaccatcgcgaggggagccgttggccagcgcacctccttctcgcgcccctttatcgtgagcaatttga

SEQ ID NO: 347169 - DNA, 122 bp, Homo sapiens
cttccaggcaggccctgggggcagacttacactggttctcgaagagcaggacctgcatgccgtacaaggagaaggactgtcggaagctgtacgtcaccgagttcttcttcttctggaagatc

SEQ ID NO: 347170 - DNA, 122 bp, Homo sapiens
ctgaagatcatttaccatagccctcatcagtcaatattatcaatgggtggttccttaatacgagtaagaccaattctcctattctgagcttcttggtgagttggacatctgtgtgacttctg

SEQ ID NO: 347171 - DNA, 122 bp, Homo sapiens
gacatgctaatgtgcttacctatgtgtttcacaccatccatgattgaccgaaagaacttgcggacccggtcagccacctctttggtcttccgggcaatagctttaatcttgttcagggcacc

SEQ ID NO: 347172 - DNA, 122 bp, Homo sapiens
gcatgtacgtggtgttcatccacaataaaaggagactaaccagctcagcttggcgctgctcgcctggaggcatcagatccttggaccctccccatctgattggctgctacccggtctagccg

SEQ ID NO: 347173 - DNA, 122 bp, Homo sapiens
gcgcctgctctgtagagccggcggaaccgggtagcttggccaggttgtgaggaaccgcagcgcgccgcaggaccgggccgctgagcctgcagccgccccgcgccgtgacctgcgaccctaga

SEQ ID NO: 347174 - DNA, 122 bp, Homo sapiens
tcacacacacaccgaggtcaggtgtctattttagaggtgaatgtccaggatcaagcaattcgtttatgacaaatcctgttttagaacctagtattcagaattccccagctgggctccatgtc

SEQ ID NO: 347175 - DNA, 122 bp, Homo sapiens
ggctccgcgccgtgcttgcgggtcagccggagttccgggtgggcgtgggcttggcggccccgcactcggagcagcctgccggccctgccggccccgggcaataaggggcttagcacccgggc

SEQ ID NO: 347176 - DNA, 122 bp, Homo sapiens
aggtgggaacagggggacatttacactttggcccagtctccaggcggctccccgctggctcgcatctttccagaccttgagacctacccagtccccagctttagggagcccgggatgagaaa

SEQ ID NO: 347177 - DNA, 122 bp, Homo sapiens
agaataaatagaaacaaatttaatgatcattctggaatcctgttctttactttgttcacacgctattaattctcataccttcacctctctaccacaaagcctagaaaatcaaatggtctcct

SEQ ID NO: 347178 - DNA, 122 bp, Homo sapiens
gaggccgaggctggcggatcactctcggttaggagctggagaccagcccagccaatacagcgaatccccatctccaccaaaaaaatacgaaaaccagtcaggtgtggcggcgcgcgcctgca

SEQ ID NO: 347179 - DNA, 122 bp, Homo sapiens
gcgctggggacctagcggtgaacaagcagcctgggaaaggaatgtttaaaagctcccgggcgactgaagatcagccaggggtgaaaaccatcactcggtgcttcacggaacaaacgcttgag

SEQ ID NO: 347180 - DNA, 122 bp, Homo sapiens
ctctgctcatggaaggggatgcgtctcaatgtgaggaactgttcttcctctttctgtgcccgtggctgtgatgatctgcatatttcagatgtatcacaaggagaatttcatggtatttggag

SEQ ID NO: 347181 - DNA, 122 bp, Homo sapiens
cggtgcagccgaggaaatccggggctgcccgagcggggtcgtcgctggcggtctcggaggcgttcccatctgtcaccccgttcgcatcagcgcgcgccccgtgacgccgacagccaccccgg

SEQ ID NO: 347182 - DNA, 122 bp, Homo sapiens
gttaaacttgcttgtgacctctttaaatatacaattgtaaattttttagttggtggtttacgctgatgtcccggattataggttaaattaggaggaaattttcagcatgtacatccatgaca

SEQ ID NO: 347183 - DNA, 122 bp, Homo sapiens
tggccactcccctgctcaagagtctgctgtagctctctaggtacccaggtcccattcctccgttgggtgtctggagaccagcagggaccagaccttcttggcttaacctggtagctcagcca

SEQ ID NO: 347184 - DNA, 122 bp, Homo sapiens
cccagccaccaggcgttcagtcactggctgcagatcccgcaaccctcgggtgttcaagtgcgcggggtggtgcgggcgctcccgcagtccgcgcttggctcgtgggaggcctcgggcgcccc

SEQ ID NO: 347185 - DNA, 122 bp, Homo sapiens
aaagctaaagccctagaattttacattttaataagcaccacagctgattccattgtaagccgttgataaaccaaacatggacaaagattattgtataacatatcctgtaataaaaaaaaaaa

SEQ ID NO: 347186 - DNA, 122 bp, Homo sapiens
agggcagcctgggccacttggaggtgacccagcagcagctgtgtatatgtggtcaacatacgcgacacatccagagctctgacaaagcccctcaatccaaaaatatgtctcgctgccagcat

SEQ ID NO: 347187 - DNA, 122 bp, Homo sapiens
tcctttctcatgggcttcccctgcaggaagtacacttactgctatgtcacaaggtgcaagcgaatgctatggctgtgccccctggctccctttgggattttcctggggccccagggactaga

SEQ ID NO: 347188 - DNA, 122 bp, Homo sapiens
agcattcgctccgtggatatggaggagatgggcacggggcgggccaccgactatgtgttccggatcatctaccccggccacaggcacgagcacagtgagtgtcccgagcttcatcccggggg

SEQ ID NO: 347189 - DNA, 122 bp, Homo sapiens
accagccttggcctgctgggggaagggcaggagggaggccaagggagagggtgaatgagacgtgagtaacacaactgctatcaggggctgaaaatagactgtgaccaaagccctgagttttg

SEQ ID NO: 347190 - DNA, 122 bp, Homo sapiens
ctagaggcggagtggccactcagcacagagccatcagcgaggtcatcccagccaaggagacgcgcgaatgtccagggggttacatggtggaggctccagggagggaggctgggaggccactt

SEQ ID NO: 347191 - DNA, 122 bp, Homo sapiens
cggccggtgtctgagcaacacaccgatcctgatctcgcaacgcaaagacagaccaagcgccgcaaagaagttgtagggctgcgagatgctccagctctgccctctgagaaacgcacttcagc

SEQ ID NO: 347192 - DNA, 122 bp, Homo sapiens
acatcgtacaggtcagggttccctttgtgggggccaagagcctcccgggataggctccaccggctcaccaggactcttggggtctgaccacaccccgcaggcttggctccaggaagcccgcc

SEQ ID NO: 347193 - DNA, 122 bp, Homo sapiens
ggatcggggaaccggcgaaaccgtcccgggccggacgccgcccactcccgcggcctgccgcgcccacctacccagcagctcggcccaggccctccggcggccccctgggtcctggcccgagg

SEQ ID NO: 347194 - DNA, 122 bp, Homo sapiens
ggaggcaggcagcgacccctgctacatcctgggctgcgccttggacactttccttttgggcgtctctcttgcacgccgaagggcttctgtccaaataaccgaagctggcggtcttgaaggga

SEQ ID NO: 347195 - DNA, 122 bp, Homo sapiens
ggccaccaaggagtcgagtgagaaggatcgcggccgggacaaaacgcgaaagaggcacagcgcttccagtggtagcagcagtaccaggtctcggtccagctcgacttccagctcaggctcca

SEQ ID NO: 347196 - DNA, 122 bp, Homo sapiens
tccatgcccaagaaattgtaccaggaggtctgttcccagccattctagtgggttagccctcgtgtcccttccctggttctggatcttgagaaaactcaagctcttaatgtcatcttcaaact

SEQ ID NO: 347197 - DNA, 122 bp, Homo sapiens
tcccatgtggggaacccagtcctgctgtgactctgggagggagagggccggggatacaatcgtacattcctggtaacagccctgtgattgtctgcttcaggttatcagtgagctgaatggaa

SEQ ID NO: 347198 - DNA, 122 bp, Homo sapiens
tgggtcacctttctggcgcctttctccccgcacaaagtctttgtccttgtgaagttgtcacgtgccaaacgcttgtccctttttcctgctgggtaatactcccggtgccgcccttgctgttc

SEQ ID NO: 347199 - DNA, 122 bp, Homo sapiens
tgccggagaaactcatggtggcaatagagctccctcttcacgactgacctgcggctctgccgaccagactgtccactgtaggctgttttatagggggctcccttcccttcgaatagcggcca

SEQ ID NO: 347200 - DNA, 122 bp, Homo sapiens
actccaccccatatgtctgcaggtcagcacccaatgacattctggacctccgcctccccccggagcccgtgctcaatgccaacacagtgtgcctaacattgccaggcctgagccggcggcag

SEQ ID NO: 347201 - DNA, 122 bp, Homo sapiens
aggtgattgagacccagccagagtgaagctttcctagggagggaggcctgaggagggaagcgggggaagaaacccacaactgcagacccgcccgcttgcccacgcgggtcaagggctatgcc

SEQ ID NO: 347202 - DNA, 122 bp, Homo sapiens
acaaatactgatgttcccccatccctcaaaggcctttgacactgaaaaggaataccaattcggtctcttccaattattcattactttacatgcatgtaaactgtagaggaaatttttaaagg

SEQ ID NO: 347203 - DNA, 122 bp, Homo sapiens
aggtgacaggggtaactggaacctgggtttgtcggcagctttccaacgtctctgcctgctcgacaaagcagaggcaagagtgacattttgagacgcctaccaggcctgtacaccagattcca

SEQ ID NO: 347204 - DNA, 122 bp, Homo sapiens
gcaacagcctcagtcatgtgaccggcaatggcggcgctgacgagaggtaggtgagcccggcgccccccacacccaccgcgcgccccccgggccccgctcgcacccctcacgcgccccccgct

SEQ ID NO: 347205 - DNA, 122 bp, Homo sapiens
ggagcgtgatagaaagaaaagggcctattgaactctgggggaaaagacagaaaatatcaacgagaaatcttgcaattatgagaagcagtatggaaaccccacaaggtggcagttatgcattg

SEQ ID NO: 347206 - DNA, 122 bp, Homo sapiens
cgtaaccgccagggtcctcccccttctgaagccgcggcttccttgcaggccggtgtccggcgttgatcctttaactgaccatgggcagttttagttcacgagtgtggattcttgggatacgg

SEQ ID NO: 347207 - DNA, 122 bp, Homo sapiens
tagaatggctaaaattttaaaagactggcaatactatgtgttggcaaggatgttgaacaacgggaaatctcattcattgctggttgggatgtaaactgatctttagaaaactttttgacagt

SEQ ID NO: 347208 - DNA, 122 bp, Homo sapiens
acaacgaaatgaccctcccagccgtcctcagcaggcagcacccatgttagtctccttctgcgatgcctaagcggcagcaccatcgagccaaggtcctccagcgttcctagagcggagaagaa

SEQ ID NO: 347209 - DNA, 122 bp, Homo sapiens
ctttgctgtgggaatgttcaaaggccagctcaccacagatcaggtgttcccatacccgtccggtaagggaagggataatcagagctgggtggggccagggtggtttcccctgccagcctggc

SEQ ID NO: 347210 - DNA, 122 bp, Homo sapiens
ttggcccttggctcaacggccacctgactgcatccatttatgtgccagttcccttggagtcgtgaggaagacaaaccactttcactagggcaacacggagcgtggaaacgaccccgctaaaa

SEQ ID NO: 347211 - DNA, 122 bp, Homo sapiens
cagtttctgaggtgagaggtagagagaattagagatatgactagtagggtctcctaatcacgaaacaaattgcaacctatgccttgtccggtcatctttatatgactgttttctgaaagaga

SEQ ID NO: 347212 - DNA, 122 bp, Homo sapiens
ctgcaggtgacgctggggaatgcagatgtacagaaggcgacgaagctatcaaaggtcttccgggactgccaggacccaagggcttcgcaggcatcaacggggagccggggaggaaaggggac

SEQ ID NO: 347213 - DNA, 122 bp, Homo sapiens
cagtccctggggtcttgtgggagcctccgcgggcctgggagtggcaggacccttagagggcgagagttcacatgagagcgtggggttctgactcgcgagggttcacgtgagagcgtggggtt

SEQ ID NO: 347214 - DNA, 122 bp, Homo sapiens
accctctttggggctctgtggttcctggtgtctccgagctttggggtgccaccgcgttcccgttgtccagaaactggcgcctgcagcggaagccgcggtacgtctggtccagtagcagcctc

SEQ ID NO: 347215 - DNA, 122 bp, Homo sapiens
agccaggacctcctcagcgcgcagagactttcagatgatctttgtaggggtttttgcctccggtcaactgcgccccttaggaagggctttggaggacacagatcacagaacagtttcagctc

SEQ ID NO: 347216 - DNA, 122 bp, Homo sapiens
ggggaaacctctggtccgggatctccctagcccgaggagctcccaggcagaggtgaggaccggaggggtgggcgtggccggctcataaagccccggcgtttcccacgcagaaggaggcttcg

SEQ ID NO: 347217 - DNA, 122 bp, Homo sapiens
ttcctttttgtagctaatactcccacaggcctcccacggcagctccaaaatgcagcctcccgagtttcttgttgacagaggctttgagcatctctgaacagggatcctcctcaacattcccc

SEQ ID NO: 347218 - DNA, 122 bp, Homo sapiens
aattaaggccttccttatctgggcctatttcgacaaagagttcagcatcacagagttctccgagggagcgaagcaggtttgtttatttccctgattgacctatccgtctctaatgagttcaa

SEQ ID NO: 347219 - DNA, 122 bp, Homo sapiens
gaggcttaaaaggggtcgacctggttaactagaaagggcgaccagtgaccctgacctggacgcgctcggattggtcgattccagtgcagtctcagatgagactcttctatgattggccagaa

SEQ ID NO: 347220 - DNA, 122 bp, Homo sapiens
ccaatcacactcaccctttccccaggggctccagggaggccaggatcacccttgggccctcgaggaccctcttgtccgcggtccccaggctctccctgtggcagagataagcttgctgagga

SEQ ID NO: 347221 - DNA, 122 bp, Homo sapiens
agttcacagtaccctcgcaatttagatggaggaaaaaaaatcagtcggggggggggtccccgtatgcaaatacaggaattacagaagaagacaggacccccgccgcagcaccacttccccct

SEQ ID NO: 347222 - DNA, 122 bp, Homo sapiens
cagcagttgctcttggtctttaaaagatctcgtctttgtagcacagaacaacctaagcctcgaggccagctaactgaagtcaggatttattatggagagaaagtgcaaggcactgccgcctg

SEQ ID NO: 347223 - DNA, 122 bp, Homo sapiens
tgtgtccaacattctggttttttggagggtagccctagggaccggtttctgtctcatctgcgtcaaagtgctgacaggacccagcgtattctagatgtctgaaggcccttgagaagcaaaga

SEQ ID NO: 347224 - DNA, 122 bp, Homo sapiens
tccgtcaagaaaaggcagctggggcagcagggatttcggactctgggagcctgtctgggccgcctgcctcctggaggcgccctttccggcttccttggagtgctcctatggaatatgctagt

SEQ ID NO: 347225 - DNA, 122 bp, Homo sapiens
cccacttccatccagtctgggttccctggggagctctcacttcccgtactgtctccacagcgaggcctctcatttcctcctccaggctccttcttgattcctgacagtagatgcctgtggct

SEQ ID NO: 347226 - DNA, 122 bp, Homo sapiens
gtggggtgggggcggcagggggggtgggggctgggactgcaccttcacggaagggagtagcggcgtagggggctgcaccttctgcagctgctgcaggtacagctgcatctgcatggaggtga

SEQ ID NO: 347227 - DNA, 122 bp, Homo sapiens
cctctctggggactgctgccgcgagagctgggtggcggcagccagcagcaggcagagtggcgcccaggcgttcgcgcccctcatggcagcgtagacgctcggggtttgcaccccacggcgcg

SEQ ID NO: 347228 - DNA, 122 bp, Homo sapiens
caaggtcgtgccgggcccggagcgcccgagccctttcagccagctagtctataccagcaacgactcctacatcgtccactctggggatcttagaaagatccataaagctgcctcccggggac

SEQ ID NO: 347229 - DNA, 122 bp, Homo sapiens
ccctactgccgccccgacggcctggacagccagccgtgttcccctggccacgtctcagcccggcctctgccgctgccacctgagtgacagcctatctcggacatcgcccattgagcaaactt

SEQ ID NO: 347230 - DNA, 122 bp, Homo sapiens
tggccaacctccgaggaggaggagggtcccgccggctaagagttaattagccccgcacggcgaggggggaggcgccagttttctggggacactggctgccactgtactcctacccaggggag

SEQ ID NO: 347231 - DNA, 122 bp, Homo sapiens
gggggattggagggccggaggctggagggaagttaatttcctgccttcacgtttgttttgcggacctgaggatgtagcttgaagtctccctttagaaactcgtaggctacaggcgctgggga

SEQ ID NO: 347232 - DNA, 122 bp, Homo sapiens
tctgaaaaatgtgctctttctatggatggatcataccttgctagctacgtggttaatgtccgtgggatgaaacctacagattaatgtgagaaagtgaaatttacttccccaggggaatctcg

SEQ ID NO: 347233 - DNA, 122 bp, Homo sapiens
tactactcccaggaaccttcgcgcgaggccagggccttcttccagggtgcaagtgggtctcgccgcacggctctctgggattcgtagtcttgcagtgtcattcgggagttgtagttcctttc

SEQ ID NO: 347234 - DNA, 122 bp, Homo sapiens
gcccacgcaggccgcaccctcgccggccaggaggtttccctgaggagcatctgggccagccgtgtggacaagagggctcctacaggtccccaaaggtgtgacaagaatggtggtcttcacac

SEQ ID NO: 347235 - DNA, 122 bp, Homo sapiens
agaaagaaagaaagaaagaaagcaagggaaagcctggggctgaaggagtgttccagggagcgaattgctcaggacttcaaacactgggagtcattctgtcaaggggagggggcgggcggggg

SEQ ID NO: 347236 - DNA, 122 bp, Homo sapiens
tagatgcagtccccgcctcctggcccagccacatcctttgctccggctcaggagactgagcgaaggacaaaccatccgtagacacggtgctcacaactaggaagaccttcctgccccagagc

SEQ ID NO: 347237 - DNA, 122 bp, Homo sapiens
ccagcctggagtggctgaagaaactgtgagcacctccactgacagaggcggcccctcccacggctcccaataaaaatgtgaaaaccaacccccgaacgtgagcatgtgtgtgatcagaggtg

SEQ ID NO: 347238 - DNA, 122 bp, Homo sapiens
aggcggcgggtgtcatgcccctccccactcccgggcggaacaggtgtgtagccggtctgtcgggcctgggaaacaggtgtggacccctttagcctccagggactgatatcaaggtgcctgag

SEQ ID NO: 347239 - DNA, 122 bp, Homo sapiens
gggcgggtggggtcggggaggggggaccttaaagtgttgtcacactttgggaaaataaagcgcaaatttcctaactcggggcgctgtgactgtgtacttcagaagccacatccaaaatacat

SEQ ID NO: 347240 - DNA, 122 bp, Homo sapiens
cctctcccttagggacctctgcccactctaccctcaagccaggatgcccggagcggtccccggaaatgcgtgtgcttcgggtgatttaactgattattgaataggcccgcaggaggtgtgtc

SEQ ID NO: 347241 - DNA, 122 bp, Homo sapiens
ttatcatgttcaggggttcggatggaaatattgggggccatatttagaattctgcctacacgggaagcaaaagtgctttgtcacctctaaagtgccagacttaggctctcattagagcctaa

SEQ ID NO: 347242 - DNA, 122 bp, Homo sapiens
gcgtgctgaccacacctttgcaaacagctggggcgcaccgcacaatcgaaagagcagggccgcatctttgagcaagaaccagtccccaccgttaggtgggcgtttgttagggaagagccagc

SEQ ID NO: 347243 - DNA, 122 bp, Homo sapiens
attttctctccaagcccagtgggcaaggcctaggagccgtagccttcctatcagtttatccgaaaaccctgatagaagtcagcacatttttaaaaacacttaagtccattgtttcctttttg

SEQ ID NO: 347244 - DNA, 122 bp, Homo sapiens
aagccagagacacagtgaagggcctgcacgtttgtccccagcgcctggtttctcccttcccgcaggagcgcctccccatgaaggggtccatccccaggaggccactcacctggagaaatccc

SEQ ID NO: 347245 - DNA, 122 bp, Homo sapiens
gtggcccagtggcggaggcttgtgggaaattcctggtacccagctgcccaacatctgggacgctgcaacgcccacctacctgcctgcgcggcagagaagcaacagccgttcgagccacgctc

SEQ ID NO: 347246 - DNA, 122 bp, Homo sapiens
ctgtagcccaccccttccagtccataacctttggttctgcccaggcctggacccctggaacgccccccaaccccatgtagccctgcctttccaggctctctttgaccaggctttgacccatc

SEQ ID NO: 347247 - DNA, 122 bp, Homo sapiens
aaattgttgatacaaggatcagggatgaatgctacttggaagagaagtttgagtgggaaccggtcaattcgctaatgaatagttatgatgactttgtttccttatgcaaattcaaaactgaa

SEQ ID NO: 347248 - DNA, 122 bp, Homo sapiens
gcttcggccgaaggcccgagcgcccgaggcgtctgggatggtgtgggaccgggtaggtggcgtgagggtgcgcggccccgaactgcaggggcgggaacggaggctgggagcgccgagctgcc

SEQ ID NO: 347249 - DNA, 122 bp, Homo sapiens
ttccccctagcttagcaccacactaaaccctcaaggggcttttaaaattaacagtcacaacgtaaggagactttactgagccttactctgtgccaggcactgtgctaagggcttctctaaca

SEQ ID NO: 347250 - DNA, 122 bp, Homo sapiens
ggaggattctgggccaggcctttgcctcttccagcaacacccccctaacagctttgaggccgcctcctccaggcaggctgccctgatccacacccacacaggctgaggccccccgggtcctc

SEQ ID NO: 347251 - DNA, 122 bp, Homo sapiens
tgttcccggactggcctctcccatgttatgaggacctccattcaccgattgcacagtcagcgtccggctgctccactgttccgtcttctctgttctttcttctgcacgatgctggtgcccct

SEQ ID NO: 347252 - DNA, 122 bp, Homo sapiens
ccgctccctgcaaggggcctccggcccttgttctgctcatccggaccacagacctcttctcgttcctggggaaggacagttggcctccggcctggagctctgtctttagttttttagcctca

SEQ ID NO: 347253 - DNA, 122 bp, Homo sapiens
cgtctctcacagcctgccccttagcctccgactgtgaagtttagacccgaattggtcacacggcacctgttctcatcatcccattctctccccttccttcgcttggtccataatctgtattt

SEQ ID NO: 347254 - DNA, 122 bp, Homo sapiens
tcggcttctcattttatcctattcaaccctgagagctctcctgagtaaccggtgctcatccgtacacccctcctacgacagacagctttcggccttctggggagctggaagcatgaccatca

SEQ ID NO: 347255 - DNA, 122 bp, Homo sapiens
cccaaatggaggaaacatttataattgtcatttactctactttaccaaaggtgacagttccgagaagctctgacaggacaaaaaaaaaaaaaaaaccaaagtgattatgaaagaaatgtgtg

SEQ ID NO: 347256 - DNA, 122 bp, Homo sapiens
agaaaaggaaatcacgggctaggtcgcgagtatctcgttgtcaccctgaatttgctactgcgtattgaatcacagcttcttgtttggggactgcgaagctatggatcataggagggcaagcc

SEQ ID NO: 347257 - DNA, 122 bp, Homo sapiens
attttttttgcatttttcaaaattttaacaaaatctatatttaacaagaaaaagaaaagtcggccactaccattgggtccagttgccactcagttaccttattgcagcggctttctaattat

SEQ ID NO: 347258 - DNA, 122 bp, Homo sapiens
aacaaaaaaacagcactgtgaatatcctgaacacagagacaggcaggtgcccagagtcaacggctccagtcagcacctcctgcacccacaatctaggtaccttcttgaaaagcaagtcaatg

SEQ ID NO: 347259 - DNA, 122 bp, Homo sapiens
caccaagtctgtgccgcaggacggccgttgtccagcagggacccacgggctcacccgggccgccgcagacctggccgttgtagcgctcacagttgatggtgtcacactcgcagtactgcccg

SEQ ID NO: 347260 - DNA, 122 bp, Homo sapiens
tataaaaaacgagagaaaaaggcaatctgaagtggttatagctaaaataatgggcctgaacgtggctgaattaaaacagcacagaaaagatcaattaggaggcactttctcaaatagctcac

SEQ ID NO: 347261 - DNA, 122 bp, Homo sapiens
gcccctaaagcagaagtcacggggcttggcggggggggggggtgggggaggaggagagcgcgggacagaagagccccactgagaggaggaaaccccgcccccaattctcaggcaccccgtcc

SEQ ID NO: 347262 - DNA, 122 bp, Homo sapiens
ttgcatctccagttaaggaaagggtttcagaatgtccgtggggacacgtccctccagggccggctgtcgaggacccggaaaaccacagcccctaagagttccagattttccaagacccttat

SEQ ID NO: 347263 - DNA, 122 bp, Homo sapiens
gggggtgtgaacagaccaaggcgtcctgatgcgcgatcggttcggctttgggaacgggggcgccggggtgggaccagggcgcggttctggccgctacggcgcccccgccgccccctacgcca

SEQ ID NO: 347264 - DNA, 122 bp, Homo sapiens
ccgcagccgccctacgcgctgcgccgtgaggagcgggttgcggtgtacccagcgggccggcgccgagccgagccgccgcgtccaccgtggggcggggggcgcctgcgaggagggggtgggag

SEQ ID NO: 347265 - DNA, 122 bp, Homo sapiens
ccgcagtccagtgcgcggccgcaaggggcaggtgcgaggccggctgctactcgggagccccgcgctgtccctccctgcgcagtcagggctcacctgggccgcccccgccccgcacccctgcg

SEQ ID NO: 347266 - DNA, 122 bp, Homo sapiens
gagagctgctgctccccagctgggaggaaccggatgcaccttgtagactagagccagatccggaggagtagctgacctgggaataccccgttcctggcttaaaagatcctgcagaaccaccc

SEQ ID NO: 347267 - DNA, 122 bp, Homo sapiens
tgacctctctcagcgtgggaggggccggggtgaggcaaggggctcacgctgacctctctccgcgtgggaggggctggtgtgaggcaagggctcaggctgacctctctcagcgtgggaggggc

SEQ ID NO: 347268 - DNA, 122 bp, Homo sapiens
gccttccggtgcgccttccggtgcgccttccgctccgccccttcaggcaggaagtgtcggcgccgccactgtccggccacagcctaacgctcttcgctgtcgtttgtggtctcgcgcagggc

SEQ ID NO: 347269 - DNA, 122 bp, Homo sapiens
cctaggccttcacattcactctcacactcttcacactcactgactaacccagaacaactgcgagtcctgcaagctccattcaggtaaatggcctatacggctgtaccatttttaaattttta

SEQ ID NO: 347270 - DNA, 122 bp, Homo sapiens
tagaaggtctctcaccaggccctcggctctgcctctgcccgagcccagccccagcacccgcgcgcctcacctgccgggccagccggcctctgtcctccgtcttgacgctggtggactcgttg

SEQ ID NO: 347271 - DNA, 122 bp, Homo sapiens
aaaggagctgagccgagcgggggcgccgcccggggtccggtgggcaaaaggtgagtgatgcggcctaccactcgccgggcctgccatgccctaggcattggtacccagagcaaagatttcta

SEQ ID NO: 347272 - DNA, 122 bp, Homo sapiens
ggagagggcttgtttctggtcagcaccgaagaaggaaggtgtggagaggaggggccgggccgagagcaaataccgcctttttggtgcagcagcagccctgtctctgaccccggccgtcctgg

SEQ ID NO: 347273 - DNA, 122 bp, Homo sapiens
ggcagtggaggccaggacaggatatggggactcccgccaggatctgggcagcgctgacctcgtgtgcaggtcagaagagtggccttagcctctgcatagggacctggctgtaggtggttgtg

SEQ ID NO: 347274 - DNA, 122 bp, Homo sapiens
gaccaaatcagtcctgataaacacccctcctggccctacaatgggaagggcaagttcaaacgcagggcgtcgagcccacacgcctagagacgcggccaggcacccccgccctcctcgccgcg

SEQ ID NO: 347275 - DNA, 122 bp, Homo sapiens
cttttgctttgctgaaacttttcacagctgacttgataccagcactgaggcctgacctctcgatccttcagcacttcagaggttaattttgttgggggatcggatttctttcctggcctggg

SEQ ID NO: 347276 - DNA, 122 bp, Homo sapiens
ttgtagtttcttgaccctggctctttatcctaacatcctcatttcaaaatgtttggcttccgtctttcctcagtactgatgtatccctagccctgctctaatgttttcctggcatgactaag

SEQ ID NO: 347277 - DNA, 122 bp, Homo sapiens
aagcgtcacccgtgctgacccggaagttttcttcccagttaaaagtgttggcccgcggcgcgcggcctcttcctgtctgtaccagggcggcgcgtggtctacgccgagtgacagagacgctc

SEQ ID NO: 347278 - DNA, 122 bp, Homo sapiens
gtgcagtgtgccccaggagcttgcaaagtaccactgcatcagtgcttccacaggtgaggccgggggcagaagccaacctcaagcagttaccatcctccgtggggctggcgtccaggcaggaa

SEQ ID NO: 347279 - DNA, 122 bp, Homo sapiens
ttgcggcatcgcccgggacaggagatgctccggagcctgcagggctggcagcctcgggcacgacgccgggcgcaaaggcctgcgttcactgcacatcacgggggcagggtcagcctgagctg

SEQ ID NO: 347280 - DNA, 122 bp, Homo sapiens
ggtcgcagagcattgtgttcgtgtggaggacacgcgaggactcttggaagtgctttttggcggggtagtgcagtgtgttccgggcggacgggcgtcagtttacgtgtgcgtttctcatcctt

SEQ ID NO: 347281 - DNA, 122 bp, Homo sapiens
aatcacacactaagtagtgaaaagaaaaatgtaagaagacagagagtaataggggatggccgtgctattttaaaaagagtggcatgggaagacctctctggtattgtaacatctgagcagag

SEQ ID NO: 347282 - DNA, 122 bp, Homo sapiens
cccgccccgccccgccccgcgcccgcgcccgcgcccgggttcccacggcgcccgcccccgcgcgcccggcgcctccctcacgcccgccctccttgccgcccagccggtccaggcctctggcg

SEQ ID NO: 347283 - DNA, 122 bp, Homo sapiens
aggagctgacagtgtggtattctaactccttggctcagtggttcgacatccccaccacagcgactccgactcacgacgagaaaggtacccattccaaaagcgtggatgggcaaaagtccagc

SEQ ID NO: 347284 - DNA, 122 bp, Homo sapiens
ccaagacccagagcgcgtttcagagtctggtcactccaggagtcgtcgggcgctgaaaagcgattttaaagatctggagtagaccgggcgcggtggcttacgcctgtaatcccaacacttta

SEQ ID NO: 347285 - DNA, 122 bp, Homo sapiens
aggaagaggcagtggtgggcttggcatctgcctccagaccctaggctcttcccaccaatccggagcgcctcggatgggaattggatacatgtggaatgtcagaggcccagagagggtgtgag

SEQ ID NO: 347286 - DNA, 122 bp, Homo sapiens
gcgccccgagggccgcagcagctcatccggcagctcccaccccaacaacctggaagggggcgggacttccgtttgtacccggctgtggcaatctgtggtgaagttgaaatgcttttctgcta

SEQ ID NO: 347287 - DNA, 122 bp, Homo sapiens
aatttggcctcatcaggtgcaaggagcaaagcagttttgggggtggggttggaaaatgagcggtgaggaagaggttcactagcagagcaagccttccttagtgctgaagggggaaatgctcc

SEQ ID NO: 347288 - DNA, 122 bp, Homo sapiens
gccttaaggaggagctaggggcgtgcggccaattgcaagcgactgtcctagcgaagagggcggaagaggagagatccagttccggacgcggccgccgccgtcgccgccatctgtcacctcca

SEQ ID NO: 347289 - DNA, 122 bp, Homo sapiens
gctgacagtttaaagagttcccacattcactccccttcagccagtgaggcgccccctgggcgtcctgccttccaatcgctatcacaaccagaggcagggcaagtgagggctccgctcaagtg

SEQ ID NO: 347290 - DNA, 122 bp, Homo sapiens
taccaggtgactgtatttctttatcaaccccaactgtagtcatctgatagtttaagggcccgccttttggaaccaaaaagaatgtattaaaaatgttaagaatttctgaagtactaatgtct

SEQ ID NO: 347291 - DNA, 122 bp, Homo sapiens
tggaagtcacaagcctggcaccggattcggggcatggccgggagccagggcagagctcgtcgttgccaaactcagagtcagcccatcccccgccacccagagcgcgtcggcgctaggaccta

SEQ ID NO: 347292 - DNA, 122 bp, Homo sapiens
acattcggcctctaccttctgccgcaacacacacaccgaccttctaaagagccttctgtgcgccagcttccgttccaaacggaacggatctccgctggagacaaaatgcgacacaagacgac

SEQ ID NO: 347293 - DNA, 122 bp, Homo sapiens
gaaagcttggtgggagctcagggtggccagtgctcccgtgaccatctgcaactagcgctgcgggagtagccccgtccctacccctcaggcttggccagaccctgttgtatcccagaaaggcc

SEQ ID NO: 347294 - DNA, 122 bp, Homo sapiens
aatacagcaaaaatacagtaatcttaagggaacaccattttatgtgcagtctgccattgacgcacatacaatggtgttatttggcatatgactgtaatttgcccaataacacagagtacctg

SEQ ID NO: 347295 - DNA, 122 bp, Homo sapiens
agtgctcggtgagggagctgaggccatcggcgatgttgttgagggagccatagggtgaggcgcccttgtacacactgttgctcagcgcctgtgggagacagaggcacatatactacagcctc

SEQ ID NO: 347296 - DNA, 122 bp, Homo sapiens
ggaggtttgctaccagagaatccaggagaaaaaaacacataaatgctggtagtcaaattccgtaaggaaataaacccagctttttgtttgtgtatttgttttgtttttgttttgttaagcag

SEQ ID NO: 347297 - DNA, 122 bp, Homo sapiens
tagctgcttggttttgaggtttgatctgaggctctatggtgtgtcaagtgtgctttagcacgacgtggtcacagatggacaagttggcaaaaattcagccttttatcattattaaagtgagg

SEQ ID NO: 347298 - DNA, 122 bp, Homo sapiens
ggaaaatcgagggactggaggtcccatcattgtcgcgtgagcagcctcctgaacaccaagcgagacctgagggttccgctggggcctcgccctgacacccgggccctccgtgtggtcgagag

SEQ ID NO: 347299 - DNA, 122 bp, Homo sapiens
cccaccgggccacgcaggcggggccccagagaccgtgaagcagagcttgcaaagtgaccccgtccaccgaattccccaagctgagtgttcggccatagcccttcgggactacaattcccagg

SEQ ID NO: 347300 - DNA, 122 bp, Homo sapiens
agcgctgtcacagctgggattggtggtttcaggagcctgtgggcgtggctagtccgggggcggggcctatggtttgttcgaatgacgtcacacttgccgcagcgtataaggcgctacgcagt

SEQ ID NO: 347301 - DNA, 122 bp, Homo sapiens
tccgtgcctccggtctttgttccagcgacctgaggaatggcatgcatcagaagccgcttccgtgtctcagatggggcctgggtcaagtcctgggagttgatggagcgtttcccaaatcgcaa

SEQ ID NO: 347302 - DNA, 122 bp, Homo sapiens
cgctgccttcctggggtgacggagcagcaggaagcgttttcggatcctggaatacgtgggcggcccgtgggaggggctgaggcgcagtttcctactcacccggatccgaatcctccgcggtg

SEQ ID NO: 347303 - DNA, 122 bp, Homo sapiens
gtcacttcaaagcaaatgagatacccttgatgattctggcaaggtgtggtctcccactgtcggtctctcccccatatatgatgaaggtactttttaggtggtaaaggaatgtccttgcccag

SEQ ID NO: 347304 - DNA, 122 bp, Homo sapiens
acgtgaactcggtcacctcctccccctcgctcctccccggcaggctctgaggagccgaggcggtggcagcagcgcgaggaacagaacacgctgcaaactgcttggctacccctttacaagac

SEQ ID NO: 347305 - DNA, 122 bp, Homo sapiens
cagcatcgccgcaccggacgcaagggccggcgccgctcgctctcactgccgccgcgttcccgccacgcaaactctccaactccccacgcgcaggaactctcggtgtgagggacggagcttcc

SEQ ID NO: 347306 - DNA, 122 bp, Homo sapiens
aactgtcaactatttactttgggggggtggcggggggagggtgctgggaaggaattgaggcgaaaagcctctgcaggtgacggtacaggccaataccaggaggtcaagtcgccggtgtccct

SEQ ID NO: 347307 - DNA, 122 bp, Homo sapiens
cgcgcagggcgtcctgggaagtgtagttccctcccttcgctcggactggggagagcaccccgactcctccgcggagtgccgcctggccccgacacttggagagcaactccagcttcagctgg

SEQ ID NO: 347308 - DNA, 122 bp, Homo sapiens
tgatttagagagtactcttcattatgtgtttctgcagtgaattggtgtaggaatataatgcggatggttcatcatcatcaaagagatatgacctttacttgtccaggctaaatggtcctggg

SEQ ID NO: 347309 - DNA, 122 bp, Homo sapiens
ggtttcagctctggctttcctccgagcctgtgcaatcgctctaagatgtagcagaaaggtcgcacaggctgtggactcaaagccgtttaccttgaccaagttactcggcatctgggaggttt

SEQ ID NO: 347310 - DNA, 122 bp, Homo sapiens
cccgcgggtaggacggagctcagaccagctgaacctcttgttggttttatactgagtcgacgtcatcctggatttagttcctggtaatatgcagatgacaaacagaaccagatttggccctt

SEQ ID NO: 347311 - DNA, 122 bp, Homo sapiens
aatacaaactacaggtttcatctttgtacctttaaaaaacacatataaactggtggctctcgcctataaatcccagcactttgggagtctaaggaaggaggatctcttgaagctacaagttc

SEQ ID NO: 347312 - DNA, 122 bp, Homo sapiens
gggctcttgacagtgttgggggccttgaagacccagagggtctagtgcgtggcctgaggtcgcctgtgtccaagcataggtctgtgtcccccactgtccccggccttagtgtggtcctggta

SEQ ID NO: 347313 - DNA, 122 bp, Homo sapiens
cggctggtttctgccgtctttggattctagccgtcctggtgggtgtgcagtgccttctcgcggttttggtttgtgtttccctggtgcctggtgacacggagtttctttccatgtgcttactg

SEQ ID NO: 347314 - DNA, 122 bp, Homo sapiens
gggaatgggggcagagactgtcgctcctgaatgtgcacacatggggtaaatggactatatcgcagtctgctctttatttgaatggagaatggaaacaggttataagaatatataacatccat

SEQ ID NO: 347315 - DNA, 122 bp, Homo sapiens
gcgtcgcgtaaaaacgtgccaggttctgcttgctggaaccgtctaaaacaaccggaaccccggattttcacttgcagattcttgaggaagttttataataaattcggagacctggaacaagc

SEQ ID NO: 347316 - DNA, 122 bp, Homo sapiens
agactgttccgagggtcgaaactctggttcaggataagattagcaggtatttcacagagtcgacttaaggaagctagtgccggagagggaagaagtacgaagggcttgccagtgagccttaa

SEQ ID NO: 347317 - DNA, 122 bp, Homo sapiens
tgtggctctgctccttccacaagcacttggggccaggcccatccacctgccatcaggctccgcttcctgaggttacaaatcagagccacccaggctctgaaatgaaatgtgcatttagggcc

SEQ ID NO: 347318 - DNA, 122 bp, Homo sapiens
ggggccgaggctggcagatcactcccggttgggagctggagaccagtccggccaacacagcgaaaccccgtctccaccaaaaaaatatgaaaacccgtcaggcgtggcggcgcacgcctgca

SEQ ID NO: 347319 - DNA, 122 bp, Homo sapiens
ctcttggaaaggttttctctctgaaagcagttcccctgtccagaagatgcttatggcccacgtatcttcttccaactggtcaagacagttaaatacttcaaaatgccccaagaggtcccaaa

SEQ ID NO: 347320 - DNA, 122 bp, Homo sapiens
gggagcctcagcccctccagccgcccagcgccctgccaggcctcttcccggcgctcccgccgccaggcccgcattattcaccatctgggcagcacccaaggcctggagggggcggggcaggt

SEQ ID NO: 347321 - DNA, 122 bp, Homo sapiens
tcacatgcttgcaggcacactagtgcacagagatccctgagaagcacatagacagagactcggagggaatatggtgaaggtatgtactatccttccccatctagtcaaaggaaaaaaaaatc

SEQ ID NO: 347322 - DNA, 122 bp, Homo sapiens
ctgccctcctcccgggcccgtgcacattgtagtctacggcactctcttgactcggggaaacgcaggctggcttgtttctgagggtggcccccacctgacaaaactgctcagctcactaagaa

SEQ ID NO: 347323 - DNA, 122 bp, Homo sapiens
tgcacatattcaacgtgtacaatttgataaattttaatgtttccctcgtgagaccatcaccgagatcaacattatgaacatatcatcatccctgcaagttttcccttgccctttggtaaccc

SEQ ID NO: 347324 - DNA, 122 bp, Homo sapiens
ggctgcccaccctccaacgtggcagcacgcaggacagccctttttggatggaaggccccacgctccaagagagagaatccaagattacagaaatcgtgttttcctgactcatgccttgggct

SEQ ID NO: 347325 - DNA, 122 bp, Homo sapiens
cgcaggacttctggttagccagggtgttgtaagcagtggtgatagctgagaatatgcagccgttttctccttcctgggtacagtgctattctgcctagaggtgagtttttgcctgtctcaca

SEQ ID NO: 347326 - DNA, 122 bp, Homo sapiens
ccgtggctgacctccaagccgggcgggtgcgctgtgcgacgcggaaagcgccgtagagcacgcagaacacgattggctgagctcccggaagtgacgtacctcaaccgcccgacagtggaagt

SEQ ID NO: 347327 - DNA, 122 bp, Homo sapiens
agacttactgatgcttatggcagccccaggccctgaaggtatgctgtacttggtcacttccgtgcatttgtttaatcctcaccacaagcctgggtcaggataaaaagtaggcacttcactct

SEQ ID NO: 347328 - DNA, 122 bp, Homo sapiens
tgaggccggcgtagaaggccacgcgcggcaccgtggtgtaggtggcagtgctgatggcgccgctgccccccgcgcccggcagccccggagggcccggcttgcctggctcacccttctccccc

SEQ ID NO: 347329 - DNA, 122 bp, Homo sapiens
gtcgagaggcaccttcactgccatctactcccaccttcttcctgatgcttgaaatctgtccgtgatcccaggtcagtgattgctcgaggctgtgacagggacactctcagacagcagcccac

SEQ ID NO: 347330 - DNA, 122 bp, Homo sapiens
ttcttataacgagccagtattataaaagtaatgcacatccttgccaggtgtggtggctcacgcctgtaatcccaccaccttgggaggctgaggcgggtgaatcagttgagctcaggagtttg

SEQ ID NO: 347331 - DNA, 122 bp, Homo sapiens
cgaggttttcctgtctctgggcatcgtcagtctgctggaaaacatcctggttatcctggccgtggtcaggaacggcaacctgcactccccgatgtacttctttctctgcagcctggcggtgg

SEQ ID NO: 347332 - DNA, 122 bp, Homo sapiens
caggaatccagactgaaacgcagtaatccactggcaagggaaatcttccgaaggcactttcgacagctgtgctaccaagagacccctggaccaagggaggctcttactcgactccaggaact

SEQ ID NO: 347333 - DNA, 122 bp, Homo sapiens
agggcatgacccagtgggaggtgggaatctcaccaataaaacgccctcatgtgccccttccgcacaagacctgagcgcccagtggaagcagctggaggacagaggagcttccagcagaagag

SEQ ID NO: 347334 - DNA, 122 bp, Homo sapiens
gagcacacctctgcactcccagctaccacctcagccacagatgtttgccaggaagctggacgtgctcttccctgcagtcttctttctctgctcctcgttgcttggcttggctgccacaggga

SEQ ID NO: 347335 - DNA, 122 bp, Homo sapiens
tatgagctgtgacactcatggcgaaggtctgcagcttcactcctgaagccagcgagaccacgagcccaccaggaggaacgaacaactccagacgcaccgcctttagagctgtaacactcact

SEQ ID NO: 347336 - DNA, 122 bp, Homo sapiens
tctggcacaagagggttctgccagatggcagaacctcttccttggcaggatgaaggccatcgttaagtggtctggtgtgtgtgtctggggtagcgatggggtcttatggagagatttggggg

SEQ ID NO: 347337 - DNA, 122 bp, Homo sapiens
ggggaaggtaggagcagcatgggcattggtgtcaggaagactcgggcaagttactctctccgaaccctcatttcttcatctgtaaaatgcggacaacagccattgcctaggctgctatcagg

SEQ ID NO: 347338 - DNA, 122 bp, Homo sapiens
aggcgccaacgacgaactgatttccttcaaagacgagggcgaacaggaggagaagagctccgaaaactcctcggcagagagggatttagctgatgtcaaatcgtctctagtcaatgaatcag

SEQ ID NO: 347339 - DNA, 122 bp, Homo sapiens
tattcacattcatgtggacataacaggactcctgaactgcatgcttcccccagtgacacacgccccatgcctccaggctgtgcacaggcaatgcagtggcagcccagagggagaggtgattt

SEQ ID NO: 347340 - DNA, 122 bp, Homo sapiens
tccccgcgcgccccgggtcggaggcagacccctgggtttgggggacatgggcatttggggcgcctgaacccaagacctctggatggtagggatgcccgggcgtcctggataccctgcgggac

SEQ ID NO: 347341 - DNA, 122 bp, Homo sapiens
tcccctgccccccaaccctgccctgcgcctgcgcaatgaaagacaaagtttttgctgacccgggcagcagactttggcagctgctctcgcttggacccggcctctcccaacctgcgtcccct

SEQ ID NO: 347342 - DNA, 122 bp, Homo sapiens
gggagcaaacacttctttagctccgcaaagcgattgcactttctcttccaagtcggcagacggcgcgcgagcagcgtaggcactgctccgcctccaatccagttgctcttctttcttttcct

SEQ ID NO: 347343 - DNA, 122 bp, Homo sapiens
tgggcaccacgaagccaggggcctgggcagtctgggctggcgccggcgggggcggggcggcggcagcgggcggcggcgggggaagtgggccctcgaagcgagtctcctgcaggtaagggtcg

SEQ ID NO: 347344 - DNA, 122 bp, Homo sapiens
tcttttgtgcatagacagaaattatgctagaattttatggctttttcttctcacttaatgcgtctgtgagcctctccccgtgggtccatgttactctagctcatttcagcaactctccagcc

SEQ ID NO: 347345 - DNA, 122 bp, Homo sapiens
aacctaggcagagttccgtgcgtgattcacaactttggaggcctgcaggtttgggggacgcggggagggcggagggtcccggacgcggcgcccccaaagggcccctgggtatcagtctagta

SEQ ID NO: 347346 - DNA, 122 bp, Homo sapiens
ttcaggttacagggtcccctcccctccccctctccagccagagccagcccttccccgccccggtgaccctcatggccagtggctctgtgctcatgggcctctggcccctccccaacctcctc

SEQ ID NO: 347347 - DNA, 122 bp, Homo sapiens
gcagcctggtggcctccatggtgcaggtgaaggtcctggaacgtgaggttgcggatgggccggcgctctgagcaggtctgcacctcgcccctcgagctgcggtaccacgtcttgtagaaggt

SEQ ID NO: 347348 - DNA, 122 bp, Homo sapiens
gtcccgggacacgctggccgcgcactcatcccgcccacgcgggcccagtttcgcggctcgcggcgccccctggcggacgctcagaaaacagataggctgtggtcgccaaaatccctgcccag

SEQ ID NO: 347349 - DNA, 122 bp, Homo sapiens
ctgggacattcacaatcttaccagtttgcctaatttagacccttgcctagaaatttctaccgtcaggattctgtcttgcattccgagaccactgaaacatctttgtcaagttacctgtaaaa

SEQ ID NO: 347350 - DNA, 122 bp, Homo sapiens
actttttattttaaaatgtagattcacaggaagttataatgaaaaatgtacagggaggtccgttggacccttcactcaatttgccccagtggtaccattttgtgtaactatagtatggtatc

SEQ ID NO: 347351 - DNA, 122 bp, Homo sapiens
aagggttctgtagagcatttactaggagctgccttgaagctgccctctgattcagctgggcgtgaagacaaggcaggcctcagcttctccatttccctcattgggagttgtgttgtttacga

SEQ ID NO: 347352 - DNA, 122 bp, Homo sapiens
ttgggccctgggtcacagagcagatggtcctgaatggagcacaggatgtgtgctgtgtgccgggactggcccagagctcaggtggtagtggtgatggtggtggtggtgatggtggtggtggt

SEQ ID NO: 347353 - DNA, 122 bp, Homo sapiens
cttccctgccgtccccatgccgatgcttggcaggccgaggctcgccacatctgagcagagcgcctgtgctttagcagtgactgcagatggatcagtgtccggacctttcttcggcctttgcc

SEQ ID NO: 347354 - DNA, 122 bp, Homo sapiens
actgcagtaaaggcgctgacccctgcttttcccctgtgccccctgcctggcttccacaagcgacttccctgcattgctgtgcctcctatttctagggaactgtgagtgcaaacaccttcttc

SEQ ID NO: 347355 - DNA, 122 bp, Homo sapiens
cgatggcgccgatggctgatgccgcgattacgccggcgggggcggcccgcgcgccacgaacgtgcccgacaagccgcgccgcttaatttctgaagagatttatattttttttgttgtcagga

SEQ ID NO: 347356 - DNA, 122 bp, Homo sapiens
agcctgagcctgaccgcatgaggaaggcacaacctctctgctccagagacctggagaggccgggaggccctgtcctgggcatggaaggcaggagggagccctgagtgcggcaggagggaagc

SEQ ID NO: 347357 - DNA, 122 bp, Homo sapiens
aagagccagcagtcctgacggtcgcggaggtaggacgtcctgggtggggcttaaggggcacggggaggcccctgcagggagtcctggggaggcgtcagggggagggggcactgatctctaaa

SEQ ID NO: 347358 - DNA, 122 bp, Homo sapiens
cctggaagggtgaacagctagctcatgtgtaaaatgatcgcacatcggttccccagctgccgcagcccagcgccggagccggagaggccagggaagagccttcccccgaggccagccaggca

SEQ ID NO: 347359 - DNA, 122 bp, Homo sapiens
cacctcttccacgtttggaaattggaatcctgtctgggaaaaggtaaccaaagaaggacgcgttccccaagtcttggctcttaccagctgatcttgggtggtggctttgaacttgccatcta

SEQ ID NO: 347360 - DNA, 122 bp, Homo sapiens
ggccgtatctccttgtcggcgccgctgattcccggctctgcggaggcctctaggcagccgcgcagcttccgtgtttgctgcgcccgcactgcggtgagtgctgctccttccgggctcgggcg

SEQ ID NO: 347361 - DNA, 122 bp, Homo sapiens
gacaagccagtggaactgctctcttaaaggtttcccagcagaagtcttccctcccagacgcgctggggtctctttggcactgcacactgaccacctgtttgtgggacagcaatcacacagtc

SEQ ID NO: 347362 - DNA, 122 bp, Homo sapiens
gctatggcagggggctccttatgattaacccagaacaggaaaaacttagtgtcagctgaccgaaaggaactcagccttaatttttcaaaaagtcactctcattccagctatctccaggaagg

SEQ ID NO: 347363 - DNA, 122 bp, Homo sapiens
gagcgtggcaagattagcgtttcagactccagacaaggccacttccctctccaggaaagacgatctcctcaccaacacaagcgcttggcgcttcccttttccgtccaggcgtcctggctgga

SEQ ID NO: 347364 - DNA, 122 bp, Homo sapiens
tgtctgtcgcgtagcagcaagttgcatgtggagaagcagaagcatgtcacatcaagcgctcgtcatcgttattcgttcacgttttcaggtttgacgcagaaggacaagccttagatggtgtt

SEQ ID NO: 347365 - DNA, 122 bp, Homo sapiens
ggcggaaaagtcatacagaggaccctgagaggagtccttgagcagttgttagtatttcaacgttctgctcttccagggttccaaaactgtgaattatagactctttaataaaggaaagttgt

SEQ ID NO: 347366 - DNA, 122 bp, Homo sapiens
cccagggtctccgcactttggctaccggatgcattcagaagcgcagcaggaagcctttcccgccgccttccccaccccatcccactcgtaggaagatccaagattccctaggatcaagtccg

SEQ ID NO: 347367 - DNA, 122 bp, Homo sapiens
cgtgggccagcgcgagttccaggtgggcacgagctcggcaggccctgcactcagagtggccggctagcgccaccagccccaggcaatgaggggcttagcacctgggccagcagccgcagagg

SEQ ID NO: 347368 - DNA, 122 bp, Homo sapiens
caccgtcctagaaccaacggcccctctgcgtccggtcaggcctctccttctgaccctcgccgtcctagaaccaacggcccctcggtgtctggtccttgctaggcaagcgcatggggttccac

SEQ ID NO: 347369 - DNA, 122 bp, Homo sapiens
gctgccggcgggtcgcgggaagcgtaggccctggccgccgcgctccccgcgcgggtccaacgccctgggtgcccttctcgcctgcgccttgaagcccccacgcccatcctagcgcgtctctc

SEQ ID NO: 347370 - DNA, 122 bp, Homo sapiens
tggtattcctcatctgggcaccccgggcccccgcccgccttcctgtcctgccagcaggaccgctcccaccacgagccagcccagaggacgtggcagtcccacagcctctgcacttggcgctc

SEQ ID NO: 347371 - DNA, 122 bp, Homo sapiens
agggtcccacagcgccaggagccacaaacgttcccaaaagtccagccatttactaccgcacgctctgcgcagccaccaaaaagggtcacggtgctccaggacaggagccgcggtgcggccgg

SEQ ID NO: 347372 - DNA, 122 bp, Homo sapiens
aggtgatcgacttctcgcaggggctggcgctctaggagcgctgccccaaggctgtggagccgctgtgggtggagggcgccgggcacaaagacatccagctctacagccagtacctggagcgc

SEQ ID NO: 347373 - DNA, 122 bp, Homo sapiens
caaggacttaagggttcagtgaattttcaccaggttcttttttcacctaaacttcaagagcgcggtaggagagccatcatttattgagttcctgctatatgtgggcactgtttgttaggtgc

SEQ ID NO: 347374 - DNA, 122 bp, Homo sapiens
agagaggggacttcagcctcccacggctctctagcaacccttctggctgactgcagggaacgcaggggacgcgcaaaagtaaaggaacgaaagcaaggaaagagagtctcttcccgaggaaa

SEQ ID NO: 347375 - DNA, 122 bp, Homo sapiens
ggtgagagtctctctgagcaacccaaacagaaggtactgctgtgggtcccccacttggcacgcgacggcgctgggtcggcctggcgcgccctcccgcgcccacgggcgctaggctaggtctg

SEQ ID NO: 347376 - DNA, 122 bp, Homo sapiens
tcatttgcaagttaaaatataacagcttaactgctagtggttttacatttttctcttccccgttcttttgatttacttacctatgtaatagcccattgatcaagatcctccctacacctgaa

SEQ ID NO: 347377 - DNA, 122 bp, Homo sapiens
taacagctttaaatttcccctgcacatggaaaagagatataacactgatgactggacctacgtaaggcttcctctgccaacaacacggtttggttgaacaccctctggcggtgttattttag

SEQ ID NO: 347378 - DNA, 122 bp, Homo sapiens
cgacgccgctgggtttcctcccattacagcatgttgcactccagcgctgcacttcacactcgcacacgcgcacacgcacacgcgcacaactccaggcgctcggcggcgtccttcccccgcct

SEQ ID NO: 347379 - DNA, 122 bp, Homo sapiens
gaagtaggattattagctaagagtgagaatgggggaggtttgaggctagagaagaaagaacgaactatcacctaagagagtgggaaaatgactggattagagaaatccggtgtgattactgg

SEQ ID NO: 347380 - DNA, 122 bp, Homo sapiens
agctcgggtctcctcgccacagctccgagtctttcgttctgggaggcccaggcggcttcgcgttctgagaataaacagaacctctgttgctctgcgacttgcaggcactgggagattcgtag

SEQ ID NO: 347381 - DNA, 122 bp, Homo sapiens
gcatgacttccaaagttagagcacattattgctcagttccagaacatccaccaagccatgcgccccacaaagttccttcatcttagtaatgctacatttaaaatacaatccacaaacctcca

SEQ ID NO: 347382 - DNA, 122 bp, Homo sapiens
ccgaccctgaatagaacaagcagccactgtggtttcttccaacaagggacactccataagcgttaaagtttaggaagcagagctttgtgcatggatgtggagaaatcgcagaaacaatgata

SEQ ID NO: 347383 - DNA, 122 bp, Homo sapiens
actgcgatccgggtcagtgcagatcgcggcagttattttacctatgaacgcccagcacaccgtcaaacgctcagctcaggtgccccaggcgggcaggcttttcacttgggagcatttccttt

SEQ ID NO: 347384 - DNA, 122 bp, Homo sapiens
tgggaggatggagggagggattcccaagagcgttgaggaaacatcagaccggggatctaccgaaggcccaccctgactcagctctcccgggggcgggcgtgtacaggtcccccagctcctgg

SEQ ID NO: 347385 - DNA, 122 bp, Homo sapiens
ctggcgcggcttccgcagtgccgagcgttttgcagcctgggagacccgggcttctctccccgcgggtcagcagggcaccgcctccacaccccagcctgccctcctagggacaggtgcgacga

SEQ ID NO: 347386 - DNA, 122 bp, Homo sapiens
tattgctaatctgtcagaaaataacaagcataaggaataaaaatatccgcgaaacagaaacgtctgctgaagcagcttttacttccggtgccttaaaaggttcagttagaaaacttgctaga

SEQ ID NO: 347387 - DNA, 122 bp, Homo sapiens
cctccgacgggcatttgtctggctgcgtccgggctcgggacgatcctgggtcctcgctggcgctgcggccctgcccggcggcttcgtgacctccggcggcgaatccccgggctcgcgcaacg

SEQ ID NO: 347388 - DNA, 122 bp, Homo sapiens
gggcgagcccttcctctctcctttcctcccctcccggggcccccggactggctttgaagccgtccagccagcgctgtgtgtgcgaggcccttagcctccggcctggccttcctgcctcccct

SEQ ID NO: 347389 - DNA, 122 bp, Homo sapiens
tcttgcctcgtgactgatccagaatgggccttggaccccacaaggggctcgggggcctcgcgggcctgagggtgacactggcggcctcacgggcctgggctgccccacgctccaaggggtca

SEQ ID NO: 347390 - DNA, 122 bp, Homo sapiens
gcctagctccaggcactgtaccgtcactgtgacgtcgcggaaggcccggtgctgtgacatcgccgaagacacgcgccttcggcgaacgcccgtccccgtgacgtcaccagaggtgcgcccaa

SEQ ID NO: 347391 - DNA, 122 bp, Homo sapiens
actctgcaaaaaatccacgcaagggtgtaggatctccagcagaaccttcggaagccttgccggcaagagtgcatttggctggcagagtccctcttgcacacctgctggaaagctgggtggga

SEQ ID NO: 347392 - DNA, 122 bp, Homo sapiens
cctctgcacaggcgcttccccatctgtaagtaggaggattgcagtatctactggcaccggcgaacttgactttattgggaaagaaaggtctttacagatgtgatgaagctcaggagctccag

SEQ ID NO: 347393 - DNA, 122 bp, Homo sapiens
tggatttgagctttattcagtagtactttgccttggaaatggtccaggttattttggaaacggatattcaattcaaatgatgacagccattggcactcactctggggctcaggagggaaacc

SEQ ID NO: 347394 - DNA, 122 bp, Homo sapiens
tcgcggcgcctgctctgtagagccggcggaaccgggtagcttggccaggttgtgaggaaccgcagcgcgccgcaggaccgggccgctgagcctgcagccgccccgcgccgtgacctgcgacc

SEQ ID NO: 347395 - DNA, 122 bp, Homo sapiens
catccgcctggcaacatcccagtcttgaatcggtccaactgtccgccttttccatgcctgcgcccaggcagctaaacattgctggggaaaactattcaacttcacagatttgtgccactata

SEQ ID NO: 347396 - DNA, 122 bp, Homo sapiens
gagtagctaggattacaggcgcccgccaccatgcccggctaattcctggcattttaaatacgataaattacttcaacctatgaccacctcaagctgaatataagtagccgcagacaccgttt

SEQ ID NO: 347397 - DNA, 122 bp, Homo sapiens
caggtgccgtcggtcacccctttgattaggaaagggaactccctgaccccttgcgcttcccgagtgaggcaatgactcgccctgcttcagctcgcacacggtgcacgcaaccactgacctgt

SEQ ID NO: 347398 - DNA, 122 bp, Homo sapiens
agaaggagttaattaagtggagaaagggtggtgaggttcacagaaagaggtcggggtatccgcaagtaggggaattggaacagaaatagtccagtatggatacagcagtggttctcaaactt

SEQ ID NO: 347399 - DNA, 122 bp, Homo sapiens
cttaaaggtgccgcagccgccggcccccccacgcccagcccgccccccccagcctggcctcggaggccagaacaggctcggcaggtcccctcttgccacgtctctgccctcccgtggggctt

SEQ ID NO: 347400 - DNA, 122 bp, Homo sapiens
ggagccggagccgaaagtctccccggagcgcaggtgaaagtttcatgcaaactccaggctcgcagagacgcccggccggaccctcccgcagcccgcagcgcgcggagcccacacaatatttg

SEQ ID NO: 347401 - DNA, 122 bp, Homo sapiens
tgatatggagagacaagcgctgatggaaggtgccacttccctggttcagatgtgcacagtcgtcaccagcaattaatgccactgcattggtcctgcctccctactggaacagacctgaatgt

SEQ ID NO: 347402 - DNA, 122 bp, Homo sapiens
aggctaggctggaaagtggaggatccggtttgctctgggcgggtctggaagcagagccggcggagggagcgccggggccctgggctgcaggaggttgcggcggccgcggcagcatggtggtg

SEQ ID NO: 347403 - DNA, 122 bp, Homo sapiens
agtgagactccaacaggggaagaaacttggccaagctgtgtgtggagacaggaattaaggcgaggtgggaggacacccaggcacagtatctaagcaatctgggatcaggaatgggcattttg

SEQ ID NO: 347404 - DNA, 122 bp, Homo sapiens
gactcttttttaaagtccgtggaggaagtgcaggatccctccgcggggagtcacgtgccccgcccccttgggggcgtcgaaactcttaacaaaaacaaggggctcggggaggtttccgctga

SEQ ID NO: 347405 - DNA, 122 bp, Homo sapiens
ctgaggcccggggagaattgaagtgcagcgccggcgggccggcactgctgggggacctggcgcaccctcctccgctgctggcccgagtgctaagcccctcactgcccggggcgggaggcgcc

SEQ ID NO: 347406 - DNA, 122 bp, Homo sapiens
gaaagcctgggttgggtggagcagaaccatcttggagaagatgacagttccctgtcctcccggagatgcctgggtgtgttagcagaggtgacacgtgtctgacagagacgggagctctgagt

SEQ ID NO: 347407 - DNA, 122 bp, Homo sapiens
agaaaatggggaaaatgagaagaccgtgagttgatgccagttatcatgctgccactacatcgttatctggaggcaacttctggtggtttttttttctcacgctgatggcttggcagagcacc

SEQ ID NO: 347408 - DNA, 122 bp, Homo sapiens
aaaggtgaccccgggggcaggtcccggcgcctgggaagggaacttgcacagctaaattcccgctggaccctgaggctggactcgcagtctggacaccgacctccggagccctgagtgggtcg

SEQ ID NO: 347409 - DNA, 122 bp, Homo sapiens
aagataatatttatattcctttaagactaaagaccaaaacctggaacattagtcaattcacgacagttatgaaaaagacctcttggccttctgtggccatatccctttgtatcatgtgcaca

SEQ ID NO: 347410 - DNA, 122 bp, Homo sapiens
aattgaccgaaagctctatgttttcgttaataaagggcaacttagccaagtttaaggtcgcgtgcgatgcattcttccctagccaaggggcagtcaccacgcgcccttctgcctgtgaggga

SEQ ID NO: 347411 - DNA, 122 bp, Homo sapiens
catcacatctgagtatgttgaagtcaccgaggatcaaggagacagcactgctggagagggcgatagtgaaccaggaactacaagagtcaggactgagaggaacggcctggggcccacaggga

SEQ ID NO: 347412 - DNA, 122 bp, Homo sapiens
gtgaaagacagacccgcggccaggctcccagttctccagctcgtagagggcccaagtggccgctataatctgaaagagcagatatcgtaatcccatagtacttcctattggctgcaggacac

SEQ ID NO: 347413 - DNA, 122 bp, Homo sapiens
agtgatcctcctgcctcagcgtcccaaagtgctgagattataggcttgagccactgtgcccggcctgccttgacttttaacttctgtccaggtaggggctttccaggggcaggcctagccat

SEQ ID NO: 347414 - DNA, 122 bp, Homo sapiens
gcagaggatggagagggctttaagcaggcatgtgggctggggcctggtgagccagccctgcggagggaggaatgtgcgacaggggacgggtggggcagggggatggcggtgggggtgggggg

SEQ ID NO: 347415 - DNA, 122 bp, Homo sapiens
tgactggcaggaggccggggcggggggaacccccaagcccggcgtctggggctgcgggtccgacccgagatccgccctccctgcaagccccgagccgctggccaggcccgctactgcgcacc

SEQ ID NO: 347416 - DNA, 122 bp, Homo sapiens
gaatctgcttaagattcttatatctttagcttttaaaacaatacatctaaagacagaaaacgtttacatggcacagtgtaatgtggtgattaagagtatgaattttggagcaggtgcagtgg

SEQ ID NO: 347417 - DNA, 122 bp, Homo sapiens
ggagggggctgcctctgagacaacctcttgctgtaggctttcctgtctttttctcaaaggcgggttcctttcctcattgtcaagattggccgctcctatcctattcctgctcagagcctggt

SEQ ID NO: 347418 - DNA, 122 bp, Homo sapiens
aacacctccctgcccctcacccctgcctgtgccaggaacgacaagctgaagatccacatgcggaagcacacgggagagcgcccctactcatgcccgcactgcccagcccgcttcctgcacag

SEQ ID NO: 347419 - DNA, 122 bp, Homo sapiens
cgctgcgctgcgtgtcagctctggtaagccgtctagcatgtcattagtggggacctgaggcgccagcgggaaagtcccctccccgtgggctggaggctgagggagggcgggccctgggctgg

SEQ ID NO: 347420 - DNA, 122 bp, Homo sapiens
ctcacaattaacctgcaatgatttaggaatctcatgggcctccggccccaccttttgtcgcgggattaagataattatgagagcaacgtgacgtccaagacctcggctctctgcgcatcaga

SEQ ID NO: 347421 - DNA, 122 bp, Homo sapiens
ggaggagggacaggagtcccaagaccactgtcttgggtgcgggatttaaccagtcacacccgtcagccccttggaacgtcacagtgttcccttaaagtgggcaagacaagaactgttgcccc

SEQ ID NO: 347422 - DNA, 122 bp, Homo sapiens
ttaaaaaaaaaaaaaaagcaaagcggttgcgtctttgttccgtattcagtggtttgttctcgcggttatctagcggaaaacagcctttcaggaacaaggagctgtcccttggggatcagtag

SEQ ID NO: 347423 - DNA, 122 bp, Homo sapiens
ccggacggttgcgcagagatgaggctgcaggcggggaggcctggcgaggtggggctgctccggggaggaccaggctctgcccctcgcttccgtccgatggcgggctcttcccggcagcctcg

SEQ ID NO: 347424 - DNA, 122 bp, Homo sapiens
agctgccaaatagaatgcttttcccctagtgtccgcccaatttcctgcctgcctggagcccggaaggtgcatctgggcagagccaatgcaggacacttggctgggacctctctggtcacagg

SEQ ID NO: 347425 - DNA, 122 bp, Homo sapiens
gctccccggcgtctgctccgggcccaggtatgagcccgcgcgtcactgcggccgccggggcgccgaggccagtgcggggacacagcaagcctcccgccttcggaccttccgccgtggccccg

SEQ ID NO: 347426 - DNA, 122 bp, Homo sapiens
gggcctttgagggcagcctgagattggcggcttcctcccctcctccctggcccccgtgaccgccgccatcctgatggccaggtcctctctcagggagctgcagaacgcacccgacgccatcc

SEQ ID NO: 347427 - DNA, 122 bp, Homo sapiens
ggaatgctgccttcggtgattttaatttcacttttctacttctctcaataacaaaatccgcgtttcaaactccagggaaaagaaaacggaattggctccaggaggatctgcaatcaccaccg

SEQ ID NO: 347428 - DNA, 122 bp, Homo sapiens
acctcgtgattcgcctgccttggcctcccaaagtgctgggattacaggcgtgagccaccgcgcccggcctgcactggggttttaagtcccaatagttttaagttagggctggtctcctcaag

SEQ ID NO: 347429 - DNA, 122 bp, Homo sapiens
aggtgctaggcccacaaagggaggcatgttatggccgtggcattctgcttggccaggatccgagaggagcctcccaattggaggatttagcccaagttgcttcattccctgtccagtggagc

SEQ ID NO: 347430 - DNA, 122 bp, Homo sapiens
tgcaagagcgcaggcgcaagggaccggaaacagggccttccgcggttatacagatccgtgcgctccaggcttgcctttggaaaatgcctgtctgaaatttgttttaaaaccgtttctaactt

SEQ ID NO: 347431 - DNA, 122 bp, Homo sapiens
caaaatagaggaggtttcgtacctccctttgctcagcgtcaggctggctccatctcaaagcgcttattcaacccagacacacatgaatgacactcatgcacctgtgttaaggcaaagggctc

SEQ ID NO: 347432 - DNA, 122 bp, Homo sapiens
tggacaacagaaatgaacccaggccgccattccagttctccttctcaagtgactcatctacgccttgcaaaatccagacaagtatctggaaacttgaagttccttgctgtagcacttcagat

SEQ ID NO: 347433 - DNA, 122 bp, Homo sapiens
aggagaaaaccaatcccttctgccagcatctgacacgtctgtcagagcacacatccttcccgacatgggctagagaggattgcagggtctgtcctcaaggctgctcccatccctgggggctg

SEQ ID NO: 347434 - DNA, 122 bp, Homo sapiens
ccggtagctggcatggtatcggcggcagaggtggcatttggcagcaagtgcaatgaggagcgagaggaccacagcccccagcacaaatcctaccagcacaggccatgcccgagccccagtgc

SEQ ID NO: 347435 - DNA, 122 bp, Homo sapiens
ctccagccaccaaacctgtgcccgccattctgaggacctcaggtttgcctgcgttttctgcgtctgcgtaaactcagttatatttaattacgccggcgcctgacactgatgtaatcacgttc

SEQ ID NO: 347436 - DNA, 122 bp, Homo sapiens
gctcagggagcgacgtctatcacgatctaacccagccctggaggccgtgtcgcctccttccgcctccacgcgtagtcatggtaagcagggtcttgaacctctcctgtgggagccgcggagct

SEQ ID NO: 347437 - DNA, 122 bp, Homo sapiens
aataaattgctgttgttgccctcactccccctctcaggttcttggagccattcaatttaacgtccccaaagtttgcgctgaagatgcgatgcaaggacgcgttagcaccaaatccttcttag

SEQ ID NO: 347438 - DNA, 122 bp, Homo sapiens
tgcccacacacacctgcaccttctgctgagtctcctcacgctcggcagcctccagggcctcgcggggccccccagtctgactcttcagggtctgaatctcctagaggagaagagttcccagg

SEQ ID NO: 347439 - DNA, 122 bp, Homo sapiens
tctgcaggggagagaggatgcccgtaatggccacaggagaagctgcctccctcgccaggccgccccgcccaacggtgtgggaacccaggggccagcagattgagccctgagtcccctgccct

SEQ ID NO: 347440 - DNA, 122 bp, Homo sapiens
tctcagaagtcccagcaagccaccgtatggcataaggtctttgtttcctcacctatccaacggaggtgacaccctgctcccctgggtgcagctgctcctccttccatttgagttctgccaca

SEQ ID NO: 347441 - DNA, 122 bp, Homo sapiens
tggtctggctttagggaaaagtccatttgctcacttgattccgtggtgtttccacgtgagcgcagctgtgtgtgtcagctgatgtgtgtgatctgagtggtttctataccgtcgtggaaacc

SEQ ID NO: 347442 - DNA, 122 bp, Homo sapiens
ggttggaaatgaggaccctgacactgtgatcccggagtccggagtcctcctgccgggccacgagccctagcaccgcacacatggtccgcactacgaatctggggacacaggaggtggtgact

SEQ ID NO: 347443 - DNA, 122 bp, Homo sapiens
gaaacagggaaagcagtcatctttttaacaactatttgatattccacataaatatcctgccgtgggttaggcccagaattttgggataacaaatcaggcaaggacagggaggcagccctgtc

SEQ ID NO: 347444 - DNA, 122 bp, Homo sapiens
gggctacggaccgcccaggggggcggggcttgggagttggggcggggcccgggtgaggggcggggcctcggggcgtcgcggacgtcctggcggcctactgcgtgggagggagtcctgggccg

SEQ ID NO: 347445 - DNA, 122 bp, Homo sapiens
ctgtctcagaggaggaggcactgaccacacagaatgttggcctggagccggagctggtgccgggtgctgaggggcccttccagtgtggtgaatgcagccagctcatcctctcccctggggag

SEQ ID NO: 347446 - DNA, 122 bp, Homo sapiens
ctttccaccggagcctgtgaatcgcagcctcgtggcaccaccacagttggcttctcaagtcgggaggctgactccttgaaccgggcgcctcacttcacgattgctttcagctcaaaggagca

SEQ ID NO: 347447 - DNA, 122 bp, Homo sapiens
gcagccccagcaagtaggtggctgtgcccgtgttctcgtgcatcgcaaagcctcagtggacgctgagagccgggtgaatctgacttactccgcttctaaaaaatcgaggcccagcctggctg

SEQ ID NO: 347448 - DNA, 122 bp, Homo sapiens
aaggattcatttctaggacgaagattaccagctgcttcctccaaacagcctttcctgatccgtctcccaattagaactgatagctcccatggatgggtgtggtggctcacgcctgtaatccc

SEQ ID NO: 347449 - DNA, 122 bp, Homo sapiens
ttactcaacactcagtaggtagtaacttcagcccttcttaccacttactatttgtgttttcgattttgttcccttttattttgtgcttgcttcttgatgacacttttttttcttctcttctt

SEQ ID NO: 347450 - DNA, 122 bp, Homo sapiens
cgggtgcggggacgcgcgcgcccaccttcgcaaacgagacttccgggatcccggagggggcggaagtcgaggcctctctcgcttccggctcggccattgtttttggtctaacgggcagtaga

SEQ ID NO: 347451 - DNA, 122 bp, Homo sapiens
cctccccctcccacccttctctgtctacctctgggcgggactgccgggtgatgagatactcggtcggcgacggtagaacgggcgacggcgacaaccgcaatcacatccacgacggtgatcat

SEQ ID NO: 347452 - DNA, 122 bp, Homo sapiens
ggttctgtcccttctgagatctttctctgtgtaaagcatgccgtctctcctcatctcacacggaaatcctgaacatccttcaaggctcacgttggagacgggtcctctcttttgtgttcggc

SEQ ID NO: 347453 - DNA, 122 bp, Homo sapiens
cagccttgtcccacacagcaaggtacaagggaccggacgtctgcctcctcagcagcgcagcgcacaagcttcctgtcatcccggcgcccacgatcagcacctgcgccatggcgagagggagc

SEQ ID NO: 347454 - DNA, 122 bp, Homo sapiens
cagattcaaggcatctatttgctcaccatttaaacccagcatgccaggatgccaaaagagcggcagctttgagtggaggaaacagcagccaagtcattagaaatacaaagcaagctaaattt

SEQ ID NO: 347455 - DNA, 122 bp, Homo sapiens
ctgttttggctttgagtcgctgcctcttgtttctgagatttgagcgtccggcagggcgagcggggagagccaccagttaggtcagctacttaagggaagatatttctgtctctgggactgct

SEQ ID NO: 347456 - DNA, 122 bp, Homo sapiens
ccttcgcgcggcccggcgccctggctcccgcgctcccgatgctgaggaggcggtggatttcgggctgcgatgacctttcttgaccatttactttgagtcatgggtgcctaagcgaaatgttt

SEQ ID NO: 347457 - DNA, 122 bp, Homo sapiens
tcgtcatcatggcccattctcaatgagctcttgggtacacctcccagacggtgtggcggccgggcagaggggctcacttcccaaaaggggcggccgggcagacgcaccccccacctcccgga

SEQ ID NO: 347458 - DNA, 122 bp, Homo sapiens
agtatctgtggatggcgctgtgtcgcccaggctgtgcctccctgtgagtccctgcccagccgggcccagactccaggtctggcaggctgtcactgtgaggcactgagctctcgacaacagag

SEQ ID NO: 347459 - DNA, 122 bp, Homo sapiens
atagaaatgcgaaggtgacctagtattcagtctcattagcattctcattaataattacagcgatcagacattatctttgtaccctctaattctgctctcactacctgctctcctaggtactt

SEQ ID NO: 347460 - DNA, 122 bp, Homo sapiens
aagctacttccacaagaaagagaaccacacaaaagggttatgtttgggggcgctgggacccggagaccctctcagctttctgaaagggctttgtagtgcttggatccaagccatttgtttct

SEQ ID NO: 347461 - DNA, 122 bp, Homo sapiens
agcctgggcagactccaccaccataaaggcgaaaccgcactgacggagaggagccagcgccggaaaagatggcggtggtgcgctgacgtcacttccgcttcaacactctggccgggcgaggc

SEQ ID NO: 347462 - DNA, 122 bp, Homo sapiens
atgcgtttctgaagccgtcgctgttcagcagagcggtgagaagggcaacctttttctgatcgctttcccaagcaggcaggaatctaagtgtccggaaacgccaggagctggccgccaggtga

SEQ ID NO: 347463 - DNA, 122 bp, Homo sapiens
gagggttcctgtatgtccacacccctgccaattcttgacatcatgctgattcacaactttcggcagtgtaatgagtgtgaaatgttatcttttttaaaaaaattatatttctgattactaat

SEQ ID NO: 347464 - DNA, 122 bp, Homo sapiens
ttcactctgcacaccaagttagctgcatggcagaacaccaactgggcctgctgctgctggcgccgaaacagtggacagtgccgagggccgggactcagagtcgagcgtctcctggaatggag

SEQ ID NO: 347465 - DNA, 122 bp, Homo sapiens
agtggacatagaaaaagaggctggcaagggttgtttccagaggggtctgagccaatcccacgctgttgctgggcttgaggttccacatctgtgaatgggaattaagcttcccctgccttcat

SEQ ID NO: 347466 - DNA, 122 bp, Homo sapiens
cctactggcgaggtagggctcaggacctgcagccctccatgcctgagcctcccctccacccgccatgggctcctgcgcagccccagccttcccgacgagcgccaccccatgctccacggcgc

SEQ ID NO: 347467 - DNA, 122 bp, Homo sapiens
tctgatgtgcgcctgaatttaagaaccactgatcttgacaacacactatgtgttgactggcgtttttgtttccctccttaggctgtaagcagcttaaggacagggactctgtcttatctcca

SEQ ID NO: 347468 - DNA, 122 bp, Homo sapiens
ggccagtcggagcgctggggagggtccgggctcctacaggattgggtgtcccggccgctccggaagacccgcctccatgcaaataacggcagaggacccgccttttatttaaattaatgtct

SEQ ID NO: 347469 - DNA, 122 bp, Homo sapiens
agggcacttctgctgaactgtgcttttccctgcactgtgtcagaagaggcaggtgggtgccgggagcgctctgtggccaaggctctgatcacaagctgccaaccccggaaccccacctatcc

SEQ ID NO: 347470 - DNA, 122 bp, Homo sapiens
cagaacaaaacatgttgatcatgtgcaatatttcttactgtgccgagaagccgcaatgagcgagattaaagctgtttaacacacctgtgtggctgtaggctcttaacagggagggctgttgg

SEQ ID NO: 347471 - DNA, 122 bp, Homo sapiens
tagtggcactggtaggtgcggcactgggcgggggtgagccaggcggggccgacaggggctcgggggccagacccggcctcatgcagctgccgttgagctccttgctcttggcatgtggggca

SEQ ID NO: 347472 - DNA, 122 bp, Homo sapiens
tgactacttgaaaagcaggctgattgtcaggggcggaaccgaactcagagctgtcagggccgtcacatggaaagtgcctggcagggggcggcgacagggggcttgggctgacagggctgtga

SEQ ID NO: 347473 - DNA, 122 bp, Homo sapiens
tcctttagtcttgacaacaatcctttgaagtaggtattattatttttaaagtggagaaaccgatgttcagagaaattatggaacttactcaaggtctcacagctagtcagtggctgaaccag

SEQ ID NO: 347474 - DNA, 122 bp, Homo sapiens
ttggcgtcacatgccgaaggagtcttctaatgtctctccctctctgcgtgtctgctctcacgcccgtgcaggcatgacgagtgttctgatgtcagccattggactccctgtgtgtcttagcc

SEQ ID NO: 347475 - DNA, 122 bp, Homo sapiens
cgccgccctccttctccccgggactcgtctccctccagaggccgccaagccagggggaaccgatgtcccgactggggctgaaacccggttcctgcgcccctaccccctacccgccgcgcgtc

SEQ ID NO: 347476 - DNA, 122 bp, Homo sapiens
acaccgggcggcggcggaaggcggcccgagggtcccgcgcgtcccacaaccctccagtcccgctctcctggcctctccaggcgcgtgttttgtcttcctggcgcaccaacatatacacttgt

SEQ ID NO: 347477 - DNA, 122 bp, Homo sapiens
acacgaccgccacggagcctgtggggccctcctgtgtctcaaacccgagcccttccccggcgcccacatccaggtgggtgtcaagggagggagattccccacactcaggatctccttccctc

SEQ ID NO: 347478 - DNA, 122 bp, Homo sapiens
tccctttcgctcctgctccaggctccgcctccgccgtgtccgggccgctcgccccgcccccgctcgccccgcccctggatttgctccctcaaagcggaagtgaggccggactgaggctctta

SEQ ID NO: 347479 - DNA, 122 bp, Homo sapiens
actctccttcctcacctgctccgtggctccgtctcctgacatggcctcagctgattacaacgtgcgcactgaccgtcgatgggaagctagaaaagaaaaattaaactaaaaaccacccccaa

SEQ ID NO: 347480 - DNA, 122 bp, Homo sapiens
ctgaagcacggaaagctaattgtgtcactggtttcaaatcaacctcaatttttttggagacgtgagtgctgagcattttttcttcagtgaagtgacttggcagccaaaatcgccaacgcccg

SEQ ID NO: 347481 - DNA, 122 bp, Homo sapiens
agggcttcccagaggccggcctggctgggctgcagcagattctcaaggcgggaccgtggccgaggcctcgaaaagggcgacccggaggcagagccggcagggacagagcctgctgggggagg

SEQ ID NO: 347482 - DNA, 122 bp, Homo sapiens
cgcgtggtggcggcttgctcatgcttccgaggagtcccaggcgatagccttcagctgatgcgagcttccagaaaggagtggggaagggaaaaaatcatctaatgcaatcaaatcgatctgat

SEQ ID NO: 347483 - DNA, 122 bp, Homo sapiens
tgtcatcatcatcatcatggcagctctctgagttcacctactgtgtgctaggctccgtgccgattcagagctttacatacatgacctggttacatccttatgaccatccatagatccaggaa

SEQ ID NO: 347484 - DNA, 122 bp, Homo sapiens
caaggacatgtgctgggagcgtctgcaaggtccgtctcgccgtgggggccgggaggagaacgtaccgtcctcaaggtccgtctcgccgtgggggccgggaggagaacgtactgtcctcaagg

SEQ ID NO: 347485 - DNA, 122 bp, Homo sapiens
ctcctggtagcgctcggctgggccctgcagctggctgggggaggcctctctgtggccacacgcctgaggtctgggctggttccccttgctgctgcctctctcctgggtggacagtggtctag

SEQ ID NO: 347486 - DNA, 122 bp, Homo sapiens
gatcgcgcacgcggcccgcgggcccggcggaggcagctcccgctccggggacccgggacgcgccgctcccccgccccaggctgcccgcgcaggaacttcacggccacggccaagtggggccc

SEQ ID NO: 347487 - DNA, 122 bp, Homo sapiens
caccagtgtttctccagaccagcgatggagggggagaatcagcaccgcgtctggaattcccggtgcctgtggaaggtcctgtctgccctgcagccagactcatttcctcctccaagggtggc

SEQ ID NO: 347488 - DNA, 122 bp, Homo sapiens
ggcggccagagggaaacgggggcggggactgcttactacggcggacgtcacataaacaaacgcccccccccccggctgcaggccgcggcggagagggagaggcgaggtgggaaagggaaagg

SEQ ID NO: 347489 - DNA, 122 bp, Homo sapiens
ttccccatctgtaaaatggggaggaacacacatgctatatggatgactgtgagggttaagcggagcactgcagggcttgtagggtttggagatccagctcagctgctataaacaaggacaca

SEQ ID NO: 347490 - DNA, 122 bp, Homo sapiens
ttccataaggaataaaaccttgtcttccattacaattaacagtcaaggataaaacaagcacgcgcacaatcaaggagctggaacacactctccaggccgtcaaattattctcttgttcattt

SEQ ID NO: 347491 - DNA, 122 bp, Homo sapiens
gggctcaaggtgagatgattttttgggtccaagtctactcaagacaggcatcccagtcttcggtctccaaatccacctcctgtctgtccccccacactgctcctcaggccttgtggatccat

SEQ ID NO: 347492 - DNA, 122 bp, Homo sapiens
cagtgacggggacccggcgacgcctaaggtgacccagaagggacaatatggcggcgcggccgcatggagggcctctcatcccgccccaagcaggttgacgccacggtacctgcaagccctgc

SEQ ID NO: 347493 - DNA, 122 bp, Homo sapiens
gccggggccactggctggagctggcacacctccgcctccctctgggatcctgcctccctccggaaggctcccgctgctggcggctctgtgcccaccctccttagacctcagcaacgccggtc

SEQ ID NO: 347494 - DNA, 122 bp, Homo sapiens
cgtcctgcgcctggtcaggtaagcacccccccgctccccaccgctgcactccccaaactgcgggctcaggcctctcagactggcactgggaccccttcggctaatgccgagcagtaataggg

SEQ ID NO: 347495 - DNA, 122 bp, Homo sapiens
ggagcagcagcctccaaggttcccaaagcccacgattcaggcgagcggtgccgaccgggccgtggactgtggcattttaaaactacagaagtctcactgcacgactggcgcggccgaggtgg

SEQ ID NO: 347496 - DNA, 122 bp, Homo sapiens
acccagcccgctgccccccgcatccccgctccgctccaacgctcggagccctcggtgccgcgcctgttccagtgtgttacaactcgacccaggccctcatgtgaggacaaacagcccttcta

SEQ ID NO: 347497 - DNA, 122 bp, Homo sapiens
ggagatcgaagggggaaatctccgtggaccaggtctgagagagcctagccgtctagaaggcgctttctggagctcagccagaagcccctgctctgtcctacagagaaggatggttaccagca

SEQ ID NO: 347498 - DNA, 122 bp, Homo sapiens
tctacctatttgtaaaaatgtgaacattaaaaacagtacaatgactgggctctcacaaaccgtgcaaattcaatttgaaatgttcatctggtataatattcagctgtcaagaggaagcaact

SEQ ID NO: 347499 - DNA, 122 bp, Homo sapiens
acttgggcgaaggtacctagcctagtgcgcatctttactgacccggggagagtctgcactcgcgaggcagcggccgctggactgcaccggttctcctctttggaacacttcctcagcatagc

SEQ ID NO: 347500 - DNA, 122 bp, Homo sapiens
attttcaatcatttcggtgcccgaagggaggcaagagctcagttttatattgagacattacgccggctgaaggcagagaatgcgtttccctgccaggacctgatgcaatccattcaagccaa

SEQ ID NO: 347501 - DNA, 122 bp, Homo sapiens
gactcaggcccaactgggaccccaccaggcacaagcctatcggtccgggacagtggccagcgcacagctgcacggggctctgaggacgaggcccaggacaacttcagcccccatgtgactga

SEQ ID NO: 347502 - DNA, 122 bp, Homo sapiens
agactatagatagggttttgccatgaaactgggtgactttgcctgggggcatatgccccacgggagttacatggctttccatgagccaacgacattggggtggggaaccctgacattcactg

SEQ ID NO: 347503 - DNA, 122 bp, Homo sapiens
ccaggaggtggcgatgacattacatttccgggtttggaacaggaaggctcatggtgtgggcggcatgagagctagtccatgagtcaggcagagaatgtttacacgtggtggtaagaaaagca

SEQ ID NO: 347504 - DNA, 122 bp, Homo sapiens
gggaagcgtgtggaagcagagccatgcctgctgtgggtgcacatgcccgcgtgagggagtcggggtgtttcatcctggggcacctgtgggcttttgaggtgtatgatattcagaacttcaca

SEQ ID NO: 347505 - DNA, 122 bp, Homo sapiens
cccgggcagctaccgagaagcgccaatcaaccatcgaccaatcagatcatcaccgtcaatcgtcatcgaccaatcagagcccaccgcgccccggccttaagccagttgcttgttccgcggcg

SEQ ID NO: 347506 - DNA, 122 bp, Homo sapiens
gagaagggggcgcggagcgcggggcacgctggtcattgtagtccagtccatatgagctcccggggcactggactacaactcccggcaggctctgcgccagaggccgtgggagacgcagagaa

SEQ ID NO: 347507 - DNA, 122 bp, Homo sapiens
gttttaagtttatacattaccgtgttccaggttatcttctttgtttttacgaaagttctacgttcatgattgagcaaataagtgtgaagggtagctggtctttgtcttagattgtccattgg

SEQ ID NO: 347508 - DNA, 122 bp, Homo sapiens
cctgcgtgctgacggataggccgagtccccgccccgaaacacaccccgcgcacgatgctccgccccacacgcatgccccacccacccagcaggcacgctcgccccgcccgccccttccagct

SEQ ID NO: 347509 - DNA, 122 bp, Homo sapiens
ggtatctgagatggaatatatttcctgaaatcaacagagagattgaagggaaaaaataagcgagtgaggaacacatggacttcaatgtatctcaaatatctcttgcaccactgtgaatacca

SEQ ID NO: 347510 - DNA, 122 bp, Homo sapiens
cccctcttattctgaactgatgaccccccacttctcaccttaggtggaaaatttccaaaacgtcctgtccagaaacctgacaattaacctgcacgggcgtccatccattttgtctggagaga

SEQ ID NO: 347511 - DNA, 122 bp, Homo sapiens
taataagaatgaatatgtttccttcaagcagtatgtgggcaagcacatcctcttcgtcaacgtggccacctactgtggtctgacagcgcaatatcctggtaagagaattcatagttacttct

SEQ ID NO: 347512 - DNA, 122 bp, Homo sapiens
ttaacaaacacgcacccagtgtcaagaacagtcaccaggcgcttaaccccgaagttaaagcgggcgcaatctcctcctgggaactcagcccaggcacgccgccctccgcctctaaattcaga

SEQ ID NO: 347513 - DNA, 122 bp, Homo sapiens
agagcccggcgaagagttggctgctctccccgtccacacatacgataccagagccaggggcgagggctggaggcagagttgggagcctgcctggcagacaccagggctggttgagcctaagt

SEQ ID NO: 347514 - DNA, 122 bp, Homo sapiens
atttaatcttcataattaatcaatgaaactggtgccatatttattaccagaaaccaaacacgaattgaaaggaagcttaatacccaaagggaagtgaagagaaaatcaaacaggcacttgtt

SEQ ID NO: 347515 - DNA, 122 bp, Homo sapiens
ttgtcttttccacttagtattaccgttcaaaacccacgtacaccaaggaattggaatattcgaatgtgagacagaaagatgacattgcggttagcactgtctgtatccaccaaatcgtgaac

SEQ ID NO: 347516 - DNA, 122 bp, Homo sapiens
tgtggaacctggagctggaagatccgaagtcttctgtgttcctttcccacagagggaagccggcgatgatggaaaaactcacctggaaaatggggtcatagagttctttcataaagctctca

SEQ ID NO: 347517 - DNA, 122 bp, Homo sapiens
agaaccgggcttccaatgcaaatctgtggcttcgaaagcgttgttcctaccgttgcatcgcgcacgggactattaacctggaaccccaagagggggagaaaagcggacaagggacacgtttc

SEQ ID NO: 347518 - DNA, 122 bp, Homo sapiens
ggaaattccccgctcactgcagatctcagacccctcctagtgccaggagaaatggcacatcggggggtttccagaccgtttccaggggaagtttgccacagtagcacattcacaacctcctc

SEQ ID NO: 347519 - DNA, 122 bp, Homo sapiens
cagcgttctggctggtgtcccggaaggtggggaggcagcaagccagggtgataagctaaccgcatggccaaccagctgcaagccttcagggttccgggcttgcatctgcctgggtctttgct

SEQ ID NO: 347520 - DNA, 122 bp, Homo sapiens
ctgcctcccaggcgggtgccagcaggggaggccctggctgccctcagctataccacccgccggcatctgcctctcactgttggcatgtggccggtcgccttcctggcctcagctgaatctgg

SEQ ID NO: 347521 - DNA, 122 bp, Homo sapiens
ccagcccgcagcaagcgggtgccacgaggcactcagccggtccccgaagttcctctcacgcggccccaagaccaccaccgtagtccaggccaacaagcgctgccgggactcccgaggccacg

SEQ ID NO: 347522 - DNA, 122 bp, Homo sapiens
agcaggggccgccctcactcaccgcaggggacaaccacccaccaaaaaccatttcctctgcggatgcttcccgcccaaagaaggaaccagaagcaggcaggatggggaagcagctggtggag

SEQ ID NO: 347523 - DNA, 122 bp, Homo sapiens
aactttaatacatttggagtaaaaggtgtttcttctttaaatatggtataaaaataaatgcgagaaacattaacggagaatgtacagacaacagacgaagacatgagtttgtttctgactgt

SEQ ID NO: 347524 - DNA, 122 bp, Homo sapiens
agcaatcctctcaccttggcctcccaaagtgctgggattacaggtatgagccactgtgcccggcctggaagaaaattttaactaaataacaggtgttttgaaagtacagtattgggccgggc

SEQ ID NO: 347525 - DNA, 122 bp, Homo sapiens
gtggggtctgagcttgcacgtcttcgggccatgcctggaggatttgggaaggtgcactgacgacacctccctcacgctcttctttgcatatcacatctctgggcctggctattattagaacc

SEQ ID NO: 347526 - DNA, 122 bp, Homo sapiens
ttgcaaaaagcaggcagaaaggaggcaggcgtccttgttgctcccgcctgcaattcactgcgatgagtttggcacctacattgctgtgctaaacctaaggcatttttgacctaaaaaattga

SEQ ID NO: 347527 - DNA, 122 bp, Homo sapiens
ccccgcccccattggctgattccaaatctcgcgaggctgtggtccgggtgccgtggcaaccgcacctgtttcgccccgcccctcgtagggaggctcgcgaaagtgctgcggttaggaaggcg

SEQ ID NO: 347528 - DNA, 122 bp, Homo sapiens
gcgcggctactgtagagtgggctggcggcgagcgggcggggcggtatcacgcgggaggggcggggcccgctcgtcggctgatcgcacgattgtgacgcgccgccggaggcaggccgggccct

SEQ ID NO: 347529 - DNA, 122 bp, Homo sapiens
tcagcaatctgcaaggatagttctccaggtggaacaagtgagatgcaggtaaaaaacttccgtaggaggtggaactgctgagaaaggggtggcagcagcagtagcagcagctagtgatgcac

SEQ ID NO: 347530 - DNA, 122 bp, Homo sapiens
cccccaggaagaccgagctcacgtgtgagccagcgtctccgtgtgaccctcctgcgcacacgcaacagagcctggggggagcaggtgctggccaaggtctgttatctctctctgccttgtct

SEQ ID NO: 347531 - DNA, 122 bp, Homo sapiens
tagcaatacactaggaagtaaaatatatttagaatttaaacattgtgtgccagtggtcctcgcgcttgactgcacatcagttacttgaagagccacacctcagatcaatgcagtcagaacct

SEQ ID NO: 347532 - DNA, 122 bp, Homo sapiens
catgaaggtttgtcttcatacaaattctcattcctggtctgagatcaaaggtaccaacatcgctctggtggaagaattgcagtaggaaatagagcacttggcagcattcagaatgccattac

SEQ ID NO: 347533 - DNA, 122 bp, Homo sapiens
cacggccagggaggacagttagggttgttgctttataattatcacttttaatctctaatacgaccagcacaagtagcctttgtctccccgccctgatttgagcatccgagggccccccgagg

SEQ ID NO: 347534 - DNA, 122 bp, Homo sapiens
tttttgtatttttaatagagacggggtttcatcatgttggccacgctggtcttgaattcccgacctcaggtgatctgcctgccttggcctcccaaagtgctaggattacagaggtgagccac

SEQ ID NO: 347535 - DNA, 122 bp, Homo sapiens
ttttccattaacaaaatcatctcattttgaggcaactgaagcctaaaatcgttagagaagcgctttgcccaaggattcacacaatagtgttgcaaatggagatttagcactaagtcagctgt

SEQ ID NO: 347536 - DNA, 122 bp, Homo sapiens
ggcactgcgcgagtgggagggctgggcttctcgtgtactcctcaaactctcgcgaggcttcgggcggctttcttcccgagggcggcacgagggctgggcggtggggtgcgggtgcccgggtg

SEQ ID NO: 347537 - DNA, 122 bp, Homo sapiens
atcacaccacggtgtgctctggtcagaaattcccagttgcctcagaacttttctcagtctcgcgccatggtaaggttccccgtgaaaagaagctagttcaaacgtggccaacattcccaata

SEQ ID NO: 347538 - DNA, 122 bp, Homo sapiens
ggagacgctgtttggaatgtgagatgggcgtaagttgactaagggaggacgtgggaggggcgggccggttggggaagattcctggtgacaataacttcaaccaccccagtagggctgtgata

SEQ ID NO: 347539 - DNA, 122 bp, Homo sapiens
tcaggaaaacaatctagatttctacaaagctctgactctcccgttcagcaatagtatatgcgtgacaaactacctgtttagaaaatacaaagacactttaggatttaaaagtctggctgtaa

SEQ ID NO: 347540 - DNA, 122 bp, Homo sapiens
agttatttctttctttggtcgtgcccctaatcaggtccaggattcgagtttgtgttctttcgttttaattccttttaaagcgcgttcgtttgcctgagatctagcttctagatggcgttcct

SEQ ID NO: 347541 - DNA, 122 bp, Homo sapiens
tcgtccctcacagtatttgcaaccctctcttgccctctaaccagcaaatggtcaccgagccggcagtcagctttctgggagtgggagatgatggggaaagaggaaagaatcgtccgctcgcc

SEQ ID NO: 347542 - DNA, 122 bp, Homo sapiens
gcccttggttcctttgcctgggaggccttttctcatgttttcctccagtaactctacctccgtggagctttcgtcaaagcccaggcagaacaaaccctcttttcaccatgttccttatcaat

SEQ ID NO: 347543 - DNA, 122 bp, Homo sapiens
acctcccatggcgtggcacctggtggggcacaggagaagcccaccctggtgcatgcccgccgtgcactcgctccagctgggtctggccagggtatctggccggtagccaagagaggtgggtg

SEQ ID NO: 347544 - DNA, 122 bp, Homo sapiens
acccgcccacaaacgcctggccccgccgggaccagctctgcgccacagcgcatccccacgcgggaagccgcggcctgggccgtcccagcaacacccagcgcgccttctccagggtcagccag

SEQ ID NO: 347545 - DNA, 122 bp, Homo sapiens
tcgggcgccctctgccggccgctctgagggaccggggcgggggggcgtgtctcccggtcacgtgacctggaaaccccgcccccaaaccgaggggaacttgcggccccaagacgcggcgcgct

SEQ ID NO: 347546 - DNA, 122 bp, Homo sapiens
ggtccccacaggaggccagaaagcggccagtgatgtcaaaggacaagttggcgatacactcgccatggacccgctcaaagcactcctccttctcgccccgccgggtattgtagagatgaata

SEQ ID NO: 347547 - DNA, 122 bp, Homo sapiens
catgcttatctcacccaagctccaaataagtatctcttctgtcatctacatatagttgtccggtcctgagcaaactggacaggaaggggtgggtggggctggggggagctgagcatcctcac

SEQ ID NO: 347548 - DNA, 122 bp, Homo sapiens
ctcagatggaaatgcagaaatcacccgtcttctgcgtcgctcacgctgggagctgtataccggagctgttcctattcagccatcttggctcctccgatgaaaaatttcgattggctcctgta

SEQ ID NO: 347549 - DNA, 122 bp, Homo sapiens
tggcgtactgccctctggtctagagagttggtttgagctcctctgactgttctctttgcacgtggcccggcacggcttgaatccacgccccttgcagctctgctggaatccgcgccccttgc

SEQ ID NO: 347550 - DNA, 122 bp, Homo sapiens
gctgtattgccagctccgcgccgcgtgtcaataaaactctgaggttcatcacgtttcattcgctgacaagcgtggccttccaattcatctctgagctgccgcttcccactcagcatgaaatc

SEQ ID NO: 347551 - DNA, 122 bp, Homo sapiens
catggactcactcaccccacatccagctcccgaaactggtgtggctggtcatgtcgacagcgcttacccactcgcttacttctgctccgggcggggcctgttaggtgatgtgaaggatgtgg

SEQ ID NO: 347552 - DNA, 122 bp, Homo sapiens
cacgggggatataaggcaggcagagccgggctggggaggggggtgggcaggaggtagaggcggtcctgacacgggcagactgcgatgaaaccccagtttgttgggatcttgctcagctccct

SEQ ID NO: 347553 - DNA, 122 bp, Homo sapiens
tgtcacaacctgcagggctcctaagttcaagcttttttaaacttaatgggcaaactgagacgcaacacaaataggcttctgaccttggtgtctgagtcctggatctgaagtccttcacggca

SEQ ID NO: 347554 - DNA, 122 bp, Homo sapiens
ctaataccaaaatgtacatacggatagcataggtaagcaagcatcctcaaattagggttccggcacatctaataaaatgtaataaaaaactgtgtttgttattaaatagaccttgtttactt

SEQ ID NO: 347555 - DNA, 122 bp, Homo sapiens
tatgaagcatattgctgagtggtgcctgaaaattgtgtctgtccgtgtctttctcacactcgaatccacatcctttgaacaagagcatgctatgtgtagggctaatggtgaattttacagtc

SEQ ID NO: 347556 - DNA, 122 bp, Homo sapiens
ctgtataacgttttttttaaaaaaaaaaaaatccatggtctctttcagctgggcagtctgcggctgggtaatctgtcaggtgagggacatcaaggtgatcagactgagaggatggaccagat

SEQ ID NO: 347557 - DNA, 122 bp, Homo sapiens
acatacatttagatcaagtgcttcttatctaagggcatgttgttttgtgttacaccatgccgagctgatgctgcatctccctccactgttggatatttttattattttgtcatcattttgta

SEQ ID NO: 347558 - DNA, 122 bp, Homo sapiens
taaggtcttagattgtcccaaaggtggcgcatgaaatccaatcaggagaacagtttcctacgaggtgtagcctgggaaagttgggggtgactggtggaaaggaggagtgaagctccgccctt

SEQ ID NO: 347559 - DNA, 122 bp, Homo sapiens
gagaagcaggaaagaggagaggcaggtatggcccttttgcaaaatagtccccagaatgaacgaagctttgtgaagatcacagctaccttaatgggagagaaagctcatttgtacttagctgt

SEQ ID NO: 347560 - DNA, 122 bp, Homo sapiens
cgcagcgggcgagaagagctagggtctcggggcgactaggaccactgagcacctcccccccgcgcctcccgcccatgctctctctccccaggccctggaccccgggccacagccacaggttg

SEQ ID NO: 347561 - DNA, 122 bp, Homo sapiens
cacgcacccagccaatcagagcacttggcacctgcgacggcgctctccccccacctcacccgcaaggcggcacgagccggaatcttccagtctcaggctgtttgttcccccgcggggcaatg

SEQ ID NO: 347562 - DNA, 122 bp, Homo sapiens
aacattctaaaggggccacagtttgtgagtcattttattcttttgtaaagggtcggcttgcggcaaaaattaaatgatctttgcgtttgggcaaggtctggtgccccaaagctgccgacttg

SEQ ID NO: 347563 - DNA, 122 bp, Homo sapiens
ccaggcagagatgctcctcacttcccagacggggtggcggcctggcagaggctgtactctcggcactttgggaggccaaggcaggcggctgggaggtggaggttgtagcgagccaagatcac

SEQ ID NO: 347564 - DNA, 122 bp, Homo sapiens
cgtcgtcttcatcatcatcctggtactgtgcctccgactcctgcagtctcgctgcccacgcgtcctgccgaagaaactccagaactggaacttcctgccgctgtggatgcgctcgctgaagc

SEQ ID NO: 347565 - DNA, 122 bp, Homo sapiens
cttgcttggaattggcagaactggtcctggctacctggcttcctagtccacactcttgatcgtaccctgcactttactgtcactcctcaaactaggaaaggagaaggtcttcctggatgaag

SEQ ID NO: 347566 - DNA, 122 bp, Homo sapiens
cccttgggcagtcgatgggactgccccgtgaagcagggggtggcgctcatcggggaggctcgggccgcacaggagcccatggagggggtgggaggctcaggcatggcgcactgcacgtcccg

SEQ ID NO: 347567 - DNA, 122 bp, Homo sapiens
ctgagccacaatgcccggccccctgtccttaaggagcttacattctggtgcgggtgacaccgtgaaatcagtgtacgggacatcagctggtaataaacgtcacggaggtcagaacagctgtg

SEQ ID NO: 347568 - DNA, 122 bp, Homo sapiens
gaaacgccattcgggcttcgtggggcgggctgcgcgaggcccgggggctcagggtacagacgctattcttgctgggagagccgaacgcacagcaccccgtgtggggttcccaggggagtgac

SEQ ID NO: 347569 - DNA, 122 bp, Homo sapiens
tatgtgtaagctccttgcgggcagagctcctctgaagcacctatagagccctgcactgggcgtgagcagggctcactcagcagggcccactcagcaagtgctaggtcgtcaacgacctgtgg

SEQ ID NO: 347570 - DNA, 122 bp, Homo sapiens
gacagtggggtctggctccaaggtaaagaaggagcagcaaccaaaaggcctgatgcgcagcgcacccatcgcaagcatgggcagtgcgtttaagactgggtgactcactttttctcctataa

SEQ ID NO: 347571 - DNA, 122 bp, Homo sapiens
acaggcatgagccaccgcgctcaggcaaggcaacttctgacaatataattgtgctgtgagcgaggtaaagccaggcttggagaaggctccgattgatgatccttgggtcggggcgaacagtg

SEQ ID NO: 347572 - DNA, 122 bp, Homo sapiens
aggagggccctggagcacagcatccctctaccccagagccccacatggtatcctgtgcaccgtaggatgcccaattactgttgaaaggataaaagagtgagctcagggatctacctgaaaca

SEQ ID NO: 347573 - DNA, 122 bp, Homo sapiens
cagagctcagaccacagcctacttccgggcgccgacgggagctcgctcactgtttactaacgtgaagtttgtattctttgtttggaacgctgatgatgctcatcctcacgcgggagtactct

SEQ ID NO: 347574 - DNA, 122 bp, Homo sapiens
actcattcactcacacgttcactcaacaacactcatttttttcttatttaggggaacacacgttcttcttttaattcattttattttttgagaaggagtttcgctcttgcccaggctggagt

SEQ ID NO: 347575 - DNA, 122 bp, Homo sapiens
cttgcagggtacttttataatatgaaggaaaggtcaactgagaagacttgagatagtacacgtcaactacaatagcgtatgtctagtataaccccagaaggaggaggttaaagtcccaaatg

SEQ ID NO: 347576 - DNA, 122 bp, Homo sapiens
gtttagcatgggaatgctgcctgagagtgtgtgcatgcatatatttacggtgccttgagtcggctgggaggtgggctcaggaggatgtgtgcctggacctgtgcttgggagccaagggtgct

SEQ ID NO: 347577 - DNA, 122 bp, Homo sapiens
tggttccagttctccggccttgtaaacctgccgggggagcttcctgccgctgagcacttgcgagcagccttgattacatttcctcggggtagattccgggagctgctgggcctgggtgcaca

SEQ ID NO: 347578 - DNA, 122 bp, Homo sapiens
aaattaatgcaaatttctttatgacctactccaatccagaaccatgagagagaggaattccgggacatgttcctccagctgagccaaatcggtactgcacaaatccagcatattacctgtca

SEQ ID NO: 347579 - DNA, 122 bp, Homo sapiens
acctctatatttaatattttgtgtgacaaaatgggaaatagacatgaagtaactgtatgccgaagtgtggttctgcgttgtttcaattgcaggctacactagcttctttttttcatggagtc

SEQ ID NO: 347580 - DNA, 122 bp, Homo sapiens
ctcatggcctccctgacaccaccagcggccctcgggctggacagcaagcgggttttgtctcgcctgcagactccagccccggagcaccacgcatggaagcgcagcgaggccgcccctgggct

SEQ ID NO: 347581 - DNA, 122 bp, Homo sapiens
tccacctgcacgtcatgtggctgtggctcccaggaccagcgcctggagcgggtgagtgaacgtccctctcctccgtgggcactgcctccgctgtgagccacccttcaggctacgtgcatttc

SEQ ID NO: 347582 - DNA, 122 bp, Homo sapiens
ctcagggtctaactgtggttcacttcttgctctatttttgtgactgttcagccctcgagacgcagtcccccctcccccgcaactttgagatgggtgagagggcatactgccacctggaagag

SEQ ID NO: 347583 - DNA, 122 bp, Homo sapiens
aggtgccatgaagttaccaagtggctcaggtgggccgcatgggtaaggcactgtctgtgtcggcatccgtgttctccaggacctcagacccctcaaggacaggagagcccctggccccagag

SEQ ID NO: 347584 - DNA, 122 bp, Homo sapiens
tctctgtggaaacaggaaacctgattcagtgaccccgaagcccctgccaacctgaggctccgtgtcctctccagaagccacctcgcagaaggaatggctgttgcctcctgcatgtccgtccc

SEQ ID NO: 347585 - DNA, 122 bp, Homo sapiens
agagtgatgccacttgtctgcctgcagggcgaattccatggcttccctctttgccctgtccggttctggcaggtgtgtggacccaggcactgggaagactcagcgagccactggaagagcct

SEQ ID NO: 347586 - DNA, 122 bp, Homo sapiens
cagggcagccatacgggtcccagaccccgcagcggtacccgatgaccatgcagggccgggcgcagagtgccatgggcggcctctcttatacacagcaggtagatggtgattgtgattacctt

SEQ ID NO: 347587 - DNA, 122 bp, Homo sapiens
ctagggactttctaagaagatacctacccccaaaaaacaattatgtaattgaaaacccatcgattgcctttattttgcttccacattttcccaataaatacttgcctgtgacattttgccac

SEQ ID NO: 347588 - DNA, 122 bp, Homo sapiens
tcccaggcggagagacggtggccacggagcaggcaaagggaccagctgtggggccgggaccggagcttcctacctgttgctgctctgggccgggctcgcggcggtgacagaggctgggaggc

SEQ ID NO: 347589 - DNA, 122 bp, Homo sapiens
gatcatttctgcactcgtgcctctgcgagtgtcagtctcagggaaatcggggtattcagacgagatgaagccgccaggatggctgggggccggggctccgggggtggggcagcggggtccag

SEQ ID NO: 347590 - DNA, 122 bp, Homo sapiens
cttttagtccattcagcagaagcggatcgaagcaggaggctccccgcgccgcattaggggcgcactccgccgcgctcgagtacttagcgcccattcactcgctcacccgcgctctccgctgc

SEQ ID NO: 347591 - DNA, 122 bp, Homo sapiens
tagcttcttccttggaagagcatccattcaccctgcagttcccaaggagcgtcgcaaaaacgaggctaagggcacagacaaaactcgggcagtgaaggtgagtgagtgaggttgttgattct

SEQ ID NO: 347592 - DNA, 122 bp, Homo sapiens
cccgcacaggctgaggggcaggggtccggccgagccgggccgcctcacctgcacttctgtcggcccacaggattaatggcagcaccagcccgagtacaagccccggcgcgaccatgcttgca

SEQ ID NO: 347593 - DNA, 122 bp, Homo sapiens
ggaccaggcagagctgggccttaagggcccttggaccagtgtctgtctgcagggagcccccggtagccactcggatcagcccgagggaagattctggacgagaccgtggccgtcccccgggt

SEQ ID NO: 347594 - DNA, 122 bp, Homo sapiens
ccggcctcaaaggctgggagggaatgcagtgactctgcgggtgaggggtggtatcaaggccggcagcaagacagagaaggctcacaggtcctggcctagccgctccagctcgttgaggagga

SEQ ID NO: 347595 - DNA, 122 bp, Homo sapiens
cctgcttaactgacacccggggaggaaccggacgcgactaccttcctccgaggggggtgacgtctgaaatttcctgaggtgaaccccatgttcccttccgcgcagccctaaaactttaggaa

SEQ ID NO: 347596 - DNA, 122 bp, Homo sapiens
gcgcgccttcaatgcgtgcgctagaacccagatgggaagctttttaacgcgcctgtgttgcgcacttatgtccttttaggttgtctcttccctttctagagtgtgggccctgtgcctgtatt

SEQ ID NO: 347597 - DNA, 122 bp, Homo sapiens
tgggctctttgatgagcacatctagcattcgataactatttttgattgatttataggccacgcagaacgtgaaggtcaatgcctaatctactcacccgttctcttttggccatatcagcagc

SEQ ID NO: 347598 - DNA, 122 bp, Homo sapiens
actgcacttgcccagtgctctgggaggcgcaggacatccagagcccttcatagaggcccacggcagtgatgatggcgtcgcctgcgtaggaagactgcttccactgtggcagggctgtgcta

SEQ ID NO: 347599 - DNA, 122 bp, Homo sapiens
cagctcgtgtgtacacgctggtcatgtggtatccaggcagatgaaagtatgttcccagctcgtgtgtacacgctggtcatgtggtatccaggcagatgaacatagttcccagctcgtgtgta

SEQ ID NO: 347600 - DNA, 122 bp, Homo sapiens
gccgggccgaccggccgccgcctccccgcctcaccgggccgctggccgcgggccgcgccgcgacgtcagcgccccgccccctgccccgccccgcgcccgccgccccaaccggcgaggcggtg

SEQ ID NO: 347601 - DNA, 122 bp, Homo sapiens
gatctcaaggcccagctttcgcgaggtgtggagcctgtagctaacctaggagtctccgtccgccagcaatgccgcaggactaaaaagatcccctcaaaaatctcttcattgagcccccacct

SEQ ID NO: 347602 - DNA, 122 bp, Homo sapiens
aggcaaagttctttccattcaaactcttgagtgtggatacaatgccacagtgagtaacgccgggagttctgacttctgttccgtttaagttcaaaaagaacctaaatgacgttgttgggaaa

SEQ ID NO: 347603 - DNA, 122 bp, Homo sapiens
tggttggcaaattacacacacagtgtgaagatgggcacagaaacaccacgttcttttcaacggtctcacgtgagtacagactggagcctcctcaggaaggctggcccgcgctccaggcctgc

SEQ ID NO: 347604 - DNA, 122 bp, Homo sapiens
cgagccggggttgagtgggggctgggaagggagaagggggtggcacgagagggggtggcacgagaggggctaccacagaaaagctatgcagcatttatcacccgcccgctcaactctgccgc

SEQ ID NO: 347605 - DNA, 122 bp, Homo sapiens
tccctagtttgttgataaggtctagaaaagaatgctggctgcttcaagggcttttattagcgagtttttaccttgattgtagaacatgtttgctgatgtaaccagaccactcatttcttagg

SEQ ID NO: 347606 - DNA, 122 bp, Homo sapiens
acctctccaagggagtgacctcctcacgggagtgacctctccgggggagtgacctcctcacgggagtgacctctccgggggagtgacctcttcacgggagtgacctctccgggggagtgacc

SEQ ID NO: 347607 - DNA, 122 bp, Homo sapiens
cacgtggcccgccaggtcggtggccagcaggctggccacgaacagcaggaaggtggcggccgagcggcggcgtcgcaggcggcccgcggcctgcgccagcagcgccagcgccagcaggttgg

SEQ ID NO: 347608 - DNA, 122 bp, Homo sapiens
agcatgtgctgcccacggtaggggatttttaccttttctggccctcaggcctgcctggaacgagaacactcatggtgcaccgcgtttccgaaaacgtggggccgcactgtgcattcgtcagc

SEQ ID NO: 347609 - DNA, 122 bp, Homo sapiens
accaaattatttcaatgtcccttctagccttcatttaatgaaagaaggccataaaatctacggcgtggaaaggatgttaaagataggtgattgaattgcaaactaaatctcaaatcctctct

SEQ ID NO: 347610 - DNA, 122 bp, Homo sapiens
tccaaatccccggctactttacacataattactgccccaaacaaagaattgggttgtattcgtctctttgtgcttcctgacatgtgcgcggtgctttgaattttgtgggctgtgtctgccca

SEQ ID NO: 347611 - DNA, 122 bp, Homo sapiens
cgggacatccttgcccggcttgggggctgtctccatctcgcccacccgaacggcgatccacgtgcaaaactcctctcagctgccacacagtcggcttgaaaactcccggaagccctctgtcc

SEQ ID NO: 347612 - DNA, 122 bp, Homo sapiens
cttttgatatcaattctaagttcagacagcttctggcctacttcctgttatactgaccagcgtatgtttatactaatagtgactcaggattaaaaggaatgtaatattggcaaatgacattt

SEQ ID NO: 347613 - DNA, 122 bp, Homo sapiens
cctagtcgccgccagacacagggccctttgtacccggaggagcgggagcgggagcgggggcgtcagggcaacccttgcaccccagaggcctgcctaggaccaccctgggaacaaatgtctcg

SEQ ID NO: 347614 - DNA, 122 bp, Homo sapiens
gggctccgggcctctgcctcgctgagcaggccgaactccatggagggagggctctggaggcgagagaagacacagaccagggtaatgggggtaaaatctccggcttagctaggtcccagcag

SEQ ID NO: 347615 - DNA, 122 bp, Homo sapiens
cctgctttagctgggcctcagggtgctcgtccttcctggactcccggcgggtgcccagcccgcgcctgcatcagatatctctcaggccttccccagatcccaggcctgtggcacacctagtt

SEQ ID NO: 347616 - DNA, 122 bp, Homo sapiens
taatggctgcgtgggccctcagtgtgcggtttccactgaatgcgcgcagatctcagacctcgtggggtgtaggagccctaaggggagcggtcagcccttgtcctctgtccgctttctgccca

SEQ ID NO: 347617 - DNA, 122 bp, Homo sapiens
tcaggtaacagtaaacgcaaagacaggaaagacagagtcaggacctaactcagtaagaaccggtttggtatgttggaggaaaagcaagaatgctggtctgacaagagctgtgaggacaaagt

SEQ ID NO: 347618 - DNA, 122 bp, Homo sapiens
tagttatttctttcattgtgtttcaccaaagttgtttgctcataggagctggtagtgtgacgctggccacagaggcaataaatattggcattgtgctgccttcgttgctctacttggatgaa

SEQ ID NO: 347619 - DNA, 122 bp, Homo sapiens
cggcgtcttcccagacgctggcattaccgctagatcaaggagccctctggtggccctgtccggacataacagaaggctcgcactcttgtcttctggtcacttctcactatgtccctttggtt

SEQ ID NO: 347620 - DNA, 122 bp, Homo sapiens
catttgttatttagcattcattaggagccaatgagatagtccttataactctaaattctacgcagaacttatcaattcccagtggacaatgttgctttcttctctacattctttcctctgat

SEQ ID NO: 347621 - DNA, 122 bp, Homo sapiens
cttcagatccgcagtctctaggtactgaggcaggaactggtctctttgttacttttcgcgcgcgcgtgtgtgtgtgtgtgtgtgagagagagagagaaagagagagagagagagactaatcc

SEQ ID NO: 347622 - DNA, 122 bp, Homo sapiens
aaaattttttaaataaaattacacactctgcagctatggccttcatgcacagggtgatcacgtcttgttgttcccattctagtttacacaggccaaatagcatcgttcattgttttggaaca

SEQ ID NO: 347623 - DNA, 122 bp, Homo sapiens
cacctcgcccgtttacagttgggcaatgcttgggctgggcggcctggctgctcctggactcgcctcccagcgtctgatgctgtgtattttccatctgccccaggaatttgacacaggtgtga

SEQ ID NO: 347624 - DNA, 122 bp, Homo sapiens
ggtgcctgaccccctcccacagaggtcttctgtggccccacaccattcccagagtgtgcccgctgtgcccttcaaggcaatgagccaggagcccagcaaagaaaggcatggaggagctaagc

SEQ ID NO: 347625 - DNA, 122 bp, Homo sapiens
gcccacactccccagtgcggcccccgctctccgcccgctcgccgggagcacggaagtcgccgcacccagcggcccgcgggaccttgccctgtgaccctgcccactggccgccggctctctcg

SEQ ID NO: 347626 - DNA, 122 bp, Homo sapiens
ctccaggttccgcgagaagggtcggtattaaaggattccttggagcggtcagcactggtccgggccagggtgtctctgatgacaaaactccgggagagctttgtctcaccagggatcagatg

SEQ ID NO: 347627 - DNA, 122 bp, Homo sapiens
ccactggggatggcaaggacctcagctgacactccttttgctttcaactgacttgtcttgcgttcttcaaactagttgtttgacccaacaaactaaacgggaataactccagctaaatacag

SEQ ID NO: 347628 - DNA, 122 bp, Homo sapiens
ggcaggggctcttctgactccttccaagattaagctcctcatctctgcgaacataaaactcgatctgctacacagcttgcagatcatgacgccctgaacatcacagtgacaatctcctgtgc

SEQ ID NO: 347629 - DNA, 122 bp, Homo sapiens
tgagaacgcaccgccaggcttggacaaaggcacccggcctacaccccagcggctccccgccggggcctacgtggacttcagcctccagccacagggacaagagctgctggccagggctgccc

SEQ ID NO: 347630 - DNA, 122 bp, Homo sapiens
cttttataggtatttttaaacgttattttaaattacgtgttgacagtattcccctccagacgaatttagtagggcccattgtccttacgactacactacccacaatgcactacccagactgc

SEQ ID NO: 347631 - DNA, 122 bp, Homo sapiens
agcccctccccgggttggggtgcgcggggcgagcggggcgggcaggggcagcggccggggcgggagcgcggcgagggcggccgcggcagccggcgcagaaggtcgggcgcgccgcggccggg

SEQ ID NO: 347632 - DNA, 122 bp, Homo sapiens
gcgggatgggccgggccagggccaaggccgaggcggcagcggctgcgagaggcggcggcacgacgacggtccctcagcccagccaccatgagcaccaagcagatcacttgcaggtcagtgcg

SEQ ID NO: 347633 - DNA, 122 bp, Homo sapiens
cctcattagccccacacgtgtaccacgtggaccgggcccctgagccacacagcactgcctcgtgggagccccagggaagctgggctctgcagctggagcaactccactggtccaggggagag

SEQ ID NO: 347634 - DNA, 122 bp, Homo sapiens
ttttatgaccaagcctgtggtctatcctagagaatgtttgtgtgtttgacaattcaacatcgtagagttgattttgggtgctcccattgggactgtgtgtccctgtactggaacttgagtga

SEQ ID NO: 347635 - DNA, 122 bp, Homo sapiens
cttttaacattaacagcaataacttggcctgtgtctttccctccctagcatgtcctgaggcgacgtgagcataacaaaggacatggaagaagattccagatgccagaaaacctctgtcagac

SEQ ID NO: 347636 - DNA, 122 bp, Homo sapiens
gcgttgctttcttgtgaacacttggttctttcctgccacatcaaagtgattgaattaagacgtgtcaagctgttaatggcccccagacttccgcttcaggaaactggagatcgatggttttt

SEQ ID NO: 347637 - DNA, 122 bp, Homo sapiens
cgcgattcgtaaatataagaaatttcccgctctcttccacggcttcccagaacgctgtgtcgctaacaaccagtgaagacccaagggctagggtgcagttctggtagccgggcaggaaacca

SEQ ID NO: 347638 - DNA, 122 bp, Homo sapiens
ttgtttatagtactataaagaaatcttttggaaaaacaactactcaccctgggcaaacatcgtgtttcatatgtgaaatacttgtatatagatagctagtctgcctgttaaaataatgctgc

SEQ ID NO: 347639 - DNA, 122 bp, Homo sapiens
gggaaagcctccgaccttcgccctgcctcccccgcgccgcccggcccgcgttcctcccgccggccccaaagacgctaaacgtgccctactctgccccgggggagaggtaaagcccgcgcccg

SEQ ID NO: 347640 - DNA, 122 bp, Homo sapiens
cggaggcggaggcggaggcgagcaccgccccaccgcgcacgctgcggttgccccggcagccgcgccctgcgtggcggaagctcacaatcagcccggtccctccggcttccaccccgccccct

SEQ ID NO: 347641 - DNA, 122 bp, Homo sapiens
ctggtcacctggcattctagctatccttgtcctctggcctggggcccacgaggcagctcgcggcagtcacaaggaggcagatttgggcacactgtgaatcagagtcgcgccacaaaagagag

SEQ ID NO: 347642 - DNA, 122 bp, Homo sapiens
cgtctcgtgacgggaaggagcctctccatcaggctcctctggggaaaccacaacccgggacggaaacacagcactgtgctccaggccttgcatctccagttcctcagtgtgtgagagacaca

SEQ ID NO: 347643 - DNA, 122 bp, Homo sapiens
ggtgaggtgggtgggggtggtgcgacggcccagcggctgcctgggattggtgggggccggcgtgagtgacagacaggggggcgagctgcgcgaccagcggtttgtttttcggagcgttcctg

SEQ ID NO: 347644 - DNA, 122 bp, Homo sapiens
aaaaagaaagataaccagcaaacaaaccaatctcaggaggagtccacagtggaggagattcgccttccgtttctgcataaaaccaatacattttacttggagggtaatttgccagagttgag

SEQ ID NO: 347645 - DNA, 122 bp, Homo sapiens
cggccccgcagcctggagacagctccggtggtgctgcgctgcccgagactgctgcacgagcggggactgcggcctcggctccctgcctgcccggcagccccccatccagtcggcctgcccgg

SEQ ID NO: 347646 - DNA, 122 bp, Homo sapiens
cctccgcctcgctccgtcagtttccccctgctgaactattgggtgcggggcgggtggtggcgcagcctgcgcatgtgcataggggtcgactgccgctgcggtgcatgagggcgcatgcgcag

SEQ ID NO: 347647 - DNA, 122 bp, Homo sapiens
atatgatatctgtttcaactattgaactgtaaccaaaaagtgtctgagacagatttcaatcgatttagagaggtttattttgccaaggttgaggaagcacccgagaaaataaacacaagtta

SEQ ID NO: 347648 - DNA, 122 bp, Homo sapiens
tttccctttgtaattgaacgtcctgtttcccctcaaactcgaccaaccaccttctgcctccggctggatcccactggcagcatcccgccgctgttgtccgctggggattttgtgcttctggg

SEQ ID NO: 347649 - DNA, 122 bp, Homo sapiens
gtgtttttgttgctgtcctagggaaggaggaacacgtaggggacccagtatggagttctgcggacagagaaagcagggggctcctacatccagagacaccaaagacagaaaataaagcgact

SEQ ID NO: 347650 - DNA, 122 bp, Homo sapiens
acaggcgctgccaaaactcatttttcattaacacggggtggggtcccaggctcaggcccccgggcccgatcatggccccagtccgcacagagcgcccggccctggccgcccgcagctccacc

SEQ ID NO: 347651 - DNA, 122 bp, Homo sapiens
attccatcactccacaggaaagactgccctactagagtcaactgcggttgtgggcactttcgctgacaagcgaaaagccttgaggtaggtggatgctcccaggaaactcagacgtccgaagt

SEQ ID NO: 347652 - DNA, 122 bp, Homo sapiens
agtggaagtgacactgtgtgacttccaaggtgatgtcataaaaagctctacagtttctgccgtgctcactgaaaatactcactcttggacctctgggccacctgtaaaagcccaagcaccct

SEQ ID NO: 347653 - DNA, 122 bp, Homo sapiens
gacgccgctgtctgccaacctttcccagcttttcccacgattggagccaagagaggtccccggggatctcagttgggcaattgtaagggaaggagctcaggacactgacttcaagatgaagg

SEQ ID NO: 347654 - DNA, 122 bp, Homo sapiens
tacagagccagcgtggaccaatcagacctctttggggcggggcctctgtggataagtgggcgtggtctaggggggaagtcaccaagaacgcaccggaggtccttgcccgccctggaaaacgc

SEQ ID NO: 347655 - DNA, 122 bp, Homo sapiens
ttctttaaagtagtatggtggaagatatccagctacattcagagcatgctttttaatttgcggttttgagcagccagattcttgaaggaatcctagctttggacttataaacaatgaaggaa

SEQ ID NO: 347656 - DNA, 122 bp, Homo sapiens
cgagaggggagtaggaggtgtctccttacctggcgcagtgtccaggctcggggttgccgtcgcagccagctgagtgttgcgccagggggacaggtatgttccaggcagtggcaagcccaacc

SEQ ID NO: 347657 - DNA, 122 bp, Homo sapiens
tggaatcatcatgataaggtcacgtgcgctaatatttactaagcacacggctggaacttacgaggcagacacctgctttactgcctttacagacagaaaagctggagcgtagagagatggag

SEQ ID NO: 347658 - DNA, 122 bp, Homo sapiens
aaccttggcccggccgactttaagcaattgtcagttatgtactcacttctgcctccaagacgtcagtcagcctctactgtacacggctcacactgggcgccaaggacgtgtagctcacggtc

SEQ ID NO: 347659 - DNA, 122 bp, Homo sapiens
ataggaactgcaggagttatactcacagaaggagagtttccggcataaatttaataggaacggtggatgatttgagaaagtgattttatgcctggttgcaaacagcaagcaataattgatac

SEQ ID NO: 347660 - DNA, 122 bp, Homo sapiens
cacggcttccacaggatgttgctcatggaaaactgctggggcacaggactcagggtctgccgatgctccgacaccgcggcacctacccttgctatcacggcgtggtacaggggctcggagtc

SEQ ID NO: 347661 - DNA, 122 bp, Homo sapiens
tctggggtgtttttataaatactaaggcttgtgcctcatttccccagtgtctgatttcaccgacttggggtgtactctaggcactgagacttgtaatagctgcccctggtgactctaaggtg

SEQ ID NO: 347662 - DNA, 122 bp, Homo sapiens
gacgcgtctcgggacactggggacaacatctcctccgcgctttcccaacacctccacctgcggcccacacaagcgttacagaaccccggccagggacagcctgacagaaacaaaatgtccgc

SEQ ID NO: 347663 - DNA, 122 bp, Homo sapiens
tctcataagagacactttgaggaggttttgaaaagttaaacaacaaaacaccttgagtttcgatcttcagttgggaaaaactcaagtaagcctgccattctgaattgccagagacaggtgga

SEQ ID NO: 347664 - DNA, 122 bp, Homo sapiens
gaaagcagagggcgcgaaggtcgggaccccaaattgcaaaccctcagcccctagcaaagacgaccaaatgcatttacaaccgtgcaagtatctcagccttgtaacagagctccgggtttgcg

SEQ ID NO: 347665 - DNA, 122 bp, Homo sapiens
gagaggtgaagcgaccagcacaatgttgctcagctaacagtaccatgaagagtttggggtcggaacccaagcacatgctttctccattgggggaagagtgtctgcttaccagagaaggctca

SEQ ID NO: 347666 - DNA, 122 bp, Homo sapiens
gaaggcaggcccgaagccaagagctgccagcgtggaccagcggagaagagggacaagacccggccctggagactgtagcccttgtctgcactggtggagacccccaaggctctcagagtgag

SEQ ID NO: 347667 - DNA, 122 bp, Homo sapiens
gcccaggcatctggctaggtggctgggagacagtactgtctgcgaaggcctctgatgctgcgaaagccacatcaaagcacacaggacaactcgagtcgaatacaaaacgtgtgtcacagaaa

SEQ ID NO: 347668 - DNA, 122 bp, Homo sapiens
atcgcggaggttgcggtgagtcgagatcgagccattgcaccccagcccgggcaataagagcgaaactgtctcaaaaaaaaaaaaaaaaaaaaaaagacagccacagtgtgctttgaaggaga

SEQ ID NO: 347669 - DNA, 122 bp, Homo sapiens
tagataagcagcttgcacaaggacgtcggcctggtaaggctctctccaacaacaagctaacgcccactcctgcagcaagcgcccacagccagtggtttttgttacaaaacaacttttgtgag

SEQ ID NO: 347670 - DNA, 122 bp, Homo sapiens
cctgggccggggaggcttgttcccatgagggacaccgggcaggagggaaccgggtgaggtcgttgaaggaagaaaggaaacggagaaagtgcttccccagcagacagcagcattgtctgttc

SEQ ID NO: 347671 - DNA, 122 bp, Homo sapiens
ccccgtcctgcccactcccagctctggggcttggtgggggcaatccctgcgtccggagagcgctggtggtagggaggcttctcccggttctgtgagcagcaggaccctcccgagggcctgac

SEQ ID NO: 347672 - DNA, 122 bp, Homo sapiens
ggcctcgcgctacgagtgtgccgcggtggtgctgcactcgccgctcacctcgggcatgcgcgtcgccttccctgacaccaagacgacctactgcttcgacgccttccctaagtgagcggccc

SEQ ID NO: 347673 - DNA, 122 bp, Homo sapiens
agtctcctaatttgttcaaaggggctgcatgaactagtggttccttgggtctccactccccgacagaaagtttgtgatgcctaaacccagtttctattcatttatacaggagactctgtcct

SEQ ID NO: 347674 - DNA, 122 bp, Homo sapiens
catggctgcggaatccagcaggggcattggggttgacgtgcactcagcgccgagcttcttcgtagttcctcacccccttggctactatgggctggtccggaaggtcaggcaaggggaagctg

SEQ ID NO: 347675 - DNA, 122 bp, Homo sapiens
gcccgaactttaaccagttttaagcgttcaattcagccgtgttaggtaccgtcacactgtcgtccagccatctccactgtccatcttcagaactttttcattgtcccaattaaattgcagac

SEQ ID NO: 347676 - DNA, 122 bp, Homo sapiens
ttttatagggcaggctctgtttgcttaaagagcgttagataacatttgcctaaggaggcccggggatcctctgagacaataatctccactgatttttatcaaaggtgtttcctagacatggt

SEQ ID NO: 347677 - DNA, 122 bp, Homo sapiens
acaccacactcggacacagagcctgtcgccaagaagaccacacttagaagcagccaacgccgcccacagttctcatgaacgcactctcacaatcccaccgcatgcacacaaccacgaagaag

SEQ ID NO: 347678 - DNA, 122 bp, Homo sapiens
agataatcaccagcgcactcttggatctgtatacaggtttgtaaactatgtggaggaaaccgacccatcgcagtctcggccgaagaggccggagccggagccagagccagagcctgagcagg

SEQ ID NO: 347679 - DNA, 122 bp, Homo sapiens
tttatcttttcaacgatgggactgagtgagtcttgtctcatgacagccatggcttatgatcgttatgctgccatttgtaaccccctgctctattcatccatcatgtcacccaccctctgtgt

SEQ ID NO: 347680 - DNA, 122 bp, Homo sapiens
caactgaacaaacagttgttcttactcctatttataaaggcaaagtccttctgattggtccgaatcttccagtttcgcgccctgaattatgtagtgtgataggacttgtgatcagctactag

SEQ ID NO: 347681 - DNA, 122 bp, Homo sapiens
agggtcaaaagagtccgcggtttcgccgcgtgagttgctttttgcggctggggaggtctacgcttctagagcttgagccagcggggcgaccctgcagtggcaggactcggcaccgcgccctc

SEQ ID NO: 347682 - DNA, 122 bp, Homo sapiens
cacctactctcatgccaatcactgagctttggccagtcgcaggtggtcaactgttcaaaccgtgttcaaataagacaaatgccgagctgccgccaatccagccatttctgtccctcgcttct

SEQ ID NO: 347683 - DNA, 122 bp, Homo sapiens
gccagcgcctgctggtcgctgtgcgtgacggtggacagccgccactctctgccaccgccacgcttcatctggtcttcgcagacaacttgcaagagatactgccagacctcagcgaccgccct

SEQ ID NO: 347684 - DNA, 122 bp, Homo sapiens
caatcattctctgggggtaaggatgattaccaccgttatatatgggtgaagatggaggctcgaggtcccaatcctgccactgccacttatgagcaatttggattacctttgctgcttctgag

SEQ ID NO: 347685 - DNA, 122 bp, Homo sapiens
gccaccagcggcgcctaggggtcagcgccaacgcccacgggttggtcatccccacttaggcgcctcgggccgcaactaagcagcctgcccgcctcaagcccgccaccctcaagcaggcccag

SEQ ID NO: 347686 - DNA, 122 bp, Homo sapiens
taaacggaaaacgctgtgaagactacatctacgtttagctacctaatgtccatgccgcaccgacctcctaaagggaattcttaataatgggagactgaaatatccagggagggtgaggtagt

SEQ ID NO: 347687 - DNA, 122 bp, Homo sapiens
gtagcccgggctcctgccattgcgctgccagctgggcggcacctttcaggcggggaaaagcgaatcttctgccggactgatcaaggcacagcgcttctgtcctgccctttatttttgcccaa

SEQ ID NO: 347688 - DNA, 122 bp, Homo sapiens
cacggcccctgcaccggccacccgagggtgacctcagtgctcctgcatcccctccccctccgccctggtctacccaaggagggtgacctcagggcccgtgcacccgccacctgcgcaggctg

SEQ ID NO: 347689 - DNA, 122 bp, Homo sapiens
gctacactcgataacagaaccacttactggcgattcacaggaggggaccgggcggcagggcggggcggggcctgcggggcgcggggccgcggcgcggagccggcgcagcgattgggttcacc

SEQ ID NO: 347690 - DNA, 122 bp, Homo sapiens
caagcagctgcgcaaggagtcccagaaagaccgcaagaacccgctgccccccagcgttggcgtggttgacaagaaagaggagacgcagccgcccatggcgcttaagaaagaaggaataaaag

SEQ ID NO: 347691 - DNA, 122 bp, Homo sapiens
attttgtctccctggcaggtgacttaacctcctctcatggtacaatggagacagtagcaacgcccacctcatgggacggttgcaaggtgcttaggcttagcttgaaatcttggcttaacact

SEQ ID NO: 347692 - DNA, 122 bp, Homo sapiens
tgcctgtccgggtcgggccgggaccctccggggtcagccctgcctgtgccgtccgggtcgcgagaccctccggggtcagccctgcctgtgccttccctgcctgtccgggtcgcgggaccctc

SEQ ID NO: 347693 - DNA, 122 bp, Homo sapiens
agaaggacctttgtcaatgggacacggacacagccgcccagctggctggagctgcaggttcgtgcgtgtgtatgcacgtgctcgtgtgcatgtgtgcgcacgtgtgtaaatgcgtgtgtgtg

SEQ ID NO: 347694 - DNA, 122 bp, Homo sapiens
tgaagaagccgcgcaggttaggctccggggactccgcggtgtcggggagttcacaggcaccgtcccgcggtcacaggtggcatgttttgaggagttcgcaggcaccgtcccgtggtcacagg

SEQ ID NO: 347695 - DNA, 122 bp, Homo sapiens
ggccgggccggccgggtgcggctcctctcccggaggctggcggagtgggagggcgagccgcggctccggcgaagctttaataatcccatccgccaggcccactcgcaggtttttttcgctcg

SEQ ID NO: 347696 - DNA, 122 bp, Homo sapiens
atttaaaacacttctcacagctcagttgacatttggcaatccccagccttcttttgctctcgaggatgggggttcaaatccacacgacgttagcactttgtactgctacatattcctggtgg

SEQ ID NO: 347697 - DNA, 122 bp, Homo sapiens
ctgtgttagacatgaaagctgaggagtctgcaaagcacaggaacacacaaacacacgagccgctggtgtcagagtgaggctatcatcacacatcgcaggcatctggaaaactccactgtaca

SEQ ID NO: 347698 - DNA, 122 bp, Homo sapiens
gtgggctttctggtgcctcacgggccctggcggcgtgtctaccctgcatcaccaccacagcgtctccacgacggcagcactagaagccttgatgtctgcatctgtcagtcctccagctttct

SEQ ID NO: 347699 - DNA, 122 bp, Homo sapiens
gatgagcgctcaggaatcatgggctatcaaaggtaggtgctgagggaatgaaatctgggacgatagactacgaagcattggagaaaagacctatggacatttggaagataatgtgtggagtg

SEQ ID NO: 347700 - DNA, 122 bp, Homo sapiens
acagagctgggatctgggccgcagagtaagcatggggctgccagggacagtaggaaagcccggcagactgtacctgtcagcctgtcagggtcgctgagcactcacagccgggctgggaggca

SEQ ID NO: 347701 - DNA, 122 bp, Homo sapiens
ggggatgtgagactagggcaacagattaagattgaaagtcctttctcgcagcttcattttcgcccccacactgtcccaaatgcttagaaccctcctcgtcagaatgggaacggtgcccccgc

SEQ ID NO: 347702 - DNA, 122 bp, Homo sapiens
cgggggcagggagaccggacccagaggcactggggtagggctcggcagggcgggtccgggcggagcgcggggtgcggagggcggaggcggctccggcgcccgctctgcccgccgctgggtcc

SEQ ID NO: 347703 - DNA, 122 bp, Homo sapiens
gttagcaaacacagggatggccacagccttcctgttggcagagaaatgcctgtttccacccgcccggaacagcacccaggtgatgctgcccccagccacggccccctgggtggtcacgggcg

SEQ ID NO: 347704 - DNA, 122 bp, Homo sapiens
aaactaaagaaaggtactacatgattttatttacgtaagctcaaaagcaggcaaattaatcgtgttaaaagttgggatacaggtaaacatcaggtttcttgatctgggtgctgcttacaatg

SEQ ID NO: 347705 - DNA, 122 bp, Homo sapiens
gacaaaaaccttcttaaactctggaaatccagatctttaccgccccctcttttttcagtacgaaggaacgaggggaaagtgcgcgcgcgcgcgcgcgtgtgtgtgagtgtgtgtgcgtgtgt

SEQ ID NO: 347706 - DNA, 122 bp, Homo sapiens
ttgtttggaatagtttcagaaggtatggtaccagttcctctttgtacctctggtagaattcgcctgtgaatccatctgctcctggggttttttttggggtagtaggctattaattactgcct

SEQ ID NO: 347707 - DNA, 122 bp, Homo sapiens
gtgctgcggtgtagagatctccagaggatgggcagtggcaggaaatcctcagccttcaagcggaacccatagcagaccggggccctgctgaccaggggaaatctcttagctcccaggtggga

SEQ ID NO: 347708 - DNA, 122 bp, Homo sapiens
gtcgttctagaagggacagggatatacagttctaggagtgtgacatggcagcagcagagacgacaggaagcagaggctggctggggactacatctctggcatatgtcaatcaacccgatgat

SEQ ID NO: 347709 - DNA, 122 bp, Homo sapiens
tgctcccacgcacaggtccacagccttaagttgcacttacatgcagggagacccagcctgcgggaacagttcccgatgtgctctctgcacatccacaaagcgccccagctacgtcgctgggc

SEQ ID NO: 347710 - DNA, 122 bp, Homo sapiens
ggcaggtcctgacccgggtccgcgattgcctcatccggcgccgccttctaggggcctgggcgcctcctccgagtctagagtcccacacagaacagccctggactctgggcctctccgtccga

SEQ ID NO: 347711 - DNA, 122 bp, Homo sapiens
tcacctcttaaaggtcacacctctcaacattgtaacattggggattaagtttccaacatacgaactttgggagacacattcaaatggtagcaggtggataccaagaaaaaaagacattatat

SEQ ID NO: 347712 - DNA, 122 bp, Homo sapiens
tagtggggagcacggtggagagcggggacggccggctctttggggacttgctggggcgtgcggctgcgctattcagtgggaaggttcgcggggttgggagacccggaggccgaggaagggcg

SEQ ID NO: 347713 - DNA, 122 bp, Homo sapiens
gccgaagtggatgggctgcatgtgcatgcgtcacacagccatcccacacagggatccgcgcggtgaactatgcggtcctttctgatatcaagacgcagcagtccctgatccagccactgaca

SEQ ID NO: 347714 - DNA, 122 bp, Homo sapiens
ggcctagagaagtgaagtaacttaccccagggctaagtgggaagtggctcaaaagcaagccggtgttctaatccaaggtgatgagaagacctgccccagatagctgtgtttgtttttgatct

SEQ ID NO: 347715 - DNA, 122 bp, Homo sapiens
tctcggaggctcctggttttgatgtctggcattgcttttacccggtgggcttcagggagccgtccctgccgcgctttgcgtttctccgcgcacttggacagggttctgccacgagggaggcg

SEQ ID NO: 347716 - DNA, 122 bp, Homo sapiens
taagcacgggagtaaagtggccaggtgttctttagagcgatcattccatcattccacttgcgctgttcagaacggggattgaggggaacgagatcagaggcgtggagcccaattccgtattt

SEQ ID NO: 347717 - DNA, 122 bp, Homo sapiens
tccaagtaggatcaggttatcatgctaacatttttaaatcatatgatttcacaaagaaatcgagatcactcattgtatgcagcatcacttgtcccacaatgtctctacaatgaaccgttgtc

SEQ ID NO: 347718 - DNA, 122 bp, Homo sapiens
cgggtgcagcggctcacgcctgtaatcccagcactttgggaggccgaggcgggtggatcacgatgttaggagatcaagaccgtcctggctaacacagtgaaagcccatctctactaaaaatc

SEQ ID NO: 347719 - DNA, 122 bp, Homo sapiens
gcccgcggtatgggcagtggaaactgcgcatgcgcggcgtcagggtcgggcggaagttgacgccgccgtgccgccgccgcgtgacgcatttcctgtttgttgttggagaaaggagagaaagg

SEQ ID NO: 347720 - DNA, 122 bp, Homo sapiens
gccccgtgtgggtaagagccaatgccggcaaggtgaaggctgcgcggggtgggggcgacgcgactgccgcccgcccacccgcaggccacggcggagttgcaccgcggggcggggctcgggta

SEQ ID NO: 347721 - DNA, 122 bp, Homo sapiens
cactcaacagcaagcccgcttccttaccgtgggccgcttccagatgatgccttgagtttgcggagagcctggtccaagatccttgtagcccaaagctgatggacatgctgggaactcagggt

SEQ ID NO: 347722 - DNA, 122 bp, Homo sapiens
taatacaaatatcttagggagaggtaacatgttgatttaaatgcatgctcagattaaatacgaacaagattattcctaaacctttgtttaaatagtggggagaggagaaagtctgggttggg

SEQ ID NO: 347723 - DNA, 122 bp, Homo sapiens
agtgcaaactggaaacattgggagaagcgccccgcggctcagtgaaaggagccgggcgtgcgtgtgttgttttactcccatccccaccccaccggaagaaccgcttacctcgaagtcttcgt

SEQ ID NO: 347724 - DNA, 122 bp, Homo sapiens
ggtttgttgtgggtacttgtggcatgcttggagctacacaaaaatacagtaggaggaggacgcctgtgaggagaagcagacagcagtctttgccttgcgggccctctatctatcaccactaa

SEQ ID NO: 347725 - DNA, 122 bp, Homo sapiens
ctaggcgccgcgcgagcccggtcagctccgcgcgctttaccttgagccgcttcaccttctcgtctgcctggtaggggcagcctgcacgccgcagctgcttgttctccgcttgcagggtataa

SEQ ID NO: 347726 - DNA, 122 bp, Homo sapiens
tccaactctctactcaatgccattcttcagagaatggctatacatcccaacactcttgctcgggctttactctccacagcacttatgacctgaaattatattagttacttgcctgtatcccc

SEQ ID NO: 347727 - DNA, 122 bp, Homo sapiens
acgtggagggggtgtgtccagagggcgggtcctgaggactagaagggacccagatgtcgccgccgtcggggccagagggaagtaacccactaaaacaagggcggggagcggggagatctgcg

SEQ ID NO: 347728 - DNA, 122 bp, Homo sapiens
ctatataacattaaaactggccattttaacctttttctttatttctttgagacggagtctcgctctgtcgcccaggctggatggagtgcaatggcgtgcgtgatctcggctcactgcaacct

SEQ ID NO: 347729 - DNA, 122 bp, Homo sapiens
agagggagcatagtaaccctcacagctcgttggtggcagcggctccttagcctgcggaggcggtgggagcccctagcgcagaagccggcgactcagctaggctagcggcggcggcgaacgag

SEQ ID NO: 347730 - DNA, 122 bp, Homo sapiens
ctgctctccagccctccctggaaggaggagcaggaactccccatcaacaaaccctctctgcgcctcctgcaagctaggcagagttcaaagaaaggaatgattagtcagcagcctcctgcatg

SEQ ID NO: 347731 - DNA, 122 bp, Homo sapiens
gtggggcttggtgatggaccgcggtgttcaggtgagggtagtggcctggttgggggctgccggaagctgggccaggtgaaacttggtagccctctctggccttggtgtgggcgttggtcctg

SEQ ID NO: 347732 - DNA, 122 bp, Homo sapiens
ccccgggccccctccagtgagctgatgttgctggtggacacctgcacctgtacgccctggcgcctccaccggcggacctgcttggcctggtagcctgcgggacacaggactgtgggctggac

SEQ ID NO: 347733 - DNA, 122 bp, Homo sapiens
tctctttacacacaagttgactaattgtttcacaggaagaactaaagcagcaagacctgtcggcagatctgaagcccttaccatgcacctagcacactaaatgctttggagggtcacctagg

SEQ ID NO: 347734 - DNA, 122 bp, Homo sapiens
gggaggcagtagggcatgtaggccagcaggaatggcaggggcagatggagacccaggcatcgaaaagaaatggccaggctgattttgctaattacaccattggtgaggagcgctgggtagtg

SEQ ID NO: 347735 - DNA, 122 bp, Homo sapiens
tgctatggggagcagcattaggacaatctgagtggtttcagttgcaagagtgtgcgtgtacgtgcaagaactacagtcaagattcaacttctggctttcagggtctctttaataatagtaat

SEQ ID NO: 347736 - DNA, 122 bp, Homo sapiens
ctgacacatactaggtgcccaagaaaaatgtaaactgctgcacattattattttcatcatcgttattgttggtgaggtcatttttaagcaccttggcccccagaagcagaagcatccacaag

SEQ ID NO: 347737 - DNA, 122 bp, Homo sapiens
gagtaggtaaatgtcacaggtcaattcactaattctcatctactgtattcatcatgaaagcgctctcattcagaaacctattttctttttatttggtagacaattccaccaagtttgaaaat

SEQ ID NO: 347738 - DNA, 122 bp, Homo sapiens
aaaattggaaggaatatattacaatttggtttgaaccaggttgcatgggctcattaacaccggggaggcaagaagggcagtattagggccaaaacttcaaagctccaagaatgagaagtgag

SEQ ID NO: 347739 - DNA, 122 bp, Homo sapiens
cgtctcgcggtaccagtgcgaatcatcgggctatccaggtccgagatcctagtctcctgtcggctctgaggaggatgggtaagggcactcggcgggcaaggaccctggggcggcaggggagg

SEQ ID NO: 347740 - DNA, 122 bp, Homo sapiens
ggaactcgggccccgcgcctacccccggggtaaagggggccagcctcgcacaggtgggtccgttgcaggcgtctgttgcgagaccacatcctcaccacccggtgaacggcactgggagcaga

SEQ ID NO: 347741 - DNA, 122 bp, Homo sapiens
gacacgtaccagcagagaacctgtagacaggacagaggtttccagctctagtttcgggaacggatttttccgcgggctagtgggcgcggcgcggcgcagggcggagcgggcaccgcctcctt

SEQ ID NO: 347742 - DNA, 122 bp, Homo sapiens
attgccccagcaaccacagggcctgggactggggggttcccagatccttgaagctcactccgcctcctcactctcactgcatttcccaccttcctgtgggccttgcggcatcttcatcactg

SEQ ID NO: 347743 - DNA, 122 bp, Homo sapiens
cttctcagagctccacatgcatagaagtcacctggggatctcattaaactgcagctctgacgtaggttggaacaggggcctaagagtttttatttttcttttttgagacagagtttcgctct

SEQ ID NO: 347744 - DNA, 122 bp, Homo sapiens
gagaagtgcggttgagcatgggggtgggtgcgtgtggagtgagcgttccaggggccttgccgtgcccgggagagtgagggtaacggacattcccacggggatattcccacgcggagaactgg

SEQ ID NO: 347745 - DNA, 122 bp, Homo sapiens
tagaacaactgtgcaggctctaaagcctcggaaaacctgagaggcgcatcttgctggctacggttgaaacccgtgcattgggtgattccgaagctggaagggcagcggaatggccttcgccc

SEQ ID NO: 347746 - DNA, 122 bp, Homo sapiens
tgattggggaccacgtgtctttgctctatgcttggctttctattgatccatccaggttaccggatcatcctcttgatttgcatatagcacttactctcatggcctggccctacaactctgag

SEQ ID NO: 347747 - DNA, 122 bp, Homo sapiens
ttatcgaaagagtatgggagttctggagaggtaatgagatccccttcaccaggaggtttccgatagaggaccatggagtgtcctggagggacattcgggagccctgacactacatctccctc

SEQ ID NO: 347748 - DNA, 122 bp, Homo sapiens
attcttgttctggcaaatgtggccaacagaggccggaacgggagcaaggcaagagggggtcggttacctaatacgctttgaggtgtatggtcctgtgagaaagagctaaggcgagttcaacg

SEQ ID NO: 347749 - DNA, 122 bp, Homo sapiens
atttggcatcagtgaaaagcaaattcagaaaaatgaacttatttcctcttgtttgtgacgcgatttggtaccattgccgaggagacatttgccatgagttgtacatctgtatcaaaggcttt

SEQ ID NO: 347750 - DNA, 122 bp, Homo sapiens
gacttacctggggataagctgagctgggggcaggggtggagggtggagaagagcccatcccgtaggtgctccaacctgtttggctgtttggtctagcaagcacagagcaggtgagtgatgca

SEQ ID NO: 347751 - DNA, 122 bp, Homo sapiens
tcccatcgcggcttccgtctacaggtactacctgtgctctgtccagcctcagccactggacgatccttcccgtagccgtaggaaggggcggcgcttccttggaggggatattagaggcccga

SEQ ID NO: 347752 - DNA, 122 bp, Homo sapiens
cagttcccgccacggaacggcgggcgaaaagcagggcgggaatacgccggtaggaatacgcgggcacgtaacgcgtcacttccggtgctggggcgcgctgcttgcggagggagtttgcccgt

SEQ ID NO: 347753 - DNA, 122 bp, Homo sapiens
cgaggaccccaatggtacgctgatcatccagaatgtgaacaagagccatgggggcatatacgtgtgccgggtccaggagggcaacgagtcataccagcagtcctgcggcacctacctccgcg

SEQ ID NO: 347754 - DNA, 122 bp, Homo sapiens
aggagataacatatgcagacgtgaggtcacccacacacagttcacttcctttcacagatacgatgatccaagaatcccaattcttaggattagaagtagctctcagagggcattcaatcccc

SEQ ID NO: 347755 - DNA, 122 bp, Homo sapiens
agaggcggtccggccgagcctgcctagccccccggcgtggcctgacgtagctgatcggcccggaagtgctcacacgtgtgctccctgccctgctcctggccccttggccggccgggctgttt

SEQ ID NO: 347756 - DNA, 122 bp, Homo sapiens
gatatcagaagcagcatttgtgcgtgggtccagcagtggcatttgtccccgcaccatcttcggggctggcccggagcccaggtcctcctactgcccgggagcagtggccgcaactccaggct

SEQ ID NO: 347757 - DNA, 122 bp, Homo sapiens
tgtggaaatgctgtactatcacccatctaaacaaagctcggaactgtctgcgccccaggacggggtcccagctggcccaggagaaatcgcactcacaggcccagcagagcccaacgccagcg

SEQ ID NO: 347758 - DNA, 122 bp, Homo sapiens
taggagtcaatgagaccaaacaaaaagcaggaatagggtgggtctgtggcatttaatcagcggctatagaggatttcagtggattttccagaaagaggaacatttcatggttgaagctttta

SEQ ID NO: 347759 - DNA, 122 bp, Homo sapiens
gggcgttgggggaggacacattcccctctcatctgctcctttcaattactcctagctgggcggcctgcctgctgtctccttgcagtcccgaagaagctggtgggtatagggggaggagggaa

SEQ ID NO: 347760 - DNA, 122 bp, Homo sapiens
acagaggcccccactaacacctgccggggccactccaggaacacacttgcaaacaagatgcgtaaatatcactcagctctctgccccacactttctggttacacacgatggctcacctttcc

SEQ ID NO: 347761 - DNA, 122 bp, Homo sapiens
tgggcaatggctttttctataaacctcctggaagaagacaggggaaaagctccctaacgtcgctctgcgcaatggctttttctataaacctcctggaagaagacaggggaaaagctccctaa

SEQ ID NO: 347762 - DNA, 122 bp, Homo sapiens
tgacccgctccagcccgtttcacgtggtcttgagctgcgctggggttggagtggccgcaacgggcggggcggggcggggccgggcaagtttgttccccgagttcggagcctaggagcccccc

SEQ ID NO: 347763 - DNA, 122 bp, Homo sapiens
ggggagtagtttcgagatgaaaccgttccacctcaggccatcaggaagtgatatgattctcgtgaggagcgcgcagccgagatcccgcgcatgtgcaatccacaatagggttcgagcttctg

SEQ ID NO: 347764 - DNA, 122 bp, Homo sapiens
aagggttgtgggactcttcagtgcaaacttggtaaccctttgtgtcctgcagacgggaggcggtctggagcctcaagctaatggggagacgccccaggttgctgtcattgtccggccaggta

SEQ ID NO: 347765 - DNA, 122 bp, Homo sapiens
ggagagtagacagcagaaccagcggcggcggctaagcagagactgtagtagcggcgacagcgacgacggcagcgatggctggggcggggccagccccgggactcccgggtgcaggaggaccc

SEQ ID NO: 347766 - DNA, 122 bp, Homo sapiens
cggtgtggagctcgatgacaaagctcatcagcctgagtggaagctcattcattattgctgcgttttcgctcttccaggagagaacggagagccagtgtgctgtgtgtcacggtccctggatg

SEQ ID NO: 347767 - DNA, 122 bp, Homo sapiens
gcagcccaggcctcccagcctcatgggggctggggggttgtcaatgtccttccctagggacgcactggacgccctgtgcaagcacctggcccggctgcaggctgacattgcctgcaaggcca

SEQ ID NO: 347768 - DNA, 122 bp, Homo sapiens
actttcgtggaaagtttagcatccttcccttcaatcagaatcttaagaaggggagcatggcgagacgttagttaaaaggtatgaagttacaatagctaggaagaaccagttctggtattcta

SEQ ID NO: 347769 - DNA, 122 bp, Homo sapiens
agggttttttgtgtttttaaatgggagtctctgggtaaaggggcggggcgaggaggcgaacgagacaaccttagtattgtttgaattgaagcattgcgagggaacaatggcagaaaaaccgc

SEQ ID NO: 347770 - DNA, 122 bp, Homo sapiens
cctttaccgcctcaagttcaaggagtttgtccagagtgtccccaccaaaggcttcaacaccgagaagatccgggtgcccctcgggggatcgcgtggcatcaccttccaagtgtgggacgtcg

SEQ ID NO: 347771 - DNA, 122 bp, Homo sapiens
aatgctacctccttttcacaattagtgctgtggagtatataagtcaagaggcatttgctacgaacctactaggtagataccaatgcactagggcctgggagggaaatatgccctcagaagat

SEQ ID NO: 347772 - DNA, 122 bp, Homo sapiens
tggctctgccacttattgaatgtgtaactttgagcaagaggaaactgtgctcagtttcctcgtctgaaaaagaatagagcctgcctcctagagttgtgaggattaattgaaataacatttag

SEQ ID NO: 347773 - DNA, 122 bp, Homo sapiens
tgattggaattcacctcttatagtactgaccaccctgagtgcacactgcctctcttgtcacgtgcaagcagagacatacccagtgagaaaggggagaggggaatttagcaattagtgtgagc

SEQ ID NO: 347774 - DNA, 122 bp, Homo sapiens
ctctactaaaaatacaaaattagccgggagtggtggcgcatgtctgtaatcgagtggtggcgcatgtctgtaatcccagctactcgggaggctgaggcaggagaatcgctggaacccggaag

SEQ ID NO: 347775 - DNA, 122 bp, Homo sapiens
agtccagcagcgctccgcggggatgccctggtctcgacccggtccgtcagcccccggcggcgcagggatccgcgcccggcgcctaaactgccctggtgtcctcttcgttctggcccggggct

SEQ ID NO: 347776 - DNA, 122 bp, Homo sapiens
ttctttgaactcagttaccaagctcggtgaaggagacaagttcccacagctgactcggctcggctctcccaccttcccggcagcggccgcgagccctgattgtatccctcgctttcctcgtg

SEQ ID NO: 347777 - DNA, 122 bp, Homo sapiens
cctccacatcctggtggtcgtttctgtgctgcgatggagaccacggaccgccccagccaccggctgctcctcccggcattgccagagtcactgtggtggggcctgcatccccacccactctc

SEQ ID NO: 347778 - DNA, 122 bp, Homo sapiens
aatattatcccctccacttcatagatgaggaatgttgagaataaagggttttgttcactccgtttattgagcacctacatctctatttgaggcactgggacacaagaatgaacaaaacagga

SEQ ID NO: 347779 - DNA, 122 bp, Homo sapiens
cagaaggttccggtgaaaccaaagcgagggcggatggcgggactggcaccattcagagcacgcccagcccttccccgggcgcctcggccacagcagtggaatgcctcccactcccgagggcc

SEQ ID NO: 347780 - DNA, 122 bp, Homo sapiens
gtacacgagtcctccattaccctggtttgtgaattaagttctcttttctgaaactctttccgtctctcccctgagaaactcctaccctaaaaaactaaatatctttccatcctgtatcagtc

SEQ ID NO: 347781 - DNA, 122 bp, Homo sapiens
cggccccccaaaggtgcctgcaaggtgccggcgcaggagagccaggatgtcagcgggagccgcccggcggcgcctttaattggggctccggctaactctgaggacacgcatttggtggaccc

SEQ ID NO: 347782 - DNA, 122 bp, Homo sapiens
atccatagtaggtacaggagggcagtgggcagaggaggaggaagcatgaacctgaggtgccgctatgctagcaagactggcaccagggcaagggacaccaccaggtaacacggtgtcattgg

SEQ ID NO: 347783 - DNA, 122 bp, Homo sapiens
tcttcctcccgccccaagtagagcgctggccgcagggaaacggccggggagtgacagcagcggccagccagccacgaacctggcggccaaggggcggggcatccggcagcaccgcctgcggg

SEQ ID NO: 347784 - DNA, 122 bp, Homo sapiens
agaatgtaacactagagctagctccagagggctgggattgcggcaggggcattctaccgtcgtggagggccatcgggccagcgctggtcccaggaagagagtgggcctcagggtgcagctca

SEQ ID NO: 347785 - DNA, 122 bp, Homo sapiens
cggccatcactgcccagacccagcagaaccccatggttgcacacatctcccactaacattcggcatcaaaagtcagggaatcgacgtttattgcgaagttcaagacggctcactggtctgga

SEQ ID NO: 347786 - DNA, 122 bp, Homo sapiens
ccaccctttcctgcagcaccaccaccctttctatattgctgaattccaacctccctggggcggaacctggaggtgctgtttcttatggacttggttaccacagtccagaagcatttgaaggc

SEQ ID NO: 347787 - DNA, 122 bp, Homo sapiens
gcacagctctgggagtcgaagccgtccccagtgatggtgagcaactccagctccttaatccggatctccagctcgcagagctcctccgggtgggaggcagaggcgagcctgggggtcgaggg

SEQ ID NO: 347788 - DNA, 122 bp, Homo sapiens
aattttgtaaccttccgctcagtttccggtaaccgccattttgtctcctgtaacaatttacgcgccgtgtaactgtgaatctttcaaaggtatgttttactggagtgatttctggttatttc

SEQ ID NO: 347789 - DNA, 122 bp, Homo sapiens
gcccaccctttcctgcagctgccaggcccgtgcggtcagtgggacccggacgtgggcaggcgagctcgggaccctcccaggcagttcccacagctcttgcctcggctcaccagggtcacttc

SEQ ID NO: 347790 - DNA, 122 bp, Homo sapiens
catactgtcccctaacctgctccttctccagtatctgtcacttagcaatattcttctatacgttttgagttctttcttgtttgtttgctcaaggatttattgactaattgattaggcctaag

SEQ ID NO: 347791 - DNA, 122 bp, Homo sapiens
gcaggcccatcagtggccccgtcaccctcctcatgacagaaacagcagcgacgcatgtctcgcggtaccttgtcaggtcgcaaggctgtgccaagctgctccataaactctgccacttcccg

SEQ ID NO: 347792 - DNA, 122 bp, Homo sapiens
taattcctgaataaattcaacaaatttggaggtgttttttgtctgatggttccttttggtcgacaactggaatgggagaggaacagtgtgagggcaaacatcaagtgctttgctgagctccg

SEQ ID NO: 347793 - DNA, 122 bp, Homo sapiens
ggtcccgtccgcgtcacttttcactgtgttcttcccgaagctgcccttgttttgtggtggcggcacaggaagtgggcctggggatgcgtatgcccggatgaggtcgtcgtcctcctgctcct

SEQ ID NO: 347794 - DNA, 122 bp, Homo sapiens
catccccacccacccccactcggccagtgccctttgggggcaatgccaggccaggaagggcgggcaccctcgcgcgtcctggggacagaagggcgcgcaccgggcgcgtagctcctgagccc

SEQ ID NO: 347795 - DNA, 122 bp, Homo sapiens
cgctacggcagccggctgtggaaactccgtgtgctacaggctgaggtcaagatcaacatccgccagaccaccaccggcagtgccgttcccatccgcctgttcatcaccaatgagtcgggcta

SEQ ID NO: 347796 - DNA, 122 bp, Homo sapiens
ttcccccaaccactcgcgtttctgcacagcagccacggagacctgggggctgctgaaaaacgagatcagaaggcaacgtcagcctgagtgggctgaaacctgagatgaggaaatgagaagac

SEQ ID NO: 347797 - DNA, 122 bp, Homo sapiens
cccacagccatgtagctcccaccttctgtcagcttttcctcgcgtcctttgggcactagccgctcccacggctggtgttcagtggagcctgcagggtggcttggcacacattcgctctcctg

SEQ ID NO: 347798 - DNA, 122 bp, Homo sapiens
ttactggagagaagagggtgggagagagagaagtggggggccacaagggcccacccagtccggctttccagaggcatcccttgagggcggccacatactctcaactccccgccccatgacca

SEQ ID NO: 347799 - DNA, 122 bp, Homo sapiens
cagacacggacacttccatctgtccccattcgtcatcactgtgagatgaagctaagagttcgattcactaagttttatatagccagtaccatgtgaaacacaggatttgatttaagtgtgtg

SEQ ID NO: 347800 - DNA, 122 bp, Homo sapiens
tggaaacttcttattgggggacgaggagagggtgataaacatgctgctgactggaggccacgccgcttggccaaagttgggagaggggtttctttcgccttgcagtccctctgtttttgcac

SEQ ID NO: 347801 - DNA, 122 bp, Homo sapiens
gtcaatcagcctgaacactgtgcctgttccgggattttgacctgccctccaagggcgcggcgggcccagcctgcagtgtcccggcagctgcctcctctctgggtcgtttgtttttcatcaga

SEQ ID NO: 347802 - DNA, 122 bp, Homo sapiens
aggatggaactcttcaggattctagtttccctccgcgtgggtgcggaggtatcaaggggtcggctcagtgcctgggtgggcaagagagaaatggacccacagagaaaggtgggggttaaatc

SEQ ID NO: 347803 - DNA, 122 bp, Homo sapiens
cagcatcatgcagcggagggccagtggccgctattcttcctgctggtgttccactcggcccgcagctcacagcaagtctatgcggaactgtgcaacccacatgctttgattttcagaaatgt

SEQ ID NO: 347804 - DNA, 122 bp, Homo sapiens
aagtgcgtgagaaggagaatgtctcatccatctgtccactgttcctgggcttccatctcccgacaccagaatcctcagagaagaaacccctccagctgttctgagtttcccaggcagtgtgg

SEQ ID NO: 347805 - DNA, 122 bp, Homo sapiens
agcacctctgacgtgtacacgttccgctccgcaaagcacaggttggtggctgcgaggaggcggagagtgggcctgtcctctctgcccagctgccccctgggaggtgggagtcccggcctctg

SEQ ID NO: 347806 - DNA, 122 bp, Homo sapiens
agctcttgaaattctctttgcaactaggtcgactgtgaaactgcagccagtgtccccaaacgccccaaggataaggcctttatcactccgacgcatcctctctctgctttttaaatagactt

SEQ ID NO: 347807 - DNA, 122 bp, Homo sapiens
aacagggggaggttgttcttcttcactgcccagcctgcccccatcccagctgccggcacacgagctactgagacccaggcgtgtggccaatccacaggaggtgggctgtgagtgtgaagtgc

SEQ ID NO: 347808 - DNA, 122 bp, Homo sapiens
tgctgggctccaccccgagtttctgattctggggcgaggattgaaaacttgcttttctaacgagttcccagcattttcgatgctgctagtcctgagaccatactttgaaaaccgcccctcta

SEQ ID NO: 347809 - DNA, 122 bp, Homo sapiens
aagtgggcggatcacttgaggtcaggagttcgagaccagtatggaaaacatggcaaaacccgatttctaataaaaatacgaaaattagatgggcgtggtggtgggcacctgtaatctcaact

SEQ ID NO: 347810 - DNA, 122 bp, Homo sapiens
gcgtcccttcccctgccgcccgcggccacaactccacattccactttccacaagcacacacgaggcgtcccaccccgggctggccttcggggccacactgccccacgcagcggtggacacca

SEQ ID NO: 347811 - DNA, 122 bp, Homo sapiens
gaacagaattattgcactcactttttaaggacctggttatctctctgaaccacaggtaatcggagttcaaagagttaacatagtctgaagcctctcattggtctcaggtccagaaaagttgc

SEQ ID NO: 347812 - DNA, 122 bp, Homo sapiens
gcattcctggtttgaagtacttgggtgtcttggtgaagtggatctggtagggagaggtcacgatggggatcccgctgcgctctgcctgcaccatgtcactgcctgaggggaccagctgtgag

SEQ ID NO: 347813 - DNA, 122 bp, Homo sapiens
cgccattctgccagctgtactaacttcttcacttcagaaactggctcaacagtttccactcgcgattatgaagtgtggcacgcaatgaaccctcagcttagttccccttccagtcacgtcct

SEQ ID NO: 347814 - DNA, 122 bp, Homo sapiens
gcctcaatcgctgtcagtgatagaaagggagttgggtttggattcccaaatccagagtggcggagataggaaacaccaagttgccttctccagtgctgtatcctggaggagccggcaggagc

SEQ ID NO: 347815 - DNA, 122 bp, Homo sapiens
aatgtaatgaaatctgcataaaaaccctacccaaagaagttctgtctccacagggacagacgctcttgtgctctggacccttccagacctcaccctatgtatctcttgatctggctattcat

SEQ ID NO: 347816 - DNA, 122 bp, Homo sapiens
cagccgcagccaggctagtggaaaactcgccggatctgaagctgcccccccacctttcaccgccctaggaagacctcgacaatccccgcagcttttatcagcacacaagatcggcgctgagc

SEQ ID NO: 347817 - DNA, 122 bp, Homo sapiens
ggggcaccgagctgcgcgctttcggcgagcggctagccccggctcaccgcaaccagccaccgtgaatctgaggatccgatatcggccctggaccctcagatccgtggtttcggtgaattacc

SEQ ID NO: 347818 - DNA, 122 bp, Homo sapiens
ctcctggccggtttccttttctgcagtttgccgcctccaagccgccctgcgcttcctgcccgtgtctgacaaagactctgctcccttactgaacaccacagtgcccgccacgggctgccact

SEQ ID NO: 347819 - DNA, 122 bp, Homo sapiens
ggttcacaatcatggccgccttggtcaccaccacctggagggcaaaggcaggggcggggacgtgagcactaaggagaggccgggatacccttccacagagctgaggagggccccagtcagac

SEQ ID NO: 347820 - DNA, 122 bp, Homo sapiens
ctgtgggagtggagcccagcaatctgtgtttgcacaaaccctccagggaattctgatgcccgctgaagtttgagaactagaggtaaactatacctttctgcaggcgagaacctggaccaagg

SEQ ID NO: 347821 - DNA, 122 bp, Homo sapiens
tattggcggtagggaggaatagaggaaaggtgtccatatcctgagaaaggtcaacgtcaacgtctgtagcaaaagcagtggggggaaagttggacacatgagtgaggcctgatttaggaaag

SEQ ID NO: 347822 - DNA, 122 bp, Homo sapiens
agtaagatggcgcttttcgtaagcacctctccaggacagagatttccataacgagagtcacgcacttgcaggccatctttgccattatccaagacggtgagccgtgcagcctcatcgtttcc

SEQ ID NO: 347823 - DNA, 122 bp, Homo sapiens
cattaacaagtatccaccaggcccatgattttgcacttagcttcctttacctctggagggcgacaatagctgcttgttcattttcattctccgcctgggttatcccgaggaactgccatgcc

SEQ ID NO: 347824 - DNA, 122 bp, Homo sapiens
aacggaggtgccgggtgaccttgggagggaccggggctgccaccgggatggggaggggtccggcctcccttcaaacctgcgcccacctcaagcagagtgggttctacatgcttttagacaaa

SEQ ID NO: 347825 - DNA, 122 bp, Homo sapiens
ttgtggtttgtcttatcaaatatgctttgctttgaatgtgatgtggtattagagttggaacgtgatagaggtttctgtacatatgcgtgaattttgcattacagttgtaatatctgttacaa

SEQ ID NO: 347826 - DNA, 122 bp, Homo sapiens
aagaaagtgctgcataatagtccacttatagtcctcagggcaaaatgactgagctcagcccggggcaagggcccaggctgtgtaaactttgtaaatagctcaactgctttctcaattcaact

SEQ ID NO: 347827 - DNA, 122 bp, Homo sapiens
agctgtcgtggccccaaaggcatgaacgtggccctccgtgcacggcaagcagtacaggaacgtgttcggaaggcagagtgcgcggccaacagcgtgggcagcttgcctccctgctctggctg

SEQ ID NO: 347828 - DNA, 122 bp, Homo sapiens
cccacttgagtgcctgtgtgggattttgagtccggactgaaacgagatcatttctgagtccggactgaaacgagatcattgctaaggaaaatggcaggtcacctttctttcagactcaatgc

SEQ ID NO: 347829 - DNA, 122 bp, Homo sapiens
gcggaggaaggtttccggccccatgttcctggcgattttgagcctggtacacggtgtggtcgataataatgctggcttttggtttagtttcagtaaaagaaccgggatggcaaaaggcgagt

SEQ ID NO: 347830 - DNA, 122 bp, Homo sapiens
cgcccctgtctagcaccttggctctcaggctgcgggcggccaggtccggggggccgagcccgtcgaaaaagaaatcctcgttgaagatggggttggcgctgcacttgaccacgcggctctgc

SEQ ID NO: 347831 - DNA, 122 bp, Homo sapiens
gggacaggagaagtgacttggccggctctccggagcccagtgttgatcactgaggaccaccggatacaagtccctcctgccttcccctttagtgacactgaagctgttgaaatccccatcca

SEQ ID NO: 347832 - DNA, 122 bp, Homo sapiens
aggcaaatcagactcccttcccacccccaagcccaggaatgtgctccagtcaccctcacccggcgggtcctggtgaaaggagatggacaaaacagggtcacagccaccataggggcctgagc

SEQ ID NO: 347833 - DNA, 122 bp, Homo sapiens
gtggcctctttgtctaggcaccgtgcctctggggctcccccaagctgctgcaggcgccagcggtccgttccttgtcactgcggagtagcagtgcaggggccccagtttgcacggtagcgtgt

SEQ ID NO: 347834 - DNA, 122 bp, Homo sapiens
taatctccagggggtggagtacgacgttactcccaatatagcactgggtgtgcatccacccggtgattttgctcctaatattcacggaagaagagaatgctattactcgcagtatctcagga

SEQ ID NO: 347835 - DNA, 122 bp, Homo sapiens
attcattcattcattcaaatatttactgtgctcttattatgtatgtgtcaagtcccgggccgggatctgaaagcccaaaatgaatgttgaatcagtaactccagcctcattcatctatcagt

SEQ ID NO: 347836 - DNA, 122 bp, Homo sapiens
ctgtgctgaggtccgtgtggacaatcactgccctgtgccagggcactgggcacctgcagccgctgtcacacagttccccctccacccaggatggcagaccagtccctgccccgaaactctct

SEQ ID NO: 347837 - DNA, 122 bp, Homo sapiens
tgaaaggggagaggtaactgtgtttctatcgcagggcatagtacatagaacagtttcagacgctcttattggccagagtaatccagcagaagtggtttcaatgtgtgtttctcttatctgga

SEQ ID NO: 347838 - DNA, 122 bp, Homo sapiens
cccgccaggagtccctgccatctctcctcacccccggggactgagcatttataccacactcgggacaaggacacctctttattgctgttagaaaagggtggttacaagtttcctggacatgg

SEQ ID NO: 347839 - DNA, 122 bp, Homo sapiens
gaggaggaggaatgaggagttgtggggagagggtgcctttggggttgcctccggcagaggcgctgaaaagagggaaagaaaggccgtcaggtcctgccaggggcttggcagcgctcacctat

SEQ ID NO: 347840 - DNA, 122 bp, Homo sapiens
aaccttccagcagtgtgagtgagggccctgaccctagaatcaacgcccaaagagctgtggcgctacagcgggcggggacatggggtgcgcatgcgtgcgggggggtacgcgtgcgtgcaagt

SEQ ID NO: 347841 - DNA, 122 bp, Homo sapiens
tgacgagaggattgtgggatggtggacgacgtttgggcgcccacagctaggaagtcgagtcggtttctgcgcatgctcattggctgcccgcatgtcctctacgtcgcagaatttggaagcag

SEQ ID NO: 347842 - DNA, 122 bp, Homo sapiens
gcgggtggggaccctcggagctgctcgggcatccccgggccactctcgaggctcgccctgcgaggtctggcctccaggaccagtgtccccagcgaaagccccactcaccgcggtccgggatg

SEQ ID NO: 347843 - DNA, 122 bp, Homo sapiens
gagagctcgggaggcgggccagaagggacccgtcactcccgggttagagtgagaccactccgccctcgccgcccgcctcccccactcgccccgggctgtccccgccgcccgcctgattcccc

SEQ ID NO: 347844 - DNA, 122 bp, Homo sapiens
aagtcttagctgaacagtcacccctcctctccttggcaaaaaggattcctttagaacctccgaggctcctggatttctcccttcgcaaatggagccgcatactgcattcccccgctctttcg

SEQ ID NO: 347845 - DNA, 122 bp, Homo sapiens
gacgtctgacccttactcctagggctacccaccctctggtttccaggcagctcctgcttgcggagacacctcataggagcagctggatccattttccagagcgtcaagttgaggatgagaaa

SEQ ID NO: 347846 - DNA, 122 bp, Homo sapiens
tgcctgtctcagcagctccacctcctgaaggcaggcgattatctgttcatgtggtccgcacgctgacgagattgtcttttgaagctgagagggagaagcacttggcagagctccccgaagca

SEQ ID NO: 347847 - DNA, 122 bp, Homo sapiens
agctcgaggtctcccggggtgcggggacgtggggccgaagaccccgctccgcagccgcggcgaggcctcgtccttcactgtgcagatgcgaagctttcaaggacacgtctgcaccggcccgg

SEQ ID NO: 347848 - DNA, 122 bp, Homo sapiens
aacaggcacatgaaggaaatgtttctgagacagctcaaaaattccgagaagagattatcccgactgtcccaggttctcagccctgtctatggtatgcagccccataccacagtcatttgtca

SEQ ID NO: 347849 - DNA, 122 bp, Homo sapiens
ctgccccctccgccagcctggatagagtgaccaatcagctctgacctagggtgggatgcgcgtcaccatggcgacggctagggcgccctggcagtgctgcccatcgcagagggcaagtcttc

SEQ ID NO: 347850 - DNA, 122 bp, Homo sapiens
ttgccttagggagtaagaacacaaactcactggagaggccacacttaacacagaacacttcgcagaagagaagtggaaaatggtagtgaacatttgagggaggagaagcatctcaagttggg

SEQ ID NO: 347851 - DNA, 122 bp, Homo sapiens
ggtcacccaagggtggggaaggtcttggctggaggatgaaggggcctcttgtctctggggcgaggcgatgtcaaggggaatgacaaaccaaaccagtccaaagcaaggggactctgtgtcct

SEQ ID NO: 347852 - DNA, 122 bp, Homo sapiens
tggctggcagcatcgtattatagcctgagatagttgtattcattcctgaaaccctcccaacgcccccatggggtctatccacagcaggcgtcttccttaggggaaaaaaagggaagaaaggt

SEQ ID NO: 347853 - DNA, 122 bp, Homo sapiens
ctggagtctaactgcagcgccgggcaccttccgaggggctcgcgctgtctgactgcaccccggagaccgccagggttaattgatgcagctgcgtgcttcccgcccacaggacttccggtggg

SEQ ID NO: 347854 - DNA, 122 bp, Homo sapiens
tcagcagggcggggtggagcgcccgagcatctcagcatcagcagggcggggtggagcgcccgaggctctgagcatcagcagggcagggtggaacacccgaggctctgagcatcagcagggcg

SEQ ID NO: 347855 - DNA, 122 bp, Homo sapiens
tgaagtcagagaaggaggcgagactagtacaggcagaaatgagcaactgcaggacagggccggaggccagccagatgccagcaactcagaggcacctgccttggcctgcatttcttaggagg

SEQ ID NO: 347856 - DNA, 122 bp, Homo sapiens
tggagatcataacctgtgggctgaacagagggagagatgaggcaagaaatgttgagaagtcgctgctgccctggaacctccacaaatacaagtggaacctgaggtcagagaaaaaacattca

SEQ ID NO: 347857 - DNA, 122 bp, Homo sapiens
gcggcggccgggtgctggcccgggtgcccctaggccggatagagtgcttcccaaccgattcgcggccccaccccggcatctgtgccggccggccaggggctcacccagatttttatgtttta

SEQ ID NO: 347858 - DNA, 122 bp, Homo sapiens
atttcctttctgtgtgggacccacccgctgcgatagaattgagtgcagaagactgagcttcgtgtaaacacaaggtcaccagggatcgtaatttcaaactctcccctccccctcgctccctc

SEQ ID NO: 347859 - DNA, 122 bp, Homo sapiens
cagggcttgtccttctcccggaacccaggccttcagggccccgctctcccacacacgccccggcctgggcctcccacccgcccagtccgccctccaccaccgagacacctggccagggggcc

SEQ ID NO: 347860 - DNA, 122 bp, Homo sapiens
atccaaggcagccttggaaacagggacagcagtggcgtccagtggtaagagggaccccggcgagagacctagttcaaaaccccaccagcattcactcactcactcccggtgtgaccttggcg

SEQ ID NO: 347861 - DNA, 122 bp, Homo sapiens
agacaggtgcttcctgggtggcagggctgggagaggcactcattgtgatcagcctcacaacgggagcctgtgtagccaggtggacagaggcagttgaaggagccaggagtgttgaggcagga

SEQ ID NO: 347862 - DNA, 122 bp, Homo sapiens
cctcctgtccctggctcctcatcctgggagcaacagggctctgaggacgtgaggagccatcgctgtgggaggcagcaggccccgggtggggggcagaggcgcccagccttggatggggaccc

SEQ ID NO: 347863 - DNA, 122 bp, Homo sapiens
tggaggaatcttgtctggagtctgagatggaaaccccatgctggggagctgaggtgtcagcgttgacaagttgctggccaggaggtattggaagccccctacctctgggctggattctgggc

SEQ ID NO: 347864 - DNA, 122 bp, Homo sapiens
tgttaatctgttgctacataacaaatcacccaatatgtagtggcttaaagcaacaatagtcgtttattgtctctcacagtttctgtgggttaggacttcaggaggggctctgttgggttgtt

SEQ ID NO: 347865 - DNA, 122 bp, Homo sapiens
gtgaaggcggtgagggtcctgggggcccgtgagggtggctggccctagctgcttcgtctgcgaaatcctgttgagtgcctagtgtgtgccaggcactgatgcccagctcctcaccctgcctc

SEQ ID NO: 347866 - DNA, 122 bp, Homo sapiens
catgctaggtgctggcaaggaccatcctcccactgccagccaatggggagcctcacttcccggctgggggccgtgagggcacacagggtccttccaggcagcccattaacactccacactga

SEQ ID NO: 347867 - DNA, 122 bp, Homo sapiens
ccggccggcaggggggcagctgtgggggcagcgcccgtggccgccccattagtatgcggccgcgctctgcgcgccatggcaacagctccccccgcgcagcgctaggcgggcagccccgggcg

SEQ ID NO: 347868 - DNA, 122 bp, Homo sapiens
caaagcgacgcagagccctgccctccaaacaacagcacaaatgacagaagccatcagctgcggtcaattttccaatgacaaggcttcttaaagtaaggcggttcaaagcgcaggaacccaaa

SEQ ID NO: 347869 - DNA, 122 bp, Homo sapiens
cacaggcaagctgcaaagtccctggggcactctaagggcctctgcaggaaccagtctggccggctgcaggctcctggccagctcgggcctcattgggagctgctgaagttcaagggctggag

SEQ ID NO: 347870 - DNA, 122 bp, Homo sapiens
ccagtttcgtgaaggctcttggcgcgccgcggcccgcaggcacctggcacgcgccttccccgccgccaggatgcccaagaggaaggtcagctccgctgaagccgctgccaaggaagagccca

SEQ ID NO: 347871 - DNA, 122 bp, Homo sapiens
actagcagctgccatagtcccggcaacctccagctgctcagaaccaaccattgcagctcccgccacagtcagtcacagacccagcctttggtgtggcaagtgcaagcattccctggacagat

SEQ ID NO: 347872 - DNA, 122 bp, Homo sapiens
aataggcggcggcggcggcggcggcggcggcggcagcagcggcggcggcggcggcggcggcggctgccgggtgtttgctgcacagcaggctccgaaaataagcagggtccgaggggaaggcg

SEQ ID NO: 347873 - DNA, 122 bp, Homo sapiens
cacctccctctcaccctcggagtcttccattgagcatatactatgtgttctttagcccttcgtccactgatgtacattcaggttgattatgtccctgccattgtgaatagtgctgcaataaa

SEQ ID NO: 347874 - DNA, 122 bp, Homo sapiens
attactcagacgggaacagagaggccgggagaagcgaaatcacccaggggctggggtcgtcgcagccaggagagactccggccctcaccaccacctgggcgagatcacgctgcaaacggggc

SEQ ID NO: 347875 - DNA, 122 bp, Homo sapiens
agggcggtccctagttcacactggctgttgtcagcggcctctgaggtttcaggctcttggcggtgaagtaagagggacgcggaggtggtgatggttttgatgggggcgggggttgacggggt

SEQ ID NO: 347876 - DNA, 122 bp, Homo sapiens
gagtcagcctgctcccctccaggcttgctcctcccccacccagctctcgtttccaatgcacgtacagcccgtacacaccgtgtgctgggacaccccacagtcagccgcatggctcccctgtg

SEQ ID NO: 347877 - DNA, 122 bp, Homo sapiens
gcgaggcggcccgcgaacctctgacgtgctccattgcaatgaggatgaacgagcctcaggcggagggtcagcctggaacccctgccccgtgaacaccagccagcttcatgctgaggacccct

SEQ ID NO: 347878 - DNA, 122 bp, Homo sapiens
agtgatctaccggcctcggcctcccaaactgctgggattacaggcgtgaccaaccgcgcccggcagagcattttatgtttaaaacagtttttcatgtgtaatcatgagaggatatggaatcc

SEQ ID NO: 347879 - DNA, 122 bp, Homo sapiens
acaccgagaagcagccagcacaggctctccacaggggctctggcatggagcaggataacccgggcccacgtggggacacgccccgccccacaggcttgcaccggggtgcggcctgccctgtc

SEQ ID NO: 347880 - DNA, 122 bp, Homo sapiens
aaaaattacaaattgatccacaggacctgactccctgctcacatacttctcctgggctgccgttgctgcttctctctataagtaatggctaagatggtgacagtagaatttaggtctggtat

SEQ ID NO: 347881 - DNA, 122 bp, Homo sapiens
gcggaggtagccgttccctgacctagccatggcacagaacactgaaaaccacgaccctgtcggatccatcttaatccaggtgggaaacgggcttcccccggccctgccctgcccagccgcgc

SEQ ID NO: 347882 - DNA, 122 bp, Homo sapiens
tcagatgcagatggtaataactgttcttccttcctcacaagacagggaggtttgtaaagtcgttcaaaaaccaaagtgttgtacaaagccatatcctcagtggacacaaggaggaagctgtc

SEQ ID NO: 347883 - DNA, 122 bp, Homo sapiens
cggctctggccagcttgagtgacgcagatcctgagagcgctcctgggtaggtatttgccccggtgggatgccttatcagagtggtgcatggcaggcccccgtggaggatcaacgcagtggct

SEQ ID NO: 347884 - DNA, 122 bp, Homo sapiens
ggcgatctgggatagctgcgcaggcgcagcttccggctctgtgtctcgggaattatttgacgccaccggttcagccccgtagaaagctctgattaggcgcaccgcgcacgcgcagtggccca

SEQ ID NO: 347885 - DNA, 122 bp, Homo sapiens
agtccacacaaatgagctgacactcattataacaaatactgtaatggcaaaccctagagccgctagaggggtcttgttcatgaggcagagagagtggagattatatacctgtgtttgtgcta

SEQ ID NO: 347886 - DNA, 122 bp, Homo sapiens
ggcccattgaccctgcctctgtccccacagtccatggagtcgcaggtggaggagtggtaccgcgaggtgggagagctgcaggcgcagacggcggcgctgccgctggagccggcgagcaagga

SEQ ID NO: 347887 - DNA, 122 bp, Homo sapiens
aggcccgggcggcggcggcggcgaagttttgacagctgctccagtggcggcgctgggcgccgggccgcggctcgctcctcacactcgctctctcacacacgctcgctcgctctcccggagca

SEQ ID NO: 347888 - DNA, 122 bp, Homo sapiens
catttccaattctggcccacagtttgtagaagagggctttccttccttgctgtgggctgtcgaggtcattgacaccaggcagcgatcttatttctccctgacactgtttctccctggcattt

SEQ ID NO: 347889 - DNA, 122 bp, Homo sapiens
agagcaaagaaaaaaaccaaacgttccaaagtcgaagacttttcctttgatacaaacaagcgaaagttcgattatttgttcaataattttccgttgatcccttagtcttgtagtcgctactt

SEQ ID NO: 347890 - DNA, 122 bp, Homo sapiens
tgccacaatgtatattgttgtcttaatggatcatctatttacctgaatgtttaaaactctcgccctttttcttgatgaataggctgcacgatgctcttcaatagaattaattgattggaatt

SEQ ID NO: 347891 - DNA, 122 bp, Homo sapiens
tgataagaggcaggctatttctcatggcctgaatccctgtggaatatttcactttaagcacggtctgtgaaatggcgggggacttacaaaatggtgcagattggactttcttgccttctact

SEQ ID NO: 347892 - DNA, 122 bp, Homo sapiens
ggctttgtttgactccgtgtagcgacaacaagagaaacaaaactacctatttgtaacggacgtgctgccattgccctccgcattgagcgcctacctattgaaatctttacgtcgggacaatg

SEQ ID NO: 347893 - DNA, 122 bp, Homo sapiens
tggatgacctcaggatcagccccgtctgccccactcagcccgcagcctggtccccgaaagcgctcagtcagaatccgagagcactgtggcggcgcccccgtgtggccacaggactgaagaca

SEQ ID NO: 347894 - DNA, 122 bp, Homo sapiens
atgtcccctctgcccgccagagctggcctgcgggtcaccctgcaagatgacccctctgcccgccagagctggcctgcgggtcaccctgcaagatgaccctctgcccgccagagctggcctgc

SEQ ID NO: 347895 - DNA, 122 bp, Homo sapiens
gcagttctctttgggggaggagagatggcctctcagaggcgtccccacctgcctctggaacgcctctccctgcaggccccctcggttccctgcaattcgccgcccgctgggatactcccatg

SEQ ID NO: 347896 - DNA, 122 bp, Homo sapiens
gggacgcggtggggcgggtctggcgggggcggggcacctctgtgcagggttcccagtcaccgcgacgctcctcgggaagccatagggcgcctcccagcccgtctccccgctccagtttagaa

SEQ ID NO: 347897 - DNA, 122 bp, Homo sapiens
agaaagaagacgcggggttacctgaacagagacatattaatccaaacaggtaaaagtgagcgggctccgcaatcattgtcctcgggtggatcctgtatacagtctcatgccaagaggaggga

SEQ ID NO: 347898 - DNA, 122 bp, Homo sapiens
gtccaccccttcgggctggccgtgtatggggagcacattttctggactgactgggtgcggcgggcagtgcagcgggccaacaagcacgtgggcagcaacatgaagctgctgcgcgtggacat

SEQ ID NO: 347899 - DNA, 122 bp, Homo sapiens
gtgaggccgcttcctagacctcgcctagtcgtctttcctctccctgccctgggggggttgcgggggtcagtgcaaactcctgcgtccagggcactggtgagctcccgacttccggcagccag

SEQ ID NO: 347900 - DNA, 122 bp, Homo sapiens
tttcgaagtcttcaggcttgaagttctggagaaaacaactaggctctccgggcgagatcccgaataccagtttaagggatttgaaatgcaaggccgtctgggactccactgccacggatggg

SEQ ID NO: 347901 - DNA, 122 bp, Homo sapiens
gcttctgggtaccaggtagtggccactctccccatctttgtctcctgtctgagctgctaccgagtttgatgttagatggtgacataaaatacagtaattcctagatatatgcggagggactg

SEQ ID NO: 347902 - DNA, 122 bp, Homo sapiens
cccctgggacactgtcagctttgccgggactcccacgagcttcagacctgcctgcagctgcggactctgggagcagcagagaagtcagagccgccagcagcagccccagctgctgtggcggc

SEQ ID NO: 347903 - DNA, 122 bp, Homo sapiens
aaacaacaggcccatattaccccttgactatttagccaagacataagctacaaattttgccggaaaaactgtccatacatttttaactacttcttcattattcttatggaccatcatccagg

SEQ ID NO: 347904 - DNA, 122 bp, Homo sapiens
aatcacttgtcttaaattgctgagactcccgcagcttttattgtttggtggaagcacaagcgagtggaattggaccagagggtctttggctcgtcagcagcaggagggaaacgacctttatt

SEQ ID NO: 347905 - DNA, 122 bp, Homo sapiens
cctgagaatttgctcagctgtgtaaaaatgatgccacttacgataattctgcgaagctaccgcttatgccagctacctgtggagcgcaacatcggcttcctgaggcagtctcagcctgctcc

SEQ ID NO: 347906 - DNA, 122 bp, Homo sapiens
gtgcgggatgtggcagagtcggagaagagtccagggcgcccggagtggctccaggaaggacggaaacccctgagggcttttgggggcggtgggtactaatagaacccagtgtccggggtgcg

SEQ ID NO: 347907 - DNA, 122 bp, Homo sapiens
ggcggcgcagccggggccgccggaggagcgcgggtgacctggcggcggcgagatgccgctcgcccagctcaaggagccctggccgctcatggagctagtgcctctggacccggaggtgagtg

SEQ ID NO: 347908 - DNA, 122 bp, Homo sapiens
atggtgtcctcgcttcagttttgacacgacatcattagcagctgcagacagtccttgttccggctgaataagagagcacagacggacttggcactgggcgcacaccaggagggtccgaggcg

SEQ ID NO: 347909 - DNA, 122 bp, Homo sapiens
cctgcaggatacagggagtggctagggcggtgtccccggtccccgggcacctgcgagacacggatagtggccctggctgtgaccccagcccccaggcacctggaggatatagggagtggcca

SEQ ID NO: 347910 - DNA, 122 bp, Homo sapiens
ggagagaaactcctactcttctgtaaggaggataggaaagtcatttgctggctttgtgagcggtctcaggagcaccgtggtcaccacacagtcctcacggaggaagtattcaaggaatgtca

SEQ ID NO: 347911 - DNA, 122 bp, Homo sapiens
ggcttcaacggtcacttccggtcgttacgagcgagccccgccccgcacgccggcgccgggcgggcacactggaccagcgttcccagaacactccgcgaaggtgttcctgaacttcatttccc

SEQ ID NO: 347912 - DNA, 122 bp, Homo sapiens
gcatctgagatatctggatcagatcctagagaaggtgcagaggttttacgtggatgggcacgggactgctttacggccaggaaaatggaaaaaggagggattgatggagaaagggggaagag

SEQ ID NO: 347913 - DNA, 122 bp, Homo sapiens
ccagaagacatagcagcacggagacactaatccgctgtttttacacataaacacttcacacgagagagattacgtacctcacattgcagtcatagagggatctgtgggtgttagaggctttc

SEQ ID NO: 347914 - DNA, 122 bp, Homo sapiens
cgtgttcccccagccagctgcgttggacgttccacaaaggtagggactgacgtttattctcgagtcagtgatgttctggagcaaaacctaaaaagaaacaaaaacctaccctctattgtatt

SEQ ID NO: 347915 - DNA, 122 bp, Homo sapiens
tatgagctgtaacactcaccgaaaaggtctgcagcttcactcctgaagccagggagaccacgagcccaccgggaggaacgaacaagtccagacgcgttgccttaagagctgtaacactcacc

SEQ ID NO: 347916 - DNA, 122 bp, Homo sapiens
ttctgtcctctacttccctggtattgagatctctgtgtatgcatcctggaaaaggaaacacgtgctggctaccagcaaattttctaagctgttagatacaagtttcaaaattagctactgta

SEQ ID NO: 347917 - DNA, 122 bp, Homo sapiens
agtaatccactggcctcggcctcccacagtgtagggattacaggtgtgagccactgtagtcggccacatgtatatatcttattgtggtaaaaaaacagcataaaatttaccaggagtgacag

SEQ ID NO: 347918 - DNA, 122 bp, Homo sapiens
gccaccccctggagaggccacagctgctggcttcctgggcttctccaaactcctgtgtgtcgccactgccaccggcagggagccaggagagagacagaaaggggctgagacagaatgatcaa

SEQ ID NO: 347919 - DNA, 122 bp, Homo sapiens
atttgcatgtgtgattataacgggtacgtcctagagtttgatctcttctctgtgcaggggcgaaactcgaccccagccgagaactacactgtccttgcgcggggccctctgcgccccggaag

SEQ ID NO: 347920 - DNA, 122 bp, Homo sapiens
tcgcccgccccggccgagacgctgggcccggcccccacaggctgcgcctgacgggaccggcgggaggcctttgttcgcagcccggaggccccaggctccaaaccacactcgggctgcgggga

SEQ ID NO: 347921 - DNA, 122 bp, Homo sapiens
ccctcccactctcacactgaaacacccagacctagagatagctagacacacccagacacccgccaagcccctcacatacagatatgtgcacaatgatacacagcaaacgtacacagagttca

SEQ ID NO: 347922 - DNA, 122 bp, Homo sapiens
cagccggccccatgtgtctcccaccccatctctccatgtccctcaacagtgtctctgcatcgctgtctgccctagagctcttgttctgtctttgggctgtctctgtctctctgtcactgtgt

SEQ ID NO: 347923 - DNA, 122 bp, Homo sapiens
tcctggccattacccacaaggaaagaccaatgcagcagaaccgtccctgaagcagcgaaacgtggtcaggagccgtccgtcagtgagagccatccctttggaagttcttcacaggacgatac

SEQ ID NO: 347924 - DNA, 122 bp, Homo sapiens
gcactagtgatactaaccagtccagttgccggcactagcagtactaaccagtccagttgccggcactagcagcactcgttcatttgccgggcactcgcagtgctagttctttctacggatgg

SEQ ID NO: 347925 - DNA, 122 bp, Homo sapiens
gccccagccggcccgacctgcccgccccggcctcggcggccccactcaccgatcagccggcgcacctcgtcctcgctcaggtagagactcacgctgggccccgcggaagccgactgcagctc

SEQ ID NO: 347926 - DNA, 122 bp, Homo sapiens
tacagagacactgtgataaatgcaaacacagacataaacataggttgttagggaagcatacggaaatggacagctgatctgcgcttggccttgcattgcggttttgggaagtgattggtatt

SEQ ID NO: 347927 - DNA, 122 bp, Homo sapiens
ccccgagggaggaaggcccttccagagtggtcactgggaggcaaaagggcctggcttccccgaatctcagcttcctcatctgagatggtggaaaagatgatgttgactttccagagccatag

SEQ ID NO: 347928 - DNA, 122 bp, Homo sapiens
tttagctcaatccaccttaacatgaatctctttcggggcatgggaaatcatttgtcttatcgatcactggttcttttgtacagtatcttttcttagattattatgaagcagtagctacctga

SEQ ID NO: 347929 - DNA, 122 bp, Homo sapiens
ggggctgggctctgtggctgggccccgccatgtgcattgaggcattggagttggcaatgacgatggagctgccagagctgctgtctgccgggaggaggtcacggtctgcagacgccacggtc

SEQ ID NO: 347930 - DNA, 122 bp, Homo sapiens
caagcggtggccaagggtccgggcggaagacaaccctctgggattggccagttaagactgcggcccagccggttaggcaaaaacaggaccgggtccccagagaagctcttcaaggtatccag

SEQ ID NO: 347931 - DNA, 122 bp, Homo sapiens
ggctgtcgtggagataacgggcaccagaaaaacttgtaggagtagcaacagctatttggtcggatggaggccagaagccaagaataatcgaaacacgctgccagcgcccattagatggatgg

SEQ ID NO: 347932 - DNA, 122 bp, Homo sapiens
ggtctagaggtaacgccagcgcctgggaagacgcctgttacctagcggactgtggtctggcggtaacttcagtgcctagaaaaggcacccgttacttagcagaccgggaaagggagtctccc

SEQ ID NO: 347933 - DNA, 122 bp, Homo sapiens
agaagaccctggtccaccactggactttctgtgccttttctggcttcctgccgcagggaccgccgggaccgacaccgctctaagagtcgagatgggggccgaggggacaagtcggtgacaat

SEQ ID NO: 347934 - DNA, 122 bp, Homo sapiens
ctgggatgggtgactggccggtgaaaaccgggaggtaggcacaactcaagtggcccaacccgtgagaagagttgcgacaaactggcttaccggaaaggacaaactgtgggggactgatgaat

SEQ ID NO: 347935 - DNA, 122 bp, Homo sapiens
tacctgctgaaccttagtcttcattgctgaaataagagctgtcctgcaaacagagtttggcgctcgctttctggcctccggctggtggagcaaggacgtttccagcacataagattccccac

SEQ ID NO: 347936 - DNA, 122 bp, Homo sapiens
cgaggtggaccccgcctacctcaacctctcagacctgtacgatatcaagtacctcccattcgagtttatgatcttcaggaaagtccccaagtccgctcagccagagccgccctcccccatgg

SEQ ID NO: 347937 - DNA, 122 bp, Homo sapiens
ttgggggtattattgatagcagtccaaaccccacaggagtaccctgaggacagagtgagacgaggtttagagaagtgcttactatggcatctggcacaaggaggactcctgatcaatctaat

SEQ ID NO: 347938 - DNA, 122 bp, Homo sapiens
ggtgctggagggagggggtgtctgcacccacttaagaaaatgagacaaaaggctcctcatcgaggtgattagccatcagatgaaggaagactggggaaaataccttctggagatcctatcca

SEQ ID NO: 347939 - DNA, 122 bp, Homo sapiens
cgacctattcttgggcagaacatagccccgggagtggcacaatatcgtggaaagagaaggcggctgtggggagttgggataaacaatagcatctcctctgagctacctgtggaggagtctgc

SEQ ID NO: 347940 - DNA, 122 bp, Homo sapiens
tctgccctgatgctgacggaatggtctgctggactctacctgcctttggtagtgtggccacgcggcctcttagtgtacgtgttagaacctattattaaaggagtcaactgagcctggcggcc

SEQ ID NO: 347941 - DNA, 122 bp, Homo sapiens
tccaaggaggccatggcggaactgagccagatgccggaagcggaattacgtaatgtggcgcggaaaaggacgggtcggaccgtaccaaattcggaagcgggggatgacctgtgtgattgatc

SEQ ID NO: 347942 - DNA, 122 bp, Homo sapiens
gacccctagcgcggcctggtgagcgggggcttggcccagaggagccaagccgcacagacccgagaattcggaggccaccacacaacacacacacacacacacacacacacacacacacacac

SEQ ID NO: 347943 - DNA, 122 bp, Homo sapiens
atgctgcctgtgctaagtatttgtctccatatctgtcctgagaaccttggagccagggctcggggctgtttttgcatgggcctatcacctcctccaggaagccctccttggccctctctcag

SEQ ID NO: 347944 - DNA, 122 bp, Homo sapiens
ggcctgggggctgtgccattgagaggtgaccgcgtgctggcagtcctcacagccctcgttcgctctcggcgcctgctctgcctgggctcccacttcggcggcacttgaggagcccttcagcc

SEQ ID NO: 347945 - DNA, 122 bp, Homo sapiens
tcgctctcaaagcaggattctacctgaatttctagtgcctcacctgctctttggctttcccgtcagcctccgggagtccctccccagttctcagatataatttcatctctaaaagtccagac

SEQ ID NO: 347946 - DNA, 122 bp, Homo sapiens
gctccgggccctaaggggtgagtatcccacggtcctttgccacgggtaagggttcctctccgcggccgacgcgggcggcggctccgttaggtctgttggcggcctagccccggcgcggcctc

SEQ ID NO: 347947 - DNA, 122 bp, Homo sapiens
tgtggggtgaaatcacacatgctaagtggttaggtcactacctagcatgttgtcagttggcggtcaacaaatgctccaggaacacagggctttaccagagaaaggctccaggttgaggttga

SEQ ID NO: 347948 - DNA, 122 bp, Homo sapiens
tccggctgtggccaccgcagtaaacacaggacatcctgtgaggctagggaaggaggtggacgcttcttctcagggaccaccctctccagactcagtctgagccaagcaggagccttggcctg

SEQ ID NO: 347949 - DNA, 122 bp, Homo sapiens
gcaatgtagatgataaaataagtcacttgttggcaacacgcagcataccccatgcagcaccgggtttctgacttgcaactggcgtgacttctagtgaatgtgccgcccagaaacactcgacg

SEQ ID NO: 347950 - DNA, 122 bp, Homo sapiens
tcactttcacggaggaggagacagcccagttagccaagatccggccgcaggagagcgccacggtgtcagagaaggtcctggtgcagtccgcggcagaaaaggaccgcatcagtgagctgagg

SEQ ID NO: 347951 - DNA, 122 bp, Homo sapiens
ccatttcttctgctggtctctgggggtgaggaggggcgcaggggagcttcttgggggaatcgctccaactctgtggagctggtggtgctgcctggtggggctctctctgcccaggacgtgga

SEQ ID NO: 347952 - DNA, 122 bp, Homo sapiens
cgactgcgtgtctacaggtgccgcctcttgacgcctctgctgcaccgccagtgccccgctcggcaaagcacagcccctccccagcactgcagcaaatgggcaggagacccccgcccggccgg

SEQ ID NO: 347953 - DNA, 122 bp, Homo sapiens
ctcagcctcttggatgtggacgtttgggcccgtaactcttggtcgtggagggctgtcctgcgcattgtaggatgtttagagccagggcagggcttctcagcctcttggatgtggacgtttgg

SEQ ID NO: 347954 - DNA, 122 bp, Homo sapiens
cctccaggagagggggatacctgggactatttccccaagagagactggagctcccttgggcgggtggaggggcctgggtctttcttctcccctcccctgcccatccttccactaaggggcag

SEQ ID NO: 347955 - DNA, 122 bp, Homo sapiens
aaaaatttaaaacaccaccatccttgtctcatttttggcttccctcaaagtacatggattcgaaaaccaaatatttaagttagtgtttttttttttttttttttttttaacacttactgtgg

SEQ ID NO: 347956 - DNA, 122 bp, Homo sapiens
gtgtagctgcaactggggagcctgtgattcgccagtgcccttctccctaggcaagggaagcgagcaggcaataagaggggcgagtctggggcccaggcttccgctaccgagaccccagtcag

SEQ ID NO: 347957 - DNA, 122 bp, Homo sapiens
ccctctggcctaggtcatcggggcgtccataccctctgctggatttcacgggcttcgatgcggccagcctcccttcgcagctgctccacccgggccttggccaggcacaggtaggcctgcag

SEQ ID NO: 347958 - DNA, 122 bp, Homo sapiens
atttgacctctgtcttgtattaatgtgaatcttaggctgccctgcacgcacttccgaaagcgacatatctccctgcaggatcagtgacagggagacagctggccggcctcagaacgagctcc

SEQ ID NO: 347959 - DNA, 122 bp, Homo sapiens
tgcccccgactcccccagccgcaggccctgagatgctcctagggaacctttctctccacacgtcctccccatggggtctttccctaggtctgccttcacacagtgtcacaagcgagtggatt

SEQ ID NO: 347960 - DNA, 122 bp, Homo sapiens
tatggtaccttcaaattctaccagaatatttttaactaaaatagcatcatagctacgcttcgcatttttgcttttgcttttcttctcacagtcacataatcaaccaagagaatgaggcaagg

SEQ ID NO: 347961 - DNA, 122 bp, Homo sapiens
ccccaccctcccctcgccctcacctcttcccgcacctctgccctctcctccccctccccccgccctcaccaatgcgccctgcatcctgcagctggatcttcagcatctccatgggcgtggtc

SEQ ID NO: 347962 - DNA, 122 bp, Homo sapiens
tccctctgggaaggccggtgaccgggacagtccacctcgcaggcgcgccggcgcggagcccggacctcagcccgcaatgactcagcaagggccggtgggattctacatggtcctgcgatatc

SEQ ID NO: 347963 - DNA, 122 bp, Homo sapiens
gtgcagggaaagacgccaagcacaaggtcacatatcgccaggccacgtgtcgccaggccacgtgtcaccaggccacgtgtcatcaggcaccactgatgtgatgtgtcctgaaaggcaagccc

SEQ ID NO: 347964 - DNA, 122 bp, Homo sapiens
gctgtccctgcctcccccatagccacagattcactgtaacagaactctgctctactttctcgagcacatcggtcttccggccataaggtatcaggtccttcctttccttcggctcttatggt

SEQ ID NO: 347965 - DNA, 122 bp, Homo sapiens
aatgacatggtggttgcctgctttctctgttggaccgaactggtctaagccttgcagtgtcgagcggagctccctgtaggtcacctgagtgtgacgaaaagggatcccgacgccaagaccta

SEQ ID NO: 347966 - DNA, 122 bp, Homo sapiens
ggtaaatcttagaatcttggaaatgaaagtgccataatttccaggatgatattaaaacgccgtgactttctgaaaagggttccagcaacgtggttgacagaaaatattgtgctttcttttcc

SEQ ID NO: 347967 - DNA, 122 bp, Homo sapiens
cagccccagaaacagcttcagtcaggagacccagggtgctggcccggttctgccgccggccggctgtggaacaggcttctggagcccgagggtgacgccccagcctctaagagcaggtgctt

SEQ ID NO: 347968 - DNA, 122 bp, Homo sapiens
agcccagcaggagcacggatctggctggctcccaggtgcgcctggcagagccattctggacgcttaggtgaaatgtgccgccaggcactgggagcaggaggcgggcccagtggaagtcataa

SEQ ID NO: 347969 - DNA, 122 bp, Homo sapiens
ggcagatctgacaccgacccacgacgcacgatatggccggaggggcttgtaggttcagcccgtctcagtagcgatgagggcacatcttgttacctgcactatctgttgttttccccctcaag

SEQ ID NO: 347970 - DNA, 122 bp, Homo sapiens
gtggagactgctcagggctgtagctcagtagctgggctttgctgtctcacagtggcagcccgagttcagggttcaatttctggcttaggaaatgagtcctttctgatttgataactgtgtga

SEQ ID NO: 347971 - DNA, 122 bp, Homo sapiens
gcaggtagagaggtgcagcaaatagagaaggcatgtcaaaccctgcatttctacctgagacgtgtgacctggatgatcctccaaaccctattggtcccaccccctgggaaaggccatggtgc

SEQ ID NO: 347972 - DNA, 122 bp, Homo sapiens
aggctgtggagagagggagttcagagggattcgggttgggggtggagggcagaggacagtcgccatagtgacagtgccactgaccacgcgggatcccaggttgtgcaaaaggcctggcacat

SEQ ID NO: 347973 - DNA, 122 bp, Homo sapiens
ctcgtggtgggccgttttttaagcccgtcggaaaagtgcagtactcgggtgggagtgacccgattttccaggtgccgtccgtcacccctttctttgactaggaaagggaactccctgacccc

SEQ ID NO: 347974 - DNA, 122 bp, Homo sapiens
tctggcttcaccacgatgagggtccgctccagggtccaggagggccctcctgagctagggcgcacgaaggcttggcctggggcccacaggccgcagcgaaacccgcagcgcaacgcgcccgg

SEQ ID NO: 347975 - DNA, 122 bp, Homo sapiens
ccacaatccatgggttgataaatgaggattttgtgcctctgaggctaaggaccacactctcgacgctaaaaaaaaaaaaaaaaaaaaaaaaaaaaaaattctccaaggagacgatattataa

SEQ ID NO: 347976 - DNA, 122 bp, Homo sapiens
cgcctcttccaaagcggtaggtttccttcctccgcctgcctcttaaataacgtggtatctcgcagtttggctgaaacctgaattaaatgcaatgcttttttgacttttactttctcccagaa

SEQ ID NO: 347977 - DNA, 122 bp, Homo sapiens
cactcctgtgagcttacaggccttcgatcacacgtcatcgcacacgccccacacctgtgacgccctcctgtgagcttaccggccttcaatcacacatcatcgcacacgccccacacctgtga

SEQ ID NO: 347978 - DNA, 122 bp, Homo sapiens
tcgttctgcgtgtcctgtactcaacagtcatctcatgctgcagggtggctgcgtgtgctccgtacatcacacccatatttcaggtagggacggttcccggagggtgctcagcaccatgccga

SEQ ID NO: 347979 - DNA, 122 bp, Homo sapiens
tccagaacatccagttgttctgctaattttgttgttaaaacttaattgtccatgtacaggcgcacatggagaacctttgtagcagcgctttgctgaacagagctgtttcctgcagtgtcagt

SEQ ID NO: 347980 - DNA, 122 bp, Homo sapiens
tcagcccctcaacccggtggcattctgggggaggagtggggcccacagctctccagcacccggaataaagcccgcctgccccagtcggactcgggctctgtgtgtttctttccggggttggg

SEQ ID NO: 347981 - DNA, 122 bp, Homo sapiens
gctctggcactccccggagtgccttcatcccgtggcccacgcagttcttccactgctcaccggggctgtggttcctgtccccacaggtccaacgagcgctcctccaagcggagccttggagg

SEQ ID NO: 347982 - DNA, 122 bp, Homo sapiens
tcaggcattattttgtttgggggtagaggaggtaggcggcggtgggcagttgggaccccccgtacttatgttctgctccaatattgtcttgtagaaaatggtctaaaatagatctttactat

SEQ ID NO: 347983 - DNA, 122 bp, Homo sapiens
tgcctggacccgcccctcagcagtgttcccagcgaggacgagtggtactgccctgagtgccggaatgatgccagcgaggtggtactggcgggagagcggctgagagagagcaagaagaaggc

SEQ ID NO: 347984 - DNA, 122 bp, Homo sapiens
ccaggatgccgatgccaagcaggaaagatcacctcgttgcttcttccaccggcctctccgcgagacatagctaaacttgaacttggcattccaagggtctggaaacatcttcgtgggaccca

SEQ ID NO: 347985 - DNA, 122 bp, Homo sapiens
gtgccatttactttggctcactagtatcctggggcatttggaggaggggtattgacccgacgtaaattcagtgaggactgagcaaagacttgcagcctatatgagctgcattgtagatagat

SEQ ID NO: 347986 - DNA, 122 bp, Homo sapiens
gaaagcccttgctgaggtgtggctacctctaagaacactgttgattgggtgccatggtaacgtttgcaaagtagctactgctaggatacagctctgacacttattactttatttgcatatca

SEQ ID NO: 347987 - DNA, 122 bp, Homo sapiens
ccaccgaatctaccggcgctggcacacccctctgcacatctgcctcatctggctcctcaccgtggtggccttgctgcccaacttctttgtggggtccctggagtacgacccacgcatctatt

SEQ ID NO: 347988 - DNA, 122 bp, Homo sapiens
aggctgtaatctggggacttcaggcttccaggatcaggccacttaggaatggttgccctccggcatgctggtcgagccctaagccctaaagttctgctagtggagcttatctggtcattata

SEQ ID NO: 347989 - DNA, 122 bp, Homo sapiens
acaagataccatttacactgaacatagaattccctagtggaatgtcatctatagttcactcggaacatctcccgtggacttatctgaagtatgacaagattataatgcttttggcttaggtg

SEQ ID NO: 347990 - DNA, 122 bp, Homo sapiens
gaataaaggaccggctcatccccagcacctggctcagtgcgtgcaagcggctacacactacggcataagatgttcccattttgcagacggggaaacggaggctggggaataccgggcctagc

SEQ ID NO: 347991 - DNA, 122 bp, Homo sapiens
ctcacccccagcaaccctccaggactctctctttggtctcccctctctcccatggctgcgcgctggcacacaccccggctcagcaggccgctttgcttggatcccacgccaggcctccagcc

SEQ ID NO: 347992 - DNA, 122 bp, Homo sapiens
tggcggcgtaattactgatttgattccaatccattatttagacaattgaacctacaatctcgtctttagtaaaatgaggcgaagtcagatttgattacaggttcagtcccagcgacaagagc

SEQ ID NO: 347993 - DNA, 122 bp, Homo sapiens
ggtaaaatgcttttaatactactttacggatgagccacaaagactaccagacttcatctccgagggctgaactgccacatttggataccataccccaactggtacctgccctgctgtgtcca

SEQ ID NO: 347994 - DNA, 122 bp, Homo sapiens
gatgtgagattcaaaaaatcgaagagtgaagcggtgatgagagtccatctggtcgctcttcggatgcggcgctagcaggcagttgcatgaaagcagatcccagatcacgttgcactggcaca

SEQ ID NO: 347995 - DNA, 122 bp, Homo sapiens
gggcaaactgaccaccctccacccccatacacagaagagccccatcctaccctctgcagacgtctgggtctgcgatgattggccctggatgcaagtaaaagctgtttctcctttttgtcagc

SEQ ID NO: 347996 - DNA, 122 bp, Homo sapiens
tggcaatgcaaacccagtccagagatgccaactctgacccctgacctcaactaaaagagtcgctgtccccagcctgcatcctgcgggggaggagcccagaaagcatgaaagggctgaagggg

SEQ ID NO: 347997 - DNA, 122 bp, Homo sapiens
gatcccagggcggccgcctaaagcctcacctgtccatcattactacctgcttaagtacgccgggatctctgtagactaagtcagtcatcctgtaggccccactgcccacgctgtgccaatag

SEQ ID NO: 347998 - DNA, 122 bp, Homo sapiens
actgctaacttggcacaatttccctcacccccatgaaattctgggccacaggaaatggagcgaatagcaggaagtgtgaaaggacatctgcttcagctacccctgctcccactgggcacctc

SEQ ID NO: 347999 - DNA, 122 bp, Homo sapiens
ctttaatacagaagtgagggaggaagaagaaactggcctgaagagaagctggaggtggtgcgatgtaactgggtcctcaactggagcgttctttgaagggatgattcattcatcccttcaag

SEQ ID NO: 348000 - DNA, 122 bp, Homo sapiens
gtaatcgaacaaattgaaaatctgaagaccgatgctgcaagcagaccatatgcagatgtgcgagttattgactgtggagtacttgccacaaaatcaataaaagatggtaagaacttttttga

SEQ ID NO: 348001 - DNA, 122 bp, Homo sapiens
cgatccaactcacggatccaactcatggcgggcaaaccaggcctggttccttgtgctcagcggggtttcaggtagtaatggaactcctcccgtacttcttgtgatcaaagatgcagctagtt

SEQ ID NO: 348002 - DNA, 122 bp, Homo sapiens
gagtgtaaagccgccccggattggctgaaacacttcctgagcgattatctttgtgaggctcgggtgagcaagagccatcctgtgcatagaaaaagacaggctaagctaggccttttgcagca

SEQ ID NO: 348003 - DNA, 122 bp, Homo sapiens
cggctcaagggtctctgtggtgaagcgctgccctctggtggtaagaggtagaaatgaccacgtcttcttggcctggttccaagagcatcagagacgtaagcatcagagacataagccccaaa

SEQ ID NO: 348004 - DNA, 122 bp, Homo sapiens
catggcaaccccagagcaggtgtctgggagaccctgatcagtgctgacagacacggggtgcgggacacgtgggatgggcctccccagggacggctgggccaatcggggttcctgggcagagg

SEQ ID NO: 348005 - DNA, 122 bp, Homo sapiens
ccgctcacccgctcctccttcttgcgcatccagctgtacttcttgttgggcttcagctcccgcgggagccgcaggttcttgagtgggtccaccacgggcccatccagcacctccctcagcat

SEQ ID NO: 348006 - DNA, 122 bp, Homo sapiens
tttagtagagacagggttttaccatgttggccgggctagtctagaactcctgacctcaggcgatccagctgcgtcagcctcccaaagtactgggattacaggaacgagcactgcgcccggcc

SEQ ID NO: 348007 - DNA, 122 bp, Homo sapiens
cggttcccggcccagtcccgtcctgcagcagtctgcctcctctttcaacatgacagatgccgctgtgtccttcgccaaggacttcctggcaggtggagtggccgcagccatctccaagacgg

SEQ ID NO: 348008 - DNA, 122 bp, Homo sapiens
ccatctacaggtactagagggttgagaataaggaatgccagcagagaagaataaaaagaccggggaaaggctcagggacaacggttgtattctgttgtcattgttgtttgtttgtttttcag

SEQ ID NO: 348009 - DNA, 122 bp, Homo sapiens
acttgggacacttgtactcgccgaagcagcgctttttgccctggtatggagtcaggccctcgcctttggggcgtgcctacagggcaggaagcaaacacaggggattggagtccaaaggccaa

SEQ ID NO: 348010 - DNA, 122 bp, Homo sapiens
tgacactgggatgcataaatcttgagataatccctcttggtgtggctaagccaacaactccgtagacccttagcttcatttattttcttttactttcaacgtctaggatttaagaaatgttt

SEQ ID NO: 348011 - DNA, 122 bp, Homo sapiens
aggaccctcagagccaggtgcgggatataatctcgtggtgtgccgttttttgaagctggtcggaaaagcgcagtatttgggtgggagtgacccgattttccaggtgcgtctgtcaccccttt

SEQ ID NO: 348012 - DNA, 122 bp, Homo sapiens
gtgcggtggtggtggcggcggcggcggggagggtcgcggcgccccgcgcttccgctgcagcgcagaggagctggactattacctgtatggccagcagcgcatggagatcatcccgctcaacc

SEQ ID NO: 348013 - DNA, 122 bp, Homo sapiens
gctgaacgtctctctcaggccccgcagctcctcctgcagctgggagtctggccaggacagcgtgcagagagaagaaaacgggatcgctgtgtccgccaccactgcacccaccactcccttgc

SEQ ID NO: 348014 - DNA, 122 bp, Homo sapiens
cccccacagaccacactgccatgcctccctctgggccccgaggaaccctccttctgttgccgctgctgctgctgctcctgcttcgcgccgtgctggctgtccccctggagcgaggggcgccc

SEQ ID NO: 348015 - DNA, 122 bp, Homo sapiens
agcgcagcgcatggtgagggcagatgcgagacaaacactgactgctctcagcgtccccatcgtcattcatcgccgggattacagatgatacacctgaaccctggagccctcacggggtcctg

SEQ ID NO: 348016 - DNA, 122 bp, Homo sapiens
cgacccgagccgatcgtcagggtcgccagcgcctcagctctgtggaggagcagcagtagtcggagggtgcaggtgagggacgaggccggggtcgtggggaggggagttcggagggtccccgt

SEQ ID NO: 348017 - DNA, 122 bp, Homo sapiens
gcgccccggttttttcttctccagtccttctctctggtctgtaatggggcgaggggaccccgggatggagcctcggcaccgctgttccggaccgaggctaacggacggcggcgcctctgctc

SEQ ID NO: 348018 - DNA, 122 bp, Homo sapiens
tagggaagtccctttctgaaggcagagggtgggcctggagcctgtaagcttttcctgtcccgtggctgctccctccaggtctctgttcttcactgcccccctcttgagctcttctactttaa

SEQ ID NO: 348019 - DNA, 122 bp, Homo sapiens
gggctcgattgtgaatatgtgtcccaccatgggggtagaagggaagggacaaaggacaagcgggctgtagggctgtaaccctccagtgtgtcacaccagacccggcttagttaagcatttcc

SEQ ID NO: 348020 - DNA, 122 bp, Homo sapiens
tgcaaggtcttctgaggccgactctggaccttgcacaatattacttccaccacatgctaccgatcaaactaagccgcaagtccaacccagctgcaaggaatagggaagttgactccagcttt

SEQ ID NO: 348021 - DNA, 122 bp, Homo sapiens
cgctgtcttctctcttgtcccctgaccgctgtcttctctcttgtcttgcagcaggaacgtcggagcaggaggagtcagtggagccatcaggacacccaggcccatggggcaggaggcctcgg

SEQ ID NO: 348022 - DNA, 122 bp, Homo sapiens
gggaaagaggaggctgctgcaaaggaccgatcggcgggtacgccagcccggcccacccctcgcctccgtgagccgcgtctgtaaaactgggttaagagccgcctgtctgtgctgtggggggt

SEQ ID NO: 348023 - DNA, 122 bp, Homo sapiens
ttcgtgactgattaaggcacctgcctccggttccatgtcacttcgtcttgggacacgtggcgctaatgccacttttcaaccccccaccccattcagcgacattaacccgggcgacagtccag

SEQ ID NO: 348024 - DNA, 122 bp, Homo sapiens
ctataagcagtgcaacaccgcccatcccgaaggggagaagagagtcaacttccagaagggcgttccttgtccctccgatgggagggaagcacttgagttaggcggcaccagaacgaagatgc

SEQ ID NO: 348025 - DNA, 122 bp, Homo sapiens
tgggccccgagggtggaaacgtattcgcgtctccccgtctcctccttaactgtgactctccgggtcttctgagttttgcatgctgcgggtgtctaggacagattgcttccactagaacctgg

SEQ ID NO: 348026 - DNA, 122 bp, Homo sapiens
cggctccatcggcggcaggcagcatggcaggatggaggctgcgggccgtgtgtttgggcgcgggctcctccgtgtagctgtccgggctggctgccccatccagggagctgccgcagctggag

SEQ ID NO: 348027 - DNA, 122 bp, Homo sapiens
caggtcggcgcgagaggctgtttgcatctcggcccgggcgtaggtcgcctagcgacctaacgccgagggctcggggaagggatcccagacagagccaaaatggaaggcgggacaagggcggc

SEQ ID NO: 348028 - DNA, 122 bp, Homo sapiens
taggtaagggcacgcgagtcatgcatccactgtacagggggcccttccctgtttggtagccgaggcagagacagagaggggagagcttacgtcattatttcttctttgcatttcttgggaag

SEQ ID NO: 348029 - DNA, 122 bp, Homo sapiens
attcacagcaagtaggaaaaacatcactatgcagagagatttgggacttggcagtaatggcgagcccacatggttctggctagtgtgtataggattcagcatattgtggaaagttgaggctc

SEQ ID NO: 348030 - DNA, 122 bp, Homo sapiens
ggtgctgatgaagcaggtgaggcccaaggccctggggggcgggcagggggcggccctgagcgtctgggaatccccagggctgggtcgaggctgggacctgcccaccgccgccctcccatctg

SEQ ID NO: 348031 - DNA, 122 bp, Homo sapiens
gccactgatggagcaacaaggctggacggatgagccggtcccgctctgctcctcgggtctcggtgtttcaattaactggctcactggagtgacgtttggggcaatgtgcaggatctacatct

SEQ ID NO: 348032 - DNA, 122 bp, Homo sapiens
cgtgtgttgaaaattccagccaatcttatgccttctgcccaagctgaggaagaaagagagcgggtagatatgggcggctctgcccaggaagacagcaacaaaagctccaatgatgaaaacag

SEQ ID NO: 348033 - DNA, 122 bp, Homo sapiens
ccagcccggcccaggccagcctggtacccagcgctggtcgctgcccctgtggggaggcagcgcggccttcggggctccagagcgcgcgggcccggaacgaggcgcgcggccgctggcacatg

SEQ ID NO: 348034 - DNA, 122 bp, Homo sapiens
tgcctgcatgccagtgttcaccattgtggggttactttacaaattaacctgctccaccttcgacacagggaagaaaacagaaataaccatgagttcctcctacctaccctaccctgcagaca

SEQ ID NO: 348035 - DNA, 122 bp, Homo sapiens
cagacccctcgccaggcactagtgaagaacggggacctttctatttctgctctcagctgacgtggcgccaccatgtggtaactgcgttaagcaccaggtcacgcagcctgcggaggcaaagc

SEQ ID NO: 348036 - DNA, 122 bp, Homo sapiens
gggggctgcggcggcggatgcggcgggcggctgcagaagggcgcaggtgtctggcaggcccggcgcggaatgaatgagcccgggccgcgccataaagggggagggcagaggtggagcgatgg

SEQ ID NO: 348037 - DNA, 122 bp, Homo sapiens
tcagtgccgcggccggcgcccgccaagggatgggcagccagagcctgtcgactgcggctgcgcaggtatgctggggcggggcttcaggtcaccccgcccatccccagcctacgcgaccattg

SEQ ID NO: 348038 - DNA, 122 bp, Homo sapiens
ggtaaggaggagggaggggccgccgagggcgaggccggcgctcagcgtcggtctcccgcacggtctcctggatgccaaacccggtctagggagcccaggagccgttgcagcctcagctcttc

SEQ ID NO: 348039 - DNA, 122 bp, Homo sapiens
ggtttggaaatttaacccagctggggcatcccagatgaaaaggattagtatttaaagagccgttacagtttatactagcaaacacacaaataggcagattgacacttcctgcctcagggata

SEQ ID NO: 348040 - DNA, 122 bp, Homo sapiens
tggcggctttgggttagttttgaattgggctcaggaggaggctaaagacatccaattctgcgggaacgcagccctgcgggacctgaaaaggcgagactaagtcaccagccaagctgcctaga

SEQ ID NO: 348041 - DNA, 122 bp, Homo sapiens
ccatccacgcagcgcccgcgcccgcgacagtcgccaggacaggcgcgcgtgccgcagtcccggcctgtgtaccccggccaacacatgcagcggccactctcacagcggccccggccacgaca

SEQ ID NO: 348042 - DNA, 122 bp, Homo sapiens
acagtcgataaactttctctcaatttccaacaggccatcatccatctctttcagtagcaacgagcactctgtgggttcagtgaccgctgagtgctgcgcaactctgacccgcaggctcaggc

SEQ ID NO: 348043 - DNA, 122 bp, Homo sapiens
ggaccgccctgtgctgtggccgcgcgcagccccccgcaggcttcggcgctcgcactcttgcgtgggactgtccaaccgccacagggagctcttcaaaatgcaagccatgtcccttccctgct

SEQ ID NO: 348044 - DNA, 122 bp, Homo sapiens
cagcgcagccaggcattcggggccactaccggtctctgcgtcttggtggtagtggttccccgggcccgctgtcttttcttttatctctttgtcttgcgtctttatttttacaatctctcatc

SEQ ID NO: 348045 - DNA, 122 bp, Homo sapiens
cccgccgtgacgcactttcccccccggccggtccccgccgagctccctggcggcgcagcgcggcgatcctcacccgctgcagcccctcagcagccgtgaggcatcccacaaaaggtcctcca

SEQ ID NO: 348046 - DNA, 122 bp, Homo sapiens
agtgaacagatgcgtgaatgacttgtcgcttcttcttcttgtggctgcactccgtcttcccggagggagtggtttccaacacgctttcttggcctctctggaaagtcccaccgcttcctgcg

SEQ ID NO: 348047 - DNA, 122 bp, Homo sapiens
gctagctgaggtattggggcgcaggatggagcaaggggtgcttacgggaattggaggggacgcggtgtcttatccacccccggatttctgggctccggctcacgagtccctccagtcccgag

SEQ ID NO: 348048 - DNA, 122 bp, Homo sapiens
aggggagaagtgtgggctcctccgagtcgggggcggactgggacagcacagtcggctgagcgcagcgcccccgccctgcccgccacgcggcgaagacgcctgagcgttcgcgcccctcgggc

SEQ ID NO: 348049 - DNA, 122 bp, Homo sapiens
gagaggcggcggccacggcagctgcactcggcccggtctcgggcgccttcttcgcccccccgcctttgcagacggtttacaaaaaaactttgctttgcactcggaacccccgttttcacacg

SEQ ID NO: 348050 - DNA, 122 bp, Homo sapiens
ttatatcctgagcatatgtattttatgacaatttgtgatgcagtttgtttgaatcttaagcgtaaatagaggtaccactctccacccaaggaaagctattggcagcataagtaggtacaaat

SEQ ID NO: 348051 - DNA, 122 bp, Homo sapiens
cagcaaagagcatctcttccaaaccacccaatctggagaggtggggcagttttgtggttccggcaccgacaccgtccctttcacacggtactgagccgcgggctgcttcggggcggccctcc

SEQ ID NO: 348052 - DNA, 122 bp, Homo sapiens
tgggagaaacatggacactgcgcttgaagagcttcagttgcccccaaatgccaaaggccccgtaaaacagatctcgccacggagtccgcaagcagcagagactgttggccggccggccggcc

SEQ ID NO: 348053 - DNA, 122 bp, Homo sapiens
atcctgagaaacacccaaatgggcggctcttatagacacttagtacaggaaatgaccggccgaaaaggaacatgagttggctctgttaggctgatagcaatctgtttagttgaaaagacatc

SEQ ID NO: 348054 - DNA, 122 bp, Homo sapiens
agaggccaaagaggagggaagacatagtgggcgccctgaaggggcgtggtgaagccgggccgcactcacgaaacgctggtagaagcggactagccgtggcttcccatggttgttgaaaacca

SEQ ID NO: 348055 - DNA, 122 bp, Homo sapiens
gggcgggggcgggacgggggtgccagggaccggcgccttaggctgcggggacagcagtggcgccggacgcggcggcagtgaggggccggtgaggcgctgggtggggcgggggttcccggatt

SEQ ID NO: 348056 - DNA, 122 bp, Homo sapiens
tgagagtgcgagctcacaggtgcctggacgcgtgggtacatgcaggtggacatgcgagagcgtgtgtgtgcgtgcacacactctggggggccgggcgggggctggagggcacccaaaagcag

SEQ ID NO: 348057 - DNA, 122 bp, Homo sapiens
gagaaatcccttgcctctccttctgggtctccccagaactctgttccttacctgggcaaccgagcagctgcagtgcctctgcacctgctctgtccccaaccccgggagggcggcgtctcagg

SEQ ID NO: 348058 - DNA, 122 bp, Homo sapiens
ccttctacgtacctaagccatataatattaataaatacaagttgttacagcttttctcttcgaggaatatgaaaaaccatgaattgataactaccccctcccccaattgtattataaaatct

SEQ ID NO: 348059 - DNA, 122 bp, Homo sapiens
tataccagatcctcagtctcactaaagacagcgatatgggagacacccaggggcctggcccgccagcccaaaagatggtcatcgggaagagaaaaagaaaaaaatgctgcagttgttctctc

SEQ ID NO: 348060 - DNA, 122 bp, Homo sapiens
tccagtctccattgggctgggcagtcttgtgcgcactgctgtgaggcatgacaagcttcccgttcttcctccacgtgatagtcacttctgctggatagaagccccacacatagcaggccagc

SEQ ID NO: 348061 - DNA, 122 bp, Homo sapiens
cgcaagggctttctgaatgaatgagtgaactcggaagaatcaggagcccgtgtgattggccgggacttcgcaagtgcttcctgaatgaatgagtgaacgcgggagaatcaggagcccgtgtg

SEQ ID NO: 348062 - DNA, 122 bp, Homo sapiens
ccatcgcggatgtcccagtcgatcacagacgcggaccgcgcggaggccgcacacttgtggcgcggtgtggtggtccctccggcaccactcccatacttgcatttttctttgcatttttgttt

SEQ ID NO: 348063 - DNA, 122 bp, Homo sapiens
cgaggggcggggtcaggcgcgctgccggccccaatcctcagcgcctgcccgtcgagcgcacgcggctttgccggaagccctcctgctcccggcgagccaggccccgactaggccctactgcc

SEQ ID NO: 348064 - DNA, 122 bp, Homo sapiens
agtcccttgagcaggcacagttgtctcttcgtgcttcctcatgggttgcctttgcaaattcggagggagttggtgtgaaacctgtggtgaaaatactggctttgatatcagaaagtccctca

SEQ ID NO: 348065 - DNA, 122 bp, Homo sapiens
agagccccagggtgtggcgagagaaaaggtcatgagcaaacacctctggctgaaagtagccggaaaggcctggctacttatgggctaagggttttgaatctgggctgcagattgtgcagaga

SEQ ID NO: 348066 - DNA, 122 bp, Homo sapiens
aaggtccctgaggtccctatttttgtcaaatggcccccaggcccccaactctcactccaccgggccccgctggcctctctgacctcccctaaggctcctggagcagacccgagacatgctgc

SEQ ID NO: 348067 - DNA, 122 bp, Homo sapiens
atggtaaactttacatacattatcttaatgaatgcagaaaacaagcagatgagcagggaccgtctattattttcccatttatttttgtttatttttaattttttttttgtagagacagggtc

SEQ ID NO: 348068 - DNA, 122 bp, Homo sapiens
aaaaagtcaaacaggtttccacctgcaactgtcagcttgaggcaggttgtggaagcaaagcggctccataactgcattcatggagacgctcattttattcgtagaatgtgtggatgaaaatc

SEQ ID NO: 348069 - DNA, 122 bp, Homo sapiens
catatggtttattttgaaacttcaagtattattgccttaatgtctcttaaccctgttacacgctgcttgtagacatgttaatatagtaatacctttatgatatattgagtttaaggactact

SEQ ID NO: 348070 - DNA, 122 bp, Homo sapiens
gggctactcatgctattgcagcaacggctactactaccacacacagcggctggagtgcatcggtacaagccccacctcccccaacccccggcaactctctccaacccctagccttgccagct

SEQ ID NO: 348071 - DNA, 122 bp, Homo sapiens
aagtccccttatagataggaaagacgcaactcacgttgtcgatcacgacaggctggttggcgatcacatcgtaggactccatggcagaggaatctctccttctggggaaggaactgcccagc

SEQ ID NO: 348072 - DNA, 122 bp, Homo sapiens
ccgctccgccctcttccagatcctcttcgctgtcttcgactcgctggagggcttcgtcatcgtcatggtgcactgtatcctccgtagagaggtgggtgaggcagcctctgtcgggccgggct

SEQ ID NO: 348073 - DNA, 122 bp, Homo sapiens
cagtaagcctgagaaaggggctgcttcggtctccagccacaactctgtgaagccaagccacgcgctgtcttccagagagggaatagaagtttccatcctgtgcacccagtggttgagcaaga

SEQ ID NO: 348074 - DNA, 122 bp, Homo sapiens
cagagctgtaagtaactcagatggtatttgtcataaaattatgaaacactgtgggacttgcggtttctgtaatttgtctgcctcagaagagctaatgtttattgattttcttctgtacaagg

SEQ ID NO: 348075 - DNA, 122 bp, Homo sapiens
ggtttcaatcagcctgcttcctgggccccgcacagcgagagctttccccaaacctccgggcgtctgaaatgagtgcccgggacagaagccacgctctgcagttgtgaagcccaaacagatgc

SEQ ID NO: 348076 - DNA, 122 bp, Homo sapiens
tgcccggtcgagggctccaggactttgggcggtaatgagtcggctacagtgggtctgagccggcgccgcggacgagtcccttcgtttcagccagtttggctcgtttattgagaaaagtgggg

SEQ ID NO: 348077 - DNA, 122 bp, Homo sapiens
gggggtggggaaaggggcgtaaccgggagggaccctccgaggcggagcggcgcaggggggcggggaaggcgggtcatggggcgggggcggtggggcgagtcatggggcggggacggggcggg

SEQ ID NO: 348078 - DNA, 122 bp, Homo sapiens
accatcattaaggtcaggaaatacagtctcaaaaacattcttctccctacctgccagaaccgaccacaatcctaacttgatgggaatcactaagtgggtagtgtttcccataaaattgcttt

SEQ ID NO: 348079 - DNA, 122 bp, Homo sapiens
cacccttggtggggacctggaaccccgggagatgccgacgagcaagcaggtaagtggcggcgccctcccagtgggtgctcttcccaggcgcgagagtccggaggggccgaggagagatctgc

SEQ ID NO: 348080 - DNA, 122 bp, Homo sapiens
acatggcacagtttcactttcactctacccagctcttactgccagacatcctttagaacacgctcacaaacactagctggaactgggctggcattaatagcaagccagttatcagtgctgac

SEQ ID NO: 348081 - DNA, 122 bp, Homo sapiens
agggcggggccacgggctgggcagcctccctccccgtggcagtggtcagtgccgtgtaagcgttcctagaatcagagttctcctcctcagatcacccgcccttctcaggggcacccagcaag

SEQ ID NO: 348082 - DNA, 122 bp, Homo sapiens
tacaaaataattcttttgaagtaggaccggtggcaaccaacacggctccctgctccaggccgggacgcccctctgggaggaacgcgcggccacccttggaaacctgtaagtgatccacggtc

SEQ ID NO: 348083 - DNA, 122 bp, Homo sapiens
tgtgcctttgctggaatatccttcctcttctctgccaggtgaatgcatcatcttcaaggtcggctcgaacatctcttcctgagaagtcttcctagatgtgtccaggttggagaggattcttc

SEQ ID NO: 348084 - DNA, 122 bp, Homo sapiens
aaaccatttaaagggggggggtgtctttttagctttttgcatctctgttgttgccattttcgaagttgagcccttgctagagattccgaggtcctcagtttcctcaaatagatagatatata

SEQ ID NO: 348085 - DNA, 122 bp, Homo sapiens
cagggcatgaacgtccccaccgaatctggagagctttggatcctgggtgatgtcttcatccgccagtactttaccgtcttcgacagggcaaacaaccaggtcggcctggcccctgtggctta

SEQ ID NO: 348086 - DNA, 122 bp, Homo sapiens
tctggccagctgaagggtgggcttcaggtgcccatttggaagcagaggtgtcatgggatccgatctgatgaggccccccgctcccgggtgggtagtcaggggctgcttgtgagcagcacagc

SEQ ID NO: 348087 - DNA, 122 bp, Homo sapiens
tgcgtccgacacccctgcccggcctgcctctcggcctggccgccgcctccgcgatcgcagcggttttactgccccggatgcctctaggacgcagccagaaccgtagctcagtcacgccgcgc

SEQ ID NO: 348088 - DNA, 122 bp, Homo sapiens
tcttgcaggagcgcgtggccaacgctcccacctttctgcctggctcctgcctcctgcaggcgggccccagtctcagttgctcgaggatcctgctctatcgctcattcgtgcccagaagcata

SEQ ID NO: 348089 - DNA, 122 bp, Homo sapiens
acgaggggtaaaggggctccgggccgggggtcctgggctcagggaacggggagcgtggcccgggagcgtctcgcggggatgcccggctccgcgctgcaccccagagtgggtgctcgccgccg

SEQ ID NO: 348090 - DNA, 122 bp, Homo sapiens
cccaaactcacgcctttcggaatcagatacccgccaataaccaggtcttcctgggtgacccggccgttccctggcagcactggaaacagcctggaaaagagccagcggggacgggaatggcg

SEQ ID NO: 348091 - DNA, 122 bp, Homo sapiens
ctgcagagccacttcgatttggtttacggaactccatttgcatacagcctttcaggaaagcgcaaccgctgtatgagtactggaaggacctctgagatgaattactccaaaccccttgtttt

SEQ ID NO: 348092 - DNA, 122 bp, Homo sapiens
gcaaacttctgccaagatcggaactgagtactaaacagcctccacagttctccctggtgccgtctccggcttggcgccgcatcctcctctgggctcgcgatggccgcgtcccctcccgctgc

SEQ ID NO: 348093 - DNA, 122 bp, Homo sapiens
cagtgtgacacggagccggtggccatgcctggggcatccaatgccctgaacggagccgcacgcaccacctccccccaggctagggcagccgccccggggctgcgggatgctgggaagccatt

SEQ ID NO: 348094 - DNA, 122 bp, Homo sapiens
actaccttgcgctcccgggagaacctaccactcacctggagggggcggcggagcggagggcggggcctactacctaggggagagggggcgtggacacgctgaggctatactacaaagccccg

SEQ ID NO: 348095 - DNA, 122 bp, Homo sapiens
ggccggaagcgctggggtggggaggtgcccccggtgactcacgcgggggcaggaatgctgcggtcggaacgggacccggctccagaacccacctccagccccagggcttctccggccggcgg

SEQ ID NO: 348096 - DNA, 122 bp, Homo sapiens
gaggcaaggaaatgatctctattaagcaaacgcattctattccatgctctgattaggagccgcagcctcattaacgatgagaattgttctcatctcctgttgttcagggtactgtgctccga

SEQ ID NO: 348097 - DNA, 122 bp, Homo sapiens
gaaacttactttctttgcatagtctactcacaagggaggcctggccctgggacccgggtccgcgcccgtcccccttctccccgcccacctcgagcctgcaggagaggggaccccgagggccc

SEQ ID NO: 348098 - DNA, 122 bp, Homo sapiens
gctcagcgatcctctcgccgctgcttcctgagtagctgggaactcaggctcccgcccccgcgcctgaatccttgctgtgtttatccagcaggtcgcccctggctggcctgagcattccgtcc

SEQ ID NO: 348099 - DNA, 122 bp, Homo sapiens
atgtaaccattagcctcatctttactcccgaaagctcactttgcttttagtcctggccgtcggctgagcgagctgcgcatgcgccacgtgcccccgtggcgtagggcctcgtccggtcacga

SEQ ID NO: 348100 - DNA, 122 bp, Homo sapiens
caaacctgccatcactgtgagatcctgagacaccatccctgtgcgtgttccctcctcttacgggggtgaaagtcacccacatcatagactgggctggagaattaaatgactaaacatttaca

SEQ ID NO: 348101 - DNA, 122 bp, Homo sapiens
ggacgctggacaaggtaggctgctccccaggctctcccctcacttcctctggggcctaaccgtggtggatcccactgcacatccccagggtctgctacctctggtggggttaggttattcca

SEQ ID NO: 348102 - DNA, 122 bp, Homo sapiens
ggaggctgttgtgcggtacctacagcaggtgaatgggcggctgccgaccgccccgagccacgcccccaggccaggctcctgaaggaaaggtgcgagccggctcatatcacagcgcattttct

SEQ ID NO: 348103 - DNA, 122 bp, Homo sapiens
gggctgagctttggtgtctgggaggaaaggcggggctgagttcgtgtcaagcagcgcttgcgacttcatttgctgctagccacctgggttttatcttggcaccacttcagaggggcgacttt

SEQ ID NO: 348104 - DNA, 122 bp, Homo sapiens
agtgctcagatgcttgtgatggcaaagaagagacggccacaggcagggacgaggcaggcgcgaccttgtcatttgcccggcctggaatggcctctctgagaaggtggatttagggagaaaac

SEQ ID NO: 348105 - DNA, 122 bp, Homo sapiens
ctgcagaggaccttgtagttaacaaaaaaggctcaacaagcccagctcactggcatggctcgctctcgtgggccacggggtgggcggcttgctcggctggcttctcccgccccctccccacg

SEQ ID NO: 348106 - DNA, 122 bp, Homo sapiens
gcaagccatacctgacgctggagcagctcatggacttcatcaaccagaagcaacgcgacccgagactcaacgaagtgctgtacccgcccctgcggccctcccaggcccggctgctcatcgaa

SEQ ID NO: 348107 - DNA, 122 bp, Homo sapiens
tgggccgcggcggggcccgcgcggggctgtgccgctgccgccgcctcccgccccgaagctcgcccgcggccgccccgactccgcggccgcagccccagaacaaatcctccagaatcaagtgg

SEQ ID NO: 348108 - DNA, 122 bp, Homo sapiens
aaaacacaaacctgattttatcactgaactgtgaaaaactcttcacaggttctctattgccgttgggtaaaatccaagctttataacatggctgacagaactcctcctgagctggcctctgt

SEQ ID NO: 348109 - DNA, 122 bp, Homo sapiens
aggctggctccgggaagtgaggcacagggactcccacagcccaggcccagaccgtgggggcggggtggccgcagccaaaccaggctgctccccaccccatggggccccaggccaccaggatc

SEQ ID NO: 348110 - DNA, 122 bp, Homo sapiens
cgagggaggcttcgctggcttacagcggcgcgggtgcggggcggagggaaagaccaaaggcgaggtctggcttgcgagagtcctcccctgcggcccagcctcgaagaacaatggtaatggcc

SEQ ID NO: 348111 - DNA, 122 bp, Homo sapiens
aattggaggtaatttttgtcgcttgtaggcttgacccataaaaaactccccaggcagaatcggtatgatccttcttcggtggcttgacaaccttagaagtcatgtgttgaaagtgtcacaac

SEQ ID NO: 348112 - DNA, 122 bp, Homo sapiens
ccgtttctggggggtgagcggggcttggcagggctgcgcggagggcgcgggggtggggcccggggcggagcggcccggggcggagggcgcgggctccgagccgtccacctgtggctccggct

SEQ ID NO: 348113 - DNA, 122 bp, Homo sapiens
cagtctcctacagcccaagaccatgcttatctgtgagttccctaataaaactccttttaccgacaaactggatttgtctgcctccttctttggtttctcaactcctttggcatttggtggtc

SEQ ID NO: 348114 - DNA, 122 bp, Homo sapiens
agagggcttttgaaccacggtgccctgttgcaaggggctgacctttggctgacacggccacggagcgggcagttcgttaacgaggatttgatacattagacattcgagctgggcgtgtaaac

SEQ ID NO: 348115 - DNA, 122 bp, Homo sapiens
aagcaagccacgagcatttatacacgaacatcggaccttattgagaactgaaagcgggagcgaggataaggaggcgttgctgcctcactttttgctccgcccctcgaggggcagtgacctaa

SEQ ID NO: 348116 - DNA, 122 bp, Homo sapiens
acagctggaaacaataaacgtcgtgggaggtgaagatgctgggaggactgatttctccttcgctgttttcaaaagtcaaaagatgctgggtgtaatggcaacagccacagaaagttagcaca

SEQ ID NO: 348117 - DNA, 122 bp, Homo sapiens
accagcagcagcgagggaggactccgctgagaagagctcaatcccattggatttctgtcccgccagtgacttcccaggggctgttgcatggggaccctgtgggttccgcctgcccagcatcc

SEQ ID NO: 348118 - DNA, 122 bp, Homo sapiens
gaggaatggaaagtgcccagctcagggttggcacataagggaggctccccagcctgggaacgattataacagagggcccctcacttcacagatgaggaacttgaggcaagtcaccagcccct

SEQ ID NO: 348119 - DNA, 122 bp, Homo sapiens
cacatctaaacatgatgttgtatctgctggtgtacactcccatgtgccactggggtggcgcgacaatagatgttgtggtttcgtgtgtgataatctggcctccctaattcactgtttaaggc

SEQ ID NO: 348120 - DNA, 122 bp, Homo sapiens
agacctgttgctagaagttgggttgttctggattttcccctgaagacttacttattcttccgtcacatatacaaaagcaagacttccaggtagggccagctcacaagcccaggctggagatc

SEQ ID NO: 348121 - DNA, 122 bp, Homo sapiens
ttcagatttatcaccacctacattggacaaaactacagggaaaggtaattagaagaaagacgctttagtcttaaactgagccttgtgtttaccattatgaatgagtcctagtcaggcttgtg

SEQ ID NO: 348122 - DNA, 122 bp, Homo sapiens
gccttagcctgcgggtcatagccctgagggaggggacaggagtgatatctgttacagcctcggagtcagggaactggcagcacccacctgctggccgcacttctggggacaagccatggtgg

SEQ ID NO: 348123 - DNA, 122 bp, Homo sapiens
tgcccttttgtgtttaccttctctggaggatttcagagacaggccgaggcccttggccagcgccttcctgttcttccccagcaggctgtcgtaaggagtcaagtacctgccgcagcccccgc

SEQ ID NO: 348124 - DNA, 122 bp, Homo sapiens
tagatatctgagcccagtagctggagccctcagtcaattactcttcctgctgtctaagatcgaagagctgcttttactcagtcatcacacaagattctcgaaatttaatgtgcacacaaatc

SEQ ID NO: 348125 - DNA, 122 bp, Homo sapiens
atacaaaatggtctgatttttgcggttttaaaacacgtcacggctgggcaaggtggctcacgcctgtgatcccagcactttgggaggccgaggcgggcagatcacaaggtcaggagatcgag

SEQ ID NO: 348126 - DNA, 122 bp, Homo sapiens
gctgtgaaaggctatgtaacacatttcattctttatgacggtactctgggtacctccttgcgtcaaatctgggtacctcaaactgtggtatggcatccccatgcagtctgtccaatactgca

SEQ ID NO: 348127 - DNA, 122 bp, Homo sapiens
acaaccactatggaaagcaatctggcagcttctaaaaatttcagcatacaccatgccactcgtcaattccattccattcccacatgatttttatttaaaggaaagtcaagtggaatgatctt

SEQ ID NO: 348128 - DNA, 122 bp, Homo sapiens
tagcctgccaacagccatctgcccagacagccgcagtgaggatgagcgtcctggcagagacgcagttgtctctgggcgcttgccagagccacgaaccccagacctgtttgtatcatccgggc

SEQ ID NO: 348129 - DNA, 122 bp, Homo sapiens
acacaggctcaccgtggctgaatcccacaacgacctcctaggttcccagcacgaagaaaccggcccgaaagggctagcgctcacccaggcaggcttgtctgctgtctcttgtgtctgccttc

SEQ ID NO: 348130 - DNA, 122 bp, Homo sapiens
tgcagccctctggcgccagggctgtagcgccgaggtttgcaaaagcttgctcaggcctctcggggttcctccaaggttactggaaaggatgcgcacaggtggactcgtgcttcatgccaacg

SEQ ID NO: 348131 - DNA, 122 bp, Homo sapiens
gacaagtgtcagaggccaatttgaaactgaattctgacccaaggtagttactttttataccgtaccaactagaatggcatttctttcatttactcatccaactttgttgaaatttgcctgga

SEQ ID NO: 348132 - DNA, 122 bp, Homo sapiens
agctccagggaccaggaactccagggacctggatggagaagcccccgagcagcactgacccgccacccctgccttgggccccgtttaaccgtcgcgggccctgatctcgcagtctattggca

SEQ ID NO: 348133 - DNA, 122 bp, Homo sapiens
aagccacagaccctcgcggcgagtgttacagttcttaaagatggtgtgtccgcagttggacgtgcccggagtttcttccttctggtgggtttgtggtctcactgacttcacgagtgaagctg

SEQ ID NO: 348134 - DNA, 122 bp, Homo sapiens
taacaaaagtttgcttgctttatttcttgtccctttgacctcactttccaagtgaaaagacgcagaatataaaaacaaaaaggtcaaaatagccttgcagaggccactctgacttatatgaa

SEQ ID NO: 348135 - DNA, 122 bp, Homo sapiens
tgcgctgatgctaattgcatttgttaattacattctattgtgctgacctgcctgcttccccggtttatctttctgagtcaataagcagttccaaaagcttcccttagcagtgtgtccctcct

SEQ ID NO: 348136 - DNA, 122 bp, Homo sapiens
ataactgggttgccatgaatctgctgtaattgaatgatcaaatcattaaatttgaggttacgggccaagacccacaatagtgcccattactgctgtgtgggtcaggctccttgtcaatgctt

SEQ ID NO: 348137 - DNA, 122 bp, Homo sapiens
gaagctcaggccagcacagtactaacaggtcaaagaaggtctatcagtattcaccagctgcgtttaacatctttcacttaaaccatacaaagccctctgaacggaatccaaagcaccttgaa

SEQ ID NO: 348138 - DNA, 122 bp, Homo sapiens
tctaccgtggtttccgctgtccctcgcgccacagaagaggccggagggggaccggcctgacgcgggtgggcaaagagcgggcagagaactcaccagcagctgcagaaaacacagccgagttg

SEQ ID NO: 348139 - DNA, 122 bp, Homo sapiens
gctcctgtaggatcgtcgttagggatacagctacttggacccaagagatttccagggcaacgtgctttgtcattctcacccactacttttttctatttaaggggggagtttgaaaagggggt

SEQ ID NO: 348140 - DNA, 122 bp, Homo sapiens
gtttagcggctccttccaggcccgtggcgggtgggtggtggtacagtgaagcagtcgaggcgtttctccgcgcccctacacgggtgggaccacctcagccctggcccgatcccactcaaccg

SEQ ID NO: 348141 - DNA, 122 bp, Homo sapiens
taggaggatggtggcatgcaatgtacactgggtagacccctccacttgactcccaaccctcgaggtaggggtgagcatggggggtgcttcttaggtggggagctggtgccagcagggccctg

SEQ ID NO: 348142 - DNA, 122 bp, Homo sapiens
cccatgccacttgccccacttgctcgccggagtcccctcggtagaagcagggcagttttgcgtcctggcccagcaccacagttaccacgtctgaggtctccagctcacccgcggggcaccgg

SEQ ID NO: 348143 - DNA, 122 bp, Homo sapiens
cctctccgctccggaacacctgtgggaagggtgaggcgtgaggacctgcgccagaaactgcggtcaaaagtgccccacccaccccgaggctggccaggtgtgcacccagcagctgctgagag

SEQ ID NO: 348144 - DNA, 122 bp, Homo sapiens
tgaataagaaccccagctgttactgttactgcaacttggccattgcctggcacgtggggccgcgtggccgttaagaaaagtctgcgcacagaatacactcatttgagtgtaaggagaccacg

SEQ ID NO: 348145 - DNA, 122 bp, Homo sapiens
cggtgcggccagaattcctagagctgggaagcagccgccctgggccgggggtccagggagcgagccccgtggcacgctgggagttgtagttcgcgctccctcgcggcgggcgtgcgcgagcg

SEQ ID NO: 348146 - DNA, 122 bp, Homo sapiens
cgaagtggggatgcgccagcggcctattgttctcttccgggaagggagggagccgaggtgcgagacaagcttttaacaaggtttaaaatttgagaaatttatttgcatgaaatgctcgcttt

SEQ ID NO: 348147 - DNA, 122 bp, Homo sapiens
tgcgctcgcagtcacgcccatggaagcctggtaagcacacacaatggtactcaccgcccccgtcatacatgcactggcctccattctggcagggggactgcgtggtacagatatgttcatct

SEQ ID NO: 348148 - DNA, 122 bp, Homo sapiens
gtttgtcccaaaggtgacacagtgctacatttgttcttagacaagattgctgatgaaggacgatgcttgggatgttggtggcccatggcacagcagtagccaagtgcccactgactactggc

SEQ ID NO: 348149 - DNA, 122 bp, Homo sapiens
agattttcttattggcaagtggttaaaagagttaagctttgcctaaagcgttgaagtcagcgggaataaattagcagtttcttgggtttaagatacggtgtttgtggaagccaaggttcttg

SEQ ID NO: 348150 - DNA, 122 bp, Homo sapiens
gggcggggctgagacctgcgagaggcaggctgggaagcggcgccatattggcgtcggccgcgctgtattgtcataaatagagccggttttgtggtgttttcactactcggttggatgcctca

SEQ ID NO: 348151 - DNA, 122 bp, Homo sapiens
cctacgtgcagctggtgcgtgtgagctggccagccccagcggggcctccgaggggctcctcgcaactgtgtccttggggatgtttgtgccggagacgctgcgctggggcccagggagccccc

SEQ ID NO: 348152 - DNA, 122 bp, Homo sapiens
agctcgggaggccctgctcctcacgcacgcactctcagtcggcctcaaccggcgctgctccgcccctcaggcacgcacgttccgttcacccctcacgcacgcactctgcgcccgccccttcc

SEQ ID NO: 348153 - DNA, 122 bp, Homo sapiens
ggactgaacaaaaaacaacactgaaaaacagttcaaaaaaaaacaaaaaacaaaaaaaaacgacaattgccaggttttcactaaggtagggaattgggtagaaagacagcatggaatttggt

SEQ ID NO: 348154 - DNA, 122 bp, Homo sapiens
agtctgcatccccttattttcccagagcctcccctaatgaaactgactttatttactgaacgcaggaaatgggtctctccagatcaggatgactttctgctgggaaatatttgtctttgcat

SEQ ID NO: 348155 - DNA, 122 bp, Homo sapiens
tagtgagaagcctgggtggggtgttgctgcggtagccatgttataacctggcaaatgggacgcatgatagtgacgtaattgctggagtagctcctgagtttccgcagatgagccgcgggaaa

SEQ ID NO: 348156 - DNA, 122 bp, Homo sapiens
cgtttcactcacagggcacagtcttgcaaacgtttcactcacagggcacagtcttgcaaacgtttcactcacagggcacagtcttgcaaacgtttcactcacaggggacagtattccaaacg

SEQ ID NO: 348157 - DNA, 122 bp, Homo sapiens
ctcggatcgggttcagcggcgcagaggtgagctggctggggttccgaaactgacacccggcggtgcacaccccctcccttttacttcccccaccagtccccaggaaaactccgccccttgtt

SEQ ID NO: 348158 - DNA, 122 bp, Homo sapiens
aatgccaaaaatctgtttctgaagagtgagaatatgtgaccaagggaaggttctctgaaccggagagagaactgttcacctaaaatagaccaagagtgtcccccagaggcagggacacacac

SEQ ID NO: 348159 - DNA, 122 bp, Homo sapiens
agctgtgtgaccttggacacatggctcaacctctgtgagtcacctttctcatgcttaaaacggcagtaaattacctctacctgccagggttgttgcaatgatctgaggaggtgccttatgca

SEQ ID NO: 348160 - DNA, 122 bp, Homo sapiens
attaacagcaagagggaaacactcgcattgctgatgaagttccggcgtggaatcctcttacgactctccgaggggtggcagccccggtcactccaaggagaccgaggtgccctgccctgggt

SEQ ID NO: 348161 - DNA, 122 bp, Homo sapiens
ccctaccctacccttgccctgaggcttcaggttaacaaggtccttagcacccagtcagcacgagaaagatcctttctttccaagactctctggaaaggactccagtgggctctgcttggtca

SEQ ID NO: 348162 - DNA, 122 bp, Homo sapiens
cgtagggagagaagtaggggcgcggggtgagcgggggcactggcctgcgcgtgtccacgtcgagcatgatgatgacaattaggatccagggcaggaggataaagaagcgggtgaaaagcgcg

SEQ ID NO: 348163 - DNA, 122 bp, Homo sapiens
aaatatattttcattattttcaccaacctccctttaaacggtccaattcaactacttagtcggattgagcctactaaggaaatgggctcatacaaaggacagctgaaatataagtgtcttgg

SEQ ID NO: 348164 - DNA, 122 bp, Homo sapiens
cggggcgccgaagccatcttggtaaaggaagcgcctgggagcacgcggcctgccccggcccgcctcgcgactcaaacactctgcagggaccctcctaagatcaaattggttccccccgctgt

SEQ ID NO: 348165 - DNA, 122 bp, Homo sapiens
gtttgtttgtttttttgagacaacctcccgttacagaggctggaatgcatggcacgatctcggctcactgtagcctttgcttcctgggctcaagcaattctcctgtttgagcctcctgagta

SEQ ID NO: 348166 - DNA, 122 bp, Homo sapiens
cttatcggttttaacacatgccatttaccacctcccacccgctgattagggggctggaaacgggcttacatcactgtcagggcaggagaggaaaaattgcaaagtaaacggcaagatgttgc

SEQ ID NO: 348167 - DNA, 122 bp, Homo sapiens
cacaccaccagtggtcatgagacagactggggcacagagcaggctcccacaacatcccaacggaggatcacacggaggatcacgccaccagtggtcacaagacagactggggcacagagaag

SEQ ID NO: 348168 - DNA, 122 bp, Homo sapiens
cgcagcctcacccaccctcaggatcctctcctccacaggctccagcacgtgcttctgggccgagagctgcctcaccctggtgccctataccctggtgcggccccatcgacccgcccggcccc

SEQ ID NO: 348169 - DNA, 122 bp, Homo sapiens
gttcctgggaggactaggttttggaatttcccctaaacatatatcctctcagggccgaatcggacctttggcgtttcctgttctgtactgggaaccagaagctttctgaattatctcatagg

SEQ ID NO: 348170 - DNA, 122 bp, Homo sapiens
ctggcggacttggctcccattggtgaatccagtccttcccccggctttgccaatttctctcggttcatttgctgtaggatagagttcaattcactaataacgtttgcctttgggcctgagag

SEQ ID NO: 348171 - DNA, 122 bp, Homo sapiens
acagcactgtttggtctgatcaaatgccgaagctgggatctgattctgggtgccgtctctcgctactggagtgctgaccagcaggctgcccatcacgaaaagaggttgcaaggccaggcccc

SEQ ID NO: 348172 - DNA, 122 bp, Homo sapiens
gggggactgagccaggacttggcactgactacaaagggtaggggcagcccccagcactcccgccgcggcaggccaggggaggggctgtgacgtttggtggcctcatgcagctgagaggaagt

SEQ ID NO: 348173 - DNA, 122 bp, Homo sapiens
tgaaatcagttgttgtctcatgaatccacagatgtagctgcttttccatctttcatgtaccgtggtgttactttgacactttctggagcagccttacatgcagatccatgaatttcctcttc

SEQ ID NO: 348174 - DNA, 122 bp, Homo sapiens
aatgacctggtaaacacattgcaagggccttggaaaggtcctacatgggagtgaggacctcgaagcctgaggtttattagcttcatggtaaatctatctctgccctgcacagaacgtgtacc

SEQ ID NO: 348175 - DNA, 122 bp, Homo sapiens
gcggtattttaagatctctgtggtgaaccgagactagaaatgaatctgtgaatccaccaccgaaacagtgtatgtttgtaaatagtgctctcccttcctttcccggcctctcttgtctcggg

SEQ ID NO: 348176 - DNA, 122 bp, Homo sapiens
agttaccctacagagctatagaatactagagctcatttctcctgtctagctgtaattttgcgttcattcaccaacctctccttatcctctcctccccctttcccttcccagcctccagttcc

SEQ ID NO: 348177 - DNA, 122 bp, Homo sapiens
cagagcccgacgggcgcccggctgtgctgcgaggtcttcccaccccttccctaccccgcccgccccctggccttcctgattggcgagaaacactacaacaggaacagcagtcctcgccctcc

SEQ ID NO: 348178 - DNA, 122 bp, Homo sapiens
ggcctggggctcagccgggatgtgggaagcagggcaggtagggtgagatggggtaggatgcgtgaggggtagggagctggccaaggcctgggagtataaaaataaatcctgttggcctggtg

SEQ ID NO: 348179 - DNA, 122 bp, Homo sapiens
tcagcacgcgcgagctgtcaccagggcgcgagacaaccgaacacggccccgccccctgcccgtctattggcccgcccgctggagccccgcccctcaggccctgcattgcgccaacggcgcag

SEQ ID NO: 348180 - DNA, 122 bp, Homo sapiens
ggctgcagcaagagacaaaggccgcgccaaacccggaagccgccctgtccggtccagctgcgtgtctgagtgaactgtccccagctcagagtccctgattggataatgttaaaacccgcccc

SEQ ID NO: 348181 - DNA, 122 bp, Homo sapiens
cacatagacagcctctgcaggaacacttggctctagaatttgggactgagggagatgcagcgagcccatcatgacgagtgcaaccagatgtggaagaagccaatgtgggcatgtcacgatct

SEQ ID NO: 348182 - DNA, 122 bp, Homo sapiens
accagacgtgtcttctccctaccgcacaaggctgacaaactgtatacctccggggagccccgcccacattgcatgcggtagaacatgaagaggcaggaacaccatgcacatggaatgcggtg

SEQ ID NO: 348183 - DNA, 122 bp, Homo sapiens
tagctggctccccagctgctgagctctgttatgcaaatgaacttagccagaacgagcaggcggtattttaaagacccattcaaagtctgatacatctcaccttccattattttaaaggactt

SEQ ID NO: 348184 - DNA, 122 bp, Homo sapiens
ccaaaggacggaaggaagctaggcgtccgcaactgggccccactgcgctgaaatggacgtcgcgccctctgttggccgggaggtttctcagtgatgtcgccacgtgttttctgcgtggaaaa

SEQ ID NO: 348185 - DNA, 122 bp, Homo sapiens
tgtttcaagtctctggttcaatgggctgctcgaagccaggactgggtaattctttccagacgtcttgacttctccttccccgccgttgttgcccttctgcctcctccaacttaagggggtct

SEQ ID NO: 348186 - DNA, 122 bp, Homo sapiens
cacagcttacggtttctttcaattctcagggtctgtacttttacaggtcttatctcaccccgttagctagtcatcaattgcaaatttattaaacatttcaaatgatactgtcagctaaagac

SEQ ID NO: 348187 - DNA, 122 bp, Homo sapiens
ggagatgcccctgggctccttgcggggcatggctgagttcctgcctgtccttggcaggcccgcagtggtggggtggctcaggcagttacccttttcacaaccagtgctgctgggggtgaagg

SEQ ID NO: 348188 - DNA, 122 bp, Homo sapiens
gttccaatcatatagatgtgagtcaaaccctgttgggccaaacaggatctcctttgttggcggataatttcaagtgctcacagagaccctccgtttttttttaaatacctggacttaattgt

SEQ ID NO: 348189 - DNA, 122 bp, Homo sapiens
tcagtctcttctgtgcaaccacggtaatcttttgaaagtgcaagtccaatcgtgttttcccgaattaaaaagcttttgctggctgtacatcttcacagaatataccgaatgaaattataggt

SEQ ID NO: 348190 - DNA, 122 bp, Homo sapiens
ccttgagctttaaactgaagagtttcgcttacagcctcaccactggcatccatgtgatatcgtttggctttttcttgtaatacagcatcaaaagtctcctgtgtaattcgtctggctgccat

SEQ ID NO: 348191 - DNA, 122 bp, Homo sapiens
cgctcgccgggccccgcgcactagctctggggttcgcagaggcgccgcgcccggcttccgcggcagctccaacacagcgcgcaggcggtcgatcccggtcagcttaaaccgggcgcaagccc

SEQ ID NO: 348192 - DNA, 122 bp, Homo sapiens
atgtttttaatacccattatttctggggaccctattgtgtggtggacatcctgcccattgcgctagtacctgactcctaatcgtcatagcagttctcgaagctaggtgttattagcccactt

SEQ ID NO: 348193 - DNA, 122 bp, Homo sapiens
ggatccaaggagaaaccaccaggtgcctccgtcgagttggtggagtacttggaatccagacgaagacctcggtccacgagccagtccattgtgtcgctgttgacgggcactgcgggtgagga

SEQ ID NO: 348194 - DNA, 122 bp, Homo sapiens
ggccgttttccagcctccggcaggaaaacaaacaaaaggctgggtggcttctactggggacgaccggccgctttccctgggaaaagttaccctgcagctcccctcgctggccctgcgcgtcc

SEQ ID NO: 348195 - DNA, 122 bp, Homo sapiens
cacgcagctggcaccgaactgggcggagtgaggatgctctgaaagcgaagccatgggaggcgggggaggggcggcccgggagggggaggtaaccgccaggggaggagaacctctcccacccc

SEQ ID NO: 348196 - DNA, 122 bp, Homo sapiens
gtcattgttttgcaggtacaaaggtaacctgtggtcaactttcagctctgatcccaggagcggcaaatcctgcctaggttgctggtgatgcagagcaccaggaggggaagcctctgcaggcc

SEQ ID NO: 348197 - DNA, 122 bp, Homo sapiens
cactggctcttgccagatctctgcaatagtgattagtcagtctccctgtcccagcctcaccggttctcacccagctagtgttgccagtgctctttctgcaagtcaacggaatcatgttacct

SEQ ID NO: 348198 - DNA, 122 bp, Homo sapiens
cacgcgaaggctccttggcattcagagtctgctcgttagattgtgcccttggaacagtcgcgaccgcatgccgtgagtggcgtgctttctgtctttgggatcatggaaaattcttgtctcat

SEQ ID NO: 348199 - DNA, 122 bp, Homo sapiens
cctgggatctgaacacacgatggaaggccagctcggagtgcatgaggcaggtgcacaggccgcgctgtcctcgtggcctggccttctacctctgcccagcctcctggccctgccctaagctt

SEQ ID NO: 348200 - DNA, 122 bp, Homo sapiens
tcggcccgctcgccttacccatggcggcggcggctgcgcggtctcgggcggaggctccctcggcctgtccagcagctccttccaggcgctcggcggccaccaccgcatctgcagccaggccc

SEQ ID NO: 348201 - DNA, 122 bp, Homo sapiens
ttatgatctggcctccacagagcactgggaggggacccttgagacatctgagtactaccgcgcctcagagatgtttccagagcaagaccaataggagccccagttaatctgtgttctgttgc

SEQ ID NO: 348202 - DNA, 122 bp, Homo sapiens
ggatctcgagggcgcagaactcggagtggcgaggagaagcgggagggcagattgagcgcgcgtggggctcgtgagcctggggactgggagtaaaaacaactacctcaagcaggaggctcagt

SEQ ID NO: 348203 - DNA, 122 bp, Homo sapiens
aacagggccacgggcagctctgatgaccggtcggcaccctcagagggggatgagtgggaccgcatgatctcggacatcagcagcgacattgaggcgctgggctgcagcatggaccaggactc

SEQ ID NO: 348204 - DNA, 122 bp, Homo sapiens
aaagaaaaaagaaaaaaggtatggggctgcaagcatcgactcctcagagtcagctgtgcccggtcaggcagggcagctgctggagggcctcctttgacagtagggggaggctccaagaaccc

SEQ ID NO: 348205 - DNA, 122 bp, Homo sapiens
tttttttttcagattttggaatttttgcattatatccttagtggctgagcatccctaattcgaaaatccagtatctgaagtgcatttcttttgagtgtcatgttgttgctcaagaagttttg

SEQ ID NO: 348206 - DNA, 122 bp, Homo sapiens
tcaactggtgagttaattatgtataactataattaaatcaaagatgtaggataacggaggcgttgaaatagtttttgctaggcaagggtgtgacctttttaaaaaatgtatgatatatgctg

SEQ ID NO: 348207 - DNA, 122 bp, Homo sapiens
aggaggtaaagatatagccaatcatctattgcctgagatcacagcgggagggacaatgatcgggatataaacacaggcattcgagccagcaacgctaccctctttgggtcccctccctttgt

SEQ ID NO: 348208 - DNA, 122 bp, Homo sapiens
gaggtccaggtcgggaggggccgcgggcgcgggtggctagtgcgtcaggctgtgcgtctgcgctgtccctgacgcggacgccaagtgttggtcagagggtgtgggggtgtctgtcggagact

SEQ ID NO: 348209 - DNA, 122 bp, Homo sapiens
gatacggcccacggcacagcatcctgcacgacgcagcccacggcacagcagcctgcaagacgcggtccacgacacagcagcctgcacgacacggtccatggcacaccagcctgcatgacacg

SEQ ID NO: 348210 - DNA, 122 bp, Homo sapiens
aggagggcacattccttttcacctcagagtcggtcggggaaggccacccaggtgaggggacggcctgaagcgaagcgtggggcggggcagaaggcagcgccaaggtccggctggctgcggcc

SEQ ID NO: 348211 - DNA, 122 bp, Homo sapiens
gaagtgatctgccccagccttctgacttcagagtgtctcatgatccaatggccatggggacggagctgccccttgataggatgcacttaagcatggtcaattcccccttcccccaaaggaaa

SEQ ID NO: 348212 - DNA, 122 bp, Homo sapiens
agcaaaggcttgtgaagtggctaaagccgtgacctggatatttcaggactcaaatccacccgcattggaattctctgggtgactgcccagcccctttggcaggacagccagccacaggccct

SEQ ID NO: 348213 - DNA, 122 bp, Homo sapiens
acgtcggccacgagctcgttgttgaacatgagcgcgttcctctcgcgcagcgtgggggaccgcgccatttggggctctccgggtggttgttgccaagtgtgggctgcgcgggcgcgggcgcg

SEQ ID NO: 348214 - DNA, 122 bp, Homo sapiens
agaagcagaaccttgccagcacgcagaagcatctacaaatcttgcaggaggcagcacaggcgcaccattgactttaagctttgcacctgtcctgtgaggtgggcatgctttttcctatttta

SEQ ID NO: 348215 - DNA, 122 bp, Homo sapiens
tggactacattgtgcacagcttgctccttctcattctcacagtcctctgtcgggagggagcgcccgacccttcctgtgctttgctgctccctggctaacagctgcagagcagaggccagggc

SEQ ID NO: 348216 - DNA, 122 bp, Homo sapiens
tgcttcccagataagccccgcccactccaccggctagggtccgccccgagacccaagccccgcccccggccgcgtcccctccggtcccaggccctgcttcccagctgcgccccgtccccagg

SEQ ID NO: 348217 - DNA, 122 bp, Homo sapiens
gctcccttagctccaactcccaccagcctggtaacccccggccagagtgggtctctacctcgctgctgttcttctgtgctcgggatagcccatgggggagcaggaaaagaggagagaggagt

SEQ ID NO: 348218 - DNA, 122 bp, Homo sapiens
tagcgcccacgtccagcctggaccctgcggagaggcctctggggtctctgggccgtgcctcggggagaaagagccagaagctcccgtcccgctgaccgcgagccttcctcagcaccgtcccg

SEQ ID NO: 348219 - DNA, 122 bp, Homo sapiens
aaggagcgtcgtcatggccacacaggcagggaataactgatgcacagaattcagccgggccgcactcagcaccgcgctctccagatgcaaacggacacacgcaaaccggccccagactcgag

SEQ ID NO: 348220 - DNA, 122 bp, Homo sapiens
ggctgtgtgcgcgctcgcaggccagcatgagttcccggtgggcatgggctcagcggactccgcactctgagccgccggccagggccgccagcgccggggagtgaggggcttagcacccgagc

SEQ ID NO: 348221 - DNA, 122 bp, Homo sapiens
cagatgttctccgcaaccttccggaagtggaatggcgggagcctcagcattgctgcccaccgaccccccggaagcggaaacagaatccccgcgtgccccttcctcactaccctccaaatccc

SEQ ID NO: 348222 - DNA, 122 bp, Homo sapiens
gcgcgcacacttgggccaggggcgcgaggagtgcgcggccgccgggtgggcgctggggagcgggccctgggggcggagcctgcagcccaccgccccccacacaccccagccgaggcccggaa

SEQ ID NO: 348223 - DNA, 122 bp, Homo sapiens
ggcaggtgtggtggcgctgctggtgcctgctgtgggagtacagtgggcctttgtgccaggcgggcaccaccccctggctggcccctccccattcgcaggacagctcttacctgccgggccgc

SEQ ID NO: 348224 - DNA, 122 bp, Homo sapiens
attttatccacctccatttcagcatgtggctcgcgtggacaggtggacggacgctgtggccgcatggaaccttgagaacccagggacgagccagtgccgggaaggaactgccgggactcacc

SEQ ID NO: 348225 - DNA, 122 bp, Homo sapiens
gcggagcgagaacagctccttcccttgatcatgctgccctccggaggtcagtttaggtatcgccgctccctttcacgctgttttgtctcttcaccgtctgttctggatcatcctgtccagag

SEQ ID NO: 348226 - DNA, 122 bp, Homo sapiens
cctgcctcgccgcgtgcgcaccctcatgatcctgcacaaccagatcacaggcattggccgcgaagactttgccaccacctacttcctggaggagctcaacctcagctacaaccgcatcacca

SEQ ID NO: 348227 - DNA, 122 bp, Homo sapiens
aacaaatccttcacacgatcgatcaagctttaaatgcaaattcgcataaactaggagagccgtggctacggcatcacaagttttgggggcttttcatgacaccacacaggccgtatctggaa

SEQ ID NO: 348228 - DNA, 122 bp, Homo sapiens
tgatctgggtcatcttctcgcggttggccttagggttcagggtggcctcggtcagcaggacggggtgctcctcgggagccacacgcagctcgttgtagaaggtgtggtgccagatcttctcc

SEQ ID NO: 348229 - DNA, 122 bp, Homo sapiens
catttcaatctctgggaggtgttttcctctctttctctctaagtttgaagaattactgttcgagtttaaccccacttggagccagaaagatgggccaaatcaacaccaagcatgcttttctg

SEQ ID NO: 348230 - DNA, 122 bp, Homo sapiens
ggagaatattgcgctgatgtggtaaaaccaaagagtaagagcaaaaatttaaaagggaagcgcagaagtataaaaagtgcaaaaaatcacaccctgaaaccatttgggttaaaaccgcggaa

SEQ ID NO: 348231 - DNA, 122 bp, Homo sapiens
ttctttcttggctggcagataggtgaaaacttgtttgctatacttgggaaccattggtttcgatcaaagataagttgcctttggggaaagagaagtctaatcaatagaaaggagggcaagga

SEQ ID NO: 348232 - DNA, 122 bp, Homo sapiens
agagctaatctctatatgatgtaagctcaagggccaaggaaagaggctggtcagagacatcggccagtgatgaagcagctgacatcatccctgctgaaaacattttctgagaatacaagatg

SEQ ID NO: 348233 - DNA, 122 bp, Homo sapiens
ggaaggtgatccaactgcacctacctgggctttcctgggaatgtggaaatgcaatgacaacgctcccagttggatgctggtactctcagctaaaagtgttcagagaaggaccgaactccact

SEQ ID NO: 348234 - DNA, 122 bp, Homo sapiens
cacggatcctcacccaaacattggcttttcttccaatagtgcagattgggaatgcagggacgtcgtcctatttatgaacactgagtcacgtcgccgctcaatgtctgtttcctcctccctag

SEQ ID NO: 348235 - DNA, 122 bp, Homo sapiens
cagttgggacctaggatggaggacgcgtggaggacttgggctggaatcgattcccttccccgccaccacacttcctgcctttctgaggaatagggacacgtagggctcccctctcttctctc

SEQ ID NO: 348236 - DNA, 122 bp, Homo sapiens
tctagaaatgagaatattagtaaaaggctacatatacctcttttttttgagacggagtctcgctctgttgccaggctagagtgaagtgaggtgatctcagctcactgctgtctcctccccgc

SEQ ID NO: 348237 - DNA, 122 bp, Homo sapiens
ttactgcgcaggagcagtacctgctgggagaagggacttgctggaagacgtgggtagagccggtccattggtccagtgcaccaagaagtcaagaagttttcaggggctcaggatgcagctgg

SEQ ID NO: 348238 - DNA, 122 bp, Homo sapiens
aatttttacagtgtcaggactgagtgattaaagcactgtgcctgctcccctgaaacaggccgcatgctcccctgaggccggtgggactttatctccctctatacgtctcagaggagccagca

SEQ ID NO: 348239 - DNA, 122 bp, Homo sapiens
gcctgtcatttttgagccaaaatgagaaaagcatctgatccagtagttttcaaactgtagcgttcatcagaatcatctgcagagtttgttgaaaacagattgccgggatccatctccaaagt

SEQ ID NO: 348240 - DNA, 122 bp, Homo sapiens
tgcagaaaatgcaaacaccggcttggggtcacttccaaagtggactccatcctccacgctcgcctgggccgcctccgagaccccctccagcagccctgagcagccaggggacaccggggcag

SEQ ID NO: 348241 - DNA, 122 bp, Homo sapiens
tccttgtcggggtgtgctggggcgacccttgctggaggtactggcctcagccctttctcccgcttccccacccctcttacccccagattacattctctgtgtggtgtctttactgcagatga

SEQ ID NO: 348242 - DNA, 122 bp, Homo sapiens
ccagcttgcggctcttgcgcccgggtgggctgtggacgatgagtccgcacaatgggttgccgttggctgcctcctgcctggggcaggtgtcgccgcgccggggcggctcttctaggggagac

SEQ ID NO: 348243 - DNA, 122 bp, Homo sapiens
gcggtacctgaccgttccatgccgagcagcgagtagcaaaattgcagccgctgatgtctccgggcttccacaggacaaagggtggcaggaaagggtgctaagaggtagaaacaccgagactc

SEQ ID NO: 348244 - DNA, 122 bp, Homo sapiens
caccagtcctccctgatcctggggcactaaggccagcacagccaggacagtgataggcaccgccagcaacaaggtcaccagagaagtggctcctgccacagctagcaggagggaacccctcc

SEQ ID NO: 348245 - DNA, 122 bp, Homo sapiens
caagcgatctgcgctcggcatcaacttccgggatagaagctgctgggaggagcggcggggcgggcttgtctgctctaggccctcctctcggtggtagggggacgccgcagcagggtactcgg

SEQ ID NO: 348246 - DNA, 122 bp, Homo sapiens
cttctaggttccctccccatatggtcccaccacatcatacgctacacacgacgggcattccgcatccggccatagtcacaccaacagtcaaacaggaatcgtcccagagtgatgtcggctca

SEQ ID NO: 348247 - DNA, 122 bp, Homo sapiens
ccgaggtccccacgccatgaatgtggccagcagggggcttctcgtgcggacgctcaaagccggaagagccagcaggcacggaagccctcgtgggagccgggagttccatggcgaggcccccc

SEQ ID NO: 348248 - DNA, 122 bp, Homo sapiens
gagggcagttccccagctctgagcaccctgttccctcctccccgggctcctgggagcccccgggccctcaatccccaggactatgtggccacggtggccgacgccctcaagatgaacaagaa

SEQ ID NO: 348249 - DNA, 122 bp, Homo sapiens
aaggacacacgctcgggggctgctatcacatccacggcgtcggtcctgatggctggaacgcgtcctccatgtgtgcctgtcccctgcatgagggaggccagtgctccctcctcccgaggatc

SEQ ID NO: 348250 - DNA, 122 bp, Homo sapiens
ccaaggcacagggctgtgactcagcatggagcctatccactctgcttttgctggcaaactcgtttctgtccttcaaggcccatccaagtaacacctctccccaccccaggcaacactcataa

SEQ ID NO: 348251 - DNA, 122 bp, Homo sapiens
gcattgtggggcgggagcggcagccaggtgagggggtctaacacgtgaggccggggtgggcgcgggccgcccctcacggccccgtcctgttccggcagggtgactccgggggcccgctggtg

SEQ ID NO: 348252 - DNA, 122 bp, Homo sapiens
gctgttggactccacattctgtaggtgattgatgagtccactcaagatgtcacatctgaccgtaatggagaaacgtatgtgtagcatttctgaaatacccagagtatcaaggtcatgagcag

SEQ ID NO: 348253 - DNA, 122 bp, Homo sapiens
tggacgccttacttacgtaaaaactacatttcccatgagcacccacaggcgtgcacgcagcgcagccctccgtcgtcgctcgcgccctttatactcacttccgcccgcgagccacttccttt

SEQ ID NO: 348254 - DNA, 122 bp, Homo sapiens
cgcctggctaattcttttgtattttcagtagagatggggtttcacccatcaggctggtctcgaacttttgatgacctcagatgatccacccaccttggcctcccgaagtgctgggattacag

SEQ ID NO: 348255 - DNA, 122 bp, Homo sapiens
cccaggagcggaggagcagacagcggtggccatcaccagcgtccagcaggcggcgttcggcgaccacaacatccagtaccagttccgcacagagacaaatggaggacaggtgagcggcgggc

SEQ ID NO: 348256 - DNA, 122 bp, Homo sapiens
ggtgctgggggtagactgcgtatttctgcagcagatgcccggtcgctatgcccgtggattcggaggtgttcagtttctgggatcaattaagactcgctggctgagccctcgctgcatcgccg

SEQ ID NO: 348257 - DNA, 122 bp, Homo sapiens
agctgaagataaattcccaaagtcattggattcaggacaaccatgctggccagggtctggcgagggtcaagttagaaaggaggctgctgcggagccttgcttatctctgcttttctcttcct

SEQ ID NO: 348258 - DNA, 122 bp, Homo sapiens
tgaacgttggcggggctaggctcgttaactgccgagagcctccgggtttgcggtggaggacgctgaggcccgtggggggcaggcacccgggcgccgggcctcccagccgacatgtctctagt

SEQ ID NO: 348259 - DNA, 122 bp, Homo sapiens
ttcccggcgttcgcagcctgggagtcacaggcgcccacccaccggtaggtccttgagtttcgagagccagtagctgaaggagagaggagaggcaagtgcctacaactcccagagcactgcgc

SEQ ID NO: 348260 - DNA, 122 bp, Homo sapiens
cagtaaaattgagcaaacagaaaatgcaaagtcaatcacggagcgtctcctagagataaacgttatgctggacgacaaacccacgtcaacatcaaatgaacccgggggtcgcacgcgcccca

SEQ ID NO: 348261 - DNA, 122 bp, Homo sapiens
catggggcgatgtcccgaggacaccaggcttgagcttccagaatcctctcccagcggggtcgtgcaggacgcacttaactccccgcacagtgagccgtgacagcgcgtgtgcagtgtcgtcg

SEQ ID NO: 348262 - DNA, 122 bp, Homo sapiens
agaaggaatgatgagaaatgtcctcattacagaactttcccggccacactgtgagtcccacgcaaagaccccatgaccaccaaccggagcgctgggtgctccctggcagggtcacctttgct

SEQ ID NO: 348263 - DNA, 122 bp, Homo sapiens
ggaggcggggctagagaccaggaccaagtccggaaggcgtggctggggtggggcgaggatcggaggcggggctagagacggggaccaagtccggaaggcgtggctggggaggggcgagaccc

SEQ ID NO: 348264 - DNA, 122 bp, Homo sapiens
cacccagaggggactgagccagcagctgacctgaaaacagcgagtctgctgactgtccagcgatcatttccctctattgagaattttaaccaagtttctgttgtctgtagttatttgatatt

SEQ ID NO: 348265 - DNA, 122 bp, Homo sapiens
gaccccgccccggaaccttgtgttaccggcactaaatgcagaagttcctctggttgccaccggacgcaactgtcaggtgacgcttccggcgcagaaaaatggcagccgccgctccggactca

SEQ ID NO: 348266 - DNA, 122 bp, Homo sapiens
gaagtgcctccgagtgcccacggttcgtggactccacttcccagaattcctaagcggaagcgtctcagagttctctcactcctggactacagttcccagaatgctccaagggcagcgcttcc

SEQ ID NO: 348267 - DNA, 122 bp, Homo sapiens
cagagccccaagacatcgctgtttggaggtcacttccccatctagggtcacgcagctaatcggggccaccagaggccacacctggatccagcctggctggcggccaagtccagacacttccc

SEQ ID NO: 348268 - DNA, 122 bp, Homo sapiens
ctatgaccccaggcttcgagaaaagactccaccaagttccatgagcacctgtaggagagccggcctctgggtagatttcacccaaagaagctaaaacgctcacgtggtgcttatgggatcac

SEQ ID NO: 348269 - DNA, 122 bp, Homo sapiens
tttatttaatatgctttgtatactctgattagcctcagaatggcaagcgagcccagcaaacggcttgcaggcatcattacatggagtgattgaacttcttatcgcggcaatttccatggttt

SEQ ID NO: 348270 - DNA, 122 bp, Homo sapiens
acatccttgtcacctgcctgggcctctcctatgatggcctgctgggtgatgatcagagtacgcccaagaccggcctcctgataatcgtcctgggcatgatcttaatggagggcagccgcgcc

SEQ ID NO: 348271 - DNA, 122 bp, Homo sapiens
aaagctctgtggttgaacttgtcccaggagcccattgtcctttaaacagcaccgtttaagcggtccttaaggtccctggggagcccacaaaagccaatttaattcaggttacagcttaaccg

SEQ ID NO: 348272 - DNA, 122 bp, Homo sapiens
gaaaaatgaaaccagaaaataatgtgttggcaagaatatggaggaattggaactcttgtacgatgctagtgggaatgtaaaattgtgcagctgctgtagacaaattttgacagtttctcaga

SEQ ID NO: 348273 - DNA, 122 bp, Homo sapiens
ttagaggcctattatgaaatcatagaatgtctgcattggaatcgcctcacctccttttaccgctggagaagccgacggacagacgggcagcgacccccgccgtcgcacaacccgtctaggca

SEQ ID NO: 348274 - DNA, 122 bp, Homo sapiens
ggaaaggaaaggggagggggcttgagctcctggttccctggccagggatttcccagcttccgaagtctcgaggaagagctggctagtctcgagggactcctcgcgcggggattggagcccga

SEQ ID NO: 348275 - DNA, 122 bp, Homo sapiens
cgcctgccctgactcaccctcgcggcccgcccgggaactctgcgggagtcgcggcagctccgctcccagagacccaggagttgggcccagcgtccctcccggaacggtgagtaggtggctct

SEQ ID NO: 348276 - DNA, 122 bp, Homo sapiens
ggcctgacatccggctggaggcctcgggtgctccgaaagcggtaccttcgggggcccccccgcacccattggtatgcacttcccgcttgttggagtggagggcttttccccaggacctgtcc

SEQ ID NO: 348277 - DNA, 122 bp, Homo sapiens
caatgcgtaggggacctccgcgtccccgacacccgactgggacacggccgcgggctccttcgtccctcaccgccagccagggaggctctgcatgcccacgtccacttcacagccgaggaagc

SEQ ID NO: 348278 - DNA, 122 bp, Homo sapiens
tccttcttccctgtgtctttcagtaagttcttcttcccaggtggggcccctggctttgagcggcatgggtcagagcatcctgtcagggtcatgggccatgagtgaggcagcgtcggttcgtc

SEQ ID NO: 348279 - DNA, 122 bp, Homo sapiens
gtatttgatggaggctgcgccggagtgaagaggtcgtcctctccatctgctgtgtttggacgcgttcctgcccagccccttgctgtcatcccctcccccaaccttggccacttgagtttgtc

SEQ ID NO: 348280 - DNA, 122 bp, Homo sapiens
tattgcatgcaaaattttgtatcctgctttttctatcggattctttttttaaagctatgccgagggggctatcaattagctttttaacaaagctatctttaaaaggatactcaagtctaccc

SEQ ID NO: 348281 - DNA, 122 bp, Homo sapiens
ggctcggggttttttctctccattctcccaacacacaggaaataacagagcgtcaggtgacggcgcgcggccaatggggaggctccgggccgcggcgcgcgggcgggcgggagggcgcgcgg

SEQ ID NO: 348282 - DNA, 122 bp, Homo sapiens
gattatgaaacttcttttatgtaaaagattttaggtttcttttttttcctgtacatgtcacggtaagatgaggatgcttattgtcattaaaccagtgaagatttatctcaggttatggagaa

SEQ ID NO: 348283 - DNA, 122 bp, Homo sapiens
cacgacgcccagcctcaaatgcctttatacatcaaaacgatcagtatgccaaagctcgggcggcaagctgtcgactccagcacctagcatggtgcacacagcagataccaacggagtatttc

SEQ ID NO: 348284 - DNA, 122 bp, Homo sapiens
ctatctgactttctacccaggaccttgttttactttaagaataggcaaggaggccgggcgcggtggctcatgcctgtaatcccagcactttgggaggccgaggcgggtggatcacgaggtta

SEQ ID NO: 348285 - DNA, 122 bp, Homo sapiens
catcagcccatttctattgtgtcttattaggtcctcgggctacgaggacctagtgaaaaacgtggctgccctactactttgctaagaacaagaaccacacagtccggcacccccaccccagg

SEQ ID NO: 348286 - DNA, 122 bp, Homo sapiens
tcaggacccggcttgccagctggcaccaactccacgacaagttcgttgtcctccttgccccgggccagccagcggtgggcttcgaacttgtgctgctcaatcacctcctgcatccccggccc

SEQ ID NO: 348287 - DNA, 122 bp, Homo sapiens
taatctccagggggtggagtatgacgttactcccaatatagcactgggtgtgcatcctcccggtgattttgctcctaatattcaaggaagaagagaatgctattactcccaacatcgcagga

SEQ ID NO: 348288 - DNA, 122 bp, Homo sapiens
tcagaggaggggctcacctgactgcacagctccatgttttctgagtacacagcaatctgtcgtctcggctgctgctcctctgacagatagctggagaacaggatgaggacatcaaaaccaaa

SEQ ID NO: 348289 - DNA, 122 bp, Homo sapiens
cacactggcctgcgcgccctacgctttatgcagatgagggatggcgcaagcacaggcctgcgcgcagggctttaggcagatgagggatgacgcaggcacaggcctgagcgtcgcacgctttg

SEQ ID NO: 348290 - DNA, 122 bp, Homo sapiens
tacgttttcacttcaagctctacctgtaagtagggcgctcagagaattccagggtaacctcgggaaagtatgggtcaggctaagagtaagtttgctaattacttaagcctggtgcggccgtt

SEQ ID NO: 348291 - DNA, 122 bp, Homo sapiens
agtgagtctctcacagccatctgggtgatccgtctatatacagaccttccttgacactcccgcagtagtcagcatactgcctcaacacaaaagaggctagacaaatgttaagtgacatctat

SEQ ID NO: 348292 - DNA, 122 bp, Homo sapiens
attctcagagactgatcccactgatttgaaaactgatggccatgtaaaacctgcatgccacgtccacagcttgattcaccgtcactcacagttgaaggccaccaagacaatcttcaacccgg

SEQ ID NO: 348293 - DNA, 122 bp, Homo sapiens
atctggccccaagcgccactctctccggcccactgcatctccggaactggcagaggagagcgagggtgagaagagaccatggggagcgactgacaacaaggctgacacttccccgtttccag

SEQ ID NO: 348294 - DNA, 122 bp, Homo sapiens
tccccgccgcagtgcccgcgctcgctggtccggggcggccgggagcacctgcagcaggtgcgccttctccagcagcctgcgccccacggccccgcgcgcagccttatccagcggccggtggg

SEQ ID NO: 348295 - DNA, 122 bp, Homo sapiens
gtagacggttgctcttggcaaaggcttcttcctccccagggctagagcctgaccattttccgggcgggcagctgccccgaccacaccaggaagggctgctcaggcggagccacctcgcaatc

SEQ ID NO: 348296 - DNA, 122 bp, Homo sapiens
gcggccggggaagttcccaccaaaggagtcaggccgctttgtgtgtgctttcggggccaccggccctggttctcctcctccctccctgctcgccctgcgccttggccccagacgatcaggct

SEQ ID NO: 348297 - DNA, 122 bp, Homo sapiens
atttttttccactttgcagaaaagaacattgaggctccaagaagtaaatttacttgctcacgattagagaagctggattcatgctcagtcagcccagctcccaaatgtaccaggtcctcaat

SEQ ID NO: 348298 - DNA, 122 bp, Homo sapiens
accagattcttaaagagacaggcgcctgcccaaccccgccgcccaagtttgggaacaaaacgcgacggtgttctagagctttccagagggagcactgtagattgcatatgcctcttttgtgt

SEQ ID NO: 348299 - DNA, 122 bp, Homo sapiens
gtgcgtgaccctcgcctaagaggcgtgctgtgggcgctgtgggccaggtctcgggggctccgggaggtgctgcctgccaggggaagctggaaccagtagcaaggagcccgagatcagccctg

SEQ ID NO: 348300 - DNA, 122 bp, Homo sapiens
tcccccacttaaagattgcctcaagatagataatctgcagcctggccacaggcgagatgacgccagcctgcattttagatggaccataactcaagataggcgttgaagcaagacacacagcc

SEQ ID NO: 348301 - DNA, 122 bp, Homo sapiens
gtggaggctggcagccctcgctcctgtgaactggcggctggggctgcatctcgcccacgtcgctgtcatgtgcggggcccacgttgtgagttgtgtgtctgctcactattgtgctgtagcct

SEQ ID NO: 348302 - DNA, 122 bp, Homo sapiens
catttctcctcgacttagatttcgtgagcaaaatgggcccatgttttattttttctcgtgcgtgggccgtcgtgaggctttaaacaggaaactgggacagcacccgggctccgctacccgtc

SEQ ID NO: 348303 - DNA, 122 bp, Homo sapiens
acttgatcggcagccaggaacggttttttcctgctctggtcctttgtcaggtctttgttccgcccctggctacactcgataacagaaccacttactggcgattcacaggaggggaccgggcg

SEQ ID NO: 348304 - DNA, 122 bp, Homo sapiens
tgtaatgccgagcggtaattgcattaggattagttatctcctgtgctctgctcattagcccggaggatggctcgcatccagcgagagggtggcacagggagagggatgggatatgcgcctaa

SEQ ID NO: 348305 - DNA, 122 bp, Homo sapiens
cttttaagaaatgtgaaactgacccatactcccttaagtgtctgtaagtgtacatacctccgtatacatacatgacctcttgtcaaagccaagtggaccaactgaaaatggctatatttgta

SEQ ID NO: 348306 - DNA, 122 bp, Homo sapiens
gtcaaacgcgaggaccctggggctgccatggtgtgaatgagttgcacatcctgtgacacacggggccacttgacagccagccaggtgagcagagagagacctacagctctgtcgttcacccc

SEQ ID NO: 348307 - DNA, 122 bp, Homo sapiens
ctcaagctcgcccttagcagagcagagctgagagccacctactagcggcaggtggagcctcgagacgggtgctgtcgtggtgatggaggcgcacgctcgcttcccacgcagtttggcctttt

SEQ ID NO: 348308 - DNA, 122 bp, Homo sapiens
ggaccccaggcccggatcccgagtctccctttctgccgctgcaaaagcgttctttctgaccgagacctgcggccggaacaagtcccgctgggcctccatccagaaaacaggttcgctttttg

SEQ ID NO: 348309 - DNA, 122 bp, Homo sapiens
tccgtagtattgtctctggctttgaacgctgttgagggaggggaatgtttgcactcatcccgcatccttttttggctgctatctttgcggggattgttcaaggagaaatccatcctgactgg

SEQ ID NO: 348310 - DNA, 122 bp, Homo sapiens
ttactccgtgggaaaatggccctgagcccgactggcttgaggcttagacaggtgaccccgcgaagcgggtgggcaggcgcggccgaggggcgggaggcgggcagcctccgtgattggccggc

SEQ ID NO: 348311 - DNA, 122 bp, Homo sapiens
ggaggtgagcagcccccaggatacgacatgctgcaatgggcgcggctccagggcactgggcggggtcagcagttgtgccttttctcacagatccagccgtccttctcgctgtcacacggtgc

SEQ ID NO: 348312 - DNA, 122 bp, Homo sapiens
ggaggggacccgcgggcctcggggagagatccctgcgagcggagcgacgtcacggggccgcgccggccggcccgggctgccgctagcttcctgcccccgcccccagcccccgccgtcccgct

SEQ ID NO: 348313 - DNA, 122 bp, Homo sapiens
actctagcagcagccacagggctaagcatgcatgttaacagggtatatttattctatgttcgaatttgtcttttgatcgcttttattcatttttcctttctttgtcttttcccaaactgata

SEQ ID NO: 348314 - DNA, 122 bp, Homo sapiens
gctccctccatctgcagtatcccccacctccagcccgtcctgccctcctgttctccgtctcgcttcccgtcggtgcctccgggatctcacagccctcgcacctcttttgtgacccaggctgt

SEQ ID NO: 348315 - DNA, 122 bp, Homo sapiens
gaacttttgtttgctgacgactcctcagaaggctcagaagtcctgatgtgaggagaggtgcggggagacattccaaaaatcaagccaattcttctgctgtaggagaatccaattgtacctga

SEQ ID NO: 348316 - DNA, 122 bp, Homo sapiens
caagggttccaaacttggcttctccatgctttccccaaaagtaagggaatcttagttctccgggtgagttcccactgccatgtgcggttgatccacctctacctacaagttctgggtgacat

SEQ ID NO: 348317 - DNA, 122 bp, Homo sapiens
agattgccccccctccccccgtccagcacgcgtctcttttgcgtccagattggccgcgaccggagctcaatagcaggaggttaatttccttcacaaaggtgaagggggcacggctccgtggg

SEQ ID NO: 348318 - DNA, 122 bp, Homo sapiens
ccttggtcctcaggcagctcatgggatccaggaaggaaacgaattacccttttcctgccccgcctcctgcctgggccacaaaggcagggccaaagcccatccttcaagggctggagtcagtt

SEQ ID NO: 348319 - DNA, 122 bp, Homo sapiens
attagcaaggatttatatttctgctccagccccctctcaccttctggcatttggaaaagacgtcataggagccagcctggccacaggggaacagcagcaaaagtgggggacaaacagaacaa

SEQ ID NO: 348320 - DNA, 122 bp, Homo sapiens
gtgtccaaactgccgcgccgccctgctccgggtttgtcttcctccctccgtttctccttccgctgtatctagcatttcggttcctggaaaggttaccggagctgcgattggggctgggacca

SEQ ID NO: 348321 - DNA, 122 bp, Homo sapiens
gacgaattccgcaccttcagcaggtgacggccccctgattggttggtgttcccgaagtagcgacttcctgactggctgggttctcagttggagctagagggctgagaagtacctctaaggag

SEQ ID NO: 348322 - DNA, 122 bp, Homo sapiens
gaatccactatccaaataagtataaggattaaaaaaaaaaaaagtacagtgtgcatctttcggtaggaattcctaaggagtgcaccgagtgccaataaatggaatatgtaagagacacccca

SEQ ID NO: 348323 - DNA, 122 bp, Homo sapiens
gctgggaaggagaaagccgtccgctgcgaccgggcagctcagggtttgcagaaagggctccggcgcgcgtaagttctgtctacacgaccgccaaagcgtccggaacccggattcaggattca

SEQ ID NO: 348324 - DNA, 122 bp, Homo sapiens
aaattctgaaatcagagccaaagggaagtgctgcgaggtttacaaccagctgcagtggttcgatgggaaggatctttctccaagtggttcctcttgaggggagcatttctgctggctccagg

SEQ ID NO: 348325 - DNA, 122 bp, Homo sapiens
cacccggccctgagggcctctaaggtagcgtttcactcgctaggaatttccagtctcctccgagttccgaaggttcgttcacgggaccgtgagcatcttgccttcatccttcttcactgtta

SEQ ID NO: 348326 - DNA, 122 bp, Homo sapiens
ctgtcgggctcttggccttggtcccgcccttcgctcgcctccgaagcctcgcctacttgacgtcatacaatgccgcaaagcgcagggctgatctccgtctccgcccccagctgctttctccg

SEQ ID NO: 348327 - DNA, 122 bp, Homo sapiens
catgccggggaggagactggcctcctggtggcgggggagggctcctggggaccccaagtccgcggaggaggagacaggagggagcagggagatggaagacccaggagcacgggcgggctccg

SEQ ID NO: 348328 - DNA, 122 bp, Homo sapiens
tctcttaaaatgagataaaaaagagcttcctgtatatcttagttctggtccttggaatcacggaataaatctaaatgctcatcgttcatgattgaagatagctcccgagtgcaatgtgttca

SEQ ID NO: 348329 - DNA, 122 bp, Homo sapiens
gccgccggccgcccccgcgcccgccttgcggacggccccagccccttccgcaccctggcccgcgcttacctgcagcctggcacaggcacagacactgccgtgggttccccgcgctcgctagc

SEQ ID NO: 348330 - DNA, 122 bp, Homo sapiens
ggtggggctggagcttggcagcatcctgcagccctctggactcccggctctcgagtgccgcgttctacctgctgtgttctaaatggacatgccatccccacagctgtgtcaataaagcagcc

SEQ ID NO: 348331 - DNA, 122 bp, Homo sapiens
gctcctgtgctttccttcgcccgtgtcttccctcccttctcggccccgccacctgcccagcgtgccctggctctccagaaccttctatcccacagtcaggccccagagagggcaggacaagc

SEQ ID NO: 348332 - DNA, 122 bp, Homo sapiens
tagttggcacacaccctcaccatgatctaatagacagctgtataatactaaagtgcctaccgcgttgcatcatgataaagtgacatcattgactggtactgatgctaagttttgggtgcttc

SEQ ID NO: 348333 - DNA, 122 bp, Homo sapiens
caaagtaacgaactcggtcactgatgcagccaggcaaccctgctccgggggttctgaacacgaatgccgtgtgggggttccttaaagagaccagagaccggcccggcgcggtggctcacgcc

SEQ ID NO: 348334 - DNA, 122 bp, Homo sapiens
gggccccgcctccggagcgctccacccgcgtgggggaagcctccccggaggctccgacctcgctcctgcttatgaccctcgcagccacaggagcccccacttaggtgaacatttcggacggg

SEQ ID NO: 348335 - DNA, 122 bp, Homo sapiens
acactctagctgggtcccccggctgcgccgtcacactctagccgggtcccccggctgcaccgtcacactctgggctgggtcccccggtggcaccatcgtactctggactgggtcccccggct

SEQ ID NO: 348336 - DNA, 122 bp, Homo sapiens
atacccgtatgtcctgcaggcctggcctattttagcagctgtgctaaaacagcccccatgcgtggttcacaaacccaagactaaggattccatgggaggtgacggcctcctcactcctcact

SEQ ID NO: 348337 - DNA, 122 bp, Homo sapiens
ggggcctcggaagggctccccaggatgtgtactcgttctctcacggccctgagtgagccccgcacgcccggacccccaggcctgaccaccacccctgcacccccagacaaactggggggcaa

SEQ ID NO: 348338 - DNA, 122 bp, Homo sapiens
actgggccgatgcttaggaatatttatgagggatggggagggagacaattggaatgggggcgttgcctgcagaactttagaccctgtagccatagagggaatggcgttcctttctaaaagga

SEQ ID NO: 348339 - DNA, 122 bp, Homo sapiens
tgtaactggaggcattttgttctgtccaaggattgtgtcctcctccaccttccctgtgctcggtctccacctgtctcccattctgtgacgatggttcaatggaagagactctgccagctgca

SEQ ID NO: 348340 - DNA, 122 bp, Homo sapiens
gcgtcctgtggccggggtccctgcacagccctcccttccgggcggtgaaatgacctcagccgagcaaaaggacttttctgaaatctgagacccacggggctccactggatgacctagtcttg

SEQ ID NO: 348341 - DNA, 122 bp, Homo sapiens
gtgttagtttgattaaccatgaaatggagttgctgaaaaatcatgaactgcagttttattcgtcaagcaaagtcatttcacagtcagtataatattcatgctaagggtctaatgctttaaca

SEQ ID NO: 348342 - DNA, 122 bp, Homo sapiens
gtgaagagatcgggagtcctctgcgaggctctggagcacccggcgcctaagaggctagtgcgccccgtgccgctgcggtaggacctggcggtccgcagctcctgaagggcctggccgttcac

SEQ ID NO: 348343 - DNA, 122 bp, Homo sapiens
tcccgcccttcccgggactcttccctataggctgttcaagtcacgtggcgactgtggccccgcccacagctcccagaggcctgcgcgtgcggtctgcagttcggccgcttcctcttggcggg

SEQ ID NO: 348344 - DNA, 122 bp, Homo sapiens
agccccctttccctccttttgcaaactccagactagcctcagcggggagtcattggcctccggctctgctgccccctacaggttattaagccgcttcttaccccattgatcagttcctagaa

SEQ ID NO: 348345 - DNA, 122 bp, Homo sapiens
cagagcattctcaccaaccaggccagttccccttcctcccccctggggggtgctgggtgccggacacccctccccaggggctatattagccgtgtgagtcatggtggaccggctgggaggcg

SEQ ID NO: 348346 - DNA, 122 bp, Homo sapiens
tagaggtgggtacaggggagacagaacttaaatccaggtggagagtcatggaaagtcgcacgaggagagtggctgttgttccaaattttgagcaaaggaaaagaaatcctagaaacaatggc

SEQ ID NO: 348347 - DNA, 122 bp, Homo sapiens
gttgcacagacccaggcagctgaatgggtcagtggagcaatgacaatggggttgaattcccgcagagaccactttctgcatttggatacaaagggaagaagggagggtatagcctattctca

SEQ ID NO: 348348 - DNA, 122 bp, Homo sapiens
gtccggtggggtaaagaaagcctcctccaggcagcacaatggctggcactctgaggaagccggactcatcccgtgcaggccgcatacacactccactgcccttccggccaaacaagcccgga

SEQ ID NO: 348349 - DNA, 122 bp, Homo sapiens
gaatccttactaagtggtagaggcaggcccagaacccaggcagcctgactcctgactgcccgctcctaaccatgtccctggcggtgctgcctgtcagtgctgctggattcctccagcccgag

SEQ ID NO: 348350 - DNA, 122 bp, Homo sapiens
aaggaggagaggagaagacaactgaagctgagtttgctgaggacaaggccagggacagtccggtaaggaggacagaagttacagactccacaccctgtgttttgctgcctgactttgcactt

SEQ ID NO: 348351 - DNA, 122 bp, Homo sapiens
atgtatttggtaattaaatgtttgttagcaaattttaagtatacagcttctatggcgtatcggggctggaaatagtgaggaaggaggcagaaaggaccatagatgccaatgatttcataaaa

SEQ ID NO: 348352 - DNA, 122 bp, Homo sapiens
tgccgccagccagctacacctactagttaccaggccctgtgccaggcccaaggatacaaacgtgacaagatcctagtcttcgaggagcttggagcagtctgtgtgattgtgttgtgcccagg

SEQ ID NO: 348353 - DNA, 122 bp, Homo sapiens
ttctagcctcactgttttggttacagtgttgaaggaagggttttaaacttggcaaagtaccgtgcaacatctgtaaccacatttgccttctggggatcggaagatgaatcccacattcctgg

SEQ ID NO: 348354 - DNA, 122 bp, Homo sapiens
cccgctctggtatttggggttggcagctgttgctgccagggagatggttgggttgacatgcggctcctgacaaaacacaaacccctggtgtgtgtgggcgtgggtggtgtgagtagggggat

SEQ ID NO: 348355 - DNA, 122 bp, Homo sapiens
cacactttctttgaaatctgaagcaagaaattacctctccggacacaaccaagttcatctcgtgtcctctcaggacatacagccgggctccactagagggcagcagaaagatggagatgctc

SEQ ID NO: 348356 - DNA, 122 bp, Homo sapiens
cgcgtgtccagactctgcaggcgccctgtgacgactctcttgcacacacgcacacacacacgctcatgcaaaagcatcgcatggtgggtaagaccgtggactctgaacccagacgtgcaatt

SEQ ID NO: 348357 - DNA, 122 bp, Homo sapiens
gggaaggagggaggagggcgggcgagctggagccggcaggcagcgggagcccgagagagccgcgtcgggagtgcggtctccatggcagtgctgggcgcagccggagagaggtaagacgaccc

SEQ ID NO: 348358 - DNA, 122 bp, Homo sapiens
tctctcaacatttctcccctcttgcgtggttaagaagataaattccagcatgttctgaaccgatattcctgtagggaaggagaggatttccctgaactctccaccccgctgccctggtgaga

SEQ ID NO: 348359 - DNA, 122 bp, Homo sapiens
ctgagtgctgacagtttgtaaaaggccctttccaggtgctctgccaaagccactcacgcacggccttctcacggcgtcgggctgctgcgccccacggtgcccccgcgctgggccatcttgca

SEQ ID NO: 348360 - DNA, 122 bp, Homo sapiens
ggaagcaatccggcccctttttggcagcgagttggcccggtctttggctgcctcagaccgcgttgccctccagcctcgaggcagagagctgcctcggtgccacagctaaataagcccggcgc

SEQ ID NO: 348361 - DNA, 122 bp, Homo sapiens
tggacccggacccgagcctcttccaggctcagacacgggaaccacgcccagagccggacccgagcctcttccaggctcagacacgggaagggaaccacgcccagagccggacccgagcctct

SEQ ID NO: 348362 - DNA, 122 bp, Homo sapiens
ggttcgcgacttatgggcttgtcccggggcggaccccgcgcgggctcgggaacgtgcatgcgagggtgcatgtgttaggagtgtaggagtctggaccactgacctctctggacgggtcctac

SEQ ID NO: 348363 - DNA, 122 bp, Homo sapiens
gcaatcctcccacctcagcctcctgcatagctgggactacaagtgaatttcctaatattccgggaggtcaaaaccaaggctcactgttttcacaatacacacagttctatgtttataaataa

SEQ ID NO: 348364 - DNA, 122 bp, Homo sapiens
tggggccgggtgtcgtgagacgggggaggggctgcctggaccgaccggaaccgactgtggcgagaccctggctttcctgcgggcgactttgggatctgggaccgagtcctcctggagccgct

SEQ ID NO: 348365 - DNA, 122 bp, Homo sapiens
caccacccccacccacctccccatccctcctcgacctaccttgccgccccacgatctcggcgacatgctcagaactgggtactggcacgcactcggtcatgttcacgctcttcttgcgcggc

SEQ ID NO: 348366 - DNA, 122 bp, Homo sapiens
catttcttgtgaaatgctacgttaataatttcttaaactgtcacttcatactaaagttagcgcttccacagctttaagcccacttgggttagcaaacatgatggttctttttaatgcccgaa

SEQ ID NO: 348367 - DNA, 122 bp, Homo sapiens
tcttagcatcctgccttagagccaggcacacactgtgctttctattgtacagaagctcttcgtttcagtgtcaaataaacactgtgtaagctatttctgtttgctattctttttacttctta

SEQ ID NO: 348368 - DNA, 122 bp, Homo sapiens
ttcctgttgtcacatgggttcagagcagctgagcagggaacacgtcctaggcaggtctgacgtgaaacctccccttaccctgaaccgtgtgactctgcaagcagacacctcgaggcaggtgt

SEQ ID NO: 348369 - DNA, 122 bp, Homo sapiens
ggcttctgtggaagggaggcagagcggaggctgggagggaatgggtcaagcctggcctgacgcccctcagcaggggccctgggccagcagtcagttttcatcagaacccttcagaagtggcc

SEQ ID NO: 348370 - DNA, 122 bp, Homo sapiens
ccagtggcagaggctttgcaaggacgggctccaggtagtgacggcaaccagccccctccacgtgtcctggctctgtcctcgcgcaaagcacctctcctctcctgtggctgtggctgccgcta

SEQ ID NO: 348371 - DNA, 122 bp, Homo sapiens
tccatggaggactttgaggttaagagaggtaggtaccctgtccaagcttgcacagttagtcggcagcagagccgtcgcgtgtctggccccaaaactcactctcctactgctgttaggtacag

SEQ ID NO: 348372 - DNA, 122 bp, Homo sapiens
ctgtcctctgcaggtacgtgctctactccctggacctgtacaatgacagcgcccactacgcgctcaccaggttcaacaagcagttcctgtacgacgaaattgaggccgaggtgaggcccctg

SEQ ID NO: 348373 - DNA, 122 bp, Homo sapiens
atctcagattcctctaaaaccaagtcttcaagaatgggagtccaaagaaacctggaccatcgtgaagcgactgcccccggaacttgagtggccagctccactttgcgacacggagactgttt

SEQ ID NO: 348374 - DNA, 122 bp, Homo sapiens
aatcagagccaagacctctccctgcagcacctggccatctgcttacaatgagatatatcccgtgtcataggtgaaatctaaaacataccactgtgctgaagtcatgaggtgtgggggcaagg

SEQ ID NO: 348375 - DNA, 122 bp, Homo sapiens
gcggaaggtcgcggctgcggggcgcggcctggcaccctctccccggagggcggcagcgtccgggcacagcctggcacgggggacgaagcactttccagaaggctctgaaactaggtcccctg

SEQ ID NO: 348376 - DNA, 122 bp, Homo sapiens
aaataattctttgaaatggcaaagaattaaataccatcattcattatcagaagagttcaacgtttgaagtgctgggagataattctaattcattcttggatagtgaagcaaaactgattgaa

SEQ ID NO: 348377 - DNA, 122 bp, Homo sapiens
tcagcttgaaatggttcctactgaccaaatctgggacaatttggtcattaaaaagaaagacgactgtaactggttataaaacaaggaataaattaaaacccatgagagtctgaagtggtatc

SEQ ID NO: 348378 - DNA, 122 bp, Homo sapiens
ttcccccgggtggaagtgtactgccagatagaactcgcccttggcaatgagtgccctgaacgcagtcaaccaagccttcgagcacggcaggccagtctggaaggagccacacaacctcacaa

SEQ ID NO: 348379 - DNA, 122 bp, Homo sapiens
cgcctaggatgccggacggccctcggcaccaccgagacccgcctcatgagccccaggtcccgccatcaggaccccgaggtgacctcagccacaaacctaacgccagggccacgttgctcgtt

SEQ ID NO: 348380 - DNA, 122 bp, Homo sapiens
gctaggtttcaaattgaaattccctgactggggccgtcagaggactctgagggccggccccgccccctcgcggcggaagcccctcccgcgaccccgccggacgagcccccggcgcggaaacc

SEQ ID NO: 348381 - DNA, 122 bp, Homo sapiens
ggatctctgggtaatagctaagatagtttcatctctactctccttttgttgtgtacttgacggcatggaaaggagaaaagatcccttcccctttccaaaaaaaaaaaaaaaaaaaaaaaaac

SEQ ID NO: 348382 - DNA, 122 bp, Homo sapiens
cccgcacgagcccagcgcccacctgcccccgtccaccccgtggtgccaggatcagggtgacgtcgtgcccagccgtgaccactcacctcttgttgacctcgtccaactctgccctcagcttc

SEQ ID NO: 348383 - DNA, 122 bp, Homo sapiens
ctttgttagacacttaaaaaattcctggaagctgggtgcagtggcacgtgcctgtagttccggttattcaggacactgaggagaaaggattgcttgagcccaggagtttgagtccagcctgg

SEQ ID NO: 348384 - DNA, 122 bp, Homo sapiens
gccgcggaggtgggacgcgatgcagtggccgccaccgtggcgacggtcgccccttgtgagcgcaaccccacctccgggaccaacgagaggactcttatgcccaaggcgcgtgagcgaagccg

SEQ ID NO: 348385 - DNA, 122 bp, Homo sapiens
aggcggccgggagtaaggcggagctgaaggaggagcttgatggaagcgtgcgagaaggggcgtaactgatttggaaaccagaggaaaggcgctgttttcaccgaattagaatcgcgggaaaa

SEQ ID NO: 348386 - DNA, 122 bp, Homo sapiens
tcgctccgggaggggaggtgacgcggcgcgggctggacggccggagacgcggggtcagggcgcggacgaggggagcgcagggtcggaggggctcccggacgctgcccgcccagcgtcggctc

SEQ ID NO: 348387 - DNA, 122 bp, Homo sapiens
cgtgctcgctgcgcccccgggctgcgttcatcaagcgcaactccaggcgcgcgccgcaaccgcgcagggcaaccgggggctctcccgccgaacccgccctcacttacatctttctcgtcgcc

SEQ ID NO: 348388 - DNA, 122 bp, Homo sapiens
acaagaggggccaccctgcagtgacctcgcttggtcgcatggctactaaaatgtggccaccgaagaggaagaagggaaggctggcaccgtcgctacaacccacccagctcagacttcaggat

SEQ ID NO: 348389 - DNA, 122 bp, Homo sapiens
ccaaagcttccctaccaagggaaaacctttggcctcaaaggtccttctgtccagcatagccgggtccaataaccctccatcccgcgtccgcgcttacccaatacaagccgggctacgtccga

SEQ ID NO: 348390 - DNA, 122 bp, Homo sapiens
ctgctcctgcaccagccaatatcacttgcatcactagccctctgatgccatattttcctacgcctcagtagcttagcgcaggaggtcagaactttccttgctctcctgagttgactccaaac

SEQ ID NO: 348391 - DNA, 122 bp, Homo sapiens
atgtgcctccgccagggtcagcaccccgcactacagccccgggctgctcattgagaagagcgatgcctacaccaaagtctactcccgcgccggcctcaccctcatgtggaaccgggaggatg

SEQ ID NO: 348392 - DNA, 122 bp, Homo sapiens
ctagactgtttgaggagcaaatatctgccttcactgtctgactctctcagccacccccaccgggtttggggctaattgtccctcattagctgggcccaggccccgggctgccgccagccccc

SEQ ID NO: 348393 - DNA, 122 bp, Homo sapiens
tgcccgcctcggcctcccaaactgctgggattacgggcgtgagccaccatgccaggccaacgctgtttcaaaaaaagaaaaagaaaaaagtggaccagaagccatgatgggattgggagtgg

SEQ ID NO: 348394 - DNA, 122 bp, Homo sapiens
tccatcgcggcgggctgggggcccggggtgagcagggggtcagcggggactctaagcggccggggccaagccagcctgggtccccacggaggccgtccctgccccgaaccgcactcaccggc

SEQ ID NO: 348395 - DNA, 122 bp, Homo sapiens
gcgagccccaccgctaggggccgcttaggtgcagcccccaggtgggcggggactgcgtttcggggcgtggcctccgccgcggcagcccccgcccaagctcctcctaagcgcctgggggcgct

SEQ ID NO: 348396 - DNA, 122 bp, Homo sapiens
tttcttgctgtacgaccctcctctgcaactattctccttactttgtcatgactattggagcgctggaatgaagcctatgtatggaaaagatggtacttattagattattagataagtcaaaa

SEQ ID NO: 348397 - DNA, 122 bp, Homo sapiens
gcattccccttcacaacagtagagacctacacagtgaactttggggacttctgagatcagcgtcctaccaagaccccagcccaactcaagctacagcagcagcacttcccaagcctgctgac

SEQ ID NO: 348398 - DNA, 122 bp, Homo sapiens
ccacgcgtgtggagctgacacctgcctcccctgtgggtggcacagcaacagcaggtagcccggtccctctggaaagagcggaggtggaggggcctggcagggaggacgcacacggcagccct

SEQ ID NO: 348399 - DNA, 122 bp, Homo sapiens
ttcactttcacatctagcccagtgtctggccagatgccttaggaatgtttgcaggatcagcgaatagattggttccttgaaggaaaacaaagcaaagggcagaaagagcacacagtcttggt

SEQ ID NO: 348400 - DNA, 122 bp, Homo sapiens
cttttccttgtggttcctttctccggcatcccggactgcgggccctgcagccacctggaccggcattcaaaggattctgcaagtccagcttcacagactggctttcccagacgctccgaagc

SEQ ID NO: 348401 - DNA, 122 bp, Homo sapiens
gctctgctgatcccagaaggacgtcttcagtcctgacccctcgtgctggctccgaactcgcgtttctgactcccagcagcactggcagccccttgaccttgtgccttgagatcacgtcccag

SEQ ID NO: 348402 - DNA, 122 bp, Homo sapiens
ggcaccttcctgggcgttttctggagccctcaggggagaccctggggccagctgggaggccgagcctgagtctccggccgtccctcgcccgccggtgtctgcgctgcacctgcaggatgcca

SEQ ID NO: 348403 - DNA, 122 bp, Homo sapiens
tgctggttaacaaggaaatcctatgtcaattatcgccaacaacttcctgctgcgaagcagcggggaatcaaagcgtttgagagccttttcacacccgagagtggtgcagggcctaattaaat

SEQ ID NO: 348404 - DNA, 122 bp, Homo sapiens
gtaaacatttgtcgaaggcccattgtgtgccaggcatggtaaggggtgctgggcatgcagcggtaaatgagatatactgagtccctgccttccgagatacatcattgagattgtaaaaaaaa

SEQ ID NO: 348405 - DNA, 122 bp, Homo sapiens
agctgacagacaagtggatgatgacagggctttttcattatggagtctcatgagatgctgcgggcacagcacacaggacactctccatcagcattagggaccgacacaaccatcgcaatgac

SEQ ID NO: 348406 - DNA, 122 bp, Homo sapiens
gtttacaaacctcctcttccctgcatacaaatcctgcctgcaggctcatttccataccaacgttcagaagcctctgaccattacctctgatgaagaagatggtctggcagcctctcttactc

SEQ ID NO: 348407 - DNA, 122 bp, Homo sapiens
aggtgtggctgagaacactgcggagcaaacatgctcagaacatcagcccccaagggttcccgggaacccagagtcccggagctggacagccggctgaaggatcccctaggtcctgggcgacc

SEQ ID NO: 348408 - DNA, 122 bp, Homo sapiens
tgttcaggccagcactggagactgtcacggccgatgcatgctcctcagagcctgctggggcgtctcagccacctattgtctcggttagggttgcctgttccgagcaagcccctcagcagatt

SEQ ID NO: 348409 - DNA, 122 bp, Homo sapiens
ggttggttgcgttgagggagactcataggaagtgacccatgtggaaatgcgtggtcagctcggtgtgcgtggtcagctcggtttccgtggtcagctcggtgtgcgtggtcagctcggtttcc

SEQ ID NO: 348410 - DNA, 122 bp, Homo sapiens
aaatcgcagatggttctcattcctcctttctcatcccaatcacaggtctcctatatgatgcggacacgccgcacactaacccagaacacccagtacaatgatgcagaggatgagggtggccc

SEQ ID NO: 348411 - DNA, 122 bp, Homo sapiens
aagaagctcctggctgaccaggctgaggcccgaaggtctaagaccaaggaagcacgcaagcgccataaagagtgcctccaagccaagaaggagaagatcaccaagactttgttcaaggagga

SEQ ID NO: 348412 - DNA, 122 bp, Homo sapiens
agcggcccctggcggtaggaggactcagggggcggcctctgccgccggggtggaagcgatcgattgggtcgctggcagagtctagcacagcgcccggcacatagtaggctcttaattcattc

SEQ ID NO: 348413 - DNA, 122 bp, Homo sapiens
ttacgagtttagttaaggaagatcattttatcacacttgtcaggctgctgctactgcagccgtgtgcccttcggcgggcggctgtagctgtagctgttgtgacggctacggcggaggctgcg

SEQ ID NO: 348414 - DNA, 122 bp, Homo sapiens
tggagttgccagggacacggcggcgcagtgtcggccctttgtgtatttctttccagagggcgcacctgtctgctcccttccccccggcctgctctcctggtgtttccatggaggtggcttta

SEQ ID NO: 348415 - DNA, 122 bp, Homo sapiens
ttatagaatcataagctagattatgtcctcagccctcctggaaatgcttggcagagtgtgcgtcccattcaacctccacagcgtaaaggaaagggaaggcacttggggagatttcaaagaaa

SEQ ID NO: 348416 - DNA, 122 bp, Homo sapiens
tttgtactttgcgaggttgagcattagagaggtaaggaaagtgcctagcatcatacctggcgcacagaacccaaaacggtaggtatcatgtagcagttctgaaaatctagcccatcaggatg

SEQ ID NO: 348417 - DNA, 122 bp, Homo sapiens
ctggccttcgagcccgaagcctcttctgcgcgcacaacctaggcagtaatcctaaactagcgggcaccacagaccagctgcagccaccccaacccagggatcacttccggacccctcgaccg

SEQ ID NO: 348418 - DNA, 122 bp, Homo sapiens
ccaacgacctcgcctggctgctccctaggtacctgtggtggaagcggcagcggcggcggccgctctcccctctgctcacacagacaatatggcggcgatggaggaggagacacacggctcgg

SEQ ID NO: 348419 - DNA, 122 bp, Homo sapiens
tcaagatatgatagtactcatagcacttctgaattcactgctgaaaatgaccattagctgcgatatgggactaaagacaagtacacaattaccagaaactaggtaacagtcaaatggtgaat

SEQ ID NO: 348420 - DNA, 122 bp, Homo sapiens
tttcttgtgaaatatccttgcatttctgggggcacccagcgtggtaatgtcccctgacatcgctgccttacgctcaccagctatttctttgggcgctccccattggcattcacgagtgggtt

SEQ ID NO: 348421 - DNA, 122 bp, Homo sapiens
tcatttggaaactccactccctgtcatccccaggcttatgaccagaaaaacataagacggcgcgtctacgatgccttaaacgtgctaatggccatgaacatcatctccaaggagaagaagga

SEQ ID NO: 348422 - DNA, 122 bp, Homo sapiens
aggttctcttaactgctgtatatttgtcatcatcactaacatttaatgaacacttaaccacgtgtcatggcattttacatagtgctttagacatattctgtgatttaattctctcaactacc

SEQ ID NO: 348423 - DNA, 122 bp, Homo sapiens
aaaagaatttggttaacacccctaggtaccctttagagacctccaattggttacaccctacgcaaatgaaggattgacctgtgaccaatcagacactgaagtggaggcttggtttgagacca

SEQ ID NO: 348424 - DNA, 122 bp, Homo sapiens
cgcccgtggcccccagcaggagacacattccgtgcttcgctccacccggcacccgtagctcggcgccgcggctcaaggcccgcccaccggccactctcattggatagttctcaccttcggac

SEQ ID NO: 348425 - DNA, 122 bp, Homo sapiens
ctgagaagacaaaagtgatgcctcacccgtggtggcgacaggaggaataactagctaatgcgaggaaagcttttgaagatgaaagggtggtatgtgcatgttaattacaacttttatcagcc

SEQ ID NO: 348426 - DNA, 122 bp, Homo sapiens
gaggaagaggcgcctttctctattctcacaaacgtgccctgtggactggagtggtcctgacgcagtggaagaggtgaggagagagactttatccccagaggcagatttacagaggccagact

SEQ ID NO: 348427 - DNA, 122 bp, Homo sapiens
tatcccttcctaaccccttcccaatggcagaggagccatgctcacgcttccaagggtaggcggtgggggcctgagacggagtagcggtaaaggaaggtgaggaaggcgcggaaggcagggaa

SEQ ID NO: 348428 - DNA, 122 bp, Homo sapiens
ggcgccggccgcattggtgagggggcgcgggctgcttggccagggcagttccctcagctccgggttggagccggagccggagccggatcccgcgcacaccgccacgtcaacctaaacctaca

SEQ ID NO: 348429 - DNA, 122 bp, Homo sapiens
ggcgtgagtgtgagtgctgtgcttccatggaaggagcgtctcctggccgtgatgtggtcacgaggggcttccccgctctgtggacctggtgggcgtcacctttgcagggcagcctggggctg

SEQ ID NO: 348430 - DNA, 122 bp, Homo sapiens
tgggcggccgtccaggaaccctctcggcacgggttcttagacgcctgtctccactggggccggagggacaggactaggctagttttattctactacttgcttctaggccagccccgtggagg

SEQ ID NO: 348431 - DNA, 122 bp, Homo sapiens
gatggcagctcctgaccttctccatctgtgctgctgccatgtcctctctaatgctccagccgggggtgctgcagatgctgggggacagaaaacagagccaatcaaatgcctggctttgcaaa

SEQ ID NO: 348432 - DNA, 122 bp, Homo sapiens
ctccttggccccactgtcccaccgcctcctctagcacctctcaccaagcacgtggcccagcgcttgccttccctgtggactttcacatttctcagggaagttcccgagagatgcacatttgc

SEQ ID NO: 348433 - DNA, 122 bp, Homo sapiens
cacacaatcgcaacacggtttggagtaagacgcctgcatcccggaggagcgcattttccacgccctggagctccgcaggcaagaataccccgtgccgcaggacaggcccctgggacctcccc

SEQ ID NO: 348434 - DNA, 122 bp, Homo sapiens
attagcgtgagggatcctccttccaggaaggccaagaagtagggtagaaaggatttagttcggagctgacttaagtgcaaaccccgttgccaaccagttgcctatggatgactcatcaacag

SEQ ID NO: 348435 - DNA, 122 bp, Homo sapiens
cagaagtgaagccgcctgcagggcgtgggaaatcaaataggagctgctctccacccgctacgaccgctccccacaggcccagctccccagccgtcctgtgtgtgcgtgggcccggggtgtct

SEQ ID NO: 348436 - DNA, 122 bp, Homo sapiens
ggcggtcccccaggccggatggcggccggacggggagagtcctccccacccgctcccgcccgcctgcctgcctgccttacggcgatcctaatcctccgaccctggcccggagcgagagcaga

SEQ ID NO: 348437 - DNA, 122 bp, Homo sapiens
ttgagagtttgttcctcctccttgctctgggctggtctctatgtgatatctgaccaagcccggtaactgtgtctgttaggtgggatgcatgacccattccagcctctccacagactcgggag

SEQ ID NO: 348438 - DNA, 122 bp, Homo sapiens
agtcaccagaccatctcccggcgcgggtggaattcccgcgatctgtctcattccctgcgccgccgagaaaagtgagatcccgcgagactcccagggtatggtctctcaagagccctggaaac

SEQ ID NO: 348439 - DNA, 122 bp, Homo sapiens
gttttttcttcttcttaaagacaaaaaaataatctaccgctgacactcaacaagaaccgtcgtagaatggacaagtcttcggatcgcgctgtgcagatccctcagcaaattgtgacagtatt

SEQ ID NO: 348440 - DNA, 122 bp, Homo sapiens
acacgccctctaggcgtaaggttccatgcgagcggtaagagtgcggcgggacttggaaatcgaatctgtgctctgtgagagatcctaggaaaggaaactgggagcccgggagaactaaaatt

SEQ ID NO: 348441 - DNA, 122 bp, Homo sapiens
atgtagagtacttctacgtgctcacattcattacgcccgtcgatcctcacaatgactctgcggtatagtagagacttaataccattttgcatgtgaggaaacagaaacttgttcggggtttc

SEQ ID NO: 348442 - DNA, 122 bp, Homo sapiens
agcagacagctaagggaagaaaacataggatgctggagagctggtttggttggaataacacggaagacacccgtgaaagacaagaagcacactggcccgcaggagacgaggaggaatgagga

SEQ ID NO: 348443 - DNA, 122 bp, Homo sapiens
acccggaggcccgcgagctgcgcgggccgtcagcacccctagccccggcgcggcggcgtgcgttcccgcctttgtccagctctgggttttcaaaccttgccccgctgaaccattactccctg

SEQ ID NO: 348444 - DNA, 122 bp, Homo sapiens
cctggctgcctggctgcgtggcacaggctcctggctccggtgcgctcattgtctcccactcggctccaacttgcaggtgtccgtggccagctagcctctgagggtggcaggatgcacccgag

SEQ ID NO: 348445 - DNA, 122 bp, Homo sapiens
attgagccccgtgaggggtggctttgcaggtcacggatggatctgcctggctcgccctcgcgccaggcctgctcctctcagccagcccagatgctgtcagtggacacaggccacgctgaccg

SEQ ID NO: 348446 - DNA, 122 bp, Homo sapiens
gctgcaggcttcaggaggcggcttgacaggagcgccggcgtcgcactttgtgggcgtggacggggtgcaggctttcctgcagacctattcccacgaggtttccctcaccacggactcgcgga

SEQ ID NO: 348447 - DNA, 122 bp, Homo sapiens
ccccaatttttatttaagtctggggtgagggccctacaatctgtgcttttaaaaagttcccgtttttctctggtatagagtttgagaattgccagtctaataagcctctgactggtggtgat

SEQ ID NO: 348448 - DNA, 122 bp, Homo sapiens
gatggtggagggtgctgggagctggcagggtccttccagacagtctcagcctctccccgccgcccccaacaggctgtcaaacaaaaccggagagggggtgggggagccagcctcccagcgtg

SEQ ID NO: 348449 - DNA, 122 bp, Homo sapiens
cctgcagtggcctctatcaatacgtttcagcaggtgtcagcggctgctcaccagagccatcgtccaccattccctggagcactctgaaggagcccgactggcgaggctgtgtgggctcattc

SEQ ID NO: 348450 - DNA, 122 bp, Homo sapiens
aggaaagggttaaggcaagctgtgtccactgcgcaaccaacatggcccactttcatcctccggctgcagcaggaggaagtccgagagggggcctttcacatgacatcataaaagcctgattt

SEQ ID NO: 348451 - DNA, 122 bp, Homo sapiens
ctccaaggcctgacgctggaaggacgtgctgtttctctctcatccagtgctaatgataatcgccgtgatgatatcaatatgactggcaacaacacgcgctgagtgctcacttcgggactggc

SEQ ID NO: 348452 - DNA, 122 bp, Homo sapiens
acagtgggtgactctcaatgtgatactagcccggtacacttagacacccaaaaatcaacgcggcagacgttgtatccccaggagaaggacccccccgaacagacacgtgggacaatggcaag

SEQ ID NO: 348453 - DNA, 122 bp, Homo sapiens
ggacttgtgaaggcggacttgcttttttcgccgtccacacaaccgcactagccgggccttcggcaccgacggaacatctctacctgcgccccgggagccctcgccgtctcacctcgcgcgct

SEQ ID NO: 348454 - DNA, 122 bp, Homo sapiens
ataaagcagtgttagctgctgcctctccttacttccatgacaagctgcttctgggggatgcgcctcgtctcactctaccgagtgtcattgaagccgatgccttcgaggggctgctccagctc

SEQ ID NO: 348455 - DNA, 122 bp, Homo sapiens
gcagtcccggccatccagcaatgccaccaggggccgcgggtgcaggggcccgttcatgatcggaggtcggacgcctgcaagacagaggcaagtgctcagccttgcaccactgcggccccgtg

SEQ ID NO: 348456 - DNA, 122 bp, Homo sapiens
cgcaaacagtatttcgactttgatataagtggaagtctgcacgaaggtcgacaacaatagcgttggccctcggtacgcgtgggggactcaagggcccagggcccacgacgctcagtcctgct

SEQ ID NO: 348457 - DNA, 122 bp, Homo sapiens
ctctctcctccttcatactcttaccctcttaattacattaaaaagatctggactgaagatcgtacaaatagagttgacttatgtgtgtatttcattttgtatctgcaaccaggaatacagga

SEQ ID NO: 348458 - DNA, 122 bp, Homo sapiens
tcacccagcgtctgcacgctctcaagttgcgaagccccgacgcctccccaagtcgcgcgccgcccagcactcaggagccccagagccccagggaaggggaggagctcaagcccgaggacaaa

SEQ ID NO: 348459 - DNA, 122 bp, Homo sapiens
acgccatcagattcgcccacaagccctgtgcgtatgggctccaatcgatgccatcagattcgcgcaccagccctgtgcatatgggctcccatcgatgccatcagattcgcgcacgagccctg

SEQ ID NO: 348460 - DNA, 122 bp, Homo sapiens
caggactggaagcagcgatggtcagatactgtcctggctctgccatcctggaaccagcttcggtcagacatgaccccggcccggctgcccagctccacccacgtgacggggtggagcatctg

SEQ ID NO: 348461 - DNA, 122 bp, Homo sapiens
gcccagggcagccactgcctctgtgtctggatgcccaggaacgggccccgagtgccgggacgtcctggcacattgtccacagctgcctgtgttcccggggttctgctgggctcacacacgac

SEQ ID NO: 348462 - DNA, 122 bp, Homo sapiens
ggggtctctggggcggccccgtttgctttctgtcactgtatgcatgtgccctgtgtggtccgcagtgcacagagtcttttgtgggtagcgtgcctggtttatgcttgggtccccacaaccca

SEQ ID NO: 348463 - DNA, 122 bp, Homo sapiens
tgggaagccctctggagtgggaagacagtgccgctgttgagacaagacccaggactgggccggggactgtcccaaagggtttctcgtcataatggctgtggaagggtcaaccattaccagcc

SEQ ID NO: 348464 - DNA, 122 bp, Homo sapiens
actcacacttccctgatcctccagccagatcagcccctcctagctcctagctccctccctcgtggttctgatcccagcatgtgacgagacatttatctgtgcaaagctattgttaatgtctg

SEQ ID NO: 348465 - DNA, 122 bp, Homo sapiens
ttgtgctcggtgcgctgagctccgcggctccgcgagccggttccgtccccttcccgccgccgccatgaagtggatgttcaaggaggaccactcgctgggtaagcacttggtcgtcggcccgg

SEQ ID NO: 348466 - DNA, 122 bp, Homo sapiens
atcttgatgaacataatgaatgagactgcatgcaaatccacagggtaacctaattatatgcggaatgaaagcaatgttgaacatgcaggcgcatgcagtgattttgagcagaacaaattttt

SEQ ID NO: 348467 - DNA, 122 bp, Homo sapiens
ctactgggaggtggaggtgggcgacaagacccactgggcagtgggtgtatgccgggactccgtgagccgaaagggcgagttgactccactccctgagactggctactggcgggtgcggctat

SEQ ID NO: 348468 - DNA, 122 bp, Homo sapiens
agatgtggcggtcccaggggagccccggagcagacccctggattgagaagcagacaggagcggggggagtcagcccggcccccatcccaccatccaccccacccccacccccaacacgcaca

SEQ ID NO: 348469 - DNA, 122 bp, Homo sapiens
cgttcatcgtgcagttcaatgatggaaatgccgccgtggtgtccatgtgggtgtgccgggcgctggaggagaggcggagccagcaggggcccccgtgaggctgccgcagggcactgaaagcc

SEQ ID NO: 348470 - DNA, 122 bp, Homo sapiens
cctgtggaaggagacggcgcgcttctcgccctttccctgccggttggagcagttcacggccgcacagcagatcaccatcgcgggccttggcccagccgcgcagccaggccccggccctagcc

SEQ ID NO: 348471 - DNA, 122 bp, Homo sapiens
gccagggcccgccgtccttcttcgccagcaagtgtgggcttccaaagacagggctgggcccggcctgggcctccctgaaggcagagaaggacgggccctgtggaggcagccccatgtcgggc

SEQ ID NO: 348472 - DNA, 122 bp, Homo sapiens
gcctggggcgggggtgggaacgggggcctggagctgtctttccaaacctcccagccccctcgtcttcccgaaccttctctccacccttcctttcgtgaggtcccgttgcagggggagtcaga

SEQ ID NO: 348473 - DNA, 122 bp, Homo sapiens
ggggctgcgggtaccgggaaggctcagggtaaggcgctcggcggtgcgtgcccggaactccgcagatggatggaatcagaacactggcgttcttaattcagtttgtggtctacagcacgcca

SEQ ID NO: 348474 - DNA, 122 bp, Homo sapiens
gtggcaggcgccgatagtctcagctgtttgggaggctgatgcaggacaattgcttgaacccgggaggtggaggttgcagtgagccgagatcgcaccactgcactccagcctgggtgatagag

SEQ ID NO: 348475 - DNA, 122 bp, Homo sapiens
ccaactaggaagtgatgaggatgcggcgaccccattgacccacccagcaccgatccccaacgcatggtctccagcctgagctgacatcccatctaccccggtttctccagcacccaagccta

SEQ ID NO: 348476 - DNA, 122 bp, Homo sapiens
ggcaagcaggtttggttcctgcccagcaaaggtgagggaggacggaggagactctcccaccgcattcagaactttattcctttatttttgtctcaatcttgtcatagaggagcgcttcactt

SEQ ID NO: 348477 - DNA, 122 bp, Homo sapiens
ggccacgcgggcgggggtggccgggacacctggggccgggagcaggctgtttccatcctccgcagcaaggggaagggggggcgcttaaggtggagctgggagtggcttcggaagtctccatg

SEQ ID NO: 348478 - DNA, 122 bp, Homo sapiens
caggacatcctcggcggctcctggggtttgaagagcaaacgtttttccctgggctcagtgcgttttgtcccaacttcatctgtttctgaaatgttctcacttggcagtgtctagtcaaggag

SEQ ID NO: 348479 - DNA, 122 bp, Homo sapiens
gactatggagctgccgtgaggcctggcgacaggggtctggcccactcaggcaggcagccacgccctcctccgggcgtgatggggtgttcgcccagaggcaggcagcgtggggcaccctgtga

SEQ ID NO: 348480 - DNA, 122 bp, Homo sapiens
ctcggagagtggcagcggcaagggggctgccatggtgacggcggtggcctaccgcttggccgagcagcaccggcagatagaggagaccctggctcatttccacctcaccaaggacatgctgc

SEQ ID NO: 348481 - DNA, 122 bp, Homo sapiens
gaactgagggagaaagttccttgtaggtgggtgggaaaggggtggaactgacaccattgacgcaaaagctgagtaatagccctaagcaaataaatgcctgatgaaggcatgcagaaagcagt

SEQ ID NO: 348482 - DNA, 122 bp, Homo sapiens
tagtaaatatttttggctctgtgggccatattgtctcagtcacaactactcaattccgcccgttatggtaggaaagcagccagagattatatttcaatgagtgggtgtggctgagttccaat

SEQ ID NO: 348483 - DNA, 122 bp, Homo sapiens
ttccgtggttccctagtcccaagccgtctgcttcctgggccctttcattggctccgcccccgtaaaccttgctcgtccactctggaagcgctctcctgactacaggccgcgcccctcgcgtc

SEQ ID NO: 348484 - DNA, 122 bp, Homo sapiens
cccagcaccattccacctggggccatggccattgtcacctggtgctcctccaaatgttcccggagggaccctaggagaggtgaggtctcactgaccccgccagcagcaacagcaagagcccc

SEQ ID NO: 348485 - DNA, 122 bp, Homo sapiens
aaactgcggtttcctctttcccttgcctcccctgaccctatatcctcttcgtgcgctccccggagagcaggtcaggaagggatacaaaccgccttgctgtctaatggagggaggtggcccgt

SEQ ID NO: 348486 - DNA, 122 bp, Homo sapiens
catcccatccctcctcccaccagtggccaaccacagggcatctctggtttacatgacctacggcaactcgaggccattcacagtaaaggccactccagatagtgatgatgacactcacttgc

SEQ ID NO: 348487 - DNA, 122 bp, Homo sapiens
tcagcatgtcactttttttgtcaacatgtttaagttgtgtttaaattggtttcatgcttgcgggcaaatgttaattttatcaaacctaaagctatagggtcagattatagtgtggtgtacag

SEQ ID NO: 348488 - DNA, 122 bp, Homo sapiens
tgcgtacctatgcaagtgcctagctatgaagtcccaggcgtaaagggggatgttctatgccggctgagcgagaaaaagaggaatatgaaacaatctggggaaatggccatacatggtggctg

SEQ ID NO: 348489 - DNA, 122 bp, Homo sapiens
tgctactgtaactgccgagagttactatgaagttagcaaaacattgttacatcagagcagcgttgtcatcataattagactagtgagttagtgaagttttagatgagtattccatccattgc

SEQ ID NO: 348490 - DNA, 122 bp, Homo sapiens
tggagcggctcaagactgtcgctgggtccaagatgcaaggcttgctggagcgcgtgaacacggagatacactttgtcaccaaatgtgcctttcaggtcagccctcaacttaggggacaagtg

SEQ ID NO: 348491 - DNA, 122 bp, Homo sapiens
ctaggtttgtggtggctgcctggtgatgtgacactgccccccacccaagtgtgacttccacgtggtacagtgcttgtttgcagttatttaaggtgcctaggagacagtcttagtttgtttct

SEQ ID NO: 348492 - DNA, 122 bp, Homo sapiens
ggtaagtaaagtatgcatttaatgtatgtgttcatcaggctatacacctttggttcccagcgttggctgtacattgtaatcacctgcggtgataaaaattctgatgcctggtttccactcga

SEQ ID NO: 348493 - DNA, 122 bp, Homo sapiens
tagcacatcttttgaggactctgctcactacaaggcacattccaactccaagtttccatgcggatgttaactttaaaaaattatcccttggtatttgtgaacaagaaagaaagaagcagggg

SEQ ID NO: 348494 - DNA, 122 bp, Homo sapiens
tttattgccgcttcgaggcgcgtgtggtcgggggtttacatattcattaagcagccagctcggagccgcacttcaacaggtcatgagcgcccacggagatgaatcagctactggcaccaacc

SEQ ID NO: 348495 - DNA, 122 bp, Homo sapiens
aggacaggaatactgctttatattatctctatgtcccctgatatggttaggctttgtgtccgcacccaaatctcatcttgaattacaatccccacaatcctcatatgtcaagggagagacca

SEQ ID NO: 348496 - DNA, 122 bp, Homo sapiens
taagaaggaccaaatgccccccagattacacaaggggtccttctcactccaaagtgacaccgccgcagacgcacgccccacaccccgccagcgcccttggcccgcacccgctcctgcgcgca

SEQ ID NO: 348497 - DNA, 122 bp, Homo sapiens
gcacccgggaccaaaccccaatcccagtggctggctccctgaggccgccccgctccgtcccgccccgctgacagcggctgggctggagaaggctctatacggacacacctctggggacgggg

SEQ ID NO: 348498 - DNA, 122 bp, Homo sapiens
agcccctgccagctctgactcaccaacgttggtggggaagaggtcctcgttgttgatctgcgcctcgatccagtccatcagcaggtccatgtacctgggcgcggagagtgccgtgggcttcc

SEQ ID NO: 348499 - DNA, 122 bp, Homo sapiens
tctctgcccagtgcgggtctcgcttcctgacgcaggtgcgccttgggctcccacaggaagcggtcacatccagactcaccaggcctgagatgttggaagatggagaagcctttgccacagga

SEQ ID NO: 348500 - DNA, 122 bp, Homo sapiens
tccaagagaaaccccacagttttaacttaatccaatttcagtggggtgagtagcttggagcgaatgaagaaataaacaagtaacgcttcttgaacactaaaaccagaatgaaacaaggttag

SEQ ID NO: 348501 - DNA, 122 bp, Homo sapiens
tgtagcaaagtggcaacgcagctaagggaacgggctctgtatcccaaatacctgggttcacgcccaggtccaccactagctggctgtgtgatcttgggcagtatcctcactggatggaataa

SEQ ID NO: 348502 - DNA, 122 bp, Homo sapiens
cctcctgttacctcttccctgggccggtgaagggagggtggacgggatggtgtggggccgcgggtccccatgcctggagccaagcctggggcatctgcttgcatgctaggagctccctcccc

SEQ ID NO: 348503 - DNA, 122 bp, Homo sapiens
tctttctagatggcaaaggaaatctaaatcgcttttccctaagagagctgggaactctgacgtttctactcccactccctttttaacagctgctgtttaactggtttcactggctcccatcc

SEQ ID NO: 348504 - DNA, 122 bp, Homo sapiens
tccactgttagactatcagcaattctgtgttttaacttgaaagttgatctaaaatccatccgcttcactctatcacctccatgtccagcttggttcaagccattatcatctctcatttccta

SEQ ID NO: 348505 - DNA, 122 bp, Homo sapiens
cacgggctctggaaagaaagccttggtctctctgcggaggaggagaggaactcgggcccccgccccgccccagggcctccaggaagcagcctgcaaactcggcgacccctgggagccgtggt

SEQ ID NO: 348506 - DNA, 122 bp, Homo sapiens
tccaattcaaaatattttctgaaacatatgtgcacctgtgcacagggtcatagacaagatcgtgcactgtgacattgtcacaacacagctggaaacacctgactgtctgtcagtgggggagt

SEQ ID NO: 348507 - DNA, 122 bp, Homo sapiens
cccgggcgcgtcagcctccgaaggcggaggcgggcaggaggctgggcaggggcgtgtgcgcgtgcgggtgcgcgccggccctgcgagcgccccctaggcgtgcgtcggcgtcctgggggcgt

SEQ ID NO: 348508 - DNA, 122 bp, Homo sapiens
cagatttccccacagctgagtctcactgtgtcctgggagaggccttcccaaaccacctgacggcccctgctcaccctccttggaggccctgggcactcatccaagcactcatcgcctgagcg

SEQ ID NO: 348509 - DNA, 122 bp, Homo sapiens
agctctttccttccctggctggtttcctggcttcattcctttagcttaagtcattattcccgtaacatgtctactggctccttcacttattacctcagtctccttctgcacaaaatgacaat

SEQ ID NO: 348510 - DNA, 122 bp, Homo sapiens
caggcccagcccctcctggccttcaggtgacctcagctgcccggctggccccaactccaccgcacaacgcagactgcgggtccccaggcctggacccctggccccgtcccgcccgcgcatgt

SEQ ID NO: 348511 - DNA, 122 bp, Homo sapiens
agagagagcgcaatctgtctatgacttccagccaatagctacacttcttttctcagccctcgtccactgttcttttttaaccaatcagaaacgtttttcaaacgtttgccctccccgctaag

SEQ ID NO: 348512 - DNA, 122 bp, Homo sapiens
ttcggtccgggacaccaggactctgcttggaggcctgctgttgcctaaaaaccccaagcgcgggcctcttcaaggccccaggttcgagatccgaaccctccagtaatgtcctcagactcctc

SEQ ID NO: 348513 - DNA, 122 bp, Homo sapiens
atatattcaaaattctccttttccctcttctccgggaaagaaaaggctaagctccactcccgccggttgctcccctaggggaagggaaaggagaaagacagcaaaaacagcaagtgcgacac

SEQ ID NO: 348514 - DNA, 122 bp, Homo sapiens
tttggtgtgcattttcctgatgattagtgatgttgagcactttctcatatatgtgttggtcgtttgtatgtcttcttaggaaaaatatctattcgggtgttttgcccatttttaaattgggt

SEQ ID NO: 348515 - DNA, 122 bp, Homo sapiens
gacactcgggaggcaggagggctggaacagaggcgagagttgcatgccccttccctcccgcggtgccccactggccccgcaagttggcactggattctgctggagccgtcgaagctccctat

SEQ ID NO: 348516 - DNA, 122 bp, Homo sapiens
tgtcgaagagccatctccagttccacccagttcatcttcatcagaacatctatgagtcgtcgtctctgcagtccatttgtttgcccgcttgggaacagcaagctccttaagggcaggactac

SEQ ID NO: 348517 - DNA, 122 bp, Homo sapiens
actgagcatgagggaggagcctgcctcaggttaccaaggcggaaagacaggccttgggtgcgaggtgaaggggcttcctgggaagccctccagcccctctcctttgccttgcttccgcaatg

SEQ ID NO: 348518 - DNA, 122 bp, Homo sapiens
attattatccccatttacacataagggaacagaagcattgaaaagttaagtgagttgtcccgggtcacacagcttctaagtgctggagcaaatatttcagccaggattcataggacaatggc

SEQ ID NO: 348519 - DNA, 122 bp, Homo sapiens
aggaaaggtggagagatctgtgagcagctgcgagctctgggtgcctccctggactgggatcgagagtgttttaccatggatgttgtgagtgttctgtgccttggtccctgtgagtgatgggc

SEQ ID NO: 348520 - DNA, 122 bp, Homo sapiens
tcactgattggtcgggctcctggtaaacaaggaccgggcagccaatgggagggatgtgcacgagggcagcacgagcctccgggccagcgctcgcgtggctcttctggcccgggctactatat

SEQ ID NO: 348521 - DNA, 122 bp, Homo sapiens
caagggccatttctgctgccccagagcaaaccttcgcacacaagctgagtgccttggaaacgcactgcagaggggcgggtgctgtcctggcactgactcagcttttcacagcgcaaggccga

SEQ ID NO: 348522 - DNA, 122 bp, Homo sapiens
gcaacacgcgtcgcaaggtcacacgtaactttgcggcgaagcaaacagaacgtgcgcaagcgcggtgagatctagggcgggcccttgagagggcttcatgaatgttctccttgaccaatccc

SEQ ID NO: 348523 - DNA, 122 bp, Homo sapiens
cgcaagtctgttcccggtttccttgacctgggcagttcctgggaccaaggggcagcccctcgcaggccgggtttcgaccgccccagggcacccaccgatcgcactcacttgggcgtgtgggc

SEQ ID NO: 348524 - DNA, 122 bp, Homo sapiens
tatgatgaatttgctcataacaggtagaattactagcaagaagggctcaagaaacccagtcgcatagctgtgacataactattgcagttacatagttagagttcaagctgagtaaaacacgt

SEQ ID NO: 348525 - DNA, 122 bp, Homo sapiens
ccctgtcctaggtgcttgcagagcttatgttcttgcagaggacacagacaatgaatattacgcctaataaaagtaaattatataggacattagaaggtgataaatgctgtgaaaaaagcata

SEQ ID NO: 348526 - DNA, 122 bp, Homo sapiens
gcagctggccatgcacaggcagaggctctgggtcagtgcaggaagcagagtcacagccagcgccttggggtggggatgaaaggagatgacctggtggctgcgtgacagccactgtaggactt

SEQ ID NO: 348527 - DNA, 122 bp, Homo sapiens
ccccaggcctgcccctcacctcagggccatacccacagcgccctgatggaggaaccagaccgcaggctgtgccaccattaaacaagagcggctgtggccccatgctgtgcttcttggggtgg

SEQ ID NO: 348528 - DNA, 122 bp, Homo sapiens
tggaatgtcttggaaactctttcatctcaaccaagaagggttgcacaaggctgggataggcgtttaaaaattgttctttgctaatgacaatcctgggtgctctctctctctctctctctccc

SEQ ID NO: 348529 - DNA, 122 bp, Homo sapiens
cactctttttggggaatatgcaagtggatattaggccagcttggaggatttcgttggaaacgggaatccatataaaaagcagacagcagcattgtcagaaacttctttgtcatgtttgcatt

SEQ ID NO: 348530 - DNA, 122 bp, Homo sapiens
agtggcaggccttacccggagactacaaggaaccgcccgtgtgagccagtggaagactcgcgtccccaggcaaaatataagtcctgggttaatagtctgaagtctgtcattaagcaataggt

SEQ ID NO: 348531 - DNA, 122 bp, Homo sapiens
cattcatgaaaccggggcctggtgtgtctgtgctctgggacacgggtggcaaaggttcctcggctctacgcagacccgacgggcccgggcacggaggcggatcgcccgggacaaaccgacac

SEQ ID NO: 348532 - DNA, 122 bp, Homo sapiens
tccacactctacaggcacgctaggtttcaacgaataagcaaactcactgtggacagtgagcgccagggttctcaacacctgctaaggttataagcaatgggggaggcgagaaaccctgctgg

SEQ ID NO: 348533 - DNA, 122 bp, Homo sapiens
caaccttccttctctcttctttggctgttgtaattatctggggtttgtactgtacatatccggggtgtgtgtgtgtgggctgggggcaacccttctgtacagagcttcctggccccctcccc

SEQ ID NO: 348534 - DNA, 122 bp, Homo sapiens
gttgtcgctcaaaaaatgtctcatacaccttcgagaacgaatcaagtccctgtggattctcgagtataaacggagctggtgacgaggcctgacacacggtcacacctcaattcgcgcgtggc

SEQ ID NO: 348535 - DNA, 122 bp, Homo sapiens
gagccggctcccgggggccacgcaggaagcccctctccgagcgaggccgggcccccgggccgggaagctgcttcctgccagatgaagttcacacagctccaagaacaacagcccgttcagga

SEQ ID NO: 348536 - DNA, 122 bp, Homo sapiens
gcagtgacagctccgcgccgccagccggccgcgggcctgggaagccgccggtgccgggcgcgctctcggcctttcccacccaccaggcagggcgttcccgccagccggcttcctgcagccga

SEQ ID NO: 348537 - DNA, 122 bp, Homo sapiens
atcagggtgctgagcaggagtcccgtctcgaggatggggcacccacctgctaacccgtcccgccctctgtctccagtctgtagatggacggcagatccgagtagaccaggcaggcaagtcgt

SEQ ID NO: 348538 - DNA, 122 bp, Homo sapiens
gagaaatggaggcccacatctgttgtgttcactgctgtaatcccagcaagcagcatggtgcggcaccttcacagggcctctggctccagatcgttggcacacagtaagtgtttcttttttta

SEQ ID NO: 348539 - DNA, 122 bp, Homo sapiens
aagacaaaaacatgaaaatgtcattggatttcacatcatggccattgttggtaaccttgacgagggtaatttcaatcaagagctatgcacaggggccaaaatggcttcgtgctttctgattt

SEQ ID NO: 348540 - DNA, 122 bp, Homo sapiens
tttccacaactgaggccacctggtattcccaaagagaacagaaatttcgttcaagctttacgggaagcagataaaaattaaaagatgtgagggatcagtgctccaggaacatgggcccataa

SEQ ID NO: 348541 - DNA, 122 bp, Homo sapiens
ccgctccgccctcccccggcccctgcccggcgcccccagcggcctcggcctccggcgccacgtgacgcgcgcccaccgtgtcccgaacctcccgccccgggcagccccctcgcggacgctct

SEQ ID NO: 348542 - DNA, 122 bp, Homo sapiens
taagcttgggagatggagccttcaatgagcctagatcgagccacttcactccagccaaggcgcaagagtgagacactgtttcaaaacaacgacaacaacaacaacaacatcagcaacaaaaa

SEQ ID NO: 348543 - DNA, 122 bp, Homo sapiens
gagccattttaatctctcttcaaaggggccagttactattgtatcaccgcaagaatgcatcgtaatgccagtggtccttaccacactaaactgggattgcttttcatagagagcctccctag

SEQ ID NO: 348544 - DNA, 122 bp, Homo sapiens
ccgcccgcccgggaacctcagcccaagatctctgccgctgtctgtgacgcccccgcagcccgccgctcattggcctaggccgccctgactgacggctcagcgccgcctcccattggccctcc

SEQ ID NO: 348545 - DNA, 122 bp, Homo sapiens
aaaagatcacgggataccgggagcactaaactggaagtgacacaaaaccacagcagaatccgctcacacctgccgaggttcctgggggatgatctttgtgtaaaggatcctggtgccgcagt

SEQ ID NO: 348546 - DNA, 122 bp, Homo sapiens
ggcccggaacagcgccaggtgacttcgagagctggggtcaccgcggaaaagaagccattgcgccccacagctacgtgaagtgggaagggccggggttcgttggggcgagagaggtgcccttc

SEQ ID NO: 348547 - DNA, 122 bp, Homo sapiens
tctcattttggattgtgtcatagatggtgctgtagtcttcgtcattcatgcttattgatccgagagatctgtttacagggagacctgagtagatctgaaatgaatgaagggacagaggatgc

SEQ ID NO: 348548 - DNA, 122 bp, Homo sapiens
tgaactcctggcctcaagtgatcctcctgccttggattcccaaagtgttgggatgaccggcgagagccactgtgcccagcctagggctatcatttcttgaaaagtagttgatagtttcttta

SEQ ID NO: 348549 - DNA, 122 bp, Homo sapiens
caaaaaaagacattttcttccaaacaagaggtgaccaaacgggcaagggagacctcctcccgggcatgcagagcgcagcgattctgtgcccagggagccggagggctggggctgggagatcc

SEQ ID NO: 348550 - DNA, 122 bp, Homo sapiens
cccatgccctggacatggcaggggcgtgtccagcccagatcaaggatcagttcaggcaggcgacagtgaccgtggtcaccatggcgatgtggtgcccacggtcagaggtggcattggggaag

SEQ ID NO: 348551 - DNA, 122 bp, Homo sapiens
ttccattaaaatgcaaatcgggcccgctgagaaaacaagtgacacaaaaagtgggcgccgcgcggccgccgcccgcgatggcgccgatggctgatgccgcgattacgccggcgggggcggcc

SEQ ID NO: 348552 - DNA, 122 bp, Homo sapiens
gccacagagaaccagaaatgaacagaacacactttaacctttaagaagtgcagttttgtacgggggttggctgaagaaagacaaaaatcttcactcccttccagagccaaaagagccaaaat

SEQ ID NO: 348553 - DNA, 122 bp, Homo sapiens
cgggattctcgcctggcgcggctggggaaggtgaacagtgtggcccgccatgttcttctccgcggcgctccgggcccgggcggctggcctcaccgcccactgggtaaggaggctcaagctga

SEQ ID NO: 348554 - DNA, 122 bp, Homo sapiens
gatgatggtgcctcaggacaggatagtaacacttaggaagacagagtatagagtgatagacgctggcccatgggtagatgtggtcatgggagtctgcggagagtctcttctgattgcttcta

SEQ ID NO: 348555 - DNA, 122 bp, Homo sapiens
aaccgacaacacagattcttaagccctgcttggagcactgctctgagctggcattagaaccgaacctagctgtactaagtataaaggcaaagtagttatgacactgttggcagtgaaattat

SEQ ID NO: 348556 - DNA, 122 bp, Homo sapiens
ttcaagaaagtatagacagccatgtagaaacacaattggaaaaaagggtctgatctaatgcgaatagacagaatggggaaacccagcaaggcctgtgtgtccagacgcttcttgacctctct

SEQ ID NO: 348557 - DNA, 122 bp, Homo sapiens
attacaaaaacacttacggctcacctactattcgcaccacaaaagcaccagaggaaagcgcgaacgcagtcccccactaccacaaattatgcagtcgagtttcccacgtttggggaaatcgc

SEQ ID NO: 348558 - DNA, 122 bp, Homo sapiens
acgggactgcctgaggccagaagataggttctaggtctcagtccacctggtgctggacgtcgaggaacccaaaactgtccactggaggcgccctgacgctttggtcaacgagggctgcttct

SEQ ID NO: 348559 - DNA, 122 bp, Homo sapiens
ctttgtgtggagcgtgcacgcgctcccgtgtttcctttgggtggagcgtgcacgcgctcccgtgtttcctttgtgtggagcgtgcacgccctcccatgtttcctttgggtcttccggtttcc

SEQ ID NO: 348560 - DNA, 122 bp, Homo sapiens
gcctctgaaaccccccaaaagaacaaaatagtaattaaaagccacaaaattgtgctagtgcgcaccatctgaagcaccctttcctaaagacataacatgtcgctgaaagaacttgttaaaac

SEQ ID NO: 348561 - DNA, 122 bp, Homo sapiens
taatcagacacatgacaaatttctccttgctcttgagaatacaataagaagagcccaaagcgtgttggatacctcctcactggctccctttaagagaagtaaattgtgcttcttttgaaaac

SEQ ID NO: 348562 - DNA, 122 bp, Homo sapiens
gggtattgatgtcctggtcctgtatgagaaagggttcagggagctgtaggaagctgccctcggtcactcaggtagggatggatggttctgccctgagcccaggtcccctggttccccagcca

SEQ ID NO: 348563 - DNA, 122 bp, Homo sapiens
ggctcagaaaacctgcgtccatccttcccatctttcctcccatttccgaaaccacggccccggtttcgagtccagaaaaaaaggaataagtagaactcccaaaggacagctttcctggctga

SEQ ID NO: 348564 - DNA, 122 bp, Homo sapiens
aatcggagtgagaaaacattcttgcccaccgaggctcgtcgctgtcctggggcctctccccgctcactcacaattctgtccctgggctgtcgcatccacccaaggtttcagccaccacttaa

SEQ ID NO: 348565 - DNA, 122 bp, Homo sapiens
agccaggctgaactccagctgtggattctgagtctgaacttaaccattgtgctagactcccgccttatgagtgcagtaactgcccagatgacctgtaatcctctaaacgttcaccacaagtt

SEQ ID NO: 348566 - DNA, 122 bp, Homo sapiens
ctctcatggagaggctcatccactccaggcggggcgctgggctccagccggggacaagtccgcagctgctgtgttttgttgtttttttgttgttgtttaacagcagcacataattcaaaagg

SEQ ID NO: 348567 - DNA, 122 bp, Homo sapiens
cgtgtgaattcacgccgggtccccgcgggcgacgcgagcgacgcgacctggactcctatccgggatattgtaaatagatctgcttgtgaggctcacgactgggagcctgtcactctgcccaa

SEQ ID NO: 348568 - DNA, 122 bp, Homo sapiens
ctccctccatgtccctgagcccctgcctgcctgcctggggtttcccccgcttcagggcagcggaaggaaggccagcaggacatgctgtgctgggaaaagccagcaggtctccacttctccct

SEQ ID NO: 348569 - DNA, 122 bp, Homo sapiens
attccaggacttgtactcatttaatcaacaaacgtgaacactgagatattttcctcttgtcggaaatgcccttaagtccaatggacctaatccaatagttcaaccctctgaatcttgctttt

SEQ ID NO: 348570 - DNA, 122 bp, Homo sapiens
gcggagccacgagccgaggccacttcccttccctgaccccctccccccaggatgagtggacgcacatcctgctctgggcagaagggcaggacaggggccctgagtaacggtggcctggggtc

SEQ ID NO: 348571 - DNA, 122 bp, Homo sapiens
ggaaacagtctctcccacacaacagagaggcggcccgtctttctccagaaatgggccctgcgacctcccagagtggggatccctcacaatgggaagacgggacccgcagacttcagacgcaa

SEQ ID NO: 348572 - DNA, 122 bp, Homo sapiens
cgccgcggatgccgccgcccctcccggcccgcggccgcctcggcctccgggcgcgtcaggcgctggtcccgcccctcggcccgcccgcgcaatcgaggctccgcctctctgcgccgcccgga

SEQ ID NO: 348573 - DNA, 122 bp, Homo sapiens
gagagaaccaaagcagtgaggtgtggagcctgccaccatcttaagaagtgagtagtgacacgtggtgaggagaaagacccttgcagaacttctagtcttagcaaactaggttgagaaattcc

SEQ ID NO: 348574 - DNA, 122 bp, Homo sapiens
agcaaggcaagcttcctttctctgtaggaatcattattatccccctttgtcatggcccaccggggagcccattttgcctttagatcccgctggcagaagaccgacgatgaactctgtagaca

SEQ ID NO: 348575 - DNA, 122 bp, Homo sapiens
caatgatggaatcagttcttctccagagggtcagcagtgtcccgtggctctgggtatgggcgagtgtgcatgcatgtgtgggtgcatggggaggcagtgggcatgcagaggtgtgtgggcag

SEQ ID NO: 348576 - DNA, 122 bp, Homo sapiens
gatgagcgtttagtgagcctgctggctgcagagcactatgaaatcatggtacgtagtccccggcacctgtcgttattcctatatcctcctgcaactgtggtttgaaactgcgcattctctag

SEQ ID NO: 348577 - DNA, 122 bp, Homo sapiens
tcttgcttattctttcaaagaaagaccctagaggagggaaatgtgtgacatggggtcagccgtgttttgtgctggtatttgccaccgattaccagtcttaaagtcttatttaatttcacact

SEQ ID NO: 348578 - DNA, 122 bp, Homo sapiens
aatttcagacttgggttctgcccctagggacagctactcctgcaacaactggcctcttcccgccccacttcaggtatgaagccaccaaggctagtccctgacatgtatcagggagtgggtag

SEQ ID NO: 348579 - DNA, 122 bp, Homo sapiens
attaatttgtagtttttgtaagcaagatacagggtcttgcttggtttctcaggctgatctcgatctcctaggattaagtgatcctcccacctcagactcccaaatgttctttattatcgaca

SEQ ID NO: 348580 - DNA, 122 bp, Homo sapiens
gacccagttccgaggactggagaggggataggtaggtctctaatctccttccccacttctcggagcagaaggattaaaaggcccagagctcaggcctaggcttcccatgaagcggaagagac

SEQ ID NO: 348581 - DNA, 122 bp, Homo sapiens
ggaggagctggggcgggggcgggcctaggagctcggggcgggagcgggcgggggccaagccgcgaaggaggaggaaaatcagggggctgggagcggggaggggccggaggtgcaggggcgga

SEQ ID NO: 348582 - DNA, 122 bp, Homo sapiens
accttgtgatctgcccgcctcagcctcccaaagtgctgggattacaggtgtgagccacctcgcctggcctaggcattgctaattttcacaccagtgattgctttgtgatccacgtactcctc

SEQ ID NO: 348583 - DNA, 122 bp, Homo sapiens
ctccacgtccagcccgagagggggcggccgggcccggcacagcgaggcgaggaccgcgagcgcctcctggcaccgaggcccgccggccccccacactccgctcatgccctagacacccaggc

SEQ ID NO: 348584 - DNA, 122 bp, Homo sapiens
acgggagcccgccgcctctaggccaggccgcttgtgctgctctgcgccctccgtttcgcccgccacctgcgcctgccgcccccaccgaccccacgccacgccgccagaatttcctgagtcgc

SEQ ID NO: 348585 - DNA, 122 bp, Homo sapiens
cctttcaggttcctcacaaaatgacagtcaggaagatcagggtgcagacctgatttcccacgaagggctgaaagcagacaaccggagggagagcagcacctgggccaatgaggtagaagaca

SEQ ID NO: 348586 - DNA, 122 bp, Homo sapiens
ccgagggaatatttaaagccaccaggagagcctggcctgcatattgttgtatacaccttgcgaggagactaggatcaaaatgccacccacacacagatgaggatttggaatgtggtctgaac

SEQ ID NO: 348587 - DNA, 122 bp, Homo sapiens
tgccagaaacttcccgtttaacctcagcaaaatacagatcgttttgatctatggcgttaccgcacaaccctgtcaggtcacatcactaaactgcagataacagcgacaaggccgaaaactat

SEQ ID NO: 348588 - DNA, 122 bp, Homo sapiens
gcctcggagagcggctcagcgaaggccctcagctcaggagcctgattaggtgcataaaatcgctgtagccagaagggacctccccgcccccgggccgcgccccgccccgccccctcctctgg

SEQ ID NO: 348589 - DNA, 122 bp, Homo sapiens
ttcatttttaagacagaggagtttctcttggtcacccaggctggccacagtggtgcataccggtaatcccagcactttgagaggccagggtggaaggattgcttgagccccagagtttgaga

SEQ ID NO: 348590 - DNA, 122 bp, Homo sapiens
atctcttttcctccacccatttcccatctgtctagccattcttgctccgctgggctttttcgcgagcctctccccagctgcagccccgcccatctcctggggcgtgaccacctgtccaggcc

SEQ ID NO: 348591 - DNA, 122 bp, Homo sapiens
atccgcccatcttggcctcccaaagtgctgggattacaggcgtgagccaccgcgcccagccgtgcctgtatttttcaaaagaagtgttatatttgggactttcttatttgttttaagttgaa

SEQ ID NO: 348592 - DNA, 122 bp, Homo sapiens
ggagtgcccccgtgggattgtcgcgcaccgtgggtgcacgccaggaatgccatgatccaacgacccctgtgcagaggctgctggaaaggcactttcttcattgggaggacacaggccctgtt

SEQ ID NO: 348593 - DNA, 122 bp, Homo sapiens
aaacaacaagaaagaaactttgatttttctctctgctcctccccaagggccctggggcctcgggccgggtactgaggccgaggaaggggtgcgtcggacaggctcattaccgccaagtgttg

SEQ ID NO: 348594 - DNA, 122 bp, Homo sapiens
acataagaggcgtcccatgtgacaggagaggtggcctggcagaaacgtggaaagggaaaacgcagagaaattctgtcgagaaccaaaacgcctagaccaagcttgtccaacccgaggcccac

SEQ ID NO: 348595 - DNA, 122 bp, Homo sapiens
agcgtctccctgacgcttggaggagcggcgtaaagttccgggacagcgattggtgtagagcgcggtcactcaggcccagaaagtgcttcctgtgccgggggaggtgggtacagggaagtctc

SEQ ID NO: 348596 - DNA, 122 bp, Homo sapiens
tcggctacggagcgtctctgctgtgcaatctcatcggatttgtgtaccccgcatatgcctcgtgagtgcacggctggctgcccacgcggggggttctgggggctccctggcagcccctgacc

SEQ ID NO: 348597 - DNA, 122 bp, Homo sapiens
ggccggcgcgtatggaggcggtgggacgcctgcggcgcgggtgagcctggcaggtggggacgcggcggacccaggccttccgggaccccagccccgccggggaggaggtggcgccctccgga

SEQ ID NO: 348598 - DNA, 122 bp, Homo sapiens
gtccccgcctggccgcaggcatcccgaaccgaccctcgccacgctgcccgtcggattccccgacacgaaccttcgcaacgccgtccgccggaacctgctacagcctgtgcgcgccgggcggc

SEQ ID NO: 348599 - DNA, 122 bp, Homo sapiens
aaaacatataatatttaacttgagaggtgcagtcctcctctacattgagggcaggctcagcgaaggagggcccaagacataaaactaaccaatggcaggaaagcccccatgccccacccaag

SEQ ID NO: 348600 - DNA, 122 bp, Homo sapiens
tttgtggcaagtacattttggaaaagaagggccttgttggaagcccaggttgtggcatcgcgggtggctgcgggccaccctgtccgtctgtgagcatccctgctcgcagatgtggctgcagg

SEQ ID NO: 348601 - DNA, 122 bp, Homo sapiens
tcccaagtacctggccctggaaggcaattgatgctcaatcaatacacattttaataaattcgctagtgaactgaaacaccacctgaaacactgctgcttttagagtttgtggagggagggac

SEQ ID NO: 348602 - DNA, 122 bp, Homo sapiens
gaacgcggcgaggaggcagcgggctcggaccgggcctccgacctggatagcgtggagtggcgcgccatccaggagggcgccaattcaattgtcacgtggctgcaccaggcagcagctgccac

SEQ ID NO: 348603 - DNA, 122 bp, Homo sapiens
ttccaagcttttgaagaagggagcacagcggatgaaaccactccagaaaacgcgcggagtcgggacaaacacacttcccgacctggctcctgactgggacccactgagcctgcggcctctag

SEQ ID NO: 348604 - DNA, 122 bp, Homo sapiens
cccaaactgtaagcacctcacagtagataaggtctttatgttattgtaccccttacaatgcgtggcacaatgtatagataatattaaaaaaaaatgatctgaatacagtccatttgcagtta

SEQ ID NO: 348605 - DNA, 122 bp, Homo sapiens
ttttcgggtttgctctgtcggtaacaggtttcagtgtctgtaaggagactgggacagaggcgatctcatctagaacaccaacaggaagaacacgccattgtcaccctttcgggaagtacgca

SEQ ID NO: 348606 - DNA, 122 bp, Homo sapiens
acacagaagacagaagacatactcagctaaggcagcacccgatacacagaagaaagaagacgtactcagctaaggcagcacccaatacacagaagacagaagacatactcagctgaggcagc

SEQ ID NO: 348607 - DNA, 122 bp, Homo sapiens
aggagcatgtacattcccgtagagtagataccaggcccactggggatcttgttttgtaaacgcgccagccagggacaggaagttgtgatcaaaaggcagctggaaggtctgggtcagatccc

SEQ ID NO: 348608 - DNA, 122 bp, Homo sapiens
tccctgcagcctcaccagaagccaagcagatacctgtgcagcctgcagaaccgccagccacgtaaacctcgttacaaaaacttacccagcctcgggtgttcctttatagtaacacacaatga

SEQ ID NO: 348609 - DNA, 122 bp, Homo sapiens
gagagcccatgggcagagctcaccagccccacctcacagagagggaaactccgaagtggccgtggatttgcccagggtcacccagtgacagacagctcagactcctttcccagctccggcca

SEQ ID NO: 348610 - DNA, 122 bp, Homo sapiens
ggtaaaccttttaaattcagagtgattcaagggcataggcgtcggaattgtgatttcgtgcgtgttttatttaccaggccttcaaatcaaaaaggccaggcaaacacacgttctggggctat

SEQ ID NO: 348611 - DNA, 122 bp, Homo sapiens
ataaaagagatctgggcaggcttttcctcatactgaataattgaaccaaattggctaggacgggaacagattagtggaagaagcactagaatagggataggagacttgtattctgtcactaa

SEQ ID NO: 348612 - DNA, 122 bp, Homo sapiens
taccggcagtggacggtgccccggcccagccacatggactacggcaaccgggccgagggccgcgtggacggcttccacccccgcaggctgctgctcagcggcccccctcaggtgagtgttgc

SEQ ID NO: 348613 - DNA, 122 bp, Homo sapiens
gcccccgctccggacccccaaccctcccagccccaccccgctctcttcttcgtgtccaatcggccgccgagttacaagccactccctgatccgacttggctcccaccgcccggacccccgcc

SEQ ID NO: 348614 - DNA, 122 bp, Homo sapiens
ccccatccgcgccagcgcgtagagcagctcgggggacagcagtgcggggacacccttcagcgccaccatggcccggcagacggggcgggcggggcctaggggcggggcttgggggccggggc

SEQ ID NO: 348615 - DNA, 122 bp, Homo sapiens
ttttgtatactaagtgctgtgtgaacacagaaccacttccagtaaatgcaactgagccgtcgccagcagaaaaagtagaaggaggtggacagacttgtctatgtacaatgaataaaaatacc

SEQ ID NO: 348616 - DNA, 122 bp, Homo sapiens
cacataagattccccactctgttaaaaaaaaatgtgtttatacttggtcccctctgaaggcggacgacacccatacttttgtcccagcccaatttgctggctgggatttttctcatccttta

SEQ ID NO: 348617 - DNA, 122 bp, Homo sapiens
caggggagctggaggtgggagcggggcttaaggaagcttcctggtttcctcgcttaaagtcgcacccgggagggtgcgcagctgcggcccgcgtgtggccagggccgcgctgtttggattgg

SEQ ID NO: 348618 - DNA, 122 bp, Homo sapiens
tggttactgggacggcacactccggccggctttttgtccgcactctacaagttcgcaaggcgcgggaaccccgcctctcgctgcttattggcccgaaagggctatgccgcccctcactgccc

SEQ ID NO: 348619 - DNA, 122 bp, Homo sapiens
gcggcgggtcgggaggagtggaggcccgggtggggcgggcgcgcggggcgggagcagccccggtcgccgcctgggcgcgggcgccctccctgtggagcatgcgggacgtgagcgacgtgtgg

SEQ ID NO: 348620 - DNA, 122 bp, Homo sapiens
tggactacatttcccagaggcacggcgtccggagcgctggactacatttcccagaggcaccgctcccggagcgtagcttcatttccgttagtttgcgagatttggaggcctcgcgtggggag

SEQ ID NO: 348621 - DNA, 122 bp, Homo sapiens
tgactccctcaccctgccctgttgagatttaaaaaaatttcctcttctgggcctcagagccgcctcctacctgaggtttattgctttctctgcaccagcattgagcctctgcagccctttaa

SEQ ID NO: 348622 - DNA, 122 bp, Homo sapiens
ggggtcctaagccagggggtgaagatggtctggctctcagtccccgcctcgcggggggtgcgtcccccctctgcgatggggttcctaagagccagtgggggaaccagggactggctctcagt

SEQ ID NO: 348623 - DNA, 122 bp, Homo sapiens
gagtgtttagtcatattcctcaacaatttcactaatgacctgcacctgacttgaaaggctcggttctctaaaccagcttcatcttcccgttatcaagcctcagttcccaacatttgcaatgc

SEQ ID NO: 348624 - DNA, 122 bp, Homo sapiens
cccggctcaccctacgattggctggccgccccgagctctgtgctgtgattggtcacagcccgtgtccgtcgcgggcgccggggcggatacgaggtgacgcgcagaggcccagctcggggcgg

SEQ ID NO: 348625 - DNA, 122 bp, Homo sapiens
agcatacggggttcagaattggtgaatcccgatgtcacaggatagaggatgagtctcccacggtgtcctcaatagtagtagccagagccgcatccatagccacagccacagaagaagcggga

SEQ ID NO: 348626 - DNA, 122 bp, Homo sapiens
ggggcagcccaacggaaggatgccttgaagatggcaggcagggcagaacacaggctcccacgcctcttgcctgaatcactgcattgttagaaaatataagttaaatgatcctggctgtgcct

SEQ ID NO: 348627 - DNA, 122 bp, Homo sapiens
gcagccagcgccttactcatgttggcggtgacgatgacgaagggccgcaggtacgtccgccgcacgttgcgtgccacgttgctgaagtagccctcgaggcgccggagcagctgtgccgtgcc

SEQ ID NO: 348628 - DNA, 122 bp, Homo sapiens
tttgggatgacctcaaacacttgtgcttggcgagtttatgtctgggtgcctggacacatgcgggaataaacacacacacacacacacacacacacacacacacacacacacacacacacgag

SEQ ID NO: 348629 - DNA, 122 bp, Homo sapiens
gccgacatgatgaaacccctgtctctactaataatacaaaaactttgccaggcattgtggcgcacgcctgtaatcccagctactcgggaggctgaggcaggagaattgcttgaacccaggag

SEQ ID NO: 348630 - DNA, 122 bp, Homo sapiens
cccacttactgggcccgccgcttccctgtccccgcccgctctgggtctctcctcccctttcgccatatacataaacatgccaggttcacagggtccctaagcgctgtggctcccaggctccc

SEQ ID NO: 348631 - DNA, 122 bp, Homo sapiens
aaaactggattgagaaacctggcttgaaaagttgatagcataggcagccgcccccttctgcgctgtcacgccgagccagcgcctgggcctggaaccgggccgcagccccccggcttcgccca

SEQ ID NO: 348632 - DNA, 122 bp, Homo sapiens
tctactgggcgggaagatcagttgagtccagaagttggaggcggcagtaagccaggattgcgccactgcatgtgaacttaatcaagtttcttatgctttgtctcctccccactacagcaggt

SEQ ID NO: 348633 - DNA, 122 bp, Homo sapiens
gtgcaaacctgacatgttcaaatatattcacaatggtaataaggtaggaggaatctgagacgattgcattgtctaaacagtggaattgcaaaatgtttactttccatagatctggtctgatg

SEQ ID NO: 348634 - DNA, 122 bp, Homo sapiens
cataggcaccgcctgcagaggggggatataaccctcacacacagttggccaatgccatcccggcctgccgcactcctggccacccctacaccatgctctctggggccccacagcttcctgca

SEQ ID NO: 348635 - DNA, 122 bp, Homo sapiens
tccgtcctggctgagatggcggcgcccgggatcctgtgtagcggctgcagagggtgccgccgccctaggcgaagtagggccgtcctgagcgaaagaaccgcccccagcaggagcaccaccac

SEQ ID NO: 348636 - DNA, 122 bp, Homo sapiens
tctatgctttgcttaaatgtctccaggtgccttgctcttagcagggacacagtaaacatccgctgcataaatggctcagcattttttttttttgaccttcagataagtttctgttccttcac

SEQ ID NO: 348637 - DNA, 122 bp, Homo sapiens
tccacattaaacaaacatcccttttgcacttgcctgaaatatcaacaaacatcaggactccgtcaaaataatccataaagggtcgctctggggagaaatgtccatagacaatgaggtctggt

SEQ ID NO: 348638 - DNA, 122 bp, Homo sapiens
accccgcaggatcgtggaggtggagcaggacaacaagatgacccccgggaacctgggcatcgtgttcgggcccacgctgcttcggccacggcccaccgaggccaccgtgtccctctcctccc

SEQ ID NO: 348639 - DNA, 122 bp, Homo sapiens
gtcttgggggtggggggacacttcgatgtctagcaggggactgggagaccctaggatgaacggagccgggcgtacctggatggcggtggtggggatgggtggggataaagggtctggaggac

SEQ ID NO: 348640 - DNA, 122 bp, Homo sapiens
catcatggaagggaaggtgaggattctaaactcggccggggtgggggtgtcagcacggtgcgatggacgcaaccccttctcttggggcggagcagagggaacccagtgaggggcttctgtgt

SEQ ID NO: 348641 - DNA, 122 bp, Homo sapiens
ccagagttggaaggcaaggacagctgctacggttcaccctcctacacactgacccgccagcgactccgtgcaagttcatggagaagggaagggaagaaaggaaaggtgtcagctgacttgag

SEQ ID NO: 348642 - DNA, 122 bp, Homo sapiens
agtttttgttctctgtgatgttaatatgccctagggttgaactttggtctcaggagagcccgagtcctatgcttgctttaagcagccaaactaatccacatgccttttttcggaatatgaat

SEQ ID NO: 348643 - DNA, 122 bp, Homo sapiens
gaagaatgaaccagtgctatgtttactagcatgaaaaacccaaaaaacagggttggtgggcgctttggctcacgcctgtaatccagcacttagggaggatgaagcgggaggatcgcttgagc

SEQ ID NO: 348644 - DNA, 122 bp, Homo sapiens
ccgccaagtggagaacaggttggagcggtgcgccgggcttagcggcggttgctggaggaacgggcggagtcgcccagggtcctgccctgcgggggtcgagccgaggcaggcggtgacttccc

SEQ ID NO: 348645 - DNA, 122 bp, Homo sapiens
ctcttcccatactcctctgccattcacctaggtcaaagccacaccatttttcactaggaccgctacagagcctcctaactgcccttctgtgtggctcctctccaatcccctcttcacactgg

SEQ ID NO: 348646 - DNA, 122 bp, Homo sapiens
gcgcctgagggaaaccggctgtctctcgggggtttcgggctggttgggtcctcgtgggtccgagctcctcagaaaagctgggaggcggggtgggcacagcgctccccaggcatttggagggt

SEQ ID NO: 348647 - DNA, 122 bp, Homo sapiens
aggaagacatctaaggggcccctctcctgcccctccttcctcccctcaaatttttcatctcgtgtggagataatgagaagcaaaatgtcttgtcaattcattcacccaatatttatcgagta

SEQ ID NO: 348648 - DNA, 122 bp, Homo sapiens
tcattttcttctcccaaggccttgctcgtgactgggtcaggcttgcctgcaaacccaaggcggcagttcacagctcggagcccgtgtgccgctgtctgttctgtgggcggcaatctgagatg

SEQ ID NO: 348649 - DNA, 122 bp, Homo sapiens
cattggaagcaggggtctcagaaggaaggcgcagatgggaaaggcttttctgggcggtggcgtttcaatgcaaggagggcgcttgaatcactgacagacttcaagttaagggagttttcgtg

SEQ ID NO: 348650 - DNA, 122 bp, Homo sapiens
ggcacacacctatggttcaggattcggtgaatcatcatccactctggcttgatgccatagcggtagaagcgctcctccatcttggcatagagggggtccttgttcttcctcttctcgctctt

SEQ ID NO: 348651 - DNA, 122 bp, Homo sapiens
agacttagagcgaagccaaaggcgcctttcttcacagtttgggaacttactggtagtaaacgccactccatagaagcggtgaccggttaccatagagaccgcgtcggggtgggcggagcgtc

SEQ ID NO: 348652 - DNA, 122 bp, Homo sapiens
ctcccttcccacagtgctttgcacagagcaggcattcacacatacacagaatgggccgggcgcagtggctcacacctgtaatcccagcacttgggaggccgaggcgggcagatcacctgagg

SEQ ID NO: 348653 - DNA, 122 bp, Homo sapiens
taaatcagaagcaatgcttatgggagacaaggccacgctccccaggtctcctgggggcggcggcagcagcaccctcgtcctggctgtggtccacggtgcctggctgcgactaaggctgcaga

SEQ ID NO: 348654 - DNA, 122 bp, Homo sapiens
cgcgcctacgtcatagccaaggggaactgagtggcgctccctccagaggttgtctttccacgtggggcgtgggctcttctgggcattttggtttcctccctttcccacatgcaggaatttag

SEQ ID NO: 348655 - DNA, 122 bp, Homo sapiens
gggagctgcaagggagaatctcatattgtcaaggagccacagaactaattgtgccatctccgtggagaggctctgacagcgaggacctcaggccatgggcagggatcactgtagacgccccc

SEQ ID NO: 348656 - DNA, 122 bp, Homo sapiens
tctgctgggcatccgcctccactgggaagataaatacttgaatgacctggaggacagctacggacagcagtgggtgagtagaagggataaggtaggagctgagaccagtaagagtgagagtg

SEQ ID NO: 348657 - DNA, 122 bp, Homo sapiens
acaggcctgggaggggcaagaagcaccagtttgttttctgggtcagcctgcagcaaagagcgactgccctcaccgacaagctgagcctctctcccagcagcacccccacagtagccagcagg

SEQ ID NO: 348658 - DNA, 122 bp, Homo sapiens
gagtaagtttccaaacctctctgaggctcagtttcttcttctgaaaagtgaggtgatgtccgtgaggtgcttgatgcacaccttgcatgtaataaatgtcactgattgttctcatgtgtagt

SEQ ID NO: 348659 - DNA, 122 bp, Homo sapiens
gaccatggctttaggaatgctgggaatcctttccttccggaggcctggacacccacacatcgtgatggccccagcaaagctccccagcataagttctgactcaggggtctgacttctcccac

SEQ ID NO: 348660 - DNA, 122 bp, Homo sapiens
tgtaatgcctgtctttctttcatcccaccctggtccacagagcatggatggtccccacagcgctgtgtggcctccgagaggctcttgtcctctctggtctcagcctgcccgcatggggagtg

SEQ ID NO: 348661 - DNA, 122 bp, Homo sapiens
cctctccagccgctggaccgtgttccagtccagcatcttcggcgccttcgtggtctacctcgtggtcctgctctccgtagccttcatgtgctggaacatgatgcaggtgctcatgaaaagcc

SEQ ID NO: 348662 - DNA, 122 bp, Homo sapiens
ggtgtagcatctagctaggccacccaggttggagaggtagcctggctgggaaggccttcccgaagcagggtggggccggactgccaaagcctccaccctcccctggccccctctcttcagta

SEQ ID NO: 348663 - DNA, 122 bp, Homo sapiens
gccacggcggcctgggcccgcgcctcccacccctgcagaccccggctccagccccagctgcgaaacccagaaatcctgtcatagaggaaagcaaacccaagcccagtccgcccctgactgct

SEQ ID NO: 348664 - DNA, 122 bp, Homo sapiens
gccacagtggctccgggtgttggggctgtcctttcttccctttgatcttacgcagggtgacggagccaatcacgagaggctcacccctgacgtcacccagtccccagggccagggagggccc

SEQ ID NO: 348665 - DNA, 122 bp, Homo sapiens
gatctaatgcaagcccaggcttcaaagaagacctcctggtggttctgaagttaaactctccgcccctcaacttctcacggggaaacagaagcggctactctaagcatggatgaatacctgta

SEQ ID NO: 348666 - DNA, 122 bp, Homo sapiens
attcatggtgtttccgttcacactgcgatgcttgttcctcataaaccatccatctggcctcgtgctcctcgggggctgaagggcctggatgctgattgttctctggtctgacccgccagctc

SEQ ID NO: 348667 - DNA, 122 bp, Homo sapiens
cgcctgtaatcccaacactttgggaggcctaggcgggtggatcacctgaggtcaggagttcgagaccagcctgaccaatggagaaaggccatttgtactaaaaatacaaaattagctgggtg

SEQ ID NO: 348668 - DNA, 122 bp, Homo sapiens
ccaggggctgccagcagagcagcccaggtgcgtcgccttagggacagagctgccaagtgccgagctggggctgccagagccgagccgggaacggcatttgccagagccgaggcggaagccgg

SEQ ID NO: 348669 - DNA, 122 bp, Homo sapiens
ttgagcttgactttccctccatccatgctggagataaacggaagtcttcgcgcagggggacgattgcaggacggggccgctagggaggagggctcccacacgtggggaatgggggtggagga

SEQ ID NO: 348670 - DNA, 122 bp, Homo sapiens
ggagcaccagcactggtgttcccctgccaggagtgtcttctgggctgctctgctgtctgtcggaggggaggggagcagagggacactccagaccctgggatccagcccagcttatgagcagg

SEQ ID NO: 348671 - DNA, 122 bp, Homo sapiens
cctggtgggttccgccctcatgccccacctctccctgcagcgggacctggacttcaccatcgacctggacttcaagggccagctgtgcgagctgtcctgctccaccgactaccggatgcgct

SEQ ID NO: 348672 - DNA, 122 bp, Homo sapiens
ggcttgatttaaatggcagcctcctgacgtactcctttcactacagtttgaatccaatttcgccccaggaaggatggtcttaaaagtcagaattcagtctatgcattttcttgatactagct

SEQ ID NO: 348673 - DNA, 122 bp, Homo sapiens
ccaagtaacacacaggttaaacaaagaaatgaacagtttttgtagaattgaatgtgtaaacgtatggaacagctgcctacagccagcttcagtatttcagagagctgttgccactttgaaac

SEQ ID NO: 348674 - DNA, 122 bp, Homo sapiens
cctacctggaaggagcagggctctctgggagcatcccgtgtcaccagatgccccaaaagacgggccgcaacaccagcagtcccctgaactgctgagaaacctccctttctccagcctcctgc

SEQ ID NO: 348675 - DNA, 122 bp, Homo sapiens
atgatacatttgtccaagcccataaaatctacaacaggggtccccagcccccccaagtcacggactggtaccagtcagtgtggccttttgggaaccaggctgcactgcagcattcccgcctg

SEQ ID NO: 348676 - DNA, 122 bp, Homo sapiens
cgtccgcggccgctctaccccaacaggccgccaccagcgagagtgcggccataaccatcacgtgaccgcccaccgacaccagcgagagtgcagtcgtaaccgtcacgtgaccgcccaccgtc

SEQ ID NO: 348677 - DNA, 122 bp, Homo sapiens
ccgcgaacacatacatacaagcaggcgcgcccaaacgccggcagcacacaggcgcgcacgcgcttttcaggactcaggaaatgcgctttctgctccccgcgcccggtagagctaatgcaggg

SEQ ID NO: 348678 - DNA, 122 bp, Homo sapiens
aggagtgccacctcaactggtgccccgtgtgaggaaccatgtgaggaaccgtgtgaggaacgttaggggtctgcagaaacagactccccgcagatagagcccctcgtggggcaagctgcgaa

SEQ ID NO: 348679 - DNA, 122 bp, Homo sapiens
gcagcttgtctgctgcagcttaaattccagcctcacaaatattccagctgggaagggctgcggacagacaggcaggcagaggatggccggtagccagctgagggtgcagagcaagccctggt

SEQ ID NO: 348680 - DNA, 122 bp, Homo sapiens
agtgatcctccttccttggcctcccaaaatgcagggattgcaggcgtgagccatcatgcccgatgaagctgacacttttctaagtcgttgtggataaccacaggtgaaattcttgtaaaaat

SEQ ID NO: 348681 - DNA, 122 bp, Homo sapiens
gccgcggttctaggaacttgacgtgatggggcttcctgaggagcgggtccggagcggcagcgggagccggggccaggaggaagctggagccggaggccgggcgcggagttggtctccgccgc

SEQ ID NO: 348682 - DNA, 122 bp, Homo sapiens
gcccctgggaggatcctgtccaccggtgtggcttgggcacagtctctgggtggctggggccgctggcccgcccttcctccaggaagagagacccgctggcggggagtccccggcactgccaa

SEQ ID NO: 348683 - DNA, 122 bp, Homo sapiens
ggatatgcaacccgctaatgacccagcttgtaaaccttccaggggggtttgcagaaaacccgttaataaacttcaacttcatccatgtgaccctgagaccccacttctgagggcagacagaa

SEQ ID NO: 348684 - DNA, 122 bp, Homo sapiens
aagtattaaagaggtctgtagaaggaggaaagcacagggaaggggtacccagtcctagctcgtaggcaaggaagaagccataggggaagacttcaagaagagaagcaaccagccaagcaaag

SEQ ID NO: 348685 - DNA, 122 bp, Homo sapiens
tttggcagaggccattcaagtttgttttactcgttcagcctgtatttgtggggctcctaccgcgcccgggctgtccggggggtgcaccgtgaacgcagcgggctccggcccgggcgcgggcg

SEQ ID NO: 348686 - DNA, 122 bp, Homo sapiens
tgcaatgcgactgcaaaaaaggcaaagacctcagactctccttccaagggacctgtggttcgtgctgcgaagatgcttccacttaaagcatgagaaatggggtgccgggatgtggggtgtgg

SEQ ID NO: 348687 - DNA, 122 bp, Homo sapiens
gctgacccatggccacggctcccaggctctcgtctgcgcccccccgcctcccttctcgtgcgccaatcccacacttggagctgagcttttcacagccagcttttaggaacagccagcactgt

SEQ ID NO: 348688 - DNA, 122 bp, Homo sapiens
cctcggtgcccggcagcgggtgaaccacgaaatggatggacgtcatggtgctttccttctcgtcctccactcgagggcggccccctcccgctctcgcccgccccccagccctctacccctcc

SEQ ID NO: 348689 - DNA, 122 bp, Homo sapiens
ggcccctgccccgcccggcccttaaggctgcggcggccaggccgggacactcccccggggcggggctgtcccatcgctgctcctgccccgcccggtgacccctgccctccccgcccggctcc

SEQ ID NO: 348690 - DNA, 122 bp, Homo sapiens
ggttcagaagagtactggcgttggcacttcagaggctggactagagaaggcgcgttcagccgacggtgcgggatacactgccgaggaagtccgcggcgaggggcgtggttggggggtgtgta

SEQ ID NO: 348691 - DNA, 122 bp, Homo sapiens
tgccaacaaagacctctttgtgctgcagcccatgtagttctgtgtctggctttggagtgacgagggctgggacctgttctcacctgggcatgtcactgctgcaggaagacggctgtctgagc

SEQ ID NO: 348692 - DNA, 122 bp, Homo sapiens
gtatactttctccacgttgagctgttgagctgtcagtggaatcataacacgtgcaagcttcgggggccggctttttcccacagcatgggtccctggacatacgtgcaggatgtcctgtcgcc

SEQ ID NO: 348693 - DNA, 122 bp, Homo sapiens
aaatccaagttgcagtgtaagttgagccaggggaggtggccacagttggctcccttaggccgcccacctcgtggggtcaccaaggggttacttcggggcagaaaggtgcggctgtgggtcgc

SEQ ID NO: 348694 - DNA, 122 bp, Homo sapiens
actgcagatctcatctcaaagccagagctggcctcaaactgcttttccaagcctggactgcgagggctgccgacccgggcccaccccgcacaggcgctcagaatgttcgatacgtgcgcctc

SEQ ID NO: 348695 - DNA, 122 bp, Homo sapiens
ttccccacaaatcaaatcagtttgcgcaggcccctgtgttcttcaaggtccaggtttcagcgccaccgtccccaggggtcttgcaatcccctaaaacaacagcagctcattccagtaaagaa

SEQ ID NO: 348696 - DNA, 122 bp, Homo sapiens
ctcgatctcctgacctcgtgatccgcccgcctcggcctcccaaagtgctggggttacaggcgtgagccactgcacctggcctaattttaggatttttattagaaactgggtttcaccgtgtt

SEQ ID NO: 348697 - DNA, 122 bp, Homo sapiens
atgaacgtatctgaagttttcagggctgatactgatgtgaggcaacccatgcaggcaacccggaggaactgtgtccctcactctgagacagtgagaacggactgagccggaaagctgatggc

SEQ ID NO: 348698 - DNA, 122 bp, Homo sapiens
cctaatcaagacagtgactcggtggtactaagtggcacagactcagaactgcatatacctcgagtatgtgaattctgtcaagcagttttcccaccatccattacatccaggggggatttcct

SEQ ID NO: 348699 - DNA, 122 bp, Homo sapiens
cctggacctctctggagcgttggctggggagccgcagccacagccttgacccagggcctccgaagccgcggcttaaacggaggttgcaccatcaccggctgcggggccgggcgtgctgggcc

SEQ ID NO: 348700 - DNA, 122 bp, Homo sapiens
agtgggagccgcgccgcagcctttcccagagcagatggtttcagattcccagtacccccacgagcacagaaacatccttacctcgcagtagacgcagcaaagaaagaacgtctgtcgtcatt

SEQ ID NO: 348701 - DNA, 122 bp, Homo sapiens
cttcccaaggtcaggacggaggtggggctgggctccagcctgcatgggggcctggagggccgggccgtgcgttgtcttgtggaagcagctgtgcggcgctgtggaaaacgtgacagtttctc

SEQ ID NO: 348702 - DNA, 122 bp, Homo sapiens
aagccccggcggaaaaggccgtacccggcaggctggcgggcgggcaggcatgcgagccggcgttctacttcctagaagcaccgctggggccaaaatggcgtctgcccacgaccctcaaagga

SEQ ID NO: 348703 - DNA, 122 bp, Homo sapiens
ccgtgccccggggtatctatagtgctaggcttctgagacacgtggaggcgcttaggcccgcggagcaggcccctgggctgtgtttgggagattctggaaaaacagactttctcccttttcct

SEQ ID NO: 348704 - DNA, 122 bp, Homo sapiens
cctgccgcttggcagagtgatccactaccgattactgatgaaagggcccgggatgggcagcgcgaaatcttgccgagaggcgcagctcgcatcaccagaccccgcacctcgccggccctccg

SEQ ID NO: 348705 - DNA, 122 bp, Homo sapiens
ggcgggagcccctgggcggttttcgcctacagacgctaccactgtgggagtgtgtgtgggcggaacggccccggagcagaacaattgcgcccctccccctgccacggcccctgagctgaagg

SEQ ID NO: 348706 - DNA, 122 bp, Homo sapiens
tctataattcaaatcaagtaaacatgcttcttgtcccaggttaacttgtgctgcctcagtcgctgtttaaacatttttatacgcactgttaacctgcctgcccattaccctattacttttaa

SEQ ID NO: 348707 - DNA, 122 bp, Homo sapiens
atccagtcaaaagactgttgggcctctaccatgagctatgagggtaataaaaaagatctacgcctttgagggatttttcttagtatttgcaggtaaaagtaaaatttctgcttgtctgcatt

SEQ ID NO: 348708 - DNA, 122 bp, Homo sapiens
aaaagagtcgagctcagtgtggttaggaaaaacattgcaacagcagtttcaggctacttccgttttctttcttatttttatctttagaagctcagtatattaaaaaaaaaaaaaaagaaatg

SEQ ID NO: 348709 - DNA, 122 bp, Homo sapiens
gacactttcagagtagacgtttccaagagatgattaaggacacacatccgcgcgtctgtacgtgcaaactcgagcaatacaacataaagcactgaagatggcgccactcaaaagcaactaga

SEQ ID NO: 348710 - DNA, 122 bp, Homo sapiens
gaccacaacagacccagttagggggctgtatggctcaggtaccctggctcgaaaatctcccgtgatgactggatgagggacagaagtaggaccctgggtaccacagttaagaaaaactgcag

SEQ ID NO: 348711 - DNA, 122 bp, Homo sapiens
ctagagcagttctagggttcgtagtcattctctctgagtcatggaaaactgcccaggaggcgagtcccacctaagagagtatgtgtagcactggcacggcctgctgccttgcaaatgaccac

SEQ ID NO: 348712 - DNA, 122 bp, Homo sapiens
aatcacgcgtgtgtttagggctcaggaaagcgaaggagaagtgggcaagggtggcgggcccgctccgcaccgcccagcgctccggacttcacttctggtcccgctcctgggcggccacgaag

SEQ ID NO: 348713 - DNA, 122 bp, Homo sapiens
gatccgtggcatcacttccctgacatggtatttcctggttggaacctctggactcttggccgtggctgctttctagacaacaacaagcagaggcaatggctgcccatgactccctgtcatgg

SEQ ID NO: 348714 - DNA, 122 bp, Homo sapiens
cacagtgtggcaagctggaaagcccctggcacttccagttttcagcagcttccagcttttcgtctgcttatcccacagagcactgggaaatgtggtgaacaacctataggaaaaactggtaa

SEQ ID NO: 348715 - DNA, 122 bp, Homo sapiens
attaaatgaaaatactgtgccagtctcaaacctaactgtgcatgataatcatctctgtaccgttttatttatttcgaaatacagaaatgtaggtcctacttcagacttacctaatcataatc

SEQ ID NO: 348716 - DNA, 122 bp, Homo sapiens
gcgcgctccagccggtgtaggcgaggcagcgagctatgcccgcggcatggcccggcgctgcggccccgtggcgctgctccttggcttcggcctcctccggctgtgctcaggtaagggaaaga

SEQ ID NO: 348717 - DNA, 122 bp, Homo sapiens
ccctggatacaagtgataaggccccaaacactccaaggagaccgcacagatgaaacccggcgctgctcgctcaggaggcgagatatttatagaatccaaatatcagcattttctccccattt

SEQ ID NO: 348718 - DNA, 122 bp, Homo sapiens
tatgtatgtgtgatagacttcgctgcccctactttctctccttataagctaaaggcaaaacgagaccgctaaatacctttgacacaaagtgtggtttttttctgatgcctcctttacctccg

SEQ ID NO: 348719 - DNA, 122 bp, Homo sapiens
ggccgttatccatttgtgttgttcgccagctaggcctggcctcgtcccgcttcgctcggtcggtctcgcgcgcccccatagccttgctagagggttagcgttagccttaagtgtgcgaatcc

SEQ ID NO: 348720 - DNA, 122 bp, Homo sapiens
accaagagcggcagctaaagcggagccgggagtggcccgcgagagtaggcgcgtggagggcgctcggccatctttgatcctgaccaggcgacttcgtcgcctgcggatcacggaagtggctg

SEQ ID NO: 348721 - DNA, 122 bp, Homo sapiens
gtttggcagattctatattcccacggaaaggccaactaaacagtcattacgctttataggcgtgcctgtgtgtccttcgttattttggaagtatcaagcagggcctagaagcatggtatagt

SEQ ID NO: 348722 - DNA, 122 bp, Homo sapiens
gaatcgctcataaagacgaagagttcacaataaaggaaatggagatgctgcgggccgccccggtacactgacaaaccgattcttcacagtttgctgcagccagaggcagagggcaggctctg

SEQ ID NO: 348723 - DNA, 122 bp, Homo sapiens
cctctacctgaggttgtccaacgcggctccgtggagggccccggtacgccggacggaccccggcgttggctcgcagacttcctgcgttaacccccggggccctcagtcacgactcccagccc

SEQ ID NO: 348724 - DNA, 122 bp, Homo sapiens
ggtggggggtggattcaggctgtgagagcagctcacgttcatgtgtgtctgggctcctctcggcctctcagcaggccatgagcctctccggggactgcagtgactaatgtgtattttatgag

SEQ ID NO: 348725 - DNA, 122 bp, Homo sapiens
tgaccagtgtctgtgctgccagggagccctgggaggtggccattcagaggagggcagcggcgggggaaggtgcccacaggccaccaaaggccacagcaggcgcaagggcttggggccaggag

SEQ ID NO: 348726 - DNA, 122 bp, Homo sapiens
tggcataggcagcagctagcggagagaggcacaggctggctggctggtccccacatggtacgtgatggacactgagcttgctgagcatcctgcagttcagagctggcactctctagacctga

SEQ ID NO: 348727 - DNA, 122 bp, Homo sapiens
atggggatgagatgtaattgagatttgagggacagcctgaggccaaagaatggagtcagacgaataggatatacagtgctcacacctagtctcatgctaaatgaggaaggctggagctagaa

SEQ ID NO: 348728 - DNA, 122 bp, Homo sapiens
ataagggccttggctgctgtggggtgtgttcgctgcggtggactgggacaccttcgcgtacgtgcccataggcaccttgcggtgcagattccatattaatcaggtgcaaggccccggagcac

SEQ ID NO: 348729 - DNA, 122 bp, Homo sapiens
tcagagtggagctgaggaagaggactgtgtcaccggggcagttgctgatgcccatggccacgccaggagcctggtctcatgagtctccttgtctctgagcctctcctacactccaccatggc

SEQ ID NO: 348730 - DNA, 122 bp, Homo sapiens
cacaccccagcttttgggctctaggcctcagaaggtcacttcctcccaagtagccagagccggggcctcctgggtctgggcaattctaccatagcttattcctgggccagaggaaacccctc

SEQ ID NO: 348731 - DNA, 122 bp, Homo sapiens
gtggagtctcatctgcgtgtgcctcacttgcaccccagatgcaggaccctggaaagtagccgtctctgggttttctactccagggataacatgacctgctggattaatgtgctgaaggacat

SEQ ID NO: 348732 - DNA, 122 bp, Homo sapiens
agactttgaatttctagcctattgcttgctctgccaggttaccgtccacgccgtcaggaacggatggctagctgcctcatgtgattgagtgtgaatgtacttttcttgctcccgattcacca

SEQ ID NO: 348733 - DNA, 122 bp, Homo sapiens
ggctcgtaagcgttccctcgggccgcgagagtgaagagcacaagaaaatggaacccagggcgcaccaagcagccttaccttgatctgggcgaccgtttcctggccggtcacctcgaaggtgt

SEQ ID NO: 348734 - DNA, 122 bp, Homo sapiens
gcctctgccaaagattgctgtaaacacggaataaagatttcattgtgggttggtgtgactcgaataattagacagttaattgttcattctgatctggtggtgctgccatcagtagtgcaggg

SEQ ID NO: 348735 - DNA, 122 bp, Homo sapiens
aggccccagatgtgcaggcacctgcgttccatccacaggtttgggccccggctggcctgacgcactgggtggacatgggccgggtttccgtgacccacaggcaactttggcacagacgggct

SEQ ID NO: 348736 - DNA, 122 bp, Homo sapiens
gcattagaggacaaggggggtgcacaggatgtggctccccatctgtctcccaccaatctccgccactcacacctccgcccgctcccagacgtccaagaatgtgaagcacgtggatgcccgta

SEQ ID NO: 348737 - DNA, 122 bp, Homo sapiens
gtacctgcggttcgttgcgcctggaattttgtcccctgcgcggatgattctgggaaatgtcgatcggctgtgggcggcgcactgggtccgccccgctgtagcctcaggcctgacggcgactc

SEQ ID NO: 348738 - DNA, 122 bp, Homo sapiens
ggaaagtactgaatggcagagttactaatgacttctatcaaatcaccttttgctgactcccgtgttagtcctggatagcgtccttggcacacttgatttcagattttgacaggtgataaaag

SEQ ID NO: 348739 - DNA, 122 bp, Homo sapiens
ttagagcaccggtgtggatgcgcttggccccgagggggccgcgccctgccccagtgcgtgcgcctcctgccccagcagggacccgccctcaccaagtggcctccagtagcccctgtgtccct

SEQ ID NO: 348740 - DNA, 122 bp, Homo sapiens
agtcaatctatctccccgaaagcctacttaaactcataagaatctgcacattctttctaccgaactaataataatagctacaatgtattgagaacttactatgtagtaaatcctactacatt

SEQ ID NO: 348741 - DNA, 122 bp, Homo sapiens
ctagtcccttccctgagttttcgttaactgaacccatatctcaggaaggaaggctgacaccgaacacgctggacagacttgtcaagaccattgtctgctccggggcccagcagacttgaacg

SEQ ID NO: 348742 - DNA, 122 bp, Homo sapiens
cctgcagagcgggcagcaggatgggacctctcccgagagtctggaagccccagctggctccggccctctctagggctgcgggaccctcccttctctggcctcagcttcttagctgccttggt

SEQ ID NO: 348743 - DNA, 122 bp, Homo sapiens
tagcgaagcactggtaggccccggaatggctcttctgggccgaggtgatgagcagcgtctcgttgctgagcccgcggatggagatggcctcgtcaggcagcaccagctccgtgttgcgatac

SEQ ID NO: 348744 - DNA, 122 bp, Homo sapiens
gcgggaaccgaggctggctcgcgggccggcagctgtgctctccaaggtctgcgccggagccgccttccagctcttgtatcactatgtgcctcccgaaggcgacactatttgcataagccccg

SEQ ID NO: 348745 - DNA, 122 bp, Homo sapiens
aatcactctgcccagcattcaatttaacaatgaaattgccttcaactaaatgaatggaaacgcccctcccacccccccacccgcccccggcccacacacacacacaccttttatggccaagg

SEQ ID NO: 348746 - DNA, 122 bp, Homo sapiens
agctcaccccgaaacgccggggtcttggtcctctgggggactagtgagtcctgctcctctcggctttgctccgtccctgccccggcccctccgcgggagtctggggtcgcggcccggtcagg

SEQ ID NO: 348747 - DNA, 122 bp, Homo sapiens
cccctcgccctccgcctccgcctccgcctcctgcttagctcgcgcctactcggcccggcccgccctggctctcgctttaatctcaggaggcggtgtcccagggtccagggcgacacccccaa

SEQ ID NO: 348748 - DNA, 122 bp, Homo sapiens
aggatttattataacatttagctcactgtccaatcgactaaaacaagctctcccagggctcgggccagctgtcggcacgcggcaggtgttgagtgtttgatggggaggagggagatgcccct

SEQ ID NO: 348749 - DNA, 122 bp, Homo sapiens
agacagtaatatttacatgtcagggttactctgagaattaagagataatgggccctgccccgcgtctgcctcagaggggcccgagccacccggggcgtgcgccgcgtccccgccggggccga

SEQ ID NO: 348750 - DNA, 122 bp, Homo sapiens
atcatattggacaagtatctttaacacaaaacagcacagggaatcatgggccactctcatcgttaggctctcttcacaggtatagcctatgttagaaggcttctgaaccacagatgctaaag

SEQ ID NO: 348751 - DNA, 122 bp, Homo sapiens
cccctgggctgcacactgggttcaggggggccttgaggtggggcccctgttcccaagtcccggcggggtttctcctgaacctcaacccatcctcacctgcgggcattcccatcccccaacgc

SEQ ID NO: 348752 - DNA, 122 bp, Homo sapiens
tccagttaccctgattccgctcggagatcggcccggcagccatggcgaaagagatcccgccgtctcccagcagcggttccgccttctgacctcagcacgacttccacttccggggcgaagac

SEQ ID NO: 348753 - DNA, 122 bp, Homo sapiens
taatcaggtggctgaggcaggacaatcacttgaaccagggaggcagaggttgcagtgagccgagactgcagcattgcactccagcccaagtgacagggcgagactccgtctccaaaaaaaaa

SEQ ID NO: 348754 - DNA, 122 bp, Homo sapiens
cctgagcctgcttctttatctgtaacatgaggggattggactggatgccttatggcttagcgctgtgctatgaagaggaagaaggaggaaggaaaaggagcgcagagcgggttacactgcca

SEQ ID NO: 348755 - DNA, 122 bp, Homo sapiens
tctcccgaaaggccaggcagaaaaccaacgtgttcgcccctgactacatcgccgggatgtcgccctttgtcgagaatgacatctccagccgctcagctaccctacaggtccgggacagcacc

SEQ ID NO: 348756 - DNA, 122 bp, Homo sapiens
cctcctgctggcccacgtggctgacagagcccatgctggcacgacgctccagcaggtcggcgtccctgcgggacgcactaccggtgacatggctagcatcaccctccttcctggcagtgaca

SEQ ID NO: 348757 - DNA, 122 bp, Homo sapiens
atgaaacctgtgctgcccaactgccgtctcccaggattcttttgaggatcaaagcaaatacgtagaccccttttaaactacagctctgtaaaccaaggggcataaaaggcaacctccccttg

SEQ ID NO: 348758 - DNA, 122 bp, Homo sapiens
tgcagtttccttgtgccggggatcctgtcccctactcgccagcgccaggctcctcccccccggcgcggatgacactagaacctccttaagttgcgtcgcgccacagctgtctgcgaacactg

SEQ ID NO: 348759 - DNA, 122 bp, Homo sapiens
caggcccctcccaggctctgagtctcccggctgcaggcggatggatggggcttcttcaggcggtggcggcagcagcgaaggtggcggcggcagcagcggcagcggctgtaagtgcagcctcc

SEQ ID NO: 348760 - DNA, 122 bp, Homo sapiens
caggaggggctggtgcgcccatcccccaacccaccgaggtgggtggggaccagccagtggcgccctgctagcctgcgtcagcgccagtgcctggcccccgagtccctaccccaggctggtag

SEQ ID NO: 348761 - DNA, 122 bp, Homo sapiens
tttacgtcatcacgtatccttgcaacgtcactacgctctgagcaggccgacagtcatagacgagtagaccttaggcgagggaaggcatgtactttccctaagaagcgggaggagagaaataa

SEQ ID NO: 348762 - DNA, 122 bp, Homo sapiens
ggaaagtgctgccagtgccggtcggccttggggcaggaggctgctgctcctaaaaaattccgttcacctttggccaaagttctgagccagctcccgccggctgggccctcccctcaaggccc

SEQ ID NO: 348763 - DNA, 122 bp, Homo sapiens
cccccgctgcgctgccgggaggtccggacgaaatgttggagctggagagtcggcagccctcgcgtggcgttgctgcctctgcagatgcctccggagggactcggtgtgtctcggtgttgatt

SEQ ID NO: 348764 - DNA, 122 bp, Homo sapiens
ggaccataaaactcaattcctccctatcctgaaataaatgctaggcagagtaacgcagaacgtcaacagaatgccacagagaagcatttgcttttcttggtaaccagtgcatttaagggcac

SEQ ID NO: 348765 - DNA, 122 bp, Homo sapiens
atacccaaggtcagggagggccattaccctgtgaaactttggggatctacggctggaccacgtggggccatgagcagaaaaagccagtaagccctaaacaggctggatattgtagctggaca

SEQ ID NO: 348766 - DNA, 122 bp, Homo sapiens
tctcacttgggaagcgcaaggggtcagggagttccctttccgagtcaaagaaaggggtgacggacgcacctggaaaatcgggtctctcccacccgaatattgcgctttcggaccggcttaaa

SEQ ID NO: 348767 - DNA, 122 bp, Homo sapiens
atacccccctaagctcggcatcgcctgcacctctcacaggtgctctgtccgccacagtaacgcactatggaaaggaaagttgtacggcgaacgactgaaggagccaaacgaggtggatctgg

SEQ ID NO: 348768 - DNA, 122 bp, Homo sapiens
cgcgcgctagaccaaggcccgggggcagggacaaggccatcgaagccgtggtcacagacgcgccgggagggagggggccacgtcgggcggcatgcgttgaggcgacaggagcgcctggtcag

SEQ ID NO: 348769 - DNA, 122 bp, Homo sapiens
tgaaatgctctttgcagaaagtttcagccgtaacaaatgagcacgcaccgcgcaccagatcgcggactccgggatggtgcctggaggtgagcagatcttccttcgccgcacaagctggaaca

SEQ ID NO: 348770 - DNA, 122 bp, Homo sapiens
gacggtcttttagatggaagccgtaggagggatggaggaagcaaagatgcagccaggcatcggcctgaatgggcaggagtatgtgggacactcatggaagatcaggccaaaaatgtctgtag

SEQ ID NO: 348771 - DNA, 122 bp, Homo sapiens
acagggcttggggctggcccgcacgctgcctgatcgtttccgcccgccgctccacctccccgcgggccccgcaccccgagacctcagcgcaccccatcgccttgcttgccagggtctccgaa

SEQ ID NO: 348772 - DNA, 122 bp, Homo sapiens
gtgacgagtgtgacgaactcttccagtccaagctggacctgcggcgccataagaagtacacgtgtggctcagtgggggctgcgctctacgagggcctggctgaggagctcaagcccgagggc

SEQ ID NO: 348773 - DNA, 122 bp, Homo sapiens
gggctttgctccgcgggaattaaaggaaggagaaatgttagtacacttttaattggaaaccgagttcttctttcagagcggcttgtttactcaggattgggcattagaactcaggggaggct

SEQ ID NO: 348774 - DNA, 122 bp, Homo sapiens
aatctcagaccccatcccagacatactgaaccggaaactgtgggcggacagcccaacaatcggtgttttaataagcccccgggtaatcttatacacgctaaagtctgagaaccactgctcta

SEQ ID NO: 348775 - DNA, 122 bp, Homo sapiens
tggggatgccagggcttcagtggtccccagaagaaacgccctgcggggtctgtggggaaacgcaccggccttcccaggttgaagtgggcccgctgagacccctgcctgccgctttagaggca

SEQ ID NO: 348776 - DNA, 122 bp, Homo sapiens
acaaagaaatccgttcccgatgtctctttatgccgaggctgatctcgggatttgcacgctcgtttctggcacaaatcctctgactgtcaactcaaatccagtcagtgggattcagacctttg

SEQ ID NO: 348777 - DNA, 122 bp, Homo sapiens
cattaggcctgacgggcctcaggccgagcccgtgccccggctgtgggccagaagttgccgcgtcgaactcggccttcggcccagcagcttatcacaggccccgcccccttgtcaaaaaaaaa

SEQ ID NO: 348778 - DNA, 122 bp, Homo sapiens
ctgcccaacccatggggtggagttttctcccttcctatccatcctagcgaatataaaccccgacttgatgtcagtaactggaaggagcagctgttagaattctgatttcagctctcagcatc

SEQ ID NO: 348779 - DNA, 122 bp, Homo sapiens
ctaactctttatcatggtcatatcagtgctgtgctacagccaggtcataccagcttttgacggccaattgttaaattttcaggaattctgtgaaccagttgttaagcacagccattgttaca

SEQ ID NO: 348780 - DNA, 122 bp, Homo sapiens
ggtcggcttcagcggcctgcaggattccggctcccaattggtcggcccgtccacggcttgcgcagctcaccaatggcagcggtgctgggtggaggggtgcccacatccaagatggcgtcccc

SEQ ID NO: 348781 - DNA, 122 bp, Homo sapiens
taaatatatgtattacatccctagaaaaagaatccctggattttccctcctgtgtgttttcgtcttgcttcatggtccatgatgccagctgaggttgtcagtacaatgaaatcaaactggcg

SEQ ID NO: 348782 - DNA, 122 bp, Homo sapiens
tccccatcatgcatgtgctattgtgccaagaagctattaaagaaaattcttggagagtttcgactctgctgctggtgaagtcttttgtgtgcctgtgacaaatgcgtcaaacacaagaagca

SEQ ID NO: 348783 - DNA, 122 bp, Homo sapiens
acgctaaactgggcgctcgggacagaagccaggtctcggcgggacatggcagggggtgggcggggcctgggcgaggtgggggcggggcgcgaggcggagagaccttcccctatagaaccggc

SEQ ID NO: 348784 - DNA, 122 bp, Homo sapiens
gcatttcttgtaaccttggtttagagagcaggtgttggtaaaaagttctgtgaccttgggcggttctacccagcacagccatccaggttgggcatttacgtgtgtgattagggagttgtgtg

SEQ ID NO: 348785 - DNA, 122 bp, Homo sapiens
ctccgcccctgccgccagccgatcctcgggcctcgccagcagcctcagcagcagcagcagcggcggcgacgaccacgatgacaggaaacctacatagctttttttgttttttgtttttaagt

SEQ ID NO: 348786 - DNA, 122 bp, Homo sapiens
caagggctcgcgctggcatacagtagggcttgctattgacgatgagcgcacccacggctccggcaactacaaggcggtgctcacggacagcacggccctcggcgtggatatccggaaggcag

SEQ ID NO: 348787 - DNA, 122 bp, Homo sapiens
atgaagggggtcagagcagcgattggagccgagagctggaagcgccttaaagagactgcgcggtccccgccccccttcccgccagcctcaatgaattagagctgtgtttcccaaacttgcct

SEQ ID NO: 348788 - DNA, 122 bp, Homo sapiens
agccctaattacctgccggacagtgttgctggagggtgttggaggcttgccacgagcacacgacctgtctgaagctgctgtggggacaggcagggccaggactcggggccctgaatgcatgc

SEQ ID NO: 348789 - DNA, 122 bp, Homo sapiens
acccgtgcctggggtcggggccagtgctcttctcggagctccagaagttctgctgagaagcgcggcggcagcaagacgacttctccggagccgccgagctggagttagaggtggagctccgt

SEQ ID NO: 348790 - DNA, 122 bp, Homo sapiens
ccgtataatctaccgacccatctgagccccttgagaagaaaggagaaggttgttaatacacgcactgggaccacaggcatcactgggcctgtcctgggcaaactgatttatgatggccgccg

SEQ ID NO: 348791 - DNA, 122 bp, Homo sapiens
tccaggacggggcggctggcggggcagagatgctcctcacttcccagatggtgtggttgccgggcggaggggctcctcatttctcagatggggcggctgctgggcggaggggctcctcactt

SEQ ID NO: 348792 - DNA, 122 bp, Homo sapiens
gtggcggcagctacagcaggtaggctgggttggagcgccaggtgccaggcaccaggcaggcgggctggcaggggggcggccctgggcgggcccaggatgactggcctccaagccctgcctta

SEQ ID NO: 348793 - DNA, 122 bp, Homo sapiens
tcccagcctgcagaaatccgtggatgcgctattcacacgggaatgcctgtgctcgttccgcgagagggttgcattccgccttttctctggtattctcggcgttcaagcatttgaacggggta

SEQ ID NO: 348794 - DNA, 122 bp, Homo sapiens
gatgaaggtaatttgtttaactaataggtccaacactctttctgttttatctgattgcttcggacagtctgtgtgatcttatagctacctctttttgtcttacatattctattcattcttca

SEQ ID NO: 348795 - DNA, 122 bp, Homo sapiens
gggagcccggagctgggagcagacgcgaggatagagcgccggtgaggcggggcgaggcgccgtgtgcaccgcagcgaccaatcggagcgcagcaagtggccggccgggggcggggcgggacg

SEQ ID NO: 348796 - DNA, 122 bp, Homo sapiens
tcggccgggaccagagaatctggcttcctaaaccaagaaggcgggccagcccaggacaggcggtggggaagaggcgctgcccaggcaggcgtctcccagcagggccgcctgcgggcgtccat

SEQ ID NO: 348797 - DNA, 122 bp, Homo sapiens
taaaagaaaagggcctatttcagtcgggggacctggactgaactaactcgtgttcatggccgccaaatcccgtgtgacaaatgtattcttttgttgttcatagaaataaaacagtttttcgg

SEQ ID NO: 348798 - DNA, 122 bp, Homo sapiens
ggtctctgccattggggtcttggctggtgagaatgaggatgattactcatatccatgtgtcgttgtgactcagagagctcgggttctggagttggagagaccaaagttcacagctgagccca

SEQ ID NO: 348799 - DNA, 122 bp, Homo sapiens
tgtgtgtatatatatatatatgcagttcctctttggattaaggatgttaattccaattttcggttgtgtgacttaacaaacctagtgctagtaacaactctctcacttgtaatagagaaaaa

SEQ ID NO: 348800 - DNA, 122 bp, Homo sapiens
tttagcccagttatcttggttaaagataaggtgtgtctggtaggcattgatttttctttccggagaaaaaacttaggaggatttcctcttgatgaacaaggctagcctgctgagcctttgag

SEQ ID NO: 348801 - DNA, 122 bp, Homo sapiens
accaatcgcctggactacagtgaggagcattgtgtgactccgcggtggatttccatgcaccgaatggactcagtttctaaactcacatcctaacgtatcctggcttttcacagaatactgga

SEQ ID NO: 348802 - DNA, 122 bp, Homo sapiens
agtgaaggattcatgtttcaaaaatctaggaagggaaaagaaatgaggatctgattagaccgatcctaaaaagccattttactatgccctgagaaactagagccaccatggtagaataaaaa

SEQ ID NO: 348803 - DNA, 122 bp, Homo sapiens
gtggtcaggcctgagaaggggatgctggctgtcactgtggctcagcccagttggggtgcacggcgtctgcaaaggaagagaggctgtccgctggcttcccgctggctccccagagtgggcat

SEQ ID NO: 348804 - DNA, 122 bp, Homo sapiens
ggcccttcgggaagaagctctagctggtgatgagagcaaggtttgggggccgctacacttcggcagtgcagtgttgggaaggtgagaacacagttctaaagaacaagaattgttgagtctga

SEQ ID NO: 348805 - DNA, 122 bp, Homo sapiens
aagggaagagcctggggaaaattcatacagggcctcacagccagccctaattatgtcattcgtagggggatcccagtgtagagattacacagtgcagtgtggttttaaacttttgagtcatc

SEQ ID NO: 348806 - DNA, 122 bp, Homo sapiens
gcaggggcgggggcgtccaactgcgagagggacaaggcgagccgggtaaggggcctggagcgctgccactggagccaaaaccagatcaacagcggggtgactggggccatgtggcttcgtgc

SEQ ID NO: 348807 - DNA, 122 bp, Homo sapiens
cccccaacttccccacctacttcatccctcaactgccactgtcgttatcatcatcctaaacgataagagtaaataatggcaatattattacattcgtggatttaagggtaatgaacctccct

SEQ ID NO: 348808 - DNA, 122 bp, Homo sapiens
gcgggcgggcgggccgcagtggagcggagtccgcacgtcacgctcggagaagtgcctccgcgagcagccgcctgtaccagcctggccgcgcagcctgacgtcacaaagccagccacgcgcct

SEQ ID NO: 348809 - DNA, 122 bp, Homo sapiens
aagaaaagaaaagaaaagaaaaagaaaaagtgaaacaaacacctaaggctactgaatccccggggcaggcgctcatagggtcacactccttgcaggtccagaagagagtatatgctcaccct

SEQ ID NO: 348810 - DNA, 122 bp, Homo sapiens
cagtcgacaggtggggccggccccacctcctggcagcgctcgcccgctccgttcaatccccggtagccccccaaataaattgcacgctggggagcgcaaacaggaggagggctgatgcggcc

SEQ ID NO: 348811 - DNA, 122 bp, Homo sapiens
agaggaacagatgtagcgcctgcgggacaagaccgagggcaccatgcaggtccacgaggacgcccagcgcgaggtgcagcggctgcggagagccaagaagctcctgagcaggtgctggggag

SEQ ID NO: 348812 - DNA, 122 bp, Homo sapiens
ggattcacgctgctccccgggcctggggggtccactgagggaataaagtgcacgggccaccgggctgccgagtggtccccgccacccccacaggctcagaaattgttctctctgaaactctg

SEQ ID NO: 348813 - DNA, 122 bp, Homo sapiens
aaaacacagggagcttgcagctaatgtctgagaagaagaatgctttaatggtaataacaacggggaaggggacaatctagtatttgatgtaaaccaccaggatactgactcatcctgaggcc

SEQ ID NO: 348814 - DNA, 122 bp, Homo sapiens
ccttgcactcccgcgacgggctctcctgggggtacagcatcccgccctgcagccccagcgcgcagccccacaacaacggcccgagcgccgcccaggcaaccgccgacccccgggccatgctt

SEQ ID NO: 348815 - DNA, 122 bp, Homo sapiens
acctgggtgtaattttgttaactagactaagatctgattcagttcctagcagcctgtacacgcattcacctgcgtggacgtgtgtgtagttctttgcaaacttaccccccgtatatagattt

SEQ ID NO: 348816 - DNA, 122 bp, Homo sapiens
cctcagcataccactcctgccatcaaactggactacttcctccagctgattttcaaggaacgaggcagtgaatgaataattcatgacaagtccattctagcaaccaatttcacctctgccta

SEQ ID NO: 348817 - DNA, 122 bp, Homo sapiens
cggaaaagccagctttcctcccgccgagctccccgctttttaataaaatccaggtagcgccggtttaaagaatcccaaatctccatatacagcccgggattggaaaaggtacattacacaac

SEQ ID NO: 348818 - DNA, 122 bp, Homo sapiens
tggccgggagggccccggggactggggtttggggctccaagggggtctctgccgggtctgcgggagtcgttagtgtgttggggagtccccgagaggtccccggggtttcctgggagggcagc

SEQ ID NO: 348819 - DNA, 122 bp, Homo sapiens
cccttctcacaccacgctgtacacccccaggactcttggtattctgacttggctaagaggcgtcctttttctgaatagactgttgaccacatgtagaaggaaggcagagagagaaatgaatc

SEQ ID NO: 348820 - DNA, 122 bp, Homo sapiens
ttgactcctgaaggaagactccgccccttcgttgtttctgcagcttcatcggtttctcagcgggctccctctcctcatgagattagtgaagaaataagtttttggcaaaattcctcaaagct

SEQ ID NO: 348821 - DNA, 122 bp, Homo sapiens
cagcttggatacagctcagggcaagcccctgtgcttcacagccttgctctttaggaagtccgtagaggaacccagctccactggtccctcaccagtgtggtctccaagtccttcctggagag

SEQ ID NO: 348822 - DNA, 122 bp, Homo sapiens
gctcggccccgccccgcgcgtcattgggccaggtccccgccccgcccccagccccacccccgcccctttgactggagttggctttttccagagaactttccgggctcggattggccgcgccg

SEQ ID NO: 348823 - DNA, 122 bp, Homo sapiens
cccattccagggcagctcagattatgcagggaattgggaacaggtacccccaccatctgccgcataccacccagggagctgctcctcagaggagaaatcaggcggggggatgaaaatacagt

SEQ ID NO: 348824 - DNA, 122 bp, Homo sapiens
aaaccccgtcggatctccaaaggctggaataggcggtgcggctgtagcccgcgctgtaatcgtaggacacctgatggggcggcggcggcgggggcagggcgcagtctggaaagaagggggcg

SEQ ID NO: 348825 - DNA, 122 bp, Homo sapiens
gaggccacccgggagcaattaaactgggccacaccagccacctcccacagcagcggggtccgcagatttaaccctttccccccagattccggcactgggtgccgcgctctctcccccagcac

SEQ ID NO: 348826 - DNA, 122 bp, Homo sapiens
agtggcaggcggggtttcaggtggggaccgggtggccggcgaggcccggccgcaggagcgcgccccgcctgcccgcgctgaccttcccggagtcgccgggaagcgggagggctgcaccccca

SEQ ID NO: 348827 - DNA, 122 bp, Homo sapiens
gcttcttcatcatcatctttcttttcttctttgggttcctttgattttctttcagcaatgcgttgttcaatgagggcaagagactgttttgtgaaatggacaaagctctgaggtcctggggg

SEQ ID NO: 348828 - DNA, 122 bp, Homo sapiens
tcgagaggcttttggaactcaactagcaggtgcagagagtactacaaagacccgggtttccgtccacgttcacgtaaacctccctacgaggggaaactacaggcgcgctgccggagggcgcc

SEQ ID NO: 348829 - DNA, 122 bp, Homo sapiens
cctttcttcagatgcagggaaacagtttaaattttattgttaaaggatctgaaaaaacatcgtttagggaggggatgctgacattctggaaggggagatttcccataaaggaggccaccaga

SEQ ID NO: 348830 - DNA, 122 bp, Homo sapiens
gttttacaaaatttctttattgcacaaaataactgaagatcacggtccttgctgggttcccgggaggccggtgcttttcagtgctgccggctgcagagtgcatcacttcacacgccagctgg

SEQ ID NO: 348831 - DNA, 122 bp, Homo sapiens
gaccgcggtcctgcaggggcgcttgctgcgtgagtccgagggctgcgggcgaactaggggcgcggcgggggtggaaaaatcgaaactagctttttctttgcgcttgggagtttgctaacttt

SEQ ID NO: 348832 - DNA, 122 bp, Homo sapiens
agggcaaagaggccaggaaagggggtggggaagggcgtctgacatcagggctagaatttccgaaggtactgaccgacagccttaactagacaatcaaatattttcctgtttgttcaaacggc

SEQ ID NO: 348833 - DNA, 122 bp, Homo sapiens
tccgcctccaaaatgcataagttctcgcgagacgcagtaaggcaccggctcgaactggggcgggccactgccaggaaagcaacgcccctgaatgcttatgccggtggttggtagaggaaatg

SEQ ID NO: 348834 - DNA, 122 bp, Homo sapiens
aatttggcatcccactgtaatgcttaccaaaggtataccgataaagggcattcttcccaccgcaaggcacggtacttgaacttgaaggatgcctcctgagtaggaaataatgaattacctgg

SEQ ID NO: 348835 - DNA, 122 bp, Homo sapiens
tcgaggacaacacggagatcatcctggaccccgagaagatcaagaagaagtatctgcgcacgtggttcgtggtggacttcgtgtcctccatccccgtggactacatcttccttatcgtggag

SEQ ID NO: 348836 - DNA, 122 bp, Homo sapiens
ctggtggtgcccaaggccctccatcgggtccctgagagtctcccaactgccggtccttagcgccagcctgcaagcccagacccgcctcgccaggctgcctgtgagcctatttttcatgtagc

SEQ ID NO: 348837 - DNA, 122 bp, Homo sapiens
agttcagcggacttctgataacgtctaatttcacggagtgccacagtaccaggcctgtaacgatgaggtttcttcacccctccagtagtgggagcactcttgcgagaggcttttgtagccag

SEQ ID NO: 348838 - DNA, 122 bp, Homo sapiens
agcccagcttgcagccaagagcggcccagcggcgccaccggacttgagaaagtttgtgcgcgcccctccgcgccacggccacgcgcagaagagactcggagccggccccaggtctggcccgg

SEQ ID NO: 348839 - DNA, 122 bp, Homo sapiens
ccctgctctgttccgcctccttcgctgcggcgcccgcccccgccccgcctctccggtctccgctccgtaactgctcagctctgctccggctccccggcgcggcccctcacccgggtggagcc

SEQ ID NO: 348840 - DNA, 122 bp, Homo sapiens
cagagccgagcagtggggctgcggcaatgagtcatggcaagctcccggaggggatgtgcccggttactaagagagagcatcaagaaagttcttcacgggggtgtacagcaggagaagcaggg

SEQ ID NO: 348841 - DNA, 122 bp, Homo sapiens
accacccagatgtgttatggctgattcccagcatggcattctttctaatttccacatctacgatatgcaaagaactgtgcaaagtgttggatggggagacaaaagtataatttaaaagaatg

SEQ ID NO: 348842 - DNA, 122 bp, Homo sapiens
cgatcatcaattctcatcatgatcgtgacgtcacaaaagacagcggccaatgggagcctgcgatcagctcaggacagtccctggcctcagcccagaacccaagagttgggaggggggaagag

SEQ ID NO: 348843 - DNA, 122 bp, Homo sapiens
gagagctccacggaaagtgatgaggaggaagaagagggctgtggtcatacacactgtgtacgtggccaccgcaaaggacggcgtcgtgcaaccctaggaccgacccccaccacccctcccca

SEQ ID NO: 348844 - DNA, 122 bp, Homo sapiens
cgaataatcttgtgtagtaaatttttgctgcaactgacaatgttcaaagtaaatctctcccggtttggtgttctaagaagccaacagccacagcaggatgagcattaatactacttccagaa

SEQ ID NO: 348845 - DNA, 122 bp, Homo sapiens
cagggcttgaagactcttgcacagagaccagctcgagccccagggacaaggccatcaccccgccactgccagaaagtactgtgcccttcagcaatggggtgctgaagggggagttgtcagac

SEQ ID NO: 348846 - DNA, 122 bp, Homo sapiens
ggtcaggatgtgggcactagggtcggggctctccctgggtgggtaggggtacctgtgtggcgggtccctggaggaggaggggatggaggagcagatcgccaaggccgagtggtggagtttgg

SEQ ID NO: 348847 - DNA, 122 bp, Homo sapiens
aggcagcagggggcagcagggtcaaggagaggctaactggccacgggtggggccagcaggcgggcagaaggaggctttaaagcgcctaccctgcctgcaggtgagcagtggtgtgtgagagc

SEQ ID NO: 348848 - DNA, 122 bp, Homo sapiens
acagggatgaaaaaaacttcctttcaaagagcaaaatcatgactaagtgtgcaaaggactcggggaattaatctaactgtagagtgtgactgacgtactcaaagtccatcgtctctttatca

SEQ ID NO: 348849 - DNA, 122 bp, Homo sapiens
taaaattagccaggtgtggtggcacacgcctatacaaaaattagccaggtgggccgggcgcggtggctcacgcctgtaatcccagcactttgggaggccgaggcgggcggatcacgaggtca

SEQ ID NO: 348850 - DNA, 122 bp, Homo sapiens
ccctccaccgcaggtgaacctgccgctgctcaccctgagccagcccctgctgttgggcatcgcccgaaatgagaccagtgctggccgagccagtgccgagttctatgtccagtgagtaggct

SEQ ID NO: 348851 - DNA, 122 bp, Homo sapiens
tggcggcctacctgcagtggcggcgcttcgttttcttcgacaaggagctggtgaaggagccgctgagcaatgatggggccgctcccggggccacacctgcttctggatccgctgcttccaag

SEQ ID NO: 348852 - DNA, 122 bp, Homo sapiens
ccacccctgacccaaaccccattcagggcattccaatccagctcatgattttcagccacacggcgaggggatgaagccatttcaggttatgcacttgatcccaaagagttttttgtgcttcg

SEQ ID NO: 348853 - DNA, 122 bp, Homo sapiens
ggtgccaatattggtatccaggggagggaatctaggcatctggctgtcctgcccactgtccgtgccaggggctttgcctacagtcccaggagggaggagggaaaagcaaagagagcctggga

SEQ ID NO: 348854 - DNA, 122 bp, Homo sapiens
tccccacatcttgcgctccgcatcccccaagctccttgtgcccctccatccccaaccccccgggtttaggtgtgtgtgaagcttcgtggcacattttgagctgcctttctaggtaatcgcag

SEQ ID NO: 348855 - DNA, 122 bp, Homo sapiens
gtaggaattgctaagtaaacatcacggctgttatcgttgttcttgtccctgcctagctggcggcagccttgtacatccagacgggcagtggttccttgggaacctcgcagaaccgggtggaa

SEQ ID NO: 348856 - DNA, 122 bp, Homo sapiens
cacctgctcgtgagggaggcacgatcatcccccaacacatgacgaaactgaggcctcaaacggtgagaaaactaaaggatcaagcttgctcaagttatatcaggttagctcctaaaaggagg

SEQ ID NO: 348857 - DNA, 122 bp, Homo sapiens
cgtgatccgcctgcctcggcctcccaaagtgctgggattacaggtgtgagccaccgtgaccggccttgtaacacattttctttgaccagtccactgttgaagggaagttaggttgattccat

SEQ ID NO: 348858 - DNA, 122 bp, Homo sapiens
ttagcatggtgagaggaacaaaatccaggaggtgacattagggacaaatggacataacaacgttgatgagtactggtccaagaaaaaaaactcaccataattcacaaagcgtctagatataa

SEQ ID NO: 348859 - DNA, 122 bp, Homo sapiens
atatcctgtaagtcattgcaggtacaggcgtggatctgggtttggaaacgccgcctggatcgctggctgggctcctgcagccgccaaggaggggctggctggaggtggggctcggcgtgcat

SEQ ID NO: 348860 - DNA, 122 bp, Homo sapiens
cggtcatcatccatgcctcgcctgggaccccgatcatcatccaaccctcgcctgggaccccggtcatcatcagcattacgccaggatgatcgctcatcatcagcgcctcctcgcctcggccc

SEQ ID NO: 348861 - DNA, 122 bp, Homo sapiens
gcgtgttaaaatcccacagaagcccctggaccaagcagcggcatcgaaggcgagcaggggcgcttttgtgtccgcggccgctgaacctgcgtagaagcgaacccggaccgatgctgggaccg

SEQ ID NO: 348862 - DNA, 122 bp, Homo sapiens
cagcagaaagatatctggaaaatcccaaatacttcactgatagggatgcctgaccagaaacgtttggaggcccctggcccctgggtggtctctctggtccttcttgttctgtccattcctgg

SEQ ID NO: 348863 - DNA, 122 bp, Homo sapiens
aaggcaacagctgccaccaaggcattagtgtctgtagggttaaaggtctgcttgttcggccggagacctgaagaaaaagtaatggggatcctgaagtatgcttctgatgcaggactgaacgt

SEQ ID NO: 348864 - DNA, 122 bp, Homo sapiens
taaaccaatgacaaaaagcactaatttaaatttcatctggagaggtgcttctgcattgctcgacattgtcaaaatacagattgccccttggtggcggcagcagctaaaactttagatgaggc

SEQ ID NO: 348865 - DNA, 122 bp, Homo sapiens
ggcggaagggaagcaccctccgtgagaggagtgaacgccccagaggccagtgagcatctgcggagcggagggacctcggaaaccctggagcccggcgggcctcttccagcacccctccccgg

SEQ ID NO: 348866 - DNA, 122 bp, Homo sapiens
tgggaagtctagaaagccgcatgagtcactgttgctttcgtattagaaatgccttgttttcgaattagaaatgccttgcggtcggttttcagttactactttagaaaattgatgtgctggga

SEQ ID NO: 348867 - DNA, 122 bp, Homo sapiens
ttgcactttttgcccaatgcactcaaaaaggctaatcgcttctcccctatacctcacacacgcatctgcttctctgctgagaggacattcacgtgatctggtgatgacatgagtgttacccc

SEQ ID NO: 348868 - DNA, 122 bp, Homo sapiens
ttttattagatgctgttatcttcatgttagtcacaggaaaaaaaaatgcccacatacacacgcacaactaaatgtagtcagtttgctcagctgctgctgacgtcactgctgcccactaggag

SEQ ID NO: 348869 - DNA, 122 bp, Homo sapiens
ttccacagagagaaacctgacagtcacaagaggtcctataaattccaaaggtctagaccacggtaactatgagtttgttggaccaagaaattatcagggcctctagcagaaatttaggttac

SEQ ID NO: 348870 - DNA, 122 bp, Homo sapiens
tcggcgcggcacggcgtgacctgcgcagtggcgtccgttgtaagtgctatgacaacagggcgaagatggctcagagttaggctggagaggggaggtgtcccttccgctgcggccgtcgggtt

SEQ ID NO: 348871 - DNA, 122 bp, Homo sapiens
ttcccctgctcattgcctgaggctttcaaacagttcccgctcctatctggtttttgctggcggcacaggcaagttgctgagttcttgtgataaggctggctgatacataaggataattacgt

SEQ ID NO: 348872 - DNA, 122 bp, Homo sapiens
cccggggcggccgcacagggcaggagcgtcttttgttccaacccccggggcatggcggggcggggccgccgctttgtccgaggccggtcctccagcccctccccggcggccgcggcccggcc

SEQ ID NO: 348873 - DNA, 122 bp, Homo sapiens
cgcatcccgctgccgcaggagagagacagcgcgccccggccctgctccccaggcttcgcccgggcgccctcaactctgtccccagagactgagcacctgtcctccgcctcggcctctgctga

SEQ ID NO: 348874 - DNA, 122 bp, Homo sapiens
tacaacctggaactccctgcccttttcctgaagaagcaaataacagcctcctgcgagaggcgccctccctgcacctgggggaaaggagggtccttatctctgaagacacagggacacagaag

SEQ ID NO: 348875 - DNA, 122 bp, Homo sapiens
gccctggggctccactcacctgggcaggacccgcggggctcccacgaggctgggtccaggcggaagctgaggctccgcggctccgggctgctgtcacccccgccctccaccttgccaccgcc

SEQ ID NO: 348876 - DNA, 122 bp, Homo sapiens
cagccctgccaaagaacaggctgtggccccaaatgggacacatcagttaggcacagggagcgtccaagctcaggtttctctatttgcttaaattaatcctttgttattgttcgacattaatg

SEQ ID NO: 348877 - DNA, 122 bp, Homo sapiens
tctatcccagtctaccgctgctctctcaggggcatttgtgtccccgtttgaggtcataaacgagctgccgagggaggggtgtaatggcggtgggcgacttatggaaattaataatctcaatt

SEQ ID NO: 348878 - DNA, 122 bp, Homo sapiens
tggagaatcccaagatgatgaattcagttatagctgtttgattctttctttccatgatgtcgcctggtttcctttcaggaattgggcaaagagaagaccagattataaaaatgaatcatatg

SEQ ID NO: 348879 - DNA, 122 bp, Homo sapiens
tcaggcagagctaggccagtatcggggtctgggggcgaccgtctgcagcaccgtcacatacgtggggacgtccacctgtgtcagatgtttcccagcttgtttcatgatgacaacagctctgc

SEQ ID NO: 348880 - DNA, 122 bp, Homo sapiens
tctgtatgcttgtggggtgggggcagacacacaggcagcctcctgcccagagggtccaagcgggcatggccatccacatctgcaggtcagaagaggcctgggctggagccgcatactggcca

SEQ ID NO: 348881 - DNA, 122 bp, Homo sapiens
ccggctctggggagcaagggggctcctgcgaacccgagtccaggaatgggcgtcttcctgcggtagcccctgccggcctgggcttgcccttcgtccaccttcctctttccgcgagggagaaa

SEQ ID NO: 348882 - DNA, 122 bp, Homo sapiens
tggcaggtaaggaacagaggcctaaaggtaggtgggctgtacacagtcatcatccaaccacgtggctcattgctgttgccttgggctcagaagtagcatcaaagctggtgccccaaccaggc

SEQ ID NO: 348883 - DNA, 122 bp, Homo sapiens
tcaggaagggcgtggaccagggaggctggggcgggaggtgccgggggtggggtgccctagcgtgaccacctccttcgcagctcctggtggccattctcccagagggggaacctagtccagca

SEQ ID NO: 348884 - DNA, 122 bp, Homo sapiens
cctcacgtccgcaatcactgagcagttgagattagtggagcggaccttctcactgctcaccgtctgcaggaaggtcctacggtggaaaaacagaggagcgccaagctgagggcttaaagccc

SEQ ID NO: 348885 - DNA, 122 bp, Homo sapiens
ttgatcccaagaagcactagcagttcagcatgaaatacagggctttgggcgacccaatggcggccgccttgggtcagctgttcccctggccaccccggtgtggctggatcaggggcgcggca

SEQ ID NO: 348886 - DNA, 122 bp, Homo sapiens
gcgatcccagttctcattattcttctcgcttgtgtttcgttgtctttcccaccctcgtggcgtagagagctttggagtcaaccccatgccagcgtcagctctgccaccaagttgggtgtgac

SEQ ID NO: 348887 - DNA, 122 bp, Homo sapiens
gggctgtgtgtggggttctctgcccgcctcccttccttccccacgtggagttcttaggagcggccttgtgtggaaccctggatgagactctgccctatacagcccgaccacctacccctcct

SEQ ID NO: 348888 - DNA, 122 bp, Homo sapiens
cttttcccgggaaggtcgggcatctccttagagtcagtaaaatggagctcactggccaggcgtggtggctcatgcctgtaatcccagcactttgggaggccgaggctggtggatcacgaggt

SEQ ID NO: 348889 - DNA, 122 bp, Homo sapiens
ccagaacgacgccaggacgcgcgccgggctccgtgcctcccacggcccaggcgaggccggcggctcgagggttaaaaggcgacccccattctgtaggggagaaagtgccttttctccaagtc

SEQ ID NO: 348890 - DNA, 122 bp, Homo sapiens
cgaattcgtgctaatatttctctgggggcggcgggctgcctgccttccggggacggagggcgggggagactggcagggaggccaggcccaaccacggggctgccgggaccaggccatgtgtc

SEQ ID NO: 348891 - DNA, 122 bp, Homo sapiens
aaagtttccaagaacacagacaaccgagacgagaacacagcagtgtgtgccaggaggaaacgccgcgtcaggcactgatccatcagaggccggcagggaagggtgtaaactcagcgacggcc

SEQ ID NO: 348892 - DNA, 122 bp, Homo sapiens
ctgaaccttgagctggggagccagagtgaccggggcaggcagcaggacgcacctccttctcgcagtctctaagcagccagctcttgcagggcctatttatgtctgcagccagggtctgggct

SEQ ID NO: 348893 - DNA, 122 bp, Homo sapiens
tatgcagaagggcccagccgggacagcagccactgcatttctttggcttgcgctgcagtccggatggagctcggttctgacccagaacatgagatcgggttctcattaattcagcccagggc

SEQ ID NO: 348894 - DNA, 122 bp, Homo sapiens
tgtggctgccccttgactctcggcagggcgtttttggtgaacagaacttctgaatttcagcgcagtctgatttgtcgtttttcccttgtacggctcctaccctgtgtctcccgtggccacag

SEQ ID NO: 348895 - DNA, 122 bp, Homo sapiens
caggcaactttgacagtcggtggagaagcagcaagggcgatgcggtttctgagagagccgcgcgggttcccagcactaaacgtgggcgactttccttaatcttcccccagagacagaaggcc

SEQ ID NO: 348896 - DNA, 122 bp, Homo sapiens
cacgcccggcctggctgtgctctcttaaagggccgaagcaatgcgggtgctggcgaccgacgcaaggaggtgacgcacaggggacttaaggagcggaccgccgcgggaggacgcgcccagct

SEQ ID NO: 348897 - DNA, 122 bp, Homo sapiens
cgcatgcctgccttttggttgctgttagcgggtgcgtttagctcccgccacgacttccggcggactgggtttaatttaaacattttccaggctacggaacagctcctaagggaagattaagt

SEQ ID NO: 348898 - DNA, 122 bp, Homo sapiens
gagaatgtgtctgttgaattcgataagcaattccttgcatttgagaaggcaaggagccgacgggaacctaccgacagggctgccacgcactgctgcagagctttccgtgcaaagcgcggctc

SEQ ID NO: 348899 - DNA, 122 bp, Homo sapiens
tgacatgaggagtgaataaacgaacacagataaagaacgaggcacacagtacgtgcggggcgagagactccctttgctcctcccgcttcacctttgcttcagtgccgcagccggggcccgtg

SEQ ID NO: 348900 - DNA, 122 bp, Homo sapiens
acattttgtgcagatggccccaaagaacagacccaggatcagatgtagacaattccaagacggaggccgggcacagtggctcacacttgtaatcccagcacttcggagggctgaggcaggag

SEQ ID NO: 348901 - DNA, 122 bp, Homo sapiens
ggataaagaggagagtccccctgtacggtgacttacctggtctcggtgcctccgctctcccgttccctcactaatgagactcttaaatctggcagggacccaggaagggatatttgtaatta

SEQ ID NO: 348902 - DNA, 122 bp, Homo sapiens
tcacgcgtgggcttcacgcgtgggactcgcaggctcagtctgcaggggcgctgctgtcaccgcacccgcctccccagctcaggcagcccaggactccctctggcttatatgtagtaaaaaac

SEQ ID NO: 348903 - DNA, 122 bp, Homo sapiens
gcggcggcggcgggcggggatctgggcgtggaggcgcgaggggcggggcgggcggcactgcgggcccgcggctcgggcggcaccagcggctcccggtctctctctctgctcgccctcagtcc

SEQ ID NO: 348904 - DNA, 122 bp, Homo sapiens
tgcccaacgctcagtctaggaaagtgggtgatcaccccggcgtccaccctccctccacttcgcaggctgccgtctctggacctcgtgtgccttccccgtggctctgcgccacgccttcccat

SEQ ID NO: 348905 - DNA, 122 bp, Homo sapiens
cgaacccagcgcaagagtacgccacggcgcctgcgcatcccctgacgggtactttccattcgccagatgggggaagccagggggaagcaggttactgtttttgcatttctatcttcaaggaa

SEQ ID NO: 348906 - DNA, 122 bp, Homo sapiens
ccaaccaatcactcaacatacaactaaaacacttcatatttttaccacagaaacagaatacgggaggtaagtatgaaaagtctgtagatctatttatacacagtgggagtatctacctgaga

SEQ ID NO: 348907 - DNA, 122 bp, Homo sapiens
tgcaagagactgggcagaaagccactagaggatggcgtcaaaaagatgctgagaattttacgacagctgccatgcttcattttaaatacatattcagatctgattttaggcaggggttcaat

SEQ ID NO: 348908 - DNA, 122 bp, Homo sapiens
agataggtagactcgatgttgtcgtacccgagcaagttagagcaacgccacactttgagacgaatttaagagtcctttatcagccggcgaccaagagacggctaacgctcgaaattctctcg

SEQ ID NO: 348909 - DNA, 122 bp, Homo sapiens
cgtttgtgccccttcgattcacgcccattgcacaaatggggacactgaggcaatgagaggcgaggagacttgcccaagacctgcaggctccgtcaggggcagggtcaccggtgcggcttcag

SEQ ID NO: 348910 - DNA, 122 bp, Homo sapiens
ctggtttgtttgaaacggtcagaatgtcataaataccttatgatgaacattttcccaattcgcttaaattcgagaggccaggagtgtacctttccctttcctgagaagagcatgggccactg

SEQ ID NO: 348911 - DNA, 122 bp, Homo sapiens
gaggagctgatgctccttgatgaggagcctagctgcacagaagatgaaaagctgtctttgcggtggaatgaattcccccagacccaaagcagctgctcctcgaagtctctgaaaacaaaaat

SEQ ID NO: 348912 - DNA, 122 bp, Homo sapiens
tttacagctgagtttcttacctcaccccacccactaccccaagcattagggccacactcccgagtcctcctgtcacaccagctgggcacttgcagaagctcattgtgcatttgagtctttgg

SEQ ID NO: 348913 - DNA, 122 bp, Homo sapiens
aagagcgttgagtaggcatccatggacttttctttctgggacagattgtcaggctcactgcgccgatgcctgtctttcatctgtttaagtctctgccgccagccccaagggcgcttcatggg

SEQ ID NO: 348914 - DNA, 122 bp, Homo sapiens
gggcggcagcgaggactgtgagtgcgtggatctagctggggccgggctccgccaccgtctcgcgtcgcgaccttggtcaagcccttacccgggccctgtccctctggggagaaggagggggt

SEQ ID NO: 348915 - DNA, 122 bp, Homo sapiens
tactgtttcttctgtccagcttttcctttaggctcagggtacgtgtgtgggtctgtgacacgggtagtgagtgtcacagggctttggtgtacagatgattttgccacccaggtaataagcat

SEQ ID NO: 348916 - DNA, 122 bp, Homo sapiens
ctctgggaggtttgaggcctggcggggcggccccgggaagtgatttgtggccgctaggcgcgcgctggaaaccctttcccatctgcggagcccaccggagctgtgatcggaggaggaattcc

SEQ ID NO: 348917 - DNA, 122 bp, Homo sapiens
accattatgtaaatattatagtagttttaaagtagagtcacacactgcataatgacatttcggtcaaagacagacctcatatatgatggtggtcccataaggttataatggagctcaaaaat

SEQ ID NO: 348918 - DNA, 122 bp, Homo sapiens
gctaaagcaaatttaactctgcaaatgtgtattttaaaaggtcagctattgaatgtggtacggaaattgcactgccatgcaagattgaagtgttgtgtgaaatttcagcaattgtgcccatt

SEQ ID NO: 348919 - DNA, 122 bp, Homo sapiens
ctcaggacctaccgggggcgggtgctacacttaatcaccgggaaacgcagctttccggggcggctgacggcccaccccctccgaccgggctgttctctcccgggccctgcctctcggtcctc

SEQ ID NO: 348920 - DNA, 122 bp, Homo sapiens
cgtgaggctgccgcagggcactgaaagcccaggaccagtaaccaaggagaacaacccacccgtcgcccttctccgtatgctgcctgcgccagaagagctttgctgggccctggcttccctgc

SEQ ID NO: 348921 - DNA, 122 bp, Homo sapiens
aaatgagttctgtctgagataaatgtgcttatttacaccagcttctagactggctgaggtcggcccagggcctgcagccaggtatctgagcaatggagagagctccagagtgcagcttcttg

SEQ ID NO: 348922 - DNA, 122 bp, Homo sapiens
acatggtgtcctccatgtcctcacgccgtcttctttgaggactctggtcatatcggatgacgggtccaccctgttccagcatcaccttgtcctaacgaatcacatctgcagtgactgtactt

SEQ ID NO: 348923 - DNA, 122 bp, Homo sapiens
catgtaccccgcatttttacccagagagactggcaaagttacttgtgattcataaacacccgcggtaggcatccaaactgtgaccaaggtaagcctggtcagcagtacaataaagatccaga

SEQ ID NO: 348924 - DNA, 122 bp, Homo sapiens
ctcctccggggcgggctctccagtgagctggggagcggcagatgcgcccagcagcggctgcgccgggaccccacgttttccgctcaaggtggtttcgatgggggaggggtcttcggcgccgc

SEQ ID NO: 348925 - DNA, 122 bp, Homo sapiens
gcactgaagacatgttaatggaaggtggatttgtgattcagaacctctagactacctgggcgagtcttttaaaatgtaagtaatatcttaagtgatattacttgtcccagatcagttgttta

SEQ ID NO: 348926 - DNA, 122 bp, Homo sapiens
tgcggcggaggcacagagaggccttggcggcgctgtggcttcggtcggcaccgggtcccgcgcagccgggccctccaccctgagtggagctgccttctaagcacccagcccctgccaatcac

SEQ ID NO: 348927 - DNA, 122 bp, Homo sapiens
agtttttcacacaactatacctgcagcaaactcatatgcccagtgaagatatgtatcattcgtaatgactattgaattgcaatattccctgaaaccaaagtttttattttcttatctcctag

SEQ ID NO: 348928 - DNA, 122 bp, Homo sapiens
aaggggaaggcgctgcacctcgtatgtccaaaagcaccgactgtgggcgggctgttatttcgagctgcattttgccgattttttatttcttccaagctcatgtcatcttcatctagaaacgc

SEQ ID NO: 348929 - DNA, 122 bp, Homo sapiens
tgtcacagagaagatgacaccgataatttgcgtacgcaaagacaagaaagtgcattccaacgagagccaaagaatgaagtctggatacagtgtaggcgcaatgcaggggaccactgttacga

SEQ ID NO: 348930 - DNA, 122 bp, Homo sapiens
atgtgcacatctgtgtatcatttccagaagacatgggttggccagctgtcctggacacctcgagcacacacagactgcaagctccatgaaggcagcaggctgatctcccttgatcacggcct

SEQ ID NO: 348931 - DNA, 122 bp, Homo sapiens
ccaagccattggttgccgggcaccgccccattcgtctattgggccaaagaagatgccgttcggtcacctagaatggcatatgtggtttttattggtctaaatgtgaagcagtgcccgcccac

SEQ ID NO: 348932 - DNA, 122 bp, Homo sapiens
ctcctcaggtggcctgtggagaggagaaacacagggcaccaactatgaagactctcagggcgcgatttaagaagacagaggtgagtgtgaggccctagatgcccgatacacccctgcaactt

SEQ ID NO: 348933 - DNA, 122 bp, Homo sapiens
agcagcacacggggaagctgggcacgtggggcggaggcagctgcctggtttccatgtgtgcgccctttaagacccggcggcgcgacggaagcgcgtgggcagcacgtgggcagcacgtgata

SEQ ID NO: 348934 - DNA, 122 bp, Homo sapiens
atcctgcactttataaaaaactttccttcaagctcttcggctggacccccaaccacaaaccgtggctgggtgctctctgagcataaatcactgttaacttcaataagttttcaacattttaa

SEQ ID NO: 348935 - DNA, 122 bp, Homo sapiens
cagatgggcccagccacccagcggggcggcagccctgagcacacaagtttggagagcgcgcgaggcacctgaaagtggttggggtttggaagcaaaagggtgacacctgctgttcgctggga

SEQ ID NO: 348936 - DNA, 122 bp, Homo sapiens
gtcctgcctccctgcgtcagctctgccttataaatggagtgcattctatcaaaaccaggacgccttcagagctggagtgcagccagaccaacggggccctgtgctttattaatccccttttc

SEQ ID NO: 348937 - DNA, 122 bp, Homo sapiens
ttgccgcagcttcttgggggcctcaccctgcgggcggccctcggacctcggtgagccccgcggtccagccctcccagcagacacccctgcagccgactccctgggacccccgcctagcgcgg

SEQ ID NO: 348938 - DNA, 122 bp, Homo sapiens
aaaaaaaagcatttaacaaactccaacacccatgcatgattaaaactctctgtaaactaacgaatagaggggaacttactcaactggataaataatttttaccaaaaaacccacaggtaaga

SEQ ID NO: 348939 - DNA, 122 bp, Homo sapiens
catgattatttcaatgaacctcttcctggtcactcttaagatagatctgagtttttgactcgccagtcaagggctttggcgacactcaatgacataatattcttggaaaaagcagtagcatt

SEQ ID NO: 348940 - DNA, 122 bp, Homo sapiens
ctgggtgttgggggtggtcctagggccttagggatcaagggggtgcccaaagctcagtaacggctcccacctgcagggccccaggcccctgtgactcagcccagagacctggcgcaacccgg

SEQ ID NO: 348941 - DNA, 122 bp, Homo sapiens
gcgagtcacgccctgtctgggcaaaagaggagtaaagacccctcagctgcagcccggcagcgcattcctacccagggtccgccgccagagctttcccgcgcggtcggatagttacactactg

SEQ ID NO: 348942 - DNA, 122 bp, Homo sapiens
caaagttcaagagttttcgctctaaggtttaattccaaaccacctaccactaggcactaacgaactaagcccagacgctcagcaaccaactcattaaggtaagagatcccatcctttccata

SEQ ID NO: 348943 - DNA, 122 bp, Homo sapiens
tatctagcgccctgaaaccgaacatacagccatatattagattgaggttagaagaggtggcgactgtttattcaaggtgataaaatggtccatcagcagtaatctccatcgatatgtgccac

SEQ ID NO: 348944 - DNA, 122 bp, Homo sapiens
caatctcctcccactaggcccctccttcaacaccgggaattacaatttgacatgatatttcggtggggacacagaaccaaaccatatcgtttggtattccagaatttctgccttgctgttgc

SEQ ID NO: 348945 - DNA, 122 bp, Homo sapiens
actgtgccctgcctaaagccaacacattttccaaaaatccctggctgcctcaacagttttcggagtgctcttacaatcctcaggggtgctgtgtgtggggtgtgattctctattaatccaag

SEQ ID NO: 348946 - DNA, 122 bp, Homo sapiens
gcagcctacgcccaggccattccctccaggaccattgccaacaccacctgccacctgccacgtacagacgccatgcacatgtttcgagacccccacacaggggacctgccgtggaccgggat

SEQ ID NO: 348947 - DNA, 122 bp, Homo sapiens
gtcagggatcgggtttcgtaccggctgcacccgaagatgccctccacaccagctgcaccacgcccaatacctgggagcacacagtggccaccaagtggaagacattattctccgccgctctc

SEQ ID NO: 348948 - DNA, 122 bp, Homo sapiens
tttatcatagctatgtatgtataagagaaaatagtatatatagggtttggtagtatctgccgttccatgaatccactggtgatcttggaatataacctcctcagataaggagggaactacca

SEQ ID NO: 348949 - DNA, 122 bp, Homo sapiens
ttggtgcattttctttatttcattttattttttctcttttgagacggagtctcaccctgtcgcccaggctggagtgcattggctcgatctcgactcactgcaacctccgcctcccaggttca

SEQ ID NO: 348950 - DNA, 122 bp, Homo sapiens
gcccttcattcctccccgtcagcgttctgagccacaattccttcccatcctccgcctgagcgctctccacgtccagccccaaggctgtctcaccagtttggcaccaggccggtatcttccgc

SEQ ID NO: 348951 - DNA, 122 bp, Homo sapiens
cagcgccgaccctacaaaaacagggcccgcccatctccgaggatggcaaagtcaacagtgcgggcacgcgggcggccagtccccggcggcccgcgtgcgtcacgggggcggatgcagaggac

SEQ ID NO: 348952 - DNA, 122 bp, Homo sapiens
gtcccacctgccacaggtgagctagggttttatgacagccgtggctgcagtgagtctcctcgacctctcgccagctgttacccagcaaagcaccttggggagggtggggctgcccacttccg

SEQ ID NO: 348953 - DNA, 122 bp, Homo sapiens
ggtggctaatcctcacaaggctctccatgagggaagctcacccctataaatccaggcgggcgcttcgttacccaggagcccaaggtgcagctccgggacgcttcttttcaaggccgggaccc

SEQ ID NO: 348954 - DNA, 122 bp, Homo sapiens
ctgcgcgcctgattggacagttcccaccccagagccctgattggatagtagtgcaggcaccgcgacctcaggccttgcgtgtcagaagatgctaccatacactgcacggaatgagccgagag

SEQ ID NO: 348955 - DNA, 122 bp, Homo sapiens
gtttcctttccccagcacagagcagccttccaattgcacagaaaatgtatcctcagtctgcgtactgaagcactctttcatgaaatcaaaaattgtaaaaaagttccagaacacccaactcc

SEQ ID NO: 348956 - DNA, 122 bp, Homo sapiens
cctgcctttgctttcctcccgtaacctttgcctgactgccttgtcctctccctcatcccacggggcactcccatgcggtgccagagaggggaggctttgctctgcagctcctccgggccatt

SEQ ID NO: 348957 - DNA, 122 bp, Homo sapiens
ccctccagccgcggtcatcacagaatggcctggcacggtgaccacggagtgccctggcaccggtgcccgcggctgtgacggaaaaagggtgggaagaacagggaagaggaagcagaaacagg

SEQ ID NO: 348958 - DNA, 122 bp, Homo sapiens
tcatccggcagctcgccgggtcctgccttcctggcctagaggagtcgggcaggacgggtccgttcaccctttctgctggttccggcacccccagcactggtcatcaatctgacccctttcca

SEQ ID NO: 348959 - DNA, 122 bp, Homo sapiens
cgaggcccgcgggacccagcccagagctgaggttggagttctccgggccacgttccgggtcgcttaggctcggagatttcccggagaccgtcgtcctccctttctgcttggcactgcggagc

SEQ ID NO: 348960 - DNA, 122 bp, Homo sapiens
cagaagcagtgcgagctctgccccacgagccgaccacattcgcagggtcccgtcccgggccgcagagagcagccacctccggtcctggctccagcacacggcattcactgccccgtcgtgac

SEQ ID NO: 348961 - DNA, 122 bp, Homo sapiens
tcacatgatgagttgcagtcaaaatgtagccaaaactttgtttcatgaataggccaagtgcggtggctcacgcctgaggccaggagtttgagaccagtctggccaacatggtgaaacctcat

SEQ ID NO: 348962 - DNA, 122 bp, Homo sapiens
ggtgttgcgaagggaactagtccggtgcaggacgtggggcttttgcagctcagctggttccggctggggaagatggcggtggctggggcggtgtccggggagccgctggtgcactggtgcac

SEQ ID NO: 348963 - DNA, 122 bp, Homo sapiens
cctaaaccaattctgaggaccacgaattcggattatccgggagttcttttgccatggcaccgcccccgccacttccgctaggaacccggaagttcctacccgacgccggaagtcccacggcc

SEQ ID NO: 348964 - DNA, 122 bp, Homo sapiens
aaggccccacagtggcccccagggacccagatcaggatcagggcagggtcccaaggacggcggcccagcacccaccccgggcgcagagagctttgggagtgtgggccctgagtctcgggtgg

SEQ ID NO: 348965 - DNA, 122 bp, Homo sapiens
cattattttattatttaattatgcaatgcctagttcctaaatggattggaggcaaattaccgtaaattttgaaacagcctatatgtcagaaatgataatgttgccacctaaatgttttctgt

SEQ ID NO: 348966 - DNA, 122 bp, Homo sapiens
agataagatgttgaagagataggaaggtgggcaagaccactgtgtcatggctaattgtttcgatgtcatcctgagggcaatgggaagccacagaagagatttaagcaagggctgacttgcag

SEQ ID NO: 348967 - DNA, 122 bp, Homo sapiens
ggcacgtgcgggaggggcaggagccgggaccaggaaccgctgtggtgagagccaaaggcacggggactggccgccacagacctttggccaccgcagtggggatgggggtgggcgggcgcttg

SEQ ID NO: 348968 - DNA, 122 bp, Homo sapiens
gctcaaggtgcattggccaacatagctgtggacaaagccaacctggaaatcatgacaaagcgctccaactatactccgatcaccaatggtacctccctctctgctgcactcctggacatggg

SEQ ID NO: 348969 - DNA, 122 bp, Homo sapiens
tcaaagattctggttaaagtaagacttgacagtcttaaaaacattagtagtcatagagaacgttaacttcctctgaacattgttggcaaaggaggctttcaaataagtactgcatattcata

SEQ ID NO: 348970 - DNA, 122 bp, Homo sapiens
gcagggtccagccagctgccagcagctctgcagctttaagaactggggcgggctagctgccgaggagaccacgctgctgcatgggccacgtgagctcaggctgtgggagcggatggagctgc

SEQ ID NO: 348971 - DNA, 122 bp, Homo sapiens
ggaagtgggagacgctgcgggtcctgggcccaggccttgggatgggcgggaaggcttggccgcgccgggctgtgggcactgcaggaggcccctgtgcaggtggagatcgccgcggccctggc

SEQ ID NO: 348972 - DNA, 122 bp, Homo sapiens
gaacactgatttatgaatcatgtcctgctgtgtgcaacgttgcagggaggcctccgtttgcgatttgggtcgatcccattagaggtgatggattacaaaacccagcagagggtgctgttgtc

SEQ ID NO: 348973 - DNA, 122 bp, Homo sapiens
aggcactcacctgagcaaccccatcccaggctctgcgtctagggagccccgacctaaggccgtcatggtctcacaacgctgcttcactgttttgcatctgccccacttggcatcccctccac

SEQ ID NO: 348974 - DNA, 122 bp, Homo sapiens
aaacaagtccaaagctgctcagccactgaagagtcctcaggagagtagtgctgatgtccacggaatgtgggagcagcacatggacaagcctgtgagtgggtttcactcagtggaatccctcc

SEQ ID NO: 348975 - DNA, 122 bp, Homo sapiens
acccgacaggccagggtggtcgtggcatcgagtccatcgttggtgcaaatggccgggggccggtggcggtggtggggcggggggcacggcccgcatcaggcaaatcccggaggcgccctctg

SEQ ID NO: 348976 - DNA, 122 bp, Homo sapiens
cgagcacgcctctgacatctgcgcaggctgctgtgcctctagcttcctgctctctgactgcggctgccttggcatccagctcctgtagctgctccaagaacctgggctctgtcactggagcc

SEQ ID NO: 348977 - DNA, 122 bp, Homo sapiens
ttttccttaagccttgatttcctgaagctctctctgttccttatttgggaacaaaaattgcgaagactcatctttccctagaactctgaatggatgaatttttaaaagtggggagaatgttt

SEQ ID NO: 348978 - DNA, 122 bp, Homo sapiens
tcagctgcagtaaggctgtaaatgtttcccctgcggaatcctgggaactgtaggtccaatcgttctaggtagttgtaggcacttccggctcgaggaaggcagtgctgtggaattctgggaag

SEQ ID NO: 348979 - DNA, 122 bp, Homo sapiens
ccgaatgctgtgcaagtgcgacatcaacttccactaataagggtcacaaccgcccttcaacgtagaagcaaccatctcggtgcccaaggtcaagagagacaccgaagcccggaaatgcccta

SEQ ID NO: 348980 - DNA, 122 bp, Homo sapiens
acaagaggtaaatcaccaagacataaaacaaaccagaatggagtatgttgctaactgacacgtaggtttttaatgctttccacagattttttcctaagggtagaattgtgtattttactatg

SEQ ID NO: 348981 - DNA, 122 bp, Homo sapiens
tccaaaatcccttgcaacatcctgagtgacaggagtgccttttcttctaatgaagtgactcgctgggctcctggacagcatcaggatgagggctggtcaccaggaagaccaagccaggattt

SEQ ID NO: 348982 - DNA, 122 bp, Homo sapiens
gctgccttccttagcagcttctgtcctcttctgtgagtcagtcagcgagtgcttgggatccgcatccagccgtgctgagcacacaacaggctgtgtgtggaaatggccaccaccattctcct

SEQ ID NO: 348983 - DNA, 122 bp, Homo sapiens
gcaaagactaggaggaccaaggctagtagtgccagcctcagatgatttgcacatgaaagccgcctttccgtctgcagctttatgcatttccaaaagacactcaaatcaggggctcagcttga

SEQ ID NO: 348984 - DNA, 122 bp, Homo sapiens
ctaatgacttggcggctggctgcgaccccccgggaaatcaggtgcaagcatgtgtgttcccggggcgcgtgtgtgggtggcctcgggatgggggaatagggagcggagaaaagaaaccgctt

SEQ ID NO: 348985 - DNA, 122 bp, Homo sapiens
ccgcttcgtctccccttctcctccccgtctcagggagcctgcagccagggatcaggcaggcgagatgctaaggtaataattgtattaatgaaaacggcaaacacacatcctttccatctggc

SEQ ID NO: 348986 - DNA, 122 bp, Homo sapiens
ccctgactgaagagctctgctggttttattctactacaatcggaacaagaccctaggactcgcaataatccgtttctctcccgggagacagggaatggctcgcaaccgccctagaagcctgc

SEQ ID NO: 348987 - DNA, 122 bp, Homo sapiens
tgcagacccgaagaggcagcggcgacccgaaggggcagcggagacccgaagagacagtaacgcctgagcgctttctatgctaggttggatgaggacacagaggtcgtggggaagcatgacag

SEQ ID NO: 348988 - DNA, 122 bp, Homo sapiens
atgttgaagcagtgacgggctccaggagcagccaccggtagggcgtggcccagagccgagcgacaaaggtccgtcccgtctgcgaaggtctaggaaaaagtggagttaaggccctagtgggc

SEQ ID NO: 348989 - DNA, 122 bp, Homo sapiens
agatctgtcccgggcctaggggcaccaggaaggctgcgtgctgggcaggaggcccctccccgggcccaggagggtcagcgatcacctggacggcgtagatggcgtgcttgctggccacagag

SEQ ID NO: 348990 - DNA, 122 bp, Homo sapiens
cattgtgcgaatcgccatactgtgttagtctagcattgctagtcacttactaggcactcgcgaagtgtagctgactcctagtgttgttgctcttagaaaacacccatatgttagaaaaaaaa

SEQ ID NO: 348991 - DNA, 122 bp, Homo sapiens
attattctttttgctcatattcttccacctttggccactgtgagcccctttaagttggcccgagtgcttttgtcacaacagtggtcttgaatagccttttcactttctggcatgacaaaatg

SEQ ID NO: 348992 - DNA, 122 bp, Homo sapiens
gagccgggccgggggcgggggccgggcgccgggcgagaggtggcattgtgtaggggagcgcggagctgcatttgtctgctccaggtgctagccaggcaggcgcagccgtggccggctagggc

SEQ ID NO: 348993 - DNA, 122 bp, Homo sapiens
gagagagggggaatgaaaggggagagagagggaccaagaccggcgagcgggagacaggagcggaaaccacagaggtagagtcagggccgacactgaagaaacgtagatgcacagggaggggc

SEQ ID NO: 348994 - DNA, 122 bp, Homo sapiens
tgcaccgtgctccgagcccggcgcgcgctggtctcagctcgcgcacgggggtgtcggccgcgcgcccggtcgcttctccgcggccccggccagaagcatttttaaagtcaaaatgaagaaca

SEQ ID NO: 348995 - DNA, 122 bp, Homo sapiens
tttttggctaggaaataaaatgaacgttagcaataaggttgggttttttgttggtggtggcggttagaaaaagaacctcaacccatcttatttactggatccaaggtttcgtagaatgtttg

SEQ ID NO: 348996 - DNA, 122 bp, Homo sapiens
gcaactgtcagctggagcagagcagcaactgctttcattagaagaggtattggaaaggaccgcacattccccaagtgccacctgtgcttcattgcctgttgcttacaccttgcctcctttgc

SEQ ID NO: 348997 - DNA, 122 bp, Homo sapiens
ctgaccttgtgatctacccagctcagcctcccaaagtgctgggattacaggcgtgagccacggtgcccagcttcactatgccatttcatgcaaggggcttgagcatctgcagattttggtat

SEQ ID NO: 348998 - DNA, 122 bp, Homo sapiens
cgggaggctgagaggcgcagacgccgagcccggggtgccactgggccccctcgccgctggcgccggcagcccccaccagctggggctttgcctgaaagggttggagggaaggaactgagacg

SEQ ID NO: 348999 - DNA, 122 bp, Homo sapiens
tttcccaaagtctacaatgtgactgaaatgtactgagaattccagtgagaataaggcagacgtggcctgaaatttatgatgctgtctaccaaaaacctgggctcgaggccagcacctaaaaa

SEQ ID NO: 349000 - DNA, 122 bp, Homo sapiens
gctgaggaaggaaaacggcccttttgtgggcatcacttctgctcttctgaaaaaaagccccgatgctgcaatatttttcaaggcagaatatcgtcccagatggaggagggagcactgacaag

SEQ ID NO: 349001 - DNA, 122 bp, Homo sapiens
tgatccgcctatctcagcctcccaaagtgctgggattacaggcgtgagccactggcccggcggcacaaccaaatcttattaaactcaccctaggctggccgcggtgactcatgcctataatc

SEQ ID NO: 349002 - DNA, 122 bp, Homo sapiens
gaggccggagctgggcctggggaggctgacttgaggacgacttgggcctgcagagtctgtcgggaggcaggagctgtccctggacaggcctacttgacgacaatctggtcccgcagaggctg

SEQ ID NO: 349003 - DNA, 122 bp, Homo sapiens
aggagacgccgtgaggatggtgttggagagggcgggaacggcccacccctattgtatgggcggctgagtcttctcggacacctcctgaggtctcctttcaagggttgtagaactgaaggtga

SEQ ID NO: 349004 - DNA, 122 bp, Homo sapiens
agcgtccgcagggccggaaggaggcccctgccccgtccaaggctgcaccagctgccccgccgcccgcccggacccagcccagcctcattgctgacgagaccccgccctgctactccctgagc

SEQ ID NO: 349005 - DNA, 122 bp, Homo sapiens
tacggtcctagaaccatcaccaatctagatggaaatatatccatcaccccaaagttccatcgggctcttttgcagcctatttccttctccactcacaggcacactgtaggaaaatgaactta

SEQ ID NO: 349006 - DNA, 122 bp, Homo sapiens
actggaacacttagaaaaaagttgtgcgaaagaaggaacgctgaacctgtccacgggaaacgggagactcctatagcacagaaccgcgtgctggctttagcccaaagcctttagcgcctacc

SEQ ID NO: 349007 - DNA, 122 bp, Homo sapiens
gcagacaagggcgttgggggtggttaagagcgcccaggtcttcctcctgccatctctaggcgtccctcccactccgccccacccactccagaccttccgctcctgtcgacctcactctaccc

SEQ ID NO: 349008 - DNA, 122 bp, Homo sapiens
atccaaggggaagtttgaaatgcaaccatgtaactggcacagactctgaagagatacccacgtggcagatggttttcttaaatattgagtcaacaaactttaatgctggagtagccacaaag

SEQ ID NO: 349009 - DNA, 122 bp, Homo sapiens
gctggcctccacattcttgctggtggaagaccacaagcaacgggatgccttggaaagcatcgttctgcagcaggactgctcaaccggccaatcagaacacagggaaccatgaaagaggtggg

SEQ ID NO: 349010 - DNA, 122 bp, Homo sapiens
cactgtgtacacaaaaaagaaccccacccagaaagccccgggcgcccaagctcgggctggcggtgagaacagaggaagcagagcgacttcctcctgcaactggggagagagggtggtgatgg

SEQ ID NO: 349011 - DNA, 122 bp, Homo sapiens
ctgtaggggctccatctcccgtccaaacagtggaatactaatacccatcaggaggagtggcgtgagcgagtagccctggctgcccctctctttcctcttgacaagctctcagctctcctgtc

SEQ ID NO: 349012 - DNA, 122 bp, Homo sapiens
tcacctgtgagtcccgcccactgtcccaccccgccctcaccaggcagtcgagctgggccacgggcgtcttggccccaggctggcccacgtcccacaccttcacacagcccttgccgcccgtg

SEQ ID NO: 349013 - DNA, 122 bp, Homo sapiens
gcccttggccatttttgagtagactcgccttaggtcgagtcctggttccccactaataatcgagacatttcctttgttccgagacgcaagaaatggtgggtagtcgcgcacatctactcctg

SEQ ID NO: 349014 - DNA, 122 bp, Homo sapiens
agcaaacggagaagctgcaaaagggccccagccataaacaaattacatttgttacacaaacgtgagcatatgcacatgcagagacagagagctgggactacaggcacataccaccacaccca

SEQ ID NO: 349015 - DNA, 122 bp, Homo sapiens
ggattggtgttggcaagaaagcaaacctctcctccccacgctgtccttaccccgcgtatccgacgagcctaaagtcataggtaagagatctgtagaagcgacgtcaaggtgtggttccctct

SEQ ID NO: 349016 - DNA, 122 bp, Homo sapiens
acgggacggggcctcttaaaggaaccgaacctttatctccttttctgaggggcgttccagcgctacccgtggaacacgtggtggacaggcctttggttccacgctccacagtaagcaggttt

SEQ ID NO: 349017 - DNA, 122 bp, Homo sapiens
ccgccagccgcccgggcgtccccaattagcagttggggcgggaccaagtcctcgagctgccgccgcagcggcggttgaaagccccaccccctgcgcgtgcgcggtgcgcgtcccgtcttcct

SEQ ID NO: 349018 - DNA, 122 bp, Homo sapiens
agctttgctccactgaaggaagcaaaagtgtttatagagaacatccaagttgactatgagcgactccgttagatccttgagaccctgactgtctcaggcatgaatgacttggcttgaggagc

SEQ ID NO: 349019 - DNA, 122 bp, Homo sapiens
cccggcctgtgtctggctcaccttccctggtggctgcactgctctggggtcattgggtatcggggaacctgccccgatggtcacgtaggttcttttctattttccctaagtgttggccggtt

SEQ ID NO: 349020 - DNA, 122 bp, Homo sapiens
ggggtccactctaccgggccttctgcccgcgtccaccgcgctccacggcgcggccggcggcggtagggaaactctcaggggctccttctccgcggctgttctccccgccgcctggctcgcgc

SEQ ID NO: 349021 - DNA, 122 bp, Homo sapiens
ctctctattcacacacaaaaggcagaatgagattccacctgctgactttcccttcctgcccgcacagcactagtgcttatgtcagaacaagctgggagagagggagagacgacaatttcacc

SEQ ID NO: 349022 - DNA, 122 bp, Homo sapiens
cccactcagcctcagtgtacacacgctggtgcccacaggcgggccacctcttctgggcagcgtgtcacctctatgcacagtgggaactcagcaccgtccggcagcagcttcctgctgaccca

SEQ ID NO: 349023 - DNA, 122 bp, Homo sapiens
cggctgtctgccctaatgcccccggtttgctgcggtggcccccggccagtcagaaaggcgcggagaccctgcagcagcccctcagaccccggactgcaagatggcggcaccaacgcagcagc

SEQ ID NO: 349024 - DNA, 122 bp, Homo sapiens
aggccaacgcaagaagttaccagtagcctatttcagatttattaaaaaacacataggtaacgagtcagagctttggctaggaatgatttggaaaagaactgaaggcataattccacaggaca

SEQ ID NO: 349025 - DNA, 122 bp, Homo sapiens
ctccctgtccacctgttcctgtcagggctcggataggcctccctgtccgcctgtgcctgtcggctcaaataggcctccctgtctgcctgcgcctgtcagggctcggataggcatccctgtcc

SEQ ID NO: 349026 - DNA, 122 bp, Homo sapiens
cacaaccaaacgccctctgaagggcccaactgcctgaggttgcaaacctttatttcccagcgccaccccctctccgactgaggtttgcacacacagtcgcctcctcccccgccaccgccggc

SEQ ID NO: 349027 - DNA, 122 bp, Homo sapiens
caattatcagagagttttggcaatgcctggactgatttctctatgtatgcattatgagctcgatattgagctgatgctatggggcaaataataagggtaggataaatcaaaaatataattcc

SEQ ID NO: 349028 - DNA, 122 bp, Homo sapiens
ggagaagcttcactgagcacaaacccttctaacccgtgtcgggagatccataccatgattcgatgtccctgtccatcacggcgagtcggctcatgctccatcgttgcacaccccgacacagc

SEQ ID NO: 349029 - DNA, 122 bp, Homo sapiens
gctcactgcagcctcaaactcctgggctcaagtgatcctcccacctcagcctcccaggtgcgtgccaggacacccagccaattttttaaattttctagagatgaggtcttgctatgttgccc

SEQ ID NO: 349030 - DNA, 122 bp, Homo sapiens
cgccccgctccaggctccctggcccgacaccgcccacaaactaaccacttgttttgtccacgccccctcccatgggcacgccccaggccttggccccgcccacctactccggctggacttgt

SEQ ID NO: 349031 - DNA, 122 bp, Homo sapiens
ggcaagcatgcgcaatgtgggccgggcggggctggcgagcatgcgcagtatggggcggggcggggcagggctggtgagcaagcccgcggggagcgagcgcggaggcgggcgttgctacggca

SEQ ID NO: 349032 - DNA, 122 bp, Homo sapiens
tataaagcagtcaataaatgcttactaatgaagagctctaacatttatccaggagaactacggattattgtgccaaaaaagaaacttaagtcttccacttccatctaagccttagagtaact

SEQ ID NO: 349033 - DNA, 122 bp, Homo sapiens
tcctttgtcagtatcagccaggtcatcgctgaccccggagttgggctgaccttccttggccgcccggatgccgacccccaatgcccctgtagcctggaactgctgggtcggcctgtgccttc

SEQ ID NO: 349034 - DNA, 122 bp, Homo sapiens
ggagctgagggttgagggggtgtgctcccttctaggagatgggcgggggcttggcctctccgaaggagacggggccgagctggggggggcggagggaggaggaggaggaggaggcggaggcg

SEQ ID NO: 349035 - DNA, 122 bp, Homo sapiens
accctaattgtctatgtaagggattgtgtggatgaaaaatacaatatgtgacggcgtgtgcgaaaaatagggctgttggcatattaactcaattttataggagagtacataccctgctttaa

SEQ ID NO: 349036 - DNA, 122 bp, Homo sapiens
gcgaacccagggcgccccgggtccgggagccgcggtgacaggtgcaggcgggggcgtgcccgggcctcctgcgccacccccgagccccgcgccgcctcaccttcttgagccgctccatcagg

SEQ ID NO: 349037 - DNA, 122 bp, Homo sapiens
ccctcattacaattccgggctgcatgtggtggtttctgtggcagagtttataagtgtcctcgccccacgtctgtggccgggtgcccaggccacgtgtcagccctgggaggggtggacagaga

SEQ ID NO: 349038 - DNA, 122 bp, Homo sapiens
ttaggcccatggaagccgagccgcacctcattcctatatgcaaattagctgctccagtgccgaaagctccgccccatttgtagttgcgtcggctgtccagcacccagtgcaaacgaggcgtg

SEQ ID NO: 349039 - DNA, 122 bp, Homo sapiens
tggccgggcggggctggaggcgagaacgaccccacgggctttcccagggccgtccgcccgcggaccctcccagctccccagagcccagtgaccctcgcgcagcaggagaaccccagacggac

SEQ ID NO: 349040 - DNA, 122 bp, Homo sapiens
gcccaaggggtgtggactcagcagccccaccccagaccagagaaggcagccaggctctggcgtccaccgagccagcgcccctatctgggcgcgggccgcatggcggcagaccaccctatatc

SEQ ID NO: 349041 - DNA, 122 bp, Homo sapiens
aaggtcactaatggctaccagaatcccaaatctgtgcttcttcttgttcctaattcccttcggtccccatgttgctgttggcactgcaggttgtgtttttcttgaaacattcttctccactg

SEQ ID NO: 349042 - DNA, 122 bp, Homo sapiens
actttggaacccgatacgtgtgccagtttccagaccaggaggaagtgcgtctcttctttccgctgcacctctgggtgaagaatgtgttcctaaaccagactcggactcagcgagtcctcttt

SEQ ID NO: 349043 - DNA, 122 bp, Homo sapiens
tcgaccagagtcttcccattgcaggagcttttgtcacaacttaggctttacctgtacaaccgtcatctccacagaggagcgacaagcctttatgcaatatggacaccaagaaaaccgccttc

SEQ ID NO: 349044 - DNA, 122 bp, Homo sapiens
tcactgatggtgtctgtttgtccagacagctgaatgcagcgacattccagtttctccacccgctcattctcctgcatgagctccataaagcggctctggagtcaaaataatggggtcacatc

SEQ ID NO: 349045 - DNA, 122 bp, Homo sapiens
agctccctcggatggcctctcggcctcgtaatgggacagcaccggcttctgcccgtactccggcactcagcagctcatggggagcctgctccggatgctcaccggtcacctttactccacca

SEQ ID NO: 349046 - DNA, 122 bp, Homo sapiens
ggaagccggtggtgccgaaggcctccagcagtgcgcggtaattcacaccgcggttgaagtcgtagccccggacctgggtgctttcgggcggcaacgtcgagctgtgctttagcacggcggcc

SEQ ID NO: 349047 - DNA, 122 bp, Homo sapiens
aacttgcgccccaactccagaggcagaactccgctcccagagagcgacgcgtcgccgccccgggtggccccgcttgctccaaactgcttgaatcctcacagtgacacccccaacaacgcgcc

SEQ ID NO: 349048 - DNA, 122 bp, Homo sapiens
ggattacaggcatgagccattgtgcccggctggtgaatacattatctttacatgccttttcgtgtgataaagtcccacggaatgacttgctgggccaaagtatataaatacatacatacatc

SEQ ID NO: 349049 - DNA, 122 bp, Homo sapiens
ccgcgcgttgggaggtgtagcgcggctctgaacgcgctgagggccgttgagtgtcgcaggcggcgagggcgcgagtgaggagcagacccaggcatcgcgcgccgagaaggccgggcgtcccc

SEQ ID NO: 349050 - DNA, 122 bp, Homo sapiens
gaggggagaggcttcagggcagtgggcggggctcaggctcagggatgcaggggtctcacccgcgtcctgcccgtccaggtcgtgtcccagtgcggccgttttcattctggccgtggccgccc

SEQ ID NO: 349051 - DNA, 122 bp, Homo sapiens
aaactgatcaataggaatgagaaaagacccataagaaagacactcgattgtgtcttagaacgctgggtataaagagaagatcctaaagcttcttgagacaaaacaaaaccgaaaccaaagcg

SEQ ID NO: 349052 - DNA, 122 bp, Homo sapiens
ctgcctctgtgttgaatattggttgtgtgattggttggctgtggaggcctcgcaataaaacgtgaattcaagcttatgttgcgtcgttatgaaaccttcgggcgtaggctccgcctgtggtc

SEQ ID NO: 349053 - DNA, 122 bp, Homo sapiens
gtcctgtctcttcactgtgcggtgactgtgccctggcttggagccctcgctgggcagctgcgcacccgcagagccgcttctctcccagattgtgcagagaccacgggagagtcgtcagggga

SEQ ID NO: 349054 - DNA, 122 bp, Homo sapiens
agcatccttgagtacttccgcccctacctgggccgcatcgagatcatgggcgcgtcacgccgcatcgagcgcatctacttcgagatctcagagaccaaccgcgcccagtgggagatgcccca

SEQ ID NO: 349055 - DNA, 122 bp, Homo sapiens
agcaaaaatctggaacaaagcaggataacaagatgtctgctcttttatgaaaaaagtgggcggccctgaaaagggcctttggttgaaaatgaaaataagagtgcagcaagcaggagccttag

SEQ ID NO: 349056 - DNA, 122 bp, Homo sapiens
gaacagcggtcagtcttgggcacgttgctgaatcccatgagtgatggccaattcaggaggcgaagcacccagcaagttccccaccacagcggacatggaacacgcacgagaggcagagacat

SEQ ID NO: 349057 - DNA, 122 bp, Homo sapiens
ggcgcccgggttctgcttcttccacttggttcggcggttctggaaccagatcttcacctgcgtctcggtgaggctgagcgacagcgccaggttgaggcgctcgcacaccgacaggtagcgcg

SEQ ID NO: 349058 - DNA, 122 bp, Homo sapiens
gcaggtgaagggctggtacccaaaaacacgcctctccaccacgtgaccatcctcatctatcgcagtatacccctgctctctcaggggcatttgtgtccccgttttgtgtcgcaaacgagctg

SEQ ID NO: 349059 - DNA, 122 bp, Homo sapiens
aatggattggggaaattgaaggctttaaagccacggtctctattcctacacccagctttccgtcctcggttactatcgcccaagatcaaagccaccctggttttctgattgccgcaactgcg

SEQ ID NO: 349060 - DNA, 122 bp, Homo sapiens
tcgtcgcgtagcaacagaacctcgccatactggaagcggggcgcgggggggggattttctcgactgaggatgctgctgcccggtagccagcaagggccctgtcggtctcaaacgtgaatttt

SEQ ID NO: 349061 - DNA, 122 bp, Homo sapiens
cgtgtccctcctcacagaggccctgatgaggacggggaggaggaggccgctccagggccgcggcaggcgcacgacagcctctaccgcgtccacatgcccagcctgtacagctgtggcagcag

SEQ ID NO: 349062 - DNA, 122 bp, Homo sapiens
gagagggaaactaaggcccagcaggccagacttgcccaaggtcacacggtcagccaggagcgcagggaggccgagccccgcaccccagatcgctggtgcgccccgcagggtggtccgggagg

SEQ ID NO: 349063 - DNA, 122 bp, Homo sapiens
taatttatacaaaggtcaccagtttatactgcatgtgaggaaggaaggcagtcagatatgcgtgactgcatctagacagaaaaagtcttgcatttatagccagagcagctttctgctttatc

SEQ ID NO: 349064 - DNA, 122 bp, Homo sapiens
cttctctgcattttgcatcgttaggtcttggagagagatgcgagaggtttgggccctgaacggagttaaattatgcagctgcggggatgccaggtcctccagaataggatgcttcgtttaga

SEQ ID NO: 349065 - DNA, 122 bp, Homo sapiens
ccacgaacagtacctggtaggcattcagtaagtgttatgttgattaactgacttgcctgacgattggtgtggaggcagaataccagggggtgagaggaatcaaatgatcaatgtaaatgcac

SEQ ID NO: 349066 - DNA, 122 bp, Homo sapiens
ccatggcccggcctgagtgctcctggcgtgcacctccctcccaccctgaccccagccctgcgggagcacctcagagcatggcccggcccctgaccctcatctgggggtgccctcagcaggag

SEQ ID NO: 349067 - DNA, 122 bp, Homo sapiens
cctttccggaagtcattcaggatgccatattgactaagggcaagtggtacttcctgaatgcgaattattcttggtctcactgtctgcgggactagggcccttggaaacgattaactgaacaa

SEQ ID NO: 349068 - DNA, 122 bp, Homo sapiens
ggcagggaggagcagatgccgcaaggcagagcagcacagaagggaaggtctgtatgtcagcgagactgagttaaatttaagtgaatctcgcagctggaaagtatcttctagatctccgatcc

SEQ ID NO: 349069 - DNA, 122 bp, Homo sapiens
gatcacaaagatctgataaggcaaagtgatcaaattcattgatcgtaggtggccacctggcgataaggactgcagggcctaagaaagtacaaaagatgacctttagtaggagctcccaaccc

SEQ ID NO: 349070 - DNA, 122 bp, Homo sapiens
acgggaagctacagggtagtgccacaaggtcccaggagactttccgccagcttccctcaacggtgacatcttaggtaatgggtgcaaaaccagaaccaggaagttgatgtgggtacgagcac

SEQ ID NO: 349071 - DNA, 122 bp, Homo sapiens
actgacttcaagaatgaagctgcggacccttgccatgactgttacggttcttaaaggtggcgtgtccggagtttgttccctctgatgttcggatgtgttcggagtttctcccttctggtggg

SEQ ID NO: 349072 - DNA, 122 bp, Homo sapiens
cgcaacccgagaccccgggccagccctcccgccctcacgcggcccgtgcgcaaagcggaccgggccggcgacgcgaatctccgccccgccccatctgacagcaaattttcccattggtcgag

SEQ ID NO: 349073 - DNA, 122 bp, Homo sapiens
gtgacatacctgctggccttgacaggcaacctcctcattatcaccatcattaccgtggaccgtcgtctccattcccccatgtattactttttaaagcacctctctcttctggacctctgctt

SEQ ID NO: 349074 - DNA, 122 bp, Homo sapiens
agcccttgcgccttccttccgctaggtggcggtaggagttcggcggaccgagaggttccgcgcccacttcgcggcccagaggactgagcccggcctccggtgcaaggaaaccccagaggccg

SEQ ID NO: 349075 - DNA, 122 bp, Homo sapiens
aaaacagccttccacagaagtcagacgctgagctacaggaacggctatgcaattgttcgacgtccaacagttgggataggcggagaccggctccagttcaaccagctgtcccaggctgagct

SEQ ID NO: 349076 - DNA, 122 bp, Homo sapiens
ctcaaaaagctgaacagagaattaccaagtcatccgcagtcccactggcaggcatatacccgagaactgaaggcaggatgcacccagatcccgtccacccgttcacaacagctgaaaggtga

SEQ ID NO: 349077 - DNA, 122 bp, Homo sapiens
gtggctgtctgggttcagagtcaatcttgcaacagggcccccttggcaagggtcacagtgcgacgccgcgctccccttcaccaccccagctcggcccagcgagaggtgcagcacgtgcaggc

SEQ ID NO: 349078 - DNA, 122 bp, Homo sapiens
gtggagaccagcgtatgaatcacttcggccctcgcatgccagctagtgattgagtgtgctcggccccgtccggtcccgtcccgccccgggatccaggggagcctacgcctgcccacgtttgg

SEQ ID NO: 349079 - DNA, 122 bp, Homo sapiens
ccctggcgcagcaggaggggagaagcccgcagaggcccggacgcccccctcaccggcccccgccactgtgcttggagcaggtgcatcctgtctggagcttgtgctggcccggcgagtggagc

SEQ ID NO: 349080 - DNA, 122 bp, Homo sapiens
caacggtggttaccaggagccccctccctaccttggtcctttggagtcctccacatttgccggtttagactctaattcagttgctccctgctgcttggcatcatggaagtcaaggtccagag

SEQ ID NO: 349081 - DNA, 122 bp, Homo sapiens
gaggtgtgcgggggaggggcgtgccctggagttgggggcggggcgaggcgggctcctccccggcgggcgggcccgggcgcggcgcggtggcctcgcggtgcctaggctggggctgccggacc

SEQ ID NO: 349082 - DNA, 122 bp, Homo sapiens
aaatatattctccagaaagctccagaacctttgcatgggtcagggtgagaggtgccgccacgatgtaaacagaacagagcagctgagccctccaggtgggctccaggtgcgatctgcacaga

SEQ ID NO: 349083 - DNA, 122 bp, Homo sapiens
agtgtgtgtgcgagggcatttgcttgcaccctgcctgcggaacccaagaatgtgcaggcccgagccagcgttgagcaggcgcggtcacggtgctcagatctcccgggggcatttcagttccc

SEQ ID NO: 349084 - DNA, 122 bp, Homo sapiens
agacacccagcctttgtgctatttcctgtcctctcccccaccttcgggccttcggaatatcgcaaaccgggccccgaaactcggcgcggcggcggccgccccacaaaggcagcggtgggagc

SEQ ID NO: 349085 - DNA, 122 bp, Homo sapiens
ccgccccgcggcgccctgcgctctccgccttatttccgctctcccccgctgccttccggccgcttcccacctgtgctgcatttcgtgttattttcctgacacgcttacgccgacgaccaacg

SEQ ID NO: 349086 - DNA, 122 bp, Homo sapiens
aggttggagccaagactccacagacctgcacacaaagggtgttaggggccaggagtcccacgaaccatatataattgggtaaggacagccatattggacgcctgggtcccgagcagaagagg

SEQ ID NO: 349087 - DNA, 122 bp, Homo sapiens
aactgtactgggtctggatcccccacggaagcacttgcagccggaccaccgaagggctcacgcaggcccatcctcccaccacgggctcccagcactggcaaaatgccactcagaccacagct

SEQ ID NO: 349088 - DNA, 122 bp, Homo sapiens
gcattcctcccctcccctattgcttgattcgcccctcacgttcaggagaacgggctgccccgactttgttagtctggcggtccccgcgcacccgcccagacccgcagagtccaacaacgcag

SEQ ID NO: 349089 - DNA, 122 bp, Homo sapiens
gcctcaccaatgtgctccgaatggataatgagccagactccagcactcagaactgccaggcgggccctgcccggcagggaagctgcgttttccggctggctcgaaaaacagacccttgtcct

SEQ ID NO: 349090 - DNA, 122 bp, Homo sapiens
atcatgtcgggaccgagtgtgtggcacccgtggcctccagcaggaccgagctccgacccgcgacacagcgcgccccgccccgccccggggaccccacccccggcagccccgcccacccctcc

SEQ ID NO: 349091 - DNA, 122 bp, Homo sapiens
cgacaagtgaggggggctagggatctggcggccactgtgggccacggggctcaccccactcggagttgctgagggaccacgtggagcatgcctggaattgtctgagacactgaaaaggggag

SEQ ID NO: 349092 - DNA, 122 bp, Homo sapiens
atgtaccttaacatctctgcatcttggcccctaatcatggcggacaactgggggtggtttcgaaaagcagtcatccagaagcccgggatattctgaatgatgtagttcctccgctccaggta

SEQ ID NO: 349093 - DNA, 122 bp, Homo sapiens
cgtatgcctcccctctgcggagcacgaagtggtgtagtaaacacagtgaccttgctgccacgtgcatcctctccacaccctcctccaaaccaaggccccaaacaccagtcaaactaagagaa

SEQ ID NO: 349094 - DNA, 122 bp, Homo sapiens
ctgcgcccaacagctcatctttggtcgtgacgcgctgagtccacctcatttcaaatgttacgctcgccccaaggtgaacacagatgttacaggttaactcactgcgtgtgtgctgtgacttt

SEQ ID NO: 349095 - DNA, 122 bp, Homo sapiens
ggcggccaacgcacctgacaggaaaaggtctgtccactccccaccgtctccgactacaatcgctgctctgtatttcaacatttccctggaattgggtccgtttctccaggtgaaagagtctg

SEQ ID NO: 349096 - DNA, 122 bp, Homo sapiens
gacagtaccacagcctggaggaaacgcccttcaggaatatttcatagtggcaatgaatgacgagcattgagccatcatgaggtgccaggcactgcttcggaaaccaaaggaccatgctgaag

SEQ ID NO: 349097 - DNA, 122 bp, Homo sapiens
ttcctggaacttggcccgttcagccctgggcccggaagctcgttctgactgacaagtctacggaacctcggagtcaaaagaaccgccataagctcgcgcgctggctcctcccctggcaccat

SEQ ID NO: 349098 - DNA, 122 bp, Homo sapiens
gttatcgtgatcaaggggagtatacataccataggcctcacacagtctctggtagaattgcgctggactttctacttttccctgaatgacctcagagaccttgttaacgtttgtggccctct

SEQ ID NO: 349099 - DNA, 122 bp, Homo sapiens
cgacgctctcatgaaggagcagctggtggagatgaccggcctgagcccgcgggtcatccgcgtctggttccagaacaagcgctgcaaggacaagaagaaatccattctcatgaagcagctgc

SEQ ID NO: 349100 - DNA, 122 bp, Homo sapiens
tggagggccgaggactacccccgcttctaggtgagaggccagcaggaggctcagggaggacgcggggccttaagcagggggaacaggggtgggcaggatgtacttttttcagaaaaggtggc

SEQ ID NO: 349101 - DNA, 122 bp, Homo sapiens
ttttttgggagcagtgatgaatttgtataaacaattcaccttatttcacttagtccattgcgagaccaaaagtcaacatgcaaataagatctagttagtgttggagccaggctaggaacagg

SEQ ID NO: 349102 - DNA, 122 bp, Homo sapiens
ccgccctccgcgaccggttcctcctcccggctgctcgctggggggtgaggcctcccccttcgccctcccccacgcatctactgctcctgtcgggaaggaaggtcgcccaggccggttcagcc

SEQ ID NO: 349103 - DNA, 122 bp, Homo sapiens
caaggctaacagctgttctgtattcagagccgcacaatcaaggaaaaacacgatcggaggcgggccctggacgggaacaagaagggtgggcttgactgggcggcccgcggtcttggttcccc

SEQ ID NO: 349104 - DNA, 122 bp, Homo sapiens
tgaacaggttgcgagatgattgactcctgagggagaccttctcaccttttcattggttgtcgctggccctctcgtctatcacccaaccaaccccgaatgcctcttgtaagccccacctccgg

SEQ ID NO: 349105 - DNA, 122 bp, Homo sapiens
tcctggcgacaaagcgagactccatagcttttctagatcacacagcgaatgcctaaaaaccgtagagaaataaggacatacacacacaaactgaacgaggaagagatacctgtgatcctacc

SEQ ID NO: 349106 - DNA, 122 bp, Homo sapiens
attttcttttgtccttgtccattaccccaagactttcttctagatatatctctcactatccgttattcaaccttagctctgctttctattactttttaggctttagtatattatctaaagtt

SEQ ID NO: 349107 - DNA, 122 bp, Homo sapiens
acagctgtgagccaccgcgaccggccagcttgagatctttcattcaaaggaagcataggccgggtgcgctagttcacgcctgtaatcctaacattttgggaggccagggtgggcggattgcc

SEQ ID NO: 349108 - DNA, 122 bp, Homo sapiens
ctggcttctgctctgcgcgcgcagattcgtgcagaccaggaagcggatagcgtggagtgacggtgccaccgcggcgcgtgagtttcgccctgtcttgtattaagtctgctcttccaggttcc

SEQ ID NO: 349109 - DNA, 122 bp, Homo sapiens
agtctgttcagataaatctgtttcttcctcttctttctttttcggtggagtggagagttccgtttatgttaaaacattacccaatcaacagttcaaagcatcctcttgagacagcagtagag

SEQ ID NO: 349110 - DNA, 122 bp, Homo sapiens
atataacccatggtggaagtgacaacccaggacctaatccatgctatgctaggattccagcgtcagacattcaaactccaaaacaaaagaaacacctctgttactttcaggttcctttggtc

SEQ ID NO: 349111 - DNA, 122 bp, Homo sapiens
gcgattattgcgcccggccttgttactttttaaaatatcactgctttatctctctgaacacgtgtgaaagtgatggccttcttcctgtgtccagaaaaatacccccatccctgcaccccgcc

SEQ ID NO: 349112 - DNA, 122 bp, Homo sapiens
ctctgcgcttctaaacctctgcattccccagagtttcccatccccacccaaagatcaagtcggcattccctgtgcgcacggatggagcaacctccagctcttgggtgcaaaatgcctttcag

SEQ ID NO: 349113 - DNA, 122 bp, Homo sapiens
ttgtggctttactgattaattgggggaattgaattacattatctttttgtggggcgaatgcggccaaggacttaatacagaagcaataagaaaaagtttagactactactatagcctcagag

SEQ ID NO: 349114 - DNA, 122 bp, Homo sapiens
tggggtcggggggaacggtggcaggcggactgacagaagcaggtgcccggagaggggcgccgggtgagcagcagcggcaggtggtcgtgtcctggccctaccggcaggtgccacctgtcgcc

SEQ ID NO: 349115 - DNA, 122 bp, Homo sapiens
aggagcagatctcagagcagccaactgaagcaaacggacacaagcgaggagggctccccgcgggagaatccccgagaggcagagggcgagctccccgagagcggtggccccgcagccccccc

SEQ ID NO: 349116 - DNA, 122 bp, Homo sapiens
ccaggccctgcaggaaaggaggtgcatgactactttaaggccactcactctgtgactcaacgggccgggtcggggctggaactcaatgccctcccgggcctggagagcccacgcgccgtggg

SEQ ID NO: 349117 - DNA, 122 bp, Homo sapiens
agcattattccatgagaggcagggtaaaaggatttccgtggctcttgacaaacccactaacgcagacccggcccagtgtcccagcgctcttcctctgacttgccgtttcccactgtctgcaa

SEQ ID NO: 349118 - DNA, 122 bp, Homo sapiens
acatttgcagccggacagaaaacctctcccagggctatggagactgcgggaaaaatctggcggctcgcgatggattgctaaggagaactagtcataatcttaaaccaccgaaacctctttcc

SEQ ID NO: 349119 - DNA, 122 bp, Homo sapiens
cagctattccttctccccaccctacttcgctcaaccccgccagaactagggcaccaggttcgtgccgggtaaattatcttcccagctaggagcctggccatgctgtctgaagtgtgtgaatg

SEQ ID NO: 349120 - DNA, 122 bp, Homo sapiens
gaatttgaagaattgagagagaatgaaagtgccacaaaaacaaaagaaaaaaaattgaggcgagtcgtggacatgatagacatgattttgcaaacaaggcacatctaggagaaaaggcggga

SEQ ID NO: 349121 - DNA, 122 bp, Homo sapiens
ccaatcctcatatgtgatgagaaaaattcttatctcctccactccagcctgggcctctctcgcgaagtctctctgtcctcattcgcacctcctctacttctctccggcctctccgtatttct

SEQ ID NO: 349122 - DNA, 122 bp, Homo sapiens
tctgcgcgctcccattacgtgccgccacctcgcgcccctgcacgtacccaacgtgccctgcgtggtcccgttacgtgtcccatcatgtttcgtgcgcttccattacggatcatacctcgcac

SEQ ID NO: 349123 - DNA, 122 bp, Homo sapiens
cggcctgcatgtcccaatgtcacgggcgccgcgcccgcgggatggtcccgagaagagggacgggatctcagccgccggctcagtcccagcaccgcctcccccaccacccgaccccggggtgg

SEQ ID NO: 349124 - DNA, 122 bp, Homo sapiens
ggtggccgatgtcagttacctgatggccatggagaagagcaaggcgaccccggccgaccacgcctgcaagaggaccgtcctgcccgaacccacgtaccacctgccccggcccgcgccggtcc

SEQ ID NO: 349125 - DNA, 122 bp, Homo sapiens
atgtgtgtgtgtgtgtgtgtgtgtgtgcatgcgtgcgcacacacaaagcaacttctgtttcgtttagactctgccacaaaacgccttcctgttcaagaagctgcaccttctttcagcgaggc

SEQ ID NO: 349126 - DNA, 122 bp, Homo sapiens
gggttaacaggcagctcttccggtccacccccctccttccagcctgtagcttcttgttgccgtggagatggtggccccgccccgatgcagcacctgcccccccattggctgcagtggtgact

SEQ ID NO: 349127 - DNA, 122 bp, Homo sapiens
gagaccagggcaaaggcgtcagagcagacgggcgggcagggcaccaggcggatggcaaggcggcccagggcgctggggtagtgcacgcgcatgacggtgtcgaacacgttggcgatggtgtt

SEQ ID NO: 349128 - DNA, 122 bp, Homo sapiens
cctcccagaagctgtcaggcggcggccgtggcccgctgtagccccgccccgtggcccgcccgcagtaggcccgattcaaatctggccaatgatagtgtgtaaacaaacccaggccccgcctc

SEQ ID NO: 349129 - DNA, 122 bp, Homo sapiens
acctgccctgccgcgctccgcttccacccgcaccgggccccgcggagtccggcatgaacgcggtgcagacaagaaaagggaagaggaactaaccagagaggggggaaaaaagagaagcgtct

SEQ ID NO: 349130 - DNA, 122 bp, Homo sapiens
aagtattaaacgtacctctacaggactggaaatgcaactcacatgagcctttttaagaaacggggaggaaggccgggcacggtggcttatgcctgtaatcccagcactttgggaggccgagg

SEQ ID NO: 349131 - DNA, 122 bp, Homo sapiens
ggcccgcccgaacgttcccgttcctgggccgccattggccaagtctgaacggccccacgtcgaggctccttatgggaaatgtagttcacgtcccgcttcaggagctagcggcgccctccctt

SEQ ID NO: 349132 - DNA, 122 bp, Homo sapiens
ttttttgtatacatcactcttggtggaaattttcaacaaccacaaaggtgggggaaagggcgtggcgtacactgactccttagtcatgtttcctgatgttgccattttagtgtattttaagt

SEQ ID NO: 349133 - DNA, 122 bp, Homo sapiens
aagcagccctggagggccaagtgaggaggcctctgttggagtgcctgaaatgtctggcttcgggaccttggattctttaaatgatgcaatctcctggcttctgcagagttgaaatcaaggct

SEQ ID NO: 349134 - DNA, 122 bp, Homo sapiens
agttacctgcctcaacaaggaagtctcatggaagatactagcatcaactgagattcagttcgcgaggaagatacttttcgttcttttttttttttttttttttttttttgagatggagtttc

SEQ ID NO: 349135 - DNA, 122 bp, Homo sapiens
ccgggtgctcccgctcctgtggtggtggcagtccagggctatcaggcgctctggctgtcccggctcccgcctctgcctggtgggcagaggggaggattggcagtttgctcctgccgtgtggc

SEQ ID NO: 349136 - DNA, 122 bp, Homo sapiens
cataaaatacctaagacgaaagttactaggatagccaggggcttgtcttccgggtggcgccgaggccaggaaactgtcctctctaacctatttccccagaggagtctaaattggtcgttcaa

SEQ ID NO: 349137 - DNA, 122 bp, Homo sapiens
agacacagaatggctggaggccttggactccgccagggtgaagttacatctctctggctccgccagtccagtctgcaaaggaatcagacacaacagtttaagtccacagtctggactgctca

SEQ ID NO: 349138 - DNA, 122 bp, Homo sapiens
tggacagtacctagaagtcagaagtaagacagatctctggtgggtccagccaccctccagcgagccctgcagcccctccagtcttctgaccctccaatttgtgcctgcccctggattttagt

SEQ ID NO: 349139 - DNA, 122 bp, Homo sapiens
gcgagcggaggactgtgtgcccgtgtccgagctggggctgcctctgggcgaaaactctaccgacaggcggcacgcattccgcgcccgctctgcctacttgaggagggggtgtcactcctgcc

SEQ ID NO: 349140 - DNA, 122 bp, Homo sapiens
cactctagagaccagcgggcaccgcctggaggcgccttcaccacttggcggttccgggtccgcgccccaccgcgccacaagactcacgcccgaaccacgtgatcagggccgtggctccgccc

SEQ ID NO: 349141 - DNA, 122 bp, Homo sapiens
gatgaccagtttttccagttccagctaatgaatggttccttctgtgctgatctgacatgccgtccatcccatgctcacatccataatatgactgtgttgctggcctccctgttctcttccat

SEQ ID NO: 349142 - DNA, 122 bp, Homo sapiens
gtccccccaggttcacacaggaagtctccttagatgtttttcaaggtatggatatcccatcgcagtaacaaagagagctagcaatgggatgactgcacatcttcattctgtctcccctcctg

SEQ ID NO: 349143 - DNA, 122 bp, Homo sapiens
actccgggcactcggggaacaatgtcgtcaagggctcccggttcccgggtttatatggctcgaaccttacatcgccagccggatccacctcaactcagccgtcacttcccctaagacgtcct

SEQ ID NO: 349144 - DNA, 122 bp, Homo sapiens
ccgctgcctagtctgcatctgagtaacatggcggcggcggcggtagccaggctgtggtggcgcgggatcttgggggcctcggcgctgaccaggggtgagcacgggcagccagctgagaccgg

SEQ ID NO: 349145 - DNA, 122 bp, Homo sapiens
ccgagtaacagacccagaaggggcagcctgaaagcaatggggtctcaaaacaatagagaacgtgggcaggttgggctggggtgtgggcagaatagacgccagctcatccgaactggcctaga

SEQ ID NO: 349146 - DNA, 122 bp, Homo sapiens
gggagagactagcaatgaaggtgtcttgagatcagcactgtaattccaccaggacgccaccggagtccggtgttaagcttctactatggcaacagaatgagagcgtggatgggttgaaatgc

SEQ ID NO: 349147 - DNA, 122 bp, Homo sapiens
gtacacaaaaggcatctaataaatatttatacttaataaacatttgctgagtgagtatgccgaatgggttttcaaaggatactgtgataataagtcctcgctaccttcaaaaatagcctcca

SEQ ID NO: 349148 - DNA, 122 bp, Homo sapiens
acattgacgacagtactttaaggcctgcacagaccgttagtctccaaagggctcacatttcgtccacaagctataaagaggtgtgtattccagagatagtcagtggcagcaaggaaccgtcc

SEQ ID NO: 349149 - DNA, 122 bp, Homo sapiens
aagcatgggcacaagctcttctgtcagttctctacaatgacaatgaagactaagctgcaacgttcattacaatgcactgaatgcatagcaataactgaaggaaattaacagaaaacttaaaa

SEQ ID NO: 349150 - DNA, 122 bp, Homo sapiens
atgtggaaaaaatcacatagccgttagactgtggtacctggatctcaaacccaggcaatccggctccagagtgtttttaaccatttccctgcactgcctcctgccggtcaaaagaataaatg

SEQ ID NO: 349151 - DNA, 122 bp, Homo sapiens
tgcgcaggcgcggtcgtgagctcctcagacggggcggggcgatccgtaggcagggcctgacgccgcagtcctccttggccggagcctcaacggatgggcggggagggggcggggccgggcaa

SEQ ID NO: 349152 - DNA, 122 bp, Homo sapiens
gcggctcaggagtgcaggcgcacgcagtaggagtgcgggcagctccagctgcggtcgcggcgcaggatctcctaaggaaagccagctgggctcctgagtcaggtggtgacttgaagaacttt

SEQ ID NO: 349153 - DNA, 122 bp, Homo sapiens
ctgctctgggtgtcgctattggtgctgctggcgcagctagggccgcagcctggactgggccggctcggagagcgtctccgcgtgcgcttcaccccggtcgtgtgcggcctgcgctgcgtcca

SEQ ID NO: 349154 - DNA, 122 bp, Homo sapiens
gacatcccgtccctgggaggttgagtggaatctgcagtccagtgcctggaactaaatcctcgactgctgctgttaaaaaacatgcattagaatctctagaacacgaggaaaaacagggtctt

SEQ ID NO: 349155 - DNA, 122 bp, Homo sapiens
cttttaattatcgaaaaagtggttagtgtggtatttgcttagtagctcaaacctaccctacgactactgaattgtggctatgggggcggaggggctctggcccgcactgccgggtcggccac

SEQ ID NO: 349156 - DNA, 122 bp, Homo sapiens
ggtgtttaccttttctattctagtgcatcctttgcccaggggaactcatgtttgactggacgcttgagattctttgggatgcttgcaattccacttggaaggggatgtatgcttttgaccag

SEQ ID NO: 349157 - DNA, 122 bp, Homo sapiens
gcccggggcggggagggggtaggcctgggtttccgggtgtgggaggcgggtctggggttccgaaggcagatggggaggaggggtcctgtccgggatcggaagcgcggacgggcctggggttc

SEQ ID NO: 349158 - DNA, 122 bp, Homo sapiens
atccagcccatcagtaaatcctgttatccagacatttctcagcactaattctgagaccatcgtagtccacacctctatcatctcttgcctggactactatttaatgtaacagcttttaaccg

SEQ ID NO: 349159 - DNA, 122 bp, Homo sapiens
accaaacagttgcctgagctggactgtttaagtttctggtgtctggcagcatggttcccacgtggctcctagtagtttttaagttggacatgggcagaagtggagcctggctccctctaaag

SEQ ID NO: 349160 - DNA, 122 bp, Homo sapiens
aaaaagaaaaacatgctattgaagtgtatacatgcaataaacgcggaagctcggcactctcgaaggccacttgctactgcacaccactctccacacgagatgtgtggttcccgggctgagtt

SEQ ID NO: 349161 - DNA, 122 bp, Homo sapiens
tggtcttcaaaggcctcagatgcgcctggggccccagggaggagaacgggatgccggtctcggccgcccccaccaattgatccatgatcggcttggccagggcgcccggcagcgagagcgcc

SEQ ID NO: 349162 - DNA, 122 bp, Homo sapiens
ctcgctggcctccggagtgaagctggagaccttcatggtgaatgttacagttcataaaggcggtgtggacccagagtgagcagcagccaagatttaccgggaagagcgaaataacaaagcta

SEQ ID NO: 349163 - DNA, 122 bp, Homo sapiens
cgtcatcgcgcggggcgggccgtgggccgggtcggagactactggagtgggccgggcaggcgcacgacgtcatcacgcgagcgttgtgtctcggctggcgggagccggggacgggaaaggag

SEQ ID NO: 349164 - DNA, 122 bp, Homo sapiens
taaaggattcagactccccagtgtttcttcatggttttgctttatgggtctcctctggggcgatggaggcatcagcggagttgtagaatttccattttggatgcagtccttctctccccacc

SEQ ID NO: 349165 - DNA, 122 bp, Homo sapiens
tcgccgttcccgaggtcgtcccctttgcacctgtccgcaggtcctcgggcgtgtggcttccgggcacacagaaaaccgtgtggttctaggatacatggggatctcgggcactgctctgtcaa

SEQ ID NO: 349166 - DNA, 122 bp, Homo sapiens
caggctgagccttgggaattgttccccgacattggttgttcctgggctccacagctaccccggccgacaaaagccacattgtggggctgacggcagctgccagcacctgctccctgcaccgc

SEQ ID NO: 349167 - DNA, 122 bp, Homo sapiens
ccctcgcgccagcaggaccctctgcgttccggtcttccgctgggacttatatagctgggccgctcccgggctgggccgcgcgaggtctcagaagacccgggcgtgggacctgccgggggcgt

SEQ ID NO: 349168 - DNA, 122 bp, Homo sapiens
tttgctccttcagatgttcagatgtgtcccgagtttcttcttccagtgggttcgtggtctcgctaacttcaggagtgaagctgcagaccttagcagtgagtgttacaactcttaaaggtggc

SEQ ID NO: 349169 - DNA, 122 bp, Homo sapiens
catggccctctgtgcctctctgcaccctcccaccccacccacgagggccaggctgtgtgtcggcccggcaggaaattcaggctgacgtgggaccccacggtaactgcacctgtgtcccgctt

SEQ ID NO: 349170 - DNA, 122 bp, Homo sapiens
acaaagctgtccatgtgtcctctcctttactcaggccacttgaggatggcgggcgggactcgaaggccctggtggagctgaacggtgtctccctgattcccaaggggtcacgggactgtggc

SEQ ID NO: 349171 - DNA, 122 bp, Homo sapiens
ctcagatgatccaccggcctcgccctccctaagtgctgcgattacaggcgtgaaccaccacgcccgggttaaacttgtgaatttaacatgttgcagcctcacatgagaacacggtattcaac

SEQ ID NO: 349172 - DNA, 122 bp, Homo sapiens
agggccccagagcagccctgcacttctctcactttccccatgtgtcatttttgttgagcacgtactatgtgccagtagccttctctcattgcatgctcattacaatctgagcagggagctat

SEQ ID NO: 349173 - DNA, 122 bp, Homo sapiens
ctacttgttcaaggtcacgccgtggagcatgaggggctgtgccagggggaggacccagggcggtcgccccgcaaccctttgcgctccccacgacaccacttcgcagttttccctttctagtc

SEQ ID NO: 349174 - DNA, 122 bp, Homo sapiens
gcggctcgcggagcctggctgagcagcaggaggggcgggcgccggggggcggggcggtcacgccgcccgtcccgtgcccgcggtagtcacgtgtccgcgggtgtcacgtgctcgcgtcgcag

SEQ ID NO: 349175 - DNA, 122 bp, Homo sapiens
actcctccatgacgtggtggccacagctcctgccgggcagtgaggccgactgcagctgaccggtgaccggcgtggctggctcaaggctttggctctggttacaaataaactggccgtgaagt

SEQ ID NO: 349176 - DNA, 122 bp, Homo sapiens
ggtgccctgactgcagccaacaatagaatttgtttagccatcttgctattcctttcttcacgtgcaaaacttgttggaggccagggagagattctctgtccatttcctcttgctgggtgaag

SEQ ID NO: 349177 - DNA, 122 bp, Homo sapiens
ccattatcagaaatgtttgggatgtaattacatttgcagttaatttctgttgaagtttttcggaatgttgacctataacggcatataaagataactgactaaaggccagcgttccatcagta

SEQ ID NO: 349178 - DNA, 122 bp, Homo sapiens
tcacctacccgcccgttttggaacaagtgggcccagttcttcaggccaggatcgagaatgcgcatgctcaactccggattgtactggtcccgccccagttcaaggcccggattgtgcaggcc

SEQ ID NO: 349179 - DNA, 122 bp, Homo sapiens
ctgaggcctggtgggcacggagatcctgtgggagtgaggagggcagagccaagccagggccgagttcccagaggcaggccttgggcctcgtcttacctgtggtccagcctcctgggccgctg

SEQ ID NO: 349180 - DNA, 122 bp, Homo sapiens
acagagctgcctgttgtatttcaaaaagttaagccttcaaaaacttttcagacatgtgggcgactttttttttttttttttttttttttttttttgagacggagacttactctgttgcccag

SEQ ID NO: 349181 - DNA, 122 bp, Homo sapiens
tgttctcccaactgtggctggcgctacccagtgtggcccctacaagtcttagttccttggcggaggggaagtccccactttgggacaaggccaactggacttatcttcccgctcaactttga

SEQ ID NO: 349182 - DNA, 122 bp, Homo sapiens
ggctggtgagtgaacccggccgggggcgcaggtcacgaccaccccccatccgccacggaccgcccgggtccctcagagtctccggatccgaaatctaccccgaggcagcgggacccgcccag

SEQ ID NO: 349183 - DNA, 122 bp, Homo sapiens
tgaagatagggtggcggcacatcctgcatgtgggggactcagatccagtcttgcctgtatcggtgacttgggctgtgatcttgggcaagtcttgtctctctgggcttcagttttttcatctg

SEQ ID NO: 349184 - DNA, 122 bp, Homo sapiens
ggaaatgacgttagtcgacagcggatgtcctgctggctgccagggcagcgtgggacgctacggcggatatggctgcagagcggccggctgggatcttagataggaggggtggatttgcaagg

SEQ ID NO: 349185 - DNA, 122 bp, Homo sapiens
ggggccagggcttcagcagaagcccaggcccgaggcagagccgccctcaccccccagcggcgacctccggctggtgaagtcggtcagtgagagccacacgtcctgtcctgcaggtacgatgg

SEQ ID NO: 349186 - DNA, 122 bp, Homo sapiens
ggcccaggcgcctttaccaggtttcattttccgtttaggccaaaatccccgcgggttggtcggggcgggggcggggctcggtgggcggggctgaccgcgggggcggggccagggtctaacac

SEQ ID NO: 349187 - DNA, 122 bp, Homo sapiens
ccctgctgcctgtcaccctgggcatagaggacttcgaactggaggtcctggcagggagcccgggtgtagagagcttctgggaggaggtggcaagtggagaggagccagccctgccagggacc

SEQ ID NO: 349188 - DNA, 122 bp, Homo sapiens
tgcgaggtcaggaaggaggcaccgagggccgctgctcttatagcaggcggaagcgtcacccgggccagcagccgcgggcggggcggcggcccttcccggtgactgcgtaggagtccgagctc

SEQ ID NO: 349189 - DNA, 122 bp, Homo sapiens
atgcctcgggcagacgacacttacacactcggtgtgcacaggatggacagcaaacagcagcgcggccagcagggacgccctgggggcgaggtgcagcctccggcctttactggtgtactgca

SEQ ID NO: 349190 - DNA, 122 bp, Homo sapiens
ccatcagcttcctgccttttcacatcaccaagacagcctacctggcagtgcgctcgacgccgggcgtcccctgcactgtattggaggcctttgcagcggcctacaaaggcacgcggccgttt

SEQ ID NO: 349191 - DNA, 122 bp, Homo sapiens
ggcttcttatcatacatacccaccaagatcttgaggtggttcccaggcacgatgccctggcgcccgtgcagcgagcagagccaccagccatccaggccctgcgtgtcctgctccagcaccgt

SEQ ID NO: 349192 - DNA, 122 bp, Homo sapiens
gaattaatgcacataaagtacttagcatagggcctgacatgtaattatgtgctgaaccaacgaatactgtctatcagtcgtatcattattattattcagaggccaccacagggatccttgag

SEQ ID NO: 349193 - DNA, 122 bp, Homo sapiens
ccgagaagacgacccagtaggcaggatggtacatctcgacgctgcggtgctctcagctgccgggcttgctactgcttctgctgctgctaccgctgctgccttcctctgtgctgaattctgag

SEQ ID NO: 349194 - DNA, 122 bp, Homo sapiens
cgaggacgcccagaattgttgggaatctgggcggaggcccgtcgtgggcttggaggccaccgggtccagcagaggcagaggcctctgtgccacgcacgcacacacacctgctctcctccgtg

SEQ ID NO: 349195 - DNA, 122 bp, Homo sapiens
ttcttgttaatgctactaagttgggatgtacccaggtgtgagaggtcacctgattcattgcgtttagaagactgcatttattgctgttgggggctgaacaattaattgggttcatctccaag

SEQ ID NO: 349196 - DNA, 122 bp, Homo sapiens
gtttccctggaaactgggtggctcgggggtgcatgtgctatctctgtgtgtctgtgtaaccggagtgtgtttatgtagctccggatgtgtttgtgactctgggcttacgaatcctgtgtttg

SEQ ID NO: 349197 - DNA, 122 bp, Homo sapiens
ttttgctccttccctgtttttcttcttttgggaatgtggccatgaggctgcaggtggagtcgccatcttacaaccagtggcaacatgtctgagggtgaaagtaacatgctaaggagggcaca

SEQ ID NO: 349198 - DNA, 122 bp, Homo sapiens
gagtgtcctggtagagcatactgttttaaagctcagcaactgtagaatgaaagaatgctccgaagctaagacctcttgactcattatgactaatacatctcagagctgtatcgtaaggcaaa

SEQ ID NO: 349199 - DNA, 122 bp, Homo sapiens
caactcttccctcccggggaacaggctgctgtccttggcttcagtcagggccactagagtcgcgtgcgcgacacccctcacccccgccaaaagaacctcatgtttaatgttccccttactct

SEQ ID NO: 349200 - DNA, 122 bp, Homo sapiens
cggagcccgagccccagcccgagccgccgcctaccccaggccggggcgtcgagcagccggcggcctggccatgtggggctagccctcgcgcctggcctgcagcaggaccagcaacatggagg

SEQ ID NO: 349201 - DNA, 122 bp, Homo sapiens
agtgacgcatctcccagccaaggaacgccaaggaggccggcagccgccaggagctggaaccggcaaggaagcagcctcccccagagccttctagagaatgtggtcctgcagcaccttgattt

SEQ ID NO: 349202 - DNA, 122 bp, Homo sapiens
tcagcatctggctgccccagcttggtcaatgccacaaacatccccacatcactgtcgaaacgtacatactcctccaagttaaagatgaatctgaccacaaactgcaccttttctgtcccgtt

SEQ ID NO: 349203 - DNA, 122 bp, Homo sapiens
gaggcggtgccgacaccctcacttgctggtggctagcatcattttgctcacctagagaaacgttttgcttcgtgaagctgctgtcctgtcagaagcagcctccgaaaggcttcttttcaaag

SEQ ID NO: 349204 - DNA, 122 bp, Homo sapiens
ccaacattataaaccaggatctgacatagatataaatccatgccttccaacttcccttgacgtcacattatcttctcttaagagatagtcactttggctaatagggaaaagaaaaccagtaa

SEQ ID NO: 349205 - DNA, 122 bp, Homo sapiens
aactgggaagccttctcagctacacttcggggcactggtccaaccccacgcaaaatccctcgtttcccttagcgtggtaagacggagcctgacctgagctccaactgtcctatctttttcaa

SEQ ID NO: 349206 - DNA, 122 bp, Homo sapiens
tcatttgaatgattgcatccggccgccaatcgctatctgcggaggaggtgagaacggtagcggaatcctggccaccgtctaaaacccggggcttagaattgaaattcgtctttatatttttg

SEQ ID NO: 349207 - DNA, 122 bp, Homo sapiens
cattatcatgtaagggagttaaatatcttgcatgcatgctctcttctgtgtttatatattcgatgccatgaaattgaagggcatgtggctaaaacctttttactacatgaaactttacaaca

SEQ ID NO: 349208 - DNA, 122 bp, Homo sapiens
agcagagctcacccctttctcgggaaatggtttatcgtggataaaacgcagtccccaaagcgaaggtccgacgggcggccagacgcaccccggggaccttcaggtggacacacggggcctcc

SEQ ID NO: 349209 - DNA, 122 bp, Homo sapiens
accttttctgtgtttaggtatgtttagatatacacatacttaccattgtgttaccattgccgacagcattcagtacagtgacatgctataggtttgtagcttgctagcaatagcctaggtgt

SEQ ID NO: 349210 - DNA, 122 bp, Homo sapiens
cgcaagtctacacggtctcacctgcccccgggttgctgaagggtgcctcggtcacggggccgcgtctccacaggctcaacagctgcgagtccccgggactgccgacctcagccttggggatc

SEQ ID NO: 349211 - DNA, 122 bp, Homo sapiens
cgatcccctggggtcaagcctcctcacatctcacctcgcaggtagctgagactacagatgcgcaccaccaggaccagctaagttttgtatttttttgtagagaggaggtttctcacctgtat

SEQ ID NO: 349212 - DNA, 122 bp, Homo sapiens
ggaggcagaggctgcagtgagcctagattgtgccattgcactgcagcctgggcatcacagcgagactccacctcaaaaaaaaaaaaaaaaaaaaaaaaagtctcaatatccaaaccacccaa

SEQ ID NO: 349213 - DNA, 122 bp, Homo sapiens
tgcggacaggagtctctccgagtcgcagctcgccgccgagaagcacccacctcccgcggccggcgcagcccaaggccctggcccctatagcccggcctaggcccgccccaggcggggctagg

SEQ ID NO: 349214 - DNA, 122 bp, Homo sapiens
cgggaagaagaaaaacaaaatctgtctaaccagtcgggttccttgtttatactgaaactacggcagccgccgccgcgcacgccccccttggctcaggcgcctgcctcccgctgccagccccg

SEQ ID NO: 349215 - DNA, 122 bp, Homo sapiens
ccagagcacttggcttttttgtttcaaatttcctttcttcaacctcacaccagagtgccccggtcaggctcgacttatccattaggaacagtgtgggcagtgaaggggaccctccaaactgt

SEQ ID NO: 349216 - DNA, 122 bp, Homo sapiens
gggcgcgcggggggcgggggcagctctcccaacgcgggggctccgcgagtgagccccgggcgcgctgattggagctcacgctactgaataattcatgagggaagcggagaggggcaccgagt

SEQ ID NO: 349217 - DNA, 122 bp, Homo sapiens
gggtctctctgtgggcggcctcagagcagcgatcctgtttcccaaggagctgctggggcccgcgtgggtgaagggcctgcttgggagctttggagttgcagctcacctgggaaggggcggaa

SEQ ID NO: 349218 - DNA, 122 bp, Homo sapiens
cttcccccatgggagatgccactgcaaagtccaaatgcctgaagagccccgacggagccacgccagccggttctttctccccgaggcacctgctgagctgcctcgttgacttcccaccccag

SEQ ID NO: 349219 - DNA, 122 bp, Homo sapiens
tctgcaattttatttacggaaagggaacaaaggcaaggtaactgaagcccagagaggaaacgtgacttgcccagggtcttacatgcagtgtgggtgaactagaagccaggtgtcctttggct

SEQ ID NO: 349220 - DNA, 122 bp, Homo sapiens
ggatccctttcgcctcatcaccgcagtcaccgcccacggctacgcccctgcggggaaggccgcggccaccgcccacccgccccaccccctgtgctccgggcacccagctgacatctgggggc

SEQ ID NO: 349221 - DNA, 122 bp, Homo sapiens
ccctttctcccccgggctccacccctcgcgcgcgaccggccgcgcggcgcagcgccacgccgcctcagtctccgcccgccgatccggcctcttcggccgttgcgcactccaccccctccctc

SEQ ID NO: 349222 - DNA, 122 bp, Homo sapiens
tctatccattttttcttcatactgttcctctacacaaggttttctcctctctaagcaaaccgattttttttaatcctataaacagtctaattgccaggatagactagattatgctactataa

SEQ ID NO: 349223 - DNA, 122 bp, Homo sapiens
aagtgtgtgcatgcatgagtgttcgtgtatatgtgatgtgtatgtaagtgactgcatgtacgtctgagtgtgcatgtgttgtgtgagtttaaatgagtgcatgtgagtctgagtgtgatgtt

SEQ ID NO: 349224 - DNA, 122 bp, Homo sapiens
ctcgaacccctgaccttgcgatctgcccacctcggcctcccaaagtgctgggattacaggcgtgagccactgtacctggcggggcttattgttttttaaaaagatttccaaaaccttgccct

SEQ ID NO: 349225 - DNA, 122 bp, Homo sapiens
cggcggcggcggcggcggcggcgcgggagggcaagcgcgaggagccggcacaaaaggcagcgggacaaacacccacctctggccggaacaaaaggcggcagtgccggccgcgtctcccgtcc

SEQ ID NO: 349226 - DNA, 122 bp, Homo sapiens
cgggaaaggatagctctgtaatgctctcagagctgagccaaaaaggaaaagaaagcaaaacgacaaaaaactgatccgtgtcctgcatgttggcagcagacaaccttccttgctgctgagct

SEQ ID NO: 349227 - DNA, 122 bp, Homo sapiens
tacctggccctggggagactaggttaggccctgagtggaagagacagataaaggaagcagcgggaatggggtcctgaactgattcatttgcatatgaaaaatgcactcaaagggagtcgttt

SEQ ID NO: 349228 - DNA, 122 bp, Homo sapiens
tctgccttaatttattaattaaattattgatcagacaaagccttaagtagttagagaacgcggataggctaaaagggaagtgtgaagagctacaaaagtaattttgatttaggtaatacttt

SEQ ID NO: 349229 - DNA, 122 bp, Homo sapiens
atttttacctattttctaaatttatttaaatgcttagcaggaagcataaggaaaagccatcggcctccaatacccatgatgacagagggagcacttgagccttgccttccctcctcttaaat

SEQ ID NO: 349230 - DNA, 122 bp, Homo sapiens
ctgcattccagcccgggtgtccgggtgtgctcagagctctgctgggaccagggtggaccccggattcccctgtggagcctgtcactgcccctcccagccggattctcggattatttcatccg

SEQ ID NO: 349231 - DNA, 122 bp, Homo sapiens
cctggattatcctcgccaaggactttgcaatatatttttccgccttttctggaaggatttcgctgcttcccgaaggtcttggacgagcgctctagctctgtgggaaggttttgggctctctg

SEQ ID NO: 349232 - DNA, 122 bp, Homo sapiens
cacaccagtactacttggtgcaaactacttccgccaatccctacaccccattggtatacccgctacacagatggctaagtcatggttacataaacttaaggcttcacactgcaacttaaggc

SEQ ID NO: 349233 - DNA, 122 bp, Homo sapiens
ctgaatctgccccttaccatctctgtcctcaaggccaacctttatgggggcagagcagggcgagaggatcacagggagtcaggagacctgcgggctgagggctgagggctgggggtgaggat

SEQ ID NO: 349234 - DNA, 122 bp, Homo sapiens
gcgaaagaggaagattgagaaactcccccagactggaggagatttcagggacgtgaccaccgaacgcagtgcgagtccctgggctgaatccgggactaggaaatgacattcatgtgaaagcg

SEQ ID NO: 349235 - DNA, 122 bp, Homo sapiens
tggggacaggcttagcacttggcacgtctttccccagtagtggccaggctttgggtgttccgcccaccctgtgctgaggggacagagagcagtggccacagttgagctgccccaggcccacg

SEQ ID NO: 349236 - DNA, 122 bp, Homo sapiens
ccaagcagccactgaaagcctagctccagcccttctcctaaattgggaagcgacgagacccgatcgagtttcccggccggtatttacatgttccctatttacagaccaaacctccctcttcc

SEQ ID NO: 349237 - DNA, 122 bp, Homo sapiens
gtgcccactcccaaacccgggactcatgggctgcctgggggatcctgggttctgtgcatccgtctgtctgaccatccctctcaatcttccctgcccaggactggccatactgccaccgacac

SEQ ID NO: 349238 - DNA, 122 bp, Homo sapiens
ggctgctgcgcgggctcctagttttctgatccttctcctccttgtgtctgcctgtctgcccgcctgactgcagccctctgcagccctgcttacccagggaatccttctccggcgaggctttg

SEQ ID NO: 349239 - DNA, 122 bp, Homo sapiens
cggtggcacgtggcaggatttccttcctggctgaggctgagcggcattccatggcacggacggactgcacctcgttcgcctgctcacttgggtttcctctactctgggctcctgtgaaggac

SEQ ID NO: 349240 - DNA, 122 bp, Homo sapiens
gattgttgtttttacagcgttaacagtctgaaccggagcataacgatcggctgtctcaggcgtttcatggcccgggacaggcggctctcttcttacagattacagggaactcacacaattaa

SEQ ID NO: 349241 - DNA, 122 bp, Homo sapiens
tttataacttggtaagtgccagcgaactcgcctcctttacacccccgagtgccagccccgcgctctgcactgcgctttattcgctcgagcctattcagggactgtcactccggggccgcgag

SEQ ID NO: 349242 - DNA, 122 bp, Homo sapiens
cgcgcccaccccggcacgcctctcctcgcctcgcctcagctccctccacaaagcggcactcgcctgcagctctggtttccaaaagtggtcggggctctggcgaaaacgatgcacatggaggc

SEQ ID NO: 349243 - DNA, 122 bp, Homo sapiens
agcacccaatcacctagagagcgagagtgagccgaggcaaacacgccgggttccagacaccgtcccagcccccgagacccgggtttgcaaagggctgcacacgttcgccggagggtcgctgc

SEQ ID NO: 349244 - DNA, 122 bp, Homo sapiens
aggacacacttacagaagagacgaggcctggttattcttccaacacactcccctcagccgcgcacagcgttactggctatgtggccagtgaccagatttgcagacctgtttccagacctcag

SEQ ID NO: 349245 - DNA, 122 bp, Homo sapiens
tcagaggagccaaggtccgacttgggcctggctggttgcccacagccctgctcagagggccggctccctgacccccatggttcaggtttcggtgcccgacgctggggtgggccagcgtggag

SEQ ID NO: 349246 - DNA, 122 bp, Homo sapiens
cctgggctaggcctttagggaagcgggacccccaccctcagccccaaccaagaagggcgtcgtctgctccccatcgtcgtctgctctgtgctggatgatccagggccacaggccaggacaga

SEQ ID NO: 349247 - DNA, 122 bp, Homo sapiens
aatatcttacactagtagagggatctgtgagaaaaagaatcaagaccattgaatgtgtggcggcttatagcatttgacattctgatctgtgcacgtgatgagaaaaaaagtctgattacaga

SEQ ID NO: 349248 - DNA, 122 bp, Homo sapiens
ctctatatttatacataaccccggggaagacacagagactcgtacctgcgctgtttgtgccgccgctgcctctgggccctcccagcacacgcatggtctcttcaccgctgccctcgagttcc

SEQ ID NO: 349249 - DNA, 122 bp, Homo sapiens
caaccaatcagcaattgcctctccgcaagcccgcctgcttgcgtcaccgacggacagcaccggttccgaatgggagagccgataacgcttaacccccagctcactctcaccaatcgctataa

SEQ ID NO: 349250 - DNA, 122 bp, Homo sapiens
ggatgggggaaagttggtgcatgaagaataaagtgcaggcctgccaggattccccgcagacgtgtaccctgaggcggggagagcagctgcagaaattcagagtcattaaataaatgaatagc

SEQ ID NO: 349251 - DNA, 122 bp, Homo sapiens
gcagatgcacagcctctgtgagtgcctcagacagcagagtctgcggcaaagccctgactccgtgggtcaccagggactttcccaactgcaagaaacgctccagagaagcaactgctcagaga

SEQ ID NO: 349252 - DNA, 122 bp, Homo sapiens
gcgacgccagtatttatattagggggcgtggcctggtgacatcacagctggccgggcagccgcgcgagcggggcggaacccggttgcagcccggagaaaagggagggggacggaagaggaag

SEQ ID NO: 349253 - DNA, 122 bp, Homo sapiens
atattcatagaatagaaattgaagtaagtctattcgtttttatattaaaagtagctagtacggtgctctgtacttatgcactccatggatgctgaatgagtcattgaatgaagtggagtcta

SEQ ID NO: 349254 - DNA, 122 bp, Homo sapiens
gtgcatattacagatggggaagccaaggctgggaaagctatggtgccttctcagggtcaccggggaagggtagacattggagtccagacctgcccaattccaaagtctgtgctgtgttgtct

SEQ ID NO: 349255 - DNA, 122 bp, Homo sapiens
taatcatcataatgagtgcccaggtagataatatttttcttctgttatccactcgctagacgagcatgtgtagttttgtgttagggcatgcagtgggaataaaagaaagctgggctgcaggt

SEQ ID NO: 349256 - DNA, 122 bp, Homo sapiens
catctgtcagacttgccataactagcatatggctgaagcttccggaagcaccgtcacaggcgactcattcagcgcctgtttgttgagcagttactgcgttctcatcaccacccacactaggc

SEQ ID NO: 349257 - DNA, 122 bp, Homo sapiens
tggctgcccagtgtggggcgacaaagacgccggtgaaggaatgctatgagcgtgtgaaagcggagaatgtctaaaagaagctcagcgggaaagctgagcacttggaagaagcagggtaacaa

SEQ ID NO: 349258 - DNA, 122 bp, Homo sapiens
tatgaaaacacagaactattacaagggatgagcgccgcgccaagccgaacctgggagctacggacagtgtctaaactttagtcactcacaggagtacaaagatccggggctgctcctaactc

SEQ ID NO: 349259 - DNA, 122 bp, Homo sapiens
actctgctcaccgagcccaggcccagcacaaagacacaccataaacacctgcggagggagcgtggcccagcccagggactctggggctcccagaagacagggccctcccccagccatgccgg

SEQ ID NO: 349260 - DNA, 122 bp, Homo sapiens
ttcttccccaaccctaggcaaatgagcaactagagtcccttttaatctgagcagggagaccgtccctgaagatgcttttggtaatgtggccactagatgcccagaactacccataagccccc

SEQ ID NO: 349261 - DNA, 122 bp, Homo sapiens
gcctcaccgaggaaatgccaatttgaaaaacagaatgctattgtccactgactgagttttcgcgagggaccacatccccacctcacccccgcctccagggcttgtaaggcactgacaaccaa

SEQ ID NO: 349262 - DNA, 122 bp, Homo sapiens
gagtataataaccatgtgagaaagttactgtttttccaccatgaacagactactgtcaaccggtaatcctggtaattttaggggatttttttttccctttaagtactggttggcaaactagt

SEQ ID NO: 349263 - DNA, 122 bp, Homo sapiens
ctgagcctccatgacacggcaccgccaaccccctggcctacactccacccacctcccaaacgtgttggttgattcttcagcgtcacattacttcattgggctaggtaaaggtctatcagtct

SEQ ID NO: 349264 - DNA, 122 bp, Homo sapiens
aagagcaatcaaaaaggtgtctgacttggccattcagacaattgcccccttgtgggaatgcgggaatgaatggtacagtggacaccccagcaccattgacgttataaacatgtaaatgaaac

SEQ ID NO: 349265 - DNA, 122 bp, Homo sapiens
caaggcagcaggatggaggggtttgtaaaaatgccttccacctaccctgctgggcttgcccgagaggctctgagtgtgtgaaggggaagacaattatcgctaggctggagaatagaaagagc

SEQ ID NO: 349266 - DNA, 122 bp, Homo sapiens
cggaggctgcctgtgtgccattgttttaattacaggctgttatttcatttgaaaagtcagcgataggattaagggtactgtcattttaaaagccagattcctggcctaaaaccgctcagtga

SEQ ID NO: 349267 - DNA, 122 bp, Homo sapiens
tgacctttcctccgggggttcccaggtccgagacggtccttaaaggacctcagaaggatacgacaaccatcccatgaggccccacgggaaccagctactcacccaggggcagaaacagcaag

SEQ ID NO: 349268 - DNA, 122 bp, Homo sapiens
ggtcggagcttgcctgagaggctcagcgaaggtccatgccttgttcagtcccaggcagtgcgggacaggtgggcgaagctcgaaccccatgctctgtcccggcactggcaggaattcactta

SEQ ID NO: 349269 - DNA, 122 bp, Homo sapiens
tccgggagtgcgggtggcggggcctggaatttccgtggcgcctggggcagatcggggaggcgccgagtccctgctcccctggcgcccaagcttgcccctgtgcttacagcctattggttgca

SEQ ID NO: 349270 - DNA, 122 bp, Homo sapiens
tctattactgccgactgctgggaaccagaaagtctatttgaattccaacagctcccctttcgcatgattcaagttaggttaggtgggcatgcctaacatgattctttcagtcatttattatg

SEQ ID NO: 349271 - DNA, 122 bp, Homo sapiens
ggtttttctgtatatgtttctggagtcctgagcctgagctaaacaaaagcaggaggctgacggggctgctggagtttgcagagacacggaggaggagagagcctgtgctttgcctgccgccg

SEQ ID NO: 349272 - DNA, 122 bp, Homo sapiens
ctgcgcctacacacgggcgagaagccgttcgagtgcgcggagtgcggcaaggccttcggtcgcaagtccaacctcactctgcaccagaagatccacaccaaggagaagcccttcgcgtgcac

SEQ ID NO: 349273 - DNA, 122 bp, Homo sapiens
tggaggcccagagctgtgagccccaaacacacccggataagacgctggacctgccaggtgcggcagagccgaggacgggagagccttccttccccgcttcatttggggcctatttagccatt

SEQ ID NO: 349274 - DNA, 122 bp, Homo sapiens
ggagactctgattggacagtgctgtcgactccgcacccctgattggagaattctccagtccgtccccctagcgcccttgattgggcagggctccgcttcggattaacgtctctgattggaca

SEQ ID NO: 349275 - DNA, 122 bp, Homo sapiens
ggcacctacacaggtgatagggtgggtggggcgcaggtcaccgtggcgccaacgctggggcgcaggtcaccgtgctgccaacgctgggacgctggtcaccgtggtgccaacgctgggacgct

SEQ ID NO: 349276 - DNA, 122 bp, Homo sapiens
cagtgtctggccaggaacagagcagctggtccaagcagattgcctcaagtgctcagcatccggctgccttccagggactctcccctgataaatatggatgcacacctggccagcagcaggcc

SEQ ID NO: 349277 - DNA, 122 bp, Homo sapiens
tcggtgaagcacagaagctcttcgggcccccgggccgccagcaaggccgctggggaggggcgacaaaggaagggcatgggggtctgagctctatcctcgggagacagccccctcctcttccc

SEQ ID NO: 349278 - DNA, 122 bp, Homo sapiens
atatcttgcccctcagagattccacctcctcagcctggtgatgctgtagggatgctgggtcggcttaagcaacattgcctgtccaggtccttcccattcagttggctcccttggaagccttc

SEQ ID NO: 349279 - DNA, 122 bp, Homo sapiens
acctcacctgggctctgctgttccgcctggacaccccagtttcggggagcaatggtgtgccgaggcgcactggggtacgtcgcgttccccgctcgctccgggaagtacctgcctgcggggcg

SEQ ID NO: 349280 - DNA, 122 bp, Homo sapiens
aggaagcgcggcggggcgggggcgggggtgtgtcgggttttataacccgcagggcggccgcggcgcaggagaaggggcagagccgagcaccgcgcaccgcgtcatgggggccgcctcgggcc

SEQ ID NO: 349281 - DNA, 122 bp, Homo sapiens
aatagtaacattttcacaggaaatgcagaatttactagttagctggtttttgcttctgagcggtctctgttattgatttcaggttctgcctgaattctcagtggctttccctttgtcctgtt

SEQ ID NO: 349282 - DNA, 122 bp, Homo sapiens
gtggcggcgcggcccggagcgcagcgcgcggcagggctccccctggcggtcagaggacagcgcgaggcagacaccgcctccgcctggtgaggtagacaccgcctccgcctggtgaggtctcc

SEQ ID NO: 349283 - DNA, 122 bp, Homo sapiens
ctcctgggttggatgaaccctcaggctctcctgacaacagccccagggccctgacaatcccgaggctccgtggccacctgtgccccctagtggcgcatctcagaacttcccggctaggtgcc

SEQ ID NO: 349284 - DNA, 122 bp, Homo sapiens
aagggggacgcgggctctgtcggggtggcagcagcctggctcatggccaagcacgggccacgacagggcagggagcgcagcccaggccgggaggccgcggaggccccacgcggcagcacgga

SEQ ID NO: 349285 - DNA, 122 bp, Homo sapiens
ccgaaaagaaaggattgcctgggtgagcccgggaaggtggaggtcgcagtgagcagtaatcgcaccctctactggatcttagcggttctgcagccgaggagagccatctggtccgtcttaaa

SEQ ID NO: 349286 - DNA, 122 bp, Homo sapiens
caggcgggagcggggcggggaggcgggtcccgggaccacacgcgcggctcggcacttccccgtcatcggcctccaggtctcccgctgggggtcccccaggatgtgacctgggcccacgactt

SEQ ID NO: 349287 - DNA, 122 bp, Homo sapiens
ggaacgctcgaccgcccggggctgtccctgggggggtcaccagaggcgtggaggcggtgccggcagtggaggccgcagacaccttgggcctggccagcagcgcgcgccacaccgccctgccg

SEQ ID NO: 349288 - DNA, 122 bp, Homo sapiens
attgcacgggagccccgggagggtcatggggaggattccgactcgtgtgtggggttcgtgcgtgggaggagcagtgttctgtgtgatcctcagtccctcctttctccataaaggtcacccat

SEQ ID NO: 349289 - DNA, 122 bp, Homo sapiens
caaaaccactgagagttactgggattttgtctacggccttggcggtcatcatttgctcctcgcacaacctggagacccaactccctcgctacctggagtgtcagaaaagccgttttggagag

SEQ ID NO: 349290 - DNA, 122 bp, Homo sapiens
ttggtgccctttccacagtcccacatccctttctggttaaagctgctatttagttcaaaacgacagatgttgacacaaattcttgctgccacccacaagaaaaattgagtgaactcctgaaa

SEQ ID NO: 349291 - DNA, 122 bp, Homo sapiens
ctgggtctgtctttacatttgaagccgaaagaggcaacatactgacacacccaagggaggcgggagggtggggaagacagcagcagagggcaagaaacttctagaacttcagggtcggcaaa

SEQ ID NO: 349292 - DNA, 122 bp, Homo sapiens
cctgctccagccactgagcacactagccgtctgagacggcagctgagttgcactgtgcgacgcgacagagactacatttcccagcattccagcggcgcactcgggggaccacagatcccagc

SEQ ID NO: 349293 - DNA, 122 bp, Homo sapiens
ctatcggggtgtgttatctcggaaaccaaatatttgatcatcagtcccgcagcgcgctggcgctgccggggggttagtttgagcaagtctggagaatgtgcgcgcacatatggagggggagc

SEQ ID NO: 349294 - DNA, 122 bp, Homo sapiens
ttcccccgccgcgcgccggcgccccagcccttcttccctccctccgccccccgcggcgctcggttccccgacgctcccggccgcactctgttgtcattgtgacgtcacaaagggacgggctc

SEQ ID NO: 349295 - DNA, 122 bp, Homo sapiens
atagcccccgacaatactgtcagcctgtgccgcgagtgtaaggggttcttaggacgcatgcgcagactgggggcggggggtggggggcgaggtagagagtgggaaggaaccagggggcgggc

SEQ ID NO: 349296 - DNA, 122 bp, Homo sapiens
attggcccaccccctgcagagtgaatgagaaagtgatgaaaggaaggggttgattttcttcgaaccgcacagaagaagctgcttttcccataggaatgtccggctggcggtcaccgaggaaa

SEQ ID NO: 349297 - DNA, 122 bp, Homo sapiens
gctgggcgggggagaggaaggggcggggcagggagcccgccagagtgcggggtcgcggtgcggacttcgagcacgagccctaaagacgctcagcactcgtcgcttctcctagcagaccctgc

SEQ ID NO: 349298 - DNA, 122 bp, Homo sapiens
atgataactgtatggaactaacactccaagtcaaacattgaagtcaaaattctgggctggcgtacattagttaggagcccccattttagaaaatattatttcaagcaggccttgtttttatc

SEQ ID NO: 349299 - DNA, 122 bp, Homo sapiens
tcagctgtagcaaagccagcctccgggctaggggatgccttccatgcgctaggcagcagccgaccccgaaacagctccgcggccccctgcgcctgggccctggcagactgaggggtccatgc

SEQ ID NO: 349300 - DNA, 122 bp, Homo sapiens
tgctcaacaaatactgagtgaatgtgtgagggaaataaatgagaggcggacgctggcatccgggagctgcgcaatgatctaacgaatttctgcaaaaattacaactaccccgcctttctcct

SEQ ID NO: 349301 - DNA, 122 bp, Homo sapiens
ttcattggctctccccgcgaggcaggtctggaagatcaagaatgaagctcggagctctctcgcggagcaaggacaccttcgggcttcaggaccacccagggcgtccaaaactgctgccaggg

SEQ ID NO: 349302 - DNA, 122 bp, Homo sapiens
cctgttagagcgcatttaatctaaggatgggacactgtgttccatgccaagcagcctcatcgtggctgattgttgcaccaacaacaagagctttaaccgttgacgtcccttcctgctcaaga

SEQ ID NO: 349303 - DNA, 122 bp, Homo sapiens
ctctgggccctctcctgtctgggttgcagctggcgtttcgtgtcttggcagtaacactggcgtcaggactgtcaccggatggcctgtttttcagaaggctacccccatacaaccgagtggac

SEQ ID NO: 349304 - DNA, 122 bp, Homo sapiens
cacggtccacggtgctgcgggttccaaaacgccaggcgagccccacggcctgcgggtgcccgggaggtgcagactgaagggcaagaccttgtcagagagagaaagaagcaataacgcatccg

SEQ ID NO: 349305 - DNA, 122 bp, Homo sapiens
acctggatgatacatcaggaagctaccaggcaagaagggaacaagaggacatgctggtcacggcttgttctctacgtatgccatctaccacaccaagaccgatggctcatagccaagcactg

SEQ ID NO: 349306 - DNA, 122 bp, Homo sapiens
ggccaccaagccctgagaaccctgccggcacccagcaccccatgccagccagcaccgctacggctgccatccatcagggctgaaccctgccggcacccagcaccccatgccagccagcaccg

SEQ ID NO: 349307 - DNA, 122 bp, Homo sapiens
agagtttggcctttactgagcacaaaagggagccactgaaggggttggtgcgggagaggtcggtcctgttcaaattacctgggaggccatgtgcaagctgaactggagggagcagaggcagg

SEQ ID NO: 349308 - DNA, 122 bp, Homo sapiens
gcacacggtgatggacatggaaggacccgggaggtgtggagtggtgggcccggcccgtcgcgggaaggacacagagggacataggctgccctggagaggcgctttcggacatctggaggggc

SEQ ID NO: 349309 - DNA, 122 bp, Homo sapiens
tgcaggccccaccaataactatggcgaagggaagcttcaggctcgcctaacagccaattacgatcagggaatgatcctctaccacctgttaattgtggtagaggaatgctgcgagccggtcc

SEQ ID NO: 349310 - DNA, 122 bp, Homo sapiens
caggaacatcacttggtaattaagagatcgccttgcttcagatccttgctctcctagccacgtgactgtgagcaagtgactttgcttctctgtgtctgtttcttcaactataaaataggtat

SEQ ID NO: 349311 - DNA, 122 bp, Homo sapiens
ggtggcgcggcccgggagctgtggtcgaagcccctgggcctggcgtgtaggctgcgcgggcggcggcgggctgggggcggggctctccgccctccgcgcgggtccgcctggcccctcccccg

SEQ ID NO: 349312 - DNA, 122 bp, Homo sapiens
ttgcaactaaaaaccatttgcgatttgcacaaatcaatacggtttctgtttgaggagtttcgccatcagattttaaagaggactggaaggaatacaaggaaaataagcacaatccaaaccaa

SEQ ID NO: 349313 - DNA, 122 bp, Homo sapiens
ttcctgtcgtcggtgcccaggacttggctggtgctatgaggccacacccaagtggggacccgggtggcctgatgacgccagcacacgtggcggtttattgagctgtgtgccaacatcccttc

SEQ ID NO: 349314 - DNA, 122 bp, Homo sapiens
attttttcgagacagagtctcactctgctgcctaggctgagtgcagtggtgtgatcgaggcgcactgcagccttgacctcctgggctcaagcgatcctcacctcggcctaccgagtagctgg

SEQ ID NO: 349315 - DNA, 122 bp, Homo sapiens
ctggtcttgtggaaatgactcctggggagcctgagagcctatagcctatgatttgtcagtcgcatgcagactggaggattggaacacaggagcctcaaagatgaagagttttttttccaccg

SEQ ID NO: 349316 - DNA, 122 bp, Homo sapiens
cccaagttgaaaagaaaaaaaatttctctggagcctctcagcacttacttatttagcaaccggctactccaactgtgctttctccaaaccacacagccagaaagagcaaaaagggaaaaaag

SEQ ID NO: 349317 - DNA, 122 bp, Homo sapiens
ggctggagagagcaggagggagggggctgggaagaggaggaggaaggggaggggggtctgcgctaatcgactctggcgcccacataaggactggccacggactgaaggagaggacagggaag

SEQ ID NO: 349318 - DNA, 122 bp, Homo sapiens
tgcctcttgtttctcagcgacagtgacctccaacaccttttatttagtgctgcaatacaccgtgtggtttgacggcacgcggaacatatcacgtgccaagccaacaccttaagagggtggga

SEQ ID NO: 349319 - DNA, 122 bp, Homo sapiens
acgtaggggcacagggtccccagagaagggcctactgggggcgcagggaggctggcagcccgccttcctgcaggtggagttagactcagtgagtgtgaaggatgctctgtggccaccatagc

SEQ ID NO: 349320 - DNA, 122 bp, Homo sapiens
gtgtgacttaagaccaagggcccgagatggcaccgggtgcatccgcgtcggcgctgaattcgagccatggttgaaaaagccaagcatgggttctgctcagctgctggagggaggtggccagc

SEQ ID NO: 349321 - DNA, 122 bp, Homo sapiens
ttcaaaacctagttccaaaatgtgcaataatctgctctctctatggcagctttacctgaccggagatggggtcggtgcccgcacgtgtctgaccggggaaggggagtgtcttatgggcgatg

SEQ ID NO: 349322 - DNA, 122 bp, Homo sapiens
cgcagtaaaacggagcaaaaccagcccggactcgcgtccgaactatcggcgcgtgtgccccgagatccaaggaagtcgtgtggaaaaccgcagccgccgccccatcttcggccccggctggg

SEQ ID NO: 349323 - DNA, 122 bp, Homo sapiens
ggaaacccagcgtcctgaccacactgctgggtcagcgaggcgtccctcagagaccggaaacgcggacttcagctcgcttgggaaacggcttccattagcagaagggagactgcggtttagtc

SEQ ID NO: 349324 - DNA, 122 bp, Homo sapiens
ccataagagaagcgcgccggctgagggtgcaggagaggcgagagcgcgccccgcgccgcgcggtcccaggctggctgctcctgcagatgtgaaaggagcccggagacttagctctgaatcct

SEQ ID NO: 349325 - DNA, 122 bp, Homo sapiens
ctgggggtctcctgctgaggccgcgtgggtgggttattgattcctgcaggatttccgacacgttttcctttgcctgctcgtgatacagacgaaacctgacacttaactgtttctacctcaaa

SEQ ID NO: 349326 - DNA, 122 bp, Homo sapiens
atggacacacatgtacataccactgcttttgtctactgtggttctagactcttgcccactcgtaagtagctatgaaagcaaggaaagcttctctcctccctcaagtaggaatactcaagagg

SEQ ID NO: 349327 - DNA, 122 bp, Homo sapiens
tctccactggaagagaacgtctccgagtccctcaactctctacgctttgcctccaaggtgcgattaccacccgtcagccttgtcaggacccgtgggtggttgtaggcttctccattccaatc

SEQ ID NO: 349328 - DNA, 122 bp, Homo sapiens
ctcacaaccgagaactcagaggccgcgtgggggccaaacagtccctgctgctgggggaggcggtttctagcccagaccacgcatgccagggttcaggcacaactctcaacagggcagggtct

SEQ ID NO: 349329 - DNA, 122 bp, Homo sapiens
cggccgtgatgaagttcgcttaccgggtgagcgcgggcggcgggcggtctgttggatcggcgcggctcttccggtggacggcgcctgagctggctccgggcgggctgggggcgcgtggtctg

SEQ ID NO: 349330 - DNA, 122 bp, Homo sapiens
cctctccatcctcactttccatccgcacatccagggccgcccacgtgcacccacaccgtgcgctcactgtgtggcctgtcgagaacacagtgtcctctgcccctgatttcccaggagagtcg

SEQ ID NO: 349331 - DNA, 122 bp, Homo sapiens
gaagagcgggaagtgaggaccaatggggcaggccaaagggactgtggaggccgacgcatgcgcagtgccctccggcctagcccggccaacccgcctgtcccggaccgcccggcgtcaggtac

SEQ ID NO: 349332 - DNA, 122 bp, Homo sapiens
gagcccccacggccagggccggccgctgcttcctgtaggcaggggctcctctgccaggtccgccgactgcagcgtgcccagcccagccctcgacaagacctcggcaaccacatcgcgttcct

SEQ ID NO: 349333 - DNA, 122 bp, Homo sapiens
tcatccacactcctcttcccagctaaggcctcagcacgacgggcacacctctcatcccgccggcctgccctcgccttgcacgtccaaaacagacaatagcgaaggcccaggtccccttggcc

SEQ ID NO: 349334 - DNA, 122 bp, Homo sapiens
tgggtgacagagcaagactctgtctcaaaaaaaaaaaaaaaaaaaaaaaaaaaaagctaccggaagcacagcgaggatgtccttgacacacatcctattttctgggaaaagattactaccac

SEQ ID NO: 349335 - DNA, 122 bp, Homo sapiens
ggattctcaccatatatcaagcctatattgcatgctgcctgaatacgtgggtttacgctacggaagtcctgatggcaaaccctcatatcgaaggcttccctccttgcttctccctatgtcca

SEQ ID NO: 349336 - DNA, 122 bp, Homo sapiens
gtgccgtttgggagcggcacgggactcgatggaggacgggtggggctaatagtatcggcgcgccgagaggggctgaaacagctggacccgggatggggtgggggatgtcacccaactcctct

SEQ ID NO: 349337 - DNA, 122 bp, Homo sapiens
tttgagcaagccagttcccgaaggctcagcatctcattcattcattaaaatgtcattgagcgcctactgtgtgtcaatcactgtatgggcagtgagcagaaaaaaaatacctggtcttattg

SEQ ID NO: 349338 - DNA, 122 bp, Homo sapiens
ggcagacaggcggcagcaggggacaggcggcaaggccagaggaggtgagggcctggggggcggaacttagccactgtgaacacgacttggtgtggaccctgctcacaagcagctaagccctg

SEQ ID NO: 349339 - DNA, 122 bp, Homo sapiens
aacccggccttttgaagggcagcgatttaaaccaatcagcgcaaagagttggcaaccctccgcccaattggaatcgctctcattctgaaggcggttccgacatggagtccggcagcccaatg

SEQ ID NO: 349340 - DNA, 122 bp, Homo sapiens
acaaaggacaacaccctagtctcccttcctggctctgcatcccgccgtgccagcttcactcgcaggacccacagcatagcccgggaggcagcgctgcacttacagccccccaagtctgagtc

SEQ ID NO: 349341 - DNA, 122 bp, Homo sapiens
aggcagcgcgcggcacggccgcccggggcatccccgcggctggggggcggaaggcgagggcggtggcaggaagggtccgccaggcctgagctcgctcccccactgccagccgccggctcgga

SEQ ID NO: 349342 - DNA, 122 bp, Homo sapiens
tgaacagtagtaaaagcccctgctagcgcctcggtaaacctgcccactccacggagcatgcgcagcgctcttcacacatgctcagcaggccctctcaagtccacggagcagcattgctggcg

SEQ ID NO: 349343 - DNA, 122 bp, Homo sapiens
ctgcaccagtgcataggccttccgcggccgcctcaccacttcaatgtgctcccgcgccaccggcatctccagccgctccagggtgtctcgcagcaggcaggcaagcaccggcactgagaact

SEQ ID NO: 349344 - DNA, 122 bp, Homo sapiens
aatgggatcaattactcctgccactgtccttggtgtgaatatgtgtgcacagagcccttccggtgtgcgtggccggacgctgggccacagagattcacaaattagccctgacctctgggctc

SEQ ID NO: 349345 - DNA, 122 bp, Homo sapiens
aagccattactctctggagtcgattgccccgagacacatgggccaaggaggggtcagcggcgaattctttcggcctgttggggacccctcgtgtccccacgccagactggacctcccgtatg

SEQ ID NO: 349346 - DNA, 122 bp, Homo sapiens
aggcgggggcacgtgtttggatgtgggtgcttgtgtaaccagttccccaagcgccagccccgacagcgctccttcgggaggctggtccgagcccctgtttccgccgcggcgcaggaagggtt

SEQ ID NO: 349347 - DNA, 122 bp, Homo sapiens
aaatcccctccgttctcatgctttccttcccttcccagtgcagggctcccggcaacctagcggccctggcagtgactctggggcctcttcagggagccggctgcagctgcctcagggccagc

SEQ ID NO: 349348 - DNA, 122 bp, Homo sapiens
ggctgagtcactgcactctcagagctggggccaccatgaccctcaagagaaagggggctgcggcaccctggggctccagccacaggcagctttagttctgcaagagcagttgaggaggccag

SEQ ID NO: 349349 - DNA, 122 bp, Homo sapiens
tgcttctcacctgtctagtggcaccacaggacggtcggcttccactcgaattcccccggacggtatcatcacatagccgggtcctcgcagtgttggtttcccaatccgatgactgtcacctc

SEQ ID NO: 349350 - DNA, 122 bp, Homo sapiens
aaccaccaataaacagagagcagcgccagcagcctggggatgtgatcataattatgccgccgcgcgagccaatggggacgagggaactcggtcctaaaatcatcccaaaaccgaaggcgagc

SEQ ID NO: 349351 - DNA, 122 bp, Homo sapiens
tgaaccacaacccccacacttgggtcaccatttcctcttcctcctccttgtgtgggtggccggagacctgtaggaccttccctccctttagggttctgtaaggccccttctcagtcctcaga

SEQ ID NO: 349352 - DNA, 122 bp, Homo sapiens
tagggaaacagtgcaacctcggcaggcaggtgcaccaacaggaggagcagccgcggagagcgcaacgggtgctgggttctcctcagaggtgggctatcggcagctccagcgggtgccctcgg

SEQ ID NO: 349353 - DNA, 122 bp, Homo sapiens
aggcagtctgtctcatctcttaatcatgagtttgtgctacctctcgtctgtggatctaggcgtgaggaggtagaagggagcccctggtcacgcccctgtgccgccttctagtggcatggcct

SEQ ID NO: 349354 - DNA, 122 bp, Homo sapiens
ctgtggcgacaccgcttcagggatgggaaggtgagggtggtctggctttgtggaaggaaacgagggtgacacagccctctccgaggttgaggtccgttagggtcctaattccttctacctgc

SEQ ID NO: 349355 - DNA, 122 bp, Homo sapiens
cacctccatcctccacaaggtgggacctgcccaccttcgagaagtcgcgggaggccggagcggcggtccttctactcgacccccttccgcagcctgccgggagatgtagttcgttccgcagc

SEQ ID NO: 349356 - DNA, 122 bp, Homo sapiens
gagccactggcaatcccagtgcagggatgagcgctgctgagaagggcgtgacaaacatgacgtacaagtgcagaattaacacactaatgagtgagccagcagtggggcaagagctggttcca

SEQ ID NO: 349357 - DNA, 122 bp, Homo sapiens
attccggcggcaggggcggggcctgagcgggcccggggcggggtcggggcggggacggggcggggcgctgatcggacgggcagggggcggggccatggccgccaagacaagccccgccatgc

SEQ ID NO: 349358 - DNA, 122 bp, Homo sapiens
tcctgcccgcccgcccgcccccgccgccggctcgcgcgctctcgcaccgcgcgcgcccgccggctcccattgagccccgggcccgcccgctgatgtcatccccggcccgccgccgccgcccc

SEQ ID NO: 349359 - DNA, 122 bp, Homo sapiens
gactgcataggaatcctgtggatgtagatttggggatgcccgctccccttcctccccaaccggattcacattaggtaggtctgagccacccagggtcagcgtatccatggaggacaagtggg

SEQ ID NO: 349360 - DNA, 122 bp, Homo sapiens
tttcaaaaaaaaaaaaaaagaaaagaaaaaagagaaaaagaaaaagaaaaaaaagaaatccggtatgtattttacatatacagcatgccgccattcagaccggccacatttcagtgctcagt

SEQ ID NO: 349361 - DNA, 122 bp, Homo sapiens
gatggggggttccagcgtcgactcacggagtccttcggatgagagcgtctgggtgccagacgaggccgggggtttgttttgggtggtttgggagtccgagctcgagggctgggccaggaagg

SEQ ID NO: 349362 - DNA, 122 bp, Homo sapiens
gtaaggatagactagatggtttacaccttgaagccaagaagtggacttcaggtctgtccacgttcctttccacctttggttttgtgactttattgaatggtcagtttcagcacttttgcttc

SEQ ID NO: 349363 - DNA, 122 bp, Homo sapiens
gcgggccgagacttgggttccccaggtccttggtggggaggtttccaggaggctcgggcgcgcccccgtccacggccccggaagctgacgtcgccgaagcgtacgccgctgcccagcctgcg

SEQ ID NO: 349364 - DNA, 122 bp, Homo sapiens
actcttacccattctaattctttcagtaactcagcgaaacggatggggcccttccttccccggagcactcctccagggactgagaatctgcagagccaggctcagcgctcgcctgcagagcc

SEQ ID NO: 349365 - DNA, 122 bp, Homo sapiens
ccccttctgtttcttcttctggggcgggggtgggggcaacaggaatccccccgaggaatgcgggtcctctaggcctccccaggagcaactcctctgccccacacagcctaattccctttggc

SEQ ID NO: 349366 - DNA, 122 bp, Homo sapiens
ggccaggtggcatgcaaggagttaagcggtaggcagtgctgtggctccgtgcgaggagcgcgccgggctgaggcgcgctgctggtggcggcggcggcagcggcgcgggagctagggctggag

SEQ ID NO: 349367 - DNA, 122 bp, Homo sapiens
gggaagagtgacttaaaccagccatgcataacagccattataaagttagagacacattcgcgagggaggcagttctggattctcagaacatctgagctcagaatctacctttgtcctcttcc

SEQ ID NO: 349368 - DNA, 122 bp, Homo sapiens
gtctgaaagtgtcggccggccttgggcttctggttgcaatgtctttgccctgctcccctgcgccttgtcggctgagtttcgggtgcgttccctactgtagggagggagccctctgtgagcgg

SEQ ID NO: 349369 - DNA, 122 bp, Homo sapiens
gcactggtagggaagccaggctgccaacagccctgccaccctggctgcaggttctggagccggggaccctctaggctgaagttctccaagtgggttgagcccaggtatccgtttatcctagg

SEQ ID NO: 349370 - DNA, 122 bp, Homo sapiens
acaaaaacaaaaaaactccaacgttctcttaagcttgagtggccaactgcattcctcaatcgcaagtgtatgaaatgtttctgtttgggtggtttccttgaggagaaaagaagaaacagctt

SEQ ID NO: 349371 - DNA, 122 bp, Homo sapiens
acctttcccgtctcatttcttgcctctcctgtaccttcgtgaacgtgccatgtaccttagcgctgtgtcttttcatgtcctgtgctctcggcacttccttgattaggtggaccaactgctac

SEQ ID NO: 349372 - DNA, 122 bp, Homo sapiens
ggaattgggctctttatgtgaaaaggtgaactgtgggacacagtttgtgcacagcctcagcgagctgctgaaactggctttaaggcctgcagttgcttgtcagaagaaaatgtttctaaggc

SEQ ID NO: 349373 - DNA, 122 bp, Homo sapiens
ctgtgtgttacatatcgcgttcccttttctccatttttatttgtcctactttactttggacgttccttaccttgcctaggctagcgaattaacccactggcattttttttctgtttccatct

SEQ ID NO: 349374 - DNA, 122 bp, Homo sapiens
gaggaggtgggggcaggcggcggcccgggcggggggcggccgggggcggggacgccgctgcgccagacactctggcctctcagcatccacgaccccacgcgccgcgcccgcgtcaaggagta

SEQ ID NO: 349375 - DNA, 122 bp, Homo sapiens
cagctggcccttacatcaaaggaatacacaaagcccaccctgtgcacctcaaatgtctcccggttaactaaagtctttgggtgtattatgatccactgccctcactccccttcacatctact

SEQ ID NO: 349376 - DNA, 122 bp, Homo sapiens
aaaggagctggtggggaggggggcgcggaaacagaatacacgtccttttctccattcgcacgacagagtcttgcgtggggtgaccgatgcctgagtttagctatccctgaacttgagaatac

SEQ ID NO: 349377 - DNA, 122 bp, Homo sapiens
cacgtccatagccggctgtcccaaagacagctgtgcattgaaaagcaatctacaaaagaacgactataatctactgactgactgttactagttcagcacatctatgatctacatcgcatgtt

SEQ ID NO: 349378 - DNA, 122 bp, Homo sapiens
ttttatcctttgttttggcgagggaagagattaaaaacgagataggaaagctggcttccacgggattccattttagcagagtcattgcgaaacaaaaccacctctgcaaggggcaggttcct

SEQ ID NO: 349379 - DNA, 122 bp, Homo sapiens
gtccagaaagaaaggccagggcaggagcctgaaacatgggaaccctgtgggggcgtccggcgacaccttgctccaggtcccagcccacaccagtggaatccattttggagaggcttggccgg

SEQ ID NO: 349380 - DNA, 122 bp, Homo sapiens
ccgccttctttggggctagcctattaagcttctttaggtagggggaaatagaacaggagacgcgaaaagcagaaggtaatgaaggcagtggaatgtaccatttctgcttgccaccctccgaa

SEQ ID NO: 349381 - DNA, 122 bp, Homo sapiens
ccactccgctctactccactctttctgcagacgttatttttggcggtagggcagaggttgcggcccgaggtccgggcgcagggacaacggtcgccagctcctgcgctagttccgttactctt

SEQ ID NO: 349382 - DNA, 122 bp, Homo sapiens
gcaaccccagcaaagccacccaaatgaacagtctacaggtagcaggtagtgacccgaggacggatactcaaaaaaggcttgacagaggacatgggatttaagaaaagctatggaaaaaaaag

SEQ ID NO: 349383 - DNA, 122 bp, Homo sapiens
atttcacccatttatagggttgatagagggattaaaaattcatgtaaagtgttataacctcgtgtatgagtcaaggccctgggagggaacgctttgcatactctatggagtgattgaagaga

SEQ ID NO: 349384 - DNA, 122 bp, Homo sapiens
tgtaagaatttccaggatatattaattcgctaaagttaataaaagcaagaaacagaaggacgtttcagaatgctattgtttgtgtaacaagggggtgctgaatacatacataattgcttggt

SEQ ID NO: 349385 - DNA, 122 bp, Homo sapiens
accactggagctgggaacaagatcccaaggtagtccaatgggtctaccaggggcagattccgtttcccggcaagaaagagtcccacacttgtgccgaccccccttctaaagtcctatcagga

SEQ ID NO: 349386 - DNA, 122 bp, Homo sapiens
acctgctccatgttctccatgcaggccaatctggtctagacctatcaccaccctctttgccgcagaccttggctcccacccaagccccccagtctgtcctccctgcagcagccagagggcac

SEQ ID NO: 349387 - DNA, 122 bp, Homo sapiens
cgggtttgtttggatggtggagggagacagggcccgtcaggaggcactcttggggaatcgcgcagccatacaactttagagctggccttggctgggagaggaaaatccatctgaactcaccc

SEQ ID NO: 349388 - DNA, 122 bp, Homo sapiens
caggaagctgaccttgaagctctccagcacgggcagcaggccttggcggaggtcctcgagcgcgggcttggccttctcgctgagcgtgctcagatgctcggtggccttggcgtggtactcgg

SEQ ID NO: 349389 - DNA, 122 bp, Homo sapiens
tctgaactaacacccacccgcctctcagggacgagaggtcaaatctcgcgaggcgtgctccgtctcgcgagatctgggttgagcctgccgctgccttggctaccaggctcctcaggtggcag

SEQ ID NO: 349390 - DNA, 122 bp, Homo sapiens
accctgtggtctagtgcttagggttctgtgtgtttgtggctgcagcccaggtttgaaatgcggcttgtttcaattaatttaaatttatgtagccacatgtgtatagattctgtacatttact

SEQ ID NO: 349391 - DNA, 122 bp, Homo sapiens
ctggccacttcttccctcacttccaggacaacctgttgcgcctctatctcctcccctccccgcagtttccccgccttggcctctaagagctgattggcagaaattactacccaaccctcagc

SEQ ID NO: 349392 - DNA, 122 bp, Homo sapiens
ttgaaaaagctctacagacttgaagtcagtagaaagaaatacgtgacttaaggtaagcagcggaggggaggttgtgaaggccaatgttcttattatgtagatgaagcctcttcatttgggtg

SEQ ID NO: 349393 - DNA, 122 bp, Homo sapiens
atctggggtcaggatttcttctagcagtagtgagactttttgcataccagaacaagatatcgtcctttgggcagtgccagccctctgtacagactcccacacactggattttggcctccagt

SEQ ID NO: 349394 - DNA, 122 bp, Homo sapiens
acactacacacacatatcacatgtacgttttgagaaaaataacaccatgaacctactacccgttaaaaattagagaaaatattaaacttttcacaaatttacatagcattcttatacagggg

SEQ ID NO: 349395 - DNA, 122 bp, Homo sapiens
ctcctttactacttcagtcgctgaaacctcccctcacagagttcacggccaatataaaaacggaaagaagggatgaccatacgagcttgtggacttttgcctgcaaaatctcatagaatgtg

SEQ ID NO: 349396 - DNA, 122 bp, Homo sapiens
gaccacaaatctatatttcagaaccatactttaatgcctgcgaaatagtctacctttcaacgactgaatttatttaaccaatttccttctgctgaacactcacattaattctacatttttgc

SEQ ID NO: 349397 - DNA, 122 bp, Homo sapiens
gagcaagtgtacatcgttggcctcaggcacatttcatctgattgagtcatctggctcaagcggccactctggtcctttttgtaacccgactattaggggaaagcgtatgtgacagaatgtga

SEQ ID NO: 349398 - DNA, 122 bp, Homo sapiens
agtctcagctacatttttgtaaaagacctttttgccaaaattagtttaggtttcaagtcacgtttcaccctcagtcaaatataaaggtcactcagtgaacaaaggggagattgtgtattctt

SEQ ID NO: 349399 - DNA, 122 bp, Homo sapiens
tgttgatcaacttacacttcgcttttgaatatttagatactgctagcggaacaatatcagcggaggcttaggtccgcattaagtacctttgttcatcgactcctgcaagccatgtttattag

SEQ ID NO: 349400 - DNA, 122 bp, Homo sapiens
atgcctgtcccttcatgctgatatactcggttctggaagccgagggtcgccgatctggtgcgcagttaacagacctacacccagcttgtgccggtctaacaagccacgccagaggggaagct

SEQ ID NO: 349401 - DNA, 122 bp, Homo sapiens
atgcaaggatttgctttttagtttgcttgaattcggtttgcttcaatagttactgtgtcccgcacataaatacacaactgacaaatgcaaagacccagacagcaggtccttggtttacatct

SEQ ID NO: 349402 - DNA, 122 bp, Homo sapiens
cctcgagatgaaattggcagttggggctgattcacagaaacaccgatttgtggctgagcacggtggctcacacctgtcatcccagccctttgggaggctgaggtggacagatcacttgaggt

SEQ ID NO: 349403 - DNA, 122 bp, Homo sapiens
gagtcacctggtcactgattctctgcctggaccttggatagaccattgggacacatcttgcgatggagtgcgactcaagcaatgacattcctgaaaggagagaagctgtggggttgggcgga

SEQ ID NO: 349404 - DNA, 122 bp, Homo sapiens
gaagctggaagttagatgcaaaggcctgactgtgtttcgatttcacataccgggcaagaacgcttatgggtggtattggatccctcattgcatccctccatccactatgctgagactgacca

SEQ ID NO: 349405 - DNA, 122 bp, Homo sapiens
cagaggacacagagcaatgaaagcgagacctggagctccggctgcagcgagagacaaaggcgccgccaaatcccggaagccatcttgtctgctccagctgcgtgcctgattggacggttccc

SEQ ID NO: 349406 - DNA, 122 bp, Homo sapiens
tttaataattgtgaaaatagaaagaattaaatagcacaaatatagtataaaactaaacaccgttactgtctatcagtttgggcttatgtgaaataaagggaactgtgactctgaaacaattt

SEQ ID NO: 349407 - DNA, 122 bp, Homo sapiens
aagcccacattctttcgatagctcacggtggtgcatgagtgtccatcatctgactcttctcggagtctcatattttgtgggactcctgtgcaaacatatgttattaaaatttttttcctcct

SEQ ID NO: 349408 - DNA, 122 bp, Homo sapiens
cccatatctgctctactggcagcactgttagtagtccaagaaatctctgatgatccatcccggctgactcctgtgctcacactctgctcagcggtggtgctgtccactgttgataaggcact

SEQ ID NO: 349409 - DNA, 122 bp, Homo sapiens
agtgcacggccatggggctgcgcagcggcaacctgcgggacaggtacagcacagcgcgggcgcggggcagcgcggagcctgcctgggatgaggagcgggggggcaggtggggcccgatctat

SEQ ID NO: 349410 - DNA, 122 bp, Homo sapiens
aatggggttaccaatggtgtccacttggctgggggccaggtttgtaatggcggtaggatgcggagagcagcagccccaaccctttctgggaaacaaattgaccacgttgctgtagttggttg

SEQ ID NO: 349411 - DNA, 122 bp, Homo sapiens
aggaaaagacagccctcagtatatgtggtattacatcctgagaatacagtattttttgttcggttgaaaaaaacctgcatataggtgaacttgtgcatttcaaacctgctttgtttaagggt

SEQ ID NO: 349412 - DNA, 122 bp, Homo sapiens
cccttgactgcactcgttcagctgttcaggcgtcgcgattcgtaaatataagaaatttcccgctctcttccacggcttcccagaacgctgtgtcgctaacaaccagtgaagacccaagggct

SEQ ID NO: 349413 - DNA, 122 bp, Homo sapiens
tcactgtgtgcgttcttgccagcatcctcaggttcccgagccggtgaccagggacctgtgcgggaaagcgtggggctctggaatttgatcgcctttggtctaacaaagccactcagcttaaa

SEQ ID NO: 349414 - DNA, 122 bp, Homo sapiens
cccatcgtgctctctgtcgctccagttagatgccccatcctgccccgcgagctccaattacgtgccccacctaaccccccacgtccgtgcctcatcatgacccgcacgctatggttacatgc

SEQ ID NO: 349415 - DNA, 122 bp, Homo sapiens
cagctgaatctggccagcccaacctcccggtcgctatggcacccacaggcctaacattcgcgagtccaccttccgccgtccgcgaggtaactccagccaatggcatcctctgtttctttaac

SEQ ID NO: 349416 - DNA, 122 bp, Homo sapiens
aagaggcttctcaggattattttaaatacatagacatctggactgatgttagctgagcttcgattttttaagagaagcaaaacttcaagatatttacttgcgagttcccagtttttaaaagt

SEQ ID NO: 349417 - DNA, 122 bp, Homo sapiens
actccagctcctctgcctacaggctgtggcccagggcaggttgcttcatcgctcttagtccgagtctcctcatttgtgaaataggggtaataatagtatctatctatctctcagcgttgtgg

SEQ ID NO: 349418 - DNA, 122 bp, Homo sapiens
ggagcttttttcagaagcccatttgcagccgaaagctgagatgtgcaggatgatacgcagcgtgttgaaatttttatgaatgaactttgccgaatgaatttctctgtgtgtgtgcaagctaa

SEQ ID NO: 349419 - DNA, 122 bp, Homo sapiens
ggccagccacggctgggcagggccagaagcgcctcctccaggatcctccccgcgctggcccgccccacaggagcaccgcccctaccaggagcccggagctcttcccagggcccgcctccccg

SEQ ID NO: 349420 - DNA, 122 bp, Homo sapiens
acaccaggtgcccctagcctcttggagagtcctctgcacagaccctcttcatcagcatcccgaggaggagaggaggatgttgttttaagcacctacttgctatgtggcaagcagcgtgttgg

SEQ ID NO: 349421 - DNA, 122 bp, Homo sapiens
aaaagaaagaaggcagttttttgttttgctttgttttgttttttcataactcagttctcacgcttttcttttggtatagtaagttcgagggtcccaagactttgtttttcttccacaatgtg

SEQ ID NO: 349422 - DNA, 122 bp, Homo sapiens
tatttaggctaccaaacatctataaaactaccactaatatgatgaagaaaagagcagtcccggaactctgggacctggtccgatgcttaaggccggccctggtgttctcctgttggccacaa

SEQ ID NO: 349423 - DNA, 122 bp, Homo sapiens
aatggaactttgtactcttcggggacggtacggggggcgggcaagaaacaataaacaagccggcaaagaaagcgccacaaaattccaggtggcggtaagtaccaaaaactatggtacctaat

SEQ ID NO: 349424 - DNA, 122 bp, Homo sapiens
tctccactgctcctcccaagcatgtgtgtgaccagctgtgattccatggtgccccgtttccgtgttctctgaaacatttcagtggtgcttcacagaaaattccttttataaatagagaagct

SEQ ID NO: 349425 - DNA, 122 bp, Homo sapiens
gccacctcagagggagggcccttaaaaaggaaggcattgtagattgtgagacgtagacagcgcacctcagagatggtcagttcagctccttcatgattcctgaaactccacagtgaggagag

SEQ ID NO: 349426 - DNA, 122 bp, Homo sapiens
ggccgccttgagacccccgttgtcggcgatgttctcccccagggtgtgccgcccgttcaccggctccccgttcacgctgtagttgctgtactgctctaccatgcactcggtctgacgcttga

SEQ ID NO: 349427 - DNA, 122 bp, Homo sapiens
aatattacaaattagtaaagtcaaagttaacagattttatttttgctgtaagtaaaagtgcgtaagtttgcagtctagtctaagaagaagccagtgtcatttagtgtgctacctagatggaa

SEQ ID NO: 349428 - DNA, 122 bp, Homo sapiens
cacgctagtcgttgctcctggagggctgcacggcggcttgtccctttggtagttgaatcccgcccattccaaaaagcgctgacagggatgtaaagggttttttttgtttgttttttgttttt

SEQ ID NO: 349429 - DNA, 122 bp, Homo sapiens
tcgggcgcaccaggaggggccgggggcttagcgccagggcccgggggatcgccgtggatgcgctggtgctgcagcagattggagcgctgccggaagctctggccgcactcagcgcaacggaa

SEQ ID NO: 349430 - DNA, 122 bp, Homo sapiens
cacagcatcggaagaatgaatagtgctccctgatccctaacgtgcaatcggggctggagccggagacccctccaccctgcagtcagggccagcggggctgtctcaggcagcacatctaaagg

SEQ ID NO: 349431 - DNA, 122 bp, Homo sapiens
gctcggtagacttcgggcgggccctgagggctgagccaggcttaagagggcgggcggggccgcggggcatcgacaggtcgagggtagggaattgacccggcccacgcagatccccgcgtcgt

SEQ ID NO: 349432 - DNA, 122 bp, Homo sapiens
cggtgaggaggtgctgccaggctgggttggagcaggcaggtgttccgcgggatcgagacccgccccggcagcacccccggccccctccccaggtccccagctccatgtatgcaaatcactgc

SEQ ID NO: 349433 - DNA, 122 bp, Homo sapiens
cgtttctcaaacgtggaggggaccttttcagagctgagaaacagacaccctgagccagtccgtggagcatttaagctggtctactctccagccgccttccaagctgagtcatttcctccaag

SEQ ID NO: 349434 - DNA, 122 bp, Homo sapiens
agtgggagaagcacgcgatggggctagcgcccagtcctgcgggggcaggcgccaagctcccgggagtccgcaagtcgcttcctatattggcaagcttcaaatgagacattagaatctccggc

SEQ ID NO: 349435 - DNA, 122 bp, Homo sapiens
tccaagggcaccatgggcatcactacccacctgataatgtgtcagagatgggaggatggacggggaggtttgcatggaccaggtcctctcattccactggttggaactcagtcatatgaccc

SEQ ID NO: 349436 - DNA, 122 bp, Homo sapiens
cttagcggccagagagggtggccaggtgggcccagccccgcttccccaggtgactcccagcgcttaggcgcaccagcttcaccccgatgcccagtgggaaatcggaaccctcctaaattctt

SEQ ID NO: 349437 - DNA, 122 bp, Homo sapiens
gcgctgccgggtcctgaagggcccgcctgcagcccagcagttcgcgttcgcctacccgcgcgcgacctacctactcacgcggccagccgcggactccaggccagctctgtcttgttgctggg

SEQ ID NO: 349438 - DNA, 122 bp, Homo sapiens
atgccccggaggcagcaggtgccgtacaagcagctggacctgcgggggacgtccctgagccggtgcgggagaatgcagccccggcgccgccgggctccctgtcccaggtgtgtggggtgtgg

SEQ ID NO: 349439 - DNA, 122 bp, Homo sapiens
acacaagcctcaggggccagttgtggaaatatcactcccctcaagggaaatgatagaatccgaaacaagagcacctgagcccagagaagccagaatggtgttggaacgcagagaggatgaga

SEQ ID NO: 349440 - DNA, 122 bp, Homo sapiens
gttgttcaacccccaccccaagattagttcaaagtgaccgtgaagatagtctgtgcccaccgcatcgctaagtcctagccctctctgcatactccagcacacagaaactgctgcttcacttg

SEQ ID NO: 349441 - DNA, 122 bp, Homo sapiens
cctgagcccggagcgccccaactccggagctcctctgccccatcggtccccggacccagtcgggtccccctggccgccctgctgcttccttatcgtgctccaccggccccccgaagtcgctg

SEQ ID NO: 349442 - DNA, 122 bp, Homo sapiens
cttccaaaatccgctcagggaagcagacccgagagctggtcagggcaggctggctggccccggcaggtaagccaaggtgggtgtcggtgccgtcagcctcctccggcaggcagtctccgggg

SEQ ID NO: 349443 - DNA, 122 bp, Homo sapiens
tcaggcagcgaatgggagggcagcttgaaccctccctgttctggtgggtgttttggccagcggctgcatccttctgctagtggccatcatcactgtgacttgttcttgccaaggcaaggcta

SEQ ID NO: 349444 - DNA, 122 bp, Homo sapiens
cccgctcagtgtctctctctgtcactatctccagtgtcagctaatggaacatcaggggaacgatgactcctggattctccttcctgggtgggcctggagaaagaggctggtgttacctgaga

SEQ ID NO: 349445 - DNA, 122 bp, Homo sapiens
atcttgcttattggatatgcccaggcttgtctcatttttgccaacagctacatggttttgcgtcctatggatggggcataattagattttattacacttgtacaaaaggaaaggaattcagc

SEQ ID NO: 349446 - DNA, 122 bp, Homo sapiens
ggaggaaagcgccaaaggaggccgccatctttcatacagcagcccggaattttgcgcatgcgcctctgattgtctgtccgcaatgaagctcttcggccttctcggcacccatacgtttggga

SEQ ID NO: 349447 - DNA, 122 bp, Homo sapiens
gcacttccttgcagcattgcctccctttgaacttaactgctgtcattatttactcttcctcggtctatgtcctattttactagattgtaagcacctgaaaaaaaggatctacatcttctatt

SEQ ID NO: 349448 - DNA, 122 bp, Homo sapiens
agctgctgcctctgctccgaactcccacggggaaagcagcgtctctaggaccaggggctccgagcatggcacagcgccaactctcgtctcttgccgcctcctgagaacctgggtgcagcaca

SEQ ID NO: 349449 - DNA, 122 bp, Homo sapiens
tccatctgtgattacagctggacagaaacccgagtgatctgtctgtgttgccttcaggtccgtactgctgcttctgctcttgttcttcatcccgggtgtggttatggccgtggcctacgggc

SEQ ID NO: 349450 - DNA, 122 bp, Homo sapiens
ccttattacgaagcgtatagatgaaggggtttaaaactggagtcaccacagtgttcaggacgtggacagctttgatcagatccaaggcatctttgatagaggtgcggacgtgaaggaaaact

SEQ ID NO: 349451 - DNA, 122 bp, Homo sapiens
gcctatatctaagcctcattctttttgagaactgtcctggagctcacagctaggccatggcgttctcttgttggacataaacaacctcacagagcaccaacttcatacagggttgtgtgatg

SEQ ID NO: 349452 - DNA, 122 bp, Homo sapiens
gcggaaacagccaagaaacgacgcggaaggaactgaagagactaacacgcgggtcatgggcggagggatacgtttctatgggaacgccacgatctctccagtaaacctgaggccttccccat

SEQ ID NO: 349453 - DNA, 122 bp, Homo sapiens
gatgaggaaactgacacccccagagagcgggttggagagcccagttaacagccccctgcccgtgctccggggccccgctgacccgccggccgtgtctccgcaggtgcagctccagggagacc

SEQ ID NO: 349454 - DNA, 122 bp, Homo sapiens
ctccagcgacatctgcaagaagtctgttctctccgagccacttaacaggaaaactaatctcgtctcggctcccacaaccctgcacctgttgtaatccctcttccttcttcattggctcttaa

SEQ ID NO: 349455 - DNA, 122 bp, Homo sapiens
ggtaaggacgggagggagcagcacgtgtggcaggagcctggtgggcggtggaagggaggccggagtccctggacccggcagccttagtctttccacctgagaaatgaacacggggatcgttc

SEQ ID NO: 349456 - DNA, 122 bp, Homo sapiens
cctgctcgcgccgggcccgcccccgcgttcttcccacctcccgattggcaggccccgaaccggcacgcccccgtgagcccgccctcgaaatcactcttaaagggtccgctcctggctcgcga

SEQ ID NO: 349457 - DNA, 122 bp, Homo sapiens
cccaccagcagtccccgctcaggactccctgagaccctgcccgcagcccccgccccagaacgccggagatccccgccctggggaccctcccggagccccgcccaagacgccccgagcccccg

SEQ ID NO: 349458 - DNA, 122 bp, Homo sapiens
cacttcccgcacctgctgagcccgcagatccagcgctctgcccacagggctctgtaccgacgacacgtcctgggcatcgtcctccaaggcccggccctgtgctttgcagcggccatcttctc

SEQ ID NO: 349459 - DNA, 122 bp, Homo sapiens
gcttggtccggagtcggtgccgggctagttttctcttagactctgtattccataatgcagcgcggccagagtcaccgagccctccgaagccagccgagttccagggcgtcttcagcggcgcc

SEQ ID NO: 349460 - DNA, 122 bp, Homo sapiens
cgcagccgccgcagcttctgagcccaaggggccgccgctgcagccgccgccgccgccgctcgcccgcccggatcccgcctgcggcagttgccgcacaacatgctacctgcggccgccccggc

SEQ ID NO: 349461 - DNA, 122 bp, Homo sapiens
ctcaggtgatccgcccaccttggcctcctaaagtgctgggattacaagtgtgagccactgcgcccggctggaatatgccttttaatcttaaactgcaccacagacccattctgccctgccac

SEQ ID NO: 349462 - DNA, 122 bp, Homo sapiens
acccacgtggtcacagtctccccacttatataaaaggcctacagaggtgcaagtagtgaacgcctgacgccccgaccactgtgctctccattcggacgtctccatcctcagaacctcctctc

SEQ ID NO: 349463 - DNA, 122 bp, Homo sapiens
ctgagtgaatcattaagggagcgaattccaagtgcatgagcgtctctgtgtttcccgggacgggtttgggccaagacaaacctctgtgatgccaacagcagttgcttgaacagtggagctca

SEQ ID NO: 349464 - DNA, 122 bp, Homo sapiens
agggtttcctcgtggaacccgggagggagcccgcccgcctggccacccactcgccggggccgggctgctcctcaggggcctgcggaatcaaacctcagaggacctcccatggttttggaaaa

SEQ ID NO: 349465 - DNA, 122 bp, Homo sapiens
gcacatggagaatcgagcggcaggccatgtgcacgagacatgaatgcaggcaaatgtagacgcttcccagaacacaaactctgactttttctagaacattttactgatgtgaacattctaga

SEQ ID NO: 349466 - DNA, 122 bp, Homo sapiens
agagaggttacccagagaaggggttggtggtaagcagagacgctgttccctgggatgctgcgcgcttggccgctcatctgtgttcatccgccttgagcctgcgcatgagatatatcactttc

SEQ ID NO: 349467 - DNA, 122 bp, Homo sapiens
tggtttcaagactttccgttttctaggtatttccttggccttaaaccattttcctttaaacgaactttttctgtgaagccatccggtttcccccgatagtggcatctcacaaaggacaatcc

SEQ ID NO: 349468 - DNA, 122 bp, Homo sapiens
cacgagaccattcgagaagcagcggcgctgggtcaatcccccaggctagcccggaggaggcgctgcgtgggcggacggggcggcagccggcgggacagcggcacctgtacccctcacagggc

SEQ ID NO: 349469 - DNA, 122 bp, Homo sapiens
cccacagggctcaaagaggggcaggaggtagcagccagctgggaggtggatgagacaaggcgttaaattgccctggtcttgtggctgacccacaggggaaaattgagggttcttcatatttg

SEQ ID NO: 349470 - DNA, 122 bp, Homo sapiens
tagccggcctcagagcgcgcccgtacctgcaccaggtagctggctccccgcttcagcccccgcagctctgcccggttttctgacgtcttcaggaaccgcacgctgctgggaccctcggcgcc

SEQ ID NO: 349471 - DNA, 122 bp, Homo sapiens
tgcctttgtctccatgttcacatcattgtcatcttcaaatagtctatccttgcagtgtttcgatcctccaacttaagacttaggggttggttgtttttttgttttgttttgtgttttttgtt

SEQ ID NO: 349472 - DNA, 122 bp, Homo sapiens
ggcacgatcgcaaggtcgcgcagaagctcctcaatggccagcgccagttgcagccccggccgcacccttgcctcacctgagcctgggctcttgctcttgcggaatccacaggtctttcttga

SEQ ID NO: 349473 - DNA, 122 bp, Homo sapiens
cccgcaggaaagcgatcccagcaacactcttcctgcaccgcctcgaactcacctcactaacgactcccagtccctcggtcgcttcttcaactgtgccccgacaccggaaaggagcactattt

SEQ ID NO: 349474 - DNA, 122 bp, Homo sapiens
tggcccagccccttccagcagcgtcagcagatcccagtggttacgttggtgagcgacgtccgccggcgctagcccagcctggtcccgcagctctcgggctgcccccagccccagcagtagct

SEQ ID NO: 349475 - DNA, 122 bp, Homo sapiens
cagaggttttttggggaaatcagtacccaccctgaatgctccttccttgttttctccagtcgatgacgatagtttgccacagtttcatccctttgttgtatacagttttgagtatatggctg

SEQ ID NO: 349476 - DNA, 122 bp, Homo sapiens
gattcttacttcagccaagaaagacagcggtcattttctagctgggatggagcagctgtccgtcagtggatttctgtcgaatatatgttataggcagataaccaagtgttaaggcaagatca

SEQ ID NO: 349477 - DNA, 122 bp, Homo sapiens
ccggagagcagagggtccagctgcgtggggagtgtggtgttcccagccctgctgtctgttcgctgggtgtgagtgacaagagtccccactccctgcagaaattccattacctggacaagtcc

SEQ ID NO: 349478 - DNA, 122 bp, Homo sapiens
actaggagtgcttatcaaatgaggttttaggctctgaaaggaaggaatgagaaggtgtgccgggacaaggaatagccagttcccataaaacttgggaaacgtagatttctcaaaagtagggt

SEQ ID NO: 349479 - DNA, 122 bp, Homo sapiens
ccaaagcccaccgtgaagggacaagcctggcctggcccgcgtcctctcccccggcgcgcgcgtcgggaaccactagatggcagccgcgactcgcgccagctctcactcgcccccgcgtctgc

SEQ ID NO: 349480 - DNA, 122 bp, Homo sapiens
ggaacccaggaggtggaggttgcagtgaaccgagatggcgccactgaactccagcctgggcgacagagtgagacgcctactcaaaaaataaataggctgggtgcagtagctcacgcctataa

SEQ ID NO: 349481 - DNA, 122 bp, Homo sapiens
ttgtgaagcgggcagccttctttactgtctaggggagcactgcttcctgccctctgagagcgctaacctgcgtgggtgggcttctggaagaaggcctgggcagtgagaggcactgcctagga

SEQ ID NO: 349482 - DNA, 122 bp, Homo sapiens
acccaccctaccctggagcaggctcacccatgaagtggagcttggctgacaggttgcaggcgaagccctcgggcacaaagctgtagtcagcctcgtcggcaggtgtgacgtcgtcaatggtc

SEQ ID NO: 349483 - DNA, 122 bp, Homo sapiens
gcctccccaccagatgtttccttccctggtggatttggctcccctgccgaaccaccagaccgcctgctgcgcgcccccagctccagatttccagtcacactgcgcgggtcgcgccctaaccc

SEQ ID NO: 349484 - DNA, 122 bp, Homo sapiens
cctccccctcaccccccccagtccgagcgccgccgccgccgccgccgccgccgccgcggccgctcagtaacacgtccccaggagactcgcaggagcaacacgtgatgtgtctacttatcagg

SEQ ID NO: 349485 - DNA, 122 bp, Homo sapiens
ggcaatatttgatgatgagcagcgttaattctgagacaaatttagcctactaatgacatccgggtccatcatgatatttttaggttggaagtgacatgtgacatcattatccacacatgatt

SEQ ID NO: 349486 - DNA, 122 bp, Homo sapiens
catttcatttcaaataaagcccacagctgctatcctggcctacagagtcccacacactctcggccctggtgacctccttgatgttctctccacagttgccttcctgtcctaatcagctccgt

SEQ ID NO: 349487 - DNA, 122 bp, Homo sapiens
aaggtactccgggacgccaggacctggcagagtgaatatttgacccattcttctcctagacgaaggtaattattggcctcaggcaaattaaaaataaaagaatgcaaattgggtaggttttt

SEQ ID NO: 349488 - DNA, 122 bp, Homo sapiens
tggcagctgcccctccctgacacgtcacatggatttttctcactcttctcttcactgccacggggcatctcagccctcctggggacctgggccagggaccaaagcccaggccaaagacagcg

SEQ ID NO: 349489 - DNA, 122 bp, Homo sapiens
acgtgagtcactgggtcccagagccacggaaggctctcagctcagcagtcagagtgcactcgtcattgcgttcgaggttaggtggcctagcctgggaaccaactcaccgtcatttgaaatcg

SEQ ID NO: 349490 - DNA, 122 bp, Homo sapiens
agatgagttcctgaaccttcctgagccttggcttccccatgtggaagcaaagatcacagccgccctctgggcatcctctgggcagtgtccacggaaggtgtgtgccagagcgtcttcttcac

SEQ ID NO: 349491 - DNA, 122 bp, Homo sapiens
cctcctcccaggccataccccaataccaggcatgcttcagtagcgtcctcgaggggactccgtcagggatgcacaaggaccactcacctcctacctccgccggacttcatctcccctctccg

SEQ ID NO: 349492 - DNA, 122 bp, Homo sapiens
agcggccacactgcatcctttccccagggtcgtgctctctcgttgaatgagtgatgagagcggccacactgcgtcctttccccagggttgtgctctctcgttgaccgagtgacgagggcggc

SEQ ID NO: 349493 - DNA, 122 bp, Homo sapiens
ccttgaaaagggacttaactgcgaggttaaatcgtggaggtgagcaaggcccagtgtgtgcggagaactcacatttaagaaggagtccattgagccggacgcagtggctcacgcctgtaatc

SEQ ID NO: 349494 - DNA, 122 bp, Homo sapiens
ttccacctcacagcagttgtatccatttcttcattgtgtctcttcctgttacaatccctgcgcgcacacacatagtcctaccttcaattatttattcattatccaatatttattgagaacat

SEQ ID NO: 349495 - DNA, 122 bp, Homo sapiens
ctcagtggcttgagtctcaaacatttgtgtaaaaatgaaagtccgatcaacgggggagcccggatgctgcagggtttccccccattcacatgttgctagacacaccttggctccactatcta

SEQ ID NO: 349496 - DNA, 122 bp, Homo sapiens
gttcaaagacttccacattcaagctcggtgttgtttcacacgcgtgcgccccggctgcggcggtgacatattgctgtattcggacataaggcactgtgatctgaacataccgtgcactcacc

SEQ ID NO: 349497 - DNA, 122 bp, Homo sapiens
cgtgaacaaacaccttggatctttccggttcgccagggcagcgagcaaagcagcagcgaacggaaaccccgcagggctgcgcaccgcagctaaaccgacgctcgcaggagaggggaagtgag

SEQ ID NO: 349498 - DNA, 122 bp, Homo sapiens
gcgggcttgtctgaccagcagcagcggtacctggtggctggttagaaattctcagggccccggaatgattctgccatgcctctttcctatgtggctgggggaaaaattagaccacaactccc

SEQ ID NO: 349499 - DNA, 122 bp, Homo sapiens
cgccggtctcactcctccttgcaagtttgtgtgtccctggtcgagttacccaaatccagacggtgtgtctgccgtgagtgcagcttatgtgccactggcaagcacagcggctgccagagtgg

SEQ ID NO: 349500 - DNA, 122 bp, Homo sapiens
ccaccgaaaagacccacattgtcagcacatcctaatcaagtagctactaagtggagggaccgcagactgggtgtcacggggaggggcctgcagcgaccaggcccgtcccaggatggctgcgg

SEQ ID NO: 349501 - DNA, 122 bp, Homo sapiens
gggttggccgaaatacagctctgaagcctcataaaattcaaaaaagaattactcctcttacgcggatacagtcagttttttccaccgaaggaattgctgcggcacattactgttccttgtgt

SEQ ID NO: 349502 - DNA, 122 bp, Homo sapiens
ccagtgattggctgcccggaaggaggcggagacagcctcgcatggcgcgcgcgtccacctcgccgttccccctcgcgcagctccaaccaaagagagacatccaaccccgggggagtgacaag

SEQ ID NO: 349503 - DNA, 122 bp, Homo sapiens
gcaggcggaacacgcatgcgcgccggcaagtcagccagggcgggttcgcgcgccctcttgcggccctctaggtgcagtgcagggagctttgcgttttagggacttgggctccctccggccat

SEQ ID NO: 349504 - DNA, 122 bp, Homo sapiens
accgctccgggtttccactttcagccatttctctccttgtcccctcaccaagagcggggacggagcaagccttcgccacctgtctctggcacccgccgagggaagacaggccaatggaaaga

SEQ ID NO: 349505 - DNA, 122 bp, Homo sapiens
cggggcggggacccttgtgacgttgagccgagccaggaggggtcagagcctgggcggggtcggggcgcgaccaccccaagagctgctggccggatgggtctttgcaagtccaagctgcccga

SEQ ID NO: 349506 - DNA, 122 bp, Homo sapiens
cgcactgggtggggttggggctccgccgcctgctctagccattgtgcactgaggggcccgcgctaccgcgcgccgggcccgccctcttcccgccccttccgcccggcgcaccccccgtggcc

SEQ ID NO: 349507 - DNA, 122 bp, Homo sapiens
aaggaagagaaccaataaaggagaggttggggagcagtcagagaagcagggcacggggggcgggggatgccaagcagagacagggcagccatgtttgaggcttcaaagaggtctagtaaatg

SEQ ID NO: 349508 - DNA, 122 bp, Homo sapiens
tgggaatacagtcgtgagccaccacgccccatcctatttataggttctttagtcctcaggcgaagccctagggaaacagaatttctctctccactttctgtcccttttcactgcccaaggca

SEQ ID NO: 349509 - DNA, 122 bp, Homo sapiens
aactctcataaaaactccacaccttaatccccttgctgcagacatacctagagagaacaccgccccactcctttttgctgtctgtcacaaggattgtcgcaatcctctgtaagtttccccaa

SEQ ID NO: 349510 - DNA, 122 bp, Homo sapiens
cttatgggtataggctttctcgtagcagcataaacatagtttaaaattagattgtgttggcggttgcaccaccctatgaactgtatggtttgtgaattatatcttaataaagctgtttaaaa

SEQ ID NO: 349511 - DNA, 122 bp, Homo sapiens
tttgatagataaggacacagataacccaagaaggaagtgaaagccccaaggtctctgagccgcacagagccaaggacgaaagccctggacggtcctccaggcagtctcctttcctcccaaca

SEQ ID NO: 349512 - DNA, 122 bp, Homo sapiens
gttgcttcatttatttttctttttttagtgtcattaccagtattggttgcactactgtagcgttctgggtgctggggatcaggttaggccaggtagcttctgtttaaaatgtggattttata

SEQ ID NO: 349513 - DNA, 122 bp, Homo sapiens
attagataaaagtacgcaaagctttttgggctttgtactgggaagtgctacataagactgcgtggtagtggtttgggcctcattgcttatatctgacatagcttccaggatttatgcctgtc

SEQ ID NO: 349514 - DNA, 122 bp, Homo sapiens
cgcgacgcctttgcggctagagcttcttttactatcctgagtcagagcctcccgaagccacggaggaacgcccacggggccggggggtggggtggggacactgcgcattcaggtctcaccat

SEQ ID NO: 349515 - DNA, 122 bp, Homo sapiens
cccatcccctccctcctcagcccacatcctgctcctcccaccgcggtggtcacatgggggcgccgccggatttaagcttaatctgcctggtgctcagcacagcatcctggctgtggcgcgtg

SEQ ID NO: 349516 - DNA, 122 bp, Homo sapiens
tgacctcgtgatacgcccgccccggcctccgaaagtgctgggattacaggcgtgagccaccgcacccggccttcacagttaagtttttaacgtccctgagattgatactgtgtctgtggtga

SEQ ID NO: 349517 - DNA, 122 bp, Homo sapiens
cccgactgcggtgggccctgctccgcctcctgtggccaaggccgctcatcacccaggaaccgacacgcacgagatgcagaatctaaaagagaaagcggcaccgccaccagcaagcacaagag

SEQ ID NO: 349518 - DNA, 122 bp, Homo sapiens
gactcatgaaacaatgtttgtgcatttgagaaatgcctcaatatgggtagttgctcatatcgccacaaaactaaagtcccagagcttcacactccgcagcttcccaatccatcttagagaat

SEQ ID NO: 349519 - DNA, 122 bp, Homo sapiens
aaagaacatacaccagttatatcttctctgacaacttgaattacatctcccaaactcctgcgacagacaagataaggtcctgctgtcccgagcagcacttaccagggatacttttaacagga

SEQ ID NO: 349520 - DNA, 122 bp, Homo sapiens
gaatgttggaaagctatgttctgggtccagttgcaagaccatcctgcccacttgctgggtcgctgaggcagagcgccctggactgtgctctggagagcagggggccgtctctgctcactgct

SEQ ID NO: 349521 - DNA, 122 bp, Homo sapiens
cgatgatgaatggagccaggccacaggtgaaatttccatccaggcgggacagactcaagccgggactgggttcccctgacgcccggcttcccaaatgtgcttccctcccggatgcacagaga

SEQ ID NO: 349522 - DNA, 122 bp, Homo sapiens
gacagaacgggagctgccggcgggagcagagctgcgaggaggtggcctttgagggcagcgcggggtcgaaatcccatcccagcgctgtgacctcttggagcccacattgcctctttggtgga

SEQ ID NO: 349523 - DNA, 122 bp, Homo sapiens
cgcgtgagttgctttttgcggctggggaggtctacgcttctagagcttgagccagcggggcgaccctgcagtggcaggactcggcaccgcgccctccaccgccggttggtggcctgcgtgac

SEQ ID NO: 349524 - DNA, 122 bp, Homo sapiens
gaagagaagttgcccctgggtcaacctacggacgaaagtgccttcccagtagcctctgcgcggggcccccgggaaacgtgcatccctagttcgcacccatggtgcatgtcctgcacgcgggg

SEQ ID NO: 349525 - DNA, 122 bp, Homo sapiens
ataaatttaagttgcgagcctaatcagactgctgctgggggagccttgttccttctctaccgatcaagctgataatttggtctgtattttttgtttttatctttagtaacatttctaggctc

SEQ ID NO: 349526 - DNA, 122 bp, Homo sapiens
agcgcggtcctgcgtgagttgctatggctacagctgcgccaggcggacggcctgcaggaccgaggtgcagctgggacgagcggaaagctctgcgcgtgggcggggagcccggagcctcgccg

SEQ ID NO: 349527 - DNA, 122 bp, Homo sapiens
ggcctgcgggctcgcgggagctcacgcgaactcacgcgcgagctcacaagctgcggcggccggctaggcgactagtgacgtcaccgaggcttgtccctgccttattggctgccttcgaccag

SEQ ID NO: 349528 - DNA, 122 bp, Homo sapiens
gcagatgccgttttcaaaaatcatttgttccgcctcgaccggaggtggctcctggcagatcgccccgcggtgctcagaatcccagaggcctgcgggcggctgacccggggcgagcagggctg

SEQ ID NO: 349529 - DNA, 122 bp, Homo sapiens
cccagcccttggatggataagctgcaaaacccacaggccacggcatctaggctcggccagcgtgggcgtcctggggcgattcagtggcttgcgggttctctgacccacttgcccaccaacag

SEQ ID NO: 349530 - DNA, 122 bp, Homo sapiens
cacagctcccaggaccttatgagcccataaagggaagcggacacgaaggcgggacgaaagcgcgtcatcgccgaggctctcacagctcccaggacgtccgcaagcatgtttccaacaagccc

SEQ ID NO: 349531 - DNA, 122 bp, Homo sapiens
tcaccccatttcgtaatttagttagtgagaaccacaactggctaaacctttgtggggggccgggcactgtggctcatgcctataatcccagcactttgggaggccgaggcaggcagatcaca

SEQ ID NO: 349532 - DNA, 122 bp, Homo sapiens
agctgtcctgggggaccatggcgagggccttaggccgcttcaagctgtcgatcccgcacacgcacctgctggccaccctcgaccccctggccttggacagggaaccaccaccgcatctgttg

SEQ ID NO: 349533 - DNA, 122 bp, Homo sapiens
catggacagacgcctaccaggggtgacaaagcagtgcagttggattgtaaggaaaaattccggaattaatgcatcctaatgaatgttgtccccttcaatggtgttaccttaggagctgaaca

SEQ ID NO: 349534 - DNA, 122 bp, Homo sapiens
gatttcgggaagtttgagtgcaggaaagcagcgctccgaggccaggcctggggtgctggccgctgcggggggcacgccctgcgctgctcaggggcctgtggtttcggagagcaccccgatcc

SEQ ID NO: 349535 - DNA, 122 bp, Homo sapiens
tcttaaacctgggaagggattcatttgggggggtcacaccagcgggcatcctggctcaggcggaactctggctccagacagtgcgcccaggaccaaacggtcaaccccggcctactcccgcc

SEQ ID NO: 349536 - DNA, 122 bp, Homo sapiens
ctccagcctgggttacatagtgagactacgtctcaaaaagaaaaaagaaaaaagaagttgcgtctgcataccacaggacacaggttgcatgaccacattcctttcaaggctcagaattattt

SEQ ID NO: 349537 - DNA, 122 bp, Homo sapiens
caccacgagagagctttaacgcaggggccactgcagcagaatggagactcaggtggcgaccgtttcgccaccccgggcgtgtgacagcagaggcccgcagtgagggtgggaagagctagaac

SEQ ID NO: 349538 - DNA, 122 bp, Homo sapiens
gagaaggagcgcttgaggcggttagtgtcctgcaggcggtccgaggagaggtgcaggccgcgcaggccctgctgcagtgcgctggtcgccgggggcgtggggggcgcggggggctccccgcc

SEQ ID NO: 349539 - DNA, 122 bp, Homo sapiens
ccacattatacaagctcccactgcccccacggggttccagcaccctgtccggaaagccttcgcctccctctactgtgtcaagcgtgacagcggcttggaaagctccgtccttcgcagacaca

SEQ ID NO: 349540 - DNA, 122 bp, Homo sapiens
gggacctcatcccattggactgatagacgtggcttggtcatacaagccagagacagtgagcgacagttttgccagaaaggatattttgctgacttccacagttatcccctgaaaaaagaaag

SEQ ID NO: 349541 - DNA, 122 bp, Homo sapiens
cctcgccggaagctggcgggagcagtcccttgcagcgaagcccggcaccccgacggcagacgctccccatcacatcttccaaaggggcgaggctgggatcagcaggaatggcacccacccgg

SEQ ID NO: 349542 - DNA, 122 bp, Homo sapiens
cggccgaggcgcacaaagttgggtgaacgggcggctacctccttctcaagtccctggcagcgcgcatctcccggacttggacagacctggggagaccctgggaacccaggagcccccggcgc

SEQ ID NO: 349543 - DNA, 122 bp, Homo sapiens
tcctgctgagccacaggacccagtgccggccttcgctgctgtcaccctgttccagtccaccgtttttctagtctggacggctacaattctaagggcctgcctgcttccactctggcagcccg

SEQ ID NO: 349544 - DNA, 122 bp, Homo sapiens
tggccagtgggagcggcaggtggggcggggctcgtcggtcggggcggagccaggtgaaggcggggccagttaggggcgtggctagtgtgcgcggccaggtgagttcgggggtctggggcggg

SEQ ID NO: 349545 - DNA, 122 bp, Homo sapiens
atgtgttatcagaggagccgttctggtcaaagctaggttggcaaagctcctctcctcccgcgcatcctttcccaccccatggaacttgaactctaggggacctcagaatccagtttaaaagc

SEQ ID NO: 349546 - DNA, 122 bp, Homo sapiens
cacctgtagccacagttactcgggaggctgaagtgggaggatcacttgagccagcgaggtcggggctgcagtgagctatggtcacaccactgccttcctgcctggatggcagagtgagactg

SEQ ID NO: 349547 - DNA, 122 bp, Homo sapiens
tttgattgttttcatcaacgaagtattaactcaatctctggcttcacgggccaagcacagcgttccatgtccataaacctggaccgaggagctgggcccaagggtatccagtgacctcgatc

SEQ ID NO: 349548 - DNA, 122 bp, Homo sapiens
cttggtgaccacgctctccgcccagaccgttccatttcttcagcagggggcgccccgggccgggccggcactgaccagcctcgcagagccaccctcttccggcctgcccccctctgccgggc

SEQ ID NO: 349549 - DNA, 122 bp, Homo sapiens
tctaaggtctagtcctgcggactggcagtaggttctgcttgtttgctctgattaagaggccggctgcttgcaccttgactttcatagtcttcatggtacaggtggaaaagggataataagtg

SEQ ID NO: 349550 - DNA, 122 bp, Homo sapiens
cagcctcagggaggaggagaaagcctgattgcttcaggagagcatgtttcccaacggtagcgttggtttgcccagtgctcacagctagctctgaaggatgcatagtccatacctgactgccc

SEQ ID NO: 349551 - DNA, 122 bp, Homo sapiens
gggaacaatcactgccttgctaggagaagccatgagtgcagcgaggccagagttccccagcgcgggtccagcggagctgagcccagcctgctcccgcagggagcctgcgccgcggcatcctg

SEQ ID NO: 349552 - DNA, 122 bp, Homo sapiens
ttaagaaactttgtgtaccgagtcagcagcgaggaacgcgacctgtgaagaccacttttgcgggcagggatccgcagggactgactactttcggacaactggtacaatttcccctgggggtg

SEQ ID NO: 349553 - DNA, 122 bp, Homo sapiens
tcgggcggggacaggggtttctggaggagacggtggggccgagactgaccctggggtttgcgtcgcacccgccccccggaggcccttgcctggctgtgggagggggcgcggtcaggtgctgg

SEQ ID NO: 349554 - DNA, 122 bp, Homo sapiens
gaggtgctgagagtgccacctaggttgtgacaataggaataaatagaaagtgtttagttccggaaacatttagaggcaacaaatttcctggaatgggcatgagctttaggcagccctcattt

SEQ ID NO: 349555 - DNA, 122 bp, Homo sapiens
ggactgcgtggccatttgattcgttgctagaacacacaaaccaagggacttgagctcagacggccggggcctgggccctggggctcaccttccctgcccgaccctggggctccagccgagcc

SEQ ID NO: 349556 - DNA, 122 bp, Homo sapiens
caaaagctgttacttgggtatctaagcaactggaaacgcttggctgaggaagatttcttccgcccctggcaagctggggacattccagcagggcacctttgagcctctgatgtgaaaagcag

SEQ ID NO: 349557 - DNA, 122 bp, Homo sapiens
gtccgtgcccctgacctgcgtcaccatagcctcagcccatggtcacttgaggcgctgggccgcgtgccggtcgctcattcctccgtgccggtcgctcattccgccttgccgttcgctcattc

SEQ ID NO: 349558 - DNA, 122 bp, Homo sapiens
gcaaatattcgagcttttaacagtgctttactctttggtatccacgaggtggagccttcccgggaagcagaaagcatcttttggtgtcctgttttttgttttttaccctcggcaacgccacg

SEQ ID NO: 349559 - DNA, 122 bp, Homo sapiens
taaatgtggccagggagctcgtctctctccgtgtcacagtgggatccgcctggcagccgccgggagctgcagccaatgtgttaggacttcaggtgcttcttggcacaaagctagactgcgac

SEQ ID NO: 349560 - DNA, 122 bp, Homo sapiens
caatcccccaccaggggggacacggccgattctataatgtcgcagccagaaggctgtgggcgtacaggcagccaaggggagaaacagaaccgacaccggcctaggcccatctgcaagaaaaa

SEQ ID NO: 349561 - DNA, 122 bp, Homo sapiens
cattcttgtctcctcgtgaacattcttaaagcagcttagatcttcaaggatttggagaaacgtagttggttgaatgactaactcattccttcacacagtacatttttattgagcacttacca

SEQ ID NO: 349562 - DNA, 122 bp, Homo sapiens
gaagaagcaacaggatctggtgacagcctgcatgtgggcagtgcgggagcctggcatcaccgtgagacccctgctccaacatctccatgaacggtggaaccactgccaaaaaaaaacggaca

SEQ ID NO: 349563 - DNA, 122 bp, Homo sapiens
gacacagccctgtcctcaggagtccccagcctgggggagatggggacacagccctgtcctcgggagcccgggcttcaattcaatgggtacagccccaaatccagtgagccccaagttgatga

SEQ ID NO: 349564 - DNA, 122 bp, Homo sapiens
ctgctaaagtacctggaagccactgatatttcctcagaggatgtgcacaaaagtaaaaggcgatacagggaacagaatcttgtccaggctctggttcctcagatgccctaagtcagctcttc

SEQ ID NO: 349565 - DNA, 122 bp, Homo sapiens
gtggccttttaggagcattggggtcctttttcttccccttcttatcacctttgggaggaacgtaatttttcatctccctgtcatagcgagctttgtcactttttgccatatcttcaaacttc

SEQ ID NO: 349566 - DNA, 122 bp, Homo sapiens
aatctgggccaggcttggagcctacggaggctccggccgccagaggagagaggatcagggcgggaaacacagctcaaatcctacctgcatggccgagctcaccggggtgcgtctaagtagct

SEQ ID NO: 349567 - DNA, 122 bp, Homo sapiens
ctgctgtggataatgctgctgggaacatgggtgtgcagttatctgttcgagtccctagttcgcattcctttggctacacactcagagtgggatgtctggactgaagcaatacttttgaactc

SEQ ID NO: 349568 - DNA, 122 bp, Homo sapiens
cctgtgcgcccctgcttctaagcactttgcaggtattatttaatcatcaagctaatcctacgagagagctgccattttcccccagcttacagatgggggaattgaggcgcgaagagggcagg

SEQ ID NO: 349569 - DNA, 122 bp, Homo sapiens
ctgtggtcgaagagggctgagatccagaccctgacctggagggtctcatattctatggggcgtcggggtcgggggaaaggcaatatacaggtagatcaacaaaagaaagctaggtgcggtgg

SEQ ID NO: 349570 - DNA, 122 bp, Homo sapiens
acctctccccaacaccagcctgcacttgggtacatatgttcacatacacccaggcacgcacgtgtgcatacatgctcagctgggccctgctctgtcactgatgagccagggcctctaagatc

SEQ ID NO: 349571 - DNA, 122 bp, Homo sapiens
agcattgggaggagcctcctgtgggcgtggcgatgccgggaggagccaatgaggaggcagcgtgagggggcggggccagcgccggggtggggcgcgcgcgtcgcgggccgggagggacttca

SEQ ID NO: 349572 - DNA, 122 bp, Homo sapiens
tggattccccaaaatgctcatgcctctccatcaccacacaactcctcaagggaaaagtgacgcaggggcaaacagagtcaacagcatccttagcttatgacagttaaaatcttacttttaca

SEQ ID NO: 349573 - DNA, 122 bp, Homo sapiens
cagacgcttctgaaagggcaaagacgacgccaaagaagacgccggagacctcgaatagggcgcaggtggacatctctgattttcagcagaccagcctgtatgtgtctgaagtctagcaacga

SEQ ID NO: 349574 - DNA, 122 bp, Homo sapiens
ggtaacagaacaaattaatgtcgaagcacaaccagtaacataataatgcctcaatgcaaccgtgcctgtcaaaggacatctgtattagcagctcggggaagtggcatttgcagaaaggcaca

SEQ ID NO: 349575 - DNA, 122 bp, Homo sapiens
caaatccgacaggagctactgtcacgaaaagcgggtttgcagccttggcggctttatcgccgccgaggactagggaggcgggccaggacatggggacccgaggacctgaaagactggaagat

SEQ ID NO: 349576 - DNA, 122 bp, Homo sapiens
gccagaactctgcacccggctgagtccccgtgcttctcccatattctctcactgagtgctcgcagcgactctgtaacacactcgcaccgtccttgttatcgggccccttttacaaatgaggg

SEQ ID NO: 349577 - DNA, 122 bp, Homo sapiens
cctttcctggtttctggagcacttccccagtccagccctcgtccagggatccacctcaggcgcctgcaggctgagcttggccaagcagagacctctcatgcagatgccctgaggcccagggc

SEQ ID NO: 349578 - DNA, 122 bp, Homo sapiens
tcccttgtgggagtctctgggctgcctgttggtgggacgatttctcaggagcacgacttccggcctgaaaaggaagtctcctcctttttctcccaaaccacttcttcccccctaccccccgc

SEQ ID NO: 349579 - DNA, 122 bp, Homo sapiens
aaggtacccttgggtataaatccaacttcttcattttaatggtgagaaatcaaaagcccacgtttcctgatttctagcccagcactggaactgttttcatggcatgtcaattcatcatacat

SEQ ID NO: 349580 - DNA, 122 bp, Homo sapiens
attttagcaaccaagggggtgtggctaagcgagagagcggcttccctggtggcccgggcgcgcggtcttgtcatcttgttgctccttgtgagcgctgggtagagaaagtgagggggtagagg

SEQ ID NO: 349581 - DNA, 122 bp, Homo sapiens
ccctaagggagagtgggcagggagcacgggcagggagctcatggtggcacagggaggatgcgaaaatgtgagcaggacggggagcggcaggaggagagcagtctccccaccttgaacaattc

SEQ ID NO: 349582 - DNA, 122 bp, Homo sapiens
gcctgtagtcccagctacccaggaggcatgggaggattgattgcttgagcccaggaggggcgactgcactccagcctgggaaacagaatgagaccaactggaaaaaaagaaagaaatgctaa

SEQ ID NO: 349583 - DNA, 122 bp, Homo sapiens
taggccggagctgctggtgggaggcagccacttgagatcaccaggcctcctgtagaccggcgggtgcagggcccggtcccagagttaagggtgtgagtgagactgctgcgggcaggggttgg

SEQ ID NO: 349584 - DNA, 122 bp, Homo sapiens
ttggaggccccgcccctggcactaacccctcccccttatctcttcgcagcgaggcggctgcgcagtacaacccggagcccccggtaagccccctctgcaaccagacccccttctcctgccaa

SEQ ID NO: 349585 - DNA, 122 bp, Homo sapiens
tgcccagaccaaaacatttttttaaactacttatcctgggagggtggtgccatgaattcgcgtcatcccccagcccctgcaaactgaatgccttgggtccatagataaatggtgaatataat

SEQ ID NO: 349586 - DNA, 122 bp, Homo sapiens
aaccagcaccaagggagggagctgaggtcgcccgggcctcagggggccggggcgcaggggcgcatgtgtcccgccagggctcagggtgtgtgcactgtgggtcccagtttctgtcagctatg

SEQ ID NO: 349587 - DNA, 122 bp, Homo sapiens
tcatcaagtggaaatgagaactactatcccggaagagtacatcttccaggtgggagataccgtaggaacagaaactcagagaaaggcggagtccaggctgcctggggaaaagccctccctca

SEQ ID NO: 349588 - DNA, 122 bp, Homo sapiens
cgacccacccgcgttcatggtcccaaacccccacctaacctccagccagcgcccttctcccgagctccaggcccctccagctccagtgtgggcatcgtcccctggttctcctcaagtccact

SEQ ID NO: 349589 - DNA, 122 bp, Homo sapiens
tccgagacacgcggtgaggcggcgacgggctccgggtgagggtctctggagtgtgggcgccgtttcctgggcgcagagggagagcttggggtcggggggaggtgagagctgaggggcgaatg

SEQ ID NO: 349590 - DNA, 122 bp, Homo sapiens
gctgccctgttggcgttggtgcgggactgcgcaggcgcgcggggcaagagggtggcagtgcgcctgcgccgcgtcggcgtgcggaacgccgcggtgtctcggcgcctctgcgcgcgggaaga

SEQ ID NO: 349591 - DNA, 122 bp, Homo sapiens
accatcccacttttttgagtcttcatcacttttcatcacttctgtcttttagcctatggacgagtacatgtctttctcatctttttgcttcactggtcatctctcttcagattttgcccctt

SEQ ID NO: 349592 - DNA, 122 bp, Homo sapiens
acgcaaaagaaccggtgtgtggcctctgagcccacggtggatacgcaggactgggcggaacggaatccctactctcggggtctccaccctccgggaaggacttgtcacttctgcatccattg

SEQ ID NO: 349593 - DNA, 122 bp, Homo sapiens
tgactggctcagacgccgtcacgtgatcccattttctccccctcccccgactacacaagccgtttccgccttcggccttgaggaataaccgcctcccccaataggcgcctgcgatttctctg

SEQ ID NO: 349594 - DNA, 122 bp, Homo sapiens
caatagcagtttccaggggcttggaggtgaaggaagtgaggagttgttcaatcaatataacgattcagttacacaagatgagtaagtttttgggatccactgtacaacacagtgcctgtagt

SEQ ID NO: 349595 - DNA, 122 bp, Homo sapiens
cgcccctccacagcctccttttcagcgtccaaaatcggactttaggaacagaaatcgaaacggtcgcggacctcccgagcggcaggtcggggcgctgccgggtcggcgcggggtccagcggc

SEQ ID NO: 349596 - DNA, 122 bp, Homo sapiens
tgggaggagggaagagggtgcggccgtggggagcctggctccccgcatccgcccagcccgcggggctccccatcccggccagtggctccctaagccttgccaggtggtgacggctccttggg

SEQ ID NO: 349597 - DNA, 122 bp, Homo sapiens
gggcttccgcaggtggtgccgcaggttgtgctgcagcaggggcaggcaggtgttccactgcgtggcgcacaccacgtggatgacccgggggtcgcccaggcgcacggctcgctgcagcgcga

SEQ ID NO: 349598 - DNA, 122 bp, Homo sapiens
agaatgggatggcctctgtttatattttcgttaaatagaaccacatgattgcaaccttgccgctgggggttgttagcagagaatttattagcctgagccagtatccttgactgcagggctgc

SEQ ID NO: 349599 - DNA, 122 bp, Homo sapiens
agggagaggcggctggcctaaaatttaggtgggcggaagaacctgtgacggagctgtgaccgctgcacaggccagagaccctggagtcctcctcaccccggggttgggggccggacctgctg

SEQ ID NO: 349600 - DNA, 122 bp, Homo sapiens
aggtaccctaagggtggtattgaggctggtccccaacattctggtgcccaacgtggggctcgaaagaatctgatgaaggaatgctcgagcgtgtgaaacggagggctgatggacgaaggact

SEQ ID NO: 349601 - DNA, 122 bp, Homo sapiens
aaagttatgttacaaacagagtgctggtccccctgcaacatgttcactcacattggctgacgttttaattctttgccaatctgaggggaagagatgtcaactttttttgtttgctcttttaa

SEQ ID NO: 349602 - DNA, 122 bp, Homo sapiens
ttttctgagtttagggtctacaatcctttcagattagacctcaaatggacacatcctgtacgtggacagcagagctatggaaaacaagagggatgcatttgtaaccctctgtttacactaca

SEQ ID NO: 349603 - DNA, 122 bp, Homo sapiens
ctcccctgaaggctgggctcgcgtgggcggccgcgggtggtggccctcccggttcctgcccgaggaccagttgtaaatgttactgcttcctactaataaatgctgacctgatcaaatggagc

SEQ ID NO: 349604 - DNA, 122 bp, Homo sapiens
ttggtattgcctttaatgtaacttgccatctgtgttctagtttctaagcattggcagaagcgagctaaaagcattggccaaacttcaaggggttaagatttttgctaacaaatatggactat

SEQ ID NO: 349605 - DNA, 122 bp, Homo sapiens
tgcctctcaggccccaggccagcttcccaggggtgaggtctggctccgaagacacaaagacgaaagtcattaggaccagggacaaacaatgacggaatctcttctatttacctgaactggag

SEQ ID NO: 349606 - DNA, 122 bp, Homo sapiens
ccaagggaggtgaggggaacagcccaaagatgagagcagcaaggacaaaggcccagagaccggaacatgatcactgtgctgtaggaaggggaacacagagagcctagtgtgctggaggtgag

SEQ ID NO: 349607 - DNA, 122 bp, Homo sapiens
ccgcaggggcccgggaccctagaggaggcggggctagcaggtgacgtcagcgggcgggcccgacagaattaccgccgcggcggcgatggaaggcggacgggggagatatagtcacttccctc

SEQ ID NO: 349608 - DNA, 122 bp, Homo sapiens
tcctaggctgagtggttcacaggccagctggccgggggttggggagccacacagggtgaacgggcagcagccggctccatgccccactgccctggctgatgagtccttcggtggcctcagtg

SEQ ID NO: 349609 - DNA, 122 bp, Homo sapiens
gagcacaccccttctgcctgatcattgggagcacactccttctgcctgatcatgggcacacgctccttctgcccgatcatgggcacacgctccttctgcccgatcgttgggagcacactcct

SEQ ID NO: 349610 - DNA, 122 bp, Homo sapiens
gatctgcgatggtgggtgaactgacccttgggtagttttcgcctaagtgcttgttattcccggtggaaatgctgcagaaatggaagcaactctgggctgggggctgggagactaggtttcag

SEQ ID NO: 349611 - DNA, 122 bp, Homo sapiens
ggcctaaatgctagcatgaaaatatcttaaagcaccgtgcataacccacaaaccgctctgcggcttccagggagcatgcaaagaaccaagccgcacggccggggccccgagtcctgccgacc

SEQ ID NO: 349612 - DNA, 122 bp, Homo sapiens
gcaccctccttctaaataagccggatgcccaggactgctgccttaacccctcagaggtctcggagaaacactggaatgaaatgattacagatttcattgctaatgtgggcgagtggagtaat

SEQ ID NO: 349613 - DNA, 122 bp, Homo sapiens
agatgatacagaatggaaaattctataatagaacgttaatagctatgtctcctagggcaccggcttacctgctctaacaaagaccacaaatttgaaatgattcagaaggtgcattgctctca

SEQ ID NO: 349614 - DNA, 122 bp, Homo sapiens
tctactttcagatctcagttcaaatgccactttatcaggtaaaccacttttctggtcaggcgcagtggctcatgcctgtaattccagcaccttgggaagctgaggcaggagaatcacttgag

SEQ ID NO: 349615 - DNA, 122 bp, Homo sapiens
ttccggctaggcgcaacacggactacatttcccagggtgaacagcggcggggcctagactcggccgcggcctggggcggcgagccgctccaccgcctgctcaggggagtgcgagctggcgcg

SEQ ID NO: 349616 - DNA, 122 bp, Homo sapiens
acctctgcgaccaggtccctggagaagctgcgtgaagcccgccgtgtggtagtgcccacccgtcaccctccccacgccctcgcctgcaattcatttctggatttccaaggacatttggggtt

SEQ ID NO: 349617 - DNA, 122 bp, Homo sapiens
gttcacgtagaacacacgggggatgctcagcctgatgcagtgcaagtcactgccaacgagcgcccacagcctgaacaggccggcctggctggtctcgctgatctgaaaggccacacggacat

SEQ ID NO: 349618 - DNA, 122 bp, Homo sapiens
cgctgtgattccaggaaggagagaggccgcggcatggagacgggcatgcgagcgtgtctgcgcctctgtgtgtgtgcaggaggggctgctctgtgggtctatgcattcgtgtgaatgcaagg

SEQ ID NO: 349619 - DNA, 122 bp, Homo sapiens
gaggtctcatcacagagagacccgggttacgcatctttggcaggagaggcatggatgcgacgctcatgcctttcatggatggctctgctcagcccacgctgccaggtggggcaggattttca

SEQ ID NO: 349620 - DNA, 122 bp, Homo sapiens
cagcaggcgaggatctggagcagctccagaccattgtgtccagcgggcaggccttcagtgcgggaaggggcggcctcgaggctcccctcccccagcccccacatctggtgggctggccccag

SEQ ID NO: 349621 - DNA, 122 bp, Homo sapiens
agtgggcaaagaaacattctatgttggagctgcaaagacaaaagcgaccataaatatagacgctatcagtggttttgcttatgaatatactctggaaattaatgggaaaagtctcaagaagt

SEQ ID NO: 349622 - DNA, 122 bp, Homo sapiens
acctcccctggagccccccggggcctggggaactctcgcgccccggcctgggtctggctccgtccatgcagccattcctggcagtgtagtcaccgagaagctacagttgatcagaagcgtct

SEQ ID NO: 349623 - DNA, 122 bp, Homo sapiens
ccggacaacctgcagccccgcccctgcaggtgaacggcggcccagtccctgcaggtgacccgcggaccctccccgcccgtcctactaccgtcataggaccgcctccgcaggcgcactggagc

SEQ ID NO: 349624 - DNA, 122 bp, Homo sapiens
ggtaattaagactcctggcccagaggacatgcttggttagtgttcctcaggatgcaggaccggctctgcagaatcaagctggaaacctgagggcggtgccctttgcttgttggcagctccat

SEQ ID NO: 349625 - DNA, 122 bp, Homo sapiens
caataggcgcaggcgctgcgagccaatgggaagggtgggaggggcgccgtggctaccctgcgagtgagaaccaatacaaaaggacatttcagggaaagtgggcgggactttatgcacaagtc

SEQ ID NO: 349626 - DNA, 122 bp, Homo sapiens
ggtccatggtagatgtctcaccttggaagttacagctgccacctcctgccatcctgcacccggctgagaaagccattgaatggaggagtgaaagagaatttcagattgcccagacccgggag

SEQ ID NO: 349627 - DNA, 122 bp, Homo sapiens
acgcctgttgccaggcggaccgtggtctagtggtagcgaaaagcgtcaaggaacaacacccgctacttagcagacggggaaaggggttcccgggggagtttagaaaagactgcccctccacc

SEQ ID NO: 349628 - DNA, 122 bp, Homo sapiens
gcccagggggcgtggctccaggcttccctcgccctctccttgagctggcccagtgccctacggttgccatagtaattcgggagcgctagattcaaaagattgagctattatacgttcccgga

SEQ ID NO: 349629 - DNA, 122 bp, Homo sapiens
agaaaaatcaccaaaataccacttctcccagacaggggcttcatatccatttctataggacgtgccatttgagaaaaacattcctgacctttcccactctcagttctgcctttccgtttctg

SEQ ID NO: 349630 - DNA, 122 bp, Homo sapiens
cgacatcagcatcctgacgcaggaggccctggggcctagtgaggtgtggctggacagtcccggagacccctcgcttgggggcgacatgtgctccgcctcccactttgccctcatcactgctt

SEQ ID NO: 349631 - DNA, 122 bp, Homo sapiens
cagggagctctcggcagtttaagttgaaactcacagccctgacattttaagccatagcagcgaaggtccagacgtcgtctggagagaaccctaccacttgcggggcccttaacttggcccaa

SEQ ID NO: 349632 - DNA, 122 bp, Homo sapiens
cacacctatggccaagaaaacactggaaaggcagagatggaggccaagaggcaggtttctcggtgaagatctgacagccaggagctggggctctccacaggtagggaaacagctccagcccc

SEQ ID NO: 349633 - DNA, 122 bp, Homo sapiens
cctggaaatccaccccttcttatcccggaggcctgaactcgatttctgcaaaacttcccgcgaccagctcataaaaggagagcgcgtccctgggtgggctcgaaccaccaacctttcggtta

SEQ ID NO: 349634 - DNA, 122 bp, Homo sapiens
ggccgagtctcctccactaagcaatggcttgttttgtaaattagacttgcttggtttgtgcgattaatactacaatggccagtgtttaggacatgcccagggacaggagtggaggctgcagt

SEQ ID NO: 349635 - DNA, 122 bp, Homo sapiens
ccagacatatctagcaaataaaacaggcctcaatccagaggctagtatttcttctcacatcggaaatgataaagatgctgtgaccacaactttcacagatcgtcatttcactgttttgccac

SEQ ID NO: 349636 - DNA, 122 bp, Homo sapiens
ggcagaccctcctgtctccgcctgcagccccctccagcagacccccccgccttgggtttccgccaggacctaaatgcagtgtctgagttgccgcgacagtgcccacagagccccagatgaca

SEQ ID NO: 349637 - DNA, 122 bp, Homo sapiens
aaagttttctcaggctttccgagtcctggcccacgggcgttgggtatgagcagcgccctccgccctccgccctaagggttcgtggcccaccgctccttcgcagtccctgccgccaccgtcca

SEQ ID NO: 349638 - DNA, 122 bp, Homo sapiens
ttgtcccttcacactggtcctatagagccgatcctaattcccatggcctgacagtacaaccgcatggagatgcacgtctctaagacgcctcaccactgcctaagaagcaatcaaggtgacgc

SEQ ID NO: 349639 - DNA, 122 bp, Homo sapiens
cagagatatgtcacagtgccccttgttaacagggtccaggcagaagacttacatcttcttcgtgctgggttcagcagtatttcacaatgttgtttgagagcaggaccaaggaaagagagtaa

SEQ ID NO: 349640 - DNA, 122 bp, Homo sapiens
cagattcacagactgtcaaagtgcggcttaaaccgagttcctgggctccctcactggcttcgtccacttaaacttttaacgtacacatgtagagagctgaaactccaggggtaacatgggac

SEQ ID NO: 349641 - DNA, 122 bp, Homo sapiens
actgccccggggagcgccagccgttggggcgggagcgggcccaggatggggactgagacccgcgtcccccacccgaacctggacctagcctcctctgaacgcagagggcagtgggccgcccg

SEQ ID NO: 349642 - DNA, 122 bp, Homo sapiens
ttaaaacaaaatccaaaataaaacaaaacaaaaaccaaacaacatgtgggacctgaaaaccgggccaagtagtcattttgcattcctccctcaccaaataaaaccacttcagaaatggatgg

SEQ ID NO: 349643 - DNA, 122 bp, Homo sapiens
tgtaaactagtgttctctaaactgcctaacattgttagcatcaataaaattctatttttacgtcattttatttgtactaacaaatttttacatctctctcacccttctacttcctatgattg

SEQ ID NO: 349644 - DNA, 122 bp, Homo sapiens
ccggccgcccaccccgggaccctggcccacagggagctccgtggggccgcccatctgggccgggcgcggccccggcacccagcccgccttgttgtccatattatggactgcgcacaaagtgc

SEQ ID NO: 349645 - DNA, 122 bp, Homo sapiens
aggagagggagtgtcttggtgtcactgggggccaatcctgcccttggttcctggactgaccggttccccaccttgccagggagcacctctccatccgaggcttcatctggtggctgcgctgc

SEQ ID NO: 349646 - DNA, 122 bp, Homo sapiens
gccagccagaaaagattctagctgtcacccgccctgggttatttctttggttgggagccacgatgtgatcacagaatagccatactgggggagggggtctgattggcagcaggaacttgagg

SEQ ID NO: 349647 - DNA, 122 bp, Homo sapiens
acgccatggctccagtgacgcgaggagagcccgaaggagaggcggccggcgaggagtgagcgaactgaactgctctgcggccgccagccacatgcagaggaagaaggagccagaggccggcc

SEQ ID NO: 349648 - DNA, 122 bp, Homo sapiens
ctccggctccacggccatgatgggcttggctcaatttagttttaaaaagcattggccactcggattggtggtccgaagcgtccgtcaagcggaggacctgctgttgctacggcgtagggggt

SEQ ID NO: 349649 - DNA, 122 bp, Homo sapiens
gagctaattctggctataggaagtacatcaccacaggaccctagcctttgtgaaaacccacggacaagtggacctctgagtgcagcaaaaggtgggctactgaatgtcagttggggtgctgt

SEQ ID NO: 349650 - DNA, 122 bp, Homo sapiens
ctggaatgtcaacaagcacctccccagagctgctcccagatgggccactgaggaattcgtcgtgagcacagcagtctgctagagtttcagaatgtctcactaaagccatttccatagacctc

SEQ ID NO: 349651 - DNA, 122 bp, Homo sapiens
cacacgctcctggggctctgccgcagctgctgctcgggccagcagctccttctcccggtgcgaatgttgtctgttgtcttgctgagggcggggggcccgcttctgcctcaccttgcagtccc

SEQ ID NO: 349652 - DNA, 122 bp, Homo sapiens
ccggacagtgaccaggagacccactgagtggccatgattcctgcctgaagcagagccaggcgttgtttgagtcggggctgcctcaccttaggaggtggccttctattaatagcagtgttgac

SEQ ID NO: 349653 - DNA, 122 bp, Homo sapiens
gcggggctgcccatgtacggggagcccggggggcccatgggcgccccctggtggggcatccgggctccagacggcatcccggggcgctgggggtgggcgggggtgaagcagaaacgggcgcc

SEQ ID NO: 349654 - DNA, 122 bp, Homo sapiens
ggagcgccggttttctgtgctgtgccactgtggactgtatcctgcagacatttctaatgccgagctcactagccaggaagtcatgtcagctgtggaaatgttcagcttaggagctcaccata

SEQ ID NO: 349655 - DNA, 122 bp, Homo sapiens
tgatcagattctcctgaccgagtgaacgaccccctcccggatcacgcgagttctcctgatcggattctcctgactgagtgtttcctgacacatgggcaccaggcagtgcctccctcaggaca

SEQ ID NO: 349656 - DNA, 122 bp, Homo sapiens
ctccgcccccagggatccctcggtgaagaggactctctgtcgaggctgctcttccctcctcgtcccgggcctcacctgcacccagcgccagagacgtgagtgctccaacggaggtggaagac

SEQ ID NO: 349657 - DNA, 122 bp, Homo sapiens
acttggaagctagcctgggaggaggttggcaatcgtttaagttggtggagataactgaagcgctttagcatttgaacagcaaggggaatcagagggacaaaaggagtatgggagcctcaagg

SEQ ID NO: 349658 - DNA, 122 bp, Homo sapiens
tccctaaagtagcagaaactccctccgaggtagatatctgagtcagacactctcgtccaccgagcgattctattggtttaagatgagctgcgtatgaggtaagtaagccgtccggaggggcg

SEQ ID NO: 349659 - DNA, 122 bp, Homo sapiens
ttataaccaccttatgcaaattagggctccgaaagtcgttcatttccattggtccgtgtgcggaccttgcgttttcagcaatgcgtacgtaacaacaccgactcttgacttgattggccggt

SEQ ID NO: 349660 - DNA, 122 bp, Homo sapiens
cagactcgacgattctgctgttcgacttgttctgatgaagacagtacccttctcaataatcgtatagtatttcttttttctttttttttttttttttgagatggagtctcattctgtcaccc

SEQ ID NO: 349661 - DNA, 122 bp, Homo sapiens
cccgcccgaggagagaggatccaggagaccactccgggcgggatccgcggagcctggggccgggcggttggcccacattataagagggcctgcgttgcttctacctcaaaggctttagggtg

SEQ ID NO: 349662 - DNA, 122 bp, Homo sapiens
aatcaacatcttacaactatctgtacaacctgctattcccaagaggttgaaaaacaaagccgagcccaatacatgtgcaaattttcaaatttcaaattaaaaggggatctaacaaataaagg

SEQ ID NO: 349663 - DNA, 122 bp, Homo sapiens
tatttgacaaaagcaccaatctatggtagattagacattataaaaacacacgcacacacacgtgcacacacagtccttcagtgtaagtattttgggaagctctggctaagaaagtccttctc

SEQ ID NO: 349664 - DNA, 122 bp, Homo sapiens
tgtgcccccactgggtgtggctggttggtgggaggtgctggttcccacaccggggggcatcggctgagaggttcctggctttggggtctgtgctgtgtccccaccgggagtggctggttggt

SEQ ID NO: 349665 - DNA, 122 bp, Homo sapiens
gtttctcctatcttttttctgattgtgacagccacgtggccggctgagtgtaatagagtgcgctagcggcactaggggctgaggtttctctggtagccaggggctttgtaactgtgctgtcg

SEQ ID NO: 349666 - DNA, 122 bp, Homo sapiens
gtaaacggcgtcctccctccaaagaagtggatgccccttcgactctcctccgccccccggcggttcctaaatctaggaaagccagccccggcatcgctcactactcctgcacctcagctctg

SEQ ID NO: 349667 - DNA, 122 bp, Homo sapiens
cggggaggcgacagcagccccagcgagtaatgaggagcagcggcagtgacggggcagagtcggggctgggagattagagagcccctcccagggcctttccctcccgcctggcctggctcctg

SEQ ID NO: 349668 - DNA, 122 bp, Homo sapiens
agggagaattaacgagctgtgctccattttacggctgccgtctgatgtgggagctgtgtgcggagcactccgcggacaggccagctcagccccagcccttcctccagcagttcagcctggat

SEQ ID NO: 349669 - DNA, 122 bp, Homo sapiens
aagacacaggctccgtctaacgtggctggtgcttccccagggggtgccctgggctggcttcgtgcgtgaggggagcagccagagggggaggaacccagcagagacggagacagtggggagcg

SEQ ID NO: 349670 - DNA, 122 bp, Homo sapiens
aattccgctctggcctggagccttgaattcccgttacggtcccgccccgccgaggcccgtcgccttgtttctctgagtcagtttccccaacggtgaaagggaggacgctgacacctgcctgc

SEQ ID NO: 349671 - DNA, 122 bp, Homo sapiens
ggttcccagcaggacccccggctgcaccccatccgggtacccatttccggccgtggcagccgacaccctcctaccccaggggaaagtacatggtctggccgctccagccccacagtgcagag

SEQ ID NO: 349672 - DNA, 122 bp, Homo sapiens
aacaaagtacttactgaaggggtttgagggcagtggtgacagtgtgagttatggctttgccggctgccagtggagccatccgctctgcacagccgtgcaagggtgttttgaaaagtggctca

SEQ ID NO: 349673 - DNA, 122 bp, Homo sapiens
atgcatgtgaaagtgtttaggaaaaatgaaaagtctttatgcaaatatgcagaatgttgccgtaagagcccgtacacagtgggaatgtcatacctatggctgacgcaccttgctgtcagtgt

SEQ ID NO: 349674 - DNA, 122 bp, Homo sapiens
cagtacaaacctcattacattaactaccccaacaaaacaacactacaagaaccatgattacggcttttcaggaactgcagaggcaagacaattattgcctggacttgtttgaccataccgcc

SEQ ID NO: 349675 - DNA, 122 bp, Homo sapiens
gccgcctcgggccgctgctctgcctgctgctccccgcgtcctgcgcctggtcaggagtggcgggtgaggaggagctgcaggtgattcagcctgagaagtctgtatcagttgcagctggagag

SEQ ID NO: 349676 - DNA, 122 bp, Homo sapiens
gggcctggccacggggccgcccgagcgcaggttaacattcctggatgcgcaggttaggaccgtgtggtgtagacccacgacgttgcttttgctggtgaacttgcctatgtcctgatctttta

SEQ ID NO: 349677 - DNA, 122 bp, Homo sapiens
gcattcttctgaggatggttctttttagaggatttcttctgggagctcttcttctgagagcgggttgggtggctattgatctttggaagggcactctggaactcccccagcaaatctacttt

SEQ ID NO: 349678 - DNA, 122 bp, Homo sapiens
gacttagcacaagtcacctggattatttatgagcttttaaatatacacttgtcagccgggcgcagtgactcatgcctgtaatcccagcactttaggaggcctaggcgggtggatcacttgag

SEQ ID NO: 349679 - DNA, 122 bp, Homo sapiens
gaggctaaggcaggtagatcacttgaggtcaagagtttgataccagcctggccaacatggcgaaatcctgtcactactaaagatacaaaatgcgcgagatgacgtggcgcatgccagtaatc

SEQ ID NO: 349680 - DNA, 122 bp, Homo sapiens
gtgctccctggagttgtgcagtgggacagcctgacacagggcctggcacagaatgtgctccgtgagtggctgagattaatcaatggaattgcatttgtgcatgaactgagctgagcataggc

SEQ ID NO: 349681 - DNA, 122 bp, Homo sapiens
gagtgtgaatgtgggacgagcttctgcccccttgtcagagccactgcaggaatgtgcaatcgagtccactttgggggaaggtggctgcatcaggaactgtgttcttgccacgactcctctta

SEQ ID NO: 349682 - DNA, 122 bp, Homo sapiens
gacttgttaagccagtgccttgcagcctaggcgcggggcttttccaccggttctcagttccgctttagtccagagagaagacactacgcttcggggttcaggtgagagccagaggaagctgg

SEQ ID NO: 349683 - DNA, 122 bp, Homo sapiens
ggctgttcgaccagtttttcggcgagggcctttttgagtatgacctgctgcccttcctgtcgtccaccatcagcccctactaccgccagtccctcttccgcaccgtgctggactccggcatc

SEQ ID NO: 349684 - DNA, 122 bp, Homo sapiens
gaggagggcgctggtgctcaatgagtgagcccacctggggactaccaggacgaggacgggcgcaggtgaaagtcctgggctcattgccccagcatccaactttcaccctctgtcccctttag

SEQ ID NO: 349685 - DNA, 122 bp, Homo sapiens
atcaggctggggacttcaacagacaaccaaggtgccagtaaaggcattaaggagctatcacggccaggtgcggtggctcacacctgtaatcccagcactttgggaggccgaggcaggcggat

SEQ ID NO: 349686 - DNA, 122 bp, Homo sapiens
ctgaacttccaaccactaaatcgaattctattaatagcagttcagtggatagtttcactccgggatacctcactgcatctaattgttcctcagtgaacttccaccacatccctaaaatcttg

SEQ ID NO: 349687 - DNA, 122 bp, Homo sapiens
ttgttgtaatccctctacaaaggctcatcctattataagcaataataatattaatggcaacggccactcacatttatggagtgcttattctgctatatgcactgtgcttctctcagcctgga

SEQ ID NO: 349688 - DNA, 122 bp, Homo sapiens
tgctgcaggtttctgccagcaagcggaacgcttcgtgcatcagcaagaaagatttcccttcggcttcctctctggatcctgccagataaggactgccgcgaggcctctccgttccccgcagc

SEQ ID NO: 349689 - DNA, 122 bp, Homo sapiens
gcccgggcggtggggacagtcagggcctagggagtgccccggagaggccctgggggcggacgggaggcatggaccagccccctcccatcacccggcgcttcagctcttcgtccacgtggggc

SEQ ID NO: 349690 - DNA, 122 bp, Homo sapiens
tcttctcctatttggcttcagaaatgcatgggatatttgggaatcaaaacaggggcccttcggttagaaactgaatcctgtcagattcttccatgtttccatgtctaggattaattgaatcc

SEQ ID NO: 349691 - DNA, 122 bp, Homo sapiens
acaggaggcctacagggggtgtgcggtggccggcccggtcagacctgctccgaggccgtgcgctctccaaggtgctgaaccccggcccggccaaccgcagcgctgctccaggctctgggctg

SEQ ID NO: 349692 - DNA, 122 bp, Homo sapiens
gattcgagtctgggctcctgactcgaaagcctctcagtctccctcctccacacagtcctccgtggacttgtcacggcgaatcccattttagagatggacaaactgaggcttggcaagggcaa

SEQ ID NO: 349693 - DNA, 122 bp, Homo sapiens
ggcaagaatccatcgcaggtggcgctggtacttcctggcactaagatcgattggcgggaccgggacttcgcggcttagcccctccattttcaagttccccgccaaaccctcccctcttggtt

SEQ ID NO: 349694 - DNA, 122 bp, Homo sapiens
ttaccctcctgctgagctttgctgggctccgtgtagacctagacctttacctgctactgccgccgcccaccctgctccgggacgagctgctgttcctgggcggcccggccagctccgtctac

SEQ ID NO: 349695 - DNA, 122 bp, Homo sapiens
tacgcctagaaccttaaactatgatgcacaatactttgttccgccccagttaccaggatgcgagtgtcttttaagcgatccggtcagtgactgcggaggtgcagtgtcagtatggattgaag

SEQ ID NO: 349696 - DNA, 122 bp, Homo sapiens
agagaggcccacgtgcggcgcttgggaaattgcggctaaggcaaactcctcgcttaaactcggatcaactacagtgtcagggcttctcttctagccggttgtaaaagcacggatggatttgg

SEQ ID NO: 349697 - DNA, 122 bp, Homo sapiens
gacagagtttggtgagcttggataagtcatttctcctctctgagcctcagtctcttcagccgtaagtgtgaaaaataataaaacctcccccaaagattgtcatggggattatgacaaagcag

SEQ ID NO: 349698 - DNA, 122 bp, Homo sapiens
aacgcaaaggaaaagccttcacaacctctcttcattaaggagacagagttttttgccccacggctctgtgcagagcatctttgacctccttgttcttcaggctgtacacaacagggttcagt

SEQ ID NO: 349699 - DNA, 122 bp, Homo sapiens
gggctctgagacgaggagctgcccacccgggccttagcaccttgataaagcctggagagtcggggcactgggccggtgagaggggcatgaggggcagagagcacctggggacagacatcagt

SEQ ID NO: 349700 - DNA, 122 bp, Homo sapiens
aacactggattcagaagctagagatctcctagctgggagcccacggacaggcccctttctcgttctgggactcagtttccccatgtgtccaatgatggtgttagaggagatgaccactaagg

SEQ ID NO: 349701 - DNA, 122 bp, Homo sapiens
cacgggcccggaaattccactgggacacccgaaaaagtgctgcacgccgcctgagggagacggaaagggacccggggcactgagtccattgctggggtcgccagggtacgtggcaggacccg

SEQ ID NO: 349702 - DNA, 122 bp, Homo sapiens
agccactatagtgggatgaatagtgtcgcccaaaattcatgtctgcctaaacctcagaatcggactttatttagaaatagggtctttggggtggtgggctgggtgcagtagctcacatgtaa

SEQ ID NO: 349703 - DNA, 122 bp, Homo sapiens
agggcagcagatgcagtgtggcgggtacggcgtcgcgcaatgtggcggagcgcaagtggacgcggtgcctctcgatggccgcttcgtcgccgctctccatcctccctcctacgcgacgccag

SEQ ID NO: 349704 - DNA, 122 bp, Homo sapiens
tgaaatcctcccctgccccgcgggtctctggattgggacgcacagtgcagttgaggtctgcgtcgggcttggcttttcacaaaggctgatgtcttaactgtcacccatatggtccctgggcc

SEQ ID NO: 349705 - DNA, 122 bp, Homo sapiens
aggcagggagcgagggagggatctgcgaggcaacagcgaccccttcgagggtcaggctggcgcgggcagccgcggcccgggctccctcctcctccgctccgccgcctcctcccctgcccgct

SEQ ID NO: 349706 - DNA, 122 bp, Homo sapiens
ggcttagcgggggctgagaatttagaggactgatagaccgggctccatccttttaggccccggggagcctatagtctctatggaagtagggggccaattaatggattttttggtcgatactg

SEQ ID NO: 349707 - DNA, 122 bp, Homo sapiens
aaggaaaacccaacgcgggccccctccatccccccggacagccagggagagggacagcagcgaggcctggcaaggacaccgggcaccttgacccacatgctaggggttagggggtgccgtgc

SEQ ID NO: 349708 - DNA, 122 bp, Homo sapiens
aagactcgagttgtaaaaacaaattccacacatagcctggcttataaggacacagactaacgggaaaggccgagcttttaaaaatggggctggaggaagcgagaaggaaaggatgtcaccgt

SEQ ID NO: 349709 - DNA, 122 bp, Homo sapiens
agacgcgtctgttcatctccaacaggcccactagagaggcgggttttccaaagcctggcacggcccactgcaggtgacgccctctgccctccagcgccctcaggcctctggggtccaccctt

SEQ ID NO: 349710 - DNA, 122 bp, Homo sapiens
acaagcccactttcctctttagaggctctggcctcgtactgccttgaggtttttactttccgtttcctctgcctggaaggctctctgttcctatcctcagcattcaggcctctgctcacata

SEQ ID NO: 349711 - DNA, 122 bp, Homo sapiens
agacgactgcacattctgccagtgcgtcaacggtgaacgccactgcgttgcgaccgtctgcggacagacctgcacaaaccctgtgaaagtgcctggggagtgttgccctgtgtgcgaaggta

SEQ ID NO: 349712 - DNA, 122 bp, Homo sapiens
tggactgctcgccctgcagggctggctgagctctcccccactgctcacgtcactagactccgcctcccggattttataacaactgacacattgtagcctacaggagagcagaactcactgca

SEQ ID NO: 349713 - DNA, 122 bp, Homo sapiens
ttcctgacaagtagtttccgtgcgcccgagagcgtgtgaattgctcctaattaccgtgtccggtgcgcctctctgcgtagacttgtgtaacctctcggcttctggggcgccggctcggctgc

SEQ ID NO: 349714 - DNA, 122 bp, Homo sapiens
ccagcggcagcagcagcagcagcagcagcaggagcggaggccaccggggggcggcgggggcggggagcatgggggctgcggcggtggctgcgcgcaggagagggaagaagcccgccaggcgc

SEQ ID NO: 349715 - DNA, 122 bp, Homo sapiens
ctcctcttgaagtgataccttttctagctcttgttggaggtgtctcaggactcattacttcggggaacctgcaactgtgtcagtctggggaaactgcaaatattcttgtcttacatttgtct

SEQ ID NO: 349716 - DNA, 122 bp, Homo sapiens
gacggatcagattgggccaggagagacctggatggaggagaggcctgtgggggccaggaacgaaatgcagcccgcctcccccgagccccaggcacggtgctcaggagtgagcaggtgggcca

SEQ ID NO: 349717 - DNA, 122 bp, Homo sapiens
agccaggtctgcagagaatcgtatgcttgaaggaacgtcttgtgcctcaagcgctttacccgcaacctctggactctgttttagttgagtgtgacaagaaagacccaaggcgtatgaagctt

SEQ ID NO: 349718 - DNA, 122 bp, Homo sapiens
cgagggagagtggtctctaagctttccccaaagaaagggaacaggtctgacttcagagcgcgacgaggagttacccctgctgtggcctacagcgttcacaccgccgagcttctgtttcagtt

SEQ ID NO: 349719 - DNA, 122 bp, Homo sapiens
tgtgctcactcctagtcaccagggcctcatctccgtgttcccacaccctgaccttgctgccgccctaatgctgcggacccagtttccaggtacgccgggttcttggaaggtcctgccggtca

SEQ ID NO: 349720 - DNA, 122 bp, Homo sapiens
gagcaacgccgtgcagccctggaggaacggcagcggcagaagctcgagaaaaacaaggtgcgggatgggtctccgtgaatccatgtacacgtgtgctcaccgtctgcatactggtgcagtgt

SEQ ID NO: 349721 - DNA, 122 bp, Homo sapiens
aatgctaaattaagagcacggctattttcgggagctgccgggtcaaaaggggtgtaaatccgataaaaaggggtgtaaatccgataagcctcctggaggtgctctaaaaaccttcttggtga

SEQ ID NO: 349722 - DNA, 122 bp, Homo sapiens
gaaacacacacacattcacacacatacataacacacaacttatagcttggactcagttggcggtcatcactttgggataagatctgttttatctacccttttgcagatattatggactaagg

SEQ ID NO: 349723 - DNA, 122 bp, Homo sapiens
cgagggttaaaggagcttggacgcaccggacctaagggcctggcacccggaagcagacggcgcaagaaacgtgctcaagcgcttctgggtgcagaggcatggggccgccgtcgtggcgggcg

SEQ ID NO: 349724 - DNA, 122 bp, Homo sapiens
atctttctgtagcttcaatgtttaaggtgccttatttttcttgatagtttatcaacacatcgccaagtccaaatctgaataattgctgtctgcttttaagacaccagcagggtcaaagtaat

SEQ ID NO: 349725 - DNA, 122 bp, Homo sapiens
actagaatctcagcctcataaaaccagggaacaaccactgaggttgagagggtatttccccgtaaatgggaagcaatgggtccaggcaggcaatgaaggaattactagaacatcacataaat

SEQ ID NO: 349726 - DNA, 122 bp, Homo sapiens
cttttgttttggaaatgcttttcagcagcttatgaaaacaccttgagtctgggtcaggttcggtgcattggcttggagtttacaccctcagctgggaggggaaaaagataacgccagcagct

SEQ ID NO: 349727 - DNA, 122 bp, Homo sapiens
agaggtcggacagaagagacgatcaaagagcaatgggaggagctgagacaggaggggagccgggggcctgtgctgcgggtctgagctcatttccactaaaagctcctaaaagggccgacatg

SEQ ID NO: 349728 - DNA, 122 bp, Homo sapiens
gcatgcaaatgacaacattacttggcaacaaaagaatgtggacacaatgtgaaatcaagccggggtccagcagttagaatcagcccttccttgactacaccagggacatactactacaaatc

SEQ ID NO: 349729 - DNA, 122 bp, Homo sapiens
gatttttccagtacaacatccacagcatggctcacggagcgcttcagctccacgctccagcgccggcccctccgggccaggtccaccacacccgtgacactgctggccaccacgtccttggc

SEQ ID NO: 349730 - DNA, 122 bp, Homo sapiens
tttgtccaaggctataggatgaattacagagctgggaggccgaccacgtcagtctgattccgagacgccgtgctctccggtcctcaggcttggacagtcccagagcatttactgtacctttt

SEQ ID NO: 349731 - DNA, 122 bp, Homo sapiens
cttcccccgaggccagcgatggctcgggtgcgggcgaggagctgggagggcggctctcgacgcaggtgtcagatccgctcggcagtgctcggcgcgctggcccggcccccagctcctccggc

SEQ ID NO: 349732 - DNA, 122 bp, Homo sapiens
ccaggccctgcctgtgctgttccatcctgtcctgtcttgtccccggggccagggtcactccgggtgagactcagagccagtgtacccaacgggacacaggcaggcaggtcaccagacctccg

SEQ ID NO: 349733 - DNA, 122 bp, Homo sapiens
ggcgcgtggggccgggtctcggcggggatagtcgggccggggagacggagccagaggggccgcagtgtccctcgcctcaggcctctacctgtaatggccgccccgtgactgaccagtgccat

SEQ ID NO: 349734 - DNA, 122 bp, Homo sapiens
catgacctagggttcctttgcagtcgggtttgttatccgagtccccctgcgaggagaaggcgccgatgacctagggttccttcgcagtcgggtttgttatccgagtccccgaggagaaggca

SEQ ID NO: 349735 - DNA, 122 bp, Homo sapiens
aaatatcatccaatcagagacgctgggctgggaaccgtccaatcaggaacgcagctggtgcggatagggcggcttccgggatgtggcggggcctttgtctctcgctgcagcctgagctctag

SEQ ID NO: 349736 - DNA, 122 bp, Homo sapiens
tccttttgccttcttaggaacctggggccagttctctgggagatggaccactgtttgtcacgaaactacgtaatagccaaaccaagtgctgtcttaagttcttttttgttgttgttgttaat

SEQ ID NO: 349737 - DNA, 122 bp, Homo sapiens
actgcctcacccttcttccctataccatctattaacaccctgcaaacttcatcaagctttcgcaaatagggattcagacaaattccaaagaagcccagaaggggttgtgtgtgtgtgtttgg

SEQ ID NO: 349738 - DNA, 122 bp, Homo sapiens
ggcggtaacgagaaagcattggcaggtgagattcaccaaggtaaaaacacacaccccacacgtggccccacacatgataaggatgggggtcagctgccccttccctgacatgagggtgtcac

SEQ ID NO: 349739 - DNA, 122 bp, Homo sapiens
tttccactgttctagattatccccatgttttttcacttgacagagattatgatgaggaaccggttacacccacgctacctcccagtgagccttccccaccacacaaagctgcctccaggatt

SEQ ID NO: 349740 - DNA, 122 bp, Homo sapiens
tgaagtcgcgcgcccagccggagggcaggagatttcgcacctgggcgggggcgggagtggcgtcagggtggggagggggctcgtaacccgagcccccccaggatcgccggccccctcccacc

SEQ ID NO: 349741 - DNA, 122 bp, Homo sapiens
tggttagataaccttgggttcaaagacagacatttcctgttgtcacagtctttacataaacgctcataccatacttacgattagttgtttatgtgggttaaattaaccatggaatcactcct

SEQ ID NO: 349742 - DNA, 122 bp, Homo sapiens
tctgtagccttgtagagtaagaaactcgccacatgtgggtaaaagagaccttatcattgccgtcatcgtttcctgaacatacatcgtcacgtttatgtgtttcccaccaccccaagccaagg

SEQ ID NO: 349743 - DNA, 122 bp, Homo sapiens
aagactgacatttactgtttaggagatttgtttggcttctctgtccacattcccccatggcgggaatggctgaagctgagaaatgactgcctgccagcctctgcatccccccggccccttgc

SEQ ID NO: 349744 - DNA, 122 bp, Homo sapiens
aatccacagcctcccaaggtcgactgaccgtggcccatggcagccacttgccagtctcgtcgatgctctttctgtcaaggagggggagagcgcctgtgtttcatttccaaatgactagccac

SEQ ID NO: 349745 - DNA, 122 bp, Homo sapiens
ctcgttcaatgtgtgtctactaaggcctcctctggtgcaggcttggtgcttgtgcagcagcgccctgggggccaaggagcagcttctgggcagtgtgctggctccagatgaatgcacttgtt

SEQ ID NO: 349746 - DNA, 122 bp, Homo sapiens
ggagcacccagaccacagcctggtacacagtgggtgctgcgcaagtgagagctacctcgacggggaggtgctttgtaaactgggcctggtgctctgtgagaagcgtcaaggtggcgccagct

SEQ ID NO: 349747 - DNA, 122 bp, Homo sapiens
gaggggcagctgaaggaggacgcagctgctgagcccaggagagagcccgaccggagttttcgggcgcttcacgcccggcggggaggcagtgcgtccggggtgagggcagccccgatcctccg

SEQ ID NO: 349748 - DNA, 122 bp, Homo sapiens
cttgaatatcaaattttcttttttcttctcagcaaggccatttacttctatagaagggtgcgccctcacagatggagcaatggtgagcgcacacctggacaagggtgggggggcgggtctta

SEQ ID NO: 349749 - DNA, 122 bp, Homo sapiens
atttaaacagtctcagtctagctgtgttatcttgggcaagttctaaactctctgtgcctccgttttctcatctgtaaagtggaaatacggtccttatttcctaggattattttaaggattaa

SEQ ID NO: 349750 - DNA, 122 bp, Homo sapiens
ccccaccggctcgcacttcccagccagaaggaacagcgcttctccctgggaaggtattaacgtcaccgatatcatatgctgagtcttcatatctagcagctgtaataaaattctgtgttgtt

SEQ ID NO: 349751 - DNA, 122 bp, Homo sapiens
accagaaatctcatcataagaggccaggagacatactggaaaagtgactttcccagcagacgaggcccgaaacagggagtgggatggggctgaagagtggtgatttggtggccccgatgtag

SEQ ID NO: 349752 - DNA, 122 bp, Homo sapiens
gttgacgcctgaaggagaccaagcagcagggaacactctctctgtcacccagggagagcccgagtggccagaatccgaagtcaccattagacactctctctgcgctcttggacacctccaga

SEQ ID NO: 349753 - DNA, 122 bp, Homo sapiens
agctatgcaaccatcagcataatctcaatgggacgctgtcatcgactcccagagctgccccgatcccaaccccccagcctccaggcgacctctgatctgtcaccttttctagaattttcctg

SEQ ID NO: 349754 - DNA, 122 bp, Homo sapiens
aggccacccttggtgactgcagtgccacatgcaagggtgaagtggtctggtgctcctctgcgtgtttacaaggcttaattaataagtgtcccatgtaaacagcctgcaccatgtacgtgcca

SEQ ID NO: 349755 - DNA, 122 bp, Homo sapiens
tgtgagtgcctggcaagggtgacgtggggctgtttctgcgggcacagctgcagcaattaccggagtggaggcagggcccaggcagcactgccctccaagatcttcccttgggcttttcagca

SEQ ID NO: 349756 - DNA, 122 bp, Homo sapiens
ggatgggaggaggttgggggagcagggcgcgtggaggagggaggttggacgtgtgtacagcgcctggggacctcgctggccccttggtgcccccaggactctgaggcttctcctttcggctt

SEQ ID NO: 349757 - DNA, 122 bp, Homo sapiens
ggggcaaccccagaaatgggcgacttcaaggaggcgggagataacatcccctccagggggcgacgtccaagagcatattgtgtggctgcgtgcactgagtagagctcaacgcccgggaccta

SEQ ID NO: 349758 - DNA, 122 bp, Homo sapiens
ttctctaccgagtgacaaagacgtaaataacagggccctctcctctgggagcctgccacgcgctgtcctcgctgtgggagtcggcctctcatccttcctgccatcgtgacaccaggacacag

SEQ ID NO: 349759 - DNA, 122 bp, Homo sapiens
gctctagttctttacttttaaagatatcattataggaattataagaattatgttcatgtccggggatcctggagagtcacttacaggaaagaattaacacaatgaacagatttgggtagtgt

SEQ ID NO: 349760 - DNA, 122 bp, Homo sapiens
gtgtgtatgttggggggggcgggaagagtgtctcgagcaacccaagcgcgggtctccaggcggcaaggccccctttgatcaggaaaatccaattatttgtgtatatacatttcccacatagt

SEQ ID NO: 349761 - DNA, 122 bp, Homo sapiens
aagtagcttttaaagtataacaggctgagcaaaatggatgtacaaataccaaaaatgtcacgtttaatgcaggcgattgtcattctgatcttgtttataatggatcactcttgattgttaag

SEQ ID NO: 349762 - DNA, 122 bp, Homo sapiens
ggatgaatgggtgaataaagacaaaagacagaagagtatatttggaagaaggggtcagggcgcaccttgctcttcgggggtgtttcagtctgtggcttgatccagagcaggcttgcaagact

SEQ ID NO: 349763 - DNA, 122 bp, Homo sapiens
gccaccatggctgggagcaggcggagggccccggaggagcacagttagcgcgagagcgcccgaaggggaggccgaggaggagcgggaggaggagccccgccgcctctgcagggtcccgccca

SEQ ID NO: 349764 - DNA, 122 bp, Homo sapiens
cacagaaacagaaactgaaccgaacaccgaaactgaaactgtttgtctcttcctgagaaacgagcaaacctgaaagctactctctcagcttcagagggaaaaaatggttgtagatttctgga

SEQ ID NO: 349765 - DNA, 122 bp, Homo sapiens
ccctgcatgcgagttgggccgcgggcggggttggagcctactcggggcgactgcgatggacgccttagaaggagagagctttgcgctgtctttgtgagtagctcctccagggcgcaggcgac

SEQ ID NO: 349766 - DNA, 122 bp, Homo sapiens
gcttctggctgcgacgcaaccgccgctgggcggtgagttgccgccaaccgccctaacggccgaaacaatgttaatggctttcagagtctggcggcgcgttcccattatcatcttcctgtgac

SEQ ID NO: 349767 - DNA, 122 bp, Homo sapiens
aacacttgctactttccttctgtttttactatggttgtcctagcagttggaaagcaataccgtgctgtgtcacttgcataatgcactgagcctagtatgtcctgcacctggagcctccaact

SEQ ID NO: 349768 - DNA, 122 bp, Homo sapiens
gggagatcacgtcccgtgcgtcgggaggcgggggcctcgggctgtgacgtcacgtggccgcgcccctgccgcccagatatctccggcgccgcccgccattttgactccagtgtctcgtttgc

SEQ ID NO: 349769 - DNA, 122 bp, Homo sapiens
taacgcttgactgaatttatttttccctcaatgactccagactctcaccaagacaagcatcgaccctctgtgcttctggggttttctatttccccttccctgtgggtatgagtgaatctggt

SEQ ID NO: 349770 - DNA, 122 bp, Homo sapiens
agcactgctgcctggtctccacagtagcctccctgcccgggtcccagcaccctggatgcccgtctctgtcccaggcgggatggggcacagtgcaggacacagccatgtacaccaagaagaga

SEQ ID NO: 349771 - DNA, 122 bp, Homo sapiens
ctacaagttctttcagtcttggctgcctcactaggctgctggagaaacccagaaggtagacgatgagacccacaagtatgaggcatttggaatgcatgggctaccctgtgaagaactttacc

SEQ ID NO: 349772 - DNA, 122 bp, Homo sapiens
ctcagcgcactgccccagccagagttttctcctcggcttagaggtttattaatgctcctccgcgctcccgggggagggggcgctaggtactaccccgccaggccccgccccgttccattccg

SEQ ID NO: 349773 - DNA, 122 bp, Homo sapiens
tggagggagctttgcgattgcacctgctgtctgccttggcagccaggcaggacgcatgcccgtgagcccagccacacaacccacggcacaggcctcgttcttcatggggctggtttcattct

SEQ ID NO: 349774 - DNA, 122 bp, Homo sapiens
gtggccccaagcacctgctttacctgctcagaccagagtgtcgttccgtcccattcattccgcagctttccccgaacgcacacaagtgaaatgtaaatgtcagtgtgtgtgtatctatctcc

SEQ ID NO: 349775 - DNA, 122 bp, Homo sapiens
tgggccttgagaacagtgcagagctcattgatgtagacatagagcttggctggccggctccgggcccgagacaggaccctagagaggatgttgcagaactccgccgaggccaaaaacagaga

SEQ ID NO: 349776 - DNA, 122 bp, Homo sapiens
aaggttaaacctaggaacacggaagccaatgtgcccccagagaacggaagaggcggtctgcgagttcagaaggcaggcagctcatgcttgaaggtgatagccttctgcctacaagagaaatc

SEQ ID NO: 349777 - DNA, 122 bp, Homo sapiens
cggccccggggcacacggagcccttggcagtgcgtctttatgggccccctttaaggccggcggaggcatctcgggccgggcgcggcgctccgtccgtcggccgtagcgactgaactgcgcgc

SEQ ID NO: 349778 - DNA, 122 bp, Homo sapiens
aaggtacgtcttccagaaaatccacgtcttccaaccaagccatgtcttccagaaaatccacgtcttccagaaaatatatgtcttccaactaagctacgtcttccaacaaatccatgtcttcc

SEQ ID NO: 349779 - DNA, 122 bp, Homo sapiens
gatggaagaaaacatacattcctgatcctgactatttgacttctcaaagaagatagcattcgtaacaagaaagactcaagaccatcttccttttggtttcaaaaggtctctagttcagaact

SEQ ID NO: 349780 - DNA, 122 bp, Homo sapiens
gtcaggggaaggagaggacaggctgcacctgtgacagcaaggagggcgggactaccgtgacgttgtccctgggccccactcgctcactgggatggcattccttcctgctggtgctatcagcc

SEQ ID NO: 349781 - DNA, 122 bp, Homo sapiens
ctcttctctcttgtgctcacgttatggaatcatgtctatttgggatgtgtggcttccaggcgggcaagagcaggcacagatgagaccggcgaggtgggtactatcatgttttgtgtattgtt

SEQ ID NO: 349782 - DNA, 122 bp, Homo sapiens
atgcgcgcaccggcccagcgcccggaagcccgctaggaagtattgatcgcacctggagagcgcgcgggacctctcgccacagctgggtgcgttctgagacgggggaggcgcggaggccgtga

SEQ ID NO: 349783 - DNA, 122 bp, Homo sapiens
ccttggagtgtcttcggcggagccggaagctgagccccacctgagtggccccgtcctcaacggccagtatgccatgagtcagaagctgcaccagatcacctcccagctcagccatgccttcc

SEQ ID NO: 349784 - DNA, 122 bp, Homo sapiens
ctttaatttgcggctggtcgacatggtaagttctgccaaaatgaggggctttgcaaggcccgggggccaggagtctgggtatttaaggccttggccattgtgacagggaaggggcatggctc

SEQ ID NO: 349785 - DNA, 122 bp, Homo sapiens
ctggggcagcctgattaaccagcttctccagggccaagctgttgggggtgaggtgcagcccgaagcagccagaccagcccctgagcctcccgggtgctggcagctgtcatggggctaccctg

SEQ ID NO: 349786 - DNA, 122 bp, Homo sapiens
ctcccaggctgtggggtgttcacctgtgcaccttcaagccgatcacttccttggggtcctcgtcaattcaattccatggaaatattacaaggggtagacagagatgagccgtgtcagtgtct

SEQ ID NO: 349787 - DNA, 122 bp, Homo sapiens
cagatggcaactgggtcttgtccctgtgaagctatcacccagtcatcagtgggtttgccccgaaaggctccatagaaccctatttctctcctcatctgcactgagctctattttgtagaatg

SEQ ID NO: 349788 - DNA, 122 bp, Homo sapiens
acagcgccccgcggcctgtccatgagcggcccatgcattatggaagacgcgcgctgggctcgctccctggtccttaaatgacagcaaatgaggtaaagccaggagggtggggacggaagtgg

SEQ ID NO: 349789 - DNA, 122 bp, Homo sapiens
cgccccctgcctctcaaccaatccgcatatgcagctgctttgctcccgccccagggggggcggtgccggcaaggctgtcagtctcaagaaaatgattagctcgcaaaggcgccgtgggggcg

SEQ ID NO: 349790 - DNA, 122 bp, Homo sapiens
acattagaatctgtactcttcctcacgaaattagcacttaaggagttaaaatgactaccacgttcctcttgcaacaacagtattttcacatggataattagatttagtatttaggtaaggtg

SEQ ID NO: 349791 - DNA, 122 bp, Homo sapiens
cccggcagtccagtcagacaatgtacctaacggggatttggcccaacaagagaagcaggccgcgggaggccacatctgtgatgcacacctgcctggtttggaagaactgctgggaaattgaa

SEQ ID NO: 349792 - DNA, 122 bp, Homo sapiens
cgtggggaagggcccagaccaccgggttcgactcagttttctgtgtaagagggttcgggccggctgagtcgctgaggattatgaatttgctcgcagaaaggcctagggagctctcattgtct

SEQ ID NO: 349793 - DNA, 122 bp, Homo sapiens
cggccaccgccggctctccctgcccctttgcttccacctcccaaagctccgcgctggctgcgttctccagggagctgttcagaagtttggggctttgcttgggcttcttcgctctccttccc

SEQ ID NO: 349794 - DNA, 122 bp, Homo sapiens
gcacacgtcgtggggtcagcgcccccccgctggggcggccgggtgaactcccgctgggttcgttggttccttctgaggctcctgccccaccgctgccttcaatggactcctacccagggagt

SEQ ID NO: 349795 - DNA, 122 bp, Homo sapiens
aggccggcaccttcgctcttcctcttccccaccccctagcccttttgtctctttttcagacggatgttttcagtctcaagtggttttattttccgcacaaaaccctgagatcaagggcagat

SEQ ID NO: 349796 - DNA, 122 bp, Homo sapiens
aaaaggtggaagaaggtggagaagcgattatttactttgactttcatagggcatgacttccgtaagctatgtatgcagcttccaaatgtaattaaacatgtttttgagtttgatttgtgttt

SEQ ID NO: 349797 - DNA, 122 bp, Homo sapiens
gcaccggcgtcacgtgaagtgcggcgtcagctgagcccctccgggtgccaatgcatggggcggggtaagggcggggcagggggcggggcatggagtccttgacccacctcctccagagccaa

SEQ ID NO: 349798 - DNA, 122 bp, Homo sapiens
gtgggtagaggagagaggccgataataaggcattttgatttaaaaggccttctgcagtgccgcaggcaagcagaacagaaacagtaaatgagacaatgaattgtgtccgtggaagactccat

SEQ ID NO: 349799 - DNA, 122 bp, Homo sapiens
agtcagctaccttgggacctctaggatcttccgacatcccaaagctgtcttcccgtaccgcggagcccggaaggggctgtactttttcggcctctaagcactacggtggccgagcgagttca

SEQ ID NO: 349800 - DNA, 122 bp, Homo sapiens
aaaatgggaggaaggcggatccggggccgctgagcggtgggttctgccgcagtgttctctcgcctcctgctccagcagcctctgccccatggctcctgagctgcactgggtaggaatgagtg

SEQ ID NO: 349801 - DNA, 122 bp, Homo sapiens
gaggaacctccgagctctccatcgccagaccaacttccccaggacccgggcctgagccgtcgctgggcccgtcgccttccccggctctcggccccgccacgtccccacagggcgtcccggtg

SEQ ID NO: 349802 - DNA, 122 bp, Homo sapiens
gtattgcaaaaaaactaattatatttacagactataggtaagggagaggaaaagtcctgacgcaagctacaggaaattaaaacagacaagtaagcccttgagtctaattgaagagcaaggat

SEQ ID NO: 349803 - DNA, 122 bp, Homo sapiens
ttgtacatcaagtcctttcccgtctccaccatgagacaccaaaaagtcacaatgattagtcgaaagcagcagaagtctttatggtcccaatcctggaatgaatacttgataaatgtcctcaa

SEQ ID NO: 349804 - DNA, 122 bp, Homo sapiens
ccgccgggcgcgagccgctcacccgggccgaggtgcctgaggcgccgccgccgaagtccccgctgcaaagccgggcgaagcctccaaccgctgccgcctccagcctggcactgagcgccgtg

SEQ ID NO: 349805 - DNA, 122 bp, Homo sapiens
caactccgagcttttccgcaaatgcgaattgtgcctaagaagtgcatgaagatgccacggcgggtagatcccatctccgttctttgctttcccagaaagggacctgttgcactaactggctg

SEQ ID NO: 349806 - DNA, 122 bp, Homo sapiens
cgagagcctcgggacccttttctacccgcgttgtcgggggctgttgaacccagagcgggacgtctggatcaccagaggtttccagaagcgactttagcaccaaatgggatgtttaagtccac

SEQ ID NO: 349807 - DNA, 122 bp, Homo sapiens
aagctttcaaagagaaagtttgacccctaggctttgatccactttcccttgaaaacttctcgcgaggcccaacaggtcgcaacgggtcccagccttcgcgcctcgctgtgcaggctggctgg

SEQ ID NO: 349808 - DNA, 122 bp, Homo sapiens
gggccctggggagtgggtgggggcctggaggcttcttggaggagggtccagggcctgtcccgcccctgttcctgcctgcaggagttgtttactcagagcaaggggtggtggggagtgagctg

SEQ ID NO: 349809 - DNA, 122 bp, Homo sapiens
caggggagggtttctgcagcagaatctcgggctcagggttggcggttaacgagggagcagcggggtcttggggagggggctcgacacccctgaaggtgccccctaaaggagccactgttaga

SEQ ID NO: 349810 - DNA, 122 bp, Homo sapiens
atcccaagatgattaaaatagggtttctgatggatgttgaatggcgtggactcgctactccgttcttcacagctgccttccagaatgtgttcaaaagaaagacaagaaggagtgtatggctt

SEQ ID NO: 349811 - DNA, 122 bp, Homo sapiens
gtgaagaagggtatggaatggggtgcagaagtccatggagatgaccggcagatctcagggcggtttctggcacatcagaagttgggcttatgcttcttgagctccaccataaggtggtgaat

SEQ ID NO: 349812 - DNA, 122 bp, Homo sapiens
taatctacattgggttggtactattatccttgtcattttacataggaggaaactgagggacgagaggttaaatcccttgcccaaagtcacttagctagtaaactgagattcgaaccatggca

SEQ ID NO: 349813 - DNA, 122 bp, Homo sapiens
cgggggttgcggagactgaggagtaagcgatacggacgccccccgcactggcagtgcgggcgcatgcgcgcttggccaggtggcgcgcgctctcccagcccgagcgagctacttccgccacg

SEQ ID NO: 349814 - DNA, 122 bp, Homo sapiens
cctgtagtcccctggtggtccgcagattaaacctagcctacaaagtataggcgcaaataccgttttagattctaattaatgaaaaacacttaaaatccaagtttaaaaatcataaaaagggc

SEQ ID NO: 349815 - DNA, 122 bp, Homo sapiens
tttattcgttcacaacaaccacacatactctatttttctttgcttgcggaagaatgtcatcgtgaggcagaacaaatatgacaatttaaatgcgtaccccggggcttaagtagcacaatgcc

SEQ ID NO: 349816 - DNA, 122 bp, Homo sapiens
tcggcgcgccgctgccagggctgtacacctgctggctgccatggctgaggtgggccgtaccgggatcagctacccaggcgcgcttctcccacagggcttctgggctgcggtcgaagtgtggc

SEQ ID NO: 349817 - DNA, 122 bp, Homo sapiens
cagaggcgtggaaacgccgtggggtcggagtcgcttccatgcggatcctgcgttcaccagcgcccaaaagaggaggcctgcttggcttcccaccgcgccccaaagaacgttcttctgcagat

SEQ ID NO: 349818 - DNA, 122 bp, Homo sapiens
ggtcaagagtggaggccgccgggaagtaggacgctattcccgagtccggtcacaagatggcggactggtccggcagaagacgagcagggacgaggaagcggggctaatgaacctgagataca

SEQ ID NO: 349819 - DNA, 122 bp, Homo sapiens
accacacatgaaagtgagtgcctgaaacatgcaaccctctatctgctttagccaccttcacgcaccagctaagtcatcgcactttccatgaccatgttgcctgtgaagagaatgaacatggt

SEQ ID NO: 349820 - DNA, 122 bp, Homo sapiens
tttaattttttaacacaccatttattattaccccaatgtaagcactgatgcacaggaaagcgaagaaacttgcacagggatatccagtggcggctgtgtccccccgtcactgcctccgccag

SEQ ID NO: 349821 - DNA, 122 bp, Homo sapiens
atgtacagactccctgggatcctcatgttttgggtgacaggacctatggaccactatactcggggaggcagggtagcagttcttccagaatcccaagagcttctctgggattttcttgtgat

SEQ ID NO: 349822 - DNA, 122 bp, Homo sapiens
cgtcctggaccagcggctgggaaaagtctccccataatgcccacatctccagttcccacacgcccgagggcccctccatgccgctgagaggaggaaggggacaggccgaacccggatctggc

SEQ ID NO: 349823 - DNA, 122 bp, Homo sapiens
gcgccgcggggcaggaagccggcctggagccgcggggcctcctgggaattgtagtcgtcccgagctgcgcttggctggaagtacggtccgggttcgcgttctcggatctctttggttccgct

SEQ ID NO: 349824 - DNA, 122 bp, Homo sapiens
cagtagctcctctggcggcagcagcactgtgagcaccagcacgccgcgggccagcagggccggcacctcgctggcacaatccagcccatcccagccgcactcctccgtgttgcagccctggt

SEQ ID NO: 349825 - DNA, 122 bp, Homo sapiens
ctgggtcctgccatttactgcaggtggctttatctacgtagcaacagtgtctgtgttgcccgagctgctgagggaggcatcaccattgcaatcacttctggaggtgctggggctgctggggg

SEQ ID NO: 349826 - DNA, 122 bp, Homo sapiens
gcgggcgtctttatttcattttagctttctttagcggggcctgtgtctcttctcactgaccgttttctgaaactggctggggagggtcagggatggctgctgtcctcgggggagggactgag

SEQ ID NO: 349827 - DNA, 122 bp, Homo sapiens
gtaggacctgatgatggctactagatgcctggtaaatgatccttcaagaagtgaatgaaccgggggccgtggctcacatgaagtcagcagttcgagagcagcctgaccaatatggtgaaacc

SEQ ID NO: 349828 - DNA, 122 bp, Homo sapiens
cccctcccgctcccagcaagccttcgatatccttggctccatccaaggtggcataattgccgggctccatggagccgagggtcggctcatgaggtgcgggggcggggaatctagggggcacc

SEQ ID NO: 349829 - DNA, 122 bp, Homo sapiens
tatgcaagagtacgaaggacaatgtttttaataaaaccttggctgcttttctgtaagaatcgatgcaagtaattttatctctttaggggtggttttcaaagcaaggggaagaaacaaattga

SEQ ID NO: 349830 - DNA, 122 bp, Homo sapiens
tctcacacgaaaacccccaggctctgcgggcagcgtggtcctgcagtggctaacactgggcgaccggagtcgtgttccgacccctaggagaggaaccggctcggtcgtggtgcagcccgcga

SEQ ID NO: 349831 - DNA, 122 bp, Homo sapiens
agccgaattccagaggaagggaacaggggtgagagaaaagaggcaaccgggaaaacccagcggtcgcctggaattctcgacggtgataactgaaagttctgaggtgataactgaaagttctg

SEQ ID NO: 349832 - DNA, 122 bp, Homo sapiens
ccctcccccacacccacccgctctttccgccccccaccccagccaccctagcagggcacccgaaccgctcaggctgaacttagttccacactcctcgggggcagcccggaagccggctcccc

SEQ ID NO: 349833 - DNA, 122 bp, Homo sapiens
agcatctacttcttggtctgcatcagtgtgcgacgattttggtttctcatgtacccctttcgcttccatgactgcaaacagaaatatgacctgtacatcagcattgctggctggctgatcat

SEQ ID NO: 349834 - DNA, 122 bp, Homo sapiens
gtgcgcgggtgaactccacgcttcccggggaaccccggcttcctggcaagccgagaccctcgctcgggtcctcccgtgcagatctcacccttgtaaagaacttcactggtcacaaacgcttg

SEQ ID NO: 349835 - DNA, 122 bp, Homo sapiens
tgcccagactggtcttgaactaccgggttcaagcgatccatctgggccagcctctcaaaacgctaggattacaggcataagccactgcacccagctgtttctttgtggttgagacaggatct

SEQ ID NO: 349836 - DNA, 122 bp, Homo sapiens
ctgattttcctcacatgtatttcctcccctcttcagccccgcgccagctccaggcacagccgttcagggtgatgccaaagggaaatgagaacgcctggtttcgagtgccagcctgaggcccc

SEQ ID NO: 349837 - DNA, 122 bp, Homo sapiens
agtatatgaccccgctctggttcagtattcttatccccaccccaaataaagagaatcacacgaccttattgtgataataaatagcaactgtagtcagagggagagaggcccagggaggaaca

SEQ ID NO: 349838 - DNA, 122 bp, Homo sapiens
ttcatctggtcctttaacattttcccttcacttctcttcagagttttttcttgaagggctcgaggactgaagcatcccacaaaatgattctattgaataattctgagcagctgctggcccta

SEQ ID NO: 349839 - DNA, 122 bp, Homo sapiens
gcggggccgctaagggttggggctgccggcagccggcttctcaccaactgccggttccagcgcacctgcttgggccgaaggagtgtaggctgcggccgggaggggctgtaagattttcagta

SEQ ID NO: 349840 - DNA, 122 bp, Homo sapiens
tcctccgcagtggaggcctcgggagccgccccgtcccggcttacccctggctgcggtaggcggcgcacctctccagtgggacccgcaggacgccgtctctcagccccacgaagagcgcgcgg

SEQ ID NO: 349841 - DNA, 122 bp, Homo sapiens
caaagaagacctagatcgttcagcacagaggtgcccatttagcagaggtatgagtgtctccgggtactcagggctgtaaggaaacacaggatgcaaacccagttagggtggggagagggctt

SEQ ID NO: 349842 - DNA, 122 bp, Homo sapiens
tcacagcaaccttggctcactgcaacctctgcctcttcagctcaagtggttctcccacctcggcctcatgagtagctggtactacagacacatgccaccatgcctggctaattttttgtatt

SEQ ID NO: 349843 - DNA, 122 bp, Homo sapiens
gggtttgctggtttttcgggaaataaggccactggggacagtcactacgttttcaggaaccgctcagcccctctgagtgccccgcagatggacctggcggcgttcctggctacggctgactg

SEQ ID NO: 349844 - DNA, 122 bp, Homo sapiens
ctcctacccactgggtgcggattagcagaagtataagtcaactatgatgcagatgctatccggagactcagaagggcaatccttaggtgtggtttccatgaataaaaggcctttggacatat

SEQ ID NO: 349845 - DNA, 122 bp, Homo sapiens
ctacggggtctcgtccctctgcacgtgcccagggctgggaccccagacacagacctgccccggacgagggaacgcacggagcttcccaagatggtttgaatcagtaactgacggcaaaagca

SEQ ID NO: 349846 - DNA, 122 bp, Homo sapiens
cactctagtggaacccagtgcttggcggctcaccggaactggctttggatgaaaaaacttcgaccttgactcccagccagctccagcttctccttcaactctacagactggacaaggccaca

SEQ ID NO: 349847 - DNA, 122 bp, Homo sapiens
gcaaggggcggggttggcctgggtcttcggccagagggcggtgaggttgacttgaactggcgggtcttgttgtgccggggctgccacgttatttccagcttttgaggtggattttgcccgct

SEQ ID NO: 349848 - DNA, 122 bp, Homo sapiens
aagctctgtgtttgtggtagcaagctagtagaaagcagtgaatatcatccattgttttggcgctactgtataaaaggatagtgggctgtacatactatgctattcttttcttttttttcttt

SEQ ID NO: 349849 - DNA, 122 bp, Homo sapiens
tccttccagtccacctgggggttgttgtcccgcaagctggaggccacgctacgggctcgacgggccccgtgaggcgggggcgggaccctcaggcgctgcaaggggtgcggcagagtcccccg

SEQ ID NO: 349850 - DNA, 122 bp, Homo sapiens
gtggctaaagtgctttggatgcagggatcccagcagtgcaaacagacttcggagtacctgcgctatgaagacacgcttcttctggaagaccagccaacaggtaagcggcccaattcattgtt

SEQ ID NO: 349851 - DNA, 122 bp, Homo sapiens
acaggttcctgccagtgagaaatggggagaataagccagaaaagtaccctaggaccagcccgttcaggactttgaatgccagccaaaggccacgtctgacttgggaggcagagggcagctac

SEQ ID NO: 349852 - DNA, 122 bp, Homo sapiens
tccctagcccgatcccccggagccgcggccccaccaccgcctggcactcccgggagcgcgcggcctcggagcccccagccccgcacagccccttgtccccggctgggaatggcgcctcgcac

SEQ ID NO: 349853 - DNA, 122 bp, Homo sapiens
catggatttggccccaacagtgggcaaggtcggggcatgaggtcaggaaaggagaaacatcggttttcgatctaataatggctgggctggagcttgttccctgtgtccaaagggcgtgcgta

SEQ ID NO: 349854 - DNA, 122 bp, Homo sapiens
aaggaaaagggggaaaatagtgactttgcagttgggaaacctggcaaatgaccctttcaccgagtgatgaagggtgatctcaccagcaatgccatgtggcatcatttaaccctgataggatg

SEQ ID NO: 349855 - DNA, 122 bp, Homo sapiens
gaagaacagggcacttgaccacctgacgcacgaactgggagggctcccactctgtctccacgccacacgtagcttctctatacagatgctgggcaaaaataggaagcatgttgatctgaatc

SEQ ID NO: 349856 - DNA, 122 bp, Homo sapiens
agggaggtggtggcgccatcagtgtgggctgtgccgtggctggaagttactgtgaggcggcggctaagaaggcggctctggtggcggcggtggaggctgaggcggcggccgaggcggcgacg

SEQ ID NO: 349857 - DNA, 122 bp, Homo sapiens
tgatgtccttcacagagaggggagtggtggcagagggagcagggccctaagggaaactgacgcctgtgcagcacgaaccccactcgcgtcctgtctgcctggactgccgccgtggggacttc

SEQ ID NO: 349858 - DNA, 122 bp, Homo sapiens
tgagggaaccattaaccattaggaggggaaaaaaaagccagtgagattgataagcagattcgtgtttcaggggaaagtttagattccacagtcgatttacaattaaaattataagcttaatg

SEQ ID NO: 349859 - DNA, 122 bp, Homo sapiens
caagatggtggccaaccccaagagctgctgtttatcctcttttgggggaagcctccaccacgtggggctcctgcgtcaacctgactccaaccccgcccccagcaacactctcctcccttttc

SEQ ID NO: 349860 - DNA, 122 bp, Homo sapiens
cgatcgtccaggacccgtcgggtccctcagcacagcgcggccctgtcgctctcctgaccacgcccctcatggccccgccctatgcctcgcccctggccctcgcgccccgcggctccctccgc

SEQ ID NO: 349861 - DNA, 122 bp, Homo sapiens
aatacgtgcttcaacgcggacgaaccgtggaaacaggcgtggtcaatacgtgcttcaatgcggacgaaccgtggaaacaggcgtggtcaatacgtgcttcagtgcggacgaaccgtggaaac

SEQ ID NO: 349862 - DNA, 122 bp, Homo sapiens
aaagaaacacgggcaaaacacttgtcatttactgctcccaacctcgcccctcccagaatgcggtgcattgtgtacatggtgtacatggtccaagttggaaactggcccattcggagataatt

SEQ ID NO: 349863 - DNA, 122 bp, Homo sapiens
accacacccaaacccctccctctgccacgttagcctggaactgcagtgaaaatcatccatcggtagttaagacaggatctagttaactaaagtaaactttgatcgcggcagctttccgatgc

SEQ ID NO: 349864 - DNA, 122 bp, Homo sapiens
ggtcgctgcgaaccccggggttccgcggtggaggggtgctatactgggatgcaggcgcggcggggactggcagcaatcatgccctgggagctaacgtagagctttggataatgcttttgcaa

SEQ ID NO: 349865 - DNA, 122 bp, Homo sapiens
tgctcggcctgtgcacgtcaccggctcttccctagggtagcttttgcttgctttctcccacgtccatcctctctctctctgactcacagccagccaggtttctagccttgtcattcctaaac

SEQ ID NO: 349866 - DNA, 122 bp, Homo sapiens
taaatggtggccctgctgcagattagttcccgatgcctgagataagatgctggaggaaatcgcggcatcatcaatttaatcccacacaaaatgcaagcgaccaccttagcttagttgcagtt

SEQ ID NO: 349867 - DNA, 122 bp, Homo sapiens
cccctgtatagggcacttcccatgagtggagcaggactggaattgctttgggtgagtcagcgagtgagtggtgagtgaagatgaaggttgagaacagtactggatacgactgcagactttag

SEQ ID NO: 349868 - DNA, 122 bp, Homo sapiens
cgctttctaacacctatcctgtatcaggtcaactcaattacctttcaaagttgcctaaatcgtgaaatattggtggttcaaatacatgaattctgcacatttcagaatagatgtacataggt

SEQ ID NO: 349869 - DNA, 122 bp, Homo sapiens
actaatgacgattgtgcgccgcatctggggaagggatacagaaaaaaaccctgcaaacaccgtgaggatgaaactgccaaagggatgcaagagcctctcaaatactaattaggggccgcggc

SEQ ID NO: 349870 - DNA, 122 bp, Homo sapiens
ccacccttaaccgaaaacggagacagagagggtcagttttcaaaatctgtggcgtgaccccgccactgagatagatctgcagatgcttcgtcccagtcagggaggccgtctcggcatttcca

SEQ ID NO: 349871 - DNA, 122 bp, Homo sapiens
gctgctgccagatgtcagtaattataaggctatgtgggtctgcagacagctcattaaagacgcttgatctgcgtgaaaccaggaagcagaactcagcctctttgccactttctgtaagaaat

SEQ ID NO: 349872 - DNA, 122 bp, Homo sapiens
ttccgatccctgggaatatcacgccctttcttctgttccagtcctgcctggaactccctgcgcacacctgtgactcctcatgcaagaggtagatgaagaaatgacccactgagtacaggaag

SEQ ID NO: 349873 - DNA, 122 bp, Homo sapiens
cccaaccgggaggcgccagggccaaaccactagctttgactcccacactccacacaccgtcgcgacccctgaccagagagacttatagcactcgcccgctttgggggcgtcccaggagccaa

SEQ ID NO: 349874 - DNA, 122 bp, Homo sapiens
caactgttcactgttttttacagttctaggtgcctgttgggcagttctactgattttgcccggggcttactcctcatgtaccagcattcagctggaggatttccctggctgggagatccaag

SEQ ID NO: 349875 - DNA, 122 bp, Homo sapiens
ctactgctgtacttcttaccccctgtatcaaagagttaaaatctaattttttcccaagatcggtctcactgtaagtctgctatctgtattttcccattcttcgtctgatagccaccgacatt

SEQ ID NO: 349876 - DNA, 122 bp, Homo sapiens
gacccagtgtggatgttccaaatccagtacaacagcagcgaagatgagaccctcatctaccggtgaggatgcgtgccccacacccggctgcactcccggcgcccttcctccgccctctgctc

SEQ ID NO: 349877 - DNA, 122 bp, Homo sapiens
tagaccctcttaggaaaaccaaggacagggtcatggtgaaattcacctaaggtaaggaaacgtggggtccacaaggatgctaaaccctcaagcctgtgccttcagcctgtgagctcctttcc

SEQ ID NO: 349878 - DNA, 122 bp, Homo sapiens
gtccttatagccagccccaccccccactcctaatgtgtgtaccacatcagaagacagacacgcatgcctgagctgattctgcatggtttccttagatattacagttcattagactcttgcca

SEQ ID NO: 349879 - DNA, 122 bp, Homo sapiens
gggccacctgcccggacgtgcgcaggtgcgctaggggcgcgtccgggggcctgtagggtgcgctctgagctaggcctcgggccccgcctggcctctggctgccaatgtggcccaggagcctg

SEQ ID NO: 349880 - DNA, 122 bp, Homo sapiens
aaagtattgctgttaagtttgatcatcagctgaatttcgtctttttataaggcctatgatcgttttacatcttgatgtcgcttctgagttttccagttatgtggtgttctattataatatgt

SEQ ID NO: 349881 - DNA, 122 bp, Homo sapiens
agcagctgtgctggaagctgcagctgaggcccacgccactgtggacagcccaggcagcttcggatctcctgcagctgtgccgcattgctactgcctgggacctggtcatctgccagcaggat

SEQ ID NO: 349882 - DNA, 122 bp, Homo sapiens
ccaggcctttggttggtgggaaaaagtcataggatggcactgggggggtctatttgcagtcgtactcttaactcttgtgagacctcaaaacaagtgccttctgggtggtgctttccactggg

SEQ ID NO: 349883 - DNA, 122 bp, Homo sapiens
actgtgggagtggcttgggcaggtcctcaaggcctgtccccccacccgaccccaccccaccgcctcccatctgccctgtggcagcttatcgggtaaccagagccggcagcttcatccacgtc

SEQ ID NO: 349884 - DNA, 122 bp, Homo sapiens
tatcaaaaacactgtatattcctctatgggatgtgaaattaatatttccacatcagcggccgggcacagtggctcacgtttataatcccagcactttgggaggccgaggcaggcggatcact

SEQ ID NO: 349885 - DNA, 122 bp, Homo sapiens
tggttctgggtaggcggggctactacggggcggtgcctgctgtggaaatgcctgcccgcgcgcttctgcccaggcgcatggggcatcgtactctagcctccactcctgccctgtgggcctcc

SEQ ID NO: 349886 - DNA, 122 bp, Homo sapiens
atcacttcagaacaagggcgggcccgttgatatctctcacactcattggttgagaggttgcggcgcaatggaaggtcttaaaccgagagtatccgggattatttttccccgccgtgcggtgc

SEQ ID NO: 349887 - DNA, 122 bp, Homo sapiens
gtgataaatagcaggaataaaaccgagagaggcgcgcagcaagctgtcggcaggtctggccgtaaatcccagctctgatggggccgagatgagctgggggctttatggaggggaagagaggc

SEQ ID NO: 349888 - DNA, 122 bp, Homo sapiens
gtggtgcgcgcctgtaatcccagctactcaggaggctgaggcaggagaatcgcttgaacccgggaggcaaaggttgcagtgatttcagtgatctgagattgcgccactgcacttcagcctgg

SEQ ID NO: 349889 - DNA, 122 bp, Homo sapiens
taaaaaaaaaatgacatctccctgtgtagcacccctaccagcccaactcaggaatggcttcggcagtgcaccccagtagtcagtcagtgccccgccacccagcagcacgcgggagcatcctg

SEQ ID NO: 349890 - DNA, 122 bp, Homo sapiens
tcaagtgctctctttacacacatcgcttttcttataggccccatgagggtggattccctacgagaaggtttggagagaaatcactggtcccacagtgaaatgaacgtttctctgggaagggt

SEQ ID NO: 349891 - DNA, 122 bp, Homo sapiens
ttggccagcgagagtgtcaattcccaggctccctcccgcgcgccagcctgctcttccaggcgggaaaagttcagcttagacaggcaagagagaagtcttcccaacacctgcgaatcgggagc

SEQ ID NO: 349892 - DNA, 122 bp, Homo sapiens
tccccatcttctcacctacttcaggttccatttcatggtaggaaattcctgtagtcctcccgggcttgctgaagtgctgctccaagttacagtccccgggttgtcaggcgtggcgagagccc

SEQ ID NO: 349893 - DNA, 122 bp, Homo sapiens
cacagtaaaaatacagtattataatcttgtgggaccaccttcctatatgtggtcattgaccgaaacatcattatatgttacctgactatattatatcttacatgattccatttatattgaac

SEQ ID NO: 349894 - DNA, 122 bp, Homo sapiens
actcggtgttctcatgggattaaatgaggctgtgccgggggtagagggcgcagagcacagcgccaggcaccagcgtctctgggctcgatccgctttcattaagctgtccccgccccttttcg

SEQ ID NO: 349895 - DNA, 122 bp, Homo sapiens
aaatgtattagtcattggcaggtagattgattttaaagctatgggaccagatgggatcaccgggaactctgaagtgatccaaaattaagaaactggggaggaaagaagggtccacagatgag

SEQ ID NO: 349896 - DNA, 122 bp, Homo sapiens
gtttccattgttctcttgcctctgaggcccactgggtccggggcagactgagcataactacgctgagccacgtcaccggccggtgagacgcgcggaggcattgatgggtcccctggttcccg

SEQ ID NO: 349897 - DNA, 122 bp, Homo sapiens
cagcaggacgggacggaagagctggggctgccccgtactctgtcgtgggctgaaggcacccggcctgggaaaaggaaacctgggtttgctcacagccagccaggtctggggcctcacctctt

SEQ ID NO: 349898 - DNA, 122 bp, Homo sapiens
actagggtaagtaatgccacaaagctttcctatattttaattgcctttttcttgattcagcgtttacttgggtgctgtaaacctttgactgttttcgagacttttaacaaagttggttctga

SEQ ID NO: 349899 - DNA, 122 bp, Homo sapiens
tgcgcctccagccaatcggggtgcccgtccttaatacaaccagccagtcagtgcccggcgcgcgacaccagcagccagtcaggaagccctgcgttcatgcttccagccattgtcggagtgtc

SEQ ID NO: 349900 - DNA, 122 bp, Homo sapiens
cccaacccctggccctgccctgtgggcagcagtgccaggtctggcactcagaggttaggccgggcgcagggagggtgcgggctccgcagcgagcgcgccgggcggcctctaggagccgggtc

SEQ ID NO: 349901 - DNA, 122 bp, Homo sapiens
gccaggaagcagttcagcttcactgctctgttcacaccctgtgcctaaagccctgtctctcggtctgcttagcttaactgctatccgacttctcgttaagctcctgccttctggaactcttc

SEQ ID NO: 349902 - DNA, 122 bp, Homo sapiens
ccgtggccccgccacacgagccccctgcttggctgcagcgcgctcagcgggcagcgggtccggccaagccaaaggcaggagtcagcaccacggacagcttccgctggatctgccgcccctcg

SEQ ID NO: 349903 - DNA, 122 bp, Homo sapiens
gcaaggtttgaaaactgattggctgggggatgaggaaaaggcaggtctttaaggtcaatccgtgttttgctttaagttgttagcgggtggttttatcacatattgtagaatatgtcatttca

SEQ ID NO: 349904 - DNA, 122 bp, Homo sapiens
tagactgtaaagcagaggtactttaaatttctacttgcttcaccctaatatggtcagttacgtctgtgtatcagtcagatatattaaacagctttttagaccagtggttctcaaaggtgttg

SEQ ID NO: 349905 - DNA, 122 bp, Homo sapiens
ctatttggcccaagctatcctcccgcctcagcctccggagtggctgggattacaggcccgcgccaccacgcccagcctcaatatctccttgacgatgaaatgcatagatgaatgaatgaatg

SEQ ID NO: 349906 - DNA, 122 bp, Homo sapiens
tgacatctaggggaaaccagccctaataggagacagcttgaaaatcagaacgccttattccgtttcctgctgaaacaaggctttaagtcctccaagcctcagtttcttcctctgtgaaatgg

SEQ ID NO: 349907 - DNA, 122 bp, Homo sapiens
ctgagattaggagttgagtaagttcaccatggccacccggctggacattgactaagggaacgtggtctccagcccttgctctggaattttccacatcgtgcattgtctgtcaagaaaactac

SEQ ID NO: 349908 - DNA, 122 bp, Homo sapiens
aagggcagcctaaggtttaatcgccagagaggacgccttgctccagcgtttggctccccacggcggtcccacagcgccacctagcggcccccccgccaggagaacacgcgtccctcactacg

SEQ ID NO: 349909 - DNA, 122 bp, Homo sapiens
cagggtgtgcatacctatttttatggcagctactatagtactccatggaactgaagattacgggaaagagtgagcccatggatactatctggcaaacatcaaagtataaggatacgacatcc

SEQ ID NO: 349910 - DNA, 122 bp, Homo sapiens
ccatccgcaggggtctcctgggaggaacccaccagcgataggaacactgaagctgggctacggcgtccgcccgagccttttcttaaaggcgccgaccccggaagcggggcgtccgagggagc

SEQ ID NO: 349911 - DNA, 122 bp, Homo sapiens
atctgactatctctcacgtacagtctcctccctgtacacgaaggagactctgctctaacacgcggatctgactatctcgcacgtacagtctcttccctgtacacgaaggagactctgctcta

SEQ ID NO: 349912 - DNA, 122 bp, Homo sapiens
acctatcttttctgcctcctcagtatcttagctaagactactgttgtcaacaggtacttacggatgtgctgtattgaggcagcgcttctgagcaggcacctgtggtgctgccctaaggaaac

SEQ ID NO: 349913 - DNA, 122 bp, Homo sapiens
gtagcactttgaaaactttttaggccagctttaatttaatggccctactgatattcacatcgaaggtgactaacaatgacaaaggccttatgaactgtacagacaatacagaagattattct

SEQ ID NO: 349914 - DNA, 122 bp, Homo sapiens
agcaattctcctgcctcagcctcccaagtagctgggattacaggtgcccgccaccacgcccggctatttttttaaatattgttagtagagacggggtttcaccttgttggtcaggctgttct

SEQ ID NO: 349915 - DNA, 122 bp, Homo sapiens
cactctgctaagtgccctgcttggaaaggctgtgggctccctgctgagaaatactgcgagcggctttgtcagccggctgcctggtgccagttctgctgcagcctgggagggacactgtggca

SEQ ID NO: 349916 - DNA, 122 bp, Homo sapiens
acataaggaaaaagatgctctgtgtctcgatatgaagtcttctgcttctgtagatttgttcgtagactcgtcagactctcacagccctctacacttgacggaacagaccccgaagaagcctc

SEQ ID NO: 349917 - DNA, 122 bp, Homo sapiens
ccagcgcccaatgcctcccccttcaccccagggtgccagtggccaggtgactgcaggggacgctccagcctgggctgtacaggagcagggcccagctgcctcacccggcccacccagtgcag

SEQ ID NO: 349918 - DNA, 122 bp, Homo sapiens
tctctttgggtctttgcctggctcctactctctctactcccaactcagtctctctgttgtcggtcatgtctctctgcctgtctgtttctctgtgtctctctctctttgacctttagtcttgg

SEQ ID NO: 349919 - DNA, 122 bp, Homo sapiens
gagaagcggctcccagtgcttagccggcctgtcggagcttcctctgcctgtcagcgccctcgcctcttagcacatgttttcaaggtcatctcctaacaccggctgccagttgcccaatcgat

SEQ ID NO: 349920 - DNA, 122 bp, Homo sapiens
ccagcgtcccgcgggagccgggacccggcggccaggcccggctggtgcttctctgggcgccgctgaaagcccagctccgcaggagctacaggcgtgagacccaccgggacccgcgagcggga

SEQ ID NO: 349921 - DNA, 122 bp, Homo sapiens
gctaacctaatattctttagctgttgtttcagaggcttttcgagaacaaaactgccgccccgtcttggccttgccgcttttcacccatcactctactgagtgtgtgtctgacttgtttatct

SEQ ID NO: 349922 - DNA, 122 bp, Homo sapiens
cttccacggcatctctgccttcccctggcctctccatccaccgctctccctcctgcctcacgccgcacctccacttctgcccatgcttgtcctgtgaccctcgtggtcatagctggttgtcc

SEQ ID NO: 349923 - DNA, 122 bp, Homo sapiens
gaattacatcacaaagcgtaacctccctgcagggcgtggactcagaggggcaagagagaccgcagaccaggacccacagagacccttgactgggccacaggcatgaactaagagtgctgaag

SEQ ID NO: 349924 - DNA, 122 bp, Homo sapiens
tcaaagttctagttcaaaagcaaaaaaacccagccagccactggttttctttaaagcctacgacctctaagaacagtgtttaaatttttaaatgcatgaaaaacaatcagaacaatacctca

SEQ ID NO: 349925 - DNA, 122 bp, Homo sapiens
gtcccaccgccccgtgagaggaaaaagcggatggtgcttcctgttgcccccaaggttgtgcgtctgaagcctacgagaaagttcgcctacctggggtacctggctcacgagattggctgaaa

SEQ ID NO: 349926 - DNA, 122 bp, Homo sapiens
gtccggagctgcgccccgaggtgggggcgggggctcccttcttttcccctccccttaggtcgagtttcacgcgcacgtgactcgcccgctggtcccggacactctccctctggcacagcccc

SEQ ID NO: 349927 - DNA, 122 bp, Homo sapiens
tgccaccccaccaagccactcaggctcctagcagagaccccgcattcctccctctcattgcgtgcacacaccttatagatggcgaaggcttcgagctccaccgtgtaaaggcagttggggtg

SEQ ID NO: 349928 - DNA, 122 bp, Homo sapiens
ggagagcctttcccctcgcaaagtgcactgtgtatctttgcctccttgtttttaggatatcgggcctcagtacccgcccacaggaacatatttgttggggcataaaagccacgcagttagtg

SEQ ID NO: 349929 - DNA, 122 bp, Homo sapiens
aactcccgctcacctgtgtgtcacacacagagaacagcaatgaacgtcctgcaaaactcccgctcacctgtgtgtcacacacagagaacagcaatgaacatcctgcaaaaatgccactcacc

SEQ ID NO: 349930 - DNA, 122 bp, Homo sapiens
gcctaggatccagaaacttcctgagcatggctctcagctgtgctgtccttcctccttctgcgctgagcctcttcccggggcaggagcacttctcaggttcatgggcggggtcaggcccagga

SEQ ID NO: 349931 - DNA, 122 bp, Homo sapiens
caggctccgagacagatcaagctttccctccccctcccagctctcctagagtcaagaggacgccctcctgccgcagacttcctgcgcaagcgccatcccatgtccccgcctccaaaccaatt

SEQ ID NO: 349932 - DNA, 122 bp, Homo sapiens
cggtttccgcctttgttctctctgctaccagtccttgagggcccagtttccaggcctgggcggcacagccgtcagccagacagtccaagtgggaccctctagctgaggctaattatgaagaa

SEQ ID NO: 349933 - DNA, 122 bp, Homo sapiens
tggtgaatttccactgcttttgcaggtcccagctgtgggctctcctttccagaatgtctccgtttgcaggcttgctcttccattacatctacggctcttagaaagcaggggctgcgtgtggc

SEQ ID NO: 349934 - DNA, 122 bp, Homo sapiens
cttgacttgtgtagtattgatgggcattttccctcaatcttctgccattataaacaaggccgggcagagtggctcatgcctgtaatcccagcactttgtgaggcgaaggcgggcagatcacc

SEQ ID NO: 349935 - DNA, 122 bp, Homo sapiens
ctctgtgcggacagggccggacagctggcggcccgctccggatgaggcacctcccctaggcggcagacacatggggaaaaactgagctctgagactattttctaagcttggtctattctgtt

SEQ ID NO: 349936 - DNA, 122 bp, Homo sapiens
ctgcgtgagttcctataagccgccttctcatcatctgaacaagcatcaaacggctaccagcgagcctgtgatcacacgtgggcccggccgcaccggggcaccgccgacaccggcaccccttt

SEQ ID NO: 349937 - DNA, 122 bp, Homo sapiens
gccccgtgtgatcctgggggagataatcatggccccgtgtgatcctgggggagataatcacgacaccgtgtgatcctgggggagataatcacgacaccgtgtgatcctgggggagataatca

SEQ ID NO: 349938 - DNA, 122 bp, Homo sapiens
aatgatcattgttattttgttttgttgggactccatcagaactttgaatcctttcttccccgacacttccttttcatatttctttgttcagtcatgttttgtgatatgcttgaatagtttta

SEQ ID NO: 349939 - DNA, 122 bp, Homo sapiens
ggaagggctctggggaaaccttcgcagagccactaatatcttcctgaagaccctattcagcggatttgccatccccacgcgctggtgacaagccacatctcacttcagcgtttgaagccaac

SEQ ID NO: 349940 - DNA, 122 bp, Homo sapiens
accgccattggccatgaactgtactgggttggggataccaggtgggaatggggaggtgggcggttctcaaaggcaagagctagaagggcctaagagattaacttctccaatcatttcttgat

SEQ ID NO: 349941 - DNA, 122 bp, Homo sapiens
cctccaaggaaacacaagagaagtcctgcaaaaactcactgtggatctcccaaagaaacacggtaaaggtcagtcagccttgcgttttgcctgtttaagaatggaaaagtgacctaacaatg

SEQ ID NO: 349942 - DNA, 122 bp, Homo sapiens
tcaggagatctggagtgcagttttcccgatctctgctctctcaggaaagtcgagtcacgccgagagacaccctgccgtgacaggtttcttcagcatccctaatgcaggtcaactccggccgc

SEQ ID NO: 349943 - DNA, 122 bp, Homo sapiens
ttttggacgctctggaaagcacctgtggccccagaggtaagcacagagagactcctttcccgtcaccgggtcgtatgcaccaacctgctcggacaggggagagggtgggaaggcagagggta

SEQ ID NO: 349944 - DNA, 122 bp, Homo sapiens
atgaaacatgcttttagttaaacaatcattttattgcttgagtacacagacaaatttatgcgaccagggcagaggctgtagatgattcactgaaaaagaaaaaaggggaaagaaagaaaatc

SEQ ID NO: 349945 - DNA, 122 bp, Homo sapiens
ggcaaaataacaaattgtgaaaatagaagccattgctcagcaccgtttctccatcaatgccgtgaacttgccttacttgaggaaaaattctttaactttggaatattgcattgaactcagct

SEQ ID NO: 349946 - DNA, 122 bp, Homo sapiens
attgacttgttcaggaataggtacccagcatgggagagacatgttttggaccgaagcctccgaaaggctattttagcttttgaatgttccccatctcctccaaggctgcagtacaaagatga

SEQ ID NO: 349947 - DNA, 122 bp, Homo sapiens
gcagtgcgtgccgccccttccaccgcagctcggagtcagggcttccgtgtgagccccagccgcaggcctctgaaacttcagtgcgtgctggcggccaccgcggtcacacatttgatctataa

SEQ ID NO: 349948 - DNA, 122 bp, Homo sapiens
aaatataatcatgctatgtagaattatggaggtaaataccaaaagaaaaagcataaagaacgaaaagtggttatctttgggtaggaagaggaagaggccttgttttaactatctgacttatt

SEQ ID NO: 349949 - DNA, 122 bp, Homo sapiens
ttcggccacagcaggtgggaaggacgcgcgggtctgggcggcgggagggacgcgcggggccgcggctcggcagaaaagctcgcgccccgaggtgacactggccgcgaggaaagcagctccga

SEQ ID NO: 349950 - DNA, 122 bp, Homo sapiens
gacttaactcctctgcacttctgtttacccatctgtgaaatggctagaatgtaatgtagacgctgcttgatttgtaaagagctagcctctgattcacctccagataacctgattcttcccag

SEQ ID NO: 349951 - DNA, 122 bp, Homo sapiens
gaatcgcgcggctggcaggtgcggccaccgggacgcgctcgcaggctagccagggacgtgcgcaccttcggggcgctccacagccctgggacgacgccaccaggtttcttctcttcattcac

SEQ ID NO: 349952 - DNA, 122 bp, Homo sapiens
tctctctgcctttgcgcaaaccattccaccacaccgcccccgacccccaaaacatccttccgtcttcaggtctcagctcagacagctcctagtcttccgggatgatcttcctaccaaggtct

SEQ ID NO: 349953 - DNA, 122 bp, Homo sapiens
atcacaccgctggccgccatctcaggctggttgtgcctgcgcggggcccaggaccacctccggctccacagccagctggaggccgtgggtctcattgccctcaccatcgccctcttcaccat

SEQ ID NO: 349954 - DNA, 122 bp, Homo sapiens
tctccccggctggagggaggcaaagggtcgagggcaggacgagcccacaacccccccacccggtctagcttccgcgccacgcgtgggtcttacccccaggccttgtccttcccaggccccct

SEQ ID NO: 349955 - DNA, 122 bp, Homo sapiens
tcaaggcccatcaccaacatcaggaaaaacaatcagggctgtccaacaaaggattcgactcgccttctctggaagcattcaggcggatatgggggttggccgcctgttgaggaggctttaga

SEQ ID NO: 349956 - DNA, 122 bp, Homo sapiens
cagtctccgcgcattacgtcagtttcaagacaccaacactattaatatcaaaggagccttcgcggaggaaagcgccaccccagaccgagctcccttaaagagacagcgcgcgtccccgcgcc

SEQ ID NO: 349957 - DNA, 122 bp, Homo sapiens
aataatccctacctcaaggagttgttgggaggagtaagtgagggaattaagttcccacaccgggacgaatgaactgagaattatatattgtagctattgctatcattagatcccaggttttc

SEQ ID NO: 349958 - DNA, 122 bp, Homo sapiens
cgacgcctgggagagcttcccttgttccagggcccaataggagcacagggtggacgggggcgggtgtgcggcgagtgtcgcggatccccgggcgtgcccgcgaggcgcacacggagggacgg

SEQ ID NO: 349959 - DNA, 122 bp, Homo sapiens
ccgagtgccccggccggggcctgaggagcgggcacagggcaaggcggcggacggctgcgtcgcccgaggcgaggaggagcgctggcggtgagtgagggcgccgcgggcgagcgggtcggcgc

SEQ ID NO: 349960 - DNA, 122 bp, Homo sapiens
tcaagggggacttgcacatttctagctcagctttcctagaaggataatgctgccatccaccgaatcatagaacctagaagctgggggacaagaggaggcagagagagtatggtaacaggctc

SEQ ID NO: 349961 - DNA, 122 bp, Homo sapiens
gactgctggagcagccgggggcggccccccgggacccgacccggagctcgggctctcgcacgctgctcctgctgcaccgcgcgctgcgctggtcccagctctgcctccaccgggtggcgacc

SEQ ID NO: 349962 - DNA, 122 bp, Homo sapiens
ggagcctgcagtggtgtgcgtggcccgggggtccccactcactggtctccaccgcccccacggcctcggtgcagacgtccacgcccggcgcgcacttcactgtcttcatcttgttcggggag

SEQ ID NO: 349963 - DNA, 122 bp, Homo sapiens
tttaataattttttaacaaggaactgggtattttcattttgtaccagatcctacaaattgcgtagccagtcctgactgtacaagtgatggctaccagctgggcatgagagtcttgggagttt

SEQ ID NO: 349964 - DNA, 122 bp, Homo sapiens
acctatttacgaaaattattacttcctaggtaaaataacgttcaaccagacagccattgtcgccattcgacggaaggaaaaactgaggttccaggagcttaagggtctgggcccagttcagg

SEQ ID NO: 349965 - DNA, 122 bp, Homo sapiens
ggaggtttgcttcctgcaagatgagtacttcactgagtttggttttcatttttcctacaccgaagccacctctgtccatccaatgttcatgtctgtccgaggctgcgcaggaggttacgtca

SEQ ID NO: 349966 - DNA, 122 bp, Homo sapiens
tttgccagtgattcccagagctcttacagttgtcccaggacgctttagcacatggccacacgactcccaaggttgacctgggagttattagaagatcagagggctctaatgtcttcccccaa

SEQ ID NO: 349967 - DNA, 122 bp, Homo sapiens
ggaggctgaggcaggtggattgcttgagcccaggaggctgaggctgcagtaagtggcacccgtatctgtgccactgtgctccagcctgggtgacagagcaaggctctgcactatccccagaa

SEQ ID NO: 349968 - DNA, 122 bp, Homo sapiens
atggacacacatgccctttaggaagatggctgtggcgacgatgtgaagggtgctgcaggacgagactgaacagggaaaaacaccgaaggatgaaagcaaacaagaaggacgtggtgaaggtg

SEQ ID NO: 349969 - DNA, 122 bp, Homo sapiens
gccccgagcaccgcgcgccaacggctggcccacccctagcgcatgcgccccggtgcccaacggccaacacacagcgctctgacacaccaaccgccccgcccccaccgtctcgcgaccctttc

SEQ ID NO: 349970 - DNA, 122 bp, Homo sapiens
aagacctccccaacttcccaggttgaactacagcagaagcctttagaaagggcaggaggccggctctcgaggtcctcacctgaagtgagcatgccagccactgcaggaacgccccgggacag

SEQ ID NO: 349971 - DNA, 122 bp, Homo sapiens
attccccctccccttcccctgtcatccctcccccagacggcaacccggcgggcacaaggtcggacgacctgctacgtaactcgcgcgtgtgactgcctagtaacagtgtctcgagtcggaag

SEQ ID NO: 349972 - DNA, 122 bp, Homo sapiens
tgactccacagcagcccaagaacatacacatcaacccgcacttcaaagggacggtggtcacgcctgttcaaggtctgtgtttccttttactattgtaaagcatagatggccccagcttccaa

SEQ ID NO: 349973 - DNA, 122 bp, Homo sapiens
catgcacgaggccctgggttcaatccccagcacctccatgtattatgctcatttgcctagcggcccagagcagggacccttggcagaaaacagcacgatttgcttcatgagtggcaacagac

SEQ ID NO: 349974 - DNA, 122 bp, Homo sapiens
atgttgtctcaccgcttacaaaggcttttccctttaaggttttccacgtttctttagagacggtttctgttgccatgtcacgagtttttcccgtgcagcgtctaacctgtcagcaccccacg

SEQ ID NO: 349975 - DNA, 122 bp, Homo sapiens
gacgcgcacctttgaggcgggtcgaagatccttctgccgaattctattgatgggcccaagcgtaaccaggctcttctgattggccggtgtacttcagtttccgtccaaggtccgcctcctac

SEQ ID NO: 349976 - DNA, 122 bp, Homo sapiens
gtgctctggccttacctcctaccactgtccctcccctttgctctccccactccagccacacgggccatgggcagtttcctgaatcccagacaaaccccctcttgagacctttgcactggctg

SEQ ID NO: 349977 - DNA, 122 bp, Homo sapiens
gacaacttttcgaggccgacctcccttgctagtccgcactacacttgacctacctagaatcgctgtgtgtaggctctaggattctgggttttaaccaagctatccaagtggttcgtttgcac

SEQ ID NO: 349978 - DNA, 122 bp, Homo sapiens
gctggacagggctgagggccctgaagccgggcagtctcagggtaaccaggggctgggaatcgcggagggagcgggaggcccaccgcccgttcgcgcctcggccctcccaccactccgccgcc

SEQ ID NO: 349979 - DNA, 122 bp, Homo sapiens
aacaaacaaagctaaggttcttaccccacggcttgcactctctcagcagagctgcaggtgcgtggatgattcgttgacacggtcagaattggctgcaggagggaattgaatcgaggttttct

SEQ ID NO: 349980 - DNA, 122 bp, Homo sapiens
agctggggtacgggatcgagaaccaatccaagatggtgggcgtgaggtctggaagggacgcggcatctcagagcagcagagccctcagcacacaggagctgccctcggaagggccgaaccta

SEQ ID NO: 349981 - DNA, 122 bp, Homo sapiens
taagcaaacttatggaaatgtggaaataaatttcatacagctgataagtatggcatagtccggcagagacacactttgtatgataacattgaagaggaaataaagaagaacagtggaggccc

SEQ ID NO: 349982 - DNA, 122 bp, Homo sapiens
ctgcggccctggctcctgttcccagtcggagtgaccagccctgggcctccttcccagcttcggccctggctccatgtggcccatctgagaggctggcctcaagcccggcggcaactccacat

SEQ ID NO: 349983 - DNA, 122 bp, Homo sapiens
tgatggcagatgcgtttggcttggtcttgtaggaggccctggccctgccgacatggccaccgcagtcccaacggcgcgctaggttggcgagatgaagaggagtcgcagtgccctgtccgtgg

SEQ ID NO: 349984 - DNA, 122 bp, Homo sapiens
gtacctccttcccagaactgttgaagagtccgtctgccccatgtgtaggagggaaagaggcgcttcaggccacacagggacacagacaagagggagagggagtaagcataggcaatgtggga

SEQ ID NO: 349985 - DNA, 122 bp, Homo sapiens
actgcaagtttgcctctcccaccagtatgggagctgccgaagcggcaagaacagcgtttccgtccatcgagcgccaggtcaccagtcagctccagtcctattttgagttgaagtaaaagctc

SEQ ID NO: 349986 - DNA, 122 bp, Homo sapiens
tcttgctagacagtcttgtcaggctctccaaaggcaaacactggcggaaaattgaaagagcgggaaagggaaaagccagatgcaaaaacaggcaaccacacggaatgcagctgcggaaaatt

SEQ ID NO: 349987 - DNA, 122 bp, Homo sapiens
acccaatatgtcccaaggagtagctgtagccttagtgatccagaaacacaaaagacaggtcggtcaggtccttcaccctctggagggcaggtgggggtggactgatggcactggaggggaca

SEQ ID NO: 349988 - DNA, 122 bp, Homo sapiens
aacgggcctgggtgaaaggggcctgtggagtttaaacccagtgaatagggtcctaagtgccgtgtcaggacgaaaagaaggcggaggtcttgggataggagctggcccgggggccgggggac

SEQ ID NO: 349989 - DNA, 122 bp, Homo sapiens
cttttacaatctatatataacacccagaacaacatatggcagagattctgaggatttctccgttcacagtgcccttagtttctctgtacattttttaatggcatgccctagactaaaaaaaa

SEQ ID NO: 349990 - DNA, 122 bp, Homo sapiens
ctgcttgtgagaggagaaactggtgacagtgtcgcatggacactgtcggggaagccgagacgtagacctggaagcctgtaccagaggccttgtggacagctttggagcatgcatcttaaggc

SEQ ID NO: 349991 - DNA, 122 bp, Homo sapiens
ttcatagacagtccagtggcgtgatcttaaagttatcaggaacttgtgttcaagagtactcgtcagagtattttccataaatcttgaagaagaagcaattttgaatggtagctgattgcaaa

SEQ ID NO: 349992 - DNA, 122 bp, Homo sapiens
tgagaccagaaggacaagctaaattatgcattcttacttgagggatcggaatggatggggcggagttctcttcaggctagccttctgggaaaagtggatgtctttttcagagattcatcata

SEQ ID NO: 349993 - DNA, 122 bp, Homo sapiens
acagccgcgcccccggagagcggggacaaaggcgaggctccgcccgagccacacacaaagcggagcgacccccgcccaccaacccctccgaggcccgcagccccgcccgccgccctgcagca

SEQ ID NO: 349994 - DNA, 122 bp, Homo sapiens
ctttgttcaaatgatttgcatacattatgcaaataggtagaactgcccgaagaatgcctacgctgcgtggtgcggacgaaacgcttcccggggcctttggattggtctgtctagccacctca

SEQ ID NO: 349995 - DNA, 122 bp, Homo sapiens
ataaatagcagtaccattttacaaaatcagaagctaggaaaatgtatttggcctttgactcgtggttggtcctcagtgaatgttcagtgaatagaattataaaatctctttgttcttttttg

SEQ ID NO: 349996 - DNA, 122 bp, Homo sapiens
catgccgggccctcgccctctgggggcctcagtagtctctgcaaaaggtcaggggtggtgcgctatctttagggtttaattttttgcagagatagggtctccctgtgttgcccaggctggag

SEQ ID NO: 349997 - DNA, 122 bp, Homo sapiens
ttttagcagctcagtggtgacatttcaggctgactgcttccttttggttgctaggcacttcgcctttctcgcaacagaggctgtaaagtgctactgctgttgctattgctggtagtgtttgc

SEQ ID NO: 349998 - DNA, 122 bp, Homo sapiens
cctcatcttccactacctgagcatcttcatcatactcctcctcatgctcaccctcctcctcgtcatccaggccctccacgtggtcctcaatatctgagtaaggggcctccttgtggtcccag

SEQ ID NO: 349999 - DNA, 122 bp, Homo sapiens
aagcttaaataccatggcaagagggaaacagcagctagcagtggtaacagacataaaaggcggctgactgtcttcagtgctacctttggcagcagtacagatggactttgtaggccactggc

SEQ ID NO: 350000 - DNA, 122 bp, Homo sapiens
gacccctgcacattcactcacacacacactcatacagatgcacgctccaacatgcaggctcgtgcacacacacactcagaaacactgtcacacacacccctttccacacagccagcatgcca

SEQ ID NO: 350001 - DNA, 122 bp, Homo sapiens
tttcgctcgtcaggaagccgccatcccttccttcgttccttgcgaggagcgactagaacccgagttctctgagcacaccgtgccgtcagctggcccgtcacgcactcgactccgccactccc

SEQ ID NO: 350002 - DNA, 122 bp, Homo sapiens
cccttgtccatctcacttttctccagggctcctctgtgatctcctgcggcacacactccacgccaggcccttggccatcattttaaacacacgatgggtgacagaccacctggctgatgtgt

SEQ ID NO: 350003 - DNA, 122 bp, Homo sapiens
ttttattgacaaatgaagattcagacttgaacgtctttaactttcgaatttgttctgcagcgaatgagaaaacagagtcatcctctgcacagcaagtagcagtgtcacgccttagcgcttcc

SEQ ID NO: 350004 - DNA, 122 bp, Homo sapiens
ggctgccatctgcctcctcaggccagagcccgaggcgccgccagcggtcaggtcccgggccggctgccagccacaggcccaagtaaacgctgaatgaagggcagatggaggaacctgtcccg

SEQ ID NO: 350005 - DNA, 122 bp, Homo sapiens
ctccagcgcccgcaccactagcggcaccagcccggccgccgcctccggcccgaaacggcgcgccagatcctgcagctcagtgcccagggccccggctagatggtacacaagctccgcggccg

SEQ ID NO: 350006 - DNA, 122 bp, Homo sapiens
aacctgaagagccagcacaggcccctcctgcccaatctactcctactccaggtgtggctgcggctcccactctggtgagtggtggtggcagtaccagtagcaccagcagtggcagcttcgaa

SEQ ID NO: 350007 - DNA, 122 bp, Homo sapiens
cgcgcgaggcagggcggagctgcgtactttgtccgcccgcgcggcccgtcgctcgcgccgcggcgggaaaatccgacctggccgcgcaccaccgccccttctcggccctcctgcgtttgccc

SEQ ID NO: 350008 - DNA, 122 bp, Homo sapiens
aatttccatttaatgggcgcctcctatatactaggcactgttgtgggccagtgaatattccgagcctaggcaagtgcctggtacacagtaaacgcaggatttctggagtgaataaataagct

SEQ ID NO: 350009 - DNA, 122 bp, Homo sapiens
atttacaactggttttcccttttggggggtcaagacgctatttctggcctcaaagagtttcgtgggctggtagtggcgcttccagggtctagaggaaaaggcgggcccgcgtcagacctccc

SEQ ID NO: 350010 - DNA, 122 bp, Homo sapiens
cactcctttggcaatctgtgtctatcttagcagcctgtggcttcaaccactcagctacctcgtcaggactatttgtgtctatcttaaacaatgagtcatctacctgtccctggtaggatatt

SEQ ID NO: 350011 - DNA, 122 bp, Homo sapiens
ccatcaggtcccacgctcaccccggacaagccgcgctgggactccgggttcttccattctcggggtttcttcgggacctgaggcttcttagagatccgagacttctttaagatgtaagcatt

SEQ ID NO: 350012 - DNA, 122 bp, Homo sapiens
accaatcccagctgccatagctccgcgctcccgggatggggctgtgttgcccacgcctcgcggcgcgggcggacacacaccctgctaggactagctcagtcctcccagtttcccttccgaga

SEQ ID NO: 350013 - DNA, 122 bp, Homo sapiens
caaggggtggccaaaggcacctgtccaagaggtgggagggaccacacctgggggcagggacgagtcaggcacagggaactccgccagcctagaggatcaaattcctccggggtgaactctga

SEQ ID NO: 350014 - DNA, 122 bp, Homo sapiens
tggtgttagcttgcatcaccttgtgttgtgagctcaaataccctgttcccaaaccaatcccgtaggcttacgagtctccctacacccagagttaggaagatggtcactgggtgggggggatg

SEQ ID NO: 350015 - DNA, 122 bp, Homo sapiens
caatcagctataataagataaaagcctatcattagagaccccaagcaaactcagagtggccgccatagccccattctgtgggactttctgtccttgcctgtatttttccttctagcaatgct

SEQ ID NO: 350016 - DNA, 122 bp, Homo sapiens
cagatccgagaggggcggcgcgctccgcccccgggccgcgcacgtcggtgctcggcggcgcgcacgcctgcgggagccctctccaggcaacctagtgctgatcgctcgtgccggtgcggccg

SEQ ID NO: 350017 - DNA, 122 bp, Homo sapiens
aggatgccagtaccgcccgcaccagcagccagtactccgctgggatagttaattgtcgagcgcggagcccagttcctaacctgcagttacctgtagctgccacggcggggacggggcttggt

SEQ ID NO: 350018 - DNA, 122 bp, Homo sapiens
ggcaatcgttagtctccgggccaacccaggacgatgctttttggcgttttcaggcaccagcgctgccacctgctggcaaaaactttctctttcggttgtgagggggaaaagcaaaaagcatc

SEQ ID NO: 350019 - DNA, 122 bp, Homo sapiens
tcaggtgtcccgggccagcgcccaggtgcggtggttcaagggcagtcaggagctgcagcccgggcccaagtacgagctggtcagtgatggcctctaccgcaagctgatcatcagtgatgtcc

SEQ ID NO: 350020 - DNA, 122 bp, Homo sapiens
atgcggcggtggtccccgtaagtggacaggtgcgccagtggtagccctgtcggctgctttcgacctaccgcccccagcgccccttccgcgtggtccacctgcacagccgggccccggatctg

SEQ ID NO: 350021 - DNA, 122 bp, Homo sapiens
ctcactcaaatgggtctgtgcctataaaaactctgagaccctagcagccagaggcactggcgctggatgtggagagaagcacatcagcggaggaacacactcaactggctggacgtggagag

SEQ ID NO: 350022 - DNA, 122 bp, Homo sapiens
attgctgtgatgaggcccaggggtccagagttcctgctgcagaaggcttcgctccagccgcggagggacctgggctgtgtctgggggagggtggagcagcattgggtgtggaacagaatagt

SEQ ID NO: 350023 - DNA, 122 bp, Homo sapiens
aggaaggggttgcccccgccactccgcaggctgcagagggaagagaaagcgcccccgtggcgcccccagggccgtgcagcccagacctagccccgcagccccacataccccagcacctccga

SEQ ID NO: 350024 - DNA, 122 bp, Homo sapiens
aaaaggcggctgtgagcttccctgagctcggcgggccttccccgaccccgggctccgcctcggtggcagagctcctgaggccttcacatggcgcaaagtccacgcccaccgggcccggctgg

SEQ ID NO: 350025 - DNA, 122 bp, Homo sapiens
ggctgggagaacacccctgtggaggggtgtaacttggcgcattacgaggaactagagaaacgtgcacttttcctaagacatcaggaaaggagcgaggagagacttatccattttgtcccata

SEQ ID NO: 350026 - DNA, 122 bp, Homo sapiens
tgagctgcccgcggccgccgggacctgcactgccggatagctcggcatgcctcggctccgcggtggaatctggcctggcccgtcatccagttcctgtccccggcaggctccggcccagacca

SEQ ID NO: 350027 - DNA, 122 bp, Homo sapiens
gccctctccaggggaggtgagggactcaagaatcgcgccctgcttctgtccccaccgcgccgtccccaagcccacgcagtgaaaagaccacccttgaggctgattccgggtccagctgggag

SEQ ID NO: 350028 - DNA, 122 bp, Homo sapiens
cagcctggggtggccagggaaggggtgtcggctggatgagggggacctggcttctcctggcgggttgggacaggagaggaagacacggaaccagacactggcttcttactctatcagctgga

SEQ ID NO: 350029 - DNA, 122 bp, Homo sapiens
agtaagatgaaaggaagaagcatccttttttgaccaaggcattggagaccttgaatgccccggagagggatttggataggcagagggaagctggtgcaggttttcactgaagccattgaaag

SEQ ID NO: 350030 - DNA, 122 bp, Homo sapiens
gcttttctagccattgacgaaccccgtcctgtttttcggagttttgagggctcagagggccgcggcgggagcggatcgccctccctaccccgcacccccgtcccagcctgggccagagccgc

SEQ ID NO: 350031 - DNA, 122 bp, Homo sapiens
ccgccggcgaggcggatgagggcggggtgcggacccgcttccggttgggcggtgcttgcgcgcgtgagctgagccggtgggtgagcggcggccacggcatcctgtgctgtgggggctacgag

SEQ ID NO: 350032 - DNA, 122 bp, Homo sapiens
ttaaaaactgagggatctagtacaatgaatattagaggacaattggaagcctctgctgcacggaggatacaaggacacttggaacacacacctaccctcatgatgctttggtacagtagcag

SEQ ID NO: 350033 - DNA, 122 bp, Homo sapiens
tatggaggcaaacatgattgttttgcaagtgtatagcgataagcatgggtatcatcagtgcggcaagaatgtttttaggatatgtggctatgaacctttaatataaacatatgactatgatt

SEQ ID NO: 350034 - DNA, 122 bp, Homo sapiens
actgtcttgaggggggaggaagccgaacaacaagaggaaagcagcgttcgctcctgatttcgcacaggaagtccacagcacctcctgccaaagcgagataagaaagctcccatgcactattc

SEQ ID NO: 350035 - DNA, 122 bp, Homo sapiens
caacttcacgctgcatgcgggcgacgagctcactcttatgggccaggcggagatcctgtgcgccaagaccaccaaggagcgctcgcgcttcaccaccctcctgcgaaagctgggccgggccg

SEQ ID NO: 350036 - DNA, 122 bp, Homo sapiens
tctatgtgtatcccagaaacctacttcacatgtccttgcttcctaactcactgccagaaacgtgtgagtcattcgtgacattttctcaccctcactcaacatactttgttatctgccacatc

SEQ ID NO: 350037 - DNA, 122 bp, Homo sapiens
gaccgctatgtggccatctgcaaccccctgagatacatggttattatgaacaagaggctgcgtatccaacttgtcctgggggcctgcagcattgggctgattgtagcaataacgcaagtgac

SEQ ID NO: 350038 - DNA, 122 bp, Homo sapiens
gtccccaggctgtgagggtgacatatgggaccgggagagctgtgggggccaggcggccatcgatagccccaacctctgcctgcgtctccggtgctgctaccgcaatggggtctgctaccacc

SEQ ID NO: 350039 - DNA, 122 bp, Homo sapiens
gggcggggaggaattccggttctctgggactttccaaaaaaggcgaagatccggtgccggcggctccgcctccctagcccttgtttgggagccattccggaaaattaaacttcggaaagaaa

SEQ ID NO: 350040 - DNA, 122 bp, Homo sapiens
accccggccggaagacacgcaccccggccggaagacacgcacctgaggatggagagaggccgtctggctactacgtggcagtcacgtcagactgggacacttcctgtttgcagagaactata

SEQ ID NO: 350041 - DNA, 122 bp, Homo sapiens
ttccacttgtattctcacggcccccgccagggaaatttgcccacccggagaagtaaccaacgtccttatgttttgtgtcctgctccagccgattcatgtttacagcgagtccctcacacccg

SEQ ID NO: 350042 - DNA, 122 bp, Homo sapiens
cttgcagaaaaccaaaaaattgaaaagtgacaaactggcacgtagctgtgacggcgagagcgctctggtttaagtcattgttgtgaactgcccgtgaccactgcgcctgacttctaggccca

SEQ ID NO: 350043 - DNA, 122 bp, Homo sapiens
catggctccgtcttaaaggggacgcgggcggcagaaagtggagctgggctggtgtgcgcgcggccggagtctgtggagctggaaattcaccggtccaggaagacgtctttcccgcgtcccag

SEQ ID NO: 350044 - DNA, 122 bp, Homo sapiens
tgcccattctttaagtcacggatgcccaatgtgaagagatcacatatgttcatgatgccccgtgatcatcattgtcatgctgttgcctgaagggggaccaggaatagattggcatcctggat

SEQ ID NO: 350045 - DNA, 122 bp, Homo sapiens
atgctgctgactccctgcccaagggagcgggactcggccaccgcctaccgtgagtgcagccgtgggtttcgggttccagggaggcaactgcccctgggaccccactccctctcagtcacctt

SEQ ID NO: 350046 - DNA, 122 bp, Homo sapiens
cctagtgaaatatggcacttttaatgtaaaaatgcacattcgtctactctattgcctcctcgctcacagcaggggagtgccaaactcgatattttagctcacctaagagaacaacctgtatt

SEQ ID NO: 350047 - DNA, 122 bp, Homo sapiens
gagggaggggttgaggcggagtctgcaatgggggctgtccagcagtagcaagcagcgggccgatcctggtggagggttgggaggctgctgtcattttatgggtcggcagccagagtgagagt

SEQ ID NO: 350048 - DNA, 122 bp, Homo sapiens
gactggggggcctttctgagctgatattctgttgtgaatatctgtgggataatttcacgtcgtcgcctcccctggctctaaggagcttggacgtgtctggaggttcatggaagccacctgca

SEQ ID NO: 350049 - DNA, 122 bp, Homo sapiens
aaacctggtggtcctgggcggccccgagaccccaacacatgcttcttcgaggggcagcagcgcccccacggggctcgctgggcgcccaactacgacccgctctgctcactctgcacctgcca

SEQ ID NO: 350050 - DNA, 122 bp, Homo sapiens
gagaagaatttgcttgctcagaagatgggagcgatagggactccctactctgactcctggcgcggacaggcgtagggaagaagtcgagcctccccacagctgttgccactcgggctgtcgcc

SEQ ID NO: 350051 - DNA, 122 bp, Homo sapiens
atttgtcaggtatgtgggttggaccaagtgacggttcttgaatctggctgtgcatcgaaacgtgtgcagggtttgttgaaggtggaggtgcctgggccccagtcccagtgggggttggtggg

SEQ ID NO: 350052 - DNA, 122 bp, Homo sapiens
ttggctgcccttccacacacccttccctgccggcccgcccctgccctccccctcttaccgcgcaccccgctgagtctgctctgccttgacctgcgacagtgcccagtgacccaataacctcc

SEQ ID NO: 350053 - DNA, 122 bp, Homo sapiens
taagcctcctagcagtcctataaagtaggcattatttttcccattttaaacaggcaaaaacgattaatgtgagaattgtccaggacttaccaccacttccagaccaccaaaggtaatcctct

SEQ ID NO: 350054 - DNA, 122 bp, Homo sapiens
ctgttccaggtcccgagaacgtgatgctctcaagtaactaatgggtcctaggggtgggaccgtccactgcccaccacgtgggagggtccctagcgtcaccttcttggcgcgcggttccccgg

SEQ ID NO: 350055 - DNA, 122 bp, Homo sapiens
acctcttggacctggtgagtccgtgtccccagtccctgcggggacagctcaggaagagagcgggttccaggacagcccaagcatccgaatcaagttatctacaccttcgagactgagcaata

SEQ ID NO: 350056 - DNA, 122 bp, Homo sapiens
atagagctgatctgaatccagaggtaagtttccagaattaaagagctgttttatagactgcgtctttctacttcacgagtgggtagaaatcatctttattagaaaaaaaataagtgcgggag

SEQ ID NO: 350057 - DNA, 122 bp, Homo sapiens
tgggaggttaggagaggaacaaaggtcaaaggcacggaagcgtggcggggctgtgagcagcgaggggcccggggagcctctcctagctcagatgccagcctgattagtcgagctagtcctta

SEQ ID NO: 350058 - DNA, 122 bp, Homo sapiens
cgagctcattgggcggggggcggggctctgcgctgccagaggcggggcctgactggagagcggccgaattgggcacatttgcgggaacgcagagcggagcgtggagagcggagcgaagctgg

SEQ ID NO: 350059 - DNA, 122 bp, Homo sapiens
gacgtggtcagcactttgacttggagtggatgatggttgggaagagggaagggtgcacaccggtgaccagttgtaaggccaatgcaatggctcccatagtgatggtgtcagtggagatgtag

SEQ ID NO: 350060 - DNA, 122 bp, Homo sapiens
ctcccttttctatgggggattaccaggcaaaaggtgagctctgctgccattttgaggactcgatcctggcagcgataatgaggtagtccaattggggagcctgggactccccaccaacttcc

SEQ ID NO: 350061 - DNA, 122 bp, Homo sapiens
caggaggggtgtcttggagactccagcgcatctgggctgccccgaagagggtacctggagcggagcgaccagggggattgaggacagggagagacaacttggggacggcagaagctcctgga

SEQ ID NO: 350062 - DNA, 122 bp, Homo sapiens
cccagatttgtaaacagaggctgtggaagccaaggtacacatgggcagatgcaaacgagccgtctgctgaggagaaagtcgaatgtgctcggggtgggtgcgcgtctgcctgaagcacgtgt

SEQ ID NO: 350063 - DNA, 122 bp, Homo sapiens
gctttctcatgatgcctagtgggtccttgggcagggttttgtaaatggatgaacttgggacgtctgccatggagttaacatgtatccagagtggcaagaaaagactaatgggagtgtattta

SEQ ID NO: 350064 - DNA, 122 bp, Homo sapiens
ggcgcgggctgcttggccagggcagttccctcagctccgggttggagccggagccggagccggatcccgcgcacaccgccacgtcaacctaaacctacaccgccctctccaccccaccgccg

SEQ ID NO: 350065 - DNA, 122 bp, Homo sapiens
tgctctggtttgggatcctggagttcctgcttctttcaggctacctctgttcctaaatgacgcttgtctttccctccctctctctttttattccctccccctcgggtttgcccctccctaac

SEQ ID NO: 350066 - DNA, 122 bp, Homo sapiens
gcactctgcgccagggtgagagccggcagagagacgtccctgggggctggtggcgcttggcggttctgggaagcaaaagttggtttggaatctttgttaacagctgggcatacatcttttaa

SEQ ID NO: 350067 - DNA, 122 bp, Homo sapiens
ccgccggcctcacctacggtgccgcaaaatgctggtgcctttactgcactttacgactagcgggagggggccgggctagcgggctactgggctgcggagaccagagcccggctccactgaag

SEQ ID NO: 350068 - DNA, 122 bp, Homo sapiens
gcagcgaagaggacgaatctctactgcaggagcttgcacggcccctggagggtcagggtccggaggagcgcacagtggaggagggcggaggagaggcgcgaagcgtcaggctatcgggagga

SEQ ID NO: 350069 - DNA, 122 bp, Homo sapiens
ttgggaggtcccggccccaaagcaggccgggccaaccgtccccccgggaggctcggggctcgggcggggtcacaattacacctcggctccaggcgaggacttaaaaaccaagtggtggggac

SEQ ID NO: 350070 - DNA, 122 bp, Homo sapiens
gaagttcaaatatgcactacatgtactattcattcattcacacatttgacaaatatttaccgagtgcccactatgggtcaaggactgtgctaggcactggaaatacaacagaataagaaaga

SEQ ID NO: 350071 - DNA, 122 bp, Homo sapiens
tgtttttatctggaaagtccgatgcacggccgtttctgtgtagcgggcagcatacccctgcggatgagtttttgtaggaattccagagtgctgcatgagactcagtatcttgtgactttagc

SEQ ID NO: 350072 - DNA, 122 bp, Homo sapiens
tttctccccgcggagctgcgctgagtctgaaataggtgtacgcgtcagcggggcaggaaacggaaagacagtgcagtaattggtggaaagctggaagtgggcacctcgagggcctcagcccc

SEQ ID NO: 350073 - DNA, 122 bp, Homo sapiens
aattcgagtctgccaggttctgggacccaatggggagaaacaccccgcaaatgacagactcgcctcaccaacacctaagcatgttcccaaaagctctgctccacggcctggccattgaacgc

SEQ ID NO: 350074 - DNA, 122 bp, Homo sapiens
ttgctactctgaagctgtaactggacaggatcttggccgaggtgcacagtgagcgtggcccgcccccttcctcatcgcgaatcagaatttctacacaggggcagctagaccagaaaaccttc

SEQ ID NO: 350075 - DNA, 122 bp, Homo sapiens
gttgtggaacttttcacgccacggtagtgagtctgggacagtttaccctcctgtccgagacgccatctctccatcctttcgcctcaagtgtgtaggggcaagattacgaatttttgatccaa

SEQ ID NO: 350076 - DNA, 122 bp, Homo sapiens
aagccctccctgctggtgtcctgacttcacttgtgttggagttcactcccccacgaccagcggtaccaccaagagggatggcctgggctgctgtcctgctcaacaggatgactcagctggag

SEQ ID NO: 350077 - DNA, 122 bp, Homo sapiens
gtgcaatatggtacaaacatccctggttaaagtaaactgagatcacctctgtgttggccacgaagggccgatgcatggaggcgcagcagcgaggacaccgccgggcgcctcccctccgatgg

SEQ ID NO: 350078 - DNA, 122 bp, Homo sapiens
ctgcgtccgcggggcagtactggtcgggcgcgacggtggagacacccagacgcagctccccgcctccatcaaccaagatggagggagctgcaggctcccttggagctgggctctcgcgggtt

SEQ ID NO: 350079 - DNA, 122 bp, Homo sapiens
ttaaggtcagacagtgccctatatagccattaagattgttttcataaataatccctcctgcgatgtgagcatctcagaaacatctggttgtaagaatttaaagtgtactggtttgtaatagg

SEQ ID NO: 350080 - DNA, 122 bp, Homo sapiens
aatgtgaatatgaggacacttggagcaaataaaaggtgaaagttaaacatttaagatcaacgaagaaaccaaaatccacatgatcagaccagggctaaggaaaattggaataggagatgtga

SEQ ID NO: 350081 - DNA, 122 bp, Homo sapiens
aatataaagatcgtagattatatagaccgtagggccgatgtatataatctattagggccgcgtcggccttgcaggcgggtctccaagtgaatgagcggcagagtcccatcatgcgcatcagc

SEQ ID NO: 350082 - DNA, 122 bp, Homo sapiens
tactgggcgtcactgggcaggttgcattacctctccaatttctttatctcccaaccagggcgggtagaccagatggtccttccagctggcctgtttcacagttctaaagtataccactatgc

SEQ ID NO: 350083 - DNA, 122 bp, Homo sapiens
aatggagctgtcagccctgaaaatagagatgctttggtagaagttaaataacaaagccgtcgaaagtgcattgctctccataggtccctggctgtaatattattcataccatcttccttttg

SEQ ID NO: 350084 - DNA, 122 bp, Homo sapiens
cccgtctcctctttctagtcctctatatgctatcagccctttttcctggtccatccctgtcgttccttctctctctgtctctggttctactgtcaagggccctagttccctttgttttactg

SEQ ID NO: 350085 - DNA, 122 bp, Homo sapiens
cgtcagccaagcgctttccgtgcaggctgataacagggtggtgccgtgcttcccttgggccgtggcaggatcctgctccaagggggggtcctgctccgagggggccggggtttctgttccaa

SEQ ID NO: 350086 - DNA, 122 bp, Homo sapiens
ggaggtggcggcggcaacggaggcggcggcggcggcggctgagacatagctcctggctctcgtgtctcgctccgcgtcccaggcgaccctcaaaagctcatagcccagacccccaccaaccc

SEQ ID NO: 350087 - DNA, 122 bp, Homo sapiens
aacttgcaaaattcctgaaaattgaagaatcaggtctctggagccagcacaagtgactcccgtatatgactgatcatatttaatttacctattactctctttccagttcagcaatgagtgtg

SEQ ID NO: 350088 - DNA, 122 bp, Homo sapiens
agcaggttggccgcagcggcaggagctggaatgggagggggtgcatgaggctgagtgtggcgcatcctcctcggggctgagatggattttacttgtcttgggttccccacggctgtcacagg

SEQ ID NO: 350089 - DNA, 122 bp, Homo sapiens
gagggagagaggagcggaagctgagggtgtgaaacggctggccccgaacacacctcgcggcgctccagtgattcctggtgtccgacctcagccccagtcagtgcgggtccagtttccaggct

SEQ ID NO: 350090 - DNA, 122 bp, Homo sapiens
tagtttgtttgtagaaagggacctcactatgttacccatgctgatcttgaactcctggcccgaagggatgctccttgctttggtctccctaagtgctgatattacagaatggagccactgca

SEQ ID NO: 350091 - DNA, 122 bp, Homo sapiens
agttaaagctgagaatcattgggactcactgcctatgtccgtgtctaggtgggagaaatacgtgcatctgtggtcacaatgctgctttacagaaaacactggttgttcctgaggttattggc

SEQ ID NO: 350092 - DNA, 122 bp, Homo sapiens
ctcgcgctactctctctttctggcctggaggctatccagcgtgagtctctcctaccctcccgctctggtccttcctctcccgctctgcaccctctgtggccctcgctgtgctctctcgctcc

SEQ ID NO: 350093 - DNA, 122 bp, Homo sapiens
tctggatttgcctcctgggaggacaccatgcctggcacagactgatggggtggctgcagtcgaaccttgcctccagattatgaaccagtataagtagcacaattctcgtggctactttcact

SEQ ID NO: 350094 - DNA, 122 bp, Homo sapiens
gaggcccatccactgctggtggtcggcatagtcgccgcggcgcaggaagtactggaggcccgagtagttgggctgctcatagagcatccagcagccgctgtccacgcgcgccgagttgcagc

SEQ ID NO: 350095 - DNA, 122 bp, Homo sapiens
aagaccagcattgtttccacttgggcgaaggcagacaccccaatctgggcaaaattgattcgggtggttgttggaaaaagcagctttcagcatccagggagtggaaccaataggaatgaaca

SEQ ID NO: 350096 - DNA, 122 bp, Homo sapiens
tccaggtggcttggctgcagagactggtcttctaaccagtattctgtactcccctccttacgattaagcactaaattagcctcgggcagttgtgaaggttaaatgaatgtaaaccacaatgc

SEQ ID NO: 350097 - DNA, 122 bp, Homo sapiens
ccaactcaccggcagccaactcacccacacggccgcagtactaaggaccaactgcgcgtgcgaccgcgacctctttagcccgccctcctgtgcctgcttcctattggctggtagtagttccc

SEQ ID NO: 350098 - DNA, 122 bp, Homo sapiens
ttcttccgcctggccagacagatccctgttttttgtttttcaaaattcagaaagcatctccgaatatttgcccagaggagtgtgaaacatactttcctggtctttctttcactttgttttat

SEQ ID NO: 350099 - DNA, 122 bp, Homo sapiens
gccattcaaccaatccccagataatccagagctcttgggagcagaaccttaaagagagatcgtggagagagccagggcccagaagaactctctcaaaggtacattttgacccggaaacttgg

SEQ ID NO: 350100 - DNA, 122 bp, Homo sapiens
ctcattttcaattatgacaaaaacaaaacaagccttgcctggacagtcacgaggcttgaccgggcacactgaatgctcagaggtcagagtgggcaggagccccggagcaggaggaagaagcg

SEQ ID NO: 350101 - DNA, 122 bp, Homo sapiens
cagcttagttttggacttctgttctccagagctgtgagatagtgagtttctgtcattttacgccacccagtttgcagttacagtggccctaagaaattaatacccaggcacacacaaccaaa

SEQ ID NO: 350102 - DNA, 122 bp, Homo sapiens
atcctggcaacggtcccggacttggggcctggtgcaggcggctgggcctcaccttgatggcgttgatgtactgtttcgcaaacctctggcactcctcgaccttctcgccgtggcgctcgatc

SEQ ID NO: 350103 - DNA, 122 bp, Homo sapiens
gtgtcagcaccgctgctgggggcgggggtggaggggagaaagagtcgggttaccgaagtgcgtcattcctggctctagcagggcctgctcgggagctgctggtgtttgttactgtcctcgca

SEQ ID NO: 350104 - DNA, 122 bp, Homo sapiens
gggccaccgatgccatgaagaacttctccgagttccggcaggaggccagcatgctgcacgcgctgcagcacccctgcatcgtggcgctcatcggcatcagcatccacccgctctgcttcgcc

SEQ ID NO: 350105 - DNA, 122 bp, Homo sapiens
ggattcgaggcggggcctgcggggcggggcctgggccaagcggcccgcaggaggcggcggcggccgttcagtcccttgttccccgccgccgccgtcgctgacccagcccgccaggcgctcct

SEQ ID NO: 350106 - DNA, 122 bp, Homo sapiens
cttctgagttagaggaaggaaaaagatacccaagtcaggtataaaagtatgaataggaatcgccagcaatgaggaagggcagctgaaataaagcaattaacatgcaaatgcaaggaagcttg

SEQ ID NO: 350107 - DNA, 122 bp, Homo sapiens
agaacttctggcctcaagcgatcttcccacctctacctcccaaaatgctgggattataggcgtgagccacagagcccagcctagttataataatgttaatactaagcattcgtttagcaaaa

SEQ ID NO: 350108 - DNA, 122 bp, Homo sapiens
actagcctgccagcaccttcttctttccttgaaggcttgtgactcatagctgctgtgtaacgtgtggcacccccagacaggaacacatcttgcaaattgcatcgggggctgcttctctggtc

SEQ ID NO: 350109 - DNA, 122 bp, Homo sapiens
ctaggctctaccaacactaacgtgtaacgtgtcacaaaagccaacgggcgttgcgggggccgggggtagccaacagctcaagtgggctgcttcactccgtggcagattcacctggggattcc

SEQ ID NO: 350110 - DNA, 122 bp, Homo sapiens
ggcaggaagccagcgcatcccgtgcagacgggtggtgcagataacggacccgccacagcacgcaattcaactttcttggtacctgggactcgtagttcagaaggcgcagtagcacgaccttg

SEQ ID NO: 350111 - DNA, 122 bp, Homo sapiens
tcctgcctgaagagcagaggtgaggacctgggacccctgaggggcaggccaggaggagctcgggcgcaggccaggcccccttggtgaagcagaggctgaaggaaaggggtctgggtcttgtc

SEQ ID NO: 350112 - DNA, 122 bp, Homo sapiens
ttacctctgatgacgagggggacgggcacgtggagagggtacgccaagacacaaagtccacgtcaggactgcgtatgcccctggccctcctggtgggcgtgcaaggcgagcccagtgcccat

SEQ ID NO: 350113 - DNA, 122 bp, Homo sapiens
tccacccttagctttcagcagtctttgcatgactgcaccacagaagagggtccctttccacgttcttgcctctcccccatagactgttgctgctcattactcgatactaggcttacagtgtg

SEQ ID NO: 350114 - DNA, 122 bp, Homo sapiens
ccatggtgacagatccggctagtccggactcctggctctttatactgcgcaagcgcactgcgcaagcgcacacaactgatttggataccccgcgccttttggttcaaagacaaagcccctcc

SEQ ID NO: 350115 - DNA, 122 bp, Homo sapiens
tggtgtgcagttctctgtctcgtgattcgtgtaacagtgagtgctgcctgcaccaacagccggctgccttccgtggctgtgtgggctcctgtgcggaggccgcccctctccctggccaagca

SEQ ID NO: 350116 - DNA, 122 bp, Homo sapiens
actttattattgtattctgaacatggcacctctgcaacttttgtttccatatcctttgagcgtcttctagaaagcaaagcttgattctgccttctgggcttgagcatgtgggcatagctggg

SEQ ID NO: 350117 - DNA, 122 bp, Homo sapiens
ttgtggtaaaatggtatctactgctgcccgtacctttcctccccccgaattccagggactcgtactcatttgttatctaaccaatccataaaagactctggattggaggaagcagttatgat

SEQ ID NO: 350118 - DNA, 122 bp, Homo sapiens
tgtgcttttgtagctatcattgcatatttattttcatatttagtataaacctgccagctgcgtaatcagtttggtgctatgtttattagtattacagcgtgttgataaattgactcaggagg

SEQ ID NO: 350119 - DNA, 122 bp, Homo sapiens
accctgactctaccaaaaattagctgggcatggtgtcgcacaactgtggtcctagctacccgggaggctgaggtgggaggattgctggagtctaggaagttgaggctgcagtgagccgattg

SEQ ID NO: 350120 - DNA, 122 bp, Homo sapiens
tgggagcagcataaaaggcggggtcttattagcataatctgcctggcaacctgatctcgacgttatatgattggttaaactctgtaagccccatgccgtgcctagagacgagaaacgctggg

SEQ ID NO: 350121 - DNA, 122 bp, Homo sapiens
tcagctccatctcctgcccaacgcctgccaaggttcatggttcaaggtcatgtagcctgacggttaagtgaaggggccctgtgattgactcagccttgccacatactagctgtgtgacttta

SEQ ID NO: 350122 - DNA, 122 bp, Homo sapiens
gaggaaccgggtgaccgagaggtccgggcgcaggccgtgtgcgaggaaggaggtcactgacgattcttccaggccctcgtttcacagaggaggggactgcagccaaagagacggctgctgcg

SEQ ID NO: 350123 - DNA, 122 bp, Homo sapiens
atgcgcctctgaggccttgccaggaaccccgcagcccaaagaccctccgttccgcagcatcgttgcatgaacctcgcgctgctcccagggctgatggtgccacctggtggcacaaagggtcc

SEQ ID NO: 350124 - DNA, 122 bp, Homo sapiens
tagagggaaaaggaattcacctagtaagtcaaggtggcacctaacctgtgtggactacctcgtatgtggtagtacttagcccagaactgagtacttcacgtgtagtatttcatttatcccca

SEQ ID NO: 350125 - DNA, 122 bp, Homo sapiens
atagtcgcactagaggaaagccagcccaggacgaagctcagcccaggacggagagtcccgcggagtggggggggtccggctgcctgccttcccctccagcggctgcccctcggtgtggagac

SEQ ID NO: 350126 - DNA, 122 bp, Homo sapiens
aaaccaggtattcttccccccgtgactccagggcacatctgccagagctttgaggttcatcgaggaagggagcaaagagacaaacccacctggagctttcctaggggcccattcctgcggac

SEQ ID NO: 350127 - DNA, 122 bp, Homo sapiens
cttagagtttcctgaccagggcccgctggctgctaagacttcttcctggtgcaagggagccggccggccggccgtccttttaggcgccggaagggttaagccagggcggcaatgaaacgtag

SEQ ID NO: 350128 - DNA, 122 bp, Homo sapiens
cttttttaagacttcagctttgactgtccttacaagtggaaaacaacagctaattgagaacgctgttttcggtaagggggacactaaatggatctacaggagtagtggcacaactaaattta

SEQ ID NO: 350129 - DNA, 122 bp, Homo sapiens
cctccctgccgccgccgggagggagcctcgtttttaaaagctttcgagaaaccgtccgtgcgcaggaggcagctgggagacacccaggatgtcgttctccgcattaaggagggggacggcgg

SEQ ID NO: 350130 - DNA, 122 bp, Homo sapiens
gccacaataaaaacgaagtcatacaggtcttcagactctgcaccaggcccctgacgggtgcgagcacccttcttccctgcagctcgcttgaaacgctttaggggcttaggctgtggggctga

SEQ ID NO: 350131 - DNA, 122 bp, Homo sapiens
caccagcagcatccatggcctgtcttttggcttaacacttatctcctttggctttgacagcggacggaatagacctcagcagcggcgtggtgaggacttagctgggacctggaatcgtatcc

SEQ ID NO: 350132 - DNA, 122 bp, Homo sapiens
aaatcagggtggagctaggatgggggcgagctgcacggatcgagagcgccccctcacttccgcacaatgctctgcacttggcaactttcatctaaccacagaggaccaaaagctgaacccag

SEQ ID NO: 350133 - DNA, 122 bp, Homo sapiens
gagaggatcagataagaaaatgtgtttcgtagtaaaaatgtaggtccagtgatgttaacacgtttctttgctattgatgggagtttcaagaagctttattgtgctaatttgtgtttggaaat

SEQ ID NO: 350134 - DNA, 122 bp, Homo sapiens
accctctccgcgtcccatgaacccaggtcccctgccgtgagctcttctcgcatccagacccgggtcacctcaactcaccacatggaaaacgaacaccaggtcaacggaaaagggagccgggg

SEQ ID NO: 350135 - DNA, 122 bp, Homo sapiens
catcattactctcagatgtccctaccaacacaggcttcatcagaggcagggcacgagagccgaggcttctccgcagttctactctaacatagtcgcagcttaggtcacgcatgcaccatatg

SEQ ID NO: 350136 - DNA, 122 bp, Homo sapiens
ttcaccgcttagtcttcttttactctctgtctcatttggtatgtagtggttattcattagcgcacagacaaatatcctttaccctctaattccatctcatctaccttaatttgtctgttaaa

SEQ ID NO: 350137 - DNA, 122 bp, Homo sapiens
atgcagattgtaagacaccttacatctattattttacaggacaaattaaaaataatgacacggcctcaccattgttgatgaggttgtcaggtggactgcgcatctatccattcactaacaag

SEQ ID NO: 350138 - DNA, 122 bp, Homo sapiens
ctggacaattgggtagatgggctttgcaatggatgttcatgattgtaacaagacagcccacgattccatttccaaataaggcataggagacaattcttttgtttttctcctgccatcttctt

SEQ ID NO: 350139 - DNA, 122 bp, Homo sapiens
tccgcagctgctgctgcagggctttgtccaggccgttgcggatggacgggggctgggtcccgcgggccgccaactcctcctgcaccaggttctgtccctcgggcctcaggtgggccccagcg

SEQ ID NO: 350140 - DNA, 122 bp, Homo sapiens
ctgtgccctggtgggctgtgctacccccaggtcgactcctccgtgtccctggcactgctgcgtccccggcaccggcagaagtttccaggcagcagcgtggatcctggcctggctgctcagtg

SEQ ID NO: 350141 - DNA, 122 bp, Homo sapiens
ccaggctcagcacgtagccttcctcaaacgtggtcagccagccatacctccttagccagccgccgagcctcatagtagggccgggctttctcgatgcagctccccaagtgggaaccctgtgt

SEQ ID NO: 350142 - DNA, 122 bp, Homo sapiens
agggaggcgctggagcgtgtgcggaggtcagagcctgatgccgcctcggtctctgggtgccggggcagccattccttcaaacaatggggtgcttccaaaccggtgcctcgtgaggaattggg

SEQ ID NO: 350143 - DNA, 122 bp, Homo sapiens
ggtctcaggtaatcttcacaaaacccgaggagaggaactgtcagtcccaccccacgaaagcggctactgaatctcagattgccccacgatcctggctctgcgagcgaggtcacgttcacaac

SEQ ID NO: 350144 - DNA, 122 bp, Homo sapiens
cgaccgtcggcctctttggcaagtggtttgtgcatcaggagaaactttccacctgcgagccgaaccggcgccgagtgcgtgtgtttctgcctttttttgttgtcgttgcctccacccctccc

SEQ ID NO: 350145 - DNA, 122 bp, Homo sapiens
cccctgagcaagctcttcacgcagcctcgagtatttcccaggttgttcagggatgccaggcgggtcataagagcagaatcccgacccggtgtttgcgtgggaagaactgcagcctatggggc

SEQ ID NO: 350146 - DNA, 122 bp, Homo sapiens
cggccacggccggagccctggttcggcccacggacagtgcggggagctggaccgcggcggcgcctctgcttccagcccacgctgcgaggctgccggcttcgctctccacctcttccacctcc

SEQ ID NO: 350147 - DNA, 122 bp, Homo sapiens
tacaacaaagctgcagagctcctggcctacaaatgcatggcttggggtgctggctggcggcgcccttcccgggactgtgcggcagcacgtgcgggcccatccccgcccccccgaaagccggg

SEQ ID NO: 350148 - DNA, 122 bp, Homo sapiens
cgggccagtcgggcctgggggtgggggtgttttagaggcctgcctgcgcccttcgtcccccgcccagaaggcgtgtgcgtcttcaccctcgctggtgtcttattgctccgctccgggtgcta

SEQ ID NO: 350149 - DNA, 122 bp, Homo sapiens
ggctctgaatgcgatgtcaacctaagcattacataacactgataggttgtaaaatggcctcgctgcctagtgctcattctaactggccacaatccagtcctccctgttgcactgagtcagct

SEQ ID NO: 350150 - DNA, 122 bp, Homo sapiens
agagccacggccgccacccccccggaccgtcacccccatccttccaccccgggcagacgccgcactactctctgcgtgccgcactcccagcagggcccctggatcggttcgctcttgtctgt

SEQ ID NO: 350151 - DNA, 122 bp, Homo sapiens
ggtggaacatctggctgctacagaggagggcctcggtacaactgcacttggttccacactcgtgaagttggccctgctagtatgtcctctccccacaagaacttggcatttggtttaaaact

SEQ ID NO: 350152 - DNA, 122 bp, Homo sapiens
ccctgaggatttgcgagagtgtggtggctagctccagaaggaggaagtagagggttctctcgatcagggcctcagcttgtgaggacttggagcatacccccctggcctggtgcctgaaaccc

SEQ ID NO: 350153 - DNA, 122 bp, Homo sapiens
ggtttgccagtgtgtgcgcagtgtgtggcgtgacggagatgcgtgcccctctcacccctccggctggtgcagagcctcccgtacctggcagccactttaccggaagcttctgggcagcctcc

SEQ ID NO: 350154 - DNA, 122 bp, Homo sapiens
atctcgatttcgttatgtagtttgggtggtctttttcctcttcttttctcaagtacgcggcgttaatgaaactcgacccgtccgctgatgtccaggtggacgcgagcctccaaggaggtaaa

SEQ ID NO: 350155 - DNA, 122 bp, Homo sapiens
tggggagcgcctctgccccgccgccccatctgggatgtgaggagcgcctctgcccggccgcgaccccgtctgggaactgaggagcctctcggcccgaccgccaccccgtccgggaggtgagg

SEQ ID NO: 350156 - DNA, 122 bp, Homo sapiens
aaccggcgggggaagggtgcgggggcgcatggggtgatcctgattcggctcccattttcccgaacgggcaccctgaggctcctggcccggggcatggtgttagaaatcatagctgcggagaa

SEQ ID NO: 350157 - DNA, 122 bp, Homo sapiens
gccacctgagtcgattttctctttcccatcccctctgccctggagattgtattcaacttccgcttgttttcattcagcatttcctgagtgcttgctctgatatatgttcagggcagcctccg

SEQ ID NO: 350158 - DNA, 122 bp, Homo sapiens
aactcacaatgcaagtccaggtagcacaaagctgggagagagacaaaggacaaagcaaaacgcacttagttctgaggcatctcagaggaggcgtggcttgaagagggcctggcttcctctga

SEQ ID NO: 350159 - DNA, 122 bp, Homo sapiens
gccccttattgagcttcagtttcctaaacagtgaaagggacataaattgagacacaaatacgataatgcatgttttatagaaagacttcgagcacatagaaagtccttattaaatgtcaatt

SEQ ID NO: 350160 - DNA, 122 bp, Homo sapiens
aatcctcactgcagcccgcgtcccttgcatgattgttgtaagaaagccccagctcagctgcgtggagacagggtcctcttggctgcaaattctaaaatcatttttcctatgaagagagcagt

SEQ ID NO: 350161 - DNA, 122 bp, Homo sapiens
gacagggagaaagggacacacaggcagactcagaaacaaacaggtgggtagggataggctcgtggaaacacctgcagaaaggcaacaggcaattgggctcagtcatagacaggagacacagg

SEQ ID NO: 350162 - DNA, 122 bp, Homo sapiens
ttagtgcagcagagtagtcctagattgtggttctagtcccaggccagttaccaaccagctcgatggctaagtgaatcaatcacttggtaatatctttaaacctctcagagttttacaaggct

SEQ ID NO: 350163 - DNA, 122 bp, Homo sapiens
gctcctacctgccaccacaggaatgagaacaccaacacacaggcagatgacccacaggagcgccagcctagaattagccttccccaacacaggctgctgcagctcacatgtgccttgttggc

SEQ ID NO: 350164 - DNA, 122 bp, Homo sapiens
gcccccacccctcctccacccggcctcgagccccgccccggacgctggacccgagcgtaacgggagcaggtgttcacatcaaaggtctgggtcgcgaaggcagagactccatgtgccgcaaa

SEQ ID NO: 350165 - DNA, 122 bp, Homo sapiens
atttaagcatgtaggggctcaggatattatgtaaataggacgattttgagtgtttgtaggcgaggccaaaaaatccataggttacttgcagaataagtcacgtcaagctcactttattttct

SEQ ID NO: 350166 - DNA, 122 bp, Homo sapiens
ccggggacttggtgttcgctaagatgaagggctaccctcactggcctgccagggtgaggccgcgcgggagatggggccggtgggggggggggggggggcagcgggggccccgggccggaggc

SEQ ID NO: 350167 - DNA, 122 bp, Homo sapiens
tgagggtgactttgtacttctgttcggcgccttcctccgcttgttagctctaatgacggccgtgtggctgccgcagaatccagccacagccctgtttgttcggtttgcatagacagggcgct

SEQ ID NO: 350168 - DNA, 122 bp, Homo sapiens
accttgaatgctggtcaccaggagtgacagaggcagcagtagcaattccagagccagacacgaatcccaacctctggagcacatgcttccttccagaacttcccagcaacgcaggagacagt

SEQ ID NO: 350169 - DNA, 122 bp, Homo sapiens
tggtggtcatccatcaacgcgatgtcctggaaaacagccaccacttccggtttctaacagcgcagcagacgcttcactcagttatctacaccgcagggacgaccaatcatttccccagatgc

SEQ ID NO: 350170 - DNA, 122 bp, Homo sapiens
ctgccattactgacatctctgagttttcgggcaccacccacattcccctcatctagacaacgacacccaatgcagaagctgctggcaacacacccagtggagccatgggctgagtgcagatc

SEQ ID NO: 350171 - DNA, 122 bp, Homo sapiens
caaacaggatatgcatctgtagcaagggctacctccggagagaagggtaggggaatgaggcggtctttgaccttgacagtaatttatggtttttaacaaggagagtgcattcttcatctatt

SEQ ID NO: 350172 - DNA, 122 bp, Homo sapiens
accctttgtcctcttcattgttctggagtctcttggacttttctgattcatttagcttcccgctcaccctgggcctcatcatctgatagttcagctatgccagcactggtactatgatttat

SEQ ID NO: 350173 - DNA, 122 bp, Homo sapiens
cccacagaggggctggggagagtcatggaggggatgccggaaggggctcaggggctgtgccgcgttccacatagtggtcccacattgggggcgtacactctaggtggctctgggaggtgccc

SEQ ID NO: 350174 - DNA, 122 bp, Homo sapiens
ccagctctttctgagccacccgttcaaaaggccagctcctcagtccttagctcctggagacggccacgctttccctcaggccggcttcttggcccggagtttttggaaacaagtttcaagaa

SEQ ID NO: 350175 - DNA, 122 bp, Homo sapiens
ccgccattcccggcccgagcggcccgagcccctttaggtccgcgccgggggtacaggagccgccgctccacggcccggtacactgcttccgactgcgcctgccccactgcgcaggcgcgggc

SEQ ID NO: 350176 - DNA, 122 bp, Homo sapiens
gaatcccctagggtacccatccttggcccagcccagcactctccattcacccccacaacccgtcccacccaccaggtgtgagccagtacctgcgaagggaccccgcctcccagcaaagggct

SEQ ID NO: 350177 - DNA, 122 bp, Homo sapiens
aggtcatgcatcttgggctggaaggtcccaggaatgatgctggcctcttctctctcagggcgtcctgccaggtttcgatgtctccctttcctggtgctgtgtactttgagcgctcgacggag

SEQ ID NO: 350178 - DNA, 122 bp, Homo sapiens
tgggcagggccctcatagccggtcacattgcaggagatggagacagctgtgccagccacgcggtacaagggcccctcggggaccagcacctcccgggcccagcatcccattcctgtagggaa

SEQ ID NO: 350179 - DNA, 122 bp, Homo sapiens
ctgggcccaactgcagctcagcgtgcacccggcagcagcatggccggaagggccagatcccgagtttcttgtgggctatttctgagccctgcaaactcaggggctgggattgtaacctcaag

SEQ ID NO: 350180 - DNA, 122 bp, Homo sapiens
agcccgggaatcttaaggccgccgccggggttggagggtctgcgacgcccaaaagggcagcgcccgcccgcagagtggggctgggaggggacggggtagggtagggtgaccccagggtgcgc

SEQ ID NO: 350181 - DNA, 122 bp, Homo sapiens
caaaggggagaaaagaaattactccccagaactctcaggcatctagaggacacccaagaacgtgggagtcagctgcttcttgtgtgcagccatgaagtctgtgcactccagtccccagaaca

SEQ ID NO: 350182 - DNA, 122 bp, Homo sapiens
gtcgggtcaggaaggagctggggaagggccggcggggtccagcaccctgcagaggaggagcgtggggaagcccacccaaatcccccccggtccacgcccaccggacgtcctccagctcgtag

SEQ ID NO: 350183 - DNA, 122 bp, Homo sapiens
cgaccctcaaaggaatgcagcgcgcaggcgccgcaacccgtcaaccggccaatgagaagacgcaacagcaatgacgccaggcacggccggaaaggagactcctgggaaaattgagctggaac

SEQ ID NO: 350184 - DNA, 122 bp, Homo sapiens
atctagactttgggtgccgtagaatgactcagagtctgaatcaacatgaaatcgagaaaacgtcctttgcaagggtttcagggaacacctgaaatcctgaagaactgtttgtatccatcctg

SEQ ID NO: 350185 - DNA, 122 bp, Homo sapiens
aaactttctcgctgagaggtgataaaaacaatgaatgtggttttcttgcagcattttttacggagcgttttcccagaaaactagaccccagttcctcaggactagttctgttcccaagtttc

SEQ ID NO: 350186 - DNA, 122 bp, Homo sapiens
ctgcccttagagactgtaggccatggaaatagctatagacaatggttgtcagctctcctccgtctcctccggcctccctggagattgggtctcctgatcagagaagcttgactggctacact

SEQ ID NO: 350187 - DNA, 122 bp, Homo sapiens
ttgcacagcaccaggactctgcctgtgaaacactattaaatctgctattaccctcccttccgcccttcccccaggactctaaggtgacgttcccacttaactctttcatgcccaatagcacg

SEQ ID NO: 350188 - DNA, 122 bp, Homo sapiens
gcaaaggagggggggagaaactttacgcacatacagtaacacccttaactccaggcaaaacgctcattcacagtagactggtagaacagcgccagctaaggaagctctattaacttacacag

SEQ ID NO: 350189 - DNA, 122 bp, Homo sapiens
ttgcccaatattctccttgtttccacaatataattataaactgctgaggtactgcttcctcgtcaagaacaaagaggttaacttcagggtcacaaaaatgtttgcagaagggatgaatacct

SEQ ID NO: 350190 - DNA, 122 bp, Homo sapiens
ctccctcaccgcctgcactgcaggctgcgggggcctgtccagtcctttgcactccaggtgcggcgctggacagcgggagctccagccacggaggccgctccttcagggaaggatagcccggg

SEQ ID NO: 350191 - DNA, 122 bp, Homo sapiens
gggggcacaatgaaggaaaagtgtcctcagcccagggatctcctgtttcagggctggatacgagaaaggaggccagtgtggtacactgaagagacttaaataactaagtaaagcaagtatgt

SEQ ID NO: 350192 - DNA, 122 bp, Homo sapiens
gcggtgggcggggagggggctggattcagtagagggcaaggggcactcacatccccggcgcgccactcgcggggctcctttctgcacgtgccccgggcctctcccgctcgctcaacctgtct

SEQ ID NO: 350193 - DNA, 122 bp, Homo sapiens
tggttcatcgtaacatatgccaagaagagcatgccagaaatgacaatctgaaggaacacacgggatctaaggcttccatacttttccaagagtaaaagagatcattgaaacaacacatgtca

SEQ ID NO: 350194 - DNA, 122 bp, Homo sapiens
gaggcgggccgggacgctctctgagaggcgttgccacccggggtaggcgctcaggatctgcggggcgcgggcaggccgggggaaaaagctgcgaggcaggcggcgccggagggagcgcctgg

SEQ ID NO: 350195 - DNA, 122 bp, Homo sapiens
aagagaaaagattccattgcctacagcgaagagtcaatctcacggatacatcggagcccccggttaatccgcttcatctttcatctgtgctgcagtcgtggattttaatgagttgcaggcga

SEQ ID NO: 350196 - DNA, 122 bp, Homo sapiens
aggccggccggggccaggcgtgcgcagtggttcttgggagtggcgaagcgggtcctgccccgctgtcagctgcggcccccggcgccgggcgggggtggccgcgaccattggcggagaggcga

SEQ ID NO: 350197 - DNA, 122 bp, Homo sapiens
attttttacttttgatacagtgactagcaaaggtaaaaaaaaaaaaaaaacataggacatcgaagggtcaattcattgtctgggaagaggttttggatttatttaccaagcttctaaacatg

SEQ ID NO: 350198 - DNA, 122 bp, Homo sapiens
gggcttttggcaggacatggccactctgcaggagggatctgttgacctggctgtggagaacggagcggggacaagaggagggtggaagtggcttgggagacggtgagttgtgggctggggca

SEQ ID NO: 350199 - DNA, 122 bp, Homo sapiens
tttgcacagagtatgagctctggctgaccatccatgtcctgggtacaactcaccctcctccgtgattcaaactgttccagcctggaataacccgattgctcctatgggaacaactgctcctt

SEQ ID NO: 350200 - DNA, 122 bp, Homo sapiens
atctggccaccaactccttgtagcatcaggagcagcaggagtctggagaagcaggggaatcgtggagaccatctcatgcaacccttctgttttgcaggacaggaaactgaggcacccggctc

SEQ ID NO: 350201 - DNA, 122 bp, Homo sapiens
ttgatggaacgtatctcaaaataataagttatttatgacaaacaatcaataaacgtaatccgtcacataaaaagaaccaatgacaaaaaccacatgattatctcaatagatgcagaacaggc

SEQ ID NO: 350202 - DNA, 122 bp, Homo sapiens
tccctcccagtgctcaggcaggcgctgcggcagaagcaccaggaagcccagcaggcctgccggccccataacctgcctgtgcttcaggcggctcagcagcgagaactagaggtactggggac

SEQ ID NO: 350203 - DNA, 122 bp, Homo sapiens
caagtttaggagcccgcactcgtgagcgatggctactccgcacagccccggggtcctctacggaaatccctggcacctatcagtacccctaagggaggtcgctcgttacccctcacttgaac

SEQ ID NO: 350204 - DNA, 122 bp, Homo sapiens
cgtgcttgcattgccggtgcatgaggcgcggcgcgggcccttcagtaaaagccatttatccgtgtgccgaccgctgtctgccagcctcctccttctcccgccctcctcaccctcgctctccc

SEQ ID NO: 350205 - DNA, 122 bp, Homo sapiens
cactgtggtcatcttggaagcctcggccatccctgctggctgtgctccattcttgtgcctcgccattggaacgctctagtgagccggaatgaagttcaggcccatggctgtgatgtcacaga

SEQ ID NO: 350206 - DNA, 122 bp, Homo sapiens
agaggagcaagcgctgctggaggggacccaaaggcagaggtctcaggtccaagaggcaggcggacagaggggctgagcactgttccgggagcacgaagagcgacacaggtgttgctcccgcg

SEQ ID NO: 350207 - DNA, 122 bp, Homo sapiens
aggcacgcagcttgctgttcaaatataaataacctcaaagccaaagcagatgtgtgtatacgtaatcccttcaaaatctgcatgagattgatatttcatcatagtaagcgtgttcatttccc

SEQ ID NO: 350208 - DNA, 122 bp, Homo sapiens
aaatgaggttccaggggtcgctgttttttcactttccgttgacggggtgaacaatatcctcgtacctcgattgcctctccacacccttttggtcctcaaaaatcttcctcttgtcctccaca

SEQ ID NO: 350209 - DNA, 122 bp, Homo sapiens
aacactggcagccgatggaaaattcagacggatttgggacagtatgcagagttctccaagcgacagattaacagaggctcttgaagaataactgcgtaatcacgtgttctgctcaaaagaag

SEQ ID NO: 350210 - DNA, 122 bp, Homo sapiens
cgtgggcggtgctcggcaccaccaggtagtggcctggacgcaggcagcagcggcgggtcacgtcgcggcgggcgctgaggggcgagcggtcggcgcgcagcagccggggcaggagcgcatgg

SEQ ID NO: 350211 - DNA, 122 bp, Homo sapiens
accgcattctacaccgaaggccctctattgatggccctgggatttttctgctcgtcagtccggagtcacttaccgggcaccactagaagaacccgggatgaaacattttctcccgtgtcttg

SEQ ID NO: 350212 - DNA, 122 bp, Homo sapiens
ggaaggaggccgtcggtccgcccctcccgctgccgcagcggccaggtccgacagcgggcgcgggacgctggattcctatttgccagcttcctgctggggagcgttttccaatggggcgcggc

SEQ ID NO: 350213 - DNA, 122 bp, Homo sapiens
aattcaggggggctgtcttcagccaatgggcagggcggccgggaggccgggctgggcggccgaggcggaccctaccgcagtgtttgcacaggacccgggcgcagccactggggctggcgagg

SEQ ID NO: 350214 - DNA, 122 bp, Homo sapiens
cgggggtgcgggtgccaaggtccctctgaggttcgtttggcttattcaccgatttcattccgctcttggttttagtttacctggaaggtcctctcctgcgctggctctgggggtgcttggaa

SEQ ID NO: 350215 - DNA, 122 bp, Homo sapiens
taacaggtgccaccatccaagtgaggatttcactgttcacaggcatttgagacacaccagcggccggcggttctcactgctcttcatatggaggcaaccatatatgggtaagtcatttagtc

SEQ ID NO: 350216 - DNA, 122 bp, Homo sapiens
ggggcgctctcgcgagcctaggaagatgtctgttgccttggttcccgggacctgccgctgcggaacagcccaaatctgaggaaaccttggacacagttctgggtacttctgcaaaacccttc

SEQ ID NO: 350217 - DNA, 122 bp, Homo sapiens
ggaagagcggcagtgagaccggggagacaagggacttgaagactaggagggaagaaacagcgaggtgaggtgcgaagagcagtgccagaactttgtatcccaggcccatctccttccccctt

SEQ ID NO: 350218 - DNA, 122 bp, Homo sapiens
aaagctcttctctctcctgccccgctagactagtatcccctccttaaggctcccaacatccgaagctaagttgtttgtctgcctatcatccaggaacgcgtctgagggcagggaacaaattt

SEQ ID NO: 350219 - DNA, 122 bp, Homo sapiens
aagctttgcagtcaggggaaacttactgagactcagttttctcatctgaaaacggggcgacggataacaaggaccgtgaagaatcccccaacgcgggcgccccagctcagagcccgaccctg

SEQ ID NO: 350220 - DNA, 122 bp, Homo sapiens
tcagccgggtctagactctaagcaaaccgcaaagacctagctccgtttggataccagaagcgtcttaagctgaaccgctccaagtaccaataactaaccatgatggttgcatcttgatgaat

SEQ ID NO: 350221 - DNA, 122 bp, Homo sapiens
atgtaccactgcatttatgatcacagtgagaaaggagatgaacaaggtgctaccaatgtacgtgaaaggaaaatatgaccttacccggggaggcatctctgtggaaataacattctatacag

SEQ ID NO: 350222 - DNA, 122 bp, Homo sapiens
cgtatttctagccaacgaggagggggaatcaaacagaaagagagacaaacagagatatatcggagtctggcacggggcacataaggcagcacattagagaaagccggcccctggatccgtct

SEQ ID NO: 350223 - DNA, 122 bp, Homo sapiens
gccccgggctgggcgggatcttggggcggccgggctagtagggctggatcaggcggaagccggggcccggggctgggcttcgtgtcctgcgttccgggagcgccaacccctccaggttagga

SEQ ID NO: 350224 - DNA, 122 bp, Homo sapiens
gacgagtcacttaattaccaatcagagcagccggggtgaatgcctaatgctccttagtcccgacctcctccatcccaactccacgagcccatcttatcagagaccggagattggtccttctc

SEQ ID NO: 350225 - DNA, 122 bp, Homo sapiens
ccgaagggcgtggttggcgctcggtcctgccctgcgcgttttgggctgcggttggagggccgcagttgcagtcagggtccgccagctcggggccagcgcatggggctgctgagaccgctccg

SEQ ID NO: 350226 - DNA, 122 bp, Homo sapiens
gggcacagggaaccacggctgcttctctccgaggtttgtggcctgagaaactctccgctgcgaatctgggctggcctctccgggaagccttgaaactcaactcccgggtgggccaggaaggc

SEQ ID NO: 350227 - DNA, 122 bp, Homo sapiens
gacgaagacacacttgtagcattatccttctcggcatcagcttttattagtggatcggggcgggggaggggggagatcggcagacacggacagcctctgaccctctggagttggtatgtgat

SEQ ID NO: 350228 - DNA, 122 bp, Homo sapiens
aaccacatctctacactaacatcacactaaccaccaggtcctatctgtctgaagagaggacgtctgatccataaacacatcctgacccgggaccaagactggatgatgaaaggagacagggt

SEQ ID NO: 350229 - DNA, 122 bp, Homo sapiens
agctggatttgactcttaaggcaatgggaagccactgagaagttttaaccagaggcatggcgttatctaatttgtgttcctaacagcttccattgagtactgtgtgtgaacgaatcaaagcg

SEQ ID NO: 350230 - DNA, 122 bp, Homo sapiens
tcggagaaaagctgcagtctccctcccggcggggcggacgccaggcctccttggtcgggccgcacctccccgcaggcccgccaaagagcaccgcgccccgcaggcacccgagacccgcgcgg

SEQ ID NO: 350231 - DNA, 122 bp, Homo sapiens
tctgctgacatccttagttttaccttccagggaaggggtcctcctcagagagcaggaagccgctttcttggggacaacaaggagtggcagttaggacaggatcagaagtcactgagtcttta

SEQ ID NO: 350232 - DNA, 122 bp, Homo sapiens
acacacacaataaaaatttcacaataaaaaacattaccaaacttgccaggaaacaagcttcgctgagtgagatcaacagaattaactaaatacagatttagagtcatataaatttctgatgc

SEQ ID NO: 350233 - DNA, 122 bp, Homo sapiens
gccgtcccagcccctcggcatggcgcaaggctagcacagtttagtgccaggacttggccccgcctcccctctcgcccgtcttttctcttttatcccgaaaccagtcgccctaaacacccaca

SEQ ID NO: 350234 - DNA, 122 bp, Homo sapiens
agaatatcagagcatgcatactctgaacttggagtagccaatcccaggggacgctttaggcgggaaaatcagagtctccacccccactttgagaaggttgtgtccctggagcctcaactgat

SEQ ID NO: 350235 - DNA, 122 bp, Homo sapiens
aggtgttcaataaatgattacattatatgcaatgatttcttcaccagaactatcacttttcgtttgcgtaaaaaatataatacaaattaaacagacatcccctaccttctaaatcagggttt

SEQ ID NO: 350236 - DNA, 122 bp, Homo sapiens
cggttgaaagcgcgtgtctgcgtcgggttctgttggagtgcgttcggtgcgccgtgggtccgcgctgcttccacccaacttcctgttaggtaagaggcgcgtgaggctcctgtgccgggggc

SEQ ID NO: 350237 - DNA, 122 bp, Homo sapiens
ctgaggctggaggagtttttcttctgctgcaaagctgacacgtgtggtggtggtgttccgcgcctcccgttcttctttataaaagcccagacatccaattaaactgctgtgtcccggcgtat

SEQ ID NO: 350238 - DNA, 122 bp, Homo sapiens
acttagcacacctgagtctgtttgctcttctgtaaaatggggacactggtatctctgcatcgtggagttgctgcctcagtggcattaagcctgtcgagtatctaacacagggctatgtgtcc

SEQ ID NO: 350239 - DNA, 122 bp, Homo sapiens
aaacctgagttttaacttggtgactgttgactccctcctgacagcgaggcggtggtgaaccgagtgtttgacaagctgtccccgctgcacgagcgcatctactgtgcactctctggttcagc

SEQ ID NO: 350240 - DNA, 122 bp, Homo sapiens
gcagctcctccatccggaagccagggatcttcatcttgccgcggagttccatgctgccgtcgcccccagtcttcagggactttgcgctcccgcaggctcctgctcacctctcccatcgttgg

SEQ ID NO: 350241 - DNA, 122 bp, Homo sapiens
aggctaaaaaaaacgggagtcgtaggtttgagattctttttccagtacgtttggaagactcggaggaagaccagtcccccggaaaaaaagacgatgtactgggaaggccacagcccacagct

SEQ ID NO: 350242 - DNA, 122 bp, Homo sapiens
tagaggcatcctaaagcctggaagcagtgtgactggacatgcagtgctttctcccaagcccggccagcagaggcttcccccttcccacagagtccctcacctgctggcccaagtctgccctt

SEQ ID NO: 350243 - DNA, 122 bp, Homo sapiens
ctttgaagattcattcacagtggtagaaaggtaggaaaaaatgcaacaaataattcaccacgtgtcttcctagccagtttgtattctaaatgcgtgtgccttggtagccagttgactttgca

SEQ ID NO: 350244 - DNA, 122 bp, Homo sapiens
gggaagcaagccattgaggaagtggggccaacagagaggtcagcagccccttagccctcacgcttccaaggaacagaatgatggagaagcctgcaggcagaaaaaagaagacgccgacccca

SEQ ID NO: 350245 - DNA, 122 bp, Homo sapiens
agactgacgtttggaactcacgccgcaccaggttttttcagaatgaagacgatgtgtgttcgctgctggaactgtttgtcctgggattttataaacacctcccccactcctttttaaagttc

SEQ ID NO: 350246 - DNA, 122 bp, Homo sapiens
tgagggaagaggaaagtgccactgggcaaggtgtcccaccctcccctcctgaccctcctacgaggcttatcctggcaatggggtagtcactgccacccttccacacacacacacacacacac

SEQ ID NO: 350247 - DNA, 122 bp, Homo sapiens
gcactggagtccaaggcgtgcgtgtcacattttattccccggcagccgctcgggtgcgcgcgctacgcgctcccacactcacgctggcgcccgctagagctgggaccctggccggggtcccc

SEQ ID NO: 350248 - DNA, 122 bp, Homo sapiens
gcctcccaaagtgctaggattacaggcgtgagcacctggtttgttacaactttaaaagtacgcatttcagagcatagtctacatttactaggagggtcttgttaaattagaatgagttcaca

SEQ ID NO: 350249 - DNA, 122 bp, Homo sapiens
tgccaggcaaggcctctcgcctgcctccttaggaccaaagccacctaacttctgcccaggcgaaggcagtaaacgtctctaactctgcggaaggcaaaaagtcaagtcacacaaagaaaaaa

SEQ ID NO: 350250 - DNA, 122 bp, Homo sapiens
ctcaagccaccgtcacatgattcatgacctcgtctgcgctccaggaagcactttctaagccgccgtcgccctacgatacgggatttccggaggggcccggcggaagctgcgagggcgcgtcc

SEQ ID NO: 350251 - DNA, 122 bp, Homo sapiens
ctggggaggcggatagagaggaggattagtaatccctcgatttcagccaggactccctgacgacaaagattcatgcatgtgctgtcatcttcactgctccaaaacagagcgatgattttgtt

SEQ ID NO: 350252 - DNA, 122 bp, Homo sapiens
ggatgggctgcgttcctttctggcacagctgccccctcagtccagacagtagtagcttcgcggcagattcacgctggcttccaagttctgtacaattagttcagctggaaaacctgtttttt

SEQ ID NO: 350253 - DNA, 122 bp, Homo sapiens
tttccaccatgtggtagccatttagttgtattttttaaaatacttaccaaattacagagtcgagtttcagaggcagcagctatgaggaggtttagggtgcatggtatccctttggcttagcc

SEQ ID NO: 350254 - DNA, 122 bp, Homo sapiens
ccccggatgctccctccttcccgacttcccttctcagggccttccaggacccagtgtccccgatcttcttgctgttcctgaaccccgtggcctctgcgctggctgttccccttgcgtggacc

SEQ ID NO: 350255 - DNA, 122 bp, Homo sapiens
tttcttgttttccctggccttggagtagaagaaagaccctaaatctacatctaattgattcgttgggcacctagttcttattccatgaaacatttttggaaggattattgattcaagtgtga

SEQ ID NO: 350256 - DNA, 122 bp, Homo sapiens
attggaggactggaatatagtctagaacccagcttgggatggggattccgtgtgggacagcggcagcgtctcacctcagcagggaccagggggacttccggggacgcagagacagctgctgt

SEQ ID NO: 350257 - DNA, 122 bp, Homo sapiens
agctgggtacctagggctctttgaaaacaggaagagccgaggtgtcataaagccatctagcgggccagacgtctggaggtaatgagtttacgacaggcccagtgctttgctttgaaaccatc

SEQ ID NO: 350258 - DNA, 122 bp, Homo sapiens
ttctcttccagctaacatgtttgtgaaatgctgcagtgaatctcaaagataacaggcacccggctaattctattgggttaacacgtccatgctggctgtgcaggcttatttaagtaattgcc

SEQ ID NO: 350259 - DNA, 122 bp, Homo sapiens
tgagatgccagggagcacggagcgggagagaagagagctgctgtggtcctgggactgactcgagaaatggaggctgtgattctggtctttgccatgtctgccacgcctctaccgtgacatcg

SEQ ID NO: 350260 - DNA, 122 bp, Homo sapiens
gtcggaccgaaccaggtcaagccttacctgctgcccctccccaaagcggagcccaagccgcgaccaacttgaaatgtactgggcttcctcaagtcggtggcgttctaagcccgcctcccgga

SEQ ID NO: 350261 - DNA, 122 bp, Homo sapiens
agagttacaatcctgagccacaattaaaatcctgatcataaggtactcactttttttagacgggcatattaatgttactgcttatttttagtggcgttctagggtcatgcatatactgcgca

SEQ ID NO: 350262 - DNA, 122 bp, Homo sapiens
tggaggagggggtcctgcgtcctgtaatgcccggggcgggcgcacagccttggttggcatcgctccgcggcctggagaggagtcatccccgatcgtccctttcccctttcctcgtgtcccga

SEQ ID NO: 350263 - DNA, 122 bp, Homo sapiens
ccctgggcaccgctggggacgatggcgctgctcgccttgctgctggtcgtggccctaccgcgggtgtggacagacgccaacctgactgcgagacaacgagatccagaggactcccagcgaac

SEQ ID NO: 350264 - DNA, 122 bp, Homo sapiens
tagtttgttgttccatcctttcctgtgattatggaataatgaatgcgacaattcctggggcgtggtggcttacgcctgtaatctgcgtggatcataggatgtcccataaaataaagcttttc

SEQ ID NO: 350265 - DNA, 122 bp, Homo sapiens
ggaggaagggggccatgactgtgtctctctctccctcctgcagggcccagccgcggccgccgaactgcatggtccagggcgctggtcactgccaccttcctgcacccacttctgctgccagg

SEQ ID NO: 350266 - DNA, 122 bp, Homo sapiens
agaggcagcagggcacagggagatattgtatctttccaataaccctgtcatcagctcctgcgttgctgggactttaaatctcaatctgagcgcagcgtgcatacagccgctgcatcccagtg

SEQ ID NO: 350267 - DNA, 122 bp, Homo sapiens
tgaggaaacagaaaggacctctgccattggtgacttgaaagtagtggtggttgccaggcgcggtggctcacgcctgtaatcccggcactttgggaggctgaggtgggcagatcacgaggtca

SEQ ID NO: 350268 - DNA, 122 bp, Homo sapiens
aagtgaaaacgtggtacagtgtagccgcaaagtatatccatagtatactttgtagccacacgtcaggaggaagttacctttatgcaccccttaccactgcatgcaaatttgatattttctct

SEQ ID NO: 350269 - DNA, 122 bp, Homo sapiens
tgcttacctttgagaaaatgcactcaaatcaacatgatacgatgctttcagtatagtagacggctctgtaagcctaacattttggtaggaagccttagtttacacgggcagtaacaaaagtt

SEQ ID NO: 350270 - DNA, 122 bp, Homo sapiens
caaactcctgaacccatgtgatccgccctcctcagcttctcaaagtgctgggattacaggcgtcagccactgctcctggacagcactgcctcttgatgtgtcttgtcttcccatttacattg

SEQ ID NO: 350271 - DNA, 122 bp, Homo sapiens
actggggctgtgaacgtatgaggggctgtacatggagctgtgtgcaaggtgggggctgcacgtgcgggcttggggactgcgtgcaccaggggctgcaggcgctggggagggtgtggggggct

SEQ ID NO: 350272 - DNA, 122 bp, Homo sapiens
ccgaaagcctgccccggcacgtcgggctctcctgacccgccaagaccagagagccgttggcgccctccgcccgggcctgccggtccgtttattttaagaagctttgtgcgcctgctgtgggg

SEQ ID NO: 350273 - DNA, 122 bp, Homo sapiens
atcctccttgagcttctcggtgtaattatctttggggcagggctgttgtatcaaatataccgaaggaggacctgctatgccagactgcctttcctaaaaatccttgaaaaattcttgaacat

SEQ ID NO: 350274 - DNA, 122 bp, Homo sapiens
gaatcagcaggtgacatacccctctcttgggcctcctagacagcactcggccgccatctccggccttgatctctgtgctcaggaatccaccactgtcgtgctgggctcacctggcttttggg

SEQ ID NO: 350275 - DNA, 122 bp, Homo sapiens
acaggaaaaagtacttgagataggccttgaatgaattgtatggcttagatcaggggttggcgaactgtgtcatatggatttggaccattgcttgtttttataaataaagttttattggaaca

SEQ ID NO: 350276 - DNA, 122 bp, Homo sapiens
cacagaggtctggggggtgcattctgcatccagcagctctcacatggcagtcgtggtccccgttgctggtctgggctgttgtggagtagcgggggcatttgtgggcgaacccagaggctgaa

SEQ ID NO: 350277 - DNA, 122 bp, Homo sapiens
ccaggcaccaacttggaagccatgcaatgtcctgggctggatacaaattttggtggccaccgatcagggttcaaattccagctctggttaccgtggctgccctgtatgatcacagtgcaatg

SEQ ID NO: 350278 - DNA, 122 bp, Homo sapiens
tactcccggcatgctcctcctccccgggcagatttcaaaccctctgcagccccacctccgcgccttcgcccccggccagccccagcaacaggcggcggcccgcttctcattggccaggcccg

SEQ ID NO: 350279 - DNA, 122 bp, Homo sapiens
aactccacactgctgaaactgctttctacctgctagtccttgtcttacttgacttttcctcgacggaccttttttcccttggctttgtgagaccatgggaatccttttttctctgcaaacat

SEQ ID NO: 350280 - DNA, 122 bp, Homo sapiens
catgtttggtgctttaccaacagtggggatgaaaagtatgtggtctttgttttcagggaccgccagaaaaactaaagaacatcctctggcagtatcaaatagggccctgcagtggaaggaat

SEQ ID NO: 350281 - DNA, 122 bp, Homo sapiens
cggcgggtctgcgctggggagggccagggcccctgaagccggcgtccctcttaggggacgcgcctgggtgtgtcttcaccgtttgcctggtgagttggagacagggtctcgctccgtcgccc

SEQ ID NO: 350282 - DNA, 122 bp, Homo sapiens
gagtgccggccccaccccagccctgcagggaccagcaggctgcgatcaggaaggaagctgcgcccccaccctccgcatcctgagtgccccattcatgtggccagctgggcggacagagcccc

SEQ ID NO: 350283 - DNA, 122 bp, Homo sapiens
ctgctccccactcaggtaggggcaggtccggagctgcagcatgacagggaatttcaggcccggaggtcttcccacttgtcacctctgtttcttcttctctgcccaggtggtgcacattctga

SEQ ID NO: 350284 - DNA, 122 bp, Homo sapiens
tcaccgggcagctggcaggcctctaccctgcatggggccccgtttcaggctaagtggggccggcctcccagctttatgtcctccttcagaggggaaggaggcagtgatgtcacagaggtctc

SEQ ID NO: 350285 - DNA, 122 bp, Homo sapiens
gtgggaacagcggcacctccgcgatggtggcggagccgcggcggagctgctgcaccgacccgccgcccactccccgctcgggcccggcccacctcgcagtatcgcgcccctccattggtaca

SEQ ID NO: 350286 - DNA, 122 bp, Homo sapiens
actaaaggcaactctttcttgtgtctggtgctgcagagccgtgccctccagaagcagccgcgtgtctgctgggtggctccaagcccgtgaacctcggcagggtaagggacggacctcagtgg

SEQ ID NO: 350287 - DNA, 122 bp, Homo sapiens
actttcttaccgcaaatgcacgatttcactcggccctcacacaccccacgaggtgggcaccgtcacagtgccatctcacaggcaaggaggccaggcccaggccctgaggatgcgccgctcag

SEQ ID NO: 350288 - DNA, 122 bp, Homo sapiens
ccacgcacacaaacatacacagcccactggatgtctgccgggtgggagccgcaatctccgcgcggtcgatggggccctccgctgcgcactcggccctgcgccgagcaccctgcagcctcctc

SEQ ID NO: 350289 - DNA, 122 bp, Homo sapiens
atcccccggtttaagacgacccagctgtcccctctggtgggggcagcagcgcggtcgggtcgccctcgacgcctccctcagcaggaggcctgggcagaccccctgcggccgccggacatttt

SEQ ID NO: 350290 - DNA, 122 bp, Homo sapiens
gtagcagccgtgaccaagacatggtgccctaataccaagtgttcttgggttaaaggcaggcggctttttaattaaatcttaaagcactgcaattactggcaagacagctggtcttaagcagt

SEQ ID NO: 350291 - DNA, 122 bp, Homo sapiens
gaacggaaaaccattccccctcctcttcccagaactcttgctgagctaggtggtcaggagcgtcatggtagaatataaccccagaggcccaaggtgcagtttgaagaaacggtggcggcttc

SEQ ID NO: 350292 - DNA, 122 bp, Homo sapiens
tgacttcctcccttcacccctcacccccactgtccccagtaacagagccaatgtgaagtgcgcctaggcataatttacttgagcacatttcccgggcacctactgtgtgccaggctcggccc

SEQ ID NO: 350293 - DNA, 122 bp, Homo sapiens
tggctcaaaagaagcattcttagcattgctagggggcttttgcagattttggcttgtctccgatacttgagtcatttgatattgtagcccatgaattaggacagtgtagtttcaagagctga

SEQ ID NO: 350294 - DNA, 122 bp, Homo sapiens
ttcctcagctaacttttttcattcatttatgcaacaagtgtttattcagcccacactaaacgtttggctttttcctaggcactgacatacaatggtatacaagacagttatagtcactttct

SEQ ID NO: 350295 - DNA, 122 bp, Homo sapiens
aagagccagggcaggacttcagtcagtgttccaggaacagctgagacacccaggtcaccacgggctcgcgccgctgcggctccgacccggtgcgaaccgccatacgcgccgcgcggtgggcc

SEQ ID NO: 350296 - DNA, 122 bp, Homo sapiens
agtggtgcggctggggggcaggttgaagctgtagcctggggtgtggccagggcttagaggcggggctaagggcagggtgaggctgggacctggggcgagtccagggttgagtagcggggcct

SEQ ID NO: 350297 - DNA, 122 bp, Homo sapiens
ctggactccttgcagatcgccagggcaatgggcgtagcagacgaggccctgggcaatgtgcggactgtgcgtgccttcgccatggagcaacgggaagaggagtgagtcctgggagggcggag

SEQ ID NO: 350298 - DNA, 122 bp, Homo sapiens
gtttttacagggacagcaactaggtgtcgtttgggaactgacagggccgctccggggctgcgcctgggagcttgctgctttgcaggtctctgctgatcagaaagccgccagctgtcctgttt

SEQ ID NO: 350299 - DNA, 122 bp, Homo sapiens
gggcttggggagtagctttggcactcccaaggctctggggtcggggagcattccatgtaccgtggtgttcatgactcaggcaaaagggaaaccccagaattaccacaaagctatcccaatcc

SEQ ID NO: 350300 - DNA, 122 bp, Homo sapiens
accatggcatattggccatagcgttcatatagtcatggtgaatcaccatggcatatcggccgtagtgttcatatagtcatggtgaatcaccatggcgtatcggccgtagtgttcatatagtc

SEQ ID NO: 350301 - DNA, 122 bp, Homo sapiens
cttcctcggccgtggcggtgggttacaagtgaagctgaatcttgaaggtacccaagcctccgcctccgcgcaactcggcagcggcagggaaagagaaggaatcaataactctctaggtaact

SEQ ID NO: 350302 - DNA, 122 bp, Homo sapiens
ggcagtagtcctggcagcggcagtagtggtggcagcagaagagaggaagggggagggccccgagggctacacacgctcacactttcaagttcccttggagggagaggaggtggggctgcaga

SEQ ID NO: 350303 - DNA, 122 bp, Homo sapiens
gttaaagactattgcaatagtcaacttccaatacaacagcagctggagatttatagctaacgggctgggtgaaggagttaaaggatgctaaattactaagaggaagttaagtatcaagagtg

SEQ ID NO: 350304 - DNA, 122 bp, Homo sapiens
ttagcctctctcccttccttgtgcagtgtctggcaggtaaagctcaccaccaacaacaaccgaattgatccttcacccagctctgctggagagggcaggggttaaggacactggctctggca

SEQ ID NO: 350305 - DNA, 122 bp, Homo sapiens
cccgtgggaactccccccccaacctcgccactgccacccgcgagaaaccgagaacggccgcgcgtacagagctcgccctccagcccagggatagacgctcacctcggccgcaatggctccgc

SEQ ID NO: 350306 - DNA, 122 bp, Homo sapiens
gaccgaccgcggcctcccccgccgttatttaagcggaagcggcgcgcccgcgcggcccggcggcgcgcgcggccccagaacatgtccatatatggcgatctttccgaaagccgggcacccat

SEQ ID NO: 350307 - DNA, 122 bp, Homo sapiens
aagagcctgccactgaaaacattcagtaaaggagtgaatcttccttgccccatcaagagtcgcttttcagctggaggaagggtgtgtccccaagtttttacctgggagcaatgatgatcttg

SEQ ID NO: 350308 - DNA, 122 bp, Homo sapiens
ggatccatgccttttctgttcactgttgtcaagtttaaatgcagtgtgcaacatgaaaaccgcagtgatgtgttattagttgggaatctttgtcatttgggatatctgcatgctatctgttt

SEQ ID NO: 350309 - DNA, 122 bp, Homo sapiens
gccttttccacaggtaactttttctgcttctacccctcagagcacattcagcttactcaccgtggttacctcttgaaagcaacttagaggccggtcgcggtggctcaagcctgtaatcccaa

SEQ ID NO: 350310 - DNA, 122 bp, Homo sapiens
gaagaactgctccctgctcctttatggtcaggcagatctccacttgggaggtacagccaccgggcccaccttgtaacaagagtagcatgctctaccttactgctgagacaccgcaaccttag

SEQ ID NO: 350311 - DNA, 122 bp, Homo sapiens
cagggtgagagggggagagcgagactccgagcgtgcgggcgaggaagctgggcggggggccgagacgggggccgggacgacggctggggcgccggggtcgccagctcctcgcccacctccct

SEQ ID NO: 350312 - DNA, 122 bp, Homo sapiens
ccggatggccgatcccgggtggccctccagtggtggccgccgagctcgaggcctgcagggcgcagccgcgctccccagcttcccagccggcttcccagttctcggcaggtggcgatccagcc

SEQ ID NO: 350313 - DNA, 122 bp, Homo sapiens
tagcgtatgcattcgttctgttaagagcaaatctaggagaagtgcttcagctgcccagtgcgccgtggggagtgttttaacggatcgtgtcgcaggagagcacagcccagcgttggggccgg

SEQ ID NO: 350314 - DNA, 122 bp, Homo sapiens
ggctggcgctgaccctgcctgccctctggccgcagtgcccggccggcccaggccacacggcggctccctgctcctgcagctgtgtgtgtgcgtcctgctcgtgctggccctgggcctatact

SEQ ID NO: 350315 - DNA, 122 bp, Homo sapiens
taacccaggagcgtttggaaaggagtagggaggctccgcggccgagcccgactggcggatcgagcctgtttaatggtttgcttgcttgccgggagttgtagttcaccgctcgcccgtttgcc

SEQ ID NO: 350316 - DNA, 122 bp, Homo sapiens
ggtgatcagaaaacagctgtcttcctccttctttcagcccacggagaggcgggctgtgaacgcgctttgccagggggggatggggaacctgctgcgcctctcctggcgcctggaggcccagc

SEQ ID NO: 350317 - DNA, 122 bp, Homo sapiens
ggaaggtacctggctccccggtggctgcagctccgggctcctcctcctgcgtcctcgcgtcgcgtactgcttgctgggattcgtagtctcgccttggccatcagttcgcccttcccagagag

SEQ ID NO: 350318 - DNA, 122 bp, Homo sapiens
gttaagtgccttcagataaggatttcaacacacgtaaggccatgtttctgatgttataggcgaaggagatgcagcagatggtgaaattggaagccgagatggaccgcagaccagcaacagta

SEQ ID NO: 350319 - DNA, 122 bp, Homo sapiens
cacgggtctggctgcatccctgggagggacaaccaccgggaacacagggctccctctccccgtatggcccaagcccctcaggatacgtgtgccccagctcgggattaggctgggacgccctc

SEQ ID NO: 350320 - DNA, 122 bp, Homo sapiens
gggggaaccagcgtgcgtcgtcgtcgcagtgcacagggactttaggcagcagggaccagacgggctgcacttggcttctggggacgcatgtctaccgggagcactggcagcacctgcctttt

SEQ ID NO: 350321 - DNA, 122 bp, Homo sapiens
gttaattatccttttgtttataagaatggtttcatttttctcacaagtatacacatcattcgcctttgttggaatgcagtcttggagaacagtgtgggtctccccagagtatgcaggacaga

SEQ ID NO: 350322 - DNA, 122 bp, Homo sapiens
ggactagggagaacggtaccggaagcccgtgtctcggaggctgctgggagctgtaggccccgcgggtgtcgtagttctgggcgcttttccgggtccagggggggcagggttcgaggcgtggc

SEQ ID NO: 350323 - DNA, 122 bp, Homo sapiens
agtgtaatgcagtctcatggctttggagtgaaaggaactgattttggaatttgttagggtcgtgggagctagaagagatttggagaccagtagatacctctgttgtacagacaagaaagcca

SEQ ID NO: 350324 - DNA, 122 bp, Homo sapiens
ccagtgcccgctggcggtggggtcagggcccccgcgggggggctggggtggggcccggggcggggatggggcgcggcgtccccccccgcgggggtgtgtggtgctgcggtccgtggctcagg

SEQ ID NO: 350325 - DNA, 122 bp, Homo sapiens
gcggaccctaggagggcggggccggcgcgcgaggtgagggtgctgcgtgggggcgcagggcgggcagagtgtcaggatgggtgctgagggcttagggtgggagagggagcagggcaggaggt

SEQ ID NO: 350326 - DNA, 122 bp, Homo sapiens
gaggcgttcctgaccaccagggtggcttccgcatagaacaggccatctttatcttggatgcgatgctcagacacggccagcagcttctctccccggatgtcttcccaatacacctggggctc

SEQ ID NO: 350327 - DNA, 122 bp, Homo sapiens
tgtcctgccctgtgtaacctacggattcacgaagtgtcgtgggggccacagcgtttgatccgaggtgctctaggctcagcaggttatcactaaagactgtggggcgcaccgtacaatttctg

SEQ ID NO: 350328 - DNA, 122 bp, Homo sapiens
ggggtctagtcgatgtcctgaaccctgtcatctgctccacagcaacatataaatgagttacggtaaccagatattagatgctgagaagcagcagccgtgtgtggggattatgatgggaaagg

SEQ ID NO: 350329 - DNA, 122 bp, Homo sapiens
tgttcacggcagggctgaggaagggaataagtgaaatgcctttattacatttctactgggcgctatgtagggtctcctaattaaggcaactctctggataaataacatttctcctcagcagt

SEQ ID NO: 350330 - DNA, 122 bp, Homo sapiens
ccgccccgaattccggcccgccgctcgttctatctggggcagcgtagcctctctagatggcgggaggccggggcgactctgtggttcagccccagacctggtcccactagccctgaggccag

SEQ ID NO: 350331 - DNA, 122 bp, Homo sapiens
ttacacagactcactgtgctgagaccggaaaacctgctctttccctataggtttcaaccacgctcctccgactggggtctgggtgaggagcgccgggccaggccccggggcggggagagggg

SEQ ID NO: 350332 - DNA, 122 bp, Homo sapiens
catggggctgggtggaccaatggtgtgggtcatgggaagagcctgccttagcccacatcacgctgccctgaggtgtccctgcctaagcccttccccactttttggctggccttggtgctcca

SEQ ID NO: 350333 - DNA, 122 bp, Homo sapiens
tgctggaatgaaggctcagttcctgtcttcaagggtttcccagtcttgctgaaaggaggtcgtttcccctctgggtttctgttgattattgggttgatggtggcttgagagaccagggccca

SEQ ID NO: 350334 - DNA, 122 bp, Homo sapiens
ttcccctctctgggccaggacgagggatgggagagtggaaggatggagtactgagcaccccgccacgtagaggcagtgaagataaacgtggatgtgagaatgtcatggttcctgcactcaca

SEQ ID NO: 350335 - DNA, 122 bp, Homo sapiens
gccctcccactgtgatatctgcgctgtgtgggtacagatgccctctcaccgtcgtatctgcgccgtgggtacagacgccctcccaccatgatatctgcactgtgggtacagacgccctccca

SEQ ID NO: 350336 - DNA, 122 bp, Homo sapiens
ggggagctttggaatgttctgatagctgggtccatagccacagattcagaccgaattggccgggggtgtggcctgagctgaagatgagaagcattgccctagaatgattattgaggaatagc

SEQ ID NO: 350337 - DNA, 122 bp, Homo sapiens
ggtatgcgccaaccctatttcaggcagcgctcaaagtaggtggagccgatgtagccaccccgcatggagcgctgcacgttctgctcaaacagccgccggttgttctgcaggacctctgcggc

SEQ ID NO: 350338 - DNA, 122 bp, Homo sapiens
ttaaggaaaggggactccacagcgagatatttagacaccacgtaaaggcagaagaggtgacgatcgatcccagagccggtcatggcgaggcgatacatatgctgatgcttctcagacgccaa

SEQ ID NO: 350339 - DNA, 122 bp, Homo sapiens
tgaaggacgggatgttcgccacctgattgcggaccctgacacggcgctggcggatcagtacgccagcgtggtggatggacttggccaagcccagcttgaagacctgggtctgtaggcgtctc

SEQ ID NO: 350340 - DNA, 122 bp, Homo sapiens
ccctcagtgacttctgcaacaacacgcgcttctcgatcagctctgaggatttgggttctgcgacggacaggggaaggaaagaaggaaggctgtgaagaaccgtggtgcctgcctgcacagcc

SEQ ID NO: 350341 - DNA, 122 bp, Homo sapiens
cctgttaaggcccagctttgtgggaggctaaggcaggaggatcgctggagcttaggagttcgaggctatcgtgtgctgtgatcgcacctgtgaataaccactgcactccagcctgggcaaca

SEQ ID NO: 350342 - DNA, 122 bp, Homo sapiens
tggtggctcagaagacgagggcggcagcaagaccctcgggggaacccttagggaagtcaccgggttgtccttttaaacgatgtgtgccaccgcacagaaactgcaaaggagaaaactaaaat

SEQ ID NO: 350343 - DNA, 122 bp, Homo sapiens
atgatgaaaaatataattaagagattgactctttatggcttatggccgctctgacagactcgtatttctcaaaacttacattcagaagacactgtctgccactatttgaaatctttagagct

SEQ ID NO: 350344 - DNA, 122 bp, Homo sapiens
gttcaggccgggcagcttgtccaggggcctcaacaccgacatcacagccgcaggaccaaccgttgctcctgcggtgcgcgccgatctttcaaaccgccctgagtccagcccctagagcgcgg

SEQ ID NO: 350345 - DNA, 122 bp, Homo sapiens
ggggctggcgaggccagttttctccagcggttctaagccgctcgagggtggtgcccacgccggcttccaaaacaggcttgagccaaatccacgtcatggcaataaacgtgcttcctggggcg

SEQ ID NO: 350346 - DNA, 122 bp, Homo sapiens
ctgggatccactgttcgactcgcaacacctttccggagcccggcgcttcactcgcagcctcgcagcctcgcaaacgcccgtccctgcccccgggcgcgtcccagcctcctcgggttcccacg

SEQ ID NO: 350347 - DNA, 122 bp, Homo sapiens
gcaaacaacataattctttcatgtggcattctctcctttgtgctcatcatgcttgatgatcgctgaccagttctaaaatagagtccatgggttcaagcctttggctgtttctgggctcttag

SEQ ID NO: 350348 - DNA, 122 bp, Homo sapiens
gtactggacgtttgattctacacatagttgtattcaagattgaataaactaggccaggcacggtggctaacatctagaatcccagcacttcgggaggctgaggtgggtggatcacttgaggt

SEQ ID NO: 350349 - DNA, 122 bp, Homo sapiens
gctccagcgcctatcacccctgactcggggttagagggcaggacagaggctcagggtgtgcgcgaggagggcagggccaagcagcccagcggaggggggcgagtccgggtgattctcgggga

SEQ ID NO: 350350 - DNA, 122 bp, Homo sapiens
gaaaaccatgaaacagccctagtgttgcagtgaagctgtgacaggttgactccttccactcgggaagcccaagatggccgggccaggaacccgggaggctgctgaagtctcaattcccctcg

SEQ ID NO: 350351 - DNA, 122 bp, Homo sapiens
gtacaaagatgactttcctgagaagctgaagagcttccccaacattggcagcttatgaaacgtgtcattggtggaggtctgaatgtgaggctgggacagagggagagaacaaggcctcccag

SEQ ID NO: 350352 - DNA, 122 bp, Homo sapiens
gctgggcagacgggcggttttatttaccctcttcctttaaagggtttaatagacaggaagcgaaagccggctcttcccgggttcccaggggtgggggtggagccggccgagaggaccccaga

SEQ ID NO: 350353 - DNA, 122 bp, Homo sapiens
cacacacacacacactcaagctgccagtctgtcttaaggcagtggcagatgcctgattggcgggctctgtttattctgtgaccagattccttctaaaagaaggaaggccatgtctgcctgaa

SEQ ID NO: 350354 - DNA, 122 bp, Homo sapiens
tccagtattttgaaggtattcatcaatgcttactttctttttgagtggaaaaactgtagacgtttggcaaccagtctgataaattgtttttaaatcagaagactgcgagtcctgaaaaatgt

SEQ ID NO: 350355 - DNA, 122 bp, Homo sapiens
ctaacagctcagctgcgacctcgcctcaaacgcgtggaactacacttcccagaaagccagcgtcctcccgtggactccatttcctagaggccttagcggccgccttgctcctctaggtccca

SEQ ID NO: 350356 - DNA, 122 bp, Homo sapiens
caccctgggggccatggtctgtttgcccaggttactagagctcttggcaggggatgttggcggggggatctgagaagggtggcaggaactcagcccctggctttctccaggatggcttgaga

SEQ ID NO: 350357 - DNA, 122 bp, Homo sapiens
aaaacgggaagtggggcatgcaagagcctggattgcaatgatctattaaagatggaactccgggcttctgatacatgacctggggcccggaaacatttgggtgccccacaggacagagcatg

SEQ ID NO: 350358 - DNA, 122 bp, Homo sapiens
ccaaggagccgcccctccggggtagctgtgcgctgggcggcgctcggaccccttggcagccgcaggtgcctccccagcccagcccagctcagtccagcgcagcccagcccagcccagcccgg

SEQ ID NO: 350359 - DNA, 122 bp, Homo sapiens
cagcccagcatctggctcccacatccaatcacggcctaggcctggcacaccccagcactacgtgcagcaacatgtgaaacacagtcacgcatacacacggaaatgtggccttctgctctggg

SEQ ID NO: 350360 - DNA, 122 bp, Homo sapiens
agcagcctttacttggaggtcgagtccctccccgagggaatccgtgtacagttacactagcggtcgctgccagtgctagcccattcaggatagcccccctcaccccgcccccagcccccgct

SEQ ID NO: 350361 - DNA, 122 bp, Homo sapiens
tgtgttcctcagtaccgaacgggctatttgtaagatgccccgtgggttctatctcccttccgactctctcctctcctgtaaaacgttacaggttcccccatatggcatatccctccctcacg

SEQ ID NO: 350362 - DNA, 122 bp, Homo sapiens
cgcggtgaggaggaggaacgccgcaatcgtggcgtgctgggaggcgagggccgcgggccgcgctgcgtgcgcagggcagagctccttcaggaacacgagaggaataaagacggacccacccg

SEQ ID NO: 350363 - DNA, 122 bp, Homo sapiens
gctggccctttgaagaatcacgcgtttcctcggcccagaaaatagactgggctagaaaggcgcccggactccaattctgggcccgggtggttgcagtttttcaaagggatgtgaacggtttc

SEQ ID NO: 350364 - DNA, 122 bp, Homo sapiens
gggcgcgggccggggccgctgtcagcgcggcggtgacagccatgttgccggggagcgccgcgccgcgaatgtaaacaaagagccaaaatgtcttccaggaaagagcggctcccgggccggcg

SEQ ID NO: 350365 - DNA, 122 bp, Homo sapiens
caggggagggtccacagggctcctcttctgggactctcaggctgtcggcttctcctagagcgcaccctagtctcccttcccttgccagcttccctggtgaccagccaggacccaaatcacct

SEQ ID NO: 350366 - DNA, 122 bp, Homo sapiens
gggaggggaccgcatggatggagctgggggtagctgggcggcctccggagccgggagagtcggcagctgcacttccgccagaggtgggtgtgtccttcacatttcaggaagggagacttggg

SEQ ID NO: 350367 - DNA, 122 bp, Homo sapiens
ggagcgcatttagaggaattcgacgaaaacacaggaaatcactcctctcccgctcctgggcgccgctgccactggggcagaggactgggaaccgcggcagcgggataagtggcccagccaga

SEQ ID NO: 350368 - DNA, 122 bp, Homo sapiens
cgggcctcatgaccctgggggctgcccccctcggtgctcccggagcctccagtagagtagcgtcacaagcaatctccctggcgcttcctgggtggggacccctgctccgtccccgcttccta

SEQ ID NO: 350369 - DNA, 122 bp, Homo sapiens
cagggctccctctggacctcgagggcgggcgctgggcagagcagggctccctctggacctcgagggcgggcgctgggcagagcagggcaccgcggagctcccttcaggccctcaacctgcgc

SEQ ID NO: 350370 - DNA, 122 bp, Homo sapiens
gccaagcgtgcccgtgcgctggtgaggtggcgtccgttctacccggtcgctcccgttccgcgccatgcagagcccagtctctggcacctggctgctctgatctggtctcagcgcggagggag

SEQ ID NO: 350371 - DNA, 122 bp, Homo sapiens
gaagggcgcccgaggctgcgcccggggggtggaggtggagcgggcgggctaaggtgggtgcggaagcaggacccaaaccatggtcccacgggactagaatacccaggcaggcgggagagtgg

SEQ ID NO: 350372 - DNA, 122 bp, Homo sapiens
tgctccctgctgccgccgtgaggtcagtctggattgaggtgcaacgctgctctcggatctcgcccaacccaaagcctggtttggaggcaagatctcaagaggaaagggttttcttcattttg

SEQ ID NO: 350373 - DNA, 122 bp, Homo sapiens
gggtctccctccctgcctccctgactttgcaacaccgcgttccgggaggaccggcctcggcgagggaggaggcgggggagctgcgaacacccagacccaaaccctgacatgctctggggcgg

SEQ ID NO: 350374 - DNA, 122 bp, Homo sapiens
tttgaggatcttcccaagcttgagattctgaactggagtggatgcccttcaggatgagatcggagggcctatttgcactgggttcctggaagagccaagtgctggaggaggggagggccctg

SEQ ID NO: 350375 - DNA, 122 bp, Homo sapiens
gggttccggggaggcggaagcgggtcctggggaggcagaagccggttgtactgcgcaggccgagcgcgcctggggaccacacgtgggggagtgaggtttcacagccagcttctgggggctcc

SEQ ID NO: 350376 - DNA, 122 bp, Homo sapiens
gaacacgcccagggtaggtctcaatcctggaggcatggcccccagctccgcgccaggccccggcagctctgcaccagctgtgaaagggttactatccaggagagcaggcagcgttgaataga

SEQ ID NO: 350377 - DNA, 122 bp, Homo sapiens
gactgatgtgagttgccctcgcacacattttccaaactctccaaaaagcagctttctctgcgcgcatctgtgtgtgcggacggggcctggacttcgaaccgccggcgcggctccacgggctc

SEQ ID NO: 350378 - DNA, 122 bp, Homo sapiens
tgttgtactctctaaacctgcccagggaccttaccagattcgtgtcactgccagtttctgcggctgaagccttttcatcactacccgctgggagacccacagagtgtgcatcagtcaccacc

SEQ ID NO: 350379 - DNA, 122 bp, Homo sapiens
cccatgctggatgcttcctgtcctccaacactggactccaagctcttcagttttggaactcggattggctctccttgctcctcaacctgcagacgtcctattttgggacctcgtgatcatgt

SEQ ID NO: 350380 - DNA, 122 bp, Homo sapiens
ccagaatttgtgcttgtacaggaatttagaaagggacaggacttaaagataaaagtcttacgttagatcccgctcacagttttgtgatcatgattagtcaacttaagcccctgagctgcctt

SEQ ID NO: 350381 - DNA, 122 bp, Homo sapiens
ggcctttctgctgcggaggggaagcttgggaaaaagagaaagaaaggagagagatcccggcgggatcatgcgaagggagaaaaatcaagctgggtgaaaagcaggtaaacaagagagatgtc

SEQ ID NO: 350382 - DNA, 122 bp, Homo sapiens
tgttcatcttgtagtatttctagacaggctgaaagcaggaaatccttgcaatcttctgaccgagctgcatctctcaagactgccaggtcaaaaggagccagaaattctccaagatgtgagcc

SEQ ID NO: 350383 - DNA, 122 bp, Homo sapiens
cacaggggctcggcctccactacggcagcttcagaggcggcagacgagcagctgagggcccgtgctacagacggagcagggcgggcttggattcgaggtctgctaccgacaggctcgatgct

SEQ ID NO: 350384 - DNA, 122 bp, Homo sapiens
gttagacaggctcgcctgtcaaagccctgcagcctaagacccccggagctcacctatggccgagcaggctgggttatcactcagtgcagcaagagggaacacatgccctggggaacctgggc

SEQ ID NO: 350385 - DNA, 122 bp, Homo sapiens
cgattatctgtacccaaaacagtatgagtgggtcctcatcgcagcctatgtggctgtgttcgtcgtggccctggtgggcaacacgctgggtaggtccagggcttgcccggcagtgctgccgg

SEQ ID NO: 350386 - DNA, 122 bp, Homo sapiens
cgtcgtcatgggcttggtgggcacctacagctgcttctggaccagtgagtgggcccaggccgaggcaggcccgcccgggtacccatgcccggccggaggtgggacttagggtgggggacgcc

SEQ ID NO: 350387 - DNA, 122 bp, Homo sapiens
ggctgcctgcatcctcccgggcttcctacccctggagcttctcaactccattctctttcccgcccagtggcccgcccgctgccgcccccggccatcccctggcccccggccctcacccggcg

SEQ ID NO: 350388 - DNA, 122 bp, Homo sapiens
atttttagaaaaaacattaagacagaacttaaaaacaatagattgactataatccaaagacgagtgtacctctaaccacaattttcatttatttttaaatgtttccttcatggcctttcttg

SEQ ID NO: 350389 - DNA, 122 bp, Homo sapiens
cggcagacctgctccagaaaacacggcaggctgcattcggcagacctgctccagaaaatacggcaggctgtatttggcagacctgctccagagaacacggcaggctgcgtttggcagacctg

SEQ ID NO: 350390 - DNA, 122 bp, Homo sapiens
aaagaggcccgggaacgttggagaaagttaggcactagaattagcaaacgggaccccagccgcagggcagtgtggccttgcctcttggcttcccagcaatgtggcctggggcagctggctta

SEQ ID NO: 350391 - DNA, 122 bp, Homo sapiens
cagaccaaactgacccagcccgctcgctctctccccagctgcagcagttgccacgatgatcgtgcccgtgcccaccaagccaacggagggccaggacgtaacactgaccgtgcagggctacc

SEQ ID NO: 350392 - DNA, 122 bp, Homo sapiens
gacccgggcctgccgcctccctccagcaccccgggctccgggccctagttgcttgggcaacgggaactgtcagcgacctggcccaatcacctctcggaacgtcactcgggtaggtccagagg

SEQ ID NO: 350393 - DNA, 122 bp, Homo sapiens
ggtcacccctgcctctgccgggagcccggagaagctggactcagggagccaggacaggctcggatcctaaggccagcatttatgctccctgttcagagataggaaaaaagacccctttcttc

SEQ ID NO: 350394 - DNA, 122 bp, Homo sapiens
aacctgctgggccaggagacacgcgaccggcagctcctggagcgggcggagaggaaaggccgctcaggtgggtccccgcttgccttcctgtggttccacccgaggtgccgcgtcgctgctgg

SEQ ID NO: 350395 - DNA, 122 bp, Homo sapiens
agtgacaatctataagtatctcaagatcaaatggttaaataaaacataagaaatttaaaacgattaaaatatgcctcagtcttgggaatcctggtgtctgcaacaaaaaaacttgaggctgt

SEQ ID NO: 350396 - DNA, 122 bp, Homo sapiens
gtctaggaggacagtgtggccaatgcacctattgtgtccctgctgcagaaaggagcctgccgattggccactgtctgcagcacatagcactggctggttataaaggacttgtctaggggaga

SEQ ID NO: 350397 - DNA, 122 bp, Homo sapiens
gatctagtgcctgaaaaccgataaggcacaaagcccactccttcccttctaagcggttagcgtggggcccgttgtaccgctcaggtttatctcagcataacactagctcactcaccaaagag

SEQ ID NO: 350398 - DNA, 122 bp, Homo sapiens
ctcgaagtcatacagtcctatagagaaataagaaggatccacaaacaaaatcagcagcagcgttgcatgatgatgaacttgctatcacttgagatgatcaggaaatgccaggtgacaacttg

SEQ ID NO: 350399 - DNA, 122 bp, Homo sapiens
tgacctctggtgcaacatctgaaagcccacgacaagcctcctgggcttttccatgaatatcgccgtgcccctgcctacggatatgctgatgtgtgtatacaatattctgtgagaagcagaga

SEQ ID NO: 350400 - DNA, 122 bp, Homo sapiens
ccatgttttattttctttgtagccattatcacgatctaaagtaagagtatttgctgtttacgtgttgattatctctttcgacccattagaatgctggttccctgaggtctggcatctcgttt

SEQ ID NO: 350401 - DNA, 122 bp, Homo sapiens
ccggaaggtggcgcggccaccagtaacatgatctctagactgggacggtggggttcctgccggctgtattcgggccttggactggactgagaagctacggtgcggatccagctggggtatca

SEQ ID NO: 350402 - DNA, 122 bp, Homo sapiens
gagcgttgagggagcagggggtcaggcccccccgagctgatgatggtgggcgtggctcttcgcatacttggtccgcaccgggccgtgtgttccaggggcagaacagggaggaatctcagcac

SEQ ID NO: 350403 - DNA, 122 bp, Homo sapiens
ttgtagcgtgtgtccatgttgcagcgtgtgtccatgttgtagcgtgtgtccatgttgcagcgtgtgtccatgttgcagcgtgtgtccatgttgtagcgtgtgtccatgttatcatatgtatc

SEQ ID NO: 350404 - DNA, 122 bp, Homo sapiens
gaaaaatgcagaacagaaagatgggtgtttcatgttggaaaaaaaaaggcattttcacaacgggtttgccaccaaaacacaggtgtcatgaaaaccacccctaaatcaaaaccaaaatggga

SEQ ID NO: 350405 - DNA, 122 bp, Homo sapiens
gaagctcaggtaggcagccaggtggggggtggcagacccagagccttgggcagctgccagcggccgcctctgccagctatcactttgcagccgtgtttgcaaacctcagcaggcttgccaag

SEQ ID NO: 350406 - DNA, 122 bp, Homo sapiens
gcctaccaagtgtatttcctcgcgttttatagggaaaataaggcccggagagagacgaagcggcttgtccttaagctccaaaccccactacccaactttggagaagtctccagacctctcgg

SEQ ID NO: 350407 - DNA, 122 bp, Homo sapiens
gacttagaacataagaaactccaagagggtgtagggattgtcttagctgtctccctcctccgccggcaccgctgaaggcagcccctatggagggcgctaaacctcggggccctgggtttcta

SEQ ID NO: 350408 - DNA, 122 bp, Homo sapiens
ccttccggcagccctcaggcgcccctccacaggcaccacgagctgtcgcctgtcacccaccgctctggcccacctcccgtcagcctccctgctgcactctggagcacgaagcctgctcccgc

SEQ ID NO: 350409 - DNA, 122 bp, Homo sapiens
cgctggacagaaacctcctcagcgtcttgcggcagttgtaatccagggtggtggtgtagacggccttggggtacttggggtacacgatggtggtactgaggaagcgggtgggcctgtggcgt

SEQ ID NO: 350410 - DNA, 122 bp, Homo sapiens
agaacatgtgatcttaggaatgaccaattgggaatgagatccaatcatttccttcattaccggcctctgcatttttttctctgagtcatgtttttaatagaaatttctcaactttggttctc

SEQ ID NO: 350411 - DNA, 122 bp, Homo sapiens
ggtgggggcagccgcggcggtggggttggcagggtgtgctggggcctggaggaggcgccgcgcggccagggagccagcgggaggccgcgcctggcaggtaggagcaagccccaaagaccgca

SEQ ID NO: 350412 - DNA, 122 bp, Homo sapiens
ctgcttccagagccaaggcgacgcgcccactgtctcccagctgggtgggcttccccaggccgtctgtggggcagtcacctccttgatcctcccgtgggcaggtctcacgtcccctttgcctc

SEQ ID NO: 350413 - DNA, 122 bp, Homo sapiens
acaaaaagtaattttctatctagaatgtagtaccctcttttccccagatgcttgcacaatcgcatatgttctaattcctattatgaattccttatcccatagcatccagagtggctctgcat

SEQ ID NO: 350414 - DNA, 122 bp, Homo sapiens
tatctgtcaccgagtctctttcaccccttctgcgtgatgacatcaagtggaaatggtacacgtttaggaggcaagaggctgacaggcaggaaacacaattgagactgagctttcttcagcct

SEQ ID NO: 350415 - DNA, 122 bp, Homo sapiens
gtagcccagacacctgcgcccctggggctgcccccccgcaggtggacttgagccgggtctcgttgatgtccaggctgcaaaaggcctctgacggcgcttaccctgtgccgccacgattttga

SEQ ID NO: 350416 - DNA, 122 bp, Homo sapiens
atggcttctctcatggatgagagagacccacagagggtcctcggcgtggcctggcacacccggcctgcccacatcctggtcgcaggtgctggctccccgggcagggccaggcccagcagcct

SEQ ID NO: 350417 - DNA, 122 bp, Homo sapiens
gggagtggatggaacacgggatgtgtccctccctccagcttgccacagcttgctcctgagcgactcctatatatggaaaagcgaaagtgcctgaaaaatcatgtgagaaaattggaggagtc

SEQ ID NO: 350418 - DNA, 122 bp, Homo sapiens
gccgccagccagacccgctgccgcgctgtgacctttcaccccgcccctcgcgcgccggcgcgccgccgcctcacgcgcagccgcactgctcgcctccgcgcaccctgccccctccactccgg

SEQ ID NO: 350419 - DNA, 122 bp, Homo sapiens
tcacccccacgctgaacccagctgccacccccagaagcccatcagactgcccccagcacacggaatggatttctgagaaagaagccgaaacagaaggtaattccagccctggttttctgctg

SEQ ID NO: 350420 - DNA, 122 bp, Homo sapiens
tagggggaaagtggcagaaatggctttacttctcctctgtggacaggcggtagagagccgcgcccaggtcctccagcttctccttgtcctccaggtcctggtacaagcctttgggaacgagg

SEQ ID NO: 350421 - DNA, 122 bp, Homo sapiens
cgaggggcgggcgctgcggggaagacggtgctactcccgcgcgggaccgcgtgatgtttccgagtcagcggtgaaacctgcggcttccgcgcgtcctttaaaaatacaggtatttagataca

SEQ ID NO: 350422 - DNA, 122 bp, Homo sapiens
ccgctcgcagacgggggagcccagagcccacgcgccaaggccgccaggcctttcctccctcgcgttccctcaggcgcgtcctccacccgtttcccccaggcagggggaagccccgagaagcc

SEQ ID NO: 350423 - DNA, 122 bp, Homo sapiens
ggggcgtggactggctgtggggcggggactggctgggggcggggactgccctggatggggcggaacttggcttgctgtggggtggggcctggctgggatggggcggggcctgacctccgcgc

SEQ ID NO: 350424 - DNA, 122 bp, Homo sapiens
ttgtccagaaaattacctagtgtagagctttgcgtcttcgtaggtgtggacggagactcacgactgaaggttgctaaattgcgtttttcttggctactcaggagcgtacgtacctggctggg

SEQ ID NO: 350425 - DNA, 122 bp, Homo sapiens
cgccgacccggcgccattttggtggccgggcgcggaggtgattccacactgaggcgagcgcggcggccggggtggtagtggcagtgttcgtgtgctcaggtctgaatcgccgagggaggagg

SEQ ID NO: 350426 - DNA, 122 bp, Homo sapiens
ggatctagaagaccggaaggctatttccagggcagcacccccaggactctggggcacacacgtccccaggcagctccggtgaggccaccctcgccccctggtttcaactcctgctgtgagca

SEQ ID NO: 350427 - DNA, 122 bp, Homo sapiens
cctagggattgggaggaagacagagacagacaaaccaacagagatggagagaaagaccaacggatgctacggagagagggaaggaaaccccagtgtccaccacctcccactcagatgagttc

SEQ ID NO: 350428 - DNA, 122 bp, Homo sapiens
cggcccccgaccccagtcctggccccaccatggatcctgcatcgccgggttcggccctggcgggttcagccccgcagagtcggcacccgggccaggtccatctcctccagccctcccggtgc

SEQ ID NO: 350429 - DNA, 122 bp, Homo sapiens
ctcaccatgctgcggtcctcctgcatggtgaaggggttcacacagcccagacacaggcaccgtgcctccggcaggtccacggggatacggctggggtcgtggttgatgctgcagggagcaga

SEQ ID NO: 350430 - DNA, 122 bp, Homo sapiens
tcttctgacagagatctcaagtaacgggcacgctatctaacaacgacacgaacgctgcatcgctgctctagggaagaggttaactgacagaatcacaatccaattctcacatacacgcgcgc

SEQ ID NO: 350431 - DNA, 122 bp, Homo sapiens
cagcagtggccggtgtccagctgcctactttctgcccggatctctggctcctcatctctccggtctccgcagactaaagccctcgggatatgcagcagccatgcctgtgcacacgctgagcc

SEQ ID NO: 350432 - DNA, 122 bp, Homo sapiens
tcagcggggtcgcgcaccgctcctcctattgggcggcagcgaccaatagaatgtggggctcgcccgcgctgctacgtcacgtctgggaccgcggagtattccaggcgcctgcaactaaacgt

SEQ ID NO: 350433 - DNA, 122 bp, Homo sapiens
gaagggaaagagttaggatttcccaagaaccagccctgaaggcctggaggtgggggatttcgcttcttagttggacgggagccccttgggttcctcacttcttagcccgcgccctgcgggag

SEQ ID NO: 350434 - DNA, 122 bp, Homo sapiens
ggcatctagactggggtacatgtggatgccacacagcagttgccactggtcctctggccccggagacataatattgtcccctcacacacacccacacagccgcccaggatctccagggtcct

SEQ ID NO: 350435 - DNA, 122 bp, Homo sapiens
ccgccctcctgcggtccttccacgctcagccaggagccccaggctcaccaggagcccctgcggtgcctcctcggtttctcggcacagctcctaccccgtcttacagcattcattcatctcaa

SEQ ID NO: 350436 - DNA, 122 bp, Homo sapiens
tagtggaaactgtgtcttgtaagagatggcccccagggacctcccacatccctaacctctcggaggactgcaaaagacagcatctgaagcacctcttgcctcgccttgaatcatttgccact

SEQ ID NO: 350437 - DNA, 122 bp, Homo sapiens
gaacagaaaaactcttcctaacttaaaccgtgcagaccagcccaagtctgggcacaaagccggctttatgtgaatatccgtgggacgatcaagaacaatctccacgtgggttacatccccac

SEQ ID NO: 350438 - DNA, 122 bp, Homo sapiens
cgtgacttaagtgtggaggaaaaaaccctttgcagctaatgttggcaaaagtgtgtcccccgtagatttagtctaagaattaagaaactggccgggcgcggtggttcatacctgtaatccta

SEQ ID NO: 350439 - DNA, 122 bp, Homo sapiens
gcctcatcccctttattttccctgtgtatacattcactgctgtccagtgctgtagacaaacggtttgtttgaaaacattttgtgaaagcctgctttgttccacagcattgtctccactcttg

SEQ ID NO: 350440 - DNA, 122 bp, Homo sapiens
ctggtgttcatgtttgccgttcaatgaagtcccttgtcaaagacaaggacggtcaattcacgtgtcactttcactaggcagaagtttctccaataccttctggctacttgaaagttactaca

SEQ ID NO: 350441 - DNA, 122 bp, Homo sapiens
gtatctggttgcccgccgggatgccgggaagccggagttccagccctcccctgactcctgcgaaaacagaaatagctcagggagatgggacacagttgtccacatcagtcaagaggacccag

SEQ ID NO: 350442 - DNA, 122 bp, Homo sapiens
ggctacaatgattcaattcaagcgcatggccttgtgcaaggagcatgctccagcccttctcgtcaccttgccggggcagaagccctctccacgccgctctccccattcattcctttatggga

SEQ ID NO: 350443 - DNA, 122 bp, Homo sapiens
gcaccctgcctgcatttctggaggttcgggcggttccggggctctgcaggagcctccaggcgtgataaagagcgctgccggcactcccggggtctcggcctctttggggcccattgccaagc

SEQ ID NO: 350444 - DNA, 122 bp, Homo sapiens
agaaaagaacgcctaaatctgaaagatcttgttggaggaaatttctttcacattgacacacggatgaaacaggtatttcaaaatggaggaacttcttgcacttcacagcatacccagtaggt

SEQ ID NO: 350445 - DNA, 122 bp, Homo sapiens
ctgcaaccctcctgggttgcggcgtctgctcgcccttctgcgtccgcagctcggtccccacgttcccgctcgctgggccccacaggccaggagcgttgcccctttaacaagagtagcccggg

SEQ ID NO: 350446 - DNA, 122 bp, Homo sapiens
ggaagcacaaacacgaccccgaaaacgcaccatgtcctctggccggaaaacgcaggctcgcgccactctctctgggcatgcgcaaagccaagctcaagcgggaggccaccggcaagcggctc

SEQ ID NO: 350447 - DNA, 122 bp, Homo sapiens
ctccgggctaagggctttgttcctgctggccacctgcagtgtgtggtaatgcccttttaacgttctatccagggccctgcatggactgtctgatttgacattggacactactaagaggagac

SEQ ID NO: 350448 - DNA, 122 bp, Homo sapiens
ccctctccccctctccctcaccgccccaccccagggccgcggatccttcctcggctccctcggactcctggccaatgagggagaagccttctggaggctctccgagctttgggctcctgagc

SEQ ID NO: 350449 - DNA, 122 bp, Homo sapiens
aaaaaaaaaatttttaaattagctgggcgtggtggcccgcacgctgcggtctcagctactcgggaagctgaggcaggagaatggcttgaacccaggaggcggaggttgcagtgagccgagat

SEQ ID NO: 350450 - DNA, 122 bp, Homo sapiens
gggagccgtcttcaccggttattccgggatccagctgggcgctggggctggcccgggcttcgctggggaccgggcggcgcggggcgggcgcggagacgcacgcccccgcccgccccgggccc

SEQ ID NO: 350451 - DNA, 122 bp, Homo sapiens
tccagctctgggcctggtgaagacgggcacaaaacagcagcagtgaaacacaaagtgaatcgaattagtcactactcaggcctggggcctcagctggaaatgaccttcagaattcaacggag

SEQ ID NO: 350452 - DNA, 122 bp, Homo sapiens
ttatgaatgtgggttcaaagtgctttgatttgtttaaataccttgcataatgttaaagggcgaagggaggtgctccagtggattatttttcaatttaggagttcaaattctttgtaaatttg

SEQ ID NO: 350453 - DNA, 122 bp, Homo sapiens
gtacttttacactcctttgtcttggaactgtcttatttttgttctgtaaatgtctattgccgtaaattgttaataaaattgaagtttccattttaaatgtcgagctgacttaaatacttgat

SEQ ID NO: 350454 - DNA, 122 bp, Homo sapiens
ataccagtaaagctcaattagaaactaggcctttcttgtctagttcacaggcacccctcacggctgtgtggaggtggcctgctggaatgcagggagaaaaggctgtgcgggtcctgccaggc

SEQ ID NO: 350455 - DNA, 122 bp, Homo sapiens
cagcatgaccatgccggacgtgtactttgtcaacatggcagtggcaggcctggtgctcagcgccctggcccctgtgcacctgctcggccccccgagctcccggtgggcgctgtggagtgtgg

SEQ ID NO: 350456 - DNA, 122 bp, Homo sapiens
cagccaatcccggctatgcgattgttagaccaatggctactcggggacgctatgcgacagcggcgggtttgctgatgattggtcgggaggccgccggcgaggcggatgagggcggggtgcgg

SEQ ID NO: 350457 - DNA, 122 bp, Homo sapiens
gcgcgcgccattatgcccggctaatttttgtagttctgggattacaggagtgagtctccgcgcccggccgtgtccatctctttatctcagtcctaagacctgaatcactccttgaacaatta

SEQ ID NO: 350458 - DNA, 122 bp, Homo sapiens
aaaaaaaaaagaaaaaagaagctgggtgtgatgacacatggctgtggtcccagctacttgcgagactgaggtacgaagaacacttgaatccaggaggttgaggctgcagtgagctgttttca

SEQ ID NO: 350459 - DNA, 122 bp, Homo sapiens
ctgcggccctaatttcgcagtctctccccagatcaccgcacagcagatcaccacccctggcgcgcagcagaaggttgcctacgccgcgcagccggcccttaagacccagtttcttaccacac

SEQ ID NO: 350460 - DNA, 122 bp, Homo sapiens
agtagtatagctctgtgaatacctcatgactgtcaacgtgaagatcccgtgaggggtacgcgagctcaaggaaagaaagaggccgtgcagcttgggcggcttggacgacgtatctatccctg

SEQ ID NO: 350461 - DNA, 122 bp, Homo sapiens
gcgtggggagtcttcggtgcgtgggggcggcttgctgtccagcctgtgtgggggccgtcccgtcccacactcccctgggcattcttggactcaaggccggggctctgcgtggcttgctggga

SEQ ID NO: 350462 - DNA, 122 bp, Homo sapiens
agctctcgcagggcctgtccccacactgcccggacagcccccgggccagcactgccatgtcgaccctttcccatggggcacgtttggccttgagacgctccacagggcttggcctctggtct

SEQ ID NO: 350463 - DNA, 122 bp, Homo sapiens
gatattgaaaatgtaattggtttccttctcatggaagcagcaggtgccacttcctgagatcgcctttctgtctccactttgtgcaggggcacaaagctcactgcccctcctcagaatgtgac

SEQ ID NO: 350464 - DNA, 122 bp, Homo sapiens
gccgggaaggggaccccggagcccaccgctctggagtccccgttcgtgcagcagtgctcacgtacctcgtcccttccgcacacctgctggatctggaaggaagcaggtgtgagcaaatttgg

SEQ ID NO: 350465 - DNA, 122 bp, Homo sapiens
aattgattggccacagtggctcaagcctgtaatccgagcattttggaaggccgaggcacacggttcacttgaagcgaggagtacaagagcagcctaggcaacatggcaaaaccctgactcaa

SEQ ID NO: 350466 - DNA, 122 bp, Homo sapiens
ggccgcagcgccccctggtggccggcgcccggcggcgggatgaccgagccgccctctgcgcggagatctcagcagcaagacccccggaaaggggggtgcagtgggaaacagccggcagctca

SEQ ID NO: 350467 - DNA, 122 bp, Homo sapiens
tacaagtcgctgagttggggacacccgatccttagggggtggcgcatgccatgggtgtgacgctggaccctccatgggggaaccagaggacccagccccaggatggtttgaggacccccaag

SEQ ID NO: 350468 - DNA, 122 bp, Homo sapiens
agtaactcattgtagtacctcggggcggcggggaatggggtaagaccgcggggaagggggcgctattttcgggggcatttgaaaagcacggtctggttggaatgttatcgtctttcagatgg

SEQ ID NO: 350469 - DNA, 122 bp, Homo sapiens
ggatattgttcgcgccgcgggggcagctcctgaaagctgaggctggcgggggttgggtcccgctgggaggggactggtctgggaaggccccagacagcactgaggtgaggtccacagtggcg

SEQ ID NO: 350470 - DNA, 122 bp, Homo sapiens
tgcttgcagcattctttcttgtttatcgaagcagctctgagcctttttagcgtcctgaagcgctttgagtaacggatgaaagctatggagcccccaaatacgcgcaaatacctaaccataaa

SEQ ID NO: 350471 - DNA, 122 bp, Homo sapiens
atggccctggcttaatggacaccttgaagctggtggggaggacagtcaggccagtgcactcggccacttcaccatggacagagatccgtgagtgcaagccgtcgtcacagtctctcttgttc

SEQ ID NO: 350472 - DNA, 122 bp, Homo sapiens
agacgcggccgttggcaccaccaggagctgaggggtttctcgggcacaggatccccccagcggctcttgctcctccatgtcctgattcaacgctaggctccgttccacaccactcactcgaa

SEQ ID NO: 350473 - DNA, 122 bp, Homo sapiens
aggagaaggaggagtgagacccagccgggtcaataaacctggacgcttggaccctgcctgcgagtctgccggggcgggagggcgcgtcggtggctgctgggccttgcgcacggggagtcgct

SEQ ID NO: 350474 - DNA, 122 bp, Homo sapiens
tactcatgtaaaaaaaagaataaagctgctatgaacactctgtgtgcatttgctggagcacgtgggcaggtgttcttgtaggttatacattcagcatagggaatgatgggttacagggtatg

SEQ ID NO: 350475 - DNA, 122 bp, Homo sapiens
cttggggccactggtctggctgttggggccaggcggtgaaagtgggccctgggcagcctgcgagcagctctcacctctggccagcaaactccccgactatgccttgagggtcaaaacgtctg

SEQ ID NO: 350476 - DNA, 122 bp, Homo sapiens
agatacgggacgtgcaggaaacactgatgccccaggtcctgaccaccctggaggaggattcgaagatgacgcgactgatctcatgccgtattatcaacacgttcttaaaaacctcgggcggc

SEQ ID NO: 350477 - DNA, 122 bp, Homo sapiens
cgtggggtggccccaattcccctccattgatgattggaggggaatcgcttgttgtcacatcgaatcctagaaccctgtgagactggaaggaatttaatttgaaattgccgtgcgtaccagtt

SEQ ID NO: 350478 - DNA, 122 bp, Homo sapiens
tgctgctcaggacctcctcgctgccgggaaaactcctcgtgccgcacctacgcaacctggcgccgtcagatactctgctgcgctgcagctccctcagccagggctgttcccgtttagacggc

SEQ ID NO: 350479 - DNA, 122 bp, Homo sapiens
taaatagtagctaaatacaaaaacatcagggagaaggctgatcttaaacttagtatggatcgtgcaaaggttaatttgctaatatcctatgagcaatgaccagtccactttgggactctggt

SEQ ID NO: 350480 - DNA, 122 bp, Homo sapiens
ttcggcgcccccgattcccggggctgtgtcagagctgggccaggggctgaggaccccacccgcccggcccccggcccccggcccccggccccaggcctggcctcccggccccgtgccactta

SEQ ID NO: 350481 - DNA, 122 bp, Homo sapiens
taaatctcaaaaacgtgtgtgtggtgccctcagtaagacattctggataagacagggccacgggacgaaagtccatcagcacggcgggctgcggcgggggcggggcctggcggcagagggtc

SEQ ID NO: 350482 - DNA, 122 bp, Homo sapiens
cccgccgcgccggggcgccttttaccttctttatatttgcataacaatggcagcccgtgacgcgcgcgccggcggccccgggattgggccgcgcccacatgggggcggggcgtgggcggtgc

SEQ ID NO: 350483 - DNA, 122 bp, Homo sapiens
cttttgcacagactggggctatggttgggtcaggtcctgggggttgggactcaggccatccggtccttggaggatggtttggcaagagagcctggatcctgggggcagggcaggagattcta

SEQ ID NO: 350484 - DNA, 122 bp, Homo sapiens
gtccccccgacacacaggtggacccagggtcagctcgtgcacctgggaaatggctcccgccgggtagcaggggcggaggggcggggctgggcggaggggcgggggggcggggcctgcccggg

SEQ ID NO: 350485 - DNA, 122 bp, Homo sapiens
gctgctgctcttgcagcaggaatatatgttatttggggtcccattacagaaagaaagaagcgtagaaaaggtaagaatgagaacactgcatcatggtctgtagacttgacccagatccctgt

SEQ ID NO: 350486 - DNA, 122 bp, Homo sapiens
catcaccttctaagagaggccttccctgaccactacctgcatcatttgctaccttgttaccggacttaatttccctgcagcattttttactctttaaaattatcctgaccatctatttctta

SEQ ID NO: 350487 - DNA, 122 bp, Homo sapiens
gataggggctacatagtcggggcgggagggcccatctgagttcctgaggggcaagagtgccggctgctggctggggcagctgctcccctggccccctttcctgtgctctgggcatcagcctg

SEQ ID NO: 350488 - DNA, 122 bp, Homo sapiens
agggagtggggcgctagagcttccttccttagcagctgagaaccatttcatccccaccaccgctatcctgagaccccctcctctccccatctgcgtcggcttcccgcgaaccttccccggcg

SEQ ID NO: 350489 - DNA, 122 bp, Homo sapiens
gaggcatccctttagcttttccatagccttctgggagcccctgaatctgcatttgaatggcgcggctctgggtccgcgaaggtttggtgggctgaagtcgtccttcaggtctccaaaggaat

SEQ ID NO: 350490 - DNA, 122 bp, Homo sapiens
gtgtgagaaggagagagagagcgaggttgcggggggagtacgtgatggggaggcaggcagcggggtaaacccaatcagccaaaagcagcaactgccctctggagaagaattcggtctggccc

SEQ ID NO: 350491 - DNA, 122 bp, Homo sapiens
acgtgggccgcggtgagaagagagagcacccggctcgtgtcagggctgtaaggtagctgccgcttactcccggaaaccggtggccagtgacagatgctagcggtccataacttcggctttca

SEQ ID NO: 350492 - DNA, 122 bp, Homo sapiens
ctcgatctcctgacctcatgatccacccgcctcggcctcccaaagtgctgggattacaggcgtgagccggtttttaaggaaaggagaggaggcagagcttaacttgtttaccaagaatttat

SEQ ID NO: 350493 - DNA, 122 bp, Homo sapiens
tttttctcaagtaccaaagtaaatatattgggaaagtctatctgggtaataaattcgtcacgactaatgttgtttgttactattagttaaatgtgtgaaaactgaaatttggcgaggttttc

SEQ ID NO: 350494 - DNA, 122 bp, Homo sapiens
ccctgccacctgtttgttctgcaggtgagcacgtggagttcccaaggggagaactggccccgggctaggtgacccctctcagctcaacagttccatgtgatgctgagagatgtgcgtgcatt

SEQ ID NO: 350495 - DNA, 122 bp, Homo sapiens
gcgggctgtggaaagcccccacgggcgcctgacaggctggtccccacagtctcgcagcaccgccgtggtgagtctggccaacaccaagcacgacctggacctagtaaaggagcagctggagg

SEQ ID NO: 350496 - DNA, 122 bp, Homo sapiens
gagacgcggcacccaccggcgagcagcccgggctaggccgagcccgcgcccagcgccccgcgcccgccgcgtcccccacaccgggaactgcccgtacctgtccgacacgccgggatgcgctg

SEQ ID NO: 350497 - DNA, 122 bp, Homo sapiens
gagcaaaggggatcacaaacctccgggtttgctaatctgctggtgcggagttcagatctccgaagcctccctggagtatttctaggactcttaccgcttcccttataacgctgtgaccccag

SEQ ID NO: 350498 - DNA, 122 bp, Homo sapiens
taaatgatagtgtgggcttcagggtatggccaatgtgtgactgactgcccaggggtgtggcggtgcagagtgttagaggcatatgtattggggtgtcagggtgaactcttcctgagttgttt

SEQ ID NO: 350499 - DNA, 122 bp, Homo sapiens
ggaaagtggctggtctacacaggagatgctttccagcgtgaggaattctcccatcaggctcgaaacgagtcacttgttcaaggaacaagtcaaatgaaggcccgttcaggcttttccctccc

SEQ ID NO: 350500 - DNA, 122 bp, Homo sapiens
ttttcgtaggtcggaaacgtatttttcaattaatctcaatatggaggcccaagcgcaaggcgcccagtgtagactggcccgccagctgcagtagcccgagatgtacccgcgcgtgctctagt

SEQ ID NO: 350501 - DNA, 122 bp, Homo sapiens
ctgcctttttttccaatgaaaataacgaaacctgttatttcccattgagggggaaaaaggcgggagaagccccagcagaaatgaagctgctcctgaagcttccaacatgaaactcacctcgg

SEQ ID NO: 350502 - DNA, 122 bp, Homo sapiens
gaagtcccagggacctgcggagcgcagacataacacaacacagagcaaaactcaccgctgcggtgactttcactccacgcgatccgcttcccggtttacgctaaactgggcgctcgggacag

SEQ ID NO: 350503 - DNA, 122 bp, Homo sapiens
aaaaatgttcctcagacgcgggcggaggcgtagggtgacaaggctgtcgactcgcgcatgcgcagaagcacacttctgattcctctttcggcgctgcaaatggcgtatggggcggggcctgg

SEQ ID NO: 350504 - DNA, 122 bp, Homo sapiens
gttaaaggagaggaaaatcttccacatatccatactggagacaatggcgtggaagaaacccgtacggaagatcagagattgtttgataaatctgtcaccttatgtggaaagccatagtgtct

SEQ ID NO: 350505 - DNA, 122 bp, Homo sapiens
ttgcaccccaggcaggtggagccagctctcagcaaattgtcggcccccagtgcttggtcccggtgcacacaaaggaaactcaggtcgttctccagctgggccagtgattctcactcgttggc

SEQ ID NO: 350506 - DNA, 122 bp, Homo sapiens
ttcactctcctgcctctccacaagaagcccgagccacagacacaaaacaatatgctcttgcgtgccatttgttgcatgcccggtttttatttgacagtcagaaattcacatgccttccccat

SEQ ID NO: 350507 - DNA, 122 bp, Homo sapiens
caggcgggccaatgaggtcgaggggagctcggggtgggagatctgcggtcctcccagtgccggggaatggttgagtgacaggaccgggggggcggagccggcgcggctgcccgaggtggagc

SEQ ID NO: 350508 - DNA, 122 bp, Homo sapiens
cagtccgcccaattttatgctccatctcctctgtgtatgtgttagattctctctgccaatcgatgggaaagagcatttaggggcatttgcaatttcctttgtcacttgccactctgtgcgta

SEQ ID NO: 350509 - DNA, 122 bp, Homo sapiens
ccccgccctctgcgccttccaaagggcaaagtctctccgcctctcgccccgcccctgcttcgtcaggccccgcccacctcccaggtcccgcccaggcctggcttctgtcctgcgcgcagatt

SEQ ID NO: 350510 - DNA, 122 bp, Homo sapiens
aaacattatgacttttgctccgggttctgggccaggtgctagggagacaaggggcccctccgttgaagagcccacagtctagtggtgggagacagacaagaagactagtcattgcattagag

SEQ ID NO: 350511 - DNA, 122 bp, Homo sapiens
actcgcaccttccgggcagatggggccgccacctacgaagagaaccgtgccgaggcccagcgctgggccactgccctcacctgtctgctccgaggactgccactgcccggggatgggggtga

SEQ ID NO: 350512 - DNA, 122 bp, Homo sapiens
aaagatttactatctggccctttatagaaaaagtttgctcctccctgctctatgctgtcacgtaccttggacatatgaccactagtgcagagcgggtctcaccatattgttatcactaagtt

SEQ ID NO: 350513 - DNA, 122 bp, Homo sapiens
aaacactaacgatactagaatgcaaagctacaaagaggctggtctctaatgacacagttgcgtagctgacccaatgctagaaattacctctagactttcttttacttgagaaaataaaccct

SEQ ID NO: 350514 - DNA, 122 bp, Homo sapiens
cagaaagctcagagcaggctgcgggcagttcccgggttagtcagcagggggcgcgtgaggcggcctggcctggcggctccagctgaaatcagcacagcaggagggagggtgacagtgccctc

SEQ ID NO: 350515 - DNA, 122 bp, Homo sapiens
ggccgcccacctgcccgagctgctcagcctagtgcacctggacgccgtgcccaggccctgcgtgcagcaactgctggcctcagagcccctgatccaggagtcagaggcatgccgggcagccc

SEQ ID NO: 350516 - DNA, 122 bp, Homo sapiens
ggtgagagtgatggaggcagagggaactgcaggatcataggcctagacaggggatcctgacgcccttgaggaagtgagagaagaccagcgcagtcgtagtgggttaagtaacaaagctgaga

SEQ ID NO: 350517 - DNA, 122 bp, Homo sapiens
gactgggaagttgggaaactttgtgctgagggctgattggctggctggggtggagcccagcgccaggagctgggttgttcctgccccaccccactgtggaggagaagggtcactcccaccca

SEQ ID NO: 350518 - DNA, 122 bp, Homo sapiens
tccctcaacgtcggagttttaatcttggttctgggagacattacctccctctttgtggatcgctgattgctttcaaaacaaccaggaatcattttaccttacggggctagtgtgtgctatga

SEQ ID NO: 350519 - DNA, 122 bp, Homo sapiens
atatgattctagattatttagaacaataaaaatctatacacggaagctgcgtctaagaaacgaatatatagtgctttgcactcgactggcccattgtcagcatcccgcacttgttctttacc

SEQ ID NO: 350520 - DNA, 122 bp, Homo sapiens
ccccgccaggcgggatctttcccgggtcgggcaggttcgttcatttgttcacgaactcagcgtcagcgaggcaggaagcgggaagagagaggagaccccggataagaagatggtgctgttgg

SEQ ID NO: 350521 - DNA, 122 bp, Homo sapiens
aacaaaccacagggacacactggcttcttccaaagcagcgggcccacctagcttcacacccggcagagggaggcacatgtgaacccacctgagaggggagcacaccttccaagcacggagtc

SEQ ID NO: 350522 - DNA, 122 bp, Homo sapiens
ccgggcgggtagagggaagtttcgccgcgcctgcagctcagcgctgtggcttgtggctctcgctgctataagaagccagagaagggcgggacggtctgctggatttcgcaagagaagcggaa

SEQ ID NO: 350523 - DNA, 122 bp, Homo sapiens
ggcagcagtgtgaagtcttatgttgaagaaaaacctgcagtcacaggaccatcctgcggacgctgcctgaaccgtctcgcagcccagcaaagtccgaaggcgtgtctgaactcggccacatt

SEQ ID NO: 350524 - DNA, 122 bp, Homo sapiens
ccgcgcctccccgcccctccccgcccctcccagcgcctccccgccccctcgctccgcctccggcctcctccgagagctccagacctcccggctactcagaagccctcggactgcccggaccg

SEQ ID NO: 350525 - DNA, 122 bp, Homo sapiens
gtgtagatgccatgcagataacacagcagggtccaggcccttccctctggaactcacactcggctgtattttgggaggaaccgctgggcaggttctgcccaggaacagttaactctgcagag

SEQ ID NO: 350526 - DNA, 122 bp, Homo sapiens
gttgggccaaatggaactgccattattgtaggtcaagaacaggtcaatatcggccaggcacggtggctcacacctgtaatcccagcactttaggaggccgaggcaggtggatcacgaggtca

SEQ ID NO: 350527 - DNA, 122 bp, Homo sapiens
gatcaacaaaagaatgcaagataacaaggcccctaggcagcccctgggtcttgtggctcccgtcgaaggcagagctctggagccgcctacgccggggacaggcgactacacctggggcccct

SEQ ID NO: 350528 - DNA, 122 bp, Homo sapiens
ttaagcatgagtggaggttttgttctggttattttgactttcagccgctcgtgcttttcccggattgtgactcatgtttttggaaaggagtggactccgaccaatttctaaatagatattta

SEQ ID NO: 350529 - DNA, 122 bp, Homo sapiens
gaagaagaaatgtagtgtcactttggccagcccgagggactcgaactaatcctgcggccgcgagcggagccgaattcctagcgcagctgtgcgaagagccctcctgcctaggtgccggcggc

SEQ ID NO: 350530 - DNA, 122 bp, Homo sapiens
cagagccttaagttgggaaagcggctacgagacccacactcggttcaacccctgccccagcgaagtttccctgggatggggagaatggggcgtctcttgtattgggcttctgctaactgttg

SEQ ID NO: 350531 - DNA, 122 bp, Homo sapiens
caccccgtggcctggcgtcacagcctgtgggacagaaagcaggggaggtagaggacaggccgttttccttaagagcccaatcccggacacgcacacgccacaccagctcgtgtctcgtggtc

SEQ ID NO: 350532 - DNA, 122 bp, Homo sapiens
gcgagtctctagcacagccccgctcttgggcgttagaaccccgcgaggggggatgaaggacgccaccgaggaagcagaccccaccgggctcccgaggctgccaggccccccgctcagggcgc

SEQ ID NO: 350533 - DNA, 122 bp, Homo sapiens
taaaagactggcccaagtcctagaaacacagtcaccagtgggagcctgtcctggctggtccgggcttcttatgaagaaggcagaaaatcctaattttcaaatctgcacctttttgccatctt

SEQ ID NO: 350534 - DNA, 122 bp, Homo sapiens
gtgttgggtcttgacatgtaagtaggagtctgtcaaataaagaagaatagtagggcattgcgggtagaaaaagaagcaaatacaaaatgctgggaggtaaaagggtctggtgtttagggaga

SEQ ID NO: 350535 - DNA, 122 bp, Homo sapiens
ctgcaggcccggggtttgggcctttgcttcagatctcactattcacagacacatgaaccccgggcaggcgagtgggaggcggacaggggagcggttcttccggcccccacccgtggcgatcc

SEQ ID NO: 350536 - DNA, 122 bp, Homo sapiens
actccccattcttctcacatcctgccatcttcattcttctatattttctgcctggccccacgagatggcagtttgtaaaccaactcctcttccctattctatgacattgataggaatctacc

SEQ ID NO: 350537 - DNA, 122 bp, Homo sapiens
ggggtctagcccatgggaggtgttctgccaacgcgggtccctcccgtccccttcaggagccgcggtgcgctgaccacttcgaccccagccttcagagcagcccagacagaaagcggaagtgc

SEQ ID NO: 350538 - DNA, 122 bp, Homo sapiens
gcgcgggggacagtttcagcgtgagcggccccgacagtaggatgttggcggcgtaggcggcgcctgccagcagatccgacaacgtgaggctgcccaggagcaggaacatgggagcgtggaag

SEQ ID NO: 350539 - DNA, 122 bp, Homo sapiens
tataatatgaataataatttaggaaacggggatatgaaataataagagcagaatgcttaacgaaggaactagaaattcattagcaatcctgaattgctggaagaggcagcggttgaaaggca

SEQ ID NO: 350540 - DNA, 122 bp, Homo sapiens
tgatttgtttgctgcacgtctgtgcgaaagccacacggagccatcagtgtgggcgcctgtcgcagggcgggcacagccttgttggcgctccacgccgtatgggacagtgtagactcggtgtt

SEQ ID NO: 350541 - DNA, 122 bp, Homo sapiens
gagactctgtctcaaaaaaaaaaaaaaaaaagcatttaaaattggtctttgaggagcaaacgacatgtcatttagtaattaattgactagaggaaggaagtagtcacaggatttggatctag

SEQ ID NO: 350542 - DNA, 122 bp, Homo sapiens
tccctcccctcatctccccttctctccctcggatgttaaaaagcaaatcagatcaattttcgtttaacccaatgaaaccccgaaggctcgccatcccgggagtttgcgtctttgcgccccac

SEQ ID NO: 350543 - DNA, 122 bp, Homo sapiens
ccagcccccgttgagcttgacagggtgcagctctgggctgggcctgtttcctgtgctcaccgtgtgctgacttgcttccttgcagtgacaccctgaggcaggtgtgttgttaccccatttta

SEQ ID NO: 350544 - DNA, 122 bp, Homo sapiens
gggagaccctggaactgcagggaggcagcaggggccccgccgggccacgagcagcggaagcggaggctgcggtccccgggacccccttcaactgagcactgtggggccccggggggcaggtc

SEQ ID NO: 350545 - DNA, 122 bp, Homo sapiens
gcgagcgtgaccccggggtgtgccaggcgaccacagtggtggagcgcttggtgccccatgcggcgtggggcggggcctgagggagcggggatggtgggtgaaggcgacgggacgggggaggc

SEQ ID NO: 350546 - DNA, 122 bp, Homo sapiens
acctggatactgcccatgttgacgagacagcagcagggggagagggagggaaggaaggtgcggctgcaagaaggaaggcacgggacaggcatgtgacactaggccacaagcgataagcacag

SEQ ID NO: 350547 - DNA, 122 bp, Homo sapiens
agtccaggctatgggtctgattcagatgggccgttttaggatcgtttttgatattcattgcggcggtacaagttttgtagccaaactgacttaaaagataacattttgtttctttttgtttc

SEQ ID NO: 350548 - DNA, 122 bp, Homo sapiens
tgtgactcccactgtggtgggtgccatggaatcagcacagaatgctggcccttgaccccccggggagactgcatttaccgtagtgacaggagacaaggctatcacagccacaactgggtgtc

SEQ ID NO: 350549 - DNA, 122 bp, Homo sapiens
ccctctgcagccacagttgcctccgcacggggagctgtgtgtgtccgagagacttggtcacgaagcaggttgtgctgctcctcgttgacgtttcgttgctgagtctccttatctcagattct

SEQ ID NO: 350550 - DNA, 122 bp, Homo sapiens
gaggccaaggaagagaaattgggtccagagagcagcctcttggctgggagccaaaagaatcgtgtgtgtgtgtgtgtgtgtgtgtgtgtgtgtgtgtgttttgggacatttgccccagtcct

SEQ ID NO: 350551 - DNA, 122 bp, Homo sapiens
tttggattgtataaccacacgatggaagctgcgagaggcttctgaacaaggtactgacggcgaccagctgtgatgactaaaaagacgattctggtggtggtggatacggtggctggagataa

SEQ ID NO: 350552 - DNA, 122 bp, Homo sapiens
cagggcagcagaggctgctgctccgcgctcccgctcgtctcagtggtctccttacaaagacgggcggctaaaagctgccagctcactttaagagcagctttgtgaaaaacaaccccagtgcg

SEQ ID NO: 350553 - DNA, 122 bp, Homo sapiens
cagagtccagggctgtctgcacccgccccggggccccgaccgcgcgaacctctaggggcgcgctctccacccccgccgccacgaccccagctctcagcctgggtggagcccagagagggtgc

SEQ ID NO: 350554 - DNA, 122 bp, Homo sapiens
ggctgggaagcaacttgactgatccaacccagggttcctgaggtcaaagatgccaaacgtcgtaaatggatctgaccatttctccttggcttgggaaccggaatataagatgaaagtggggt

SEQ ID NO: 350555 - DNA, 122 bp, Homo sapiens
gtgatcgaaggcatcatttcaaacactatgtcacattaggaaaaagttcctttctggtctcggaatcaagaactgttggttgggcaaagtggctcacacttgtaatcccagcactctggtag

SEQ ID NO: 350556 - DNA, 122 bp, Homo sapiens
ttatgagattcttcttctttgttggtgtattaaataaacatattaccttattttaagtttcgataaaatactgtggaagactttgccaaattttatatgattgtgacaagttttttggggta

SEQ ID NO: 350557 - DNA, 122 bp, Homo sapiens
cagggcttccgcagcagctgtgtcacgagacatctgcggcacagagtgcctaggctaggccggggacctgctctcctgaccacacaccaagcccggcagccacccgagggtgaactgagggg

SEQ ID NO: 350558 - DNA, 122 bp, Homo sapiens
tggatttgcaaggcctagaatagctggggagtggtttccccgcggaatcggcctccctgccgctcctgctttgtactgtgacgctcagcctgtgatgactggtgtggaatccgctgagccac

SEQ ID NO: 350559 - DNA, 122 bp, Homo sapiens
gtaaagcgtttaagccgccaaatagtacaacaccccgctccaaagtaggcagatggataacgcagatcatggctcgactcaccagagctgcttgggagaaaataaaatattactagactctg

SEQ ID NO: 350560 - DNA, 122 bp, Homo sapiens
ggtggattttgggagaactcatgagaacttgacttctcgcgagattcgtagccgaagaaacgagatctgaggaggcaggaaggcggaaagcgaagggagtgtagaatatgttttaagaacgt

SEQ ID NO: 350561 - DNA, 122 bp, Homo sapiens
ttctcgatggtgcagctcatagcagcagcaccaccccagcccctgccgggctcagctacgcgactcgctcagatcttctgggagtctgtctcagcattacaggcgtcatttccgggcacgtt

SEQ ID NO: 350562 - DNA, 122 bp, Homo sapiens
ctcaggtggtccagctgctttggcctcccaaagtgctgagattacaggcgcgagccacagcgcccgttggggttgactttaaaacacaaccccatccaatgaagatttcagtttgttgatgt

SEQ ID NO: 350563 - DNA, 122 bp, Homo sapiens
ttaaaacagaacagcgaaagtattgtaaagtagacattggataattgttgagcaaacggccgattttcttctaacaccgacattgctgcagaagaatctgcggcggtctttagttggatcca

SEQ ID NO: 350564 - DNA, 122 bp, Homo sapiens
tggccgctccgagtaaggggcccgctgagcccacgcccacccagaacttgcgctggcctgcgagtgccttccacagcccgggttcccacagccccggttcccgcctgcgcctctccctccac

SEQ ID NO: 350565 - DNA, 122 bp, Homo sapiens
gaggccgagctctgcagccccctgcaaccatcagatccagattgccttcctgcacgagcgcgcaactctcagcctcggagcgtgctggaaatgctgatgggaaccgtttgaatgaccgggca

SEQ ID NO: 350566 - DNA, 122 bp, Homo sapiens
tcctcgtcctcttcccagataatgttggcagacttccagtttattaaaacaacaatccaacgctgatcttgtctctgcatacacgattcaaggatggatcatttactcaaacagagctgttg

SEQ ID NO: 350567 - DNA, 122 bp, Homo sapiens
ctcggtgagaggcggaggagcggtaactaccccggctgcgcacagctcggcgctccttcccgctccctcacacaccggcctcagcccgcaccggtgagtttgagccctcgcgctgcccctag

SEQ ID NO: 350568 - DNA, 122 bp, Homo sapiens
tctggctccggcgggaagcggaaaacgggaggcggctctcgaagcttcccgaccttcctgcgccatcaacttctcaggagtggctggagaaagatgcatgtgccaagcgagacaacaacccc

SEQ ID NO: 350569 - DNA, 122 bp, Homo sapiens
acactggatccactcactgcaaccggagctggggatggcatgccctctgcttccactaaccgagtggcctgcaccacattaaactctccagctttgattatgtaaaaatacagagatctttt

SEQ ID NO: 350570 - DNA, 122 bp, Homo sapiens
ataaaaaggcaaaggaaccgtttgaggaggctagttgccttctcggggccggtgtgtgtgcgggggtagtgttaagggggaggaaggagcccgggagcccggaggaccctcccggaggtgcg

SEQ ID NO: 350571 - DNA, 122 bp, Homo sapiens
tacggcgcaggggcggaccctcgctgacttctgccccggaagtttttctctcagttgaagcgcgcacattgagtcggcttttctactgcttcggctagggtaccttgtgaccatgtcttcca

SEQ ID NO: 350572 - DNA, 122 bp, Homo sapiens
gacccctgcgtcccgggggcacaggcgttcttaaggctgcagagccctgggtcccccacccggccccggttcactttgagcggtcccaaggcctgagggcctactgtccagtccccaggtta

SEQ ID NO: 350573 - DNA, 122 bp, Homo sapiens
atacctgttttcggcagatatccgacattcacctgagcaggtttcgagatccaggcagagcggtagacttagagaaattctgttctgaaactattgacatcattcaaccagctctcgtccta

SEQ ID NO: 350574 - DNA, 122 bp, Homo sapiens
ctaaggcccagggacgggaaggacttccctagggtgttgagtttagaccagccttcataccgggtgtgctcccctctgaagacacagaacttcccaaatgggatgtgaaccgtgttaagaca

SEQ ID NO: 350575 - DNA, 122 bp, Homo sapiens
aagcctgtttgtgaggcttatgtttggggttatctctttacttagagtgactataaatctcgaaagaggattaaagggagaaataaccatatcaactcacatggtaagggtatttaaacatc

SEQ ID NO: 350576 - DNA, 122 bp, Homo sapiens
ctcttttctctcctcctcctcccctttctctcctcctcgcccccctgaaaacctgtggctcggagagaccttggcttctctgggactctacccctggggacttcccacatctgctcctgagc

SEQ ID NO: 350577 - DNA, 122 bp, Homo sapiens
ttggactttccgagtttcccattctcctctactggaggctgaggcgggcaggcccagcgacgtctcccagctccaactgggttcggacctcaagccaaaaatgaggaggccggcaggagagc

SEQ ID NO: 350578 - DNA, 122 bp, Homo sapiens
ttgactgcccagtcccacctagcccagcctgccctgggaagacccttccacctccatgcccggtaagggacctagagagacatctaatgatgccgcagaccaaggaaccccacagcatggag

SEQ ID NO: 350579 - DNA, 122 bp, Homo sapiens
taacatccatctccttgtaatgtgtgcatcgttttatcacactggagattaagttcctctcgtaaaggcctttacatttttgagactcacttttaacagagctctttccaaagcactattgt

SEQ ID NO: 350580 - DNA, 122 bp, Homo sapiens
ggcagcccagagccagagccatttcaatattaatgaaattgtttaatctcctaaattcatcgtgtttaagttacgttttggtgagttattgaccgcctccgaaactgtagttaatgaagttg

SEQ ID NO: 350581 - DNA, 122 bp, Homo sapiens
agcgggcggcgggcaggtgcgcggggcaggtgcgcggccctgagtatgctctgcaagcggcgcgccgggcagacctcagacccgggagtgggcgctcgggcgcacggacagacgcgggcacg

SEQ ID NO: 350582 - DNA, 122 bp, Homo sapiens
agcagccactgtggcttaccttgcaggaggtgggccccactatggtgggcgatgaacagtcggatccagagctgatgcagcatctgggggcttcaaagagaagagccttgggaaacaacttg

SEQ ID NO: 350583 - DNA, 122 bp, Homo sapiens
caccctcctggagccgcccctggacccccgcgcccccgcccctccgccctgggacccccgcgctcaccctcctggagctgcctgccctgccgagcctgcccaggagctctcagtttcgattc

SEQ ID NO: 350584 - DNA, 122 bp, Homo sapiens
gactgtgcttttctgtcttgttcagccttgacccaccttgagagagagccaccaggaaggcgcatcttagcagatgggaggaactgctgagagaagatgggcagaaagctggagcccctgga

SEQ ID NO: 350585 - DNA, 122 bp, Homo sapiens
gtccactgagcctcgccggaggtaaccccggctcagggatgctttcgttgccatggcaaccgccgggccggcgcgggcccctgagtgcagctgaggaagctgggacaaaccctgcccttccc

SEQ ID NO: 350586 - DNA, 122 bp, Homo sapiens
gcagcaccagcaccgcgatcttgtacggcgtcacccagtccttgatgccgaacacattggcgtgcacaaccccattggtcatcatgggattgaagtagaggctctcgtggacgctggccatg

SEQ ID NO: 350587 - DNA, 122 bp, Homo sapiens
gccagcatggcccaggtctcagcacacagcaagcgactaatccatgtgccctcgtgacagcggctgttttgctgcatgtctcatggccgggccactgtcacttcctaaggagaaagtgctgt

SEQ ID NO: 350588 - DNA, 122 bp, Homo sapiens
cccaggggcccctcccttctctccagtgtagacccttgtctgagaccgagctatgtggggcgacctctggctcctcccgcctgcctctgccaatccgggcactgggacagaggtcggtgttg

SEQ ID NO: 350589 - DNA, 122 bp, Homo sapiens
cgcgcgcagttagtcttcggggctgcttattgtgtgtgagagccaagtctttctaacacacgagctgagtgcgtcgtcttttacttgtttcaaaactgcccattcgaaacaggtcgcaatcc

SEQ ID NO: 350590 - DNA, 122 bp, Homo sapiens
ctgcctggggcggtacagccagcagccagtgcgcctgagccctgttatttaaaattcagccgtcaccatggcaacctgcatcttgctccatttcaaccagagatacaaagaagcagtgaaag

SEQ ID NO: 350591 - DNA, 122 bp, Homo sapiens
gccctcgcggtggctcagagcccccggtagtgccctcggaagccgcatgtgctggaggcacgttggaggcaaggatcctgcagccgcgacttgaatcgcatgggtcacggaggccacgctgg

SEQ ID NO: 350592 - DNA, 122 bp, Homo sapiens
ccgaaaggggtggcccagcgaggcagagccgcagcgctgggctcctcgtgcttctgtgaacggaaaaccagaggtagcaaatagcagttccgttctcgtgattcttaattctttttccacaa

SEQ ID NO: 350593 - DNA, 122 bp, Homo sapiens
taaagaccttctggaaattctcccccagcaggtcccggcaactcttgtaatactgggctgcggagatcaggccctgccaccggagagccggactcagtcatcccctctggcccgggccctgg

SEQ ID NO: 350594 - DNA, 122 bp, Homo sapiens
gctaactcctattcatccttcaaaacccatctctggtcgtatcttgtttgttgctttcatcgctctggggcctccggggggatctgtgttttgtgtttgatttccacccacaccagacccag

SEQ ID NO: 350595 - DNA, 122 bp, Homo sapiens
ttgcctggacctcagccctcatctccatccccctccggctgtaggcaagcccaggagggacggctgcccacagaggcaccaacagcagcagctctcctaaggcctgtgctactctgctcggg

SEQ ID NO: 350596 - DNA, 122 bp, Homo sapiens
gaatggccagagggcgtgtgaatggcgcggcggccgcgcggtgggggggcggtgctcgggcgcttttcaggccgcccaggcccctccggcgcccgcccccgcccctgcccccgcccccgcct

SEQ ID NO: 350597 - DNA, 122 bp, Homo sapiens
agcccaccgcggggcgggggctcaggcatggctggctgcaggtcctcagccctgtgctgccgggaggcggctgaggcccggcgagaatttgagcgtggcacgggtggctggcagtgctgggg

SEQ ID NO: 350598 - DNA, 122 bp, Homo sapiens
aacgctaatagttatttgaaaaagtatgcaaactgctcctgacagactggcctatgcgcccggccctgctattatttattggttagttccaatttcccagctccgagcttggcgtctgatcg

SEQ ID NO: 350599 - DNA, 122 bp, Homo sapiens
tcagtgaagggctccaccgcaaccaccaggcttgttgctttcctgggcgccagtccccagcgagccgcacgccaagccagcagcacggcaccgattcttctctggctcttgggtgctgctct

SEQ ID NO: 350600 - DNA, 122 bp, Homo sapiens
ggtcatgggccataaatgaggcagtgtggggtcatcgagggtcagccttcaggccactagcgttttctccaggtgcccccggggagggaacattgctccagtagggtcacttccttgggaat

SEQ ID NO: 350601 - DNA, 122 bp, Homo sapiens
tcgctcttgggtgtggtggggctgctgcttgtgtctgcgctgtccggggtcctaggagaccgcgccaatcccgacctccgggcacacccaggtaccagctagggctgctggaggagggctgg

SEQ ID NO: 350602 - DNA, 122 bp, Homo sapiens
gctcaaagccctctcaaggcctctattctcactcagatcaaaaggctgattgccagcacccgcaggttctgtccctctgcccgggccccactgtcctctgactcatctctcaatctggcctc

SEQ ID NO: 350603 - DNA, 122 bp, Homo sapiens
agctgctggatccggaactgcagcggacgggtcctgcccgagctgaaggcggcgcgggcgcgcttcacggcctcgctgatcttgctcatggcgcctggggacagagagcacctgcagctggc

SEQ ID NO: 350604 - DNA, 122 bp, Homo sapiens
tgggttcagcctgcgatacgtgccagcgtccagcctgcccggggccataggagtgaggggcgaccaaaacacacttccgcttgaagagtcggggcaagtctgtttgagacatttcccattcc

SEQ ID NO: 350605 - DNA, 122 bp, Homo sapiens
gaagagaggcttcccagtgcttcccgcggcctgggaatgtacagtgaagtcaccagcctgcgaaagaaaaggcctctgtctcccgggtgacggggctctattcggggatgcgcattatgcag

SEQ ID NO: 350606 - DNA, 122 bp, Homo sapiens
aagggagtcccagagagggcaggtcgcttgcccaaggtcacgcagaaagccgagggtttccgtcgcgaacccccctccccactcgctcagggctctccaatccgcagctctgcgtgcggggg

SEQ ID NO: 350607 - DNA, 122 bp, Homo sapiens
cgtgtggcccgcgctgagtagtttggagccagacagactaggttcgaaccccagctccaccggaaatagccgcggccagggtagtgttgatccccaaagtggggtaatggaagttgagctgc

SEQ ID NO: 350608 - DNA, 122 bp, Homo sapiens
gctgtgttggcgcacacttgccgctacagcccttctgtcagccctttagcttcgatggggcgctggtggccgcctccccctaggttgtggatgagtcttggcctagggttcagggccctccg

SEQ ID NO: 350609 - DNA, 122 bp, Homo sapiens
gactataagtagtggagctctggtgaacttctctcggctgttctcagttcctccatttatcgtttcttcgtcatgtcgggacgcggcaagcagggaggcaaagctcgcgccaaagccaagac

SEQ ID NO: 350610 - DNA, 122 bp, Homo sapiens
catttggaagagatcatgaagacaatatgaagttatctttttacaagtcaaaatctatagcgcacagaggtttaagtgtctctcctaggtcaatgcttagttagtagtaaaaaccactaatg

SEQ ID NO: 350611 - DNA, 122 bp, Homo sapiens
ggacaactcgcccggcccatggcggaggcccccagggcggcaggcaaggtgcaggtggcccggcagccctagccaaccccgcacaaacgaacccaatgttcccatggccagccctgcgagtt

SEQ ID NO: 350612 - DNA, 122 bp, Homo sapiens
ccagggtctgccggcagaagtgcgggacaagatggaggaggaatgaagctggggtggggccgttttaggtagagccttaaaaatgcttctgccctggaatctcaaccattgtcttccaagat

SEQ ID NO: 350613 - DNA, 122 bp, Homo sapiens
caaaacccgtgttctcgtcatcacgccagctgaacagagactgtgctggacaacccgaagcgacagaggcaacgagcaacagcaacacccacgaaagggagaggaaaaccacacagaaacca

SEQ ID NO: 350614 - DNA, 122 bp, Homo sapiens
agacggtttaagtgaaagtgtgtgcctcctcagctgattgtgcgtgagggtgatgtggctcggtctaatatcaaaacaaaacaaaaataaaatgaaaaatctttagaactgcctgcattgtc

SEQ ID NO: 350615 - DNA, 122 bp, Homo sapiens
gaggtgagagaaaacatcactctgatttctggctgctagggggcagtcatgtcacccaatcgcagataatcagataactcttgccagggaatttgaatctgggttgattgacctatagaagc

SEQ ID NO: 350616 - DNA, 122 bp, Homo sapiens
tcgtcggctgctggggctccggctcagcctggcagatccgctgtggcctctctgggacctcgccccggcccacggcctgacttcggctcggagatgcagcccttcccgagaacaggtgaaga

SEQ ID NO: 350617 - DNA, 122 bp, Homo sapiens
cttactcactctttggcttcaaataatataacttgtctgctttttaaccatttttctttccgaatatcccactgaaagctgatctaacattgggcctatggaccttggccctgcctgaattc

SEQ ID NO: 350618 - DNA, 122 bp, Homo sapiens
ttggctcgtgggaggcctcgggcgccccctccaggattccgtgctaactgcaaacgatcgcgctcgcagggaggcccccagtgcttggaaaactccaggaatcccttcagagcactttattt

SEQ ID NO: 350619 - DNA, 122 bp, Homo sapiens
ggcaccagagaagcgacatcacgtcggcacctgtaactcccgggatccgtaattgggccccgcttcccccagcctcgcccccggcccactgtgcgttcggcagctcaggttaaaactgaggg

SEQ ID NO: 350620 - DNA, 122 bp, Homo sapiens
gctccgtcttctcccgaagccttggtgaaagatgccgcaaatgctcggtacgtggctgtgcgaggggcgcccagaaggcacgccagtctccgggcctcggtctcctcatctgtcggatggga

SEQ ID NO: 350621 - DNA, 122 bp, Homo sapiens
aaggcagggtttctctaccttaagcttgaccctattgacattttcagtcaaacaattcttcgttgtgaggggctgctctgtgcattgtagaatgttctgcaatatatctctggcatctgcct

SEQ ID NO: 350622 - DNA, 122 bp, Homo sapiens
cggccaggctctcgtagaggtggcagtagtgatggtgcaggttgcaggtgtacagccccgcgtccgtctcctccaccgctgcgcacccaggaggaagccgcgcgtgagccttgcggtgcccc

SEQ ID NO: 350623 - DNA, 122 bp, Homo sapiens
aacaggaagtaggtcaggaagaacaataataaggttacacccaagcgtgggtttctaaggcgcggaattttccgtacagaccgatttaaggctgcaaggaaggagtcctgggagcatggctt

SEQ ID NO: 350624 - DNA, 122 bp, Homo sapiens
tttcagcatcgctaggagccctacagcctgacggtccgggacagcccggcttcctccacccgagggggaaaacaaccccaggaaaacaacttaaactcggccttggactgtccatcaaggga

SEQ ID NO: 350625 - DNA, 122 bp, Homo sapiens
atggctgttcaggcctcctggcgtcttcaaattgaacccgagaaggatcagagctgcagccgcgcaatcacagtctcgccgtatgtaagtcaggacgtcctcagagcgctgcctgcaccctc

SEQ ID NO: 350626 - DNA, 122 bp, Homo sapiens
tccagctccttcatggggatctcacgagcctccgcgcgggcctcccgttttgcggcgagccgggcctccgccagcctctgcgcttccgcgctcaaacagtagatctcccggctctgcgtggc

SEQ ID NO: 350627 - DNA, 122 bp, Homo sapiens
ccagggcccgcgggtgctgcaggtggccgcgtccagggcggtaggtggggcctgcccgctcgcctcccgaggccggaccccgggactcagcgaaacccagtcagacccgcgccccacgcccg

SEQ ID NO: 350628 - DNA, 122 bp, Homo sapiens
ccaccaccaccaccatgcccaccaccaccaccaccatgcccaccacctccaccaccaccacgcactacagcagcagctaaaccagttccagcagcagcagcagcagcagcaacagcagcagc

SEQ ID NO: 350629 - DNA, 122 bp, Homo sapiens
atcttcctcagactaagataaagtcaatgttaaaggcagatcagtgtaccacacgtgacacgggaaagcacccagctcccacccgagcttcagatccgcaggctcaattcaagagcccagag

SEQ ID NO: 350630 - DNA, 122 bp, Homo sapiens
gggcgccgggtggcaaaggactcacccccgcacaggcccgcctggcttcgagttggaacccggacacttgcccctcactggtgtggatggaaatctgcctttcgtgggaccaaacaggactc

SEQ ID NO: 350631 - DNA, 122 bp, Homo sapiens
agagatggggtttcaccatgttggccagggtctcaaacttgtgacttcaggcgatacacccgcttcggcctcccaaatctaaatacctttttccaacaaacagaaccagtgctccttaaaga

SEQ ID NO: 350632 - DNA, 122 bp, Homo sapiens
gggctaaaggtggagttagcatttgcagaggtggagtcataagctgcacattgagaatgacgcattgatcatttaacatttgtgtacttctatgaaacatcctggtttcccctttctatagc

SEQ ID NO: 350633 - DNA, 122 bp, Homo sapiens
tctcccctcagcgccttgcagccttggcacagcacgcacgcgcggggaggtgcccttcggcgagtgtcaggtcatgtgaccggaaagggcactctgccttgtcgccatcttgagtgagggca

SEQ ID NO: 350634 - DNA, 122 bp, Homo sapiens
cctctcatccgctgtctgcgcggcccttggccggggaaccgcaggtgccacgggcactggcgttgagcttgggaggttttcccaggtgagagaatccgggggcccttttccctatcagattg

SEQ ID NO: 350635 - DNA, 122 bp, Homo sapiens
agcttaaggatttatacgcagggccccgtttgcctgctgtgtccccagtgtccaggacagcgcccggtaccaaaggtgctggtaaacatttgtcgaatgagtcgctgaacgcccagctattt

SEQ ID NO: 350636 - DNA, 122 bp, Homo sapiens
catggtgttgacttcttgcctctgaggagctgcccaatgactggaggtctgggattaaagcgggaagaggcagcggccacagcgaatttcagcggcagctgcagcagctagaaacaagaagc

SEQ ID NO: 350637 - DNA, 122 bp, Homo sapiens
gaccctggataacagctccagggacactccttgctcaagacgctggggttagacgtgctccggctacacagcggagtgtcagggggccaagaatatccctctcctttttcttccctcctgct

SEQ ID NO: 350638 - DNA, 122 bp, Homo sapiens
caggaactcaacgtggtccctcagagcagcaacagcaaggggactgcacagtggaggctgcgcagcgtggggcggacttggcgaggaggctctcgggcaagtttctggcctgagaaatggag

SEQ ID NO: 350639 - DNA, 122 bp, Homo sapiens
acattgcaccggcatcgccgcgggcccactgtctggcttagaaggtgctcaagaaagacccgcggcgaatggagaagacaagcccaaagccaggaaatgggtggcggctgcagggaaggggg

SEQ ID NO: 350640 - DNA, 122 bp, Homo sapiens
atccttaggattgcttggccacagaggttgttctcggctagaaagtccaacattgtgaggcggaccgactactctgtgcctggacactggggatgattaactggcctcagagctggtgtctg

SEQ ID NO: 350641 - DNA, 122 bp, Homo sapiens
tcctgagccctcgctgatctgctgagggactgacctccaccagcctgctgggagcactctcggtcctgcccccgccacactccaaccaggcactcatgatggggagggcatgtgctgggcag

SEQ ID NO: 350642 - DNA, 122 bp, Homo sapiens
tggccgggaggaggggcggggaacgggctagaaagtttgcagcaacttttctcgagcttgcgtcccaggagcggatgcgcgtggcgtgcgcaggcgcagtggaaggaggatggccgcgcgcg

SEQ ID NO: 350643 - DNA, 122 bp, Homo sapiens
tgctcagaaaacatttgacgaataaatgattgagtaaacgaagagttactgtactctgatcgcctttacagagagaacatctgggcctcagagacaccagaacacccagcggcccgcgtcca

SEQ ID NO: 350644 - DNA, 122 bp, Homo sapiens
ggttccttcacaggaggagtcaggggctccgcaggccgcttctcagagcccatatgctcccggtgtcactgctcccctcccgtggccctgcacagggtctgctgagtgatgccctccagcac

SEQ ID NO: 350645 - DNA, 122 bp, Homo sapiens
tgatcaggcatagcaatggcttacctgctttcctttctttcgtgtaaataccttgagggccggttaaagactaatctctgattacactgtaaatactgttaacacacctttgaaaggccttg

SEQ ID NO: 350646 - DNA, 122 bp, Homo sapiens
gcctcctccacgaagtgaatgtccgggaagtgtcccaggggccgctgcgggcagagagctcgacagctgggaccagggccggccagcaccccctcctcctgccggtggccctggcccctcca

SEQ ID NO: 350647 - DNA, 122 bp, Homo sapiens
gctcctccatcccatggtatcgttttctggtctcagttcttctccttcacaggtgggtcccgcaatcttaacgcggcgggacagcaaaacatggacaaaccctatccagctggctcccgcct

SEQ ID NO: 350648 - DNA, 122 bp, Homo sapiens
gcggcagctgccgggtcctgggcgctgggaggcggtgccgggggcggggtgcggctggggcgaattagttgccattcggagtgaggagtgggtagaagcggcggcggcggcggcggcgtttg

SEQ ID NO: 350649 - DNA, 122 bp, Homo sapiens
ccgcctcttggattcaagcgattctcatgcctcagcctcctgagtagctgggattacagacgcctgccacaacgcccggctaatttttgtatcttgtagagacggggtttcaccatgttgct

SEQ ID NO: 350650 - DNA, 122 bp, Homo sapiens
taacatgccaggtgtcctggggaggagggctgcgcttgtgggccagacagcgggcctgcacggtgcgtgcacatatgcatgtgtgtgtgcacatgcctgggcggattttattttttaaaaaa

SEQ ID NO: 350651 - DNA, 122 bp, Homo sapiens
ctacggcgggagccgagaaacgaagtggaaaaggctgcacggagaagacgtaggagaaggcgcaagctaccctgtagaattcagttcctagaaaagtccaactcagcccttccccgattcac

SEQ ID NO: 350652 - DNA, 122 bp, Homo sapiens
aggggaacaccgacaataataactactgagctcctaccacgtaggcagcattatgctaagcgctttgcatgcacgatttcgcaaatcctcaccaggacccccgcagacagctattaccccta

SEQ ID NO: 350653 - DNA, 122 bp, Homo sapiens
gccggcggagcacgcccggggaggcaggtccggctcggctgctgcggagggaggacgccgcgcccgagctctgcgctgagtcctggccgccggctctttatgcagccagcgaggcccgtggg

SEQ ID NO: 350654 - DNA, 122 bp, Homo sapiens
gttaccctgatgcttctgagctccccttcttactcaccatggggactgcataagagtactcggtgtcctccagcttagttccaagttttctgtcgctccggtgacccttcgacctggattcg

SEQ ID NO: 350655 - DNA, 122 bp, Homo sapiens
gaggggcgtgagggagccgcgtgcagggcgggaagccttctgcatcttgagttgggcggtcgttacacaggtgcgcacagatacagacaaagaggggcgtgagggagctgcctgcaggggaa

SEQ ID NO: 350656 - DNA, 122 bp, Homo sapiens
gtcgccacaaccagatacacacgcactcacacatacaccaagggctacacagacacacaccggagaagcaggcagacactgtgtccactctaacaggctgacagacagtcgtgcacgcacca

SEQ ID NO: 350657 - DNA, 122 bp, Homo sapiens
ccctccagcagatagacgccggcaccccttcctcttcctagggtggaaggggccctgggccgagcctgtagacctatcggctctcatcccttgggataagccccagtccaggtccaggaggc

SEQ ID NO: 350658 - DNA, 122 bp, Homo sapiens
tgctggtttgctgcacccatttcatgggtcaattagagcttcaaagggcctctctgaccacggttccttctcctttagcctccactctcaccgattcaatcctcattcagttgatagaaatt

SEQ ID NO: 350659 - DNA, 122 bp, Homo sapiens
ccaccacttaaaaccataaaatggtcccacatagatataatatcagaagcaaagtcaggccgggcatggtggctcatgcctgtaatcccagcactttgggaggccgaggcaggcggatcacc

SEQ ID NO: 350660 - DNA, 122 bp, Homo sapiens
cactccccacccttgccccaggtcatttcattagatacactttctacctctgagattggccgagttacatacttatctggagaacatcaagaataaacatacttcttacagtttattctgtt

SEQ ID NO: 350661 - DNA, 122 bp, Homo sapiens
cacagagacggcgtcagttgtcccttgtcacttgggctcctcaggcagccactccagaggcgagaggggcatccaggtctccaacagagccagcacgtcgcccggaaggagctgtagggaga

SEQ ID NO: 350662 - DNA, 122 bp, Homo sapiens
caataattccggttagatcagaggtgcttctaatcccctcactggcagttttctcaaccccggtgcccattctgacctcccttctctccctgaatccctgcctttgtcctgagaccaactca

SEQ ID NO: 350663 - DNA, 122 bp, Homo sapiens
ggcccgccacttgctggtgcttagtgtgtgtcaggcgctgtcctaagtgccctccatgcacggcagttctacgacacagggattggcgctgtcctaagtgccctccatggacggcagttcta

SEQ ID NO: 350664 - DNA, 122 bp, Homo sapiens
catcacctgcactctcttccggacatcctgaaggtgctgctccagcatctgctgcttctccgtcaccacggctgctgtggggtggttggcctggcccccttgctgccaaaaaggaggtcaat

SEQ ID NO: 350665 - DNA, 122 bp, Homo sapiens
caaagaatgctgggagactcccaagggagcatttttcatcccagaagcccccaggagtgtcgcgggcagcctgtaaagccccagcatttggagcagggtgactgtgtttctcgtggatggcc

SEQ ID NO: 350666 - DNA, 122 bp, Homo sapiens
cgtagcccaatctcgcgcaatgattgcgccacagatattcccatcccccattcagtgaggcgcctttcactccccctccgcgtaagcacccaaatctcgcgagacagagcgggtctctaggg

SEQ ID NO: 350667 - DNA, 122 bp, Homo sapiens
ctccttgagctctctgtggagcaatctcagagagcagtaaggtgtgacgcgaggctctgccggcttcgcagcaccgcctgcggaaagagcgcaggatggcggaggaagattaagagaaatcg

SEQ ID NO: 350668 - DNA, 122 bp, Homo sapiens
aagcaatgggggcagggagactttagtagcattttgttgctaggtgtctgcaataagagacgaaactgaactgctttgccggaaacaagtgaaatgattgctttcctgtttgtaagatttgt

SEQ ID NO: 350669 - DNA, 122 bp, Homo sapiens
taataaaaattaatgacattaaattaataaaatgttaaaaataatttttttaaaagatcacgcacaggctgctgaaaagacaatggatttttctgggacaaggatagggaaagaagaaaact

SEQ ID NO: 350670 - DNA, 122 bp, Homo sapiens
ctgctgtgcctccccggctgtcagaatggctgcagcgagggggtgtcaaaggcagggaagcgaggggcggttccgcctaggctggggaaggcggaaggcagcggcacattccacgactcctc

SEQ ID NO: 350671 - DNA, 122 bp, Homo sapiens
accggcgcgagttggaaagtttgcccgagggctggtgcaggcttggagctgggggccgtgcgctgccctgggaatgtgacccggccagcggtgagttggggccggggcagagggcaggggtg

SEQ ID NO: 350672 - DNA, 122 bp, Homo sapiens
gcacggggaagagggaggcgagctcgggagatgtgggagcacagggtggggcggctcctgcgaggagctcctggctgcacaggctccatctgatatgtcagctcccgcatccgagagctgat

SEQ ID NO: 350673 - DNA, 122 bp, Homo sapiens
tgacatgaggtggaaagtggatcgggattcaggccaggcagtaggagtccagagacagctcgtgaccgccgcaggacgctgcctcagacgtcttcatgctcggcaagagcctgacaccgggg

SEQ ID NO: 350674 - DNA, 122 bp, Homo sapiens
ctccgcaccacgggaacaaactcttacctagactcttggggcagccatgacacctagaaccggaggtgaagttggtagagaccattcagggaagacagggacctttccgggacatgacgata

SEQ ID NO: 350675 - DNA, 122 bp, Homo sapiens
acttctggaaggagttctcaggcccgcgctacttttgtagtgcaggaagcaggcggggcgcggagaggaggtagaaacgcggagctccttcgcaaagagggcggcggcgccgcgtctgcctt

SEQ ID NO: 350676 - DNA, 122 bp, Homo sapiens
gtgcaaattccacagagaaggtgtcctttgctggaaataaatatttgttttcctcatcaacgttataataaaatgatgttattcaggaatctgctatattgaggagaaatgagtctctttgt

SEQ ID NO: 350677 - DNA, 122 bp, Homo sapiens
cttcctgcctgtgaagccattgtcctccagatgggaggtaggccgggagattccagaatccgaaaacattttggaatcatcttagagcaccggtgtggatgcgcttggccccgagggggccg

SEQ ID NO: 350678 - DNA, 122 bp, Homo sapiens
cttcgctccagaccgggcctcctggcctcgccccccgcgcccccgagccaggccgcggtgcgggtcagcctgcccatttaggtctccgtctttactctgtccagccctgtcagtcacaaaat

SEQ ID NO: 350679 - DNA, 122 bp, Homo sapiens
ggtcatttaaatgctgcaactcagagattcactcagaagactggactcaattctgaaggtcgccaagaaggagagaacaatgtcttctttacccgtgagttgaaaaggcacagccttcaaaa

SEQ ID NO: 350680 - DNA, 122 bp, Homo sapiens
ggccaagctgggccttaccaggtgtgatcatagtcttaggtatcatggagttcccatctccgcagaggcaggctcttcccagctccacgagaggcggagaattgcaacttcttcctctctgg

SEQ ID NO: 350681 - DNA, 122 bp, Homo sapiens
gcaatctggaagtggacatttggatcgcattggggcctatggtgaaaaagggaatatcctcgaataaaaactagacagaagcattctcataaagcagtttgtgatgtgtgtgctcaactaac

SEQ ID NO: 350682 - DNA, 122 bp, Homo sapiens
cggggagaggacagcccggtgccccgcggcaggcagactgggaggaaaaacctgctgggccgctccccagttgcaccagggcagcctggctgtgcagtgacagcagccctgagcataagccg

SEQ ID NO: 350683 - DNA, 122 bp, Homo sapiens
tacctcatcatttaggtgagggcctctcagagaagttctatgatgtgctggaggtacccacgggatgtcagtcataaaccatggaatgtgggttttgtgtttgcaaagggctcttggacaca

SEQ ID NO: 350684 - DNA, 122 bp, Homo sapiens
tccgccggctctcaagccaaaaacagttccgaaaatctgggcggggagcgggccagagagcgctggggctctgcccccagcaccccctccacgcagacgactcggtaactgggttgcaggcc

SEQ ID NO: 350685 - DNA, 122 bp, Homo sapiens
tctctgcagcaatgatgggaattttgacgtggctctggacattagcgtcgtggtgtcctccgacggctccgtgcgttggcaacccccgggcatctatcgcagcagctgcagcatccaggttt

SEQ ID NO: 350686 - DNA, 122 bp, Homo sapiens
aggaaagcaagaaggggcccaagacaggggaaaggcgggaaggcagggagacttcttgggcggacgctcgcgcagtcaccctcaccgtccggcagccaggcctccatttccctccggtcaca

SEQ ID NO: 350687 - DNA, 122 bp, Homo sapiens
ccaccactttctgtgctctagtcccactagctgctcttggccctgccactcctggctccccggccttagtgagtttgggaaacatccctccagttcaaccttggcaccttcccttggacaca

SEQ ID NO: 350688 - DNA, 122 bp, Homo sapiens
cggcggcacccgggtctggaacgcggctgttggccctgcggtggaatgcgaggtgctctgcggatcaatggggttatgggcactttgctccctagctgaaagtgtttttcccccgcgtcttt

SEQ ID NO: 350689 - DNA, 122 bp, Homo sapiens
ataaagccacctaatcctgtctgaatctcttctctgcaaatgttttggtatgcaaatactcgttcattaataagaggaagcaggaaaaagagtgaagaggagtaccatgggaaagggggccc

SEQ ID NO: 350690 - DNA, 122 bp, Homo sapiens
aacgtcctctcctcctctccaaaatgacggctgagtcgaagagtccgcctgtcagaacggcgacccggcacgaggccccaggcccggctggcgagggcaggaagatgtggatggcacccgcc

SEQ ID NO: 350691 - DNA, 122 bp, Homo sapiens
gagaaacaaaaactgctttgaaataccacttcttattatacttaaaaaaacatggccgggcgcggtggctcacgcctgtaatcccagcactttgggaggccgaggcgggtggatcatgaggt

SEQ ID NO: 350692 - DNA, 122 bp, Homo sapiens
ctcaggaatccgtgccggggcgtatccttattcacccccgtgacattacacgctggggaccgaactcagtccgagatgtagactaggcaataacgctaatctaatcccggtacgattaaccc

SEQ ID NO: 350693 - DNA, 122 bp, Homo sapiens
ttctccttattcttttactcatataatatgactttggttctttagcctttatagctctaccgtctttttcaccaaattctttggccttaagtttatcctctctcgtttctcccttttttctc

SEQ ID NO: 350694 - DNA, 122 bp, Homo sapiens
ggctctcttcctctctggagggatttaacgctcttgagcacccctggctatgacaatctccggtcaggtctgggaggttgtcagagatgaagaaaccacttcctcatcttgcacacaaggaa

SEQ ID NO: 350695 - DNA, 122 bp, Homo sapiens
gctctacctttatgacctcatttactcttaattaagtcctatctccaaatacagtgacatcgggaattagggcttcaacataagaatttacagttcactctatagcagtatctcacttccct

SEQ ID NO: 350696 - DNA, 122 bp, Homo sapiens
gagatgcttgtggtggctccaaagcccttgagctacctgtagtaagcctgtttccacagacgatgaggtagatgggttttgtggctattggatcattagctaaagagagttgggactggaga

SEQ ID NO: 350697 - DNA, 122 bp, Homo sapiens
cacatttaaagtgcacagtttgggacgtttgacgtctgcgtagatacacacaggtgaagccgtccatccagttatgaccacagtttgggacgtttgacgtctgcgtagatacacacaggtgc

SEQ ID NO: 350698 - DNA, 122 bp, Homo sapiens
gcggcagcgggcgatcgggccgtgaggagcctcgggcgcggcctcgcctcccgggcccggcgcctgcctcagcacagcggacagcgccgcgccccttgcctggacccagccgcccgcccgcc

SEQ ID NO: 350699 - DNA, 122 bp, Homo sapiens
tcacttctcagatggggtggttgccaggccgagggtctcctcacttctcagacgggcggccgggcagagacgctcctcacctcccagatggggcggcggggcagaggtgctccccacatctc

SEQ ID NO: 350700 - DNA, 122 bp, Homo sapiens
cttctcctgctgcctcatgtcctcgtagatctggttcatgatgaattgggtggtgttgggcggcgctcgcatgccaggctctctccactcatacagcttgaccggccgcggcagcgtgctca

SEQ ID NO: 350701 - DNA, 122 bp, Homo sapiens
agtaatagtgttatgggaaaggggttccaatccagtccccaagagagggttcttggatctcgcgcaaggaagaattcaggacgaatctataaaatgaaagcaagtttattaagaaagtaaag

SEQ ID NO: 350702 - DNA, 122 bp, Homo sapiens
tggaatagcaaggtgaggaagggaagagggggcagtaatgggtatggaccaggagggatgcgagggctgtccaatcaacaagcacccacttgatcagtttcagctattcactctccactccc

SEQ ID NO: 350703 - DNA, 122 bp, Homo sapiens
ccgctgacaggtcccgcaggcccagggccaagctgggatcggaggctcagcgcggctcagcgctaatctcctcgtgaccttgtagagggcctgagctgcctgctgtctgcccccagacccag

SEQ ID NO: 350704 - DNA, 122 bp, Homo sapiens
gggcgctggggcacgcgggcgggaggggcccaggcctgcgcgcaagaggggacaggtcaacgccgaccatcggcctccgccaacccccatgcttccggacgctcaaagactagaaatgcccc

SEQ ID NO: 350705 - DNA, 122 bp, Homo sapiens
gaaaaccctagaatgcggtggttttacaagtatattagcccagaacatcctaggcagctgcgcgggccgcgggtgcggcagggcgcagggcagcacccagagccccggccagcgcgaaacgg

SEQ ID NO: 350706 - DNA, 122 bp, Homo sapiens
gcaaattggtggcaggactggggctcaaactccagagcccgactttctgaccaggggccacgctggccctcactgcactccagctctgcagcctacccgcccaatccctgtgcaggctggga

SEQ ID NO: 350707 - DNA, 122 bp, Homo sapiens
gctgccgacacaaggacattctaaacctaataactctcgccgagtgtcagtacaagggtccgccccgctctcagtgcccagctccccccgggtatcagctgaaacatcagctccgcccctgg

SEQ ID NO: 350708 - DNA, 122 bp, Homo sapiens
cctatgtctctggcttcgttacaaacgaaacgtttctcgccttcggacactccaccctggcggtggtacccaaccttcagtctccactctgcgcctggccctccagcgacctcctcacatcc

SEQ ID NO: 350709 - DNA, 122 bp, Homo sapiens
cgccgcctgccgggagttgtggtttcatggtcgacggaggctgcgaagggaaaccccagccggaagtagactcccaggatgcagcggaggcgcgaaggcatgcgccggtggacgctctgatt

SEQ ID NO: 350710 - DNA, 122 bp, Homo sapiens
ctgcggggcgttcgggctccccggggacgggcagagccggtggcacaagtttgcaggtctcgcgggcacgtgcgctgaccgggcttctgcgggctgcgctgcgctgcgcggggctggccgct

SEQ ID NO: 350711 - DNA, 122 bp, Homo sapiens
cccactctgctcagccctgacctttctgcagaaggcggtggcagctccgcagcaccagtccgctggctggtcgtttgtcttcaggtttcacagcctccctgaggctcccagtgctttgcaag

SEQ ID NO: 350712 - DNA, 122 bp, Homo sapiens
cccctcggtgcaggacaagtatgtcacagccctctacttcaccttcagcagcctcaccagcgtgggcttcggcaatgtctcgcccaacaccaactccgagaaggtcttctccatctgcgtca

SEQ ID NO: 350713 - DNA, 122 bp, Homo sapiens
gtaccctaatgtccctaagtgagctctcccggcaccccgatgtccctaagtgagacctcccggcaccccgatgtccctaagtgagccctcccagcaccccgatgtccctaagtgagccctcc

SEQ ID NO: 350714 - DNA, 122 bp, Homo sapiens
aggcctttgatggggcttcagagtctgtgacattccaacttcgaaccactgctgggttcacgtggaggtgcaataatgataataacaagcttgggggttctagtgtgatcttgctccccgtg

SEQ ID NO: 350715 - DNA, 122 bp, Homo sapiens
aagcacggagaagcctgggaaggagcttggtaagaggggcacagtccaggctgccccatgcgcgctggggttgtcgccgcgcctcctgcgcgccccagtgcccccagaatctccaagaaagc

SEQ ID NO: 350716 - DNA, 122 bp, Homo sapiens
ccgaactggtctaagccttgcagtgtcgagcggagctccctgtaggtcacctgagtgtgacgaaaagggatcccgacgccaagacctaagttcacaccaaggttctggaaagagactcaaaa

SEQ ID NO: 350717 - DNA, 122 bp, Homo sapiens
gctcccgactcccgcgcgccgccgtttcacgtcgcaaacactttagtcaattatccccctcgcggagcttctatttaaagagatattgtcaggctcttaagcctcggaatcagacccgctgc

SEQ ID NO: 350718 - DNA, 122 bp, Homo sapiens
atagcatttatccagggcttgggattgcattgcccaaaataaattgagggtgctatgagacgacagcccaggccatcaaacgtgggatacagactggctagggactgatggaggagccacga

SEQ ID NO: 350719 - DNA, 122 bp, Homo sapiens
cagtgtagcctaaagctggagagcaattaacttggcattttcaaacaagggcagaggaagcgggagccacaggactgagtcagcacatcagagaggcggtcgccaagctggctcagctcatt

SEQ ID NO: 350720 - DNA, 122 bp, Homo sapiens
tctgcaggtgatatggatgctgctgatccaaggaatgttctagaaccgtgactgcacagccgacctcctttcctttgctcggactcacctcccccctcatctcctctgcctcctgggagcct

SEQ ID NO: 350721 - DNA, 122 bp, Homo sapiens
ccccacaccgcggccccgcgcccgggatccgctgctcacctggctccccgttcttctccgcgcgctgctaagagacacttccaacttcggttttccgccgggcgctcagacacgagttgctg

SEQ ID NO: 350722 - DNA, 122 bp, Homo sapiens
gtcgaagaaggggtgtgttctgattctaccccgttttcgttttgttttaaggtcctccctcgttcacctaagggagacacacacttgtctccatcttcacacctttctcaatgtcctggatt

SEQ ID NO: 350723 - DNA, 122 bp, Homo sapiens
ggggctccgcatgtggggcacaatgaaacaagagcagccccggccagaggtccagtaaagcggaaagacggtcccgcccgcacacccctccggaaaactgaagcgtctcctctgacccccaa

SEQ ID NO: 350724 - DNA, 122 bp, Homo sapiens
cctttgctgcctaactacctcaacggcttcgagtgtttcgtctgtgactacgaactggctcggctggatgccgagaaagcccacgcggcctctcccggggacagccccgtctttgagcccca

SEQ ID NO: 350725 - DNA, 122 bp, Homo sapiens
agtgtgacctctgggaaggccctaacttctctgaatctcagactcctcatctgtgagttacgtgcaggggtcaaattatgatttaaaatatatggtggggcatgttggctcgcacttgtaat

SEQ ID NO: 350726 - DNA, 122 bp, Homo sapiens
cgcgaggcctgctgggctgacgtgacgtgaggctgggctgcggggcgccggaggcggaggcgggggcggggcgccgggaccgactagggcggggcgcggggtcggggggcggggcgcggggt

SEQ ID NO: 350727 - DNA, 122 bp, Homo sapiens
cctccccagggggcgggaagctggtaaggaagcagcctgggttagctaggggtggggtcacgtcacactaagagggtttggagaagttcaagggaggaatcctgcaaagaagaggggcgact

SEQ ID NO: 350728 - DNA, 122 bp, Homo sapiens
ggacccccatcgtccctgacacctggcgtctccgccccccgcccccgtcccccgccccgccgtccctggcccctgcagtccctggcccgcgctgcggacctccggctctggcttcccccggg

SEQ ID NO: 350729 - DNA, 122 bp, Homo sapiens
tccacgtagctcctgaccatccacgtagcccctgaccatccgtgttagcccctgaccttccgcgttagccccgacattccgcgttagccccaaccgtacaccttagcccctgattgtccgca

SEQ ID NO: 350730 - DNA, 122 bp, Homo sapiens
agagcaaccgcctgtttctttcgcccacgcagggagtcatatagcccagaaaaaacttcccgggacttttagcctgtcccaaggaaaaaaaaattggaaacatacccacatgcaaacagctg

SEQ ID NO: 350731 - DNA, 122 bp, Homo sapiens
gaattatttttggctgccattgtggtgctggaaacagacctcgacttaaattcagaaaaccgaagttcggatcctacttcaccctgacaatagctgactaagcccgagcaaagagcttgttc

SEQ ID NO: 350732 - DNA, 122 bp, Homo sapiens
ctgctggcggctcccctgctgcctcacagctaagggtctatgtcacagtcagggacagagcgccaagaaacacccctggccaaactgggaatggagctaagtaaacccagggatttaaataa

SEQ ID NO: 350733 - DNA, 122 bp, Homo sapiens
agcagtttgctcaatatctcaccgcttgatagaagcagagcagggcctagaacctgatcacgtttatccatcctgcccttatgaatagaaggaattaatcatttaagactcaacttgagcat

SEQ ID NO: 350734 - DNA, 122 bp, Homo sapiens
tgggacgcgccaggattgcaggctgatcgggtctcctcctccagggagctcccaggattgcgacgaagaaaagaatgtcccttccctctgagttcctccctatcccagggtctcctgggtct

SEQ ID NO: 350735 - DNA, 122 bp, Homo sapiens
tagagaaaacagggtaatgagaccccacgtacttatcacaccaattcaacaattaattcacggtcaaagatgattcttccctacccgccccctccctgcccccacagcctggatttatgtgg

SEQ ID NO: 350736 - DNA, 122 bp, Homo sapiens
gaaaagaacccagagatggtgaccgcgtggcaggggctctcggacatgctgccaacgacgcgaggtgggtccgcccggctcctccccagagcagaatgtgttcccggggctgcggacgcact

SEQ ID NO: 350737 - DNA, 122 bp, Homo sapiens
ggaaacacagctcaaatcctacctgcatggccgagctcaccggggtgcgtctaagtagctcgcctttgcggcccacccaaaatatctggataatggttaccccgtcctcagtgcgttggact

SEQ ID NO: 350738 - DNA, 122 bp, Homo sapiens
gggaggaggagggtctagtgaggcgggtcccacccggcctttcccatcagagcccgaactcgcggttcaggttccctctaggacgcccttggccgagaggaggcctccaatggctggctggg

SEQ ID NO: 350739 - DNA, 122 bp, Homo sapiens
tttttttttaaagagctcctgttggagcttttactctttgctcatctgcagatggggagacgtcattccagacttggtatacgtccacagatgggataaagaatcctcctaggttcttctga

SEQ ID NO: 350740 - DNA, 122 bp, Homo sapiens
ccgggtcaggcgccaagcttccaagcggctagagcgcgggccttggagcgcccccaggatcgcttcagtaaggcgcttccccactccaggcccgacccccggcgcctgagcgccaacttcgc

SEQ ID NO: 350741 - DNA, 122 bp, Homo sapiens
ggcttctgtgcagggggcgggggggggcggggggttcatgggtttcgtgaggccaggaagcgagtgggtcgcgcagaggccatccccaggcctcaatggccccagccgccatcccctccgcc

SEQ ID NO: 350742 - DNA, 122 bp, Homo sapiens
ctgttgtctcaaaaaaaataaatgaataggccgcgctcccgcccagggaggatgcgccgacgccccgagcgcccggccctccgcagcagcccggcagactgcctctgtcatcaggaccctcc

SEQ ID NO: 350743 - DNA, 122 bp, Homo sapiens
cacacttccattagcgcacatatcccccatgaattgtgcacaccagcagggtctagagtacggcacacattttgtctcaggagctacgtattgaataaataaattaattactttttttgaga

SEQ ID NO: 350744 - DNA, 122 bp, Homo sapiens
aataccaaccgattcattaaaaatactgactgaggacatataacagagcaatgaagttttcgaacagtatcacagagcctggggttctgcataatgatttgggttttgaaaggctgaacaga

SEQ ID NO: 350745 - DNA, 122 bp, Homo sapiens
ctcactccaatctcattactcagggaccccaccatctccccgatttcactattcagggaccgttcaccccatttcactactcagagacctaccaccattctgctactcagtgactccatgcc

SEQ ID NO: 350746 - DNA, 122 bp, Homo sapiens
tctcaccaataaatggagttctgaaaggataaacaagaaaacattaacagtcgttgattccgtggagtagaactaaatgaggggtatgcaaaggagtttttatgtgttttatttttacccta

SEQ ID NO: 350747 - DNA, 122 bp, Homo sapiens
acggcgccgcgctggcccctgccacagacccagccctgtcctcatcaattctcgctaccacgaaagtgtcctgacctcatgaggtctcactttcctcgctgcaaaatgggaacagtcccacc

SEQ ID NO: 350748 - DNA, 122 bp, Homo sapiens
gagggacatgaagaatccaaatctgggctcaagttccaactctgtaaactctgtaattaccggtcattcaggctgggggaagtcataatcctattagagcttctatttccttatctgtgaaa

SEQ ID NO: 350749 - DNA, 122 bp, Homo sapiens
ggataaggcaggggccgcggtaagcaagtggggctaggagggtgcaggcacagcgctgtccgtcccactcacctgctcgcctcagcacggatcagggcggagctaggaattcaatgcgagat

SEQ ID NO: 350750 - DNA, 122 bp, Homo sapiens
gcactaataaattcagctgcaaggaagaaagtatttctcttcctctgagagaggctcttccgctcctgatgcaaaccatgcctcagcagcttcacgctacgccccagtaaccccctgggcac

SEQ ID NO: 350751 - DNA, 122 bp, Homo sapiens
gagaccaaggcgggcggatcacttgaggccagcagtttgagaccagcctgggcaacatggcgaaacaccgtctctagtgaaaatacaaaaattagccaggcgttgtgacacatacctatgat

SEQ ID NO: 350752 - DNA, 122 bp, Homo sapiens
gcagcttcggggagggatcatctgggacggaagccgaggagggcccgaatgggctggaggcgtagttagaaatggaggcgcacggaaggaaaaggagtggggaggaggcagagaggggcagt

SEQ ID NO: 350753 - DNA, 122 bp, Homo sapiens
tatgccggagttcctcaggctcagtccctcacggcttcctttggctagaggacgaaattccgcgaccccttgcgcttcccgggtgaggtgacgccccaccctgcttcggcttgccctctgtg

SEQ ID NO: 350754 - DNA, 122 bp, Homo sapiens
ctaagaggagctagagcttgcctcacccgctgtagccgccgagagcccaggatgtactggcggatggggcctgcctgcaccccggggaggcgcccaccccggacccccacccctccgcactg

SEQ ID NO: 350755 - DNA, 122 bp, Homo sapiens
ccaccccccaccaatttacaataggtaaactttgagcttcctcaaagtttcgctatctagcgtttatgcccgaagctttacgaataaactccctttccaggtaaacctgcccaacccttgtc

SEQ ID NO: 350756 - DNA, 122 bp, Homo sapiens
tttacaatgggcagcactgtgctagggacacagccttgcactgcacagacttacgtcctgcgtgcatacatctttctgtctacaggcaatggcagaattagagttagagtgtagtgtgttga

SEQ ID NO: 350757 - DNA, 122 bp, Homo sapiens
ccccaaacctgccaccgacggccacttccgtttccccgatagtatttggggatctcgaagcgatacttccggctccccccaggtccccaagctttacttttgtggggcacgacgagaaagtc

SEQ ID NO: 350758 - DNA, 122 bp, Homo sapiens
cactcaatcaatcagtggtacaatgtgtaccacagtagtacaaaatgtattcctattctccgaaacgactgaaataataaataaaaccaagtagtttacagtagagtgtgtgggggtttcca

SEQ ID NO: 350759 - DNA, 122 bp, Homo sapiens
ccaaaataatgtcccgcctgcctcatcttcctctcggatttttgccaaggccaaactgcgcgtgtcccagaaaaaaaccctcggacacttggcctctgccctgtctcagccgagtgactagg

SEQ ID NO: 350760 - DNA, 122 bp, Homo sapiens
cctaagaaccgatgacaagagtggacccaggcatttccaccccagctccatgtcagtctgcgcggccgtggatggcctgggccagtgcctcgttggcccgtccatctggtctccttcgctgc

SEQ ID NO: 350761 - DNA, 122 bp, Homo sapiens
tccttggcttccggcagtgcacaagctggacaacaccacttggcctgggtttgttggtggcgaatttttgtttgttctaaccctaacccttttccctgcttagctccagctgttgggttctc

SEQ ID NO: 350762 - DNA, 122 bp, Homo sapiens
tccgcttcctgtaccacccggctcaagtagcggacacggaacagggaactatcagcccgtcggcctccgggccctgcattctctagccatggaccgggaccttttgcggcagtcgctaaatt

SEQ ID NO: 350763 - DNA, 122 bp, Homo sapiens
caagcccctcatttacaaggggaacttagcaattacactcctttcccgagcagtcaagaccgaaccctgagttctttgttgagaagtttatcgcaaattggcaaacttttcccacgcaccct

SEQ ID NO: 350764 - DNA, 122 bp, Homo sapiens
cctccaactccagcctcccgcttcctgtccctctcccacagggaggcgagcagagaaacacgcctacagcagcccattttttgggggttcatgttgggggcaggtctgtgctggctgtcaga

SEQ ID NO: 350765 - DNA, 122 bp, Homo sapiens
ccaggcggctgctggtccagctcccccgcctccgaggcaggacttgtgggagcaaaagtccgaggcgccgccgggactcctcccgtcccggcgcccagccaggccccgcccccaccccacat

SEQ ID NO: 350766 - DNA, 122 bp, Homo sapiens
ccccgggacacctctacccccgggacacgcccactcccgggacacgcccaccccgggacacgcccacccccgggacacgcccactcccgggacacctctacccctgggacacgcccaccccc

SEQ ID NO: 350767 - DNA, 122 bp, Homo sapiens
cccacaaattttgtaaagcctgaagctcctaacttaggttaaactcataaagaaatttatcggttccattcttttctcctggagccatcctggagctattcagagtcttgttccattgtaca

SEQ ID NO: 350768 - DNA, 122 bp, Homo sapiens
atgacttactctgtcatccaggtgagagtgcagtggcatgatcacagctcactgcagcctcgacctcccaggctcgagtgatcgtcccacctcagcctcccaggtagctggaactacagatg

SEQ ID NO: 350769 - DNA, 122 bp, Homo sapiens
ctaggggaatgtatgactcgctcccaacagagggcaggattctcggggagggccggagtgcgtttctctggacggaggagcagagcagcttggggcacggtgtgggagccctccttagggac

SEQ ID NO: 350770 - DNA, 122 bp, Homo sapiens
gaaaggagttagccagcttgctttaggcagacagtaagggaagcgtccctgaagaacctacgacgtgccccaaaagtgcttacaccagatgttttgtgcacataagggaatttgcacagggg

SEQ ID NO: 350771 - DNA, 122 bp, Homo sapiens
agggtctctaacatgtcttttaaaaacttaaagggggaacaaatgctacagtgagggaggcgttggtctctgttgccatctgcatggagtccccatgggtcacaggtctcttagaagcacaa

SEQ ID NO: 350772 - DNA, 122 bp, Homo sapiens
ccagcgctgttaagggcacgcagtaggcgctcagaaggggcggctcgggtccctgtcctgcgcgttcgtgctgtccgttttctctatctctttctttctatcttactttctttccttccttc

SEQ ID NO: 350773 - DNA, 122 bp, Homo sapiens
caggaagacccgggatgaggagaagcccccgagagtaaagcccgggacgagggccccccacggcacccactgagcccagacatccctgcccagagccacccaccacggcctccccatccacc

SEQ ID NO: 350774 - DNA, 122 bp, Homo sapiens
ctcaggaaggtggcaagctcagccttggcaatgatagggttggtgagtgtggtagcataacgcaaagggtagcaaatggctacatagcggtctagagccatgagcatgagcaccccagactc

SEQ ID NO: 350775 - DNA, 122 bp, Homo sapiens
tagtggcttccacagaggcgggactgagttacctggaagccaagtcccttgccaaggtcccggcttggccatggaagatggtggggtgacctcggtttggaggctcagtttcccacatgtgc

SEQ ID NO: 350776 - DNA, 122 bp, Homo sapiens
tttttacacatgacatctgcttcctaaacattccagttaagcccatgagtaatgcccgtccgttcctctggttgctcttccttcactgcccactttcactgctccacttttcccctacctgc

SEQ ID NO: 350777 - DNA, 122 bp, Homo sapiens
ctcctagctttctttttacggaaaggaggaaaggtgcttggcaccagtcggggaagctcacgccaagtgaccgagaccagaactcgctctcgaccggagccccccaagtctggtgacttgga

SEQ ID NO: 350778 - DNA, 122 bp, Homo sapiens
caacttcccaggcctaagcgattctcccactttagcctcccaagtagctgggactacaggcgtgtgccacctggtttggctaattttttgattttttttgtagagatggcattttgacatgt

SEQ ID NO: 350779 - DNA, 122 bp, Homo sapiens
ctccctcagcttgcggggaggtgtgcacggagaggcgcgagtgggaacccgggctgggcacggcgcctgcgggccagctggagttccgggtcggcgtgggcttggcgggccggcactcggag

SEQ ID NO: 350780 - DNA, 122 bp, Homo sapiens
tgccctgtcgcccaggctggagtgtagtggcctgatctcggctcggctcattgtaacctccgcctcgggtttgagcgattctcctgcctcagcctcctgagtagctgggattataggcgtgc

SEQ ID NO: 350781 - DNA, 122 bp, Homo sapiens
cccacccacctgttagtaggttggcctcctagccttggggatcctggagaggaaggctgccgagtgggtcatgaggcacttgggcccctacaagtgcagctgacactggtatgcccacagaa

SEQ ID NO: 350782 - DNA, 122 bp, Homo sapiens
gctaagctgttagctgcagccgggcggcgacgcctgccaggtacctggctccgtgagcaccgcccaaactggtcaggccagtccgtcctgtggctgtttctgccaggactcgcccgagtgtg

SEQ ID NO: 350783 - DNA, 122 bp, Homo sapiens
ttttctttttccattttcaggattttggaagcattgccttctacagaatccacagtagtccgaagctcttctacggtttttgtcaaactttgattttccatctctagcttcaataatctact

SEQ ID NO: 350784 - DNA, 122 bp, Homo sapiens
ctctcagcccacgtctccacctggggcatgtgagtggcctgactactcatccaagactgtcgagggtctgcagggcccctgaacagcagcatctgattgggctaaggcaccctcattttgca

SEQ ID NO: 350785 - DNA, 122 bp, Homo sapiens
ggggcaagcaagcgaccacaggggaccggtcccggggctggatgtggctcatgtccgaagcgcacggagccgagccggtgttgctcagggaggctgcccgccccttcacgcagaccctgcgg

SEQ ID NO: 350786 - DNA, 122 bp, Homo sapiens
ccagtcggggcggcgcaggtccccgggccctggaaagttctgggacggccgaggtctccccggacacccgcacccacgcccccgtcgtgccctttctggcttttggcttcctctcctcgatt

SEQ ID NO: 350787 - DNA, 122 bp, Homo sapiens
gaaagaatctgcatatagaaaccctgaaagaatacacactaggcaactaataaaaatggtcgggaacctgagcagcatagtgagaccctttctctaaaacaatttttaaaaacttagccagg

SEQ ID NO: 350788 - DNA, 122 bp, Homo sapiens
ctccgtaggaaagcatgctgtgatctgttagtcacgtctgcccccggcgtggagggagaacggctgcacatttgctgctgcagagtgtgccatcccactgggcgctgtgcctaggccagggc

SEQ ID NO: 350789 - DNA, 122 bp, Homo sapiens
agaagtgctggcagagggaactgccgccagctgcaggcacctcgcccaacacctccacctcgagcacacccaagtccacagcggtcccgggatctgtcacccagacactgactgcatcacac

SEQ ID NO: 350790 - DNA, 122 bp, Homo sapiens
aaagtgcccactacggaaaagccaacagtgactgtgaacttccgaaagctgttgttgaatcgatgtcagaaggagtttgagaaagacaaagatgatgatgaggtttttgagaagaagcaaaa

SEQ ID NO: 350791 - DNA, 122 bp, Homo sapiens
ccaggaaagtgccacaaaaacctgttgctcgtagccaagcttatgtgttttatggcaatccgctgagctcaagtttcttgacaacaagtcttatttatggagaaacaaatgcaggcagtgtt

SEQ ID NO: 350792 - DNA, 122 bp, Homo sapiens
ggagcctacccaaatgatttaactgtgtagcattgattatcttgtccactgtgtgagcaacgtgcacaaaatatgcattttgtatgttacggaggtcttgctgatgtggatgaagaagtgtg

SEQ ID NO: 350793 - DNA, 122 bp, Homo sapiens
ccacacgcaggagctcgcggacggtgcccacccagcccgcgtcccgctgccgcatgccgacgccgacaccgaccctcgtgcacactcacacatgtctctcactcaccgggcgatgttaacat

SEQ ID NO: 350794 - DNA, 122 bp, Homo sapiens
gcacggcagaggataagggcctggttcgcatcacagacgaaagtgccttcccagaagccgcggcttggggtcctgtggatgttggcatacctagttcgcacccacagtgtgtgtcgcaccca

SEQ ID NO: 350795 - DNA, 122 bp, Homo sapiens
tggatcttctctaggattttgtacatcttgatttattcctggcttagagtttgaagtgggcgctcttctaaagggatttatgcataggttcactatttttgtagttatggtttatatgataa

SEQ ID NO: 350796 - DNA, 122 bp, Homo sapiens
ggaagcccttgctgagcatcccctccatcccggtgcttggctgctggtgagccctggctccggagccattgggagcttccctgggccctgacctcacccatggccgcgtcacctccctcact

SEQ ID NO: 350797 - DNA, 122 bp, Homo sapiens
cttgcacgccgcgtgcccctccaccacccgccgggacgccctctgcctcggtcccgagttcgagttcgacctccgccactcagctgggtgtcctggggaccttggtttcttccctttagatc

SEQ ID NO: 350798 - DNA, 122 bp, Homo sapiens
ggaggcagcagagagtttggctggtctcccaggacagccgcctcccagggccaggagtggcgggagggacctcagatgagagaagagccaagccggtggtttctggaggttcagcacatcct

SEQ ID NO: 350799 - DNA, 122 bp, Homo sapiens
atgtggccttgaactgttagaaactatgttagtgttcatgaaagtctttatcaagtcggacgcagtagctcatgcctataatcccagcactttgggaggccgaggtgggcgggtcacttgag

SEQ ID NO: 350800 - DNA, 122 bp, Homo sapiens
ccctccctccctctctcttcccgggctggcccgcccccgcgcgcccccgccgcggccacgcgcccacccgtgcccgcgcgcctctcgtccccgcgcagcccgaatcctgccctactggctcg

SEQ ID NO: 350801 - DNA, 122 bp, Homo sapiens
cacataattctaaaataaagctcccccatggtatgagtgtgtttgtttgagtactactgacggtggtaggcaagatgtccagttctacttccggtagacggaaaacccaactgcttgtcata

SEQ ID NO: 350802 - DNA, 122 bp, Homo sapiens
acactcgcagcccattaagtgtatggacaaatatttgcaagacggtatcctccttgaaggcgggatactgtcattcatctttgattcccagagaccaccactgcacctgcacatagtaggtc

SEQ ID NO: 350803 - DNA, 122 bp, Homo sapiens
tgccgccactgtcctccgtgcgcggagtgtcgctgaagtcactggcgtcactaaccaaggcgtgcccgcccaaggtgccctggtcctggtcgtccctatcgatgacccttcgtcaatacctc

SEQ ID NO: 350804 - DNA, 122 bp, Homo sapiens
atagtcctgatacgcagtcatatcatctccaagcaatgattggtcttgcctcttcctttccggtatttgtgtatagttttttcccttatctaatttgcattaaccaatacttctagaataaa

SEQ ID NO: 350805 - DNA, 122 bp, Homo sapiens
tcaggcatggcgggttgcaggtcctgagtcctgccctgcggggaggcagctaaggcccgccgagaaatggagcacagcgctggtgggctggcactgttgggggaccccgcgaacccaccaca

SEQ ID NO: 350806 - DNA, 122 bp, Homo sapiens
attctcgaaaacctgcacccttgcgtgtcctcctagaccacaaagaggcccaagaaaaatcggatttagtgtcccttactgatgcattatcgaaaacctgttagagtcctaagcgttctcct

SEQ ID NO: 350807 - DNA, 122 bp, Homo sapiens
ccctcaacaggaccctaagctcagagaaatgaacagaggcccctgaaactgctgtgtctgcgaccatgcgtgtgcagctggatcccgtggtagccagcgagactccacttccagcagatgag

SEQ ID NO: 350808 - DNA, 122 bp, Homo sapiens
gggagagcggggcgcggggggagagggggcagcccaggagataaggaggatggagaaggacgggagagaccccgaaaaggcaagctctagacccccgttcggcatctctacaatgaatttta

SEQ ID NO: 350809 - DNA, 122 bp, Homo sapiens
cggagggaggggtctaagagggagccgttattcctttttcctctgccttaggaaagcgcgcgagagggaggggccggaacaacgaacgctggttacctaacggtccggcccagccagtcagg

SEQ ID NO: 350810 - DNA, 122 bp, Homo sapiens
gcgttcatgcgtaggctcctcctccccaggagcttcagcctggacccgctcatggagcggcgctgggacttagacctcacctacgtgacggagcgcatcttggccgccgccttccccgcgcg

SEQ ID NO: 350811 - DNA, 122 bp, Homo sapiens
cgtcacatctctgtgggcatttttggagtactgtgccttatgattggtgagacagttgaccgagaactacagaaagctggctatgacaatgcccatagtgctccttccttaggaatggtttc

SEQ ID NO: 350812 - DNA, 122 bp, Homo sapiens
gccagggaaggagaatccacaatgatgcctcgaggctctcagcagggactggcactgaatcgcagcaaggtgggggcgggacagggtgtgcggggtccttagtcgctgcctgtcctaggaga

SEQ ID NO: 350813 - DNA, 122 bp, Homo sapiens
cgggctgaaagaggtgatcccgagggtgctgtgcttgtgtgacgaagtgtttgtctcctgcgatcctcagcagacgctgctccggtgacccggagatccggacgcctcgacccctccctcag

SEQ ID NO: 350814 - DNA, 122 bp, Homo sapiens
ttttctcttctaggtttattttcttgaaaaggctccaggcttcggcttggaaaatcccaccgccaaaattgagcccagcagctggagcggcagtgagagccctgccgaaaacatggaaagga

SEQ ID NO: 350815 - DNA, 122 bp, Homo sapiens
tctcctggtccaggaggctccgggccggctcctggaactcatagaaatcctgccagtccccgtccgccgccatcgccgcccggagcagtcgcgcgccccgcccaggccggcccagcccgccc

SEQ ID NO: 350816 - DNA, 122 bp, Homo sapiens
gatattttagccgaaggtatcggagggcttgatggctgggcgaggtggcagcggggtctccgcggggccgccatcagctgtgctgctccaggtaggcggacaggagcagccccggcggcagg

SEQ ID NO: 350817 - DNA, 122 bp, Homo sapiens
cggcagagggtcccgcgtggcagagagggcggcagaggatcccgcgtggcagagggcagccgacaggcagctctgagaggatacagggttgggaagctcaggcagaaggccatcgtaagagc

SEQ ID NO: 350818 - DNA, 122 bp, Homo sapiens
ctggaaagctgtatttgctgcacgtggaaatctccgttattttccagcacccaacagtagcgtaatgggagtaacggacttaacctcatttctctttcagagcatttagccttcatatgccc

SEQ ID NO: 350819 - DNA, 122 bp, Homo sapiens
ccacgccccacattaaatactgatgccaccccattaccctaggttggagtccagagtcttcgacccctgtttagtgatggttattagggtggaaactccctggagcccaaggctgtggccac

SEQ ID NO: 350820 - DNA, 122 bp, Homo sapiens
ggcgtgctggggaggagtaaagagggtggggcggaaacccaatttcattgttcgcgggaccgattcttcccaaaagagctcgctggcagcgcctgcgcagtgcgccctctttgtgccaggct

SEQ ID NO: 350821 - DNA, 122 bp, Homo sapiens
gccagattgttctttcagtctaggcatgcccccttctagcttctgttctaacacactcatcggcttggagagggaagtgaatggcagactgtcagtcccgcgaagtcttctgagattatctg

SEQ ID NO: 350822 - DNA, 122 bp, Homo sapiens
tgtagcgctccgcttccgctggcttccgcacccgggcctccagctccttctcccgccgggcgatctcctgctcctgcactgccacctgctgggcccgctccaccacctgcacctgcacccgc

SEQ ID NO: 350823 - DNA, 122 bp, Homo sapiens
gatgcaaggaagagaggatatgacagggctccttcatcatgtgtgtttctcagaatgccacggccttctgtctgcgctaggagcaagttctggttggaatggaaagcgagacctttcgcagt

SEQ ID NO: 350824 - DNA, 122 bp, Homo sapiens
gcccctcccttcaagcctcacggaattgaaacaaggggctgcaggaatcgattctccggccgaaagacttctccagtaagggagcttcccaggctccgtttcacaggagcaccggctggggg

SEQ ID NO: 350825 - DNA, 122 bp, Homo sapiens
aaaattaagtcagcagggaagaggttttgttgtgcgaagctcctggaaaggcagatgacacgcatgagaccagaaggtgaggttctgatgagggagacaggcacatggcaaaggggacagtc

SEQ ID NO: 350826 - DNA, 122 bp, Homo sapiens
gttggttcttgtggaggagacaagcaccaggtgtttctagtcagccatcttgctctgccacgctctttttttttttttttttttttttggagacaggatcttgttctgtcacccaggccaga

SEQ ID NO: 350827 - DNA, 122 bp, Homo sapiens
ccagccaccggcacagctgagtcaaggtacaaccgcccagcaacgctttccagcagggaacgttgccctgaacagctctgactgttgagcgcacgttagaaggcgccacgctagcgcattcc

SEQ ID NO: 350828 - DNA, 122 bp, Homo sapiens
gcacggtagctgatcagtgctagaaaatacaggagatccagagcatattactcccttgaacgtatcttttagctgcagggaaaacagatctaaggcatgaattacaacttattagttgtaga

SEQ ID NO: 350829 - DNA, 122 bp, Homo sapiens
gacgcgggcgcggtgggtggagcaggaggggccggagtattgggacctacagacactgggcgccaaggcccaggcacagactgaccgagtgaacctgcggaccctgctccgctactacaacc

SEQ ID NO: 350830 - DNA, 122 bp, Homo sapiens
attcggagaataaaactacagttcccacagtatctttctctttggcttttttccagggggcgctgctttccgcgactgtcttcccatgattctcgttgggcagaaaagccccgcccgcttat

SEQ ID NO: 350831 - DNA, 122 bp, Homo sapiens
tagaaaagcagcgcctcaaccattccaacgggacgcaccgcgttcagtgacgaccctcatcggtgcccacagctctgggctcgctgaaggcaccacagaagcaccagttattaccagtgtta

SEQ ID NO: 350832 - DNA, 122 bp, Homo sapiens
ggcaaaaccagtttagactgagaccagaacgctggagcaggaagccgccagcaggtgtctcgctccccggtcccagcgccctcaggaagagcgcggccccgcagcccccgcccggcgaggcc

SEQ ID NO: 350833 - DNA, 122 bp, Homo sapiens
tcccgcgccccggcccgaagtgagcaaagtcaatgaaaagtttcacccttagcaaccctgcgcacggatccggcttccccacccctgcgtgatgcgtccctccgccctgcaggggcggggcc

SEQ ID NO: 350834 - DNA, 122 bp, Homo sapiens
agcaggaagagaagcaccagaacccggaagagaaatccagtcctctgctaggccttgcaccgtccctctggcgccctctactgacaaagccagtaaaattgtgccgctagcaaaggagatct

SEQ ID NO: 350835 - DNA, 122 bp, Homo sapiens
tcttagtgttaaacaaacaatcaataacctcataaacttaaaaattgctgcaggaaataccggacagtttatggaaggatcatatgacagaaggaagggctgaagagtgtgagaagctagac

SEQ ID NO: 350836 - DNA, 122 bp, Homo sapiens
tttccctggggggtggggagggtgacggggacgcccggatccggctgagcccaggagaggcgggactaggggtaccgaggggggcgcgtcgctgggggtccccgcgaagttggcgcccacgc

SEQ ID NO: 350837 - DNA, 122 bp, Homo sapiens
cccagaaaagcctcggtgggactccgacgtctagggagttgtagccgctaccagaaatatcgatgagcctttaccctgaggtttagaaaggcagctctttctggggcaaatacaaagagcgt

SEQ ID NO: 350838 - DNA, 122 bp, Homo sapiens
gcagctgtcgactccacccgaagataaataagtgacaacaggttcggtccacgcctctcccggcccagtcccctggagccccccagcgcccgctgcccgactctccccgcagggaccggcag

SEQ ID NO: 350839 - DNA, 122 bp, Homo sapiens
gagcagtaccgcactgaggagctggctcaggcctacgacgccttcacgctggtgagggcccggcgggcgcgcgggcagcggaggagggcactggggcaggctgcagggacgggcttcgggag

SEQ ID NO: 350840 - DNA, 122 bp, Homo sapiens
acttcaagtttggagttggactgctccagggtccgcaccttttctaggtagctcgctagacggtcatttaggttctgcatggccattttctcattgccaacaaacaggtccccgccgcctgt

SEQ ID NO: 350841 - DNA, 122 bp, Homo sapiens
tctcagggcgttcggcgccgtaactcaggagaaacccaagtcctgctctcccggcggcctcgctggggaagaattcagccgctccaccctgacatctggtttctatttcatatccatgttgt

SEQ ID NO: 350842 - DNA, 122 bp, Homo sapiens
cacaagttctcttctagcaagaccagagtactaggtttgaatctaccctgccacttgggacgtgagtggcataggcaagttagttgagccaccacggctcacttttttcatttgtaacattc

SEQ ID NO: 350843 - DNA, 122 bp, Homo sapiens
agaaacctagccaatcaacacacaactgtcaccacatgaaaaggtacttttatcaaacttcgagtctaagaacatacaaatgtttcttttatcatgtctacagtaattgtctatgcttttcc

SEQ ID NO: 350844 - DNA, 122 bp, Homo sapiens
tgagagcacctgtgaccagaacacaaaggacaccatgagctgcaaactgctaaacacgcccgggaaatgataagtagtgccagtcgaggctcctcagtgccaagccagccagtatcctctcc

SEQ ID NO: 350845 - DNA, 122 bp, Homo sapiens
acagaaacagcccatagggtcttgctgcctccacctgtgtgtccagacagtttcccatcccggccagagagacacagtcaggcttattgatccaggctgagcatgtgtgttggagcctggag

SEQ ID NO: 350846 - DNA, 122 bp, Homo sapiens
actgaaggatggaaggatgcttcctcaacctttactaccttcctcctcacctggtgaatacgaatgttcagaacctttgctctcagacaggcttggttccaatcctggctccatttttaaat

SEQ ID NO: 350847 - DNA, 122 bp, Homo sapiens
cctgaggggcgggagactcagtgatactgacttggggtgcagagacttttgaaagttgggcgtggcatgggtctgagagcggcacagaagcgtgtaagacttctgtatgtaagaagcatgca

SEQ ID NO: 350848 - DNA, 122 bp, Homo sapiens
ctacaatcattccaaaccctcttttcctatgacagcaggagcaaatgtagttttgatgtgcgtttggttgttggcttgtttgtttaataaaatccgtgtgtgtgtgtgtgtgtgtgtgtgtg

SEQ ID NO: 350849 - DNA, 122 bp, Homo sapiens
aacaagattgatatcttcatttactaaaatttaatagcactgtgcttagtaactaacacccggtatttaccttgagcataaagtggaagtagcaatatgactagttgatgtaataatgacag

SEQ ID NO: 350850 - DNA, 122 bp, Homo sapiens
ggctgaggcgctgggctgcgacagggacatcaccgttctcctcctcagggagatggtgctcgtcgtgcacggcttcccgtcctccgtggccgcccttcgggtaaggaaggagaccgggcagc

SEQ ID NO: 350851 - DNA, 122 bp, Homo sapiens
acccgccctgcccctcccccgccttcccaaaagtccgcggagaacttacacgaccaggtacgccaggatggaggcctgcagcagccggtacagcaggcccaccttcttgttcttggcgatga

SEQ ID NO: 350852 - DNA, 122 bp, Homo sapiens
ccccccggggcttaggtcggcgggagaggaggtaagaggtccacctggggaacccctagccggcatggacacgactcttgtctacaagcacctgccggctccgccttctgcagccccgctgc

SEQ ID NO: 350853 - DNA, 122 bp, Homo sapiens
cacccggccccaagaggcatcgggaggcgctgcttggcccagaggagaacagcactgatgcggaggcccagagagctggggaggccttgggggcgccaatgggagggtctaagagccccccg

SEQ ID NO: 350854 - DNA, 122 bp, Homo sapiens
tgttcagcatccatccgcccgagctctgcatccgactggagactttacacctgcttcctacgaagagggagctcttgccagcgagcccatgcttacccataatctacgaagagatcttttca

SEQ ID NO: 350855 - DNA, 122 bp, Homo sapiens
ctgtaaagagtatgggattgtttatatttgctgagtaatcaataccacatattgctttcacgttgtttgctcagctctgttccagggcacatccaagaagcatgggcatgtttctgtgctct

SEQ ID NO: 350856 - DNA, 122 bp, Homo sapiens
cgggccgccggcgagctggaggaggccaagtgccggcgggccagtgagaaggaggacgggcggctgggcagccaaggcttcgtgtacgtgatggccaacaagcagccgctgtggaacgaggc

SEQ ID NO: 350857 - DNA, 122 bp, Homo sapiens
agctcaacaggggccaggctgccggccacaggtggcgggaaggcgcaggcctggtggccacgtgggcgcgagcttgggcctcggccccaccctcacccgcttccccctcgttgattgggccc

SEQ ID NO: 350858 - DNA, 122 bp, Homo sapiens
ggcagctccaccatcagagctgaggaaatgaaaccaactcggtcctgagttccaggaactcggaccgggccaccctcacccctggttcttcccatcaccgtccaggaattcggctgcagccc

SEQ ID NO: 350859 - DNA, 122 bp, Homo sapiens
taatgttaatatagaaaaacattagtttaaaaatgatgtggaagggcctcattaatgcgacggggcaaggaaacataactgtcccgcacgcagtgccacaggctcagtccagggaggcctca

SEQ ID NO: 350860 - DNA, 122 bp, Homo sapiens
tggttttgacgcagccgtgacagcccttcatccttattaaaatcacacaatgaagcaggtcgcccaagattgaaagcgcgtttccagggcggaccccggtccccgcctttggccagcaaaag

SEQ ID NO: 350861 - DNA, 122 bp, Homo sapiens
gggctgggctcgtggctgagccagcagctgcagcagctacgggagtggccgggtggccggcgggtgccagccgccatggaggccgtgccccgcatgcccatgatctggctggacctgaagga

SEQ ID NO: 350862 - DNA, 122 bp, Homo sapiens
agtcccgcagccaagctcaactccagggtgggagattaaccaggtggagacctgggatttcgctctgggaccccctggtgacaaccctcacccccgtgccgcctgtctcctttcttccccag

SEQ ID NO: 350863 - DNA, 122 bp, Homo sapiens
tgcactctccgagtttccctggagtgctgtcaccagcctctggctgccagatttcacaaccggtgtctgggtttgctagaatcacaccccctttccaaggagaagccaaggcttgacctagc

SEQ ID NO: 350864 - DNA, 122 bp, Homo sapiens
tttggtttgaatcctcgaactgttgccttccacgtatagtacagagctatagtgctttagcgaggaaacaggcaggcagagtgagcttctgcattttttaaagtctaaagtggcaccggaag

SEQ ID NO: 350865 - DNA, 122 bp, Homo sapiens
ggggaagaggagcctctattgtcatcctcgtgaggcttcacggaggttgcgggtgcagcccgcagtcacactggggacagaacgtacagacagccttctgtggtgctaacaggcagcagccg

SEQ ID NO: 350866 - DNA, 122 bp, Homo sapiens
catgtttctctgtgaatttacgcacccagagcagagcgggtccagtgcgcagcgtacggacggcgtccacacccagctgccagggccttggcgggcagggcgcggcgggtgacgggacggcg

SEQ ID NO: 350867 - DNA, 122 bp, Homo sapiens
atgcccctggagggcaggtaattcttactaatttctgtattttctgctgctggcacaaaacgtgacccatacgtttgcaacaaatggtgaaataattcattcctgttgttaagcaatagggt

SEQ ID NO: 350868 - DNA, 122 bp, Homo sapiens
tatgcttttgtggagacaggctttgccatgtttgccaggttggtctctaagtgatccacccgcctcagccccacaaagtgctgggattacatgcgtgagccaccgtacccagccacaccttt

SEQ ID NO: 350869 - DNA, 122 bp, Homo sapiens
agagctgcagctgccagccagccctgacttgacgctgtcgattaccgacaggctgttaaccgtctagatgtaggctgtgaggagctaaagaacaggagggaaacatgggtctgcggtcctgg

SEQ ID NO: 350870 - DNA, 122 bp, Homo sapiens
tacggattagcagcagttgtagtcttctgacttttattctttcaaactctttcaaactggcgaatgagcagcactttatgtttgttgctctggcattcctggagtagctaggacattcacag

SEQ ID NO: 350871 - DNA, 122 bp, Homo sapiens
ccaccagctcctctccacttcccaagggagactccggcaaccttcagcaacatatatcctcgaccagatgcagtgctataagaacagaacgcattttggatgttattattaagaaccaaatg

SEQ ID NO: 350872 - DNA, 122 bp, Homo sapiens
cgttactgcgccggcctgtcgcggggcgcaagcctgccaaggagccggagcgctgtgccgcgtggagggtgtcaggggtggtattgtcggcgcacaaatgctcaactttatgtacttttaac

SEQ ID NO: 350873 - DNA, 122 bp, Homo sapiens
ggggaggagcctggcgcggcgggagcggcggcgcaaagtgaaactctggcaagttgcgggcgcgcggggagctgtcgcgggcagcgcgccctcgggaggacgtggccccggcccccgcccgc

SEQ ID NO: 350874 - DNA, 122 bp, Homo sapiens
gtaaggtgaggtgcctcaacaagaaaaaggaccagttttggcttcaggtctatgtgaaagcggttaacactgggcctggaatggtagatactcaataattaaggttacttcttattctcggt

SEQ ID NO: 350875 - DNA, 122 bp, Homo sapiens
ggagggaggagggaaagcggtagaaaggagcagcggagggcgagggggcaccgcgtcaggcgtttgggagtggggacagggaggagcccacagagattcagagtcctaaatcttggagacag

SEQ ID NO: 350876 - DNA, 122 bp, Homo sapiens
tctcccctagtcttcgggtcccttgaacgcaggtcgcttgtttgccttacgcgtagtcagcggccagtggctatttatggcagtaaggaatattatccacatttcacatggagcttagagga

SEQ ID NO: 350877 - DNA, 122 bp, Homo sapiens
agttgagtgaaaatcttttaggccagttgttcacacatttggtggatgaaatcaaatattcgaatcactttttctggcattcaacaaattcaatttttatgtaaaatcatctcctaactctt

SEQ ID NO: 350878 - DNA, 122 bp, Homo sapiens
ccccccacacaaattcaaaggcagagggaaggagagctgttcccatggtttatctgctaccgcgacccagtgcatcagaacaagctggtccaggccctaggatccggaggaggcaggagcag

SEQ ID NO: 350879 - DNA, 122 bp, Homo sapiens
cacaaatgagcatgagggtaattgcttccatggttaaattaccttctatcaggtccctcacgtgatatgtggggactatgggaactataattcaaggtgagatttcaatggggacacagagc

SEQ ID NO: 350880 - DNA, 122 bp, Homo sapiens
aaatggaaacacagcctctctttgacgaatgatggctctatcaaaaggtgaagggccgggcgctgtggtacacgtctataatcccagcactttgggaggctgaggcgagtaaatcacctgag

SEQ ID NO: 350881 - DNA, 122 bp, Homo sapiens
ctcgcgcacacgcagtcaggtgtggatgtacacccgcgcacacccaggcacatgtacacccgcgcgctcacacaccccatccagctacagcagaattctggccaggctgttgaccgcacacc

SEQ ID NO: 350882 - DNA, 122 bp, Homo sapiens
gaggggaggaaaggggggcggggatgatgcaatgtttggcaaccggtgtctgcacgcgcacgcgcaggggacaccgagggtggtgggaggtgcggagggtgggggagaggagagagggcggg

SEQ ID NO: 350883 - DNA, 122 bp, Homo sapiens
cgggggtgctttggggggagctgcgccgatcaccagattaagcacatgtcctatcccaggcggtggagcggagcccccgtggctctggactgcgcggacgttggcgtcaggatgaccacacg

SEQ ID NO: 350884 - DNA, 122 bp, Homo sapiens
aagattagaaacaaacaaaacccaaggcagtcttgtaggaaatcaataggttaattaccccgaagatgtactttggcagacatcacccaagctctttgtgaggccaattggaaggaaccggg

SEQ ID NO: 350885 - DNA, 122 bp, Homo sapiens
agatgagacagcgatgattctatccattttccagaggaagaaactaagactcaacatttccggtgcctatcagaggttactccagtgtccctggtatagctggtatttaacccactcccagg

SEQ ID NO: 350886 - DNA, 122 bp, Homo sapiens
agaaaagagggagggagctgagtgagcaaggttcttatcctttggcaggccacagggagccgactgctggctccagaggcctggccttcttttctcaagttacagcagctacagaggcttaa

SEQ ID NO: 350887 - DNA, 122 bp, Homo sapiens
cgctgccaaagctgccgccactagccgggcatggccatggcgtccccggccatcgggcagcgcccgtacccgctactattggaccccgagccgccgcgctatctacagagcctgagcggccc

SEQ ID NO: 350888 - DNA, 122 bp, Homo sapiens
gagcagctttataaagccaggaacaagggtagagtccctgtgtctctgaatagaaattagcgatgcttagccttctgtaccaaggaatgcatcacaaaagctaatgctgggactgggcctgg

SEQ ID NO: 350889 - DNA, 122 bp, Homo sapiens
ccgccgaggagccccgtgccccgaggcgggcacagccgccctgcatgggtgcccccggcgcgggattgacgcagagccctgcccggagccccagcgaccccgttcctgccccaggcggccgt

SEQ ID NO: 350890 - DNA, 122 bp, Homo sapiens
cgtacccatcgctgtgtagggtcccgggattcagagatgagtaaagcaatccctgccttccgggggctcaagctctcctgtcatcgggactcagttactgaatctcactaaacatcctgaag

SEQ ID NO: 350891 - DNA, 122 bp, Homo sapiens
atgagtgagcgggccaatgaaaacacagtggagcacaactggactttctgtaggctagcccggaagacagacgactgatctccgaccctgccacaggttcctggaaagactctccaggaaat

SEQ ID NO: 350892 - DNA, 122 bp, Homo sapiens
ctcccaccttcgaccggaaatcacttcctgggacttttcactgtgggctgcctcttccagcgtttttttggtggcgtttatttcatgatctgagcccctctggggaggtgaaccacctgggt

SEQ ID NO: 350893 - DNA, 122 bp, Homo sapiens
cgcaatctagggtagatctgttgctcaacaaagttaaccccagtagaagtctctgctttacggaataaagcaactcaaatgggtaaggaagcctgtggcttacgggtggcacagataggaac

SEQ ID NO: 350894 - DNA, 122 bp, Homo sapiens
ccatgcacttggttgtttgtcgtttctgcttttcccgggagggggaagggaggaacagcccggcagttctggggaccttagcgctccacgtcttatttggcaggagaggctggaaacgagcg

SEQ ID NO: 350895 - DNA, 122 bp, Homo sapiens
tccggttccggcgcaggtcggttccggttccggcgcgcccctcccccgtcccggcgccgccgccaccgccttagcggcttgttttgtttcgacttctagctaaggccgagggaggcggagcg

SEQ ID NO: 350896 - DNA, 122 bp, Homo sapiens
gggaggaggcgcagacggcctcagcaagtctcggaagagcttccccgggggagctgggcccgctttcgtgtccacgcatcccggccctcctccgcgaaccttctcaacttccccacggtgct

SEQ ID NO: 350897 - DNA, 122 bp, Homo sapiens
ttacccttctgaggttcagacagagggaacagcgtctatgtgggcacagccttctcatggcgcagggctcaaccatgcacgcacattgaatgccttcagccggacatggccaaagttatgtc

SEQ ID NO: 350898 - DNA, 122 bp, Homo sapiens
gtctcaaaaaaataaaaacataaaacaaaattaatttgaaaatagcccaccaccatgctacgctttccacatggttccatccagaagagaagtctcctcaatcacatggcaaccctgctaat

SEQ ID NO: 350899 - DNA, 122 bp, Homo sapiens
atccctttatgagctgcttatctggattcggagttctgtgtgtgctcccagacagagttgcgaaatattgtaaggctgtcctaaagtgagtcagctgcaaaataaatcagcaatcaatcctg

SEQ ID NO: 350900 - DNA, 122 bp, Homo sapiens
aaacagccccagacaacttctgctctgagctggttcctgccgcaattctgtcacttaagacgaaaaaaaatcctaaatgataggataaaactcagccaacaactttcagtgtttacaatctt

SEQ ID NO: 350901 - DNA, 122 bp, Homo sapiens
aagggggcacattctgaccataaagctttgaggctctccagtcagctaaaatacaaccagcgtcaccctaatgctttcattctgttacaagaaatgcctttattcaagctacattcctcatt

SEQ ID NO: 350902 - DNA, 122 bp, Homo sapiens
tggatggaaacaaataaggaagagtcaattttgctgagccccttctccggcaacgagaggcgttctgcagccgggagggagccgccgctcgcgccggcagccgctggcaggggcatggtgag

SEQ ID NO: 350903 - DNA, 122 bp, Homo sapiens
gtcttgcatctcaaaaggaggctcagtgtaaaaagtaaaatgttgaaaattcaaatacaacgcaggagatggctatatgtatttctgttcatacggctttattaatttggttaaaaatttca

SEQ ID NO: 350904 - DNA, 122 bp, Homo sapiens
gccgggcgtggtggtggggacctgtaatcccagctactcaggaggctgaggcaggagaatcgcttgaactggataggcggaggttgcagtgatccaagaacacgccattgcactccagcctg

SEQ ID NO: 350905 - DNA, 122 bp, Homo sapiens
aacactccacacacacttcgttagcagccacaaaacatttcctaagagcggaagggtttccgccatctggaatcctagacgccatccagcatttattgtaaagcttctaattaaagctttct

SEQ ID NO: 350906 - DNA, 122 bp, Homo sapiens
atcccaaagccaggcctgcgtcaccgaggtgtcaccaccccataaaggaggccagtgagacgcctgggagcccgcgagtcccgtcggtcggggcgcgaggtggagctgtaaagccctctggg

SEQ ID NO: 350907 - DNA, 122 bp, Homo sapiens
gaacaaacggttaaagattttgggcagcgcctcgcggggggaggagccaggggcccaatccgcaattaaagatgaactttgggtgaactaattgtctgaccaaggtaacgtgggcagcaacc

SEQ ID NO: 350908 - DNA, 122 bp, Homo sapiens
agctcctggcactgcggagaagttgagccccaaggcggccacgcttgccgagcgcagcgccggcctggccttcagcttgtaccaggccatggccaaggaccaggcagtggagaacatcctgg

SEQ ID NO: 350909 - DNA, 122 bp, Homo sapiens
acttttgggccccagccccatgacagcatcccggggtcggtgtctgtgacttccaaagcccgagtaggcactgaaacagtgcagtctttcagccttgccatccgtggacagcttaagcgtta

SEQ ID NO: 350910 - DNA, 122 bp, Homo sapiens
gagatggggtctcactctgatgtctaggttgcagtgcagtagcatgatcatagttcactgcggcctcgaactcgcaaactcaagcaatcctccctcttcagtctcccaagtagctaggacta

SEQ ID NO: 350911 - DNA, 122 bp, Homo sapiens
acgcaaaggtgacaaccttagagactgccaaagctcactctggacaccatcagaggccatcgcagactgtccttcacaggatgtgtgtgtgacatgctgccatgatcactctgtaatagtgt

SEQ ID NO: 350912 - DNA, 122 bp, Homo sapiens
aagaacgggtcttagccttggcgcgagctttgccgccctgcttgccacgtcccgacatgacgtaaaaaattcaatcagtaacgttcctgagactgacgtaacgctaaagctccgctacttat

SEQ ID NO: 350913 - DNA, 122 bp, Homo sapiens
cccagtccaggcaggacgcagggagggcaagaccccagcccaggcaggactccgggaggtcgaagaccccagcccaggcaggacccagggagggcaaagaccccagaacagggagggccaag

SEQ ID NO: 350914 - DNA, 122 bp, Homo sapiens
tttgccaacgaggcagctgaggttcccagaggctcaataccagcaccatgagccgcagcacgcaaggcaaacacagccggaggtgagcacatacctgcttcgcaccccatgcgcctaaccac

SEQ ID NO: 350915 - DNA, 122 bp, Homo sapiens
ggcgcttccacaggcagcggtagcactcgttggcgatggcgaagatgtgcgggggcagctcgcccaggtggcgccggctgtactgctccatggtggcaggctcgtacagcccggcgatgggc

SEQ ID NO: 350916 - DNA, 122 bp, Homo sapiens
cactactgaatcagggtacaggcagtgtctgagactctggttagcctacagagtcatcaacgcacgtgtgctgtagacttttttgtttttgcaaatgagggtgagatcatatctcactgtgg

SEQ ID NO: 350917 - DNA, 122 bp, Homo sapiens
gagaagcagattaggtcggtgcccttagaggcctcttccttcacttccgggaaacagcggcggttccctgacaaaatccctgttgctcgggggttcggacgccttgctaaggctggcacgca

SEQ ID NO: 350918 - DNA, 122 bp, Homo sapiens
ccgccccccgccgggccctgctagtgggtgtgactgactttgcccctcagagtttaaaaacgcgcgtttgggggtttcgctgtctgtcgttagtcttcacctgaaaacttgaaccgactccc

SEQ ID NO: 350919 - DNA, 122 bp, Homo sapiens
tgcaccagagtgtgcaagcctggggtacggcagctgcgtccttggctggacctctcctgacgtgctccccactccacattgactggggctggctccccatctctatctgttgatcagacaca

SEQ ID NO: 350920 - DNA, 122 bp, Homo sapiens
tgcgggtcggtggcctgccagcgtgctcagcttaccgacggtcctctcctcctcccctgtcgacgtccagccacccgtgtgctcctccgctgatgtgcttctttggaagaccagctgcctgt

SEQ ID NO: 350921 - DNA, 122 bp, Homo sapiens
gtggggcccagacacacatacgtgccgacaggactgaggagccctttacaggacatgcagcgggacccacacacccacacacacgtgctgacaggaccgaggggccctttacaggacatgca

SEQ ID NO: 350922 - DNA, 122 bp, Homo sapiens
gcagtgaggaaaaggacctgtctgcagagatcgtctctgctgcagtccttctgcagtccacgctggggaatgccctggtcagcgcgacagagtcctccgctctccccggcatcccctgtcca

SEQ ID NO: 350923 - DNA, 122 bp, Homo sapiens
agcgcctgcgcaaaagactacgcgagcgggtggctgggttcactgcaactcccggcaggccgctggcatttttcattccctcccgtgaccagtgacttccggcacgaaggggcggggctggg

SEQ ID NO: 350924 - DNA, 122 bp, Homo sapiens
cagagctttcccgcgcggtcggatagttacactactgtccgggacttcctagccgtgccgcggaccatctcaagtgcttccgccacactcatcatggcggtggcagtaagtcacttccgccc

SEQ ID NO: 350925 - DNA, 122 bp, Homo sapiens
gctgaggagcccaaggagcggggcggcggccactaggagctcaggaggcaagggcgtggccgagtgggacccacttgcctgcctggacccagaactctgggatcagtttgacaacttagaaa

SEQ ID NO: 350926 - DNA, 122 bp, Homo sapiens
gaagccgactggctgtgcagtttccgttcctgttggctggggcccggaagtgagagaccacgagggcccctccctccacccaaagggcatcacgccctgcctttggacgagcccacaggcca

SEQ ID NO: 350927 - DNA, 122 bp, Homo sapiens
ggtggtcgttttgagggacaagtggtaagagccaatcttcttggcgaaaacgcggagaaacgggactagttactgtctttgtccgccatgttagattcaccccacagagatagcggcagagc

SEQ ID NO: 350928 - DNA, 122 bp, Homo sapiens
ctcaaaccagacaatgaacaatccatttcaacagggacttttgccactatttctgggaaacgtggactgtgacatgacttttggaagaagatatattgtttttaagcatggaggtgcaatgc

SEQ ID NO: 350929 - DNA, 122 bp, Homo sapiens
ttttttctgggggctgacgctgggtgggcagagggcagaggcctgggccaggacagggcccgaagaacgactcagatcccggactgtcctccgggcgcgacggaggcggcggccggggcgga

SEQ ID NO: 350930 - DNA, 122 bp, Homo sapiens
atgaagttgcagcacaagagccagctcctgcagccattccagggtgggcccctgctatgccggccaaacagggagcaaatgcctctgagacacagggaaatacaagtccactggaccctgtc

SEQ ID NO: 350931 - DNA, 122 bp, Homo sapiens
cagggccagtctccgtctcagtgtggctgactcatgtggctctgagcgagtctctcacctcgctgagcttccatttccctggctgtgagagatgggttaattacacctaccacccagggtgc

SEQ ID NO: 350932 - DNA, 122 bp, Homo sapiens
gactcagccaggatgcagggctcactggggtttttctttttcctcccagggatcaacaagcgtggggccaagaactgcaatgccatccgccacttcgagaacaccttcgtggtggagacgct

SEQ ID NO: 350933 - DNA, 122 bp, Homo sapiens
ccgaggtactacagctgtccaagatgccaccggtgggggaaataggtaaagggtacactgcgatctttgtattatttgttataagtgcaggtgaatcctccgtgagctggtaaaaaagattt

SEQ ID NO: 350934 - DNA, 122 bp, Homo sapiens
attcatcaacatagcaaatatactctgaacgtgcaactcccctggacagctggaatctggcggcgccatttctcttcttgcactgccttaatgctgatattttataaccactgcagttgaat

SEQ ID NO: 350935 - DNA, 122 bp, Homo sapiens
tggagttgcgggggccacgggcgggccaccgaggagctggcgcgcggtattgatccgtcccgccgccccaagcctctcctgaggcctccctctggcgtcccccgggatccggaggcccctgg

SEQ ID NO: 350936 - DNA, 122 bp, Homo sapiens
ctctcccacccagtgacctcctggcccacttccttgcccagaggggcctgggttggcattcggctcccgcgtgccccgcagctcgtccccgcccccctagcctgtttcccgtaccgttcatt

SEQ ID NO: 350937 - DNA, 122 bp, Homo sapiens
gctgtgtatcggcgatgcgggtgtttccccagtttgtggcccctgagtgctgggtgggaccgcggtgactgaacctagaaggtggagaggaatcgtcctcggtgcccagaggcggctctgca

SEQ ID NO: 350938 - DNA, 122 bp, Homo sapiens
aacacttagcatagctcctactcccattaaaactctataaatggtagctgttaccaatgtcgctattaatactgttaatcagggaactgttctctgtccctccagaccctagcttcttcaaa

SEQ ID NO: 350939 - DNA, 122 bp, Homo sapiens
ggggaggcggggcggaggaggagccgcgggcgcggcgccgcgctgtccccggccgccgcccgccccactccgcaccgcatgtaaacagtcccagccggcccagcccggccccggaggagccc

SEQ ID NO: 350940 - DNA, 122 bp, Homo sapiens
gtgggtattattaataatccatagaaacccaaggggtccggagtgagaggagaaacatgacgtgcctgtgtgtgcacaggacgcctgacactcgctcacacacgcatgtccctctctctgag

SEQ ID NO: 350941 - DNA, 122 bp, Homo sapiens
aaggaaccggccccgccgcgctttcctggactgcggaggcggcctgagtggtggtgtccccgtccctggcagagaggggctgtctcttgattcctgagcttcagggccacatgtctcaggcg

SEQ ID NO: 350942 - DNA, 122 bp, Homo sapiens
gagtgtggggcacagaacgtgaaattccaacaggtgccacaagggggcgaaggctctggccgcgggaggcctccagccctcactcaccggtcctggcctccacagggactgggccgtggcgt

SEQ ID NO: 350943 - DNA, 122 bp, Homo sapiens
aggcagggaccgcggcttcgcggtttcctggcaaccacgcagccaagggcaaggcgcaggcgcactacaaagtctggcgcccagcagaggttaggtgtttaaagttaggacctgaatgggtt

SEQ ID NO: 350944 - DNA, 122 bp, Homo sapiens
ggaaccggcagtggcttgggggcgggacctcgcggactgctgtggcggcagctggagcggcggccgcggtggcagaaccgggggcggccgctgcagtctggagccccatagtgcggggccgc

SEQ ID NO: 350945 - DNA, 122 bp, Homo sapiens
tcgctctgtccccatagagctggccaatgctcttttctggcccgttgggaccagagtgagcgaaggaaggagacttcccctcatggaacctcaggctgacccccaagccaagactcatcagc

SEQ ID NO: 350946 - DNA, 122 bp, Homo sapiens
accttccgtttttgcgatttctgctccgaagaccgagggcgggctcgtcgcgtccaggaccggctcagcagcacatagaggggaccttcctggcgtgcaaagcgcttcgctgtcgcgatgtc

SEQ ID NO: 350947 - DNA, 122 bp, Homo sapiens
gggttcccgcggcgggcgggcgggctgcgcctccgctcgccttctcagtagctccgtaggcgtgtggccgtttctccgccaatctgagcgcaccgcgccacagcatcctgtggtcccctgca

SEQ ID NO: 350948 - DNA, 122 bp, Homo sapiens
cttgtctcgctggcctgcgacccagccagccagcaacctggaccggtgagttgggcggggcgcattcgggcctctcctggcggctccaggtgacctcccgggggccacgtgctcacacgaag

SEQ ID NO: 350949 - DNA, 122 bp, Homo sapiens
ttcagcctttcacagactaacaactaagaccactatgagccctatagctcctttatttctcgcatgggtgcctcatcacatggaggccagggaagaaggagcctgggaaaaggaacactttg

SEQ ID NO: 350950 - DNA, 122 bp, Homo sapiens
ctgcccgtggcccctgcggcctgcgaggccctcaacaagaatgagtcggtgctacgcgcacgagccatcgtggcctttcacggtggcaactaccgcgagctctatcatatcctggaaaacca

SEQ ID NO: 350951 - DNA, 122 bp, Homo sapiens
gtgccgcggctagaactaagtgcgaacacgctggggtttcaccccagtggctcctgattccgccttcccccagcccctgccaacacacacactctgcattttgcacctctgacgcttccaaa

SEQ ID NO: 350952 - DNA, 122 bp, Homo sapiens
gtgtgcgttagagttctctgcagaccgcggtgcctgtggagcactcagctgtggccacaccgcggccgggacactggagtagcgccgggtggtgcttatatcacgctcgccttttgcttctc

SEQ ID NO: 350953 - DNA, 122 bp, Homo sapiens
tttgttgacaactttatgtgtttttaatatggtttttgccaaacttggtttttccgagaccgtcttttctcagaggctcagttttaccgtcctatctgcagtcggctactttcagtggcaga

SEQ ID NO: 350954 - DNA, 122 bp, Homo sapiens
tctgcttggctgcgcccagcctaaacagtaaataatgcaagctttctctctctccaagcgcgacaggggcgagggctggagcagctccttgctctttgctactctgggctctggagagtgca

SEQ ID NO: 350955 - DNA, 122 bp, Homo sapiens
gcgccccctctccgagccctgctaacccggggccctggctcttacctcggcgcgcgggcccggctccccggctctccccgggcctcaaggccccaggcccggccgctcctccccgctccccc

SEQ ID NO: 350956 - DNA, 122 bp, Homo sapiens
gccaagacagccaggctggaggaggcacagtctctcctggcctcctgccaggtctccagccgcccacgtggactggcggtgcagccacgtccctcctcctggctactctctcctgtccactc

SEQ ID NO: 350957 - DNA, 122 bp, Homo sapiens
gaggtaccgggttcatctcactagggagtgtcagacagtgggcgcaggttagtgggtgcacgcaccgtgcacgagccgaagcagggcgaggcattccctcactcgggaagtgcaaggggtca

SEQ ID NO: 350958 - DNA, 122 bp, Homo sapiens
ccctttcaagcctccctgcttcttttcgcggctccccgcaatgtccaaccactccgggggcgcgaacccagcacccaagagtcctggggacctcacgcatgcgcggcaggggcggcgtgtgg

SEQ ID NO: 350959 - DNA, 122 bp, Homo sapiens
cgctgcatctgcgcccgctcctgtgctccggcgtcctacctaaccccgggaagtcagagccgctgggagtttctgacttactcgaagaagtctgtcctgggcaaagagcacacacgaataga

SEQ ID NO: 350960 - DNA, 122 bp, Homo sapiens
agctgggcctgcgcccaggggccagcagggcctcagggctcaacttctggcacctccctccgtccccagaagccctgcacccgccttgcctccgcgggctgtggcctcccccctcctcactc

SEQ ID NO: 350961 - DNA, 122 bp, Homo sapiens
agggtgctgccacctgccggccgaacggcaggccgccggctcgggcgcgggcctgggtcccggaggcccgacctctgcagttgctgagcggcctcaacttcaagtccccttcggagaaagta

SEQ ID NO: 350962 - DNA, 122 bp, Homo sapiens
acatccacggtgcagctggtgacacagcttatgccctatggctgcctcttagaccatgtccgggaaaaccgcggacgcctgggctcccaggacctgctgaactggtgtatgcagattgccaa

SEQ ID NO: 350963 - DNA, 122 bp, Homo sapiens
ggcctttcgcgttcgctcgctttctactgtcggtatttgcagcagcgctccctcaggtcccgagcagagctaagccagccagcacccaggggaaggggacccacagccccgtggaaagaggt

SEQ ID NO: 350964 - DNA, 122 bp, Homo sapiens
aagaccaaacactgagctttcttctaggggtgggtatgaagatgcttcagagctcatgcgcgttacccacgatggcatgactagcacagagctgatctctgtttctgttttgctttattccc

SEQ ID NO: 350965 - DNA, 122 bp, Homo sapiens
atacaacatttatatagtgaaatcagtttctctaaaatacctttcctgacctcctcaggccgagtttctctctccctcatctatattataatctctgtaccttgtcattgttaactcatctt

SEQ ID NO: 350966 - DNA, 122 bp, Homo sapiens
gcatttcttttttttttttcttgagacggagtctcactctggtgcccaggctggagtgggcgccatcttggctcactgcaagctccgcctcccggcttcatgccattctcgtccttcagcct

SEQ ID NO: 350967 - DNA, 122 bp, Homo sapiens
ctcttttgtattgtttctgcatcgtcctgtcaaacatctggaaaccagcatattggcagtcgtctcacaacatgattttgcatttacatcatcgtgctagctggtagaattttttcccccag

SEQ ID NO: 350968 - DNA, 122 bp, Homo sapiens
gacagggcgggaggggctgggcgggaggttcgcaccggcggacggaaatccagacgggagcgggagacagctccggcccagcaggcgggaaggggcctggggaagcgcggcccagcactgct

SEQ ID NO: 350969 - DNA, 122 bp, Homo sapiens
tggatgagcagcttctggggccacagctggagagaggaggatcagagaggactccgggaacgccaccgactgcaagccaccagtcacaggaaaacctccctgccctgcccagtgagtgattg

SEQ ID NO: 350970 - DNA, 122 bp, Homo sapiens
gtggagctcaattttgtacccacggaaccaagaagggcctgagcccggccagtgaggaatcggagtgggaccagtcgccaccgctttctctacttcccgtcccggcatccgatgggggaacc

SEQ ID NO: 350971 - DNA, 122 bp, Homo sapiens
aagccccctccccttgctctctatccctgtttcagtctcttcatcgcatttatcactatccgaaatgatcttgttcacttgcctttttcctattgtctatctccccctcaaccactggatcc

SEQ ID NO: 350972 - DNA, 122 bp, Homo sapiens
cgccagctgggcttctaaggactggggctctgtgaaggtaagaggcagtctgtgccccaccggctggaggctgccactttagagacgtctgagtacccgcaggtcacacccaggaggggttg

SEQ ID NO: 350973 - DNA, 122 bp, Homo sapiens
accactacctgtgggcagagtgaccatccgccttgaggtagtcgtgtcacatctaggtgccgtctcctcctactcacagcaacttcctaaccacctcctgtccacaccatcttccttgagga

SEQ ID NO: 350974 - DNA, 122 bp, Homo sapiens
ttatcatttaatgggttaaatgagtaggtgtggccatgaacacctggagagactgcctgacgtgcaggtgccataaacttctgctttcatgggcaggaaagtgtgtgatacctggaggacag

SEQ ID NO: 350975 - DNA, 122 bp, Homo sapiens
gccgtcctggcagagctgggggcagagcccgcagtcttgttcccagaggtctggagttgccgcaggtggtgttgcggtgcctctgtgcctgatgacccaggccggggctacctggctccggc

SEQ ID NO: 350976 - DNA, 122 bp, Homo sapiens
gccagaattaacgtcgttggggcaggtcctgggtagattccaggttggcgggtcctggggcggggccaggatagggcgatcctggaagctgggcttcggaagcgtccaggttggtggcgtcc

SEQ ID NO: 350977 - DNA, 122 bp, Homo sapiens
gggaactcagagttttacccagagacttcagaaatgatgtctggaggggagatttgggttcgatcctgaaagaggaccagaagtttgccagatggacaagaggaagagtgctccaggcagag

SEQ ID NO: 350978 - DNA, 122 bp, Homo sapiens
tgctgtttatgtatacctaggccgaacaagtctcaaaactctaccctctcctgccccctccggagctggtactttgaaaacataggacaataatgaaagccaagagcaggcagcctgatatg

SEQ ID NO: 350979 - DNA, 122 bp, Homo sapiens
ctgcctagagtctctcactttaaaccaagccccaggctctgttgctcatgctgaggtgggcggactgcttgagcccaggagttcaagaccaacctgcgcaacagggcaaaaccccatctcta

SEQ ID NO: 350980 - DNA, 122 bp, Homo sapiens
gaaacatcactgatgtacaactagtcgctggcagagttgggatttgaactcaggaagccacgcccctttctttgcagttttcaggagggcaggagctctgttttattaacccacgtatctct

SEQ ID NO: 350981 - DNA, 122 bp, Homo sapiens
agctgggccattggctaagcttgcagcttcctcttaatgcaaatgagctttctgaatatacgtgttttgattggactatattgatattaacgtcatctgagtaacttccaatcagacagaag

SEQ ID NO: 350982 - DNA, 122 bp, Homo sapiens
agttggggttcacctcttgactcagccctacttgatgtggacagtgtctcccattcactacgtaacacacatggagaagctgaggttcacagatagcgagtgatgggccacagtgtgaatca

SEQ ID NO: 350983 - DNA, 122 bp, Homo sapiens
caaaagctactgagagtagatactatgtaaactgcacaagacattgacctttgttaaatccgaacactctttaagataatgctcttacccacaaggctgtagcttggaatattcagtgctct

SEQ ID NO: 350984 - DNA, 122 bp, Homo sapiens
gaaccgggcagcacctggtgtcagcggctaattgtgttttaaggtggcgtgttagaccagcgcgcgaagggcaacccgagccaccgcacttgccttgcaggcgccgcgtcctctgacacggg

SEQ ID NO: 350985 - DNA, 122 bp, Homo sapiens
tccagcgcagcctcctcctccaggcggcgcgtgtgagtcaatggaaatgaccgtggcgggcggagcagccacctaggacatcgcggaagcctcctgaggggacttccaccgcttgtcccagg

SEQ ID NO: 350986 - DNA, 122 bp, Homo sapiens
cctgcttccaaatagtagcgtggctcagagtgctgtccttggagtgtcatcatgagtctccgccatacttccaatagagtgaactctattagaagaatagaatgtgggtgagtagaacctgc

SEQ ID NO: 350987 - DNA, 122 bp, Homo sapiens
atgagttgggagagtgagttcctcatgccttccttatccacatagttccaaggtttccatcgtccaactacagtgtttcaacaaagagacatgctgggcgtggtggctcacgcctgcaattc

SEQ ID NO: 350988 - DNA, 122 bp, Homo sapiens
gtcacgcggaatactgatttaaccgaaactgtgacaaacctcatcagccgggcagggatgcgtgtggagcgagccgctggccaagtgctgccagatgccccaagtgacccagagaaatggtc

SEQ ID NO: 350989 - DNA, 122 bp, Homo sapiens
ggctgcatccatgcagcgctgcaagaaaaagacaaatccgtatgctgatggggctctatccgtgggaagaacaagcagaggagcacagtccaccaaagccacgggtgcaggatgagaggaag

SEQ ID NO: 350990 - DNA, 122 bp, Homo sapiens
aggcccgacataaacttcccggcgcgctagcagaggcgtcacagacgggccggcccctagcgccattccccgaggcctggaggcggctcccgcccctaatccccacactcggggtcccggcg

SEQ ID NO: 350991 - DNA, 122 bp, Homo sapiens
agaaaaagaacatctgggtcctgagtccagctgcagtgatgacagacggccactagatggcggtgctgccccatcagaagtccgccccgcggctccagcacacagggtcgcgcttggaggcc

SEQ ID NO: 350992 - DNA, 122 bp, Homo sapiens
agccggccactagctgagcctggctgagaggcggtaagggggctgggcctggccctggagcgagctctacgagggggtctggggctcacagacaggccagcaccatgcctccaagagtcaga

SEQ ID NO: 350993 - DNA, 122 bp, Homo sapiens
atgtgttgtcttcgggagacaggacgtagaagatagttgcagcacagggtgataggctggcgaaagttatacaaaagcaggaaccactagaaggaggtaagatgtagtgtgctttgggagta

SEQ ID NO: 350994 - DNA, 122 bp, Homo sapiens
ccccacacctgtgacgccctcctgtgagcttaccggccttcgatcacacgccatcgcacacgctcctttactgctcatggtgttattcttgcctccagcacaagcccttgattgattcataa

SEQ ID NO: 350995 - DNA, 122 bp, Homo sapiens
aaagggccgggaagggcgcatgcgcagtggcagcgactaaggtttagtgaggcggcaccgcgcggcccgaggcgggtcttgaagcactcgttttcccactcgttttccggggttcccccgcg

SEQ ID NO: 350996 - DNA, 122 bp, Homo sapiens
ggagtgaacgactggagcaaatataggtctagacacgtagggcctgtgaggttttcctgacggcaggacctacccttgccacccaacccccaggagccctttcatataaagctaagcttttg

SEQ ID NO: 350997 - DNA, 122 bp, Homo sapiens
gatccccacttcaaaactggagggaagtttaagagattaacccctggctgtgttcacagtcgagtatagaaaagcctgaagtcccacactttgaggcctggcagaaaaaaaacagaactggt

SEQ ID NO: 350998 - DNA, 122 bp, Homo sapiens
ctacaacccgtcagaaccagcaaccgctggaaatggcgtccgggcccggaagccactgtgcgcccacttccgttttgcttccgtagcaccgcacaagagggcgggccatttagcgtcacaag

SEQ ID NO: 350999 - DNA, 122 bp, Homo sapiens
gattgagtttctgagagccacaaaaactcaggtgtgcagtcatgacagaatgcatcagagcgtaaaagaagctgatgagccaggccgcagctgccaacagaatacacacctgggggttcatg

SEQ ID NO: 351000 - DNA, 122 bp, Homo sapiens
tacgcgtggcgcgtggctcacggggagcatcgctaacaaagctgggttcctgctgggccccgccctgctcctcgcccccgcgactgggctgggcgcgctgtcccctagcgcagctatgtccc

SEQ ID NO: 351001 - DNA, 122 bp, Homo sapiens
tggcctatactgtgacccctagcaagttattttcaaggcctaagccctggtacctgtggacgtgaccttatttggaaatagggtttttgcagacgtaatcaacttaagatgaggtcatgcta

SEQ ID NO: 351002 - DNA, 122 bp, Homo sapiens
aaagcgcatcagggagcctgggggccgaagcgcatctgagtgccgaggcctaggccaccgcggaagcctcgtgaacactccagacagtgctggccagcaagtgtggccttcctcgcaattcc

SEQ ID NO: 351003 - DNA, 122 bp, Homo sapiens
gtggggcagtgcagagcgggtcctggattggctgggccggtgagtgctggcccactaccccggctctagcgtactggcggagacagacgtgagagctcggcgcctggggttcgcgcccgggc

SEQ ID NO: 351004 - DNA, 122 bp, Homo sapiens
ggggtgtccaaacatgtagctattagctaaaataccggctaaatccctatgtcgtaaacacgaggacttagccagtaagtcaggttttgtatcatttgtgctataaaaacaaaatgaaactc

SEQ ID NO: 351005 - DNA, 122 bp, Homo sapiens
ttgctggtatattcgaaatatgttcaccagatctacctatagctccacctgaaaaaattccgcaccgcttcccaatttatgaagggattgcacaataatttaacacaaattctgtcaagcat

SEQ ID NO: 351006 - DNA, 122 bp, Homo sapiens
gcagccactctcttctgcccttgccttcgccctgggtgggacagggctcccaagggcaggcgggtcccccagtcccgccattacgggttgtcagaccgtctgcgtgtggcattttttggctt

SEQ ID NO: 351007 - DNA, 122 bp, Homo sapiens
tggcactgcccaccattggcacagggagagcttctgcactcatcgatatcctcctcacatcgggtgccggagaatcctggtggggcggaagtgggtggggagaggaggccaaggtcatcgag

SEQ ID NO: 351008 - DNA, 122 bp, Homo sapiens
ttctggtttgtcccatttaggcataccttattctctcatgtatttattatatatccaatccgaaaaatggatttccctatggcaaatagcttttctaaaaaataaataaataaataaaaaga

SEQ ID NO: 351009 - DNA, 122 bp, Homo sapiens
gcacagacggccttctgcttgtaccggagctgggtcctttccccactaggtcatgctcttcgccagtctaagacctccccgggctcagaacactcggaacagggcccggtaaaaggccgtcc

SEQ ID NO: 351010 - DNA, 122 bp, Homo sapiens
tggtttaattcaaatgcaccaagaattccggtagcaggaagcatcctgtgctgaatagaacgggcgtggaggcaggaggaggagcaggacgccgggcactgctgatgctgctttcgctgggg

SEQ ID NO: 351011 - DNA, 122 bp, Homo sapiens
acacacacgtttggagcccagtgtgcagacccgcagcgcagaggaggcggcggaacaccccgggttggtcgggtttccaagggctgacccgagctccagcactttttccgcgcctgattttt

SEQ ID NO: 351012 - DNA, 122 bp, Homo sapiens
caaaggactaatcagctaccaactgtggcatatgaggatgtctgagtggagagctccaaacgcctacacgcctcatgcccagaagctcctccttctgtgtcccccacccttattttttgctc

SEQ ID NO: 351013 - DNA, 122 bp, Homo sapiens
caagtgcagggagtgctttttagcaagataatcagtgtgaacgcacaacctggcaacgatcgctgcgacataaggaagttcacaaagattctattaagagaccgattgcccagccataacct

SEQ ID NO: 351014 - DNA, 122 bp, Homo sapiens
acgcaacacagcgggacccttgatgagaacctggatcagggaggagcttgtcaatggcatcgtcgggccattcaggagcatggtgtgtgctgttgatgagaggaggatgcgtctgtggtaac

SEQ ID NO: 351015 - DNA, 122 bp, Homo sapiens
gggaaaagtacttaccagttataattaggattagcacctaaaaaaaaaaaaatgaaagaacggaactagagctggtgtgatagacatatggtctacaggaatccaaaaccttccctgatttc

SEQ ID NO: 351016 - DNA, 122 bp, Homo sapiens
gagattcgtctctgcgttttaattttgactttgataagtgcaagaagaaagagataaagacggctgccagaatctagggagatggggaagtggtcaggaggttcccatcccatttaaaatca

SEQ ID NO: 351017 - DNA, 122 bp, Homo sapiens
ttcctgtaaacctatggagttaggcttgccagtctgataataaataccgtcccagaaaagcgagccccagtgaaaacaactaaacaggctgaggcttgagtatgtgttgtattcctccttca

SEQ ID NO: 351018 - DNA, 122 bp, Homo sapiens
gagagggccctaagaagcaggcagtaaggggaccagccacgctgatctaggtagattaggcgagactgggcagctgcggcgtacctggaggctgtcacgccggtcctggcccctagggcagc

SEQ ID NO: 351019 - DNA, 122 bp, Homo sapiens
gagaagtaggcggggcctgaggtcccagcggaggccggagtttaagtcctgggctgttctcgcttggggtagtctgggtttaaatatgaattatatctactgatactaatttggcttcttgg

SEQ ID NO: 351020 - DNA, 122 bp, Homo sapiens
ccgggatccccgcagggcggcggggccaccagagtggagcgaactgcagcgactgtggcgcgcggagtccgaactgcagatcccgctgccgccggagccccgccccgcgtggggcgagctcc

SEQ ID NO: 351021 - DNA, 122 bp, Homo sapiens
cttgaagggggtctttaagttaagacacaggtggtccccgccccaccgctcgcctctgagcggaacccgcctctctcgcagcgctgcccactggctgacggcccccgccccccgcccacgcc

SEQ ID NO: 351022 - DNA, 122 bp, Homo sapiens
atggtcgagttgagactaacccagctgcatgtgcccttccccgggttcactcttctaactcgcgctctgctcggtgactgatgcgtggggcactgggttttcccgggcggggcagggctgga

SEQ ID NO: 351023 - DNA, 122 bp, Homo sapiens
gtggctcccaacaggcacctccccttccccgtgccagtgaggggggggtccagtgtcccccgttccacagaggggacagttagggtctctggagacatctttggacttcacggcagggaggg

SEQ ID NO: 351024 - DNA, 122 bp, Homo sapiens
ggtgggcagcagggctggacaggggcgcctgggtccctctgacggcatactcttcctctgcgcagagttcatcccgaagacacggagcaccccgcggcctacagcgcgggcgcccacgcggg

SEQ ID NO: 351025 - DNA, 122 bp, Homo sapiens
tccacgctccaaaacacgcttcctgtagagaggggcgtaaactaatagatttgaaattgtcgagtcctttggtctctcaagaacgatgggaacttgacaagaaatttcgattattccctggt

SEQ ID NO: 351026 - DNA, 122 bp, Homo sapiens
agcgtcgggatgaagtcgggagcaaagcccttcccggggcggtccagcgttcaccttcggcgagcacctaaggtgccgctgctgctggggtcgcttctacaccccaaactacctagcaagtg

SEQ ID NO: 351027 - DNA, 122 bp, Homo sapiens
caccggctgcctccgcgcccgtgggggaagtcggttttggcggcggacgcggctgcgatgcgtgcctcattcctggacataaaagggagtcttgccactcagtgcgcactggcggtcccgcg

SEQ ID NO: 351028 - DNA, 122 bp, Homo sapiens
cttcacgggcaatcaggaagggagagagctggggaccatattctgcaatgcagccaaatccgaggaagagaaactgaagggagaagtagatggcaatggttatgataaaaagggataaaact

SEQ ID NO: 351029 - DNA, 122 bp, Homo sapiens
gaaaggggcgggtgcggtggctcacgcctgtaacccagcactttgggaggccgaggcaagcggattgcttgagtcccggaagctgttcaagaccagcctggctaaaatgacgaaactccggg

SEQ ID NO: 351030 - DNA, 122 bp, Homo sapiens
ctctgtggtggacctctataatgcctttgagtgacagagatgcttgccccatccccttgacggcttccttctccgtccctgcgtcgagctgtggctagatttcgcgatgagggcagagggcg

SEQ ID NO: 351031 - DNA, 122 bp, Homo sapiens
tctgatgtgcctaatccacagggttgtccccatctatttgagtcacaccgaaaagtttaccgaacactctgggcctccctttctcacttgggcaaaggcggctgccttctcaccacgagagg

SEQ ID NO: 351032 - DNA, 122 bp, Homo sapiens
tgatgtgagtcaatatgtctgacacacttagaaactggcacatggctaatgctaaacactcgttttgttattgtccatcagtcacagggagtgaaggtgaactgcctgaagggaccagcagg

SEQ ID NO: 351033 - DNA, 122 bp, Homo sapiens
cacacgtccccacacaatacacagacactcaacactcacacacacgtgcccacacacaggcgcgcacacacactcaacaaagaaagggaccagacagatggaccctgcacacagcacctgaa

SEQ ID NO: 351034 - DNA, 122 bp, Homo sapiens
gaccggggtgggaagtgggagcagtgcccgcttcgaggacccagccagcaacgtggccaccgcgcccaacccgccgacggcgccaagttcctgcgcctggggaacagtctctgctccgagtc

SEQ ID NO: 351035 - DNA, 122 bp, Homo sapiens
ctagtgtccgcctctttcttctaccccggtggttattcagattctcgccaagacccagagcgcgtttcagagtctggtcactccaggagtcgtcgggcgctgaaaagcgattttaaagatct

SEQ ID NO: 351036 - DNA, 122 bp, Homo sapiens
cacaggtatagcgtgtcacctgggtgggacatgggcatagcacatcacctgggtgggacacgggtacggcacgtcacctggatagggacacgggtacggcacgtcacccgggtgggacacgg

SEQ ID NO: 351037 - DNA, 122 bp, Homo sapiens
atcccacgagcgggccttgggctcggtcttttccttagtccatctttcaattgtgagcgtcgtcctgacccacatcgctctccgcccaggtcttcgtctctacaggactcttgcgtgaagtc

SEQ ID NO: 351038 - DNA, 122 bp, Homo sapiens
gtggtgcagctgacacggaggtgcggtgccatccaatggtctccttacgttgggtaatagcgtggacatcaaacttctaaaaagaataaccaaaaccttttggaaactttggcagagttaca

SEQ ID NO: 351039 - DNA, 122 bp, Homo sapiens
aagggagagaagtttgagccccaggcttaagcctttccaaaaaataataataacaatcatcggcggcggcaggatcggccagaggaggagggaagcgctttttttgatcctgattccagttt

SEQ ID NO: 351040 - DNA, 122 bp, Homo sapiens
ttctctagcaataaaatcatagctcccactccctgcaggaagccttcaagacacagctctcgggttctgtcttccctggctcttgaaacaaagccgttgaagtggcttcctccaggctcaca

SEQ ID NO: 351041 - DNA, 122 bp, Homo sapiens
aaatcccgtctctactaataacacaaaaattagccgggcgtggtggcgcacgcttgtaatcgcagctatccgggaggctgaggcaggagaatcacttgaacccgggaggtggaggttgcagc

SEQ ID NO: 351042 - DNA, 122 bp, Homo sapiens
atttggaaagccccctctcttctccgccagctgccccgagaggtgggggcagcagtggggcggcacacagtgctgctgtaggaggaggaggagtttcagcctgagtcaacaacatatgcaaa

SEQ ID NO: 351043 - DNA, 122 bp, Homo sapiens
ggcaccctgttcctgctgggcaagggctcgcctcggctggcccagcacccggctgctcgacgatcccatgggtcacggctccccaggacttcagggagcccagaggagggggtctctggcca

SEQ ID NO: 351044 - DNA, 122 bp, Homo sapiens
tccggcaaacactggaattgcaagctaaagttggaaaagaagaagtctcttcacctcagtcgcaagagcaatagtgtttggttgcatttggagttctcgaagacatattccacattgagcac

SEQ ID NO: 351045 - DNA, 122 bp, Homo sapiens
gtgagcggccgcctccacacccctgtccgcccgccccgccctcttcctccagccctggcccggccactgtccctctgcccggggaggacccagctaagccccgtctgcagaccccaggcccc

SEQ ID NO: 351046 - DNA, 122 bp, Homo sapiens
gataaagacccagaccctgcccttgagatgagtaactgcgtctcttctctggggtctcggcgtctaacagcgtcaggtccaaagcgcttgttgaacgaatgaaccaaggaacgagtgaatga

SEQ ID NO: 351047 - DNA, 122 bp, Homo sapiens
tctccatggaagagctgggactagcctcaaatgtgacatcagcgtgagtgctgagggtttcgctgcagcttccaggctagatggcaggtgtgggtgttgccatgtttctgggcttctgggcc

SEQ ID NO: 351048 - DNA, 122 bp, Homo sapiens
agaagccccaggtggggcgagtccttcaaagagtggctcagttctgcaacaggtgtgacccggcccggagggagggctgcacgtgctttcttcaggtggcctccaggacggcggcttccagg

SEQ ID NO: 351049 - DNA, 122 bp, Homo sapiens
atgcaatctgtgggccgcccctctcccctggccgctaagcagcctccattgatttccgctcgtgtttataggatttccacttagccgtgatcagtagttaagcacaggaaaatcccttgcca

SEQ ID NO: 351050 - DNA, 122 bp, Homo sapiens
ctggggcacacaaacatctcccgcgtttcccaagcgatcccccgggctggtgccctctggcgccgatgatacccctgcgctctccactgcggtggaggccagccgggcctcgcccaccccgg

SEQ ID NO: 351051 - DNA, 122 bp, Homo sapiens
tttgaggtggggctgagtgggccctccctgctcctcagcagctccagcgaccaccctagacgtgctagggagatgacaccctgagccctgctcagaagggggcaccacttgcgagtaggccc

SEQ ID NO: 351052 - DNA, 122 bp, Homo sapiens
gtccatgtgttcacagtttgtgccttcctagcccacggttgggttttaccagagtgtgttcgaccagcactcagtagagtacactggggctatttctatctgttgctgttgtgaacaaggtt

SEQ ID NO: 351053 - DNA, 122 bp, Homo sapiens
cgatggctacggctgggccggggtcagccgcgacagaccccgaggagcggccgggaggcgcggagggggcttcgcagttcctggggacccccatcctagaaccccagatccttacccctgcc

SEQ ID NO: 351054 - DNA, 122 bp, Homo sapiens
tttttcaaggcatactcatctaataacgaggacagcatctgcaatttagagattcctgtccgcaaccttcattgctccaacgacaacttttgggtaagagtcattaggatgccgtctatcat

SEQ ID NO: 351055 - DNA, 122 bp, Homo sapiens
cattccacagggtctggttttcctggaaggtgggaagtcccagggtctgaggagagggagcgcaggcccccatttgtaggagtgagtcagctgacccgcccccggggttcctaatctcacta

SEQ ID NO: 351056 - DNA, 122 bp, Homo sapiens
gctgaaatcttgggtgcatgaccaggtcgtatatgcaacgagacgggcgtctcactatgccgcccaagctaaagtgggcttagatcctcctgcctctggccctccccagtccttagtagctg

SEQ ID NO: 351057 - DNA, 122 bp, Homo sapiens
tcgaatctagctgttgagccgtggctggaacatgctgcccgtgacctgcggggctgaccacggtgcccaagaaggcaagcatcagccaccccggagccgcccctgccgcgcactcaccccgg

SEQ ID NO: 351058 - DNA, 122 bp, Homo sapiens
tttttttttgagacgaagtctcgttcttgtcccccaggctggagtgtgatggcgagatctcgggtcactgcaacttccgccccccgggttcaagtgattctcctgtctcagtcccccgagta

SEQ ID NO: 351059 - DNA, 122 bp, Homo sapiens
agctttctgcagagcgctttcatcaatgtccttctctcttgtcctccctgcagaagaaatcgacgttgacgtggagagcacggactatctcacaggtgatctggactggagcagcagcagtg

SEQ ID NO: 351060 - DNA, 122 bp, Homo sapiens
ttctggaaacgctgtgtttgacagcaggggcaggatggggggctgtgtagacgctggccacgtggcaattgtaggagaaccatgggatcgataaatgttcactgttgtccctgaagcgcaaa

SEQ ID NO: 351061 - DNA, 122 bp, Homo sapiens
gcttataatgaaatatttacatattagggaaattcttaacaccaaaaaaaaccgtatcatcgaagccaatggggccaggaacttaattgttgccagtaatcaatttttctctcttgttttcc

SEQ ID NO: 351062 - DNA, 122 bp, Homo sapiens
gcggagctgttcttgcatttcaaagaaatccagattccgaaagtaagtaacaaccatgcccgtggcccggttcctttctcttacactcttccaaggaccccttttagacctagaggaaaccc

SEQ ID NO: 351063 - DNA, 122 bp, Homo sapiens
catggcactggagggcatcggcattggcagtgggcagctgggcttcagccgccgctacggcgaggactacagccgctcccggggctccccgtcctcctacaactgtgagtaagccccggtgt

SEQ ID NO: 351064 - DNA, 122 bp, Homo sapiens
ttaagtttccttaatttaaggaacgtgcgccccctaattctgccgcgccaggaaggagggcgatctggagtgtttagaatacaatagagcccaagtaagcgttgaggttaagtgccttcaaa

SEQ ID NO: 351065 - DNA, 122 bp, Homo sapiens
ttattattctgttttcaatttcattgatttctgcttttatatttattatttccttccttgcgcttgcttttagtttatttttctcttctttttctaggttcttgaggtgggagcttagataa

SEQ ID NO: 351066 - DNA, 122 bp, Homo sapiens
cctccatctctttaatcatagaatcaattcttattattttgttatgtgtctccatcctttcgattagaccacatttaccttatagacgatttgctaaacattttactaagcttgaactctta

SEQ ID NO: 351067 - DNA, 122 bp, Homo sapiens
taccgcaaaatggcgccattctaatcagaagagttgacacaatcaaatagccacacggcacgaagacgcatgcgtggcgacaacaacaacaaaaaccacaacccacattacttgagggctcg

SEQ ID NO: 351068 - DNA, 122 bp, Homo sapiens
cgcgcgcccctcccgcaagtcccactgaggcccgacccattctgtccggctcccagcccccgcgggtccccccaccccggggctgaccgggtgattcaggcagccctacatcctgctggggt

SEQ ID NO: 351069 - DNA, 122 bp, Homo sapiens
ccagcctgggccacgggcgaaactccgtctcaaaaaaaaataaaaataaaataaagccatcgccatcatccagtgttagaatattttcatcacatcggtgagatccctcatgtctattgata

SEQ ID NO: 351070 - DNA, 122 bp, Homo sapiens
cagtgtggtgctgcttccactgttgtagggtgggaccccaggtggcttgttctaattaagcgtcaacatgaatgatctgttctgtgctgtggttgagtcagaaagggaaagtcatctggcca

SEQ ID NO: 351071 - DNA, 122 bp, Homo sapiens
gtttggggagagtgggccttggtccaccctgtgcgaaagggaattccacagccccccgggcgcccgcccccgcccccgccccgccccctccccgccccttccccgccgggccccgggccccg

SEQ ID NO: 351072 - DNA, 122 bp, Homo sapiens
acctagtttgttcttaaccagaagggagtcaacatccaaagccattttacataacaactgcgaaatatttgattccagaaacttacagaaatttgataatatatttagcctgtatagtatta

SEQ ID NO: 351073 - DNA, 122 bp, Homo sapiens
gcccctagggtgaggcgggctcagcagttgcttcagaaaggcctggcgcgggcacctaggcgaggggtgcaggtgtgcggaacagcgatgctggcccatcccgtgcgggggaagagcgaggc

SEQ ID NO: 351074 - DNA, 122 bp, Homo sapiens
actctggctcagaagccacaaactcttaaccacaaactctgtattatggttttagctccacgttctctgcccttctcctctcctgctctgttgaaactatccattttagagtgtaagctcct

SEQ ID NO: 351075 - DNA, 122 bp, Homo sapiens
ctttaatttaagttccctagtttcccctgggagatctggccaagaactacccggtcggggcggaacgacatccggtaacgcccctcacagttcacttccgtcctccacctgcgtctctgctt

SEQ ID NO: 351076 - DNA, 122 bp, Homo sapiens
atcagatattatttctccatcattggattgagaaaaatcagaagagtgaatagtgtcgatcgttgctatctcctcaactgtgggtgttgttaaattgtctaatggggagaaaggaactttcc

SEQ ID NO: 351077 - DNA, 122 bp, Homo sapiens
gcttttgacttggtcctatgagctgagccaacatggcgtctcccactgcaccgcgagcgccgggctgccaggctcggcagggccgggtaatagaaaacacattggttaccaaaaagaaaaaa

SEQ ID NO: 351078 - DNA, 122 bp, Homo sapiens
gcttcttggaggctactgtcagaaaacatcacaaactagcaggatgacagaccacgctgacgtcgactgggcggcacgcgtccaccccacccctgggggcttcaaattttctcagaacttaa

SEQ ID NO: 351079 - DNA, 122 bp, Homo sapiens
cagggcctgttaggaactgggcggcacagcagaaggtgagtggcaggggagccagcatttcggcctgagctctgccccctgtcagatgagcaggggcattacattctggtaggagtgagaac

SEQ ID NO: 351080 - DNA, 122 bp, Homo sapiens
accatggtcgaataatgttagcgtgcactcggggcctcgccctagccttctgcaaagcctcggcctgcgccctcggctgcatccgtttcgacgccaaccaacctcatgctcttagtagaacg

SEQ ID NO: 351081 - DNA, 122 bp, Homo sapiens
aagtgggatttgtagtcaccattgcatctgtctactttgctactttcagttcaccatccacgtctaccctcattttaactggacttacaataggtaaagatgagaaaggagattcaatgctg

SEQ ID NO: 351082 - DNA, 122 bp, Homo sapiens
ccacacgcagaggagtgagccagaccgtcacctcccacccgagcgtgcgctgactcacagcgaatagcagagtggctggacgcacacttggccagaacatacatgaactcagagctaaatgt

SEQ ID NO: 351083 - DNA, 122 bp, Homo sapiens
ggataataattgttgcctctagggtaaccactgttacttggtggataatacttgttgcctcgagggtaaccactgttacccggtggataataagcattgcctcccaggtaaccactgtaacc

SEQ ID NO: 351084 - DNA, 122 bp, Homo sapiens
cattaaagttattacaagtaataaaatagcactaatcccacaataccaatgatacagaggcgcattcagcaggctaggtatttcaacacatttagagaagatgggaagggtctgaagcgatg

SEQ ID NO: 351085 - DNA, 122 bp, Homo sapiens
tcgagactgaactgttgttgccctgcgtgcgtttaggattatggccgccgtggtgtcttccgcatgataaggacctgggaatccctttccttctccaagtctgctggaatacatacgtcttg

SEQ ID NO: 351086 - DNA, 122 bp, Homo sapiens
gctgcctggccgcggtgagtcgaggcttgctccttctcagggcatcatcctgctgtgatccgcagggcggaaccatcctgcagtggtccgtcaggccctggcggccgcggggaccccagccg

SEQ ID NO: 351087 - DNA, 122 bp, Homo sapiens
ccatcagataaagtcacgtggctctttagtaacacggacaaggctcctcgccaaggaactcgtggcagaagagggcagcagttggcagtagctgccgatgtctgtccccagctccaccattc

SEQ ID NO: 351088 - DNA, 122 bp, Homo sapiens
gataacaaaattatttgaaataatgtagacccaacagctgaaagcttattatggcccaggcggctatccaacagctttggaaacctaagatccaagcagaccataaacaccacttgaagact

SEQ ID NO: 351089 - DNA, 122 bp, Homo sapiens
acagtgcccatgagcacaggctcgaggctccccatcctcctttggaccaggaggagtgggcgcgtcctgaggttgagccctgacctgggcagatggcttgcagagcagctgtgtctggcttg

SEQ ID NO: 351090 - DNA, 122 bp, Homo sapiens
gccatcggaaggagggaaggaacaggagcagaagcagctccaggcatatggttcctactccgtcctgactgtctaccccaagcaggtcgcttggtctttggagtctttgttttcactgtaaa

SEQ ID NO: 351091 - DNA, 122 bp, Homo sapiens
taaggatctaaggatctttttgttaaatgaatggtttcccgtttaactcatcccggggctcggagctgccagtccttccagaattcctcggtttgatcgagttgatagtacttttggcattg

SEQ ID NO: 351092 - DNA, 122 bp, Homo sapiens
gccatgctctaagctctggcctccctgcctggaggcgggacctggcccaagcctcaaagccgaagcacaaattcctcatcagtgaagatccagagccgccgtggtgctaggacacggtgcgc

SEQ ID NO: 351093 - DNA, 122 bp, Homo sapiens
ggtcctgcagcagggcctcgtaggccgctgtaagttgctcctgctgcctctgcaggctttcgttctccgtctccttggccgtgtggtggttctgcagcagcgtgtactgcgcggtgagcgct

SEQ ID NO: 351094 - DNA, 122 bp, Homo sapiens
cagggtggtccgggaggcagggccgacgtgccgacggaccgggcggaagcgtcggggcggcggggacaaacctccaggatcctcgaccgcggcggacccgccaatgaaaagccgcgtggaaa

SEQ ID NO: 351095 - DNA, 122 bp, Homo sapiens
tggggtcccccccaggactgaatcagaagatcggggatggggtcccctccaggactgaatcggaaggtatggggtggggtccccccaggactgaatcggaagatctggggtggggttccccc

SEQ ID NO: 351096 - DNA, 122 bp, Homo sapiens
ccaggtcaaggatgaggagttgcagacactggctgggaagcacggggatgacctgcgtcgcgggaagatggagaactctgagatgatccgcaacatcagcggggtccatgctgagattgagg

SEQ ID NO: 351097 - DNA, 122 bp, Homo sapiens
gtgagccaccgcgccaggcctctcatggcatttttgcagctctaaagagcggcaagagaacgtgccccaaagtgcaagcccttttcaagcctctcctggcttcacaattgctaagtttccat

SEQ ID NO: 351098 - DNA, 122 bp, Homo sapiens
agcctcaaccatctcgaacccaggaagcagggaggcgcgcggagccctgttgatgatccccggcaaacacaccgaggtctgccttctctgaacgccagcgcttgggtgcagcagaagggccc

SEQ ID NO: 351099 - DNA, 122 bp, Homo sapiens
tgtcaacgttggagggttggctggctggagaggggcgccctctttttcttctcagttgtccgggtcagtccgcactctgaggctccgtggactccaagcagcctcggggcttgcaagccctc

SEQ ID NO: 351100 - DNA, 122 bp, Homo sapiens
cgacttccctagaatctcacccaagcgagattgaccccgttgatcggcatctgttacatgcgcccccaagatgacccccaatgtcctagtttcatatctggtaggaaggcttggatcaccag

SEQ ID NO: 351101 - DNA, 122 bp, Homo sapiens
ccagtcaccattaggcctctctggatcctcaccagattctggcgtccgatgactcctgggcgacggccgcagccacttgttttggatctttctggcaccttctctattattacgcctgcgtc

SEQ ID NO: 351102 - DNA, 122 bp, Homo sapiens
gccgttgccatggaaggagctgcaaggtactctgggaccagaattctctctgcagagggtcgggtggggggcggccggctggggaaggtgaggggaaatccagtgccattcctttgtccttg

SEQ ID NO: 351103 - DNA, 122 bp, Homo sapiens
agcctcgattctctcaagtcttagccaagttccctcttaagaggccaagaaaagcagcttcgttcggctgggcaggcattttcctgcctggccctgcggccgcacgcgtgcctccgccgcga

SEQ ID NO: 351104 - DNA, 122 bp, Homo sapiens
cagactgtcatcgtttttgttgcagattcctggatttccctagcaggctggcctctcatgcgagggctttacaggcagtgcttgcaaaccaaaagggaaagagctaattctggtggcgtgga

SEQ ID NO: 351105 - DNA, 122 bp, Homo sapiens
ccaggcggggcagccccggtagctgagggacgcagctagaccttggcgggacggggctttcgccggggcccaggcccagggaccaggcggaggcgtcgcgggagcctttggggcaccacaga

SEQ ID NO: 351106 - DNA, 122 bp, Homo sapiens
ttgcccccagaattgggggcctgggaacactggacctgctccttctcccctctccttccccgtttttgtgcttctggtttgtttctttaattaatttaacaagtgctgcagtttgccctccc

SEQ ID NO: 351107 - DNA, 122 bp, Homo sapiens
cgtgccgacgtggagtgcccgcctgctcacgtgcccatatggagtgcccgcctgctcacacgtgccattgtggagtgcccgcctgctcacacacatgccgatgtggagtgcccgcctgctca

SEQ ID NO: 351108 - DNA, 122 bp, Homo sapiens
gcggagcccgttcctaggactggttgccagcagtgtggtgagggcagtctgaagggttcccggtggtggtcatagagcctgcacacgcctccttctcccaccgatacctgttatgggtggga

SEQ ID NO: 351109 - DNA, 122 bp, Homo sapiens
caggagcccaaggctatcccaacaaaaatggtggccatgttgggcggaggaagaggctggcgccccttgagacactggtcccacttctcagcctctgcgtaccctctgccatccccgcctta

SEQ ID NO: 351110 - DNA, 122 bp, Homo sapiens
ggtgcctctttttccctttaatgatctaacattgagcaatactgtttatattgaaaagctcgcacctttaattaccaattacatatacataatttcagagccaaaggagagcactgtaaaaa

SEQ ID NO: 351111 - DNA, 122 bp, Homo sapiens
gttgggggagtgtttgtaaaagttaagaattattatagatgctaagagttatcctaaatacgtagtatgttttcgggccttgtgtttagaaatgaaatcagttgtcaccacatgtcattaag

SEQ ID NO: 351112 - DNA, 122 bp, Homo sapiens
ctttcccgacacttgagacgtcactcctttgcaaggcagcattcccagcaggcagcgaagcgtgtttggagaagctggagggcagatgaggagtggagggaaggcgggtagggggcttgcac

SEQ ID NO: 351113 - DNA, 122 bp, Homo sapiens
aaagaatgatatcctcaattatctgaaaaagctatgaaaatactctcccctttccatttacgtaactccatgaggctattttttcttcatatacttcaaaataatatatcacaacagatata

SEQ ID NO: 351114 - DNA, 122 bp, Homo sapiens
cttgatcccatggccagcttcggagctcaccaggaggggaagacccattacatccacgggcgtctggcgccaccttgtggtcagtgctgaaaatgttttctgttcccactcgcaatgaaact

SEQ ID NO: 351115 - DNA, 122 bp, Homo sapiens
cagaggggagtatcaggttcctgtactcagctgtgggttgtcactgtctaataatatgaccgttttgccatctctctgcaaatgaggctgaagctgctatctgattggtataacatctcact

SEQ ID NO: 351116 - DNA, 122 bp, Homo sapiens
ttggggtggggcgcccctcatagtgcggggtcgtgtgcccggcgggcaggtgaaggagtacgaggaggagattcactcactgaaagagcggctgcacatgtccaaccggaagctggaagagt

SEQ ID NO: 351117 - DNA, 122 bp, Homo sapiens
aagtagccgcagacaccgtttgcatgacccaggaaccacaaacacggagcgaaggcctgccgggaccacgctgagcttcactactggcagccaactcacttccgggggtgcactcagcacag

SEQ ID NO: 351118 - DNA, 122 bp, Homo sapiens
atcataggtgctcaataaccgtttagggaagaataacatccagtgaagtcaagaggttggcgtaattggaacactcggcgtgaggcgcaccaggtttccagcgcccctggtttccacgtcgc

SEQ ID NO: 351119 - DNA, 122 bp, Homo sapiens
cctcgaggctcaggcccactttctgcagtgcctcaggccccccctgtagcggctccggcccggccagcccctgctcatttaaactcaccagcgaccgttaccgggggatgggggaggccgag

SEQ ID NO: 351120 - DNA, 122 bp, Homo sapiens
acgccgggaccccgcctgcggggctggcggccgattcccacgtgaagatctgtcagcgcgcggagggtgctgagcgcttcgccaccctctacagcacccgggaccgcatccccgtgtactcc

SEQ ID NO: 351121 - DNA, 122 bp, Homo sapiens
gcggcctcggaaatggggcttctggcggctctgcaggcaccgtcagagtcagagggagggcgagcggcttttggtttctgtttaaacagcgtcctgtcgctccctcctctcctgtgcggatt

SEQ ID NO: 351122 - DNA, 122 bp, Homo sapiens
gatttcgccgcctcctcgcagcttggcctaccgcgctagtgttccggactaacgaacaaacggctcactaaattcaaacatgagtttcagcctggtcgccgagccggcgggtagaaaaaacc

SEQ ID NO: 351123 - DNA, 122 bp, Homo sapiens
tttcctccacatgcagatgaaaatcacgacccaaacgtcctcatggtggaaatcagaagacgcgcagggaaaacagggacgcggaaactgccgggaagcgcaggggctgacaagcagcctgg

SEQ ID NO: 351124 - DNA, 122 bp, Homo sapiens
ttcgcagctctccgtggactcagggccctccacctcatcgggagcctcccaggcactcagcgtctcctggcctagggccctcgcctcagagtggcagctgtctagccctttgttcacacaaa

SEQ ID NO: 351125 - DNA, 122 bp, Homo sapiens
agaaatagtgtctggtagcactgcttagaggtaaaagttctgcatttgtgagtctttatgcgtgtggggattcataactgtgaagacccagttttattattgtgaatctattatccctgtca

SEQ ID NO: 351126 - DNA, 122 bp, Homo sapiens
gcgccgcagcagtgggaggggcgccaggttatgtaccagcaaagtagcgggcgcaacagccgcgccctgctctcctacgacgggctcaaccagcgcgtgcgggtgctggacgagaggaaggc

SEQ ID NO: 351127 - DNA, 122 bp, Homo sapiens
cacaggaagtgagccctacgccagtcccagccccagggcttcctgagctcggggcaggtccgcagtccacacgtcacccagacagaggacagcccagcccagccacaggtgaggcggcctga

SEQ ID NO: 351128 - DNA, 122 bp, Homo sapiens
tgagccaggaaggtaggggctgtagtgagctatgagcgcaccagtgcactccagcctgggcgagagcaagaccctgtatcaaaaagttctaatatctaaaaggattgtagtttatagtatgt

SEQ ID NO: 351129 - DNA, 122 bp, Homo sapiens
cggctgccagccacaggcccaagtaaacgctgaatgaagggcagatggaggaacctgtcccggtcggccgaagcgccgcgggcgcctttccacttacggcgggcctgcccagcctcccgccc

SEQ ID NO: 351130 - DNA, 122 bp, Homo sapiens
gaagcgaagcggagtctgccgcatgaattcttaagacctcaggttatctaggaaatctaccgcacgctaaagtgctcctccgtaagtgctgcagttagaatcttcacagcctccctgcagga

SEQ ID NO: 351131 - DNA, 122 bp, Homo sapiens
aggccaggcgaagacgctaggctctaaaacaccctcagtagaagcattaaaatgccctttcgtgatttatttccccttttataggtatttttaaacgttattttaaattacgtgttgacagt

SEQ ID NO: 351132 - DNA, 122 bp, Homo sapiens
cttccttgttgatcactttgacggagtctcttgggcagatgggcgggggcttgaggagttcgtaagagcggggaacctccttcagaagtggcatcccattgcgggcccgagacaggaccatg

SEQ ID NO: 351133 - DNA, 122 bp, Homo sapiens
acaggcgtgagccaccgcgcccggctgcaaagcccatttttctataggtaacctgtgctgcgcggggtggcactagttttcacccagcgggcgaggaggcagcgaagtcgcgggcccagcgt

SEQ ID NO: 351134 - DNA, 122 bp, Homo sapiens
agggcacagttgagacgtgctgtcactggaatgactgtaaactcggatgcagtgaaatgccggctgtaactcggatgaattcctaggttaatgacaacaccaacacagcggggtcccctggg

SEQ ID NO: 351135 - DNA, 122 bp, Homo sapiens
ggcaccagggatacaaaagaaccctataagagagtgaggcccctgcccttgaggatttcacgccctgacccctggataacagaagagaagcctgggagagccccggggtgggggtggccttc

SEQ ID NO: 351136 - DNA, 122 bp, Homo sapiens
cctccagcttccggccacacctttcggcgggtgacatctttgctgagggctcaagcggagcgataggtcatgggaaacttagaaaagataaagaacctaggaagaaaggcttcggttgcccc

SEQ ID NO: 351137 - DNA, 122 bp, Homo sapiens
ctcgctcaatctctctctctccctttatctttcccctctatctctctctgctggtgtgtacgtgtgtgagcactgccagggctggcgaagaaccagccgccgcctttagtccgagccgccgg

SEQ ID NO: 351138 - DNA, 122 bp, Homo sapiens
gcagcctcttgaggggagggtctcccccacctcgggctggacaaagacagcttttccccacgtccctctgggttctctagagcaacagcaatacccgcccggcaggggtgtggcttagagcc

SEQ ID NO: 351139 - DNA, 122 bp, Homo sapiens
ggcagaagacgagagaagcagacatggaaataaaggcagacaaccttttcttttttatttcgcttagacaaaatgcaaagagtgtctcattaaattaaaaaagaaacaagagagaaaaccaa

SEQ ID NO: 351140 - DNA, 122 bp, Homo sapiens
aagtcccctggttgctctcgccatccacattatctaagaccacagttgtgggaagaggggcggcaccacaggagagcacttagtgagtcgtccaggggcctcggttctcattctggctctgt

SEQ ID NO: 351141 - DNA, 122 bp, Homo sapiens
ctcactcaggagaggctgagggaagagatgggcagtgccaccagaggcccctctgagaggcgtttcaacagcttcacctgtgctgacaaagcagccgtggtcagcaccgccgttaaggcggc

SEQ ID NO: 351142 - DNA, 122 bp, Homo sapiens
cagtgccaatcgggcagaagtttgcaaataggcagaatggaatcgatttcctcccacctccgtgtgacgatcccatgttagctacacagtgcagaggctcttgatggtggactaagcaattt

SEQ ID NO: 351143 - DNA, 122 bp, Homo sapiens
ctgacactcacatcttgtctatgagggcaaggcacgcactgatccaggtgctcacagcttcgtggtttaggccccatggcctacagtcctttattagagcgagagtcccgaggcccagcccc

SEQ ID NO: 351144 - DNA, 122 bp, Homo sapiens
cgccaggaagcgccctacagctccggctgggcatgtaagtggcgcccgcgcgctccggaacgcttggagagagcagacaacagtatgccccgccccacctcggacctggtgcggacaccgcg

SEQ ID NO: 351145 - DNA, 122 bp, Homo sapiens
cgagcgcatctgccaagccattgaggcgtgagtgtccctgtcctgggtttgtgggcagtccggcccctttgctaggctggggttgtcaggcagatcctagtaaaagagcctcaatggtgagc

SEQ ID NO: 351146 - DNA, 122 bp, Homo sapiens
agagagattccctggaggctttgttggcgcacagggccatgcttggtttagaaaaggcagcgcggggcagcgtggggctcctccggtttctctttgtctgaaatgctgagtttcacaggctc

SEQ ID NO: 351147 - DNA, 122 bp, Homo sapiens
ccacgaggtcttggaagaggctgggggtcccggccttgtgccttacctgcgcccggaggtcgcctccttcttgggagaggatggggacgtggcatagccacccacgcgccgcgggggtcccg

SEQ ID NO: 351148 - DNA, 122 bp, Homo sapiens
taagctggggttcagtgagtcaccttctttcttcttcacctggcttccatctgcaggagccgcgatgttcccccttcgggccctgtggttggtctgggcgcttctaggagtggccggatcat

SEQ ID NO: 351149 - DNA, 122 bp, Homo sapiens
ctcctcgtcccttcttccgtctttaaagccagcagcgtccccttgttctgtctctgaccacggctgggaaggagtctctgcttttgggcacacgtggctaatccaggctaccctctcactgc

SEQ ID NO: 351150 - DNA, 122 bp, Homo sapiens
cccacaggcccgctgtgtgtgctcgggccacgggagtcctgagggttctgtgggcctgcgcgcatccctctcccatcgtgggggtggctccgtgaccttcctgccacgagcaggaggttgat

SEQ ID NO: 351151 - DNA, 122 bp, Homo sapiens
tggtagctctgggtaaagacagaagacaggttccgcgacggattcgcgacgatacagaggcgcttagctgtgacgtcactgggccacgcccccgatgcgtaggccgggcaacatggcggcct

SEQ ID NO: 351152 - DNA, 122 bp, Homo sapiens
cgactcttccaaggttgtgctttccagagcccagcaagtgggatcagctcagtaaatgctcgcaagcgagtgccaagtgccagcggtggccctcccgggaacgcctccccgaccccaagccg

SEQ ID NO: 351153 - DNA, 122 bp, Homo sapiens
gctggggagcgcccttcatgacggaaggccgctgacccgaggggctcctccacccccatgcgcagatcccaccagccagcaagctaaagcatggcggccatcccctccagcggctcgctcgt

SEQ ID NO: 351154 - DNA, 122 bp, Homo sapiens
ccaaatgttaccgagggtagaattagacctcggggcccaatttcctgccacattacaaggcggtaattaactcagctcagaggtcccgttcctccctcggtaactccaagcgttgcctttta

SEQ ID NO: 351155 - DNA, 122 bp, Homo sapiens
agtgcttactgaaaaacagaatgctcctctggtgatagtgagagtaatgtttgatggtcacgtgttggaccagccagtgagagtaatgtttgatggtcacatgttggaccagccagttgtgt

SEQ ID NO: 351156 - DNA, 122 bp, Homo sapiens
gaacccaggaggcagaggtttgcagtgagctgagatggcaccattgtactccagtctaggcgacaagagcgaaactctgtaaataaataaataaataaatatcctacaatgcatacaacagc

SEQ ID NO: 351157 - DNA, 122 bp, Homo sapiens
aggtatctggacctgaggccagcactgcctcacttagctccagcaagtgcagatgctgaacgaacttgagggcacattgtttaaaaagtctgcttgtcttgattataagccatttcctgggt

SEQ ID NO: 351158 - DNA, 122 bp, Homo sapiens
tatttttagtagagatgaggtttcaccatgttggccaggctgatctcgaacttctgaccacgcccagctaattttcgtattgttagtaaagaggattacaggtgtgagccaccatgcccagc

SEQ ID NO: 351159 - DNA, 122 bp, Homo sapiens
gagagagcccgtcatcatggtgcctcctgtctgacttccccgtggcaggactgatctgcccggctccctgacacctgcctcgtggacctgacccccctcctctttgtgcctccagagctatg

SEQ ID NO: 351160 - DNA, 122 bp, Homo sapiens
aagacaacttgacatgctaagcctggctttacattaagcacatgaaagttcttctatgtgcggaatgaaaaactaaaatgtaaccatctgcatatgatatttagaggtacataaaattgtgc

SEQ ID NO: 351161 - DNA, 122 bp, Homo sapiens
gcagtgccagcacccagctccacccatggaggggtccctacctgtgggcagggagatggccgccagggaaggctgcccaaaggcagtgacactgggctgagtcctcagaggatgcaagtggc

SEQ ID NO: 351162 - DNA, 122 bp, Homo sapiens
cacatcacgcacagcagcttcccgtcgtcctcacagtagtagtgcagcttctctcggtgtcgctcgcacaactttgcatcctgctgctcccgggtcacctctcccggctgcctgcccttgtc

SEQ ID NO: 351163 - DNA, 122 bp, Homo sapiens
atcctgtcacggaggtatcattatccccagatctagctggcttctaagccaaatcatcatcgcctattttgttgatggtgaaaggtgctgcaattgggaggtgttgcatggccaagtgaata

SEQ ID NO: 351164 - DNA, 122 bp, Homo sapiens
tgtccaagcccaattccattttcacaagaggctttctttttggaaacatgatagcggtctcgctggtgtgcgcaccaggagcgttgcggccgcggcttcctcctgcggcgaatctgccgttg

SEQ ID NO: 351165 - DNA, 122 bp, Homo sapiens
caaattactcttaaatggctttgaaacagtgaaatttaactttaagttgtcacccatatccgtacaatggaattttattcagccacaaaaaggaatgaagtactgatacatggtaccacata

SEQ ID NO: 351166 - DNA, 122 bp, Homo sapiens
tgcagctgcctgagccgctccggctgtgtgaccacggaggagttgccccctagcacccagcgtcccatgaccccagggtcacacagcggcctctcagagtcacgggaggaccgaaggccgca

SEQ ID NO: 351167 - DNA, 122 bp, Homo sapiens
ggtaatcctggaggtctaaacccgtgaggaagcccaagaaatggagttaaagacccttttcgcacaaccgattgttgtctgtgtgaccttctgcggcccttgccctctctgaaccctctaaa

SEQ ID NO: 351168 - DNA, 122 bp, Homo sapiens
ggctgctaggtgtgttgggctccaggagggccgtcagaaggagggctttttggcaccccccggggtcacagagtgtgcgcccagggcgtggggccggccagcggacgggcgggggcgtactg

SEQ ID NO: 351169 - DNA, 122 bp, Homo sapiens
caaattagaaatggcgcttcagccacggggcaaaaacagagctgagaattcacttgaaaacgtagccaactataaaccatgcccaaaggcttgctgttttcaacaggcctattgagaaacga

SEQ ID NO: 351170 - DNA, 122 bp, Homo sapiens
gcattccgttttaagaggcgtctttactctctccagctctcagaagagagttgaagagagcgggtcgggaaaccaacaagagcaaagttggcagaacttctagaagtgcagagccagcgctt

SEQ ID NO: 351171 - DNA, 122 bp, Homo sapiens
ggaacccgggttccgaacagctgcgtagaatgcgagcggccaaatggtggagaatctggccgggtaaaaggagacggaggactggggatcgaacggatgtaggggattggacgccgtggctc

SEQ ID NO: 351172 - DNA, 122 bp, Homo sapiens
ttggagccagcatcaccctctcccctacaggtgcacccttgatgaagcctcttctcacctcgagaggatctgatgtgatccaagttccgacttgggctggcacacagctgggctccaaaatc

SEQ ID NO: 351173 - DNA, 122 bp, Homo sapiens
tcatttacgaccttcctctatggccccaagagtagtcctaggaagcccactgatccccaacgggagcaagacttctaacggctgattggtatggaccgagattatctttcaattgaagtgac

SEQ ID NO: 351174 - DNA, 122 bp, Homo sapiens
agtttctgattctggggcgaggattgaaaacttgcttttctaacgagttcccagcattttcgatgctgctagtcctgagaccatactttgaaaaccgcccctctagaaagtgcgatccctcc

SEQ ID NO: 351175 - DNA, 122 bp, Homo sapiens
tagaaatctgtatcactatagaaaagggaaactataggcaaatacatacagtgcattcttcgcagtgtgctccggtgacatatgacaggcacaagcattggcctgtatccacatcacaggtc

SEQ ID NO: 351176 - DNA, 122 bp, Homo sapiens
gcactgaaacatcaaatatattgtatctgctttatctaatactcagaaacaaagaacctacgtgaccaatatcaaattttattttttagttctgactcctaaagtcttgctgtcctatcctc

SEQ ID NO: 351177 - DNA, 122 bp, Homo sapiens
tctcagcctggcgggctccccagggggccgggaggaggcggccgctggatttccctgaggcgcggcgcggggcacacacggttaatcctccgcggctgctgtttggacgaaaagcgctgggg

SEQ ID NO: 351178 - DNA, 122 bp, Homo sapiens
ggcatcgtctggaggccttgcttgttcagtgatagtttattggtccttagcatgacatctcgattaccaaggtaaattcacatacacaactgcaggtaaaaacatgtaaaataatataaaaa

SEQ ID NO: 351179 - DNA, 122 bp, Homo sapiens
ctctctgccctgcaggcagcagagccttcgctgacgccaagaggcagcgaggtggggaggcgaggagttggggaggtctggaggtagggggtggggtgggggtggggccttgcgcagccgcc

SEQ ID NO: 351180 - DNA, 122 bp, Homo sapiens
gcctcgcgcttggtcgcgtggggcggtgcgtgagtgcttagctcacaggctccgggaccgcgctcgggggcgggtctatagtgggaaggggacgcgcgccctgcggcccggcctctagtcat

SEQ ID NO: 351181 - DNA, 122 bp, Homo sapiens
cctgtccgaggctcatttccatgcaaagagcctgacatcagagcaccttttgttgctaaacgctttctttagcctcgagggagagagtcatgtggagctggaagagctcattttgaagagag

SEQ ID NO: 351182 - DNA, 122 bp, Homo sapiens
acatcgggatggtgacgctgagcaggatgaggaagctccagaagacgaagaaggactctgcggccacgctgctcccatgcacccccgagaggtagtagtggtggtctttgaattctttgact

SEQ ID NO: 351183 - DNA, 122 bp, Homo sapiens
cacagacacggtaacaatctgatctctctctcttttccccacatttcccccttttctattcgacaaaaccgccattgtcatcatggcccgttctcgatggtcgctggatgttttattttcca

SEQ ID NO: 351184 - DNA, 122 bp, Homo sapiens
caatacagaaacagaagagcatagctgtgttccagtaaaaacttatatgccccccaaccccgccaaaaaaaaaaaaaaaaaaacggcaatgggctggatatggcctgcaacgcatggtttgc

SEQ ID NO: 351185 - DNA, 122 bp, Homo sapiens
ccgacttggccatggcgagtgcctccagctcacaggccctgaggccgcagccgccgctcccgcctccctgcgggccgctgggccccgccgctccgcacccaccgctccactcgccgcactcc

SEQ ID NO: 351186 - DNA, 122 bp, Homo sapiens
aggaatgagcaggtcagattcaaggcagtgaggtcaggccgcatgaacctggaggggaatcggggacttcatgcgaaactccagcctaggctttcaaagtcaaagggtgatacagtgggtac

SEQ ID NO: 351187 - DNA, 122 bp, Homo sapiens
gccagctcacggagggaatccagggaattaggtaatgaacggtctacccatgaaggggaccgattagtgcctctcgcctggtcctgaagacctttaaattattctttcagctgatgccaaga

SEQ ID NO: 351188 - DNA, 122 bp, Homo sapiens
caccttgcacagaccagatctgccagttcagaaacagtcactgtgcattgaggtggacaccgaccaggtgcccagggctgagtctccaggcaggtgggaggtcgggtgtccccgggagagaa

SEQ ID NO: 351189 - DNA, 122 bp, Homo sapiens
aattgggggcagggtgggggcggggagcggccgccgggcgctggggccgcagctaagggccgcgcggctgccgggagcccgcgggaggggcgcagggacgcggcatgggtagttttgggggg

SEQ ID NO: 351190 - DNA, 122 bp, Homo sapiens
ccgtgcctatctttgccgtgcccattttccagcccgtggaaggtacaaccgaggtcttctcgagctgatttacccccgctgcagagctgtgagcccaagggatttcagagggagttatttct

SEQ ID NO: 351191 - DNA, 122 bp, Homo sapiens
cccgggcgaggaaaggaggcggagcgggccgtaccaagtacaccctcggggtggggggtgcgacccggcgagaacgggcggaggaacgcgacgggcgcccacacgcgccgccactctaatgg

SEQ ID NO: 351192 - DNA, 122 bp, Homo sapiens
actgcctggccccgctagaagagcgaatcctccaagggctgtgcccacacatccacgccacgtgcacctcacgcatcttgcttagaagctcacacactagcagacacggtgtggaagagaag

SEQ ID NO: 351193 - DNA, 122 bp, Homo sapiens
ggaaggggcagctgagtgtccttctcagagaagcttcacgatgacgatgaccagaaacagcgacacccggaatccgggggtgcatgcgttttcttgttttgttttttgttcattgaggcaag

SEQ ID NO: 351194 - DNA, 122 bp, Homo sapiens
cagtgtctggtcctagactgccgtcgacttccccacgcacatgtgtcacacttacagccacggcagcgtggtagctggttccacagccaatcacgatgagccgtcggcatcgtcgaatctcc

SEQ ID NO: 351195 - DNA, 122 bp, Homo sapiens
actagtgaagatatatggagattctttgtactacttaaaaattttctaaatttgaaattacgtcaaaatgagaagttaaaagagaaatgacaggtcacttctccagtcatctcccaaccttg

SEQ ID NO: 351196 - DNA, 122 bp, Homo sapiens
aaaaacacagtggctgcccgtgcctctagggtgggtagatatcccagcattccgtgcggtcggcccttcagccgctgccgccattggagaccagcagccatggctctgcgcgaccctgtggc

SEQ ID NO: 351197 - DNA, 122 bp, Homo sapiens
tcgggctctgtgtgaaaatcccacttgctctgagatgtgtgaagccagcagggccagggacgcaagttgtagcgtctcattcaactccccacgccccagccgaggggtactgtccttccagc

SEQ ID NO: 351198 - DNA, 122 bp, Homo sapiens
gccgcccggggcgctgagcaggtgcttttgcctttccagcccctttacctgtggtcctcacggaggatgggccgccgcctggggcgctgagcaggtgcttttgcctttccagccccttttct

SEQ ID NO: 351199 - DNA, 122 bp, Homo sapiens
cagtcctaggggagtctcgctttggggaaacctctcctcctgcacattcaagaaaacaaccgcggagacttagggtcggtactggtttccagtcacttacgtagcaaacgaagcaagaggaa

SEQ ID NO: 351200 - DNA, 122 bp, Homo sapiens
ctattgtacctacatataaaactgagtttggatatagggaagcaacagagggaggaagggcggcagcatgtttttaggctaatttagactcaaaaggtcatctgaaactccacccaatgggt

SEQ ID NO: 351201 - DNA, 122 bp, Homo sapiens
acgaagctgcatccttccctcacaccatgtgcaaaagtgaactcagactggctcagaggccgacatgtaagagtggaagctacggaccaccgttagaagctaaacctttgcaaacgtggtgg

SEQ ID NO: 351202 - DNA, 122 bp, Homo sapiens
ggcaaccaagggccactatttgatgtgctgcaatcctggccaaggcaggaggaagtcacccgtcataacatggggattctgaggatctgtggtgggcttttcacagttccaccctctaagac

SEQ ID NO: 351203 - DNA, 122 bp, Homo sapiens
aattatctagcacctgtagtatgtgctgccttgcacattgaaggggcgtgttgggggcaacgagaggcaatattagggagattctggaatgggaaacctgtatattaaagcacatttaaacg

SEQ ID NO: 351204 - DNA, 122 bp, Homo sapiens
acataatataatggacaagtggaatcaaatagaattgagttcaaattctctgctacccatcggccctggtattggacaaattaactcctctgagcctgtttcctcatctgcaacgtagacta

SEQ ID NO: 351205 - DNA, 122 bp, Homo sapiens
ggaggttggagccgctgggcagggaagccgggcctgtgggggcgtgggtgtggctacgctcggctctgtgattggctgcaccgagttccttggccgcctcccccgcttgtggaaggaactga

SEQ ID NO: 351206 - DNA, 122 bp, Homo sapiens
cccgtttgagcagaccttccacgctgcagaagtagacgctgctgtccaccaggttcttcacggcgcggcaggcgtactccacggtgtagatggctccccggctctactcctcccaacgctgc

SEQ ID NO: 351207 - DNA, 122 bp, Homo sapiens
gctgtgtgtttgagtgggtatgtgcgtgtgtgcgtgtgtgtgcctgtgtgtgtgcgtgcgcgctagagagaggaatgcccctctcttaggtggcaatctgagccaacatatacattcataac

SEQ ID NO: 351208 - DNA, 122 bp, Homo sapiens
acagcgggagtaacagaccaaaagaagaactgcagagcatccctctctcccccgttcacccgtgccacgagcacgtgagtgcatccacaggcagcacccagtctcctgttccactgactcca

SEQ ID NO: 351209 - DNA, 122 bp, Homo sapiens
ggaggacaacacaatggcccacggggggacacaggcttctccatcctcgatggtggattccggaggttcatccaggatccactgggggaggggagggaagcagcgcagtacttttccacacg

SEQ ID NO: 351210 - DNA, 122 bp, Homo sapiens
gggtgggggcggggcagggggcccccgggcgaggggtgcagctggggagtggggcgcggacgcagggcagggcccggggtctgggtcgccactgccggcccgcgacgcactgggttgcgggg

SEQ ID NO: 351211 - DNA, 122 bp, Homo sapiens
ggctggagggccccagggtgatcccactctggcttcaacaccgagctcttggcgccaggccggataacgcatctcaagcattcattcattcgacaagcgaggccgggcgccgtagctcacgc

SEQ ID NO: 351212 - DNA, 122 bp, Homo sapiens
ttgcgcaaggcaggccatctccccgcagcgtctcaatcccgcgtttacaacactgagggccgtctccagcctggagtcgttccttcgcttgtctcatcagccgcccccaagaatggtagcaa

SEQ ID NO: 351213 - DNA, 122 bp, Homo sapiens
cactgctttcagtactggaaaagggaaagagccaactcgatttttttccccctccttaggcggagcaacacccatgcacttctctaattacagtggtagaaacagcctctcaaaatgtgacc

SEQ ID NO: 351214 - DNA, 122 bp, Homo sapiens
gagacagccctaggtggaaaacttccggaaggcccaagcgttcgtaagggctctctaccccgctcggagcatagatggtaccgtccggaagtccgggcggagaccgtagctgcgcttctcgc

SEQ ID NO: 351215 - DNA, 122 bp, Homo sapiens
aaacacaaaaaattaatatacttctttaaaaaggaaaaaaagttatttttacttgaaagacgggattaaagttgggcaaaatgtcccaaccacctgtcctgttaagtcattatataaatata

SEQ ID NO: 351216 - DNA, 122 bp, Homo sapiens
tgattttagacatcaattcatttatatatgtcaggcattgatctagataccagatgaaaacgaagctgagaacaaaacaaagaacctaccgtcctggattttatagagacaacagacaatta

SEQ ID NO: 351217 - DNA, 122 bp, Homo sapiens
acacatgtgtacaccaggggtgtttcaaggaacataagcaggcctaccttttggtgtcaacggtggtaacattgaaggtgactcccttgagccacagtaccatgaacagtctctgggagaat

SEQ ID NO: 351218 - DNA, 122 bp, Homo sapiens
tattgctcatcatgaaactaaatttagccatggtgttgagcaagctggctctgacgttatcgggttcccgttaggtcagggccgcccacacacagggacgctgactgcagaggggctggcca

SEQ ID NO: 351219 - DNA, 122 bp, Homo sapiens
ccttctccccttccccaggaaaagatgagtgaggatctccgcgttggaggaagagggagtcgaaagaggcttccactctttgaaaaaggtcagtattaaggtgaaaataagaaagagattta

SEQ ID NO: 351220 - DNA, 122 bp, Homo sapiens
cagattccaggaatttgtcagaaacagcaggactcacaggaaaagcttgttaaaaacattcggggcatccttttctctgaccccaaaacaccaaaatcaaacaaacaaaaccagaatggcca

SEQ ID NO: 351221 - DNA, 122 bp, Homo sapiens
accacatctttgccttcttgatacttatctttcaaacctagcaattatcaggcaaatcttcgctaccaccatagcattcagaacctcctgaccttacagacttgccaggactcagcactaag

SEQ ID NO: 351222 - DNA, 122 bp, Homo sapiens
tgggaaaatgagtttctagttcttttggcagtatgttacctctgacagccactatgatttcgatggcaaaaaaggagatcacaccttggccatttacaggacatatgtccaccttgttacct

SEQ ID NO: 351223 - DNA, 122 bp, Homo sapiens
acaggttatggaggatggaaaagtgaaggtagatcagtgagatagcccagagataataatcgagggaagcagctactgcccctataggtgggggaacaaagagaaggacatgtgtttctcaa

SEQ ID NO: 351224 - DNA, 122 bp, Homo sapiens
gcggagcaaagctgtccagtcccagaaggcagctgctcctccagtgaggagcaggcggcacgcacggttcactgctcctcctccgaggactcttgcgagatgccctcctcttcctacttctc

SEQ ID NO: 351225 - DNA, 122 bp, Homo sapiens
accagcctgggcaacatagcgagaccacatctctagtaaaaataaaaaaaaatagctaggcgtggtggcacagtggcacgtacctttagtctcagctactcgggtggttgaggtgggagaat

SEQ ID NO: 351226 - DNA, 122 bp, Homo sapiens
gttgcaatgtccctccctcattcttccccttttccatgtatcccaagaaatagccactatcgaaggcaaccagctggtgtggaacaactgtgccatctggtggtcagcataaaaagtgctct

SEQ ID NO: 351227 - DNA, 122 bp, Homo sapiens
agcttccgtttctttcttaaactttctctcagtctctgaggtctcgaaatcacgaggcttcgacccctgtggaccagatgcccagctagtggcctttctccagcccctcagatggcacagaa

SEQ ID NO: 351228 - DNA, 122 bp, Homo sapiens
gaacctgttgtccccgagacatgagtcatggcagaaggaacattcatttatttctgtggacgtgtatggacattgatctagcatgtcatgttccaggctgttctgcaacgaaaagaaaagct

SEQ ID NO: 351229 - DNA, 122 bp, Homo sapiens
agttctgctttattcagcccctgcatgagcggatgctaaggccgggtggtctcctggcctcgggctgaggcctcttcccggctgtctgcccctggcctgcgctggacctgctaagtgcccac

SEQ ID NO: 351230 - DNA, 122 bp, Homo sapiens
ggccgtgggcagggtcatttcaggacccctgcggggctgagagctctggccatggggccacgaggcaggaatatctgatgtaagtggccgcaagcgtcccttcttgccggctgactcacact

SEQ ID NO: 351231 - DNA, 122 bp, Homo sapiens
tgcaggagcgagaaggtgctgtaagcgggcacaggctaagcctgggagagggggaagggacgaggggctttccaactatctctgcccaaagcagctttttcgaggcttttcgagcaccattg

SEQ ID NO: 351232 - DNA, 122 bp, Homo sapiens
gttgtagacacctgtgcagctgaaatcctgttcaggttatggaccatcaccaccattccccgacagtcacgcacccccccagtcaattacctctcccactggccccagaggtaacaactgct

SEQ ID NO: 351233 - DNA, 122 bp, Homo sapiens
ccactctgtttgacatcaccatccccatggctcaatctcgttgccctattttgttttttgcgtgtctcttactgcgttccagagctatctgatctgtctgttgatgtggacatcaatctccc

SEQ ID NO: 351234 - DNA, 122 bp, Homo sapiens
gggcggcccctgcacgcttcccgctccccctgcaggtggcgcgggcctcgggaggagccccggctgcaggagcccgctaaattcaccagggggcgctgcctcccgagactgccgcccagctc

SEQ ID NO: 351235 - DNA, 122 bp, Homo sapiens
gtcaagcaaagtaaataacacttaccttgcttaacaatggaactgagtttagccctactccgcactgacagttccgttgttgcttctgtctcggtccttctcttccctttttatagtatctt

SEQ ID NO: 351236 - DNA, 122 bp, Homo sapiens
aggacagtgtctccggattttgggcccaaaagcccccacatggcgtgcacacagcaggtgcgccagctgcgggagcagatgagtgagaggtataggcagccgaatgtccccgccagcccaac

SEQ ID NO: 351237 - DNA, 122 bp, Homo sapiens
gcgaaggggtcggcggaggcaaaaggagtcctcttaaagagaacgcggctgcgaccattgcgcgtgcgcgcaggccggcgccccctggaggtgcgaagggccttcgggcgctgacagggaga

SEQ ID NO: 351238 - DNA, 122 bp, Homo sapiens
caagtgggagatccagggctcaggacgactaacagttctatcagagaagaatctctcagtcgaggggctttcaatgggcacatcttggtatcttagttctgagttcaggtaattcctttagc

SEQ ID NO: 351239 - DNA, 122 bp, Homo sapiens
gcgccgcatcctttcctccgcgacctgtgacgagtgactgcaggaatgcaggccacctggcgcccttacggatttaacgggccggcttccgaccccctcctgcggcgcgaccactgttcctc

SEQ ID NO: 351240 - DNA, 122 bp, Homo sapiens
tggccgcctactcttaccgccccggccctggggccggccctgggcctgctgcaggcgcggcgctgccggaccagagcttcctgtggaacgttttccagaggtgcggcctggcaccgcccggg

SEQ ID NO: 351241 - DNA, 122 bp, Homo sapiens
gtgctccatacataaccatctcaggttattggaaaaatgcagcctccgagccagacgtgccgatgggacacagggatcctgaacgtgtctcagcaatccgggtgattcttcggtgtggtcgc

SEQ ID NO: 351242 - DNA, 122 bp, Homo sapiens
tccggatgtgatgatacaggattggtgaatgcccgggttaaacccgtggtccttcgcagccgctgcctcagtgacagtcattaggccccccgcagttatttgtcaaaagcattggcgccgct

SEQ ID NO: 351243 - DNA, 122 bp, Homo sapiens
ggggtgaggtggatggagggtgggggtgtactcatgccaggttgctgcatctacaggtcccgctcaggtgagggcgaggtgagcggccttatgcgcaaggtgccacgagtgagccttgaacg

SEQ ID NO: 351244 - DNA, 122 bp, Homo sapiens
aatggatggatgtcctggttaaacatctgcttaggtcatgaactggctaatttgtctctacgtaaatctgaattgggggaagaagcacctaaagagaaacactaggaaggagagggttctga

SEQ ID NO: 351245 - DNA, 122 bp, Homo sapiens
agcctgtccgccctgtgagtagcgctctgctgtggcagagacccctcaggcgcctgcacccggcttcttggtagagagagtattgtgcgctgaaagggttgccccagtgtcagtggatagga

SEQ ID NO: 351246 - DNA, 122 bp, Homo sapiens
acggaggcacggtcaatcctcctcgagttagggagccgactggacgcgaggcctttgggccgtccccagcctcgtcggattggcttcctgcgcgttggcgcaacggaagaggcggccggccg

SEQ ID NO: 351247 - DNA, 122 bp, Homo sapiens
tcatcttcctttcttacccagttggcacagatacatagcaactgaacagcattttgtctccggaacagtataatttccttaaattaccattaggtactagtgttgttttcactagcagcttg

SEQ ID NO: 351248 - DNA, 122 bp, Homo sapiens
ctttgtagcccaggccggagtgcagtggcacaatctctgctcactgcaagttccgcctcccggctggacagtgaatgtttaaggaattctcttagctaaacagggctactctattgtttaat

SEQ ID NO: 351249 - DNA, 122 bp, Homo sapiens
gcccaatgcctaagaaagcttcaagagtccaaatagaccatggaatgcaccatgcaagtgcggcagaagataccttcccaagactgtttttataggcaacatctacctgtgggttttacttt

SEQ ID NO: 351250 - DNA, 122 bp, Homo sapiens
gctgggcgaagaagtctctttcacccaatcgtatgtatgaactcttgctttcctccctgacgggactggaagctctttttacagtcacgatatggctctggtctgtggtcctagaccaagtt

SEQ ID NO: 351251 - DNA, 122 bp, Homo sapiens
ttttcagggaaaaaagtttctttctgtattatacaggcatgaatatcctagcaatgcactcgcacataaatgcccttgcaatccaattataagtatttaacatttcagaactcttttttttt

SEQ ID NO: 351252 - DNA, 122 bp, Homo sapiens
ctctgagcgcacggaactgaaaccccagcagatgacgcagcttccagccgggagggccagcgggggcagaggcaacaaggtcacagctggatgaggctggtgggcgaggcagaggccgtcgc

SEQ ID NO: 351253 - DNA, 122 bp, Homo sapiens
cgtcctaggtcgtcgagccccgccctcaccctgggcgagctccgaaatttaaccccggttcggttttgcctgttttaccactatttgaagagggggactcagcttccctctggccctagccc

SEQ ID NO: 351254 - DNA, 122 bp, Homo sapiens
attcgttgtgggtggggactgcgactcctcccagattcagagctactgctctgggagggccgtcaggaacccgtatttatagaagacatggtaggtgccaaacgtgcttatgagataaacga

SEQ ID NO: 351255 - DNA, 122 bp, Homo sapiens
tgtgaggaatcagagttgtattcctgaagaatcagaggcatatttatgaagactcacaggcgtattaatgaagagctcatttcatgtccattctcagcacagtgtccgggaatctgccttgt

SEQ ID NO: 351256 - DNA, 122 bp, Homo sapiens
aacgggggaggaacccgggcatctgccagccggttctcctcggtctcagagctgcttctgcggccttgcagtccccgcgccctgccctctccatgactgcccgtcctgggcccctcgctttc

SEQ ID NO: 351257 - DNA, 122 bp, Homo sapiens
accctcagagagtgcggttctgggccctgcacccactttaccgatggggaagctgaggcccgtccctgcagccgtccaagcccacactggcaccctcccctcggctgttccgattaggcctt

SEQ ID NO: 351258 - DNA, 122 bp, Homo sapiens
cagcacggcctcctgctccccagagacgccggctgtggcatcaggctgggggagctcacgcgccttccttctttgggtcccaggttgttggtttttctttttaaccgtgtgaggggctgctg

SEQ ID NO: 351259 - DNA, 122 bp, Homo sapiens
atgaaatttagaaaacaactcccatttacaacagcatcaaaataatttcgtttacaatagcgtcaaaaacaacaaaatacttaggaataaactttaaaaagaagtgttaagacttgtacact

SEQ ID NO: 351260 - DNA, 122 bp, Homo sapiens
gccgggggcaggaggggaaatcacctgctccgtcgggcgccgccggcgacttgtcccgcgcggtgcagctctcatcccccagccccaccaacgagatcaaaggcggggcccagagcggttcc

SEQ ID NO: 351261 - DNA, 122 bp, Homo sapiens
ggaataatcccaatgaaaattgatgtttgtgacccagagcagattctggagccttttgtacgcctgggacggcccagcgtggaggggacagtgtggtgcctttttgttcaggcttcgctcag

SEQ ID NO: 351262 - DNA, 122 bp, Homo sapiens
gagggtctgtgcatgggaatctgctccagaggctccctcaggcgccgcgccgcggggatacgcctttcaccgccccagcaattggagcgctgagtcgaagtcctgattccacgataggcgga

SEQ ID NO: 351263 - DNA, 122 bp, Homo sapiens
tagcaatgggagagatagtgccctgaacatgaggcccagccccagctgccccagcacctccgcaggctaaaggagacctctactgggcgccccagagtcagagcccggcacaggaacacaag

SEQ ID NO: 351264 - DNA, 122 bp, Homo sapiens
agacaaaactcctcagacaccggattaaagaaggaagaggtttttattcggccgggagctcggctcttaagacacgagtctgccaatgctcccagccgaataaaaaactcttccttctttaa

SEQ ID NO: 351265 - DNA, 122 bp, Homo sapiens
ttttttttcctgcttagatttcctgattctttctttagtcttgaacgttggtgactttaccgggttatgactcagtcactatttttattcattagtttttctgaatcataatatgccttctt

SEQ ID NO: 351266 - DNA, 122 bp, Homo sapiens
gctccccaagctcggccacactatccgcatgcttcttcctcagcgcggccaccatggcttcgtgctgcagtgtggcctcctccaggtccctgcgcagcttcaggaactccgcctcccgcttc

SEQ ID NO: 351267 - DNA, 122 bp, Homo sapiens
ggtctccgtgtgggagactgcagccaaactcaagtgcccttctgcatttccaactgtgtccggaattggtgggttcttggtctcactgacttcaagaatgaagccgcggacccttgtggtga

SEQ ID NO: 351268 - DNA, 122 bp, Homo sapiens
aggagaggcagaagcacagggggctgaggggaccggtcctgggtggggtcacaagagactcgcagctcctggtctcagaggactggctctgcaccctttttcttttaaaagtggccctctga

SEQ ID NO: 351269 - DNA, 122 bp, Homo sapiens
gggccagagctggcagacctggtggctgaggagttggcctttgctaggcagcatgggacccggggtttccactggaccggagctggctttgcccttaaggacggcacctcggacttcttcct

SEQ ID NO: 351270 - DNA, 122 bp, Homo sapiens
aacgacacggcacggaggctttctagggagcagtccccccaggacagcaatacgttcaggcgacagcgacacagggcagcaacagcggttccctcctggcaggcagccagacgcacacacgc

SEQ ID NO: 351271 - DNA, 122 bp, Homo sapiens
cctcttcctccctgaatattaagaacagtaccacgggggtgtttctactccctgtggtatcgcgtgccatatccttctctcccacgttcccattagaaacaatatcagtgtgggagtgtcca

SEQ ID NO: 351272 - DNA, 122 bp, Homo sapiens
aagccaaatgaggggggtggcacaagggcaccgattccacagagcgggggcactgagggccggccaccacgggggtcaggggtggctgagggccggccaccacgcaggtcagctttacaatc

SEQ ID NO: 351273 - DNA, 122 bp, Homo sapiens
agccttctgggaaacgtagtcccgccggggccggctcttaaagggaacggcgggcagacgcgggctgggggggttgtcgcctctgccggcgcaaaccttacaaccttctccgtggggccgga

SEQ ID NO: 351274 - DNA, 122 bp, Homo sapiens
ggtcaccaggggccccgggagggaaatcatggccctccctggccgggacggagtcaggggcgccagccgcgggacgcacggacctgcaggtgccgaggctgcgcgacggccggagcgtgcgc

SEQ ID NO: 351275 - DNA, 122 bp, Homo sapiens
tggccctagaccagagaggccatgggggcctgagctgtgaggctgacgctttatctcctccgtttgtaaggtggtaactgtgcgccagccttgctagaggccctgcagctggggatcacact

SEQ ID NO: 351276 - DNA, 122 bp, Homo sapiens
aacctttctgagcagagacacagcagtagaaccaatatatacattgcccttggtttctcccgattccttcctgataatctgttgttctggtttgcatgactgtggtagtgttgggggttccc

SEQ ID NO: 351277 - DNA, 122 bp, Homo sapiens
ggtcagctgtataaattagacttcccaaaggcccaaggctgaaatggtgtcaggctgggacgtgattaggaagggacagtccctattccacccagggttgatgctcccagcctgaggcctgg

SEQ ID NO: 351278 - DNA, 122 bp, Homo sapiens
ccccgtcttgctaaaggggaaatggcggtgcagggtggtgaacgtgtgtggtagtaattacgtgcacctgctgctgaggtgactgcatggggggtagccaagcgccctccacgagcgattgc

SEQ ID NO: 351279 - DNA, 122 bp, Homo sapiens
gctgactgcaaatacatgagtaaacccagactaggtaatcactctgccaatccactactgcgaggtaaatacttaattattttattaagccaccgggttttgtggttgtttgttatgcaaca

SEQ ID NO: 351280 - DNA, 122 bp, Homo sapiens
ttggtgcaactgctttcattcagtatgaaactgaaactacacagacaaatgaatagcccacgtggttattcatttctagttctttacaggaagaagttctttctgttgcttgtataatcttc

SEQ ID NO: 351281 - DNA, 122 bp, Homo sapiens
aactcccgacctcaggtgatccacccaccttggcctcccaaaaagtgctgggattacaggcgtgagccgccgcgcccagccaaacctttatttttaaggctgccaacccttattcaaaatct

SEQ ID NO: 351282 - DNA, 122 bp, Homo sapiens
gcaaagcctacctgagacaagtgaaacagtgtctttctcccatgagacgacagtgatgtacgcctccaccgaggaggggataatgcacttgaagaccgcaacattgcctctcatggttttct

SEQ ID NO: 351283 - DNA, 122 bp, Homo sapiens
gtgtagcagctaaactccacatttctagaccgtttgaacaggaaacctgagatgagggagcgtttgaattggctcatgcaaaaaacaatatttgctggaggttagctgctgcattatgaatt

SEQ ID NO: 351284 - DNA, 122 bp, Homo sapiens
tgttggggtctgattccacctattgaattgttaatttcttagagcttgttttttgttttccgtgtgtcctcttttgtagcatcctgtttgtgtttcatgggtgcagtactttctctaatcat

SEQ ID NO: 351285 - DNA, 122 bp, Homo sapiens
gagataggaaagcagaggtcatttcaaagagagagagtgaggataccaccgggaaggcagcgccgaaaaaaccagaggggaaccacttgccgatcccccaggcacagtctggaggtcccaat

SEQ ID NO: 351286 - DNA, 122 bp, Homo sapiens
aggatgccgcggtggccagggatctggactgcagcctggaggcggcggctgagctgagggcggtgtgcgggtgagtgcggagcaaaggggctcttgcagcttggggtcaaacagggtgcagc

SEQ ID NO: 351287 - DNA, 122 bp, Homo sapiens
tctctgggtgtgtggctgcgcggaactgctgggtaattctacccttcgctctttgagaaccgctaatgtgtttttcacggcgcatgcattgtatgagagctccagtttctccacatcctcac

SEQ ID NO: 351288 - DNA, 122 bp, Homo sapiens
tgtccagcagtcggggccttgacgtgaggctgcttggcaagaggacacagctgggtagcccgagaagcacctcccgtctcaggagcggcctgggtccagacacagcatggacgcatttggtg

SEQ ID NO: 351289 - DNA, 122 bp, Homo sapiens
gccgcctggcccttgtttactaaccctccctcaaacgtttcctgggtggctccccagggacggcagggctgggggcttctctccagggagctgctgctgaggcctgtgtctcccgtggctcc

SEQ ID NO: 351290 - DNA, 122 bp, Homo sapiens
ccagcacagcagcctccggtcaagggttgtaagtcattaacttgggtctcctaccacttccggttaagaatgcaacactcaggtgagaacttctcaggtggaaagcaggaagagggtggcta

SEQ ID NO: 351291 - DNA, 122 bp, Homo sapiens
catgagccaccatgccaccacacccagcctccagtttgtctttatacacatgtgacatttcggtgaatatccacatccttatggctttgaaagtcttctgctgacatttctgcaggatacat

SEQ ID NO: 351292 - DNA, 122 bp, Homo sapiens
cgccgagagcgcgtcgtctgccgcctccgtgcgccgccgccgcctctgcgcgacgcccctcggccaggcctgggaaagcgcccgccccgctccacaccttcttaaagccccgggcgccgcgt

SEQ ID NO: 351293 - DNA, 122 bp, Homo sapiens
atgtcactgtcctgggacacgctcagctgcgacttggttttgatgaggaactgcgccctccggaacatcaccctctcttgctcctgcttgagctccaggtaggagcgggagaaggtgtggaa

SEQ ID NO: 351294 - DNA, 122 bp, Homo sapiens
cccctgcaaggctggagctccggcagcaccgcagggcccggtaggtcctggcacacaggccgcatgctcattgggttgtgtctgtcaccgaccctccctgctgtcatccccgggctggacgt

SEQ ID NO: 351295 - DNA, 122 bp, Homo sapiens
tcctgtcccctccaccggccctgccaagggtaaccacgtgctgggagatttgcagcacaacgcaaaggagaaggattagcgagcaccttgttccagcaaaaactggagcaagcctaaaactt

SEQ ID NO: 351296 - DNA, 122 bp, Homo sapiens
agccccttcttgctgctctcattgttcccccattagagtctctttccagcaagtaacctacgtgcctcgcccaccaggcaggccaaaagaggtgtgaccgaaaccgtttaaaataaatctct

SEQ ID NO: 351297 - DNA, 122 bp, Homo sapiens
tacttgatactatcggaaaatggtagcaataccttcagcagtgatctcagtcatggtggtcgtcaaaagtaaaagtcagttgaaaagttcccgtcaagttgcactttgcagagtatttgggg

SEQ ID NO: 351298 - DNA, 122 bp, Homo sapiens
cccatttatcattccaaatcactggcgaggaggtcctgctctcgatctgatctccctgctcgcgcgaagaggtgaccgacacacttactgaggatctctgttagtttctcacgtctcagttg

SEQ ID NO: 351299 - DNA, 122 bp, Homo sapiens
gtgagtcccaggctaggaggtagccaccaggcaccatcgttgcctgcacaccctgcacaccgggacccactgcccctgggagcccatgtaaaatcggtcaagagggatctggctgtcccact

SEQ ID NO: 351300 - DNA, 122 bp, Homo sapiens
agcctggctggcagccatcagcagcagctgcaggtgcccgtgtgcacgcggaggatgcctcggctgtgcaagtgcaggaagttgaagatctcagagggcatggcgtggaagccgggacgcgg

SEQ ID NO: 351301 - DNA, 122 bp, Homo sapiens
ccgcagcctgtgtcagaaaacctgcctgctagtggacacgagagcgtggaaggtcaagcacgatgctctcctgcagacacctctctcagtgcatggaaacagaccactgagccaagagagct

SEQ ID NO: 351302 - DNA, 122 bp, Homo sapiens
aagccgtccagctccgcgttgcgctcctgcaaggctaccttctttttgcaggacagctgccggctgaagtacttcaccagcttgctctgtggagacacagacgaggacagaggacacatctc

SEQ ID NO: 351303 - DNA, 122 bp, Homo sapiens
cggacggactgggacccagaagagccaccagaacaagacatgcggacacaggactcagcccgattcttgcgtgccttccttatcaaggctttcccctctgaaaattaaagcagctactttaa

SEQ ID NO: 351304 - DNA, 122 bp, Homo sapiens
tactgcccaggagtaggaatgaaagaaataggataatgattctgaattgaagatagaccccgttgcacctggggaaggattgacagaaagagaacgttgaatgtcacaagggtattttagag

SEQ ID NO: 351305 - DNA, 122 bp, Homo sapiens
aagcaggagcaggagcacgcgggacccgggccgcaagtcccgtcccatctcggggctccgcggactctgcggggatggagccacctcgctctgactcccagacatgctccggcgcgtgacgt

SEQ ID NO: 351306 - DNA, 122 bp, Homo sapiens
ctttgtatcaccttgaggcgggggtttagaagatgggccttcatctgaacccggtgggggcgggagaacttgagttttgaaaaccccacattctacacctttggagggcctaagggatcatg

SEQ ID NO: 351307 - DNA, 122 bp, Homo sapiens
cctggaatgtgagtggaaaaggccagtcttagtggttagctcaaagatagtctctgaccacgcttagggcactgggataatgagcctacacctcttcttcccagacgcccaaagagcttcag

SEQ ID NO: 351308 - DNA, 122 bp, Homo sapiens
ggagcagccaggaagccgagggggcggtgagggcagggatggcccagccgtggcctctgccgctcgctggttttcacgtgagactgccgccgggccaacccggagcccaggccgcctctgca

SEQ ID NO: 351309 - DNA, 122 bp, Homo sapiens
agaggttggggatctggttctcagtctctttctgggctaccttatagcaatttgaggctccgtcatcagtttctgcaaggtttcaaagatccaggagaagcttagtgttgtgtcaagatgct

SEQ ID NO: 351310 - DNA, 122 bp, Homo sapiens
gcatacaactcccgccattctctgtgcaaaaatcaacaaataaacagaggcaccgcatttcggattctgttacgcactgtttgcaatggcgcccggtattcgtagtttctgcgaggggagcc

SEQ ID NO: 351311 - DNA, 122 bp, Homo sapiens
gcaggtgtggtctgcagcagcggctgggtctggaacagcgtctggggctgggctggtggccggggttgggccgtcgaggaggcctgtactggtgcggcagcttgtaccggtgccggaagagc

SEQ ID NO: 351312 - DNA, 122 bp, Homo sapiens
aaaagaaaaaggaaactgcccaactagctgcaaaattattatcaggtaaactcatcattacgaggcagagaatatttttcttcctttccattcaagaaacagaccactaaaaaaacctgtct

SEQ ID NO: 351313 - DNA, 122 bp, Homo sapiens
ttgtgttagacacggtggactcgttcgtgttagacacggtgggttcgttcgtgttagacacggtgggttcgttcgtgttagacgcggtgggttcgttcgtgttagacgcggtggactccttc

SEQ ID NO: 351314 - DNA, 122 bp, Homo sapiens
tgggatagaagagactaaatgtggcgggtgctgggctgaactggtgataaagacaccccgcgtgcctggagggaggaaactagaagttctatataaatcaattcatgtaacttttttttttt

SEQ ID NO: 351315 - DNA, 122 bp, Homo sapiens
ttgtacattttgtctcatctcaacaccgaagtctgaggttcacgtgcactcaggcacctccggttaccgctcaagcagcaaggtcacctgcttacaagttaggaaaaaatcagagacaacac

SEQ ID NO: 351316 - DNA, 122 bp, Homo sapiens
cttgttcctgccctccaggctctcctcccaggaaacaatatccggatccctaaaaggatccggtctctttcttggggcccagttagcagacagatctttgagcatcttctctggaaaagaag

SEQ ID NO: 351317 - DNA, 122 bp, Homo sapiens
tgaactagggcaggcagggttcatggaacttgagctcacagtgagggtgaaaattatattcgacagcagaaatgagcaaaaaataacaggaagaggaagttgtgattatagaaaagctctca

SEQ ID NO: 351318 - DNA, 122 bp, Homo sapiens
ggtcattggagtgtttactctgcaggcagggggaggagggcgggactgagcaggcggagacggacaaagtccggggactataaaggccggtccggcagcatctggtcagtcccagctcagag

SEQ ID NO: 351319 - DNA, 122 bp, Homo sapiens
attctacattcttgccaaaatgtgttactatcaagtgttttttaacttttgccaatctggcgagtgtgagatgatatccctttggttttatttggcattttcaggattaatcatgctgttga

SEQ ID NO: 351320 - DNA, 122 bp, Homo sapiens
atcataaagagtgatggaagtggtattcaaatctagttttctctgacaccaaaaattgtgcgtgttaaggaggaccaagttatactcagaacatagagggatcaaaacatgtggattctctt

SEQ ID NO: 351321 - DNA, 122 bp, Homo sapiens
acacgcaagataacttccaagtgctataaagaaaacaggtcggctgggtgcggtggctcacgcctgtagtcccagcacttcgggaggccgaagcaggcggatcgcgaggttaggagttcaag

SEQ ID NO: 351322 - DNA, 122 bp, Homo sapiens
ctgtcggcggggcgtaagcccgggctggagacgggatggttggccccggactcatagaagcgctggggccacccgccggccgattcaggagacggcgtcccccgtcccgcagccggaggcag

SEQ ID NO: 351323 - DNA, 122 bp, Homo sapiens
gagtcattgcagggcaacctgtctgtgacattagacaactgttagggagccgatttattacggacagagcactgtgtccaggtctggggaggccaggtcatggagaacctggagtggtccct

SEQ ID NO: 351324 - DNA, 122 bp, Homo sapiens
tgccagagcgaggagcttacttctctgttctcataacacagaaaggcagtctcaacgtgccgggagaggctcggtgtgggttggaacaaatgtgggcccattgatctcaattcaggttggaa

SEQ ID NO: 351325 - DNA, 122 bp, Homo sapiens
ccccacgcctccgaagtagtgggggtttacagcccgtccgggtggtgaggcaatagtgcacggttctttttattttttaatttgccaagggtctcctttcctcgatctgctctcacggctac

SEQ ID NO: 351326 - DNA, 122 bp, Homo sapiens
cggggttaggcaccaggcggcagttgtcccgactgtcagggactccgtcattgtcgtcgtcgtcgtcgcaggcatcaccctggccatcgtggtctgagtcctcctgggcactgttaggcacc

SEQ ID NO: 351327 - DNA, 122 bp, Homo sapiens
attccagaggactgattccagccattcaagtcctcctccagaggccgtcttatattaatacgtttatattaatgccgtattaatataaacgcctcatttcagagcgacaagttcctgaaaag

SEQ ID NO: 351328 - DNA, 122 bp, Homo sapiens
acagctgttcatttacaaacttttctcaattatggttcttgaaaagtgttccaattactgcgactgtatacaatttaacccaaaacttagtggttggggtaaatgacaatgtttattttact

SEQ ID NO: 351329 - DNA, 122 bp, Homo sapiens
cgagagggtgagagtccggtgctgttccttccaaagctgcccccaagtcagggatgagctcgagggtttcgtttgtgagggggtcccgggaatccagcgaggccgggtaggtggtggggggc

SEQ ID NO: 351330 - DNA, 122 bp, Homo sapiens
tgaggacagagagcctgagagcaatgaaaaggaaatcaggaacagaggctgagccagccacgggtggccccaggggacatcatcatgaacatgaagctttctggaaggctagaagtcgcact

SEQ ID NO: 351331 - DNA, 122 bp, Homo sapiens
ggcgtcgggaagtgttcttggtcagagcagagaaactgcagttgccttgtgctttcttcccggagagccctgcagctgaccctctgccagagctttgggtcaggctttctgactgaccctta

SEQ ID NO: 351332 - DNA, 122 bp, Homo sapiens
cgtggcaaggtatgaaaaacaaacaaaatgccaccaggtagtagcgtgacgttctgtccccgttcctgtctttggtttatagccttttctttcagagacggaatgtttccgtgttttatatc

SEQ ID NO: 351333 - DNA, 122 bp, Homo sapiens
ccgcacccacccctgctacaagccggaacaattgcagtgtcctttccaaaccagcccaaacggcctcctccgggaagcctgccaggacctcctctctgggcctgcaaagacccttcctttcg

SEQ ID NO: 351334 - DNA, 122 bp, Homo sapiens
cccgcggcccgaactgctgtgcgccttccgccacccgccgctctaccccgggcccgcgcacggactgggcgcctctgccggcggcccctgctcctgcctcgcctgtcacagcggcccggcca

SEQ ID NO: 351335 - DNA, 122 bp, Homo sapiens
tttgtcatgacttaaagtcaatttgtggatctaatgtagggatcccctgatttactatggcgctgataaactaaggaagatcttctgaccctgttgtcttgttccatgtgcacgtgattggc

SEQ ID NO: 351336 - DNA, 122 bp, Homo sapiens
tgcacggaagcgtctcatcatttggctgtgcttgcggggtgttccctagcactgtcttgccgaagtgagatgtgtggaagagctgccccagaatcatccatggagcattgcaagcaggcagc

SEQ ID NO: 351337 - DNA, 122 bp, Homo sapiens
cagagttgaagggggcaacagtgtttgcgttcggcctcagaggtgacgcttctttgggggcgggctggagttttctggccgtgaatggcagagcgctaatggccgcctccaatgtggcccaa

SEQ ID NO: 351338 - DNA, 122 bp, Homo sapiens
ccacctaaatcggaatccaaaataacgacccacatgctaaacaaacaccttctcattccccgctctgccttaagcaagagctctgaattcaccttcctcaatgtctgctctctgggaataaa

SEQ ID NO: 351339 - DNA, 122 bp, Homo sapiens
tcgccacctctgcgatgaggaggtggtccagacagtctaaggttcagacctgctgacttacgttacacacgctccaggctaagttctgttactaaacactccgaatctgggtttattgacca

SEQ ID NO: 351340 - DNA, 122 bp, Homo sapiens
acagctaacgtgccgcttgctgcttgccaggtatggaggatgcctatcctcaggcagacccgtttccccgcgggctggcggccagacggcgcgacaaaatgagatctgtcgagaggtctggc

SEQ ID NO: 351341 - DNA, 122 bp, Homo sapiens
gaagttgcggttggatacaaagaacttcctaaactcgagggcagttaaagatccacgtggcgtgggtgcctgaagtcctggggggcccttcctggagacactgacctctcctctctccccag

SEQ ID NO: 351342 - DNA, 122 bp, Homo sapiens
attaactccttctccgctgtactaagcatgatgctttattaccaaagaattccagcagcacgtggagagtcccacagatctctggagagagtgcccagctggatggatgtggtcatgtgtcc

SEQ ID NO: 351343 - DNA, 122 bp, Homo sapiens
aggtgcctgcatgtccaaatctcacacgtttcctttttcccttgattccaggggcgacaccgagattgattgctgattgtacctccctttctgcctccgtgcctcccacgccccaaatccat

SEQ ID NO: 351344 - DNA, 122 bp, Homo sapiens
accgctaatatgttgagatgttcacacatgcatgtgtgaggcccttcaaaatgtgagctgcggttagaattgggaagagaagggagtggggatatgtatctttgttttctgattgccttcca

SEQ ID NO: 351345 - DNA, 122 bp, Homo sapiens
cggggtcggtctgggcatctcctatctggccctgcccaccctccaggtgggactattcagcgctttccctgccccgcccctgccacacaatccccgcactggctagcactactcacctttcc

SEQ ID NO: 351346 - DNA, 122 bp, Homo sapiens
agcactaagctctaaggacatcagcttttaaatagctaccagaaatgcgaatcaatacaacgttcaaataataaggttttggccttcatttaaacccacagaaaggctataataaaatgcgc

SEQ ID NO: 351347 - DNA, 122 bp, Homo sapiens
gggacaaagtgccacagagaagagaaagtgctggggtcaggaaatggagactgaggccaccggagagcaggacccctggttgggaaatgggaccctcaggcctccctgagatggggaggagg

SEQ ID NO: 351348 - DNA, 122 bp, Homo sapiens
acggggccgcgcgggcgagttccatgcctgtccagcgctgagagctgccggccaacttcgcggtctccacgtcgcgcttaacgtggcagcagcacgcacttccagcatctttttttagacag

SEQ ID NO: 351349 - DNA, 122 bp, Homo sapiens
gaatctctcctcagtgtagtaagagcaaaggccagcatcctgtgcaaaggtgctctgcagcgtcgtgatccagggattttagcatctgtcgtcgcttgcacatcctctcttacccctctgct

SEQ ID NO: 351350 - DNA, 122 bp, Homo sapiens
cagaaccccgggtgatgttcatcaggttgtagaggccgagttccttgaggtgaaccatctcgaagatgaccagcgcgtagttaaagaacagtcgtgatccccggatgaccgtgaggttgggg

SEQ ID NO: 351351 - DNA, 122 bp, Homo sapiens
catcacaacatcctgcaaactgggtgttattttacagaggcggaaactgtaacacgtttacgcaggtagtgtcagagcctaacaattcgtggttgtaattcgcagtatcattgcgtgccaca

SEQ ID NO: 351352 - DNA, 122 bp, Homo sapiens
ataatcttaacagaaactgaagtccagagaagttaggtcactggcatgagggtttcaaagcgtatctgacgtgataccatatagattgcaagacagttcagagttgggagtctaaggaatta

SEQ ID NO: 351353 - DNA, 122 bp, Homo sapiens
cagaactggtggccccaggcaaagggggggactgaccccgctagcggtaaccagatgtggcggtcccaggggagccccggagcagacccctggattgagaagcagacaggagcggggggagt

SEQ ID NO: 351354 - DNA, 122 bp, Homo sapiens
gtgctcgcgactcaatagattggagtattcactcctggatctcaacttgcaatttgaaaacgcatctctaaagcacctaggagcaatctgaagaaagctgaggggaggcggcagatgttctg

SEQ ID NO: 351355 - DNA, 122 bp, Homo sapiens
ggctccagggcctgcgtgcccctcgacgtgagcgatgattggcgatgaaggataacagatcgccttctcggccactcagtggcaggggacttgctacttccgggtcggtggcgtctggcgtg

SEQ ID NO: 351356 - DNA, 122 bp, Homo sapiens
ccagaatctgaagacgcaggtttgagtctcagctcccttgctgactagctgtgtgatcctcgcaattcaggtaacctctgtaagcttgtcttctcattcgtcaaatgggaatgctgctgata

SEQ ID NO: 351357 - DNA, 122 bp, Homo sapiens
gactgggttgataaaagagcacttggaaatcatgtggggccaataagatccgaacgcggccgaagctctcgtcctcgggttgctgcaggtgtggttcccggtgatggaggccgtggaagaag

SEQ ID NO: 351358 - DNA, 122 bp, Homo sapiens
ggttccatccagatcattaagatatcagttgatcaagacattgaaggacagcctggccaacgtggcaaaatcccaactctacaaaaaaagtacaaaaataattagccgggtgtggtggcatg

SEQ ID NO: 351359 - DNA, 122 bp, Homo sapiens
tctctctgggccatgatcctgggactgtctgtggctgaggaacagttgtagacaccttcccgctcttccttttccaggtcggcctccggggagggcggggggtgggtgcgttgcttgctttg

SEQ ID NO: 351360 - DNA, 122 bp, Homo sapiens
catcctggccccactgccccagcctcacctgaagcaccacctgcggtcaggagtgccgtccgagctcttgcccacggtgaccatctccccagagcggaaggccttcctcaggaatacgggga

SEQ ID NO: 351361 - DNA, 122 bp, Homo sapiens
catgggtccacagagccccattatccaaaaaaaaacacagagcattgtgggcgatgcaggcgaaggcgagtgcacacacacaagcggacattgtaaggctgtttgcacaaccccgccgtgct

SEQ ID NO: 351362 - DNA, 122 bp, Homo sapiens
accgcgctcacgctgcctcgcggctgtggcggccccagggcagtgatgcgatgctgtccccgtaaagctgctgagcagcgcctggagctcttgtgaagctctccccacgtgcaggccaggca

SEQ ID NO: 351363 - DNA, 122 bp, Homo sapiens
aagggcatctcgttatatggacagcctggggccccttgccccagcattcccctccccacccgggacgcaccctggccccgcttctagagaaggacccaaaaaatcagctgtttccgccagtt

SEQ ID NO: 351364 - DNA, 122 bp, Homo sapiens
attactgaaactccacagcaaactattgtttttaccagtcacccagaaaacgaagataaacgtttccacagaggaaataataaccttccttttccaaggtcctcctctgcctcacgtccagt

SEQ ID NO: 351365 - DNA, 122 bp, Homo sapiens
agatctgggttacactggcaaagcctagctgcaagggaggctggcaaactgagtgtctgtcgtttttcagagtcaatggtctggtctgtaaactaggattaaatttaactgcatggaataaa

SEQ ID NO: 351366 - DNA, 122 bp, Homo sapiens
cgatttaaaaaaaaaaattgagccaaatgcaactttttaccccttgtttactctgtgtcccgcggtctcctcctccgggcgggtaacgtgatccgcgaccctctaggtggggacccctcccc

SEQ ID NO: 351367 - DNA, 122 bp, Homo sapiens
caccagtggaacttgcagtggcagcgctccgtctgcacggtcttgaactggtcgtagccacggccgcagcacatgagctcgcagccatccatgccctccgacgtcttgttgcacaggcggcc

SEQ ID NO: 351368 - DNA, 122 bp, Homo sapiens
cgctcggacacctggcaacaaactcgaaagtgactgctgaaggcagtgcgcccggtgagacgttgttgcagttcccttggggactgggattggcatgctttagctatctgaacgaaacttcc

SEQ ID NO: 351369 - DNA, 122 bp, Homo sapiens
tctgctccaggtgctagccaggcaggcgcagccgtggccggctagggctggaagtgtcagcggcggccgcgggcccggcagaaggccgagtaggagggaccacgcgccgggggccgcgatct

SEQ ID NO: 351370 - DNA, 122 bp, Homo sapiens
agagttgattcattaacgttgaactcacggccaacagcacctacacaggcctgagcgaagcgtctccatcgcatgtcacagctcctgcactcagggtcactcgagaggacctcagctctgtt

SEQ ID NO: 351371 - DNA, 122 bp, Homo sapiens
cttcccgggttccgattccgcctcgaggacgcgggtgcggcagacacggcccagagccctcgagggccacgaggcacagacgcccccacctcggatctttctggattcctggggaatctgtc

SEQ ID NO: 351372 - DNA, 122 bp, Homo sapiens
gtgcgaggccgccccgctgataaatgccaagtcgggattttaactcgggccggctggctccggaatgcaccgtcttaaccatttttaggttctgctgcctcaaagacgtaagaatagcacac

SEQ ID NO: 351373 - DNA, 122 bp, Homo sapiens
tgaaatcttattccatcctatcccattcagcccggggccatgaatcatctccttgtttagcgtatccctgctgtataagcttcctgccttttagttgcttggttatcagattgatggaggtg

SEQ ID NO: 351374 - DNA, 122 bp, Homo sapiens
tcaaaatgggcaaatgagggtgattctcatcatgcttccatttccctttcactctggatgcgaggaaaaagtctaaggaatgacctcacacctctgccttgtgtcagcaatttgaaggggga

SEQ ID NO: 351375 - DNA, 122 bp, Homo sapiens
tgcctccccacgagccttgggccgggcggcagctcagaaacagcctctggatttcagcaccgacactcagatggcatgttggggtcatcaccgccccgcccggcccgtaggcccccggccac

SEQ ID NO: 351376 - DNA, 122 bp, Homo sapiens
cagcggtttgcagcccctgttgatgttgggttggtttataatcaccatatggaacagaatcggagcctcgcgtccacttcgatgctagaattctgttcgagtgctgatgaccaggggcggct

SEQ ID NO: 351377 - DNA, 122 bp, Homo sapiens
caaagttgaggaaatacccgggttggagcggataggagactttgagaacgggcgggatcccgacgcgcaggctgatttttgagtgcctgcggctgaactcggggcgccgctgggcctggtgc

SEQ ID NO: 351378 - DNA, 122 bp, Homo sapiens
gctgaccttcttccacatctgtgtcactgttcaaattgaaggcaaaaggcggcccaaggccgcccaggaccggggaatgcccctcttcatcactgtgaagggaagaaaagagagtctataga

SEQ ID NO: 351379 - DNA, 122 bp, Homo sapiens
gaagaggggcaccagatcccatgcagtgccaaacacatccattccaccctctaacacatacgaggcacatcgccccatgtccctggacacaagatccacgagaacagtcagcagatgatcac

SEQ ID NO: 351380 - DNA, 122 bp, Homo sapiens
ggccagctcacagggaaaacgaaactaccattaatgtgcttggttaattacgggcagagacgctgggagagggcctcggaccacaggagccagtatatgtgttgagacagaatggggcggga

SEQ ID NO: 351381 - DNA, 122 bp, Homo sapiens
gcggaaatgggagggtgcctggaggagtggagggattggatttacaccctcttttccctccgaagcctccttggtgggggcgaagaaagaccatccaaccctgccaaaggcaaaaggattaa

SEQ ID NO: 351382 - DNA, 122 bp, Homo sapiens
ggaaacgcacagagagccttaaggctgctgcgggtgtcacagagtgagccggcgtttcaccgagagtctgggctgccagatctcataacaatcagtttttaatgaaagagaagaatggccag

SEQ ID NO: 351383 - DNA, 122 bp, Homo sapiens
ggcaggagtacgtgaccaagggtgggggcgttggcccagcagccgaaggggtcttcagcgcgcccagacccctcggggctgcggggcggaagccggggcgtgacttccggcgccgccgggtg

SEQ ID NO: 351384 - DNA, 122 bp, Homo sapiens
cctgctgccagcgcttgggctgaggtgaggtgctgctcttagaaagcctgtcacagttggcggtgtggggcgaggaccgcctcagagactgcactgcttgcggctcggctttgcgcctttta

SEQ ID NO: 351385 - DNA, 122 bp, Homo sapiens
caaattttattgaatggtggaaatagctctcagcagacggatggggagccagaaggggagcgggaaggtggttttcccatggagtcagctcagcggcgtgactctcctctgacagctccagc

SEQ ID NO: 351386 - DNA, 122 bp, Homo sapiens
gctccaggtcccgccccctgggcactgagtgacagaagaagcgatcacacagtgctgagtcgagcgggatgaacgagttccaggcacagcccttgacagggcaggcttcctccctgtgctgt

SEQ ID NO: 351387 - DNA, 122 bp, Homo sapiens
cataatgatttaaaacgccagaatatggtccagcctcacagctagaaaaccaagcaaaggcgatgggagatgaacggcaaaaaaccgttcagagatattaagctactgctggctgccatcac

SEQ ID NO: 351388 - DNA, 122 bp, Homo sapiens
gttaacgtccaactgcgttttgtctgagagccgatgggagtaagagtgtctgcagcttgtcgatgtgtacgcggttttatgcacttcttttaaactgtcaaaaggatgtctccgtgtacaat

SEQ ID NO: 351389 - DNA, 122 bp, Homo sapiens
ccccggttccccggcgcctgggctgcgcggagtccctgtcccgcgtcccggacccctacgcgcagcctccacgcgctccgagctggagaagccgccagcccgccctcccagggcgtgtcgcc

SEQ ID NO: 351390 - DNA, 122 bp, Homo sapiens
aaatcatgttgaggctgcagggacaaggaaatttcatctcatgaatctgtttgatgttttcgggatgtcctgagagaaaaattctttgacctgcctagtgagcaaggtctaagtttgtacac

SEQ ID NO: 351391 - DNA, 122 bp, Homo sapiens
caaagtggtatgagaaagggtccctcatttaagtctagggggagaccctgatgaattaatcgacaatcacaggacacaaatggtatgaaaatggagcataaggaatctttgcaccatcgagg

SEQ ID NO: 351392 - DNA, 122 bp, Homo sapiens
tggacacacagaccttttaccattaagaaatctgaaagcaagcgtaaatgtaagtaaacacgatttttaatttttattttttatggtggacagtgatcatttgccccaacagccatctgaag

SEQ ID NO: 351393 - DNA, 122 bp, Homo sapiens
taagcccttcccagccttgaccggaaacatgggcccttgtagctggggcatgtaggacaccggtctccctgcctttcctccaaggttctccagatctgcttggggactgcgggacacctcgt

SEQ ID NO: 351394 - DNA, 122 bp, Homo sapiens
taattggccgtctttttctttgctaagtctgggacccagggcttggcctggggcagcccccgccgcagacaaggctgttggaggggtcacgaacccgcttggtagccccgcgccgttaccgt

SEQ ID NO: 351395 - DNA, 122 bp, Homo sapiens
agtttcttccccagttctttctggtcatggcagacgtaaaaaatggtactcattgaacagcgtgccactctaccctatcccacaggctaagcagatcaatagctgggtaccccagaaaccca

SEQ ID NO: 351396 - DNA, 122 bp, Homo sapiens
gggccgacgtcggcggcgaggaaggacggaggagcgccggagccgctttgctgccctccgcgtggtcccgtgcctccccgacaccatggccctggctgaggtagtagtttgtgctgttggtc

SEQ ID NO: 351397 - DNA, 122 bp, Homo sapiens
aagttggcaaattttggaaacagtgtttagtgtctgtggttgctgttctgcatttcagggcgccttgcctacagattaatcccagctggccactcttctacagcacttgctcaggaacaggt

SEQ ID NO: 351398 - DNA, 122 bp, Homo sapiens
gacaccagaggctttctctctggacgcctgcgcttcccgcccatcctccagctgaggtaccggtcctcacgctgctgtgttcaggaactgttttatcatagaaatatctgaattttcaaaag

SEQ ID NO: 351399 - DNA, 122 bp, Homo sapiens
gatcccaggtcacaaaccgtggagcggctccagcctgactggcaagtgtggcttgcaaaacgcggaaaaccgagacacgcccagagataggaggagggaagtgcaggccccgtccaataagt

SEQ ID NO: 351400 - DNA, 122 bp, Homo sapiens
cggacgcgccgagggcagccagggtgagcagaagaacgcaggcggtgtcggggaccatggcggtggcggggagctgggtggctgctcgctttctaccgcccacgaggcccgcggggcctatt

SEQ ID NO: 351401 - DNA, 122 bp, Homo sapiens
tgggaactgagatgcgctctgggacttgtagttttccccagtgccaggaaactcaaaaatcgagacatcggatcccaccacgaggtgtcgcccttgagcgagtacggtgggatctatcctat

SEQ ID NO: 351402 - DNA, 122 bp, Homo sapiens
gtggcaggcgcccatagtcccagctattcgggaggctgaggcaggagaatcccttgaatccgggaggaggaggttttagtcagccgagattgcgcccctacactccagcctggcgaaagagt

SEQ ID NO: 351403 - DNA, 122 bp, Homo sapiens
agatgagagcggagagcgccggagactccccccacagaaccctctcccctcccccgttcccgcctttggggaatttccaacaccggggtgaggacccacccccacccaggtcggggtgcatg

SEQ ID NO: 351404 - DNA, 122 bp, Homo sapiens
ttgacaactctgggcttgtttcctatagcaagatttgtgagaaacttacaaatatcacaacggagctatggtaatcactaaatgagatatctaacttggagcctcctagcaatgcttacaac

SEQ ID NO: 351405 - DNA, 122 bp, Homo sapiens
taccatcatttgccaagtttaattgctacatcatccatctttatataaaactcaaatcagcgtttgttttagctatctgttctggaaacaaattaactcaaagtgtgtggcttgaaataaca

SEQ ID NO: 351406 - DNA, 122 bp, Homo sapiens
tccaagtgtccagggcctttgagcaggcgcagaggtggctgtaccgcgtggctccgcctccgcgcgacacttttccggggcttctcattggagagcaagcctgtcaagtgctttctgttgtt

SEQ ID NO: 351407 - DNA, 122 bp, Homo sapiens
tagggaaggaccccgggtggcctcctggggagctggcctggtgggcaggctggagagacccggtcttcaggacactgggtgccagtgtctcttctggatctctgtgtgtctctcacatgcct

SEQ ID NO: 351408 - DNA, 122 bp, Homo sapiens
gcggtgccccgcctgctgcggtggcaccagccaggaggcggagtggaagtggccgtggggcgggtatgggactagctggcgtgtgcgccctgagacgctcagcgggctatatactcgtcggt

SEQ ID NO: 351409 - DNA, 122 bp, Homo sapiens
cggcacgcccggtcctagtacagcgcaggcgcttaacacacagcacccagccacgaggcccggagtcagagggctttgcttgcccattcacagagccctcacccgcggatcaaagtcgtatt

SEQ ID NO: 351410 - DNA, 122 bp, Homo sapiens
ctctgggagcaaagtggcctgaaaccagagaaaagaacgccgggggatttggcttaaactcgttaaacccaatgaaccctcttgccgaacgatcgcagtctgcgcccggtcttttaatctcg

SEQ ID NO: 351411 - DNA, 122 bp, Homo sapiens
aggaaagatgaggagtctgatgtgatttaaggaaacatttcaagtcccgaaaagtgtgcacggagggccatatgtaccaggcactggttatgtcctgggaaaacatttgcataaggctcaaa

SEQ ID NO: 351412 - DNA, 122 bp, Homo sapiens
agctgaccgctggtagagcccagcttctaacttaggaaaggcactagctctctacaaagccgccactccccaactacaccctgtagggaccagccaatcccaaagcccgagcgggcgtcatc

SEQ ID NO: 351413 - DNA, 122 bp, Homo sapiens
ggtataatagagctattaaccgatgagacacatctactcattctctgtaactctggacatcgcatcttgctttaaaatgcaaatcagtcatgtcttgagcctcttactgagcagtgaatgtg

SEQ ID NO: 351414 - DNA, 122 bp, Homo sapiens
ctttttctaacaaagggataatactgctattcaccttgtaggcttattgtgacaatttaacgtaacctgctgagctcagttcctggtactcagcaagcactcaagtgttagctatgttctag

SEQ ID NO: 351415 - DNA, 122 bp, Homo sapiens
cgaaggctttccggagcagcctaggagcggccgcgggcgcagcgaaggcggcaggaggagcgcagcagccttcgggcagccgcggcggcgtcgctagagcagccggggaggcgccgcggtgc

SEQ ID NO: 351416 - DNA, 122 bp, Homo sapiens
gcttggccgcaacgaaccagttatcccctgtggtaacttctgatacctcctgcttaaaaacgtcagaatgatcgtcaaagcccagctttcagtctgtattcgcactgaaaatcacgatcaag

SEQ ID NO: 351417 - DNA, 122 bp, Homo sapiens
gagggccgcccggagctcgcccacgctgatgcggccgtccccattggtgtcgaactgtggcggcgttggttgtggcgtctggtcactgacagtcattcacacgcgcagcccctcactcacgg

SEQ ID NO: 351418 - DNA, 122 bp, Homo sapiens
gacggcggcggccgaaagcggagagatgctgggcgtggcggccgggatgacccacaggtacgggccgcaccgcgcggcccccgccacgtccgccccgcagctcccggcgggccttcgggccg

SEQ ID NO: 351419 - DNA, 122 bp, Homo sapiens
catggggaagctctgagaaggaagaggaagcctctgctcaccctcatctggaagggcagacgcaggagggcaccagttctatttgctgctacatcccaggtctcaaggagatgaggataaac

SEQ ID NO: 351420 - DNA, 122 bp, Homo sapiens
ctctactgtaaaatatacacaaggactcctaatgtaaaagctgatttcaagatttcacaacgataatcataatgatgatgtaataacagctgacacttaaatatatcagtacaaaccatgcc

SEQ ID NO: 351421 - DNA, 122 bp, Homo sapiens
agaagtagcttctacccgctgctcaccgctcccatcctcgagtcccgcacactgcccggccgagcactcagctgtcgggctctgccagccacgcggactctccacatgcggatgccaccacc

SEQ ID NO: 351422 - DNA, 122 bp, Homo sapiens
aagagggggcagcagcgcacagaggagctacagcagccacctcgacccgaccatgcgccccggatcatcagcatctggagcaagaagagccgcgcttctccctggagacgttcaccaaagag

SEQ ID NO: 351423 - DNA, 122 bp, Homo sapiens
ctaacagtagatgtagatgaagactttaatgtgaagatggacagaggagaggactgagtacggagtatcaggcaatgtcgaggataaagaggaattttcagttttggagtcagggattatag

SEQ ID NO: 351424 - DNA, 122 bp, Homo sapiens
caaaagctaatattccatggtaagagtgatcagcactgtcttaaatgacccttctgttgacggggtcagtctacagcttctatgcttcgaagtgatgaacctgatgactagggaagcacaag

SEQ ID NO: 351425 - DNA, 122 bp, Homo sapiens
attggaatttggacgaaggacttctgcagaattcaatccactatctttccttatatttcccgctttgagtcctgtccactcccacgttgcatctttcacatgacagttttcagaactgagaa

SEQ ID NO: 351426 - DNA, 122 bp, Homo sapiens
atcagtgttagagggagggagattctgggacaggctgcggcgcagatgagtcttcagggccgctgagtgacgcgagccagccacagaggacaaatcctgcccaactccacttaggtggggtc

SEQ ID NO: 351427 - DNA, 122 bp, Homo sapiens
ggccgaccgagtagacaagagcgcggtgggcttcgactaccagggcaagacggagaagcacgagtcacagagaggtggggcggaccccacggtctgtaatcacgcgtttgctccagaaacac

SEQ ID NO: 351428 - DNA, 122 bp, Homo sapiens
gggtttcccccacgctccctggccggaagaccttttctgtctggtgtctgcagagcctgacgtgggcagcgcccgcagctcgcgccggtgcaggggagctgagggccgactgcgcgctgcac

SEQ ID NO: 351429 - DNA, 122 bp, Homo sapiens
aggaagaaagggcggggccttatctacaaagagggtctctctgacgctgggctctgctgccgctgctgctgctgctgctgctgctgcaggaattccaccttgccaggccactagcatgtcct

SEQ ID NO: 351430 - DNA, 122 bp, Homo sapiens
cttgatctcttgacctcgtgatccgcctgccttggccttccaaagtgctgggattacaggcgtgagccaccgcggccggccatttttgttgttgttgttgttgttgttgttgttgttgttga

SEQ ID NO: 351431 - DNA, 122 bp, Homo sapiens
ggactcgaccggagcaggagcctcgagcgaagctgactctgacctgcagaccctgacacacggtcaggccagggagcctcctggatacccgggccaggggaatcgcgtgcagctgaaggaag

SEQ ID NO: 351432 - DNA, 122 bp, Homo sapiens
tctgaagcccagactgaaaaaccaactagcaggtgctttaatgagggcccacaggtcacgcggcggactggcaggtactctaatgagggcccacaggtcacacggcggacttgcaggtactc

SEQ ID NO: 351433 - DNA, 122 bp, Homo sapiens
cgccgcagtgtgcttccagcgcatgcgctgctaacgccccttaaccccccctccgcgccccgcctcccccacgcgccgctctccagcctctaggagtctaacccttagcggtccaccgacct

SEQ ID NO: 351434 - DNA, 122 bp, Homo sapiens
agccgcacctggggcccaattagcctggagcgcggccgggtgtgttgaacgtagcaaccgcgggcggcgggcggcgggcggcgggcgtctggggcgggcggcggccgcgcttcccggggctc

SEQ ID NO: 351435 - DNA, 122 bp, Homo sapiens
tccaggatacgggaccagtcgatagtggccaagtaacagagctcattgttcttctcgatgcggacagaaccccgggtgatgttcatcaggttgtagaggccgagttccttgaggtgaaccat

SEQ ID NO: 351436 - DNA, 122 bp, Homo sapiens
ttcgtcacagggacagaccaacgtgttaacacaaagggagaacacgggagcatcctgcaccgtgcatttcagccacagatcacatggcccctccgcgggcccagcccacgccctgaccgccc

SEQ ID NO: 351437 - DNA, 122 bp, Homo sapiens
tgtatcaacatcaagccacagtcgtttttcaatttctctggctacaaaaatgggcaacagcgttttttcctcattcctctttcttcttaaccctcaagtcacaggcaggtcttaggttaaag

SEQ ID NO: 351438 - DNA, 122 bp, Homo sapiens
acagcgtcctgaattctgccagtaaccatgtgagtgagcttaaaagcagagtttcccagtcgagccgttagatgagaacacagtcctggccaatgccttgattgtgagatgccgggagacag

SEQ ID NO: 351439 - DNA, 122 bp, Homo sapiens
ccacgccgcgccttcccagagtgaagcgagcccatgtagtgccaaatgcagccacacccacgagtgagcactggacctcaccccacgtccagcttcttggtgggggtgctctccccgaccct

SEQ ID NO: 351440 - DNA, 122 bp, Homo sapiens
ccggggaccctttcagaggctgtaaaggtgtcagaagcccaaggcaggaggcagcttggtcggcgcacctcccgggccactgctgccactgtcggggagagccagcagctcacctctggggt

SEQ ID NO: 351441 - DNA, 122 bp, Homo sapiens
ttcccaggcggaggatgtaactgagccacacgtcacgccggcctgactgcaagggaggctcgcttctcccccggccgtctgcaggagggaagtaaaactgcctttctccaaatcggtctgga

SEQ ID NO: 351442 - DNA, 122 bp, Homo sapiens
cagctttccgtcctcggttactatcgcccaagatcaaagccaccctggttttctgattgccgcaactgcggctccaggtgctgagtgcacagccactgcggcactgtccgcagctgcgcgcc

SEQ ID NO: 351443 - DNA, 122 bp, Homo sapiens
cgcggaggctcagagtgggcaaggcaggggtcgggctgcagggcgagcagggccacgcagcggtggtggcagagttgaggacagagcccgggtaggcgaggcatggcgcgtcaggtgagata

SEQ ID NO: 351444 - DNA, 122 bp, Homo sapiens
agattcagatttaatgggtctgggctggagccagaacaaggttgtttgaaagagcccccacgtggtcctaacgtgcagctacattaaccaccgtctagtccagatcttcacttcctcttcca

SEQ ID NO: 351445 - DNA, 122 bp, Homo sapiens
gccctttacagccccgccccttcgcggccggatccagcaacccaagcccccatccctccgcggtcaatctcagcaccccaggccccgcccctgaggctccgcccagcatcccaagacccgcc

SEQ ID NO: 351446 - DNA, 122 bp, Homo sapiens
ctgcgtggggtgtgcttacggagcagtgcccagtcctgttctgagccctgtcacgcaagtcgctccgttgcttttcacagccacctcccaggcagaagccaccaccttctcactctaccaag

SEQ ID NO: 351447 - DNA, 122 bp, Homo sapiens
gtcgccatccctcctggttgaggctggctttggagactcccgctggtcaagattacacgccgcaggaaacctcacatcaaggcactagcctcctttcttccaaacaaaaaagcagaggaccg

SEQ ID NO: 351448 - DNA, 122 bp, Homo sapiens
aagggctgatggttctgtgttcttgacgtaattaggaggccacgcagctctccaacactccgttaaacaaatatgtaagtcgtcctccccctctctggggacagactctagggaaggaggca

SEQ ID NO: 351449 - DNA, 122 bp, Homo sapiens
cctccctccaggcgccccctgcacctttcccccgcccgccttgcactccccccccgcccccggagcctaccccttccagaggtcctaaggaaatccagcccaggagagaaaaatatgctggg

SEQ ID NO: 351450 - DNA, 122 bp, Homo sapiens
atgacagcatgagcccccctgtgagctgggccccgcagccggcagccctgggcctggggacggaggacactcagcactggactgccctgaacctgccgggctgcccagagaggcggggcctc

SEQ ID NO: 351451 - DNA, 122 bp, Homo sapiens
cagaaacttcaattcccagaggcaggggcggtagttacgcagtggaggctacggcggttgcgtcttacgtcatcgaactgcggccatttcgaacccgcaatggaagaaaggggaggggttta

SEQ ID NO: 351452 - DNA, 122 bp, Homo sapiens
ttatgaatgatggcattaaataattttccatctctccagcaggtagtgaaattttcacaccgaattccagcataaccctctgttgcctgctgcgtccagagtagcaatctctcttttgcaga

SEQ ID NO: 351453 - DNA, 122 bp, Homo sapiens
ggggagggagaggagggacccagggaggccgggggcaggcgggttttacagggacctccccgagccccagctgagcgggagctcgggtttcagctcgccaggctctcccatcctcatctgag

SEQ ID NO: 351454 - DNA, 122 bp, Homo sapiens
ctcaggtgatctgaccgcctcggcctcccaaagtgctgggattacaggcgtgagccactgcgtccggccaagttatctgagtatcatccaactggaggttctgcattctgcaggacaggtcc

SEQ ID NO: 351455 - DNA, 122 bp, Homo sapiens
ccccagagccactctgcaccctccaggagaacctacatatgggcgctccagggatttgcccgcattaggatcaggagccccaggaagagttagatgggaatccaggcatcctgggccctgtg

SEQ ID NO: 351456 - DNA, 122 bp, Homo sapiens
tcatttggggagatgccgtgggacttggcgctgatgcagacatgctaccgtgaggccgagcggagccgggggcgcttggggcagctggcagcaccgtttggctttctggggatgcagagcct

SEQ ID NO: 351457 - DNA, 122 bp, Homo sapiens
acagaagctccgctggtacttcaagctctatgatgtagatggcaacggctgcattgaccgcgatgagctgctcaccatcatccaggtgcagagggcccggccagggctgggggcagcggtct

SEQ ID NO: 351458 - DNA, 122 bp, Homo sapiens
tggggcctggggaacactaggatgtgtaagaaacccaggacccgcgtctgggacccaattcgacttcccctacattcattaggtgcagggaatggaaagtcagcaagatctgggcaagcacc

SEQ ID NO: 351459 - DNA, 122 bp, Homo sapiens
gcggctccgtcacacgagtcaggacatgtgacccttggagggttgttgcatcaccctggacgtttggccagacgtgtggccatggttttaatcaggacaattttttgcttgctctaacttat

SEQ ID NO: 351460 - DNA, 122 bp, Homo sapiens
ggatgaaggctggcccggcgctgagatttaagcagaaacaggcaagagcagaaccctgaccgccaggcattcaggccccgcccacagacgccggagctacaaatgaggggtgggcgggggga

SEQ ID NO: 351461 - DNA, 122 bp, Homo sapiens
tgagagcttctgcctcctccacacggttacatagtcccctgagctgggttgggggaggttcgggctcctcctcatcttcagtttatcgcttattaagtgctcctgaattttttttttttttt

SEQ ID NO: 351462 - DNA, 122 bp, Homo sapiens
ccgctaacttccacccctccggatccagcagggtgtacgctgcgcttctgatcagcaaggcgcccatccattgccgttccctatcgggctagaggttcgctattgttcctgcatggctaagt

SEQ ID NO: 351463 - DNA, 122 bp, Homo sapiens
tgggcaaacagagcttggacaggtcacccacggacgttttgacaaatcgagagatgggtccgcagctctgctccatgtctacctgcccgggacaccaggaatttgctttgaatgaaaccagg

SEQ ID NO: 351464 - DNA, 122 bp, Homo sapiens
gcccctctgcagtcgcgctcaggtgtgagccgcggccctgaagctctggaagtagctgcccgtcttgggggaggggaagggggcgatggggctgggggcggagggggccactgggaggggag

SEQ ID NO: 351465 - DNA, 122 bp, Homo sapiens
agagcttgttaaaatgaagactctaatatggtaagtctggtggtgtggggattcagatttcggcatttctaacaagctcccagttaaggcccatgccactgagcagtaaggagacagaataa

SEQ ID NO: 351466 - DNA, 122 bp, Homo sapiens
ctggaggacatccaggcacgggtataggtgccgggagcccggggaacagaacctcagacccggaactgggcaccagatgcaccagccgggggtctgtccgcccagcccggggagtccagggg

SEQ ID NO: 351467 - DNA, 122 bp, Homo sapiens
aatgttagcaacaaccccgccagaccccccaccacccagatcagccactcgcagggcatccgcctgggcgtgcatccagaccccactccggagcacgacttcagcagcttcctggaggtgag

SEQ ID NO: 351468 - DNA, 122 bp, Homo sapiens
gcagggatatgtttccctccattgcatccccagtgtcccacaatgcttggcgcaccgtcacggtccagtaaaaaactttgaataaatctatagcaaagcatggagcggtccgtatagaggct

SEQ ID NO: 351469 - DNA, 122 bp, Homo sapiens
aggtcagggcagggaaggccggagttgcctattggagcagaggatctatcaggacgtccccgttgccacagcgagaaaaatcgatatgtttttgcgggctagggaggcgagcgccttctgcg

SEQ ID NO: 351470 - DNA, 122 bp, Homo sapiens
ccccctagacgcgcccccaggcgagctggagactggggcactccttgcttggtagaggggcggggcgcgcctagcggccacgcgcgcgggcgtcggagggggcgtgtctcgcgggcgcgcgc

SEQ ID NO: 351471 - DNA, 122 bp, Homo sapiens
gggtttgggttggcctcacccttggcacttggagccgcagatgagtctactgtgatagggcgggcgttgatgagcgctgtgaccacttgcccccacctacttagccttccccttgaccccgt

SEQ ID NO: 351472 - DNA, 122 bp, Homo sapiens
aggcaggcagtgtgaccgggcacatgagagctgggctgtggggcttttcccggcaggagccgcagggtgcagggttgaggctggcactgagcccacagtcaagagcgcaggaagaacggctt

SEQ ID NO: 351473 - DNA, 122 bp, Homo sapiens
ctttccccttttcctcttgctcctcatttccaacttagcccttcagaaatgcaaatacaacgtttcacctcctcccctcaccagacattcgctataggaaaaattctcctaactacgtgctt

SEQ ID NO: 351474 - DNA, 122 bp, Homo sapiens
ctgagtcacatgaccctgctaggtgacccagagcccttgttcttctaacacttgcaaacacgtcacacttacatgatcacacgtcttacgtcttccccaacagacctggtcggcttcccaaa

SEQ ID NO: 351475 - DNA, 122 bp, Homo sapiens
tgaggatgaccttagttacccataaagctagttagagcactgatatttagctcccagtgacggcatttctgacttagcacatctcctctggggatgagaaagctgtattttaacctgtatgt

SEQ ID NO: 351476 - DNA, 122 bp, Homo sapiens
tacgacccctccggagcagggtcctgggtaaatcagcagtgagctgcaggctcagccagccgccgcctttggtttcctcccgccgccggctcaccccacctcagacccgagctagctctcca

SEQ ID NO: 351477 - DNA, 122 bp, Homo sapiens
catgcacaggtcccacaggtgaaatgatgcacaatggacgagtccaggtcccgggtttcccgtgcgcctcaggcatgcactactgaaataaagagaataccctgacttttccagttgctcca

SEQ ID NO: 351478 - DNA, 122 bp, Homo sapiens
acacaaaacgcataacccaacaactcacatttgcatctttggaggttgctagggcaacaacgcattattgtgaaaatttataatcaagcatttacctcgcctttcctatatgaagcatattt

SEQ ID NO: 351479 - DNA, 122 bp, Homo sapiens
gtcagcctaagcactgcaggctgcgctgcggtcttggaatttatttcacgtggggcggggcgcgtggggagtgaaggttggagggcgtcaggagagggaggtgggtatagggaggcggtgaa

SEQ ID NO: 351480 - DNA, 122 bp, Homo sapiens
cagagccatttatggcaggtgccttgagcccgcctagaggtcccctttggaatactgcagcgactcaaggatcctggtcagcccttattggccccagctggtcctttggatgctcgggtgtg

SEQ ID NO: 351481 - DNA, 122 bp, Homo sapiens
ccaaagtacccactcttgcactgcgagcggacttgctccaccccgcccctttcccgggggcgaggatccccggcattgtcccctggggctcccgcgtccttccgggacatcccggcctggcc

SEQ ID NO: 351482 - DNA, 122 bp, Homo sapiens
cagacggcagaactgaagcctataggccgcccacagacggcagaactgaagcctacaggccgcccacggatggcagaactgaaacctacaggccgcccacagacggcagaactgaagcctag

SEQ ID NO: 351483 - DNA, 122 bp, Homo sapiens
tcctcatagcagactgggctaacattggatgggtagaaggtccttcggaaaagcaagatgcgtagggacagtaacaggaacaggttccacaaacccagacatatgaacttgaccaagtggcg

SEQ ID NO: 351484 - DNA, 122 bp, Homo sapiens
catcatgaaggtcccctgaagggaccttctcccttcagcagtgcatagtgaggccatttccgtgcaaaaagatagaatctcctgggattcctgatgtttacacttactactcactccttcac

SEQ ID NO: 351485 - DNA, 122 bp, Homo sapiens
gggcttgggaatcacccctggattagttaagagagcattccctgcaggtaacagaaactccgagaaatcagtggcagggtaagtaagggatttatttttctcacatgtcaaaaagtctggag

SEQ ID NO: 351486 - DNA, 122 bp, Homo sapiens
gggggtgcggcgcccggcggggatccgaatagggggcagccagcgtacggtgtgggaactcgggccggcgcgggagcctgcggtcaagggggctcagcactttgtaaacaaggagtgggaag

SEQ ID NO: 351487 - DNA, 122 bp, Homo sapiens
gcagtgctgctttcccactaccgtggcctccacaaaccagcgctgtgcccccgctaccgccgccactcccagggggccaagtcccacaccttcagaccctcaagacgggagccggaagccac

SEQ ID NO: 351488 - DNA, 122 bp, Homo sapiens
accaagatgacctcatctcccaagagaaaatgccaatgacaatgccaaccaagatgaccccgtctcccaagagaagatgccaatgaccacgccaaccaagatgaccccgtctcccaagagaa

SEQ ID NO: 351489 - DNA, 122 bp, Homo sapiens
aatgttgcctgcatggtgaaccctggagaaaagtgttgatctaattaattgctgcttcctcgtggccatgggcttctccagctacagcttttagattttggaaaataattaatatgatttca

SEQ ID NO: 351490 - DNA, 122 bp, Homo sapiens
ggcgggcgcttcgttacccaggagcccaaggtgcagctccgggacgcttcttttcaaggccgggacccctgcagcggcccgtaggacacctccctttccgagcacggactggtccccgcccc

SEQ ID NO: 351491 - DNA, 122 bp, Homo sapiens
aggcacagatggcatcccagaaagctacaggagctcagagatgggattcctaggtgagctcggacatcaggacaggcagctgaaaatggctgaatcttaacagatgagtagaacagagcttt

SEQ ID NO: 351492 - DNA, 122 bp, Homo sapiens
cacagaattcaatcatctcgtgtatgagaggttggatctgagacgtcttttgagtctggtcgtagtgaaggacgcaaggtgtcaattctagtgagaacaatttccaggaagccatgttccgc

SEQ ID NO: 351493 - DNA, 122 bp, Homo sapiens
aggagtggttacattatctcagcccccagcccacccctgctgcagtcggcaaatccgtggcgccctcccctcggttccatcaaaggtcccttcggtcgaggggcaagagccgagagaagggc

SEQ ID NO: 351494 - DNA, 122 bp, Homo sapiens
agcgttttgttttgcgtgggaggttccagcagtatctcttggttattccaaatttatgggcggcatctgggctgctgtacattttgaagaatcttaggaccgcttactttgcttactcgttt

SEQ ID NO: 351495 - DNA, 122 bp, Homo sapiens
tattattcctccatcacagctttagttctttgcctatttctctcttgcgatccgcctgctcggccctgcaaccgtgtgtgactggaattcctaggccacgccccccatgagcgacccgtctc

SEQ ID NO: 351496 - DNA, 122 bp, Homo sapiens
catctttatatacatagagaaaatcttctttccttttattctttctcgctcacactctctcgctcctctctctcgctcgctcgcgctcacacacgcacacgcatacacacactcgggttctc

SEQ ID NO: 351497 - DNA, 122 bp, Homo sapiens
ctcaccttggtgtgagaaaactcagggaaggttaatctcagttaatgaacacatatttaccgagcatgccctctgtcctacaatctgggtgcaggctatatagaaatagatgacccatccct

SEQ ID NO: 351498 - DNA, 122 bp, Homo sapiens
ctcgatctcctgacctcgtgatctgcccgcctcggcctcccaaagtgctgggattacaggcgtgagccaccatgcccagccagtgaatttttaatgttctcagcataaagaagtatgtgagg

SEQ ID NO: 351499 - DNA, 122 bp, Homo sapiens
aggagagtgagttgccttctctgtggacttgatagataggaaaggtctgacaattctgcccgtctacactggaaaagcgccttatcacttatacactgccaagcgccttatgaccagcgtgc

SEQ ID NO: 351500 - DNA, 122 bp, Homo sapiens
cgcaggttccgcaggctctctcggtcagtctgtgcctgggccttgtagatctgtgtgttccggtcccaatactccggcccctcctgctctatccacggcgcccgcggctcctctctcggact

SEQ ID NO: 351501 - DNA, 122 bp, Homo sapiens
ctggaaaatcgggtcactcccacccgaatactgagcttttccgacgggcttaaaaaacggcgcaccaggagatcatatcccgcacctgaatcggagggtcctacacccatggagtctcgctg

SEQ ID NO: 351502 - DNA, 122 bp, Homo sapiens
cgtctctgatgtcatgtgattccaccctccgcctctcacccaccctcgcagagggcggtgcgcttggcccggcccctcgaggcaccgcctttcaattagcactcgctgattggtcgctgctc

SEQ ID NO: 351503 - DNA, 122 bp, Homo sapiens
atctgttccagagcgtgcgcgaagtgatccagaacccgggccccaggcacccagaggccgcgagcgcagcacctcccggcgccagtttgctgctgctgcagcagcagcagcagcagcagcag

SEQ ID NO: 351504 - DNA, 122 bp, Homo sapiens
ctggcatgcaaagctctgtactcatcatactctgcattgaagtcatccttataattctggcgttgctcataggagacgatagcgatatattttctaataagaaaaaagataaatggagagta

SEQ ID NO: 351505 - DNA, 122 bp, Homo sapiens
agccccgcccctcccgcaggcccgctcctggccccgcccttcctctgatcccgcccaccacgccggcaccagcacagccctccctcagcaaggcaagtagcacttggtgtagtttcgtggga

SEQ ID NO: 351506 - DNA, 122 bp, Homo sapiens
gccacctttaagagctgtaacactcactacgaaggtctgcggcctcactcctgaagtcagcgagaccacgaacccaccagagggaagaaactccaggcacatccgaacatctgaaggaacaa

SEQ ID NO: 351507 - DNA, 122 bp, Homo sapiens
gtgaagctggacaggcgcttccgtcaggagctgggaggcgtgggggggccctctgtggatcgggagtgtgatggccctgtctggagctggcaggcggggggcccctctgaaggtcggagtgt

SEQ ID NO: 351508 - DNA, 122 bp, Homo sapiens
agtgtagagaaggaagttgcagctgtagagtcaccgccgggaaaggggctggaagggcagcgttcggggaacttcaaatgcacagactaccccgtagtgagactcactttacaaaggggaag

SEQ ID NO: 351509 - DNA, 122 bp, Homo sapiens
ggacaagttatttaatctgagtctcagttacgtatgggaatgcctaaagttaaaattacacgaactatttcaggataaattttctcacttgtaaaatggggaagataaagccctatgttaga

SEQ ID NO: 351510 - DNA, 122 bp, Homo sapiens
atgctgcacaaggctgatttgtcccatcactggttttcatttatgtaaaattttaccagtcgattaagatgatacctcccaagtattacagctgcatgttaataagtatgctgtacttatta

SEQ ID NO: 351511 - DNA, 122 bp, Homo sapiens
cgggccttgccgccagtcttgccgcggcccgacatgctagcgaggtagaccggtgaagcacgacggctcaaacactagaacagacgcccgccgcagtgtaactgctgtcgcgcgcgcgccgc

SEQ ID NO: 351512 - DNA, 122 bp, Homo sapiens
ggcgcgcggggcggggcgcacagcattgcgggccgaggacagccaatctccgcccggagtcggtgcagcagggcacccccggggcctggcctcagtgcctcaatcaccccggtcccgcacgt

SEQ ID NO: 351513 - DNA, 122 bp, Homo sapiens
aacaaatgaagcaaaactgcccagagaggggaaatgccccaaggatgggtctcactcacgcgcgtacacagacacacacgcagagagcactctcacgctgggcaagctcgggatcgcgctac

SEQ ID NO: 351514 - DNA, 122 bp, Homo sapiens
ggccagggagcttccgagaatcccaccatttagggcccgctctgctccctgctgggcacgcgggaggatgagccttgggtctcgcacacacacccccaggaggaacagccatacgcgccgtc

SEQ ID NO: 351515 - DNA, 122 bp, Homo sapiens
ggagggagaaaataaagaaaggtggcctgtgaggatatgtacagacagagaggtagcaggcgcttaaggccaagaggtgagctgtccctgtctgggcagaagaagtgcgctaggggcagctg

SEQ ID NO: 351516 - DNA, 122 bp, Homo sapiens
ggggcctgaggtgggagcgctgccccggaggagccggcggccccgtgtgccagcgcgtctcgcgcctctcgcccgctgtagggagaaccaggagaagatgatttacttcctcctcctggacc

SEQ ID NO: 351517 - DNA, 122 bp, Homo sapiens
atatggaccaacagagagatcaagagcccaaaggaagcacaaattcaaaaccattgctttcgtgtcatctacaacattcaaaacacaaggttacataaaactaggggaatgacaaaaattag

SEQ ID NO: 351518 - DNA, 122 bp, Homo sapiens
ccgcctcctcgagcggcagcacgctgtggccgcggtgctcgcgggagcggtcgcacaccacgcagatgggcatctggtcctcctcgcagtacagcttcaggggctcgcggtgcttctcgcac

SEQ ID NO: 351519 - DNA, 122 bp, Homo sapiens
agacacgactaatgactaaaatactactctgcatagtttgaatagttaacttcttccaggcgtcttctcagttaacttttctcttgtcagggcagtggctcagtcctgtaaacacagccttt

SEQ ID NO: 351520 - DNA, 122 bp, Homo sapiens
tccactggtccgcagccagaggacccaggtgaagacccggacgctgcaccctgtatacgacgaactcttctacttgtgagtgtcctaagccccagccccagccccaggctccaggctgccgg

SEQ ID NO: 351521 - DNA, 122 bp, Homo sapiens
agaatcaaaggatttagagtacctactaggggtggtaaactaaatgccttcaggagtgcacgcaagtgaaatacttaagaggaagggcgtggcttgtggctaattgaggagtgaatgttctg

SEQ ID NO: 351522 - DNA, 122 bp, Homo sapiens
tattacttatttcctctcacaaccactatgtagtttccaagtaataaatttcactatggacgtcacagcactcagataaagaatttctgaaggatttccttctttctttttttttttttttg

SEQ ID NO: 351523 - DNA, 122 bp, Homo sapiens
tgggttaattctgctactaaccatcttgagcaaaggggggatacatgaggactgtgaacccggaaaatctgagacagttctcagttaatttagggagtttattttgccaaagttgaggatac

SEQ ID NO: 351524 - DNA, 122 bp, Homo sapiens
gctctcgaggccgaaccagcgggcctggcggtctgtgagtgggtggccagccgctaggggcggggcctcagcgttgacgggcaggcaggccgtcccacccctctcgcccagagcggccgcgc

SEQ ID NO: 351525 - DNA, 122 bp, Homo sapiens
tcttgattaaggccattagtgcccattaaaattttttttaattgggttgaatgccttattcggttggaattttacattcccacaatgtgtggcagctaatgcttctggcacatctactgaga

SEQ ID NO: 351526 - DNA, 122 bp, Homo sapiens
tcacaaatcacacgtccttggcaaagcagtgcagattaaacaagccaactgttgtttgcacgtcatgaggtggaccacatttctgccatatttaatgcccgaatgactgtgctgagctaggc

SEQ ID NO: 351527 - DNA, 122 bp, Homo sapiens
ccggatgcacagaaccagagagcaggcccgaagccgctgcggccgcgggagaggacccagcgggacccaggcagtcccagaagctaacgaaggaagtgctggtcctggaacattgtgcctaa

SEQ ID NO: 351528 - DNA, 122 bp, Homo sapiens
ggtggctcccgagtgctcgggaagggccccagagcttctggcccagctggaggcaggaggcggagcctcctccgcaaagctggatcagtaccggggacgcagggcgcacagctagggctggc

SEQ ID NO: 351529 - DNA, 122 bp, Homo sapiens
atggactaatgcaagggaggggagggcgagaaaggaacacagccctgcggagcctggagccggccctggtgcagctgtggcaagcgccctgctcacccagaggaggagctgggggccctggc

SEQ ID NO: 351530 - DNA, 122 bp, Homo sapiens
gcagaagcattttccttcccacgaaaaaaaaaatatccaccggcagacccctcctgtccccgatcccacattcaccactccagcccctgccagccgggtttagtcagtgacatccctcccac

SEQ ID NO: 351531 - DNA, 122 bp, Homo sapiens
cccttcccacgtagaccgtctgctgggggcgccggcaccatttggagtacgtgaggtatacgggtagggcgcggccaggtcgggcgtctgttaggaaaaagactttttatttttatgtttat

SEQ ID NO: 351532 - DNA, 122 bp, Homo sapiens
tcctaggacgccactaaatcgacacctgggtgcagctgctccactccctcggcctcctcccgtgctcaggctgtggccgcacgcgcccctcacgcttgcccgccactctgcatgtcaccagc

SEQ ID NO: 351533 - DNA, 122 bp, Homo sapiens
gagaccaagtggggaaaagcgctgtctgggaaagcgaactacaagtcccagagttcctcgcgccgggggctgtcctcggactgctccaggcattgtaaggctcttctgttggcccagtctga

SEQ ID NO: 351534 - DNA, 122 bp, Homo sapiens
agtcttctctagatctaaccattcccattatctacaatcctaagtaaaagacggccctctcgttgcatgtacagcagcaaaagaaatcacctactttcttaagtctcggcaaaatattccaa

SEQ ID NO: 351535 - DNA, 122 bp, Homo sapiens
actggttgcatgatcttggctcgttaccaagataaagtgacacaaggtgtgtaaagctcccgagctgcaagccaggatcttcatacacatacattttagaggataatagtcctttcaaaaga

SEQ ID NO: 351536 - DNA, 122 bp, Homo sapiens
atgtttacatttttaaaagtacattggtacttatatttcatacattttgtatcaaggaaacgttttgtatagttaatgtgtgcagtttattgatatccaataaagcaatttgtgtatttttt

SEQ ID NO: 351537 - DNA, 122 bp, Homo sapiens
gccgcctccctgaccggtgcctggtccctggggctgtgctgccgctcttccatgtgcggccgccccaccgaggcgctgtgcctgtccagctttggcgtggccgactcttccaccacctagcc

SEQ ID NO: 351538 - DNA, 122 bp, Homo sapiens
agagaatgaatcagaggagcttgttttcatttcatgtttaatttcctgcaggcttagctccgtctttccgctccttcctcagcctcccagggttttctgtgggggaagctggggggagggga

SEQ ID NO: 351539 - DNA, 122 bp, Homo sapiens
gtttcaccttgtgggcagggacatctacgatccagtgctgagaacggcagcacagcatggcggctacaagtgtggactcaggtttgaatcccggctctccacttactagtgctgtgttcttg

SEQ ID NO: 351540 - DNA, 122 bp, Homo sapiens
gggagaggcagggggtagagagcccccagggggctgtgtgtgctgcacaaacccttcacccgtgacccaccaaccctttccattcctttccccaaccttagggcacccactgggagtgaagc

SEQ ID NO: 351541 - DNA, 122 bp, Homo sapiens
cttctttgatcaacttatttgttataaatcaaacctccctacaaatgtcagtgagcagttcgatttcaggcaccctttatactgcttttttataggtagtccaatattctaaatttcagttt

SEQ ID NO: 351542 - DNA, 122 bp, Homo sapiens
cagacgaacccgctgtgcaagaacattttccacacagcggcgcatacccccgcccgggggcgctcggcagccgcacgcggccctcagagcgcagcccccacacgcctttacttctggaaggc

SEQ ID NO: 351543 - DNA, 122 bp, Homo sapiens
cagggaaccccgctgtcctcccattactgaaatcctccttgagccttacataccccattacgacgctgtatcctataattaaattgaatctgccagttacctctcagcacggcagcaattca

SEQ ID NO: 351544 - DNA, 122 bp, Homo sapiens
ctagagcgacccaggcgagagggcagggctggaggggagtttagggacggagcgatggtccgctggaccagggcctgtaaacgactccagggaccaggcagggactcttcgacgatcaaagc

SEQ ID NO: 351545 - DNA, 122 bp, Homo sapiens
tctggctctcgggctttcagggctgggagcctccaggacactccccttccaggctccgcccgcgcccgccccgcgcaaccctccccgcgcacccctctgcgctgatgtcacggcgccgcagc

SEQ ID NO: 351546 - DNA, 122 bp, Homo sapiens
gcggctggtagccacgccctcgccgtttgcgcagcgcccctccgcccgccttcccggcggcgcccctgattggacattgcactcttggacccgccttcgttgcctgagtgacagctagtagg

SEQ ID NO: 351547 - DNA, 122 bp, Homo sapiens
cccatccctcctcccagggccaggactccacgctgggcttgagcctgaatgaaggggtgccggcggagtgcgacagcgtagtggtgcatgtgctgaagctgcagggtgccgtgcccttcgtg

SEQ ID NO: 351548 - DNA, 122 bp, Homo sapiens
cgttattaagacgaggagcccctctcattacccggtcaagagcgccgcgattggccgctgcggtcaggcctctggtggcccctttgtcaccgccctggaaagagtgcactttctgtcggagc

SEQ ID NO: 351549 - DNA, 122 bp, Homo sapiens
ggcagcagcggtggcagcgagagctatgcggggccagggtccacccctttctagctttggcgtctggttggcttccagggcagcctccgatccatcccgcccgaggaggcaaggttcgtttt

SEQ ID NO: 351550 - DNA, 122 bp, Homo sapiens
gaggggagaagagggaggagaaaagggaggagaggaggtcagcattcagctaggagccaccgtgcccatgccaatgactgagggctttatatgacccaaggtcaatctgaggggaggcggga

SEQ ID NO: 351551 - DNA, 122 bp, Homo sapiens
atatcatggcaagaggtccagaggcaatgcaccagtgtggtcccttgggtggtagtttgacgggtccacaacacgatgaggcatctctgaaacatgagacaggtttggcaaagaacaccacg

SEQ ID NO: 351552 - DNA, 122 bp, Homo sapiens
agagcaacaatctgcatcaccagaaaggcaacttctctaccctacacttgcagacttccgcgagtccgggagcactcaacgcagtcacccgcgcttccgcgtcccggactagggaaactgag

SEQ ID NO: 351553 - DNA, 122 bp, Homo sapiens
tgcaaaaccatggaaattaaataatttacacctacaattcttggcccttaaaaagcaactcgattctttggaaatgctttgttctttttctattaataaaatacaaattgtaatggccttgg

SEQ ID NO: 351554 - DNA, 122 bp, Homo sapiens
tggcggcggcttgctcaggagccgctggggctggaggttgaccagttcctggaagacgtgcggctacaggagcgcacgagcgggtacgttgggcgggacttccgggaggtgggacggttcct

SEQ ID NO: 351555 - DNA, 122 bp, Homo sapiens
ctagagggagggagcgaggcgtgtagagcgaaccagtgaagcggagaagggctcccagggcgcatctgtggccagctgactctaggactatcgcccctccgcctgtgcatccccacccccag

SEQ ID NO: 351556 - DNA, 122 bp, Homo sapiens
ggcctcccttgaccctgtcactctccacctccttatttttattgaccttgcacgccacgacgtgtcattatataccgatccgcttgtggacctcttgcaggtcttcctcctagaacgtaagc

SEQ ID NO: 351557 - DNA, 122 bp, Homo sapiens
cgtcacttcccctagcaacccggcggggcggggccgcggcgctccaggggcggggccgggcggggcgagcgctccaggcctcctcccgaccctgcgccgtgcccagcccctctgccctcctg

SEQ ID NO: 351558 - DNA, 122 bp, Homo sapiens
tcagtccatattagtagtctggggacaccccagtgccgagtcctacaggacactggctgacggattaacaggacatttcaatgatcgttgcctcgtaggagcaaatgtggtccggtgcgatg

SEQ ID NO: 351559 - DNA, 122 bp, Homo sapiens
cccctccccaccctcttttctctcctcccctcgatccctcctcctcctcttcacctccagcgcccagctgctcgctgagcgcagttccgacccacagcctggcacccttcggcgagcgctgt

SEQ ID NO: 351560 - DNA, 122 bp, Homo sapiens
atagtggagcaaaagaaatcacgtggatgcaatggtcacctcttaatggaggccgggaagcgccctgggatgcaggcaaggcagccgatctttcccggaccgtgtgggccacctccagatat

SEQ ID NO: 351561 - DNA, 122 bp, Homo sapiens
aatggccaagcgcgttaggactggaagaggaaggccagttcccagcgaagcagcgcgggccgcacctggcagccccgaccagcagggacggccagttccagagcagatcactcccagccccc

SEQ ID NO: 351562 - DNA, 122 bp, Homo sapiens
ttcccaccaatgccacgggacattccagggcccacgctgagccaggcgggcctggggcttcggttaccaccagcagcaacatctggctgggctcttacctcatagaccttcaaggacagaga

SEQ ID NO: 351563 - DNA, 122 bp, Homo sapiens
acaggtggcccaggctgtgcatatgcgggtgagggtgcgcggagccgcccaggagcccgccgcccgggccgccgccgccgccccccgggccgccaccgccgcctcccccggggccgccgccc

SEQ ID NO: 351564 - DNA, 122 bp, Homo sapiens
cggcgtagtcgatgaccctcttgacagctacgagcacgcgcagctccgccatcttcccgccgcagccacttacagggtcagcccgcaccctcagcggctcagtccagaagccccaccacccc

SEQ ID NO: 351565 - DNA, 122 bp, Homo sapiens
agtaacattggcaagactccaaaagccagaccttttgaggaatttgacccaggacaacatcgtctgtgctttcaattaagtaaaattaaaaagtggaaaaaaaaaaaggaaaaaatcagaac

SEQ ID NO: 351566 - DNA, 122 bp, Homo sapiens
ctagccaccgatcaagcccagcaggctccacgcggcacccacccggaagccccacctgtccgccagggccgctcacagccccggttcccacccgcgcctgtccctccacacctcctccggag

SEQ ID NO: 351567 - DNA, 122 bp, Homo sapiens
ttccggcaacagagatgccgtgggacctcacggctttgcaggatacgggcttgctcagcccggtccagatgggtgatgcccccctgatcccagggccgctcagggtgtgtgactgtgttctc

SEQ ID NO: 351568 - DNA, 122 bp, Homo sapiens
ggaacccagctgcgagctgtgaggaagcggggctggccttccagaggaagggacccagggcgaggatgaagctgtcccatccacagccaggaccaactcccagacaagaatgacgccaatgt

SEQ ID NO: 351569 - DNA, 122 bp, Homo sapiens
caggacctgcagcccgccatgcctgagcctcccaccccctccgtgggctcctgtgcagcccgagcctccctgacgagcgccagcccctgctccacggcgcccagtcccatcgaccacccaag

SEQ ID NO: 351570 - DNA, 122 bp, Homo sapiens
tggaggggcgggtcagggggggaagggccccaccgaggggctttcgccgctcagctcccccgccccgtccccagccgcccagatggtcatcacggacctgtcggcacccgaggagcggcccg

SEQ ID NO: 351571 - DNA, 122 bp, Homo sapiens
tctaggatgatgtggagggataaggggagtcctgggaacaatggggcttggagaatggctcgttttgcattaaggtgaactgatttagcggcgctgtggacctctggacatgctgcccactg

SEQ ID NO: 351572 - DNA, 122 bp, Homo sapiens
acctttcggcagctcggaccaactgtgctagcgatgcacttagcaattatctgctggctccgacgccccgccctctgctcttgcgattggctctccagtcccgggcaggactgcattggttt

SEQ ID NO: 351573 - DNA, 122 bp, Homo sapiens
agtgccaggatcccctgaaggagtgtggggcttttgaagcaagctgcccagcgagcctcccgcagcacctgctgtccctttgccagcagtcagggcccctgccccaccagtgttggttgtgt

SEQ ID NO: 351574 - DNA, 122 bp, Homo sapiens
caggtcaccaggccggatccaggagcgctcggacggcccactccccagctccgcagcccccggcccaccccacagccccccgagtccactgcaacgagccatgcttagaacagcctgtggga

SEQ ID NO: 351575 - DNA, 122 bp, Homo sapiens
ccgcttctacccagtgcagatcagcagccgcatgctgtgtgccggcttcccgcagggtggcgtggacagctgctcggtgagccccgccccggcccaggggaccaggtcccgcccagccgccg

SEQ ID NO: 351576 - DNA, 122 bp, Homo sapiens
ccgcgacgtcccctcccggcagctcgcggggacctgggagcgggtggggtctctggctggcggggagccagggctgcgggaaaccgcacgaggtcgcgttcgcgagtggcggagaagcccag

SEQ ID NO: 351577 - DNA, 122 bp, Homo sapiens
tgctataagaaaagcccatgaggcagaggcatggtatggttctcatttaattttacccatcgagaagtaatctttgataaagcaaataggaccaaagaagaagggtgatgctaggggacaca

SEQ ID NO: 351578 - DNA, 122 bp, Homo sapiens
tccactaaaaagacaaaaattagatgggcttggtggcgcacgcttgtagtcccagctactcgggaggctaaggcaggagcatcacttgaacccaggaggtggaggttgcagcgagccaagac

SEQ ID NO: 351579 - DNA, 122 bp, Homo sapiens
gtaaccacggtcgaaagtcagttcctttgttcctgacgtctttccctcagcatcaggctgcgagacctgttgtgcacgtggctgtggggcgatggctgcccctgtggtgggcgccgctgcgt

SEQ ID NO: 351580 - DNA, 122 bp, Homo sapiens
actgatgaacatttagtttgatttcaatctcttgctattacagatgttacagtaaataatcgtgtacacacacacacacacacacacacacagtttactttgcatgtgtacactgagaatat

SEQ ID NO: 351581 - DNA, 122 bp, Homo sapiens
ctgccctagccgaggcctctgcggtcttcccgggcgaggagccgattgggggccgccggacggcggaggaccctgctcctgcttcccgaactacagatcccagggtgcctctcggactcgcg

SEQ ID NO: 351582 - DNA, 122 bp, Homo sapiens
ttactcactttagtaaaaatttaaaatgctataaaataagtattgcaaagttataaatgtcgggacttctggatatgctttccataatgttagtcttaaaaggcaagagagtgaccttttta

SEQ ID NO: 351583 - DNA, 122 bp, Homo sapiens
gaagaagccaggatagagccaaaagaagagctatttcagagaaaactgggggacgaggggcggtatgtgattggagaaggtggcatcttttctgtgtgaccttagaatcgtttattgctccc

SEQ ID NO: 351584 - DNA, 122 bp, Homo sapiens
gaaagggcacgtgaggaccatcgagggtccgaggggcatggacaggtgtgaggggactcacgggggtgggtgaggtgggggaaggagcttcccagagcagcacgggggcccaagcccaccct

SEQ ID NO: 351585 - DNA, 122 bp, Homo sapiens
agctcctgccgctcctgctccagggctgctctctccgctgccagctgcttctcctcggcccggagctcgctggccctgatcttcagctcagcctgctcctggagacagcggaggccctgctg

SEQ ID NO: 351586 - DNA, 122 bp, Homo sapiens
aaagcttctgctaggccaggcgcggtgactcactcttgtaatcccgggacactgggaggccgaggtgggagaatcacccgaggtcagcagtttaagaccagcctggccaacatagcgaaact

SEQ ID NO: 351587 - DNA, 122 bp, Homo sapiens
taaatcctaaagaatccaaaacgagggtaatgacatccttcgatagctcagctggtagagcggaggactgtaggggtttgaatgtggtcatccttaggtcgctggttcgaatccggctcgga

SEQ ID NO: 351588 - DNA, 122 bp, Homo sapiens
gggcctttctgcccatggacgccgccgaagaagcatcgttaaagtctctcttctcccttccgtcatgtctaagtcaaagtctcctaaagagcctgaacagcagaggaagctcttcatcggag

SEQ ID NO: 351589 - DNA, 122 bp, Homo sapiens
atcacagctcactgcaaccttgaactcctgggctcaagcaatcctgctgcctcagcctcccgagtagctgagaccacaggtctatgccagcacacctgggctaactggctaacttttaaagt

SEQ ID NO: 351590 - DNA, 122 bp, Homo sapiens
aggaaggaggagcagcagtggcaaagctggaacctcacctgcagccccggggtcagccagcgccgcagcccctccacaccctggtgctcgccgcagaggagggggccctggtggccgcggtg

SEQ ID NO: 351591 - DNA, 122 bp, Homo sapiens
cctacgtctctatgatcgtccctggtatcacaccaaatcatcccacacaccataagcacccgcagcaggcaccaagccccaacctgcagctgctctgcagacgagcttcagacaggagttca

SEQ ID NO: 351592 - DNA, 122 bp, Homo sapiens
cagcattttgggaggctgaggcaagaagattgcttgagcccagcagttcgagactagcctcggcaactggatgccatctctgccaaaacaaacagaaaaatagtaaaagagagtctgcatca

SEQ ID NO: 351593 - DNA, 122 bp, Homo sapiens
gtttctatctttatctcataaacttggacagggtcttcagtgttgtagtatctccctaaacgtctgatgactatcagaacacagggaatgtctaaaacttttatcgttgcccttggtctctg

SEQ ID NO: 351594 - DNA, 122 bp, Homo sapiens
gctgggatcccactcaccttcagtcagcagccccaggagcaggagagaagccctgagcgtcgtccccagggccatcacaggtccccctactgtgacccccacagcgcccgctgccagccacc

SEQ ID NO: 351595 - DNA, 122 bp, Homo sapiens
cggcagccacgtccttgtcctcacccgcagcgcagtgacgccgacccatccaacggtcatcgcatgcgcgtgccccgcgcaggccccaaacccccacggattaggttgaaggtcagacaaaa

SEQ ID NO: 351596 - DNA, 122 bp, Homo sapiens
ggccccagtggatccaaagagctacttgcaagattggacttgagcttgcagggcccgacccgccctggagggaaggcatcatatcattagctgattccagaacactggccatttttgtagca

SEQ ID NO: 351597 - DNA, 122 bp, Homo sapiens
gtgccacgtcatctgccagggccaagaatccagaggtgctgtcatatttctccttgccagcgtggatctcctccgagccccgccctccctcctcacctgctcctggggaaactacaccaagg

SEQ ID NO: 351598 - DNA, 122 bp, Homo sapiens
gttttattaaccattgctctgcctctaattaagagtgttggttttcgaagagtttgaaggcggggattcttaaatttcagatttcatgaaaaatgtttgggggccagctattctaccttctg

SEQ ID NO: 351599 - DNA, 122 bp, Homo sapiens
gcatgaaaatctgagcaccctggcgagcagcggtcctgcttaagtcctctgtggtctgaacgaaagattttgaaaaaccttccacgttgaccttgctgtcatatcaagtagttagaagtgcc

SEQ ID NO: 351600 - DNA, 122 bp, Homo sapiens
ggactctaagccccatgaggacaggaactgtgtctgtcttgtttactgtgggatccctggcgctcagcacagctcccgagacaaagctgatgctcagtaaataactgactgggcagaggcca

SEQ ID NO: 351601 - DNA, 122 bp, Homo sapiens
aaaatttggctgggcatcatggttcatgcctgtaatcccagcactttagggggccaaggccggtggatcactttgagcccaagaatttgcgaacagcctgggcaacatagtgaaaccctgtc

SEQ ID NO: 351602 - DNA, 122 bp, Homo sapiens
tttgccatcacttttaatggctaaagcagcaattacttttgcaccaacttaatacatcagcgttgaggggctggggggaaaagcactaataattgcacatagcaccagctctaatagttgaa

SEQ ID NO: 351603 - DNA, 122 bp, Homo sapiens
agcacttaccatgttccaagcactatcaccaaggtactgttggggtttatggcagtctaacggtaagaaaaatgtggtaaaatgaggtaatcatgctgctatagctttttgctttttttcat

SEQ ID NO: 351604 - DNA, 122 bp, Homo sapiens
gcgccccgccccggaaccacgccccgcccccgtgaaatgcgttcccagtagccacggcaacgcccagctccgccctccccgcgcatgcgttatgcgccatcaccggcaagcaggggcgggag

SEQ ID NO: 351605 - DNA, 122 bp, Homo sapiens
gagaacacgagggctccgacgcgggagaaggattgaagcgtgcagaggcgccccaaattgcgacaatttactgggatccttttgtggggaaaggaggcttagaggctcaagctataggctgt

SEQ ID NO: 351606 - DNA, 122 bp, Homo sapiens
ggacccccgcctgtacaacccaatgcatggaggtgagcacttgagactagacgaccttcccgctcaacaacagatcctcgggctccgaccgcaggcctggacatcctttagccctgacgatg

SEQ ID NO: 351607 - DNA, 122 bp, Homo sapiens
aagcagcacacggccagcaccatggaatgccttttccagacgccagcagaacagagctgccggatgttctagtgagcgcgtttctgctggtgaacctgactgtgcccttctttgtgggatct

SEQ ID NO: 351608 - DNA, 122 bp, Homo sapiens
tcgagtgtcactgagtgcccaggaccacccctaccccccgccgtgcaggccggccccgcccggtcaccactctcggacctgtcactgagcatccaggacccccacccccggccgtgcaggcc

SEQ ID NO: 351609 - DNA, 122 bp, Homo sapiens
atggaagacccctaggagtcaggaacagatagatggagagttatggagagagaataatgtcgagtttattcccttaaatcatcgaggccatcaaagagaccggtaggtgagggaggggtggg

SEQ ID NO: 351610 - DNA, 122 bp, Homo sapiens
gggcggcggcccgggggtgtggtgggcggtgtcccgggtgcacggtgggcgtcccgggtgcgcggtgggcggtgtcccgggtgcgcggtgggcggtgtcccgggtgcgcggtgggcggcgtc

SEQ ID NO: 351611 - DNA, 122 bp, Homo sapiens
gacctgcacccgaggaggcacacaccgagcagtccctggtttctgctgctgccctgggggcggggccggagtgtccgggtgctgagcacggccccttccctgtgatcggcgcgccagccaac

SEQ ID NO: 351612 - DNA, 122 bp, Homo sapiens
aatgacaattctgtgtctttttgtgtatgttaatcagcatctcccccacccatccccccacgcccccagaaatctcgacacactgatgtaggtaggtagagcttccccctgctcctgaaaag

SEQ ID NO: 351613 - DNA, 122 bp, Homo sapiens
ttaaagttctgctgaaaaaagctgcccctctcctctgactctctcacaggaatgcactctcgtaacagaggcatctgccccctggactaacctttcttaaaaccagataaacaaagtaatac

SEQ ID NO: 351614 - DNA, 122 bp, Homo sapiens
tacttttaaagccaaagatcttatgactttctttttttggttattccttcctcagaaatacgcagtgactctcgatcggcttcagaataaaatgtaaattatttagggaggcatttaataaa

SEQ ID NO: 351615 - DNA, 122 bp, Homo sapiens
cgaacaaacccatctcgctctgggtccccaggtgcagaatcgatgtgtgttcttcaccaacgcacagaccgcttcttcactccagtgttcacttcctccagtcttcagccgagaggacatct

SEQ ID NO: 351616 - DNA, 122 bp, Homo sapiens
aagtattattcgaagacagagacgaggaaggttaccaaaatagatggtcaggctcgagagcgcttccctgcaacctccaccgagctcaggtgtgagcttacccgcccccgcctcctcctcag

SEQ ID NO: 351617 - DNA, 122 bp, Homo sapiens
tcctctgcattccccttagcctggccagagtcgctaaatggcctctttcggacttcgcagcgccgtccagcccctcctccgtcctttgtccggaggccggcccgggtctctgcaggcgggct

SEQ ID NO: 351618 - DNA, 122 bp, Homo sapiens
gcctgcggcgccacctcgtgggcgaggccgcctggtgcaaggtcatccggtgccgggacccgctcctcgccccgccaggacccccgctcacctccaagctggacgcccgcggagccctgatc

SEQ ID NO: 351619 - DNA, 122 bp, Homo sapiens
catccgcgtttcagacaattccagggcttttgaatcatggatcggccttcctggccatctcgcctccaaaacccaaaaacagaggcggtgggagggaggctgagagacgcacagatcccgcc

SEQ ID NO: 351620 - DNA, 122 bp, Homo sapiens
ccccacacacaattaatagcaaagataatgtgaaagagggggatgaatgattaggggaagcggaggagcgggcaagcaattcccaagccctcaccattaactcgcaatggttaaacccactg

SEQ ID NO: 351621 - DNA, 122 bp, Homo sapiens
ggttcgcagtgtcttttgacttgggtgggaaggagggcggtggatttaatggagggcatgcgagaaagaaggggaacagatcaggcaaaggagttagataatgtcccacctctccccacacg

SEQ ID NO: 351622 - DNA, 122 bp, Homo sapiens
gctaccgaggggcccctgccagctgctggctccaaagttggttttgtctgtgggctagatcggtgtaagttggggtccaggctgctcgctcagcagcctgattgatctccagggctcttttg

SEQ ID NO: 351623 - DNA, 122 bp, Homo sapiens
ggccctgggggcggagccgcggtgaagcaccgctcatccgggctccaggaccggggcacgcggttctccctgatcccggagctgggctcagggctcggactcagtcctgcagcgcctctagg

SEQ ID NO: 351624 - DNA, 122 bp, Homo sapiens
gggaccctggcacccagcgggcggagccggcatttctgcaggaaggagccaggtggacgccggaaaacccaggcaccaagatgaaaacacgtaatacacctggtgttcagatccgaagtaat

SEQ ID NO: 351625 - DNA, 122 bp, Homo sapiens
taatcttcccgtagtgccccgagcagccaggaacttaatatactcctatctcatgcgcaccgccagcttttcttcaaggccctatggagaaaacacacgtgtttggccacaaggcccagcgt

SEQ ID NO: 351626 - DNA, 122 bp, Homo sapiens
ctggtcttgaattcctgcctctgcctcccaaagcgctggggttacaggcgtgagccaccgcgccctgcggctgcaggtctttataaggcaactgtgggccctggaccgctccctgaaaacct

SEQ ID NO: 351627 - DNA, 122 bp, Homo sapiens
ctgttcccagcaggcctctacagaaccttgtgagacagggactcactctgtcacccaggccggagtgcagtggggtgatcatggatcaccgtagccacaacctctggggctcaagcaatcct

SEQ ID NO: 351628 - DNA, 122 bp, Homo sapiens
cagcagcggagccgagaatggcgaggccagcgggcgaccaggcctccggccaagggcacgcgaccccccgcgcttcccgagtgctcccctgaagcctggtacgcgtgggcaccggcgcacgg

SEQ ID NO: 351629 - DNA, 122 bp, Homo sapiens
taggggtggcacggatctactgctccagctctagcaatttatcctgcgtggctggcaggccggctctcccggggaagggaagtggctgcagcccccgatgccgctcagggaccctcccgagg

SEQ ID NO: 351630 - DNA, 122 bp, Homo sapiens
attagccgtttcccgtatacatttgcccttaagcaagatggtgggcgccttgtgcacatgcgcggaagggttgtttcggcggggagttccgccgcgtcggaactcgctccgggcgtggattg

SEQ ID NO: 351631 - DNA, 122 bp, Homo sapiens
actggaggattcccattctggcggaaaggccctagaaatattaataattccgccagtgggcggcagcacaaaggctggcctcttccccactgtcagtggacgggcaccgccactccacatac

SEQ ID NO: 351632 - DNA, 122 bp, Homo sapiens
acaagggccgggaaggtgggatggccggagttgaagttgcagtggagatgacgtgggggccggagggaggttgggcgtcatagcctggcagctccagcttccacgtctcaccttgcctgggg

SEQ ID NO: 351633 - DNA, 122 bp, Homo sapiens
ggaaaccccatctctacaaaaacaaaaaagaaaggaaaaaaaaaagaaaaattagccaggcgtggtggcatccactactcaggaggctaaagtaggcggattgcttgagcctgggtggttga

SEQ ID NO: 351634 - DNA, 122 bp, Homo sapiens
ttgagaccaaggaatcttcccacatgtagccccaaatcccttttctgggtttgtacaaagcgtctaaggtgttgaagcccccatggcagctgcaaggcgtgttttgaagtctcctcccagga

SEQ ID NO: 351635 - DNA, 122 bp, Homo sapiens
cgccgaatctcacctgcaagcaaatcgccaggttcaccctgcaaccgaacgaggtgctgacggcccgcgggtgaaggcccaggtccttaaacagctttgagaacgactgtgtgagtgcgatc

SEQ ID NO: 351636 - DNA, 122 bp, Homo sapiens
ccccagaggtcaatgaactaggcctggcagagttagaatcttgtgggaaggacccctaaccgcctctggaacttcagacaccaattattccttgtagtcttaccagtaaacagtcaccgcag

SEQ ID NO: 351637 - DNA, 122 bp, Homo sapiens
ggattcggcgggcgacctcgctttgaagctgatcacccgctcaaggtgatcacgacgtgccgacccagtctagattttgagttctgcagaaaatgcaattttaaaggaaaaggacccgcctg

SEQ ID NO: 351638 - DNA, 122 bp, Homo sapiens
ccgccccccacaggccacagtgcgttttgttaccccttactatgtgtcatgtgttctcatcgttcagctctcactagctcctacttataagtgaaaacatgtggtgtttggttctccagagc

SEQ ID NO: 351639 - DNA, 122 bp, Homo sapiens
cttatgcctctgcctctgccagagcagggagagtttgggtgcagggttcagagtgagcttcgtagcaccttggatataagactcaagttttccagagacaatgattccatttgcctgaagtc

SEQ ID NO: 351640 - DNA, 122 bp, Homo sapiens
actcctacctgggaaacaaagcaacaacctgtctcaaaaataaataaactacagttcaaacgtcattttgtccacaaagacctctgttgacttcttaacctagaatttctaaattcccagtt

SEQ ID NO: 351641 - DNA, 122 bp, Homo sapiens
acctgtgccttaccccttcctgtctcttatattctcataaatttgctgcctcctctcctacgtccgtccttcggggtcagcctccatccattacctctcagcagcattgcgaagcctctgtt

SEQ ID NO: 351642 - DNA, 122 bp, Homo sapiens
cgaaggtgcggtagcggcagagcatcaccaggctggccaggccattgagaaacgaggccacggccgatgccggctcttgaaagaacaggaaccgggagaagggccactgaaaaaggagcaga

SEQ ID NO: 351643 - DNA, 122 bp, Homo sapiens
tgttgctgagcagagaggacactgcagagccagtcatgcatttagggacatccagttcaccgtgcaagtgggctcagtcaccatcaaagagaagtacattttcatagactcccatatcccca

SEQ ID NO: 351644 - DNA, 122 bp, Homo sapiens
actcaagctgtaattcaccgcacatgctttgatagactgtacgctatagattagctcgctcggattttacttatgccgtccccatgtgccacccgattctcacggaaagtagcctatttctt

SEQ ID NO: 351645 - DNA, 122 bp, Homo sapiens
atctgctaggacccttccagggcgtgtgttgctatgtgcggcagggggtaccttcgaagtcgaccagaccgtccccattgaggtccacgtcctggaggatctcgtccacctcccgctggctg

SEQ ID NO: 351646 - DNA, 122 bp, Homo sapiens
ccccgcaggcctggcagagaagactgaccaagtatgggtggagacagcagtacagacagccgggcaccctcccatcagctctcccaggcctgagggatagtgggtataaggctcagagcttc

SEQ ID NO: 351647 - DNA, 122 bp, Homo sapiens
ggtggccctgtggggcaacttgaacccatacccatcccagccccagcatcacctggcacgcgccccacactcaaggacttgacagccactctgcggagagcaaagtcattcacctgctctga

SEQ ID NO: 351648 - DNA, 122 bp, Homo sapiens
actgaggcctgaaaaccgcgaggccgcccacgcgcgcctgacccgcccccccctcccgcccgccccaggccccgccctcccgcgcccgcccctgcgccggccccttttgttccctcccggag

SEQ ID NO: 351649 - DNA, 122 bp, Homo sapiens
agagagcgccccctgcccttttagttgggcagagatatgcctgggtttgggaatgaacaacggtgatctagaagcccgctgtccctgggtagcagggagtgattaggcaggcacgggcatgg

SEQ ID NO: 351650 - DNA, 122 bp, Homo sapiens
ggctgcatgtcctgagccctgccccgtggggaagcagctgaggcctggggagcattggagcgcggtgagggtgggccggcagtgctaggggatccggcgcaccctccgcagctgctggcccg

SEQ ID NO: 351651 - DNA, 122 bp, Homo sapiens
gttcatgtaatgctagcattaagcaaaagactctgcctgaaacgtcctctggcccagctccggtgctggagtgacctagttagctgtgtgtcccaggctcagccctccccctgggtagcttc

SEQ ID NO: 351652 - DNA, 122 bp, Homo sapiens
gaggtataggtttccaagtcagttctttaaatgcttcttcactggacttgattataatctcgtttacatttggtgtttctccgttcccacaaaggcagtgccttagtgagctttctaggcat

SEQ ID NO: 351653 - DNA, 122 bp, Homo sapiens
gtacaagaaacatggctccagcatctgcttctggtgagcgcttcaggaagcttccaatcacggcatcatatgatcatggcagaaggtgaagggggagcaggcgtctcatggcaagagagtga

SEQ ID NO: 351654 - DNA, 122 bp, Homo sapiens
tgcagacgctgaaggatccggcagctgcacctagactgatccaagcaacggaaacgccagcggccccaccccggccctgcccggcttggcccgtcccacccccgccagggccccaaccgcag

SEQ ID NO: 351655 - DNA, 122 bp, Homo sapiens
tctcttctcccctcccctctcttcccctcccctcccctctcctttcctttcctttggaagcgctgcttcaactggagttaaccaagtgaacacagagctttacaaagaacaggacatgcaaa

SEQ ID NO: 351656 - DNA, 122 bp, Homo sapiens
gtgctttccatcctttgaaggcagggacttgctctgatgtgggctcttgtgatggagacacgtgggggccttggccaaccacatccttgctcagagtctcagatttctcatctgtaaaacag

SEQ ID NO: 351657 - DNA, 122 bp, Homo sapiens
ctcaccaggctggggattccgggtccggccatccaaagcaaatctactcagtgcgctggtcgcgaggaccacctccagcctggggacttcaggccacaacgcccaacccaaaccccagaacc

SEQ ID NO: 351658 - DNA, 122 bp, Homo sapiens
gatcaggctgcgggggctctagtgccagcgcggggcaaagcagggccttggccaacggggcgagtcctcgttgggacaagcgacaatggtgtgggcgttgtgagaaaaagggccctcagggc

SEQ ID NO: 351659 - DNA, 122 bp, Homo sapiens
gtcactttccaaacacaagtctgatcatgctgaccctgactgagaacttggaatggctcccgttgcctagaggatgggtgcaaactccttggtatgacacacaaagccctctgtattctggc

SEQ ID NO: 351660 - DNA, 122 bp, Homo sapiens
ttcttttggttgcaagtagcagaaaccagtcaacaaaccaatctagccaaaaaaggagtgcgggggagaatttagaaagaatcccatactatttcccagaatccaaagaagagcaaatggcc

SEQ ID NO: 351661 - DNA, 122 bp, Homo sapiens
agttgaggctgcagtgggtgagggagctatggtgatacaattgcactccagccctcccagcgtgggtaacagagcaagaccttgtctcaaaacaaaaaacaaacaaacaaaaaaactccttc

SEQ ID NO: 351662 - DNA, 122 bp, Homo sapiens
tcggacagtgggtgcaggacagggggtgcagcgcacccagtgagccaaagcagggcgaggcgtcacctcacccgggaagcacaaggggtcagggaattccctttcctagtcaaagaaagcgg

SEQ ID NO: 351663 - DNA, 122 bp, Homo sapiens
ccctggccctccctccccaatcccatggtgcatttgctgcagggtacctccatccaaacacgtgggagaagaggccccacatgcgcagaatagaagagtcttgttttgtttttgagacaggg

SEQ ID NO: 351664 - DNA, 122 bp, Homo sapiens
gcccctggatctccctgccagggccttgttcccaggaggtggttgagaaatttcggtaaacgcatgacgtcttgcttgaagagtcagacaaataagtgattctagggcaggaaggagagccc

SEQ ID NO: 351665 - DNA, 122 bp, Homo sapiens
agaacagcgcgtgcaggcagcctccagagccggcggccccgcggacgacaacctcttccacggttcctatgcctatggcactgccccggcgtccgaatctactcgcacttttcccaggaata

SEQ ID NO: 351666 - DNA, 122 bp, Homo sapiens
tgagctgggtgaagtcccgggtggttgtgcctcagagcgaagccacattctcaatcagcacggccctgccccggaacgtattgaaatctaccttctccccatccaggctgatggcactgagg

SEQ ID NO: 351667 - DNA, 122 bp, Homo sapiens
gtggaacaagggcgtggtctaacttggtagctttgaccacggagagaggaccctgccctgcggtgacagggcatgaggtgacaagatggcagagacgaggtaatggaaagatggaaagaccg

SEQ ID NO: 351668 - DNA, 122 bp, Homo sapiens
ccaaaaaccgccgctttcaaatcgccaatcaaattcttccttggcttcgagtctctcagccggccgcgctctccgatgcccagccctcctggaaccacctcgcctgtgacgtaggtggagcg

SEQ ID NO: 351669 - DNA, 122 bp, Homo sapiens
ctcctgcctgcctccctccctgccccgtggcaggctgctttcccctgtctccctccagcccggtcttcagagaaatcacttcccaagtgctttcaggcccggtactcacagtcttcccggcg

SEQ ID NO: 351670 - DNA, 122 bp, Homo sapiens
ctctccgtgtgcttcccgtagccggaggcttcgcgacgtacaaggccagtgccccaagggcgaccaaagtggcgctgcctgccagcactgggctctgctggcactgaacctgcatcgcgccg

SEQ ID NO: 351671 - DNA, 122 bp, Homo sapiens
tcgtgccagactctgtagtgggtgctttacccatagcagcatcaaaaacagcattttggccgggcatggtggctcaagcctgtaatcccagcactttaggacgctgaggctggcagatcact

SEQ ID NO: 351672 - DNA, 122 bp, Homo sapiens
tgactggggctgagcaggcactgctgccccgggtccccacggatgagattgaggcccagacgctggccacggccgacctagacctcatgaagagtaagtgctgggccttggccaagcccggc

SEQ ID NO: 351673 - DNA, 122 bp, Homo sapiens
catacaagcaacaacaaagaaacttaagaatttgctcaaatgttgggaattacctaaaatcggagtgaactctcttaattgaggtgtaagcaaagggatcatttctaaaattgcctaattgt

SEQ ID NO: 351674 - DNA, 122 bp, Homo sapiens
ggctcagggacacgcgctctcggccacagcaactggctccaagttccctccctcactctccggcgaagcctgcctgagccctcccactcggtgcagaccgaaccatcgcggccgccgccagc

SEQ ID NO: 351675 - DNA, 122 bp, Homo sapiens
tccctcctccgggatgggtgtagcagggtgtgtactccgcatggggtaacctcctagagccggctacgccccaggcgcctcctttcacggccttgtcactcttttctgctccttgggctgtt

SEQ ID NO: 351676 - DNA, 122 bp, Homo sapiens
tcaatttctcaccaggcttggagtcccattctgcccttccgcggatctgctgtcatgtgacggatcacatgagctctatattccaccaccactacccctctgcctagtaactagtgacggta

SEQ ID NO: 351677 - DNA, 122 bp, Homo sapiens
cttgttttcctgaccaggactgacacagaaagcttaaagggctgggctggacaccgcagccgctcagcacaagccacagagttcctagacccgggaaagggcaactgctcccaaaactgtgg

SEQ ID NO: 351678 - DNA, 122 bp, Homo sapiens
agcagaggcgtaaggagtaggcggggcgagccggctgggctcagggtccaccagctcacccgggtcgaggggcaatctgaggcgactggtgacgcgcttatccacttccctcctcccgcctc

SEQ ID NO: 351679 - DNA, 122 bp, Homo sapiens
tggaaacagtggcattaacttggccttcgaaccacacaggagccagagttgggaaaagctcggtgcaggcagacactcctgtggttcatttaggccctgagaaactccagcctgggcctaag

SEQ ID NO: 351680 - DNA, 122 bp, Homo sapiens
gctgctgagggagcgcgacgctgccaagcagaggctggtggtgctggtcaaggacaatggcgagcctccgcgctcggccaccgccacgctgcacgtgctcctggtggacggcttctcccagc

SEQ ID NO: 351681 - DNA, 122 bp, Homo sapiens
gcaatggaaagccggcattgaatgactgagagatagaagttgtttgcagccccaggcctccgttgtgtcctcctggagggcataagccaccaaaattacccctaaagggggtttcttagagg

SEQ ID NO: 351682 - DNA, 122 bp, Homo sapiens
ccagcccagcagtagctgggaacggagctgtccccctccagtctcctcccgcctcagcaccgagcaaattctgtgcagctaagagaataaacgcatgcggaagagaaggcgttttcagaaac

SEQ ID NO: 351683 - DNA, 122 bp, Homo sapiens
ggtggtcccccagcacagcacagcagctctacaaagaggcagctagactgctttttcacacgagtccctgatcccatttttcttccctgggcggaatctctccatcaagatctacaacaccc

SEQ ID NO: 351684 - DNA, 122 bp, Homo sapiens
cgaggcgagggccggagaggaatggaggagtgccgagaaccagtggtgggaaggcaggtgcggcaccctttctcatgggaattttgaagatgggcatgactgcaatgtgcttgctgatgggc

SEQ ID NO: 351685 - DNA, 122 bp, Homo sapiens
gaggcctctcctcagcttctggtctggctgcctcctgggtctccctgggtgtggaagcaccgccccggcctccaccagcaaattctctgggagctctccacgcggtgctgggatcagggcct

SEQ ID NO: 351686 - DNA, 122 bp, Homo sapiens
tcttaagatctttcccatgttaaaaacagcagactttctctccacactttctctctctagcgtccatgctgagtggccttcttttcctcttattcctagtcaccactttccatttccaacag

SEQ ID NO: 351687 - DNA, 122 bp, Homo sapiens
gttaagtaagacgcgcctgtccgctcctgtcacttcctcccagcggcttcctcgtgcagtcgccctacgaaaccagcgtgcacccatgcctgccggcagctcctgaccgttgcttcactgtt

SEQ ID NO: 351688 - DNA, 122 bp, Homo sapiens
gagcatttcccatccacgcagggctcacgaagcccgctcatcactcggcattaaggcttccggttcccatggcggacattgtatctgcaacccctctgtttacttttaggaaaccctgccac

SEQ ID NO: 351689 - DNA, 122 bp, Homo sapiens
caaccagtcgtgaatactttaagtgatataaaatacaacgtaccaagaactcatcatttacgtattcttactctgcctgttccaagaaatattttaaggagattaaaaaataattgatttca

SEQ ID NO: 351690 - DNA, 122 bp, Homo sapiens
taagcagtatctgagaaatctcagctttgatgtgctagttgggtaattttttctaatgcacgccaaataagtacagagtattaagatagtgccttttctgccgccacccttttggaaatgtt

SEQ ID NO: 351691 - DNA, 122 bp, Homo sapiens
gagggagtccgcgcttttcgctgacttttggcaaaggaaggactgaaattagccccgccccgctgcggctgattcgtctagttaaaccctggtgttcctgacacaaacttcaggaaaggatt

SEQ ID NO: 351692 - DNA, 122 bp, Homo sapiens
atatgactcaaatgtcccaaccccctctgcctctctgtagcccagaatgtgaagcccagccggggatggctgtagcttggaccacgtgcctgcctgtagattgagcccttgcccaaagatgg

SEQ ID NO: 351693 - DNA, 122 bp, Homo sapiens
cgtgagttcctcaattattcctccgcccaggttcacagctgaaactagaggtcatgggtgcggcagccaaggcaggcgggcgcctcccctgcacttccagagcgcctagctaagccgccgcg

SEQ ID NO: 351694 - DNA, 122 bp, Homo sapiens
tgccaatgggcgctgtctgagctcccgccagtgggagtgtgatggcgagaatgactgccacgaccagagtgacgaggctcccaagaacccacactgcaccagccaaggtgggccccagacct

SEQ ID NO: 351695 - DNA, 122 bp, Homo sapiens
aaccccgctcgctgccggctgcccagcctggctggcaccatgctgcccgcgcgctgcgcccgcctgctcacgccccacttgctgctggtgttggtgcagctgtcccctgctcgcggccaccg

SEQ ID NO: 351696 - DNA, 122 bp, Homo sapiens
actcgggctgagtggcaggcacagccggcctgccaggaggcgattcccagggccaaggggcgggtcccggcgaaatggccgccccggccacgggggcggggtccgaggcaggagccaatcgg

SEQ ID NO: 351697 - DNA, 122 bp, Homo sapiens
ccctctatgcagtctgcacaaggaaatgccttggctgccaggcttctcgccccttccacacgtgggggccatacacctgcaaatccttcagtttctgtccatcccattgagtctactctgcc

SEQ ID NO: 351698 - DNA, 122 bp, Homo sapiens
cttaaacactatcctacaagtccagactagttacttcaggtggaacagcagagtaacttacgcactgcagtttcagataaaaatcggttatttttcaattctcagcacctttgaaatagctg

SEQ ID NO: 351699 - DNA, 122 bp, Homo sapiens
gaatttgtcttaacatccattctccacactgctcaaagagctctagctgtaattcaaatacggctgacattcctctgcttaataaccttttgcagtacccagctgcctacagggcgaaaagc

SEQ ID NO: 351700 - DNA, 122 bp, Homo sapiens
aggctgagccttgctgagggcactgaagctccggggagtttatagctggaggctcgggcccgccccgaggggagagggagggggagagaattcctttgctcaaacacaagcctgggagttca

SEQ ID NO: 351701 - DNA, 122 bp, Homo sapiens
cttactaactacagccaaggcatctcacagcccgccgggaattgtagttcccagaccacccgagcagacacccagcaggcgctaactgactacaattcccagagaaaaacgggttatcggaa

SEQ ID NO: 351702 - DNA, 122 bp, Homo sapiens
cgagggcagggtggggcggaatcgggagggatgcggacccggtggaacgcactgcgcagacggcgccggcgcccgcacacagctgttgactagtcttccagctctcccctggaagtcgtcca

SEQ ID NO: 351703 - DNA, 122 bp, Homo sapiens
gcctatattccccctgagggtgtggccaaatctcattggctctcgcgcccgaatgtatgacgtcatgcgccagcgcccgtcgcttttgctggacgtcatcctcgggagcccacccggacgaa

SEQ ID NO: 351704 - DNA, 122 bp, Homo sapiens
atctggtctccattttttaaaaagtagccttcaatttaatcattgcagtttttattttcacgcaacgctagatttatgctttccttaataatgttctactgcacagttaaactactcctgag

SEQ ID NO: 351705 - DNA, 122 bp, Homo sapiens
tgaagccggaggcacagacagatgaattcctgatgtcatagcaagaccaagagctgaagccggaggccgtctaggctgacctctgcttcggtgtcttgtttaaaagaagctcttattgcagg

SEQ ID NO: 351706 - DNA, 122 bp, Homo sapiens
atcactcttttgtggtagggccacatctgccagagcctggagtctgcgaaggccgggacccggttccccggcccacagtgggggtgtgcaaacccgagagaactgggtaagttggggtcggc

SEQ ID NO: 351707 - DNA, 122 bp, Homo sapiens
agggcggggcctagatccctcccaccccgcgtgggactcgctgcgggactgccctcttctcgccccaaccactggtcctccgctctgtccccaggggccctcaccagcttcccgcccggaca

SEQ ID NO: 351708 - DNA, 122 bp, Homo sapiens
gtcggttcagcgcgtcgccttccttgtcagtcggttcagcgcgtcgccttccttgtcagtcggttcagcgtgtcaccttgtcagtcggttcagcgcgtcgccttccttgtcagtcagttcag

SEQ ID NO: 351709 - DNA, 122 bp, Homo sapiens
ccggccgcctgtttatattagcgcggtgtaaaatattctcgctgtcttggggaatcgcgtcgcgcagtaacgcgccataaatcagcccgcggaccatttaccccgcagcttgagcgcgcaaa

SEQ ID NO: 351710 - DNA, 122 bp, Homo sapiens
ccatgttcaccccacactcgagggtagacccagagcatttgaactgtcctcgtactccctcggccacttctcaacaacagcgcattcccaatcctgtaacctggggcctttccctaacacat

SEQ ID NO: 351711 - DNA, 122 bp, Homo sapiens
accggagctccggctgcagcaagagacaaaggccgcgccaaacccggaagccgccctgtccggtccagctgcgtgtctgagtgaactgtccccagctcagagtccctgattggataatgtta

SEQ ID NO: 351712 - DNA, 122 bp, Homo sapiens
tgttctctcccttcctgtctgatagagctgcctcctttcagaattgcaaagtttagtcttcgctctcctctcttctggtattgaaacttttctgtgggttcataaccttattttaaagttca

SEQ ID NO: 351713 - DNA, 122 bp, Homo sapiens
ctctgccgcccgccttcgcccctcccggacacccacctgatcgcctctgccgcccgccttcgcccctcccggtacccaactggccgcctcggccgcctcagccgccgcaccgcctcgcagcc

SEQ ID NO: 351714 - DNA, 122 bp, Homo sapiens
cagcttcctcccagggcttaagggcagtgggaagtgaaaagaagttcccggctccatcggcgtcctgctgtcctgctgccgagcagcagctgtgtgcagcttcttgtcaaagtcaaaataaa

SEQ ID NO: 351715 - DNA, 122 bp, Homo sapiens
gggctccagagttggccacccatcggtgcacagaccaggagaggtataatgacgcttctgcgcggtctgggaacctagctctttttgtaacgagttgttcagcatgaggcctagtcaccagg

SEQ ID NO: 351716 - DNA, 122 bp, Homo sapiens
aggaagtgaaattgattggaattatacctgccgctgctggaggctgagggaggcggccgccggaggcgaggccagctctgtcggcccagggccccgccccaccccctccttcctccctcctc

SEQ ID NO: 351717 - DNA, 122 bp, Homo sapiens
cgcgccgggggccgtggttgccatggctcctggtagcggagcccggggggctggagatgccggtcgcggatggtcccttcttcctctttgtgcctctctctttctctcgctttttttttttt

SEQ ID NO: 351718 - DNA, 122 bp, Homo sapiens
gcatcgtagcattacctggacgtagccccatttctcttcccggacaggtcctctgatagtcgggtaggttctcaatcaagcctctcattagttatttggtctgtcaatccatttcattcctg

SEQ ID NO: 351719 - DNA, 122 bp, Homo sapiens
tagaacgctgtgggttcagcatgccaccttaatcttttcattgaaaacacaactcctggccgggcgcagtggctcagcctgtaatcccagcactttgggaggccgaggcgagcagatcattt

SEQ ID NO: 351720 - DNA, 122 bp, Homo sapiens
aactacaactgtctgtgctaaacaaagcatgcctttggcctggtttgagccctagcaactcgtaactcctgtttgaattttagaaaggacacttggccctcaggttcacgaggtgaagctga

SEQ ID NO: 351721 - DNA, 122 bp, Homo sapiens
acctcaaatgtagggaagctgacaacacagccgtgtctgtggccaaaggcccaggagccccgggcaaaccactggtgttaagtccaagagtcccagagctgaagagcttggagtctgatgtt

SEQ ID NO: 351722 - DNA, 122 bp, Homo sapiens
gtgacaattttcagtgttttcatgaagttgttgacatacattcagtgtctgaggcaaagtcgataatttgaaggcatggtacaagcaaggagggaaattcatatgtgtcctttaacattcca

SEQ ID NO: 351723 - DNA, 122 bp, Homo sapiens
gcctggatcgcccggagctcgggctggaccgcccacaccgcgcgaggaagcccccgatggcgtggcccgaccccagtctgccggcctgcccgccctaggcctctgcacccaagcccccttcc

SEQ ID NO: 351724 - DNA, 122 bp, Homo sapiens
acaaggagcctgagcacgtaagacatctggaatgcatcaaaggcgaggcccagccagagccggcgtgctcggtgctgctgcctaactccttcaagagcagagccgccacattcacaaagcgt

SEQ ID NO: 351725 - DNA, 122 bp, Homo sapiens
ccgggctggtctccagctcctaaccgcgagtgatccgccagcctcggcctccggaggtgccgggattgcagacggtatctggttcactcagtgctcgatggtgcccaggctggagtgcagtg

SEQ ID NO: 351726 - DNA, 122 bp, Homo sapiens
ggaagaaccggaggcgctggggaagccgggtcagcagggagaccccagcagagtgggagccggaggacggcggcgactgcagcccgactgtttcaggtggcgtcctcgtcacgagaggagct

SEQ ID NO: 351727 - DNA, 122 bp, Homo sapiens
tcagggttgccaaatgccagatgctggtcacctgcttctttatcttggtaacaggcaggtcgggcaggagtgggtggtgggtgggggtgagcaggggtgaggggtggcagggcctcagcaca

SEQ ID NO: 351728 - DNA, 122 bp, Homo sapiens
acttcataggcaacctgttgcaaattcaatctagccgcagattaaacatacagtatataccgttcatgttctgatttcattactgtggacaaatgcagctccaaacagaataggaaaaaccc

SEQ ID NO: 351729 - DNA, 122 bp, Homo sapiens
gcgcgggggctgggctggcgggaggcgggccaatggaggctcgggggcggggccggcgggcggacgggcgggggtgcggagggggcggcggcggcggcggcgaacaaagaggcggcgggcgc

SEQ ID NO: 351730 - DNA, 122 bp, Homo sapiens
ctcaaatgctccacccacctcggcctcccaaagtgttagtattacaagtgtgagccatttcgcccggcctaggctgattttcaagtgtctgtttttttgttgttttgttttgagaccatctc

SEQ ID NO: 351731 - DNA, 122 bp, Homo sapiens
gcgtggggtccccaggcctgggcaggtggagggcgcagccaggaggctgttggtgccaggcgtgcagagtgcggaagtggggcgctcccgcagaggctgcgcgggaccccttggtgcaaggc

SEQ ID NO: 351732 - DNA, 122 bp, Homo sapiens
tggacaaagtgatatcaccacaaacatataacggtctaaatcaggaattaaaaacacatacgttttcagaagccaggtaagtaacataaatgtgtaaggcaaaagggagtggtaaatacctt

SEQ ID NO: 351733 - DNA, 122 bp, Homo sapiens
cagccagtcaatggaccgccggcttgcaggtgtgctccgacgccgatgcgttcctctcgacgtccagccgccagtgtgttcctccgctgatgtgctcctcccgacggccagccgcttctgtc

SEQ ID NO: 351734 - DNA, 122 bp, Homo sapiens
gaccaggaccagggcgctcacaccatccctgcctgggagggacggccagcaggtgacaaacgccagcgtcccagggcactgaggccacacagggcccagacggagcctccccctgagaccca

SEQ ID NO: 351735 - DNA, 122 bp, Homo sapiens
tcttaagctagactaaactttttgttgttgttttcctaaaaccataggtgcaagctttgccgctgggaagtcatattgaattaagcacttttgaaaatgtcactgtttgtgacacacaatgt

SEQ ID NO: 351736 - DNA, 122 bp, Homo sapiens
ttgaggaagaggagcgacgccccgacggcaatggtgacacttaattcggtggaataatctcgtttggtttcaatgaggacagttgtgtcctcaggccctgttttgtgagggtccttagagtg

SEQ ID NO: 351737 - DNA, 122 bp, Homo sapiens
cttgacacttggatgtgcacccccataacagccaccataatcaagatacaaaaacatttacgtcacctcaaaaatgcttccttctccccttctcagctaatccccactccctcccaagctgc

SEQ ID NO: 351738 - DNA, 122 bp, Homo sapiens
aatgaaagagggttctcaaaacagaaagcaaacaaaaatccctctgggttttatgtatctcgagtcttagctgtgggttacagatcagcctcctggttttcttgataagcagtcagggctgt

SEQ ID NO: 351739 - DNA, 122 bp, Homo sapiens
aggagattgagttcactatggagaagtcagcagcaggaggcccatcccttactcagttgccgggacatccccagtctcgggggaagaagatgccatgggcttatacccaggctgtagccaac

SEQ ID NO: 351740 - DNA, 122 bp, Homo sapiens
gactggacgggtggcggggcaggtggcctggggtgggggctgggaggccgcgcgggccggcggggcggggagcaggggtggggagagggcggcgggggtgagtcaccgggcgcgcgctgccc

SEQ ID NO: 351741 - DNA, 122 bp, Homo sapiens
gccctctgccttctcgggaatcgggtccccaacccggtcagggcgatggctgggctcccacgagacctgtgctggtgcctgggctcgaggaagggacagatggaaaaacagcaagcagggga

SEQ ID NO: 351742 - DNA, 122 bp, Homo sapiens
gggacttccctttgtttcccgatgtaaatgacctacggctgctcaagccgtcccttttctcgaccacctttccgtggacgtatgaagccccgaacctgtgcagtgcagaaggcctccacagc

SEQ ID NO: 351743 - DNA, 122 bp, Homo sapiens
taattatttaggatttttggaatgtattcaggacctgtagcttggttttctaaagcacctcgtaaaatgatatgattactccaagccctctgcatgttttcagacagaacacattgacatat

SEQ ID NO: 351744 - DNA, 122 bp, Homo sapiens
ggtggggagcaaaaggcagcgcagggcccgtggcccagcccccacctgatggcccccacacgccccagggccccgcgcacgccccgccccgcagctcgtgttgtttccagacgcgccctcgt

SEQ ID NO: 351745 - DNA, 122 bp, Homo sapiens
agattagaaccaaagtagtgaaaatccagctggacctgactttggattgcagatcacgggcgtccgaaggctccgttctcgggaaaccaagctgggaatgaggaggggacgtggcggaggcg

SEQ ID NO: 351746 - DNA, 122 bp, Homo sapiens
ggaagtggtggagccaacggccagccagacctgtggcagtcccagccccagggtgctctccgcggtcggccatttatcggtgaagcaacagccccttgacgtcaagcttgacgcattggaga

SEQ ID NO: 351747 - DNA, 122 bp, Homo sapiens
cagggagtgagcatggtggggacgccttcagtcactctctggcatgggcaccccacaccccgccagggcagggagggaggggcagccgagggaagcatgcgcccagcgccacatcctccaaa

SEQ ID NO: 351748 - DNA, 122 bp, Homo sapiens
aggatctggggaggggaagccccatgggatgagactctgaagttatccttgccccgattccgggacttgctatctgcctgccttttggcgtggtgtctctgtgcccctgactgttcctgatt

SEQ ID NO: 351749 - DNA, 122 bp, Homo sapiens
gttaatcccactgactttagtgtgcacgaagacccaaagaagagagttttgtaaatggagcggacttccaggcccagagggggaatccccaagacacttctggacatcgccggccctccggc

SEQ ID NO: 351750 - DNA, 122 bp, Homo sapiens
acgtgcgtcaggcgctttagtggtacgcacgagaacgcctgcgcaaacgcgcgcgggaggcgggcctggccaacttctgaacaggaagcagttcgctcgcgcctaggttggcgcgggctggg

SEQ ID NO: 351751 - DNA, 122 bp, Homo sapiens
cctgtgttcctgtttgcaggccaaggggaaccctgcagccctccctccttccctccgcctcggggtactgagtgatcccaccacatgaggtctctgagcccagcctgggggttgtgctgctg

SEQ ID NO: 351752 - DNA, 122 bp, Homo sapiens
aggggcggggccgcggcggcgcgcggaggccgagctcggctgggcttggcgaggctgcggcgcggccaccggcgggagtgcagcggccactgtacccagagattcaaaaccccaaacccggg

SEQ ID NO: 351753 - DNA, 122 bp, Homo sapiens
tcccgaatgcgccaaggggagcttggagaccagtagcgaggccaaataaattagcatggacgaagccctcctgtatatttcaggggattcctagtacttaacagccctctctacccccaccc

SEQ ID NO: 351754 - DNA, 122 bp, Homo sapiens
cacctggggagggactcaccggaacccccgggaaagggccccagagcagaaaaagcccagcgtctttaaacatatcagccctgctgctatgcaacatgtgggtccagctcttgaccatgcac

SEQ ID NO: 351755 - DNA, 122 bp, Homo sapiens
ggagtttctgcaatggtaattaggagggccctcattaccctggcggagccggctgagagccgataaagccgagggggagaagggccgacatcagggtaatgggggagcagggccattgagga

SEQ ID NO: 351756 - DNA, 122 bp, Homo sapiens
taatgtagacagttacaataccggaggtcattgctgtagtgtgggcatgtgtgggctgtgcgatacccagtcctgaacaacaggtgaagttctcaagataaggtgatgtgtagattttttta

SEQ ID NO: 351757 - DNA, 122 bp, Homo sapiens
cacggctccgccccatctctcccgaagtcccgcctcatcccacccagaccccacccatcccgccgcggccacgccccatcctgcccgaagccccgccccatcccgcccgaagccccgcccca

SEQ ID NO: 351758 - DNA, 122 bp, Homo sapiens
ctgggatgcctccggctccaggaagatggctattgaaaggcagggggtggggaggagggacgagggtgtggagacgcgcctgtttcttgcaggaaacctgttgccaacatagtcggaagcca

SEQ ID NO: 351759 - DNA, 122 bp, Homo sapiens
agtagaaaatctggacttcatttaacactcaattcttgcctttccctcctcaacctgctgcggctgtagaatctggacccatgccataggaagaaaggggctcctcttctcccaccccctgc

SEQ ID NO: 351760 - DNA, 122 bp, Homo sapiens
caagaatctctgttaaagtaaactaacaatcatgactcaggttatttcaagctagggtagcggtatgcctgtgttgctaggagattgtagaggatttctacacttgcatagaaatgagaacc

SEQ ID NO: 351761 - DNA, 122 bp, Homo sapiens
gctccctctagacggcagaccctggggctaacgaggggccagctgggttctcagaggtcacggagtgcaggggtggggcggcgagtggtggaagccggcgcccccgaagaccggccagcccc

SEQ ID NO: 351762 - DNA, 122 bp, Homo sapiens
tctgttctgagtgtgtcttcctctcatgtactcaacacagtgggcagcagcctgggacggcgtcccctctcccggcggcgggcaagccttgcgctgctccaccctcggcctgggcaccctca

SEQ ID NO: 351763 - DNA, 122 bp, Homo sapiens
tcagatttttttttttttttttttacctgggtctggaagctgcaggcaggagctgtcctccgagcgtggtgctgcaggtgtagtgacagatcatcccactttgctctctggatgcacagcag

SEQ ID NO: 351764 - DNA, 122 bp, Homo sapiens
agccactgcacccggcctctacttgtctttaaagactcagttcaaatgtttcttcttccacgaaacattccctgagccacatggtctgggttagctaccatcatagcatctagtattcctta

SEQ ID NO: 351765 - DNA, 122 bp, Homo sapiens
tggcccttaggcaagctgtgttgcccttttcaatagctgcatgaaatgtggaatacatcacgtatccagaccttgtctctctttctaagatacttcgcttgatctctttcttgctgtttcaa

SEQ ID NO: 351766 - DNA, 122 bp, Homo sapiens
attaaagaaggaagtggtttattcggcccggagcgtcagcagactcgcgtctttaagagccgagctccccgaaaaagaaattcttggcctttttaaaggcttacaactttaaggggaccacg

SEQ ID NO: 351767 - DNA, 122 bp, Homo sapiens
aacagcctggaaacctcgcctcaagggtgccccaggctgccagagctctctgcccctgcccgccagctcctccctgtaagtggtaatttggagcacccttaatggcccagttcaggagctgc

SEQ ID NO: 351768 - DNA, 122 bp, Homo sapiens
gcgccaatgccgagggctgaatgcgcaggcgcggaccggggactcgggagaaggcgcatgcgtggtcttgagggcggtgcttccggtcaaagcaccgcttgggggcggggcctgcgacacgc

SEQ ID NO: 351769 - DNA, 122 bp, Homo sapiens
atgtgtgggaaagagaactgggagggaccaggctgtttagaatgctgtagatacgggtttcgcacttggcctcttgcaccaggcactagatgaataaccacgggcaagtcagtccgacactc

SEQ ID NO: 351770 - DNA, 122 bp, Homo sapiens
gcgcccgccaccaagcccggctaatttcttttcgtatttctagtagagacggggtttcaccgtgttagccaggatggtctcgatctcctgacctcgtgatccgcccccctcggcctcccaaa

SEQ ID NO: 351771 - DNA, 122 bp, Homo sapiens
tcttgccttcgtgaaggctgtttgtgctgcacagcaagtacgtgtgtccttcatgttgaccgttctgagcctttcccatgtcagcccagaccctccacccaatggtcttatctccctctgtc

SEQ ID NO: 351772 - DNA, 122 bp, Homo sapiens
cctcatcctcagtcatttcggcgcagcggggccccacctgcacctcgctcctttttactgcgtccctcgccagctgccccgctattagggaaacacacctctgaatcacccagttcactcgg

SEQ ID NO: 351773 - DNA, 122 bp, Homo sapiens
tacaatgcacacacaataatccaactatgtccttctattcttcaagggttataaaataaacgttctttaccagttaatcagttgatctctagcagtaattttcttcaccagctaatctacat

SEQ ID NO: 351774 - DNA, 122 bp, Homo sapiens
agaaacacaggtggcttgtacagacctcaccaggactggagagatctcaaagaaggggcccgagaagtggtctgcagacttctcattggagacatgtcagacaaagatattcaattcaagaa

SEQ ID NO: 351775 - DNA, 122 bp, Homo sapiens
aggccagctgagaagtcttcgtgcttcaggtgaggagaaggggaccgagtcccgggaactcgttttggaaaccaccaaacctttgggggtactccacaggggtcgctggattcgtccggagc

SEQ ID NO: 351776 - DNA, 122 bp, Homo sapiens
ccgcgcgtccctgggagcgcagagcgttcagccggtattgcccagcgggtgacctgcctgcgcgctgctagagccacgccacctccctcctctcctctttctggtcctctcctgccacctga

SEQ ID NO: 351777 - DNA, 122 bp, Homo sapiens
tccgtgggcctgttagatcctagacctacagatcgctcagctaaaagggacctgggagatcgaatggagcccgttaaatcacgtcacggagaaaacgactgactttgctacttcagtgaaat

SEQ ID NO: 351778 - DNA, 122 bp, Homo sapiens
tcctcctcgctgggaggcaggagtaggagcaagcttgggaaggaggacagcctcactgcccgtggacttggggctcaccgtggagcccctggtcgaaggctgcccacactctctggggactc

SEQ ID NO: 351779 - DNA, 122 bp, Homo sapiens
gagggagcgcgccgcacgcgtgagtaaacagccggagctgggaaagtcgagctctggcagcgtctgggtgctgaggggcagaggcggagagaaccctgtcctgatcttcctaggtgggataa

SEQ ID NO: 351780 - DNA, 122 bp, Homo sapiens
ctggatcgcggattctgggctagatcgcagatttgggatcgcggatgggggattggatcgcggattgggggttggagcggggatttgggcctggattggggatttggggctaggtggggggc

SEQ ID NO: 351781 - DNA, 122 bp, Homo sapiens
caccttgctctggcggagtccgtgagggagcggcgatctccgcgacccgcagccctcctgcggcccttgaccagctcggggtggccgcccttgggacaaaattcgaggctcagtattgctga

SEQ ID NO: 351782 - DNA, 122 bp, Homo sapiens
cctggtgctctgcagtggcagggctgagatgattatacaacctgcactccaggccaagtccggtactcgtcccagctgtcggctaagcctgcactgctatgggtgagggaatcactcctctc

SEQ ID NO: 351783 - DNA, 122 bp, Homo sapiens
tatcgttcaccagaggacgactgtgtgccccaggacaatttgcgcatggtcctagctggccggctctaggtcgacggccccaggcggttaagctacttacaaagccgtgaccggtttgcccg

SEQ ID NO: 351784 - DNA, 122 bp, Homo sapiens
cgccgcatcggagagcccgcagggttgtggcaagcgcgactacgtgagcgtcggtgtgtccgggaggcagggcctgggctgggttcccggagatgtcggcggtgggaggaagacgacgagga

SEQ ID NO: 351785 - DNA, 122 bp, Homo sapiens
ttccccccaacggcgaaattgcctcccaaactccatgtgcagggcccagggaatcctgggcgtccatggttcatgtccgtggagtgccttgggcccacaggggccagcctaaggtggtggga

SEQ ID NO: 351786 - DNA, 122 bp, Homo sapiens
gaactatgagagaaggtagctctgtacattgcaaggactcctgaagatctcattcaatgccgtcattgaacaatggcacgagcagttattaatgaaaaccattggtcagagactttaaaact

SEQ ID NO: 351787 - DNA, 122 bp, Homo sapiens
tctgccctgagggtcgaaggtcgagcaggccgggggtgtccgggaggtctttgggcatcgcggtctggggttgggacgtgtaagcgcctgggagagcctagaccaggctccgggctgccaat

SEQ ID NO: 351788 - DNA, 122 bp, Homo sapiens
aggctcccaccacacccacctacttacagctcctagggaaggtgcttcagtgtttttctgcgcatgcccgagacggttacgtagttacggagcttgcgctctcagcagttgagtcccgactc

SEQ ID NO: 351789 - DNA, 122 bp, Homo sapiens
acagccacgcaggtggcgacttcttgagcccttccccctgcggtgtcccacgtgaagccccggggagctggagccgcctcctctgtggggaagatggctcctcaccacctggcagggggctg

SEQ ID NO: 351790 - DNA, 122 bp, Homo sapiens
tccagtggttcttgaaaaactggtttttcctgtggctttctttttgtctctgtttgctcacgctacaagctcctgtgactttccctttaactctgtttacaggcgaagctttcactttgtct

SEQ ID NO: 351791 - DNA, 122 bp, Homo sapiens
ccccgcccgccgggcggggggaggtcacactggccctctcggtcgcccgtgtgtcgctgccgctgctgctgctactgctgtacggtatgagggatagctgggctctccttccccgaccgacc

SEQ ID NO: 351792 - DNA, 122 bp, Homo sapiens
cccaagggcagggaggccctgaggagatgtggggccctttcccaccccagacaccctccccggccagacacccaggctgcagtgccctcacagggccaagctctggccaccggtgctgggtg

SEQ ID NO: 351793 - DNA, 122 bp, Homo sapiens
tctttattgtttgtgaataacccacaattttaatccttacatagattaacatcattggcacgcctggtaagccaacaaggacataattatctttagtgtactagaaggtaggatatttaaca

SEQ ID NO: 351794 - DNA, 122 bp, Homo sapiens
actccgaatctagtcaaattcctggcagccaatcgggagaagggaggaatctggttagcccgcctattgaacgtgacatcatttcctccgcaaccatgaagctccaggccttagcaactgaa

SEQ ID NO: 351795 - DNA, 122 bp, Homo sapiens
aagggggtggttcccacgcttctagctccggccgagtggatggcaacagcatttggaaggcggaggacatggaattcatgtgtcaggagccaccttccgagcctccagtaccacgtgtcagg

SEQ ID NO: 351796 - DNA, 122 bp, Homo sapiens
ggcagggaccccgaatccggggtcgcagggtggtagagccggaagattggattccatctccgcaaggattgagaaaaacggactcaccgactgaactattccatctccaagttgtttttatt

SEQ ID NO: 351797 - DNA, 122 bp, Homo sapiens
tgagtatggctcagaggcagatttagaggctccagggacccgcggctccttggagacagccgccgctgtttcctctgccccagtagcctgggatgagaagagaaaaagctcacccaggctcc

SEQ ID NO: 351798 - DNA, 122 bp, Homo sapiens
tttgcagggcggctacctaggcgagcagggcgccgactactacggcggcggcgcgcagggcgcagacttccagcccccggggctctacccacggcccgacttcggtgagcagcctttcggag

SEQ ID NO: 351799 - DNA, 122 bp, Homo sapiens
cgggcatgcgtgaacactaccgggacaggaaccgcaggggcacaccctccaacacccaagcgtcagccattctcaacaggctccatcccagcccctggaggagttcccagcgggttgcgggg

SEQ ID NO: 351800 - DNA, 122 bp, Homo sapiens
ctttggctttctgtcatctgtccttaccttaaatgtcaattcaatccagggttttctcttcggtcttattctcaactctacacttcagcctgtgcactaactcaagaaagccaagaaaactg

SEQ ID NO: 351801 - DNA, 122 bp, Homo sapiens
cggccgaaggggggaaaatggctccggctccagcgtcgcctcttaaagggcctgaaacaccggccgggaaatcccaccgcacaggccccgcccccccacggacagcccataataacctcaac

SEQ ID NO: 351802 - DNA, 122 bp, Homo sapiens
ctcaaagatgatgaaaaaggcaaacaagatggctcacatccaccaaagggtcacatcttacgccacaggaaaatgaatgattttcttgttttaaatcgtgggctttagccccagctctacaa

SEQ ID NO: 351803 - DNA, 122 bp, Homo sapiens
ggacacccagccatttgaatctgggccagcgagtttggctcctcttctgctggcagagcacgagcccagcacagcatcctgctgctgttggcatgtagacagctgtctttcttcatctcact

SEQ ID NO: 351804 - DNA, 122 bp, Homo sapiens
agcgccctggggcttcgagggaacggcagccgagcccgggagactggtgttgggtacccgcgggggccggcgggttccacgtgggtggaccccgagctgagggcagggtagggtcgcggatc

SEQ ID NO: 351805 - DNA, 122 bp, Homo sapiens
caccaaagcctccacagccatagcccaggcctctgtaatagctgccatagtagctcatggcgtcaggagtggtgagttgtttggctgctcaaggcaagatcctaagtgtgaatggcagcacg

SEQ ID NO: 351806 - DNA, 122 bp, Homo sapiens
gatcctccagcctcagcctcccgagtagctgggactacaggcacgcgccaccgcgcccggcgctcggcgtcgctgcaaaagagctgctagaggcttgcaggctacacatggtagcaaccaga

SEQ ID NO: 351807 - DNA, 122 bp, Homo sapiens
ccgggtgcgggtccagaggtgctgagctcaggcctccggtttcccctggtgacagccccacgtgttggcgttgaaggccttggtgccctgggaggaagcgcagagccgggggcggctcggcc

SEQ ID NO: 351808 - DNA, 122 bp, Homo sapiens
tgtcgccgcatcggcatcttcgggcaggatgaggacgtgacgtcaaaagctttcacaggccgggagtttgatgaactcaacccctccgcccagcgagacgcctgcctgaacgcccgctgttt

SEQ ID NO: 351809 - DNA, 122 bp, Homo sapiens
gaaggagggcataaaaggagaccactgaaagcagaagccaagcgagttcccgaacatgcgcgctcccagcagcaccgctcccggcagccaccagcccagacgcccatccacagaggcgcgga

SEQ ID NO: 351810 - DNA, 122 bp, Homo sapiens
ggcgcgggcggggaagggaaaggggaggcggacccgggtgccgccgcctggtgagcgcctcggtcaccccactgggcagcccggggtgaccaccaaaatacaacagcctttcggctccctgc

SEQ ID NO: 351811 - DNA, 122 bp, Homo sapiens
gcgccggggttacgggtacagaacctgggttcgaatcccggccccgacgtttccgcactacgtgccgttgggcaggagctgacgtcaccttgccgggcctcagtttccttctctggtgcgct

SEQ ID NO: 351812 - DNA, 122 bp, Homo sapiens
tggcactgcaagcgcccacaccagcaccctgccctgggcagagtcacgtgggaccatccccgcaggacagtgctgcacccagagcccccaccctgaaagcttcccgtgctctgagcagctcc

SEQ ID NO: 351813 - DNA, 122 bp, Homo sapiens
agagcgatcctgcggccgtggcggacgccgggaggagccaccgggctctcctctcaggagcgcgtccccgtgccctccagctgcccgtccctgctgaaagcatccggacagctccccgggcc

SEQ ID NO: 351814 - DNA, 122 bp, Homo sapiens
cctcgttggcggcttctggacactgagccactagagggcatcggtcccggtagggccggacggcaggctccgggataccgccacgctctctatggcgcccagaagggggcggggtggcgacc

SEQ ID NO: 351815 - DNA, 122 bp, Homo sapiens
gtacagggaagtctcgcctgttggaactggctgtggggctgcggcggtggggacgggccacggcgttctgtgacatccccccgcctcccctcgtcttctcccggctggcggcgaccggcctc

SEQ ID NO: 351816 - DNA, 122 bp, Homo sapiens
cgggtggaaacaccgaggacacgccccgacgcaggggcaactcccatggtggcttcttcccgccctcggggctccacctagctcagccctggaattccgcaagcacccggaggccggggggt

SEQ ID NO: 351817 - DNA, 122 bp, Homo sapiens
aagacaggagttaacccaagaatgacaaacttccttgacttggcgatttagaaaaaattacggcccagtttggtcagctaagaggcacacccaagaaacagctttgaagtatgtaggggtaa

SEQ ID NO: 351818 - DNA, 122 bp, Homo sapiens
gaaaatagtttctactcggggccaccgtgtgagcaaatgtgtgagtgtgtgcaaagcgcccgggccaggccctggcacgcatcggcgcccatgttggctggtgtcaggggtggtggcggtgg

SEQ ID NO: 351819 - DNA, 122 bp, Homo sapiens
aggccagacccctcttctccaagcgagatctaccacatgggtgatttcgggagcccacgccggctcagacagcctggattttagcttcataggtggatgggaacctatgaaggtttagagat

SEQ ID NO: 351820 - DNA, 122 bp, Homo sapiens
ccactccctgtccatcggcacccctcccaaaggcttgtgtctcctcaaggttcccctatccgctgcagggtccagtagccccagctaccaaggtggccatgctgacaccagaggcactgaga

SEQ ID NO: 351821 - DNA, 122 bp, Homo sapiens
tggtgctggggacacgctgggtgtggggcccctgaccagcgcccaccacccgcatctgcccggtgcagagtccccagtgcgttcctaggggtggcggcaccacccctcagacccggggattt

SEQ ID NO: 351822 - DNA, 122 bp, Homo sapiens
atctaggcctggagagctctctctggagagtagatttaacaggaaagtttcatagctcctcgtgtgatcagcagtgggatgctggggtctaataataatggaccaggaaccctgagtttgac

SEQ ID NO: 351823 - DNA, 122 bp, Homo sapiens
ggccattgtcccctgaccagctaaaatcaagcctctgtctcagtccagcctttgcacgcacgcttcctttgccctgctttccatcccctctccctccaactcccctgccagagttccaaggc

SEQ ID NO: 351824 - DNA, 122 bp, Homo sapiens
actggtccagggaagctgagacatggagaagacagggacccaatcttcagcttggagacacgtccagctgaactcagcccacatcagtgacctgcagatgcataagtgagaataaacgattg

SEQ ID NO: 351825 - DNA, 122 bp, Homo sapiens
ccgggagccacctgaatggcgacctggatccagacgacagggaagaaggagctgcctctacggctgaggaagcagccaagaaaaaaagacgaaagaagaagaagagcaaagggccttctgca

SEQ ID NO: 351826 - DNA, 122 bp, Homo sapiens
ccctctcctctcagtttcaccttgaacgagagaaagagaaagggaggcagatgacagctccgtccagcacagaacggggtgtcctgtgaagtggtgagctccctgttcctgggagtatgtaa

SEQ ID NO: 351827 - DNA, 122 bp, Homo sapiens
acttcttgaagctgaaagatttcccaccccataaaagagccagaatgtgacaaccaggagcgctgatacctggggaagggagactggctctggtcgtgtgattccgggtttagggctctggg

SEQ ID NO: 351828 - DNA, 122 bp, Homo sapiens
tgtgattgtaacattattagaaaccaaactgtttttccttaatgtgctctgctgagtatacggtgcatcaaaatataatgggctggttaattgttacctgggctaggtagcagtccatccct

SEQ ID NO: 351829 - DNA, 122 bp, Homo sapiens
aggccggcggggggctgaggctgggccacggctgaacacacagggtgcagctctccagggcggagaagtcaacggctaagagaccgaagagcgcgaacagcagcatggccacgacccactcg

SEQ ID NO: 351830 - DNA, 122 bp, Homo sapiens
cccacctttggcttctcttgatttttgcttttacccatagcccccaactccagctgacaccgcacttagagaatttcctcatccgttttactttaagaagtagcaattatctttctcaaaga

SEQ ID NO: 351831 - DNA, 122 bp, Homo sapiens
tggatctagagggtattgtgctgagtgaaaaaagccaacctcaaatggtcacatactgtacgattccacttatgtaacattctgaaatgacaaaattatagagatggaaaacagagggccgg

SEQ ID NO: 351832 - DNA, 122 bp, Homo sapiens
ccgagagccagccacccacgcaaacggaaacgcaccttcgctacctcccggagcaaaatgcgagcgcgggacaggacgaaacaaaacctgcccgggcttactcatcagagactccgcggggg

SEQ ID NO: 351833 - DNA, 122 bp, Homo sapiens
tttcattggaacgaagtcccgaggtatctaccgggccccagcaggcaccatcctttgctacgctcatttagacatcgaggccttcaccatgtaccgggaagtgcacaaaatcaaacaatgcc

SEQ ID NO: 351834 - DNA, 122 bp, Homo sapiens
catcggcctcccaagatgctaggattacaggcatgagccactgcgcccggcctcatgcaccgttcttaatgaataatgtgatgtttacaacaaccctgtgagataggccctctaataattgc

SEQ ID NO: 351835 - DNA, 122 bp, Homo sapiens
ggtgacttaaggcagacgggggcattgtcgaccccctatggagggaatcccgaacaaacgcgccttgccttttcatgggcgagggaaccaggagggagaggcaaggagctaggggtgcaaag

SEQ ID NO: 351836 - DNA, 122 bp, Homo sapiens
gcggccctcacttcctctggcgagcgcagccgggcggaagtgcgtcagttgttatctgttcggggcgccgccgccgcctcacgagcccggtgcccaggagcccggccgcctcccgcctgccg

SEQ ID NO: 351837 - DNA, 122 bp, Homo sapiens
caggagagctggagtgctgccgtcattaacgccaggccagaacacggcgggctaacagggcgctggcctgcgtgcccacctctaggtccgctaatatgtgcccagctctaggtccgctaatg

SEQ ID NO: 351838 - DNA, 122 bp, Homo sapiens
gagcatgcgtcccagccggaggctgagcttgcgggcgaagaacacggcagcgctgggaaccgggctagggctttccgtgtgggccgcgcctgccggccctctctgttgtcccacttggcacg

SEQ ID NO: 351839 - DNA, 122 bp, Homo sapiens
atactatttttttccaattcctatatacctatgataaagcttaatgtataaattaggcaccgtaagagattaggaggaatacctaataataaaatagaacaattataacaatatattgtaat

SEQ ID NO: 351840 - DNA, 122 bp, Homo sapiens
ggtactcctcacatgtgttgtcctggccataccacctgcggggatgggagggcgacaggacgcatgagggttccttgtggcccccagacctcaccatggcagcctcagggtgcagacaacac

SEQ ID NO: 351841 - DNA, 122 bp, Homo sapiens
acatcctgatcagcagcagaagtgattttcccgtgtccccgtgtccctgctcaccacccacgctcccgagagctcccaggccaggcctcacagggctccttccctgtgggagcggaggtttg

SEQ ID NO: 351842 - DNA, 122 bp, Homo sapiens
acctcaagcgatctgcccgcctcagccacccaaagtgctggtattacaggcatgaggtcccgcgcccggccgacaatttacactgttctccagttggggcggagcgggagacactatggagc

SEQ ID NO: 351843 - DNA, 122 bp, Homo sapiens
acagtctcccttggtagctttgcggggaaatgcgggccagtagataatacactttaataccgaaagaatattagttaattatccaacccattaaacatttattgagcacttaacatgtgcca

SEQ ID NO: 351844 - DNA, 122 bp, Homo sapiens
gaaggagcttcttgaaggatgggctctaatcacatcactcacctgctcaaaatccttccacggtgcccccatctccatagccaaggcctcccccactctgaggccaatctccattttcgtcc

SEQ ID NO: 351845 - DNA, 122 bp, Homo sapiens
tgaatgagggatggctcatagccgacttgagtgtcaatactcggagaacattgggtgctccgtgtcaatttatggcacagggtctctagtaaggctttgaggttgaccttaacctagtctag

SEQ ID NO: 351846 - DNA, 122 bp, Homo sapiens
ttggcccaggaaatgacagcgttcttggggtgttacttccccctccatccagtagggacgcgcctactctgccctagagagacgcaggccccgccccccgccccaccccgctcgcccgggag

SEQ ID NO: 351847 - DNA, 122 bp, Homo sapiens
gggaaccagccacgtgtccatctgattctgccgtggaactttctccgccagaggtggcagcgaactaacacaccctgtcccttgtccaccgagagagagacatggatgcgcagagctgtgag

SEQ ID NO: 351848 - DNA, 122 bp, Homo sapiens
tccgcggctcctccccctgcaccccctccttcccccactccgaacccgcggcaagaaagccgaaatcacttggcctcagcaaggaagcagggagattgcccgggactaaggcagcagagacc

SEQ ID NO: 351849 - DNA, 122 bp, Homo sapiens
gcggttccatccaccgatccagagtgggattaccaagttgggcaagcagggcgtcgccgccgggacataatggttcaatgcctcctggcagggatgcaggtggcctccaataaatcagtcaa

SEQ ID NO: 351850 - DNA, 122 bp, Homo sapiens
cgcccgcacagccctcgggaacttgttaacaggaaagcctggcagagaaacaaatgccagcgttttggaagaactgagagtcacgtcgttaggcgctgaggctttcttttccttccccgccc

SEQ ID NO: 351851 - DNA, 122 bp, Homo sapiens
tcatgagttgaacggttccccagggaacgccggactgcgcagaaggtcaaagtcatgggccggaccatctaaaagtgtctgatcgccggtctgtgacacagcaagttgggggtgggggctgg

SEQ ID NO: 351852 - DNA, 122 bp, Homo sapiens
tgaaaacaggcgaggtgggggatgggggaagagaggcgctcggggagctgggacgggcaccgggttggggggtcccggaacccctgaaagttcagtgacacctccagagttccctcttcccc

SEQ ID NO: 351853 - DNA, 122 bp, Homo sapiens
agaattttggtgcgtaacaattccaacttttgcttctgtgcccttcaagtgtattttatccgtgccccagttttgcagatgaggagactcggacttgtaagtaactttctgtaggtctttgc

SEQ ID NO: 351854 - DNA, 122 bp, Homo sapiens
tgctgctgctgctcgggctgctggccccgggcgcgcagggggcgcggggccgcggcggcgcggagaagaacagctaccgccgcacggtcaacaccttctcccagagcgtcagcagcctgttc

SEQ ID NO: 351855 - DNA, 122 bp, Homo sapiens
ccatatttcaaagccattcttttaacataaattattactctttttgcacacagctatatacgttatccactgaaattagtatttgcaggtaactacccttttgcggaggcctacttaaaaac

SEQ ID NO: 351856 - DNA, 122 bp, Homo sapiens
cgcgcttcctgtcacctagaattactggaacttcaatgtggaaatgcccttttggagaggcgacagggggaattgattttaaatattgttttcgcctcatcaaatgtcaccatccagtttag

SEQ ID NO: 351857 - DNA, 122 bp, Homo sapiens
ttagagctgaggcgtctgcaagccgagcgtggccacggtcctctggccccgggaccatagcgctgtctaccccgactcaggtactcaggtatgtctcaagtccatgtcctccaaacagactc

SEQ ID NO: 351858 - DNA, 122 bp, Homo sapiens
gtaggacaggcggcagccaggatccaggctgtgcacggggaacattgaagaacgctgccacggccccgaagaagaagtggagccacggggagaggaacggggaatttagaggaagtggggcc

SEQ ID NO: 351859 - DNA, 122 bp, Homo sapiens
ctcgggcacttactccgttggaggtgggggtgatctctacagtgttgtcgattttgccgccgcccccgccattgggctcgggggtcccggtggccacccggggagccagcttgccgaccgca

SEQ ID NO: 351860 - DNA, 122 bp, Homo sapiens
ccaccccctttctccaataaagtccaaaatcagcaatcagtgttgacatcaacgtgcaaacggcttagagccccaggtaaaacaaaagacgcctgcaaaaaggcaaacgagaaaggaactca

SEQ ID NO: 351861 - DNA, 122 bp, Homo sapiens
ccattgcaccctagcctgggcgactctaatttctggcctcaagcaatcctcctacttcatcgtcccaaagtacataagctactcaccatagattttagtttaagttgtctgggcatagagat

SEQ ID NO: 351862 - DNA, 122 bp, Homo sapiens
gtcggggtggaggagggcagttgaggggaggcaggagtcaggggaggagtcgggctgtgtcgaagtgctgcgctgatgacctgcgccaccacgggactctctagggctcagcttcctcatct

SEQ ID NO: 351863 - DNA, 122 bp, Homo sapiens
atccctgcctccgctcgccggcgtggggaaccctcaggctccagtgaccttggtggggggcgtctgggggctccccctccccacccccggccgggcacggacgcgggtgaccgtactgcgac

SEQ ID NO: 351864 - DNA, 122 bp, Homo sapiens
ccatcgagatctttgaagaaccagctagcctagaggagccagaacatctcgctcctcgcgcgtttccgtttccgctaggactctggcagttggtgagcatcatggcaaccgttgtaagtgtg

SEQ ID NO: 351865 - DNA, 122 bp, Homo sapiens
aatgagggtcatgcttgcatactggccttgggtgagtggctcaggaacagtttgcaagaccgtgttgaagctacttgtaactagaccattttcccagcttgaccatgagcttcttcaaggca

SEQ ID NO: 351866 - DNA, 122 bp, Homo sapiens
aggattacacagaatgtagcagtaatagtttgggacattagagaagatttgttggaagtccgtctgagcagggactgtatgggctgttcggcattcaatagctgtcctataatggtgtcccc

SEQ ID NO: 351867 - DNA, 122 bp, Homo sapiens
ccgggcctcttgctgcaactcttcgatttgtttcttcagcgcctcattggcctctgtgaccgcgaccatctgctccttatcgaactgcaacgactgtggaagggaaggagggcgtgaggagc

SEQ ID NO: 351868 - DNA, 122 bp, Homo sapiens
ctttgctgcttcttcacacagatcttcaaaaataacgactctctctcctctctgtggtctcgtcagagagcaggaatcctggccagctggtcaggtcactcagaaaaatggcacagctgttt

SEQ ID NO: 351869 - DNA, 122 bp, Homo sapiens
gagacccgccaagatctccaggcaggccgggccaggctctctgggattccggactggcttcgcccaactggaaccccctcgatgagggggccccaggcagaccttatatgaggtcagcactc

SEQ ID NO: 351870 - DNA, 122 bp, Homo sapiens
ggggcggagaggagtcgttcactatactaagccgagctctgggcccagagcaacaagagtcgctgaggcaggcaggaagtacccccctgcacaccacgagcggacaccagccgtctctagca

SEQ ID NO: 351871 - DNA, 122 bp, Homo sapiens
aaagacactggatttggcaggcacgctgtcgccgggacttgtgctcttggccatgtgacccggccgcgacagccgaaatcctgtcactcggcccggcgggaacggtgcatctcgtgggggaa

SEQ ID NO: 351872 - DNA, 122 bp, Homo sapiens
actccccacagctcgcggctcacggcgctcctggggcagccccggcccggccctgcccggcggccctatgccgggggtgccgctcaggtaagtcaccgcagccttggcaagggggtgtggga

SEQ ID NO: 351873 - DNA, 122 bp, Homo sapiens
gactgccccaggagatgctgcctcgcccgacaggcgccccggcccctgccacgcctcccgcgcctggaaagcacgacatcccgcaggcagcatatctgagcctgcatcggcctgcgggagtc

SEQ ID NO: 351874 - DNA, 122 bp, Homo sapiens
gtattcatacagcatcccacaccttccaatgtcctgggcacatcccagccctggggccctcgccaggcagggctctgagcccagaaaaaggcagggtctcaagagaggataagatcgagtgg

SEQ ID NO: 351875 - DNA, 122 bp, Homo sapiens
cggcggcggcggctgtggctgctgcctgctgctcctcgcggcgaaaagcacaaagcacagcgccctccgcctgcaggcagcccgcccgccgccggccccggcctcagctcgcacaccccccg

SEQ ID NO: 351876 - DNA, 122 bp, Homo sapiens
gccgtctgctcggccgtccgctccacgccaggcaccacgtggcggttgccagtgtgccagcgctccatctcctcagggtggccgagcgccagattcctgcagggtcctgggcgacgcccctg

SEQ ID NO: 351877 - DNA, 122 bp, Homo sapiens
cctcattaagtggctggattctgatgcccggaacccaccggtggtctcaaagatgtagaacgcagcgtgtgcccacgctcagcaggtgtgccatccttccacctgctggggcaccattctta

SEQ ID NO: 351878 - DNA, 122 bp, Homo sapiens
aggtgtcatccgaattcaggctcctggggcccgggagggtccgactctacggacccaggtcgctgtggcccatcgctttcgatttgacttggtttctgtcgccactcgcggaaggcgcgccc

SEQ ID NO: 351879 - DNA, 122 bp, Homo sapiens
ctcactctaaaagcttttccacattcctcacattcataaggtttctccccagtatgaactcgcttatgtccaatcagagctgagccctgacggaaggacgtgccacactcactgcaggtgta

SEQ ID NO: 351880 - DNA, 122 bp, Homo sapiens
gagcaggctatataggagttagaaagtcacaacttcactgcttttggccaaaggccattgcggtacttgcagatgaagaagaaaaagaaaaaaaaaaacagagacaaagtgttctttcagaa

SEQ ID NO: 351881 - DNA, 122 bp, Homo sapiens
gccccgggctggtcagagagggggcctgctccttatccagagagttctagtgacttgtcccggctccctgggtcatggttctgcctgtcccctccagtctgcacttggccagacttttctac

SEQ ID NO: 351882 - DNA, 122 bp, Homo sapiens
gggtgatggacgcacctggaaaatcgggtcactcccacccgaatattgcgcttttcagaccggcttaagaaacggcgcaccacgagactgtatcccacacctggctcggagggtcctacgcc

SEQ ID NO: 351883 - DNA, 122 bp, Homo sapiens
ataaggctgacttcagaacggtcctaaagagccactttatagtaaggttctcatgtaccacgaaagaaatcctgacactcctaatcaaaaaagcaaaacaaaaatcaccttcctatataacc

SEQ ID NO: 351884 - DNA, 122 bp, Homo sapiens
gctccacgggtttcgcctccacaatcaccgcttcccctgagcccgcgttggggaggtgcccggggcctgtcctgtgacgcggggtgttactgcctgcccagctccagcccctggaaaatgcg

SEQ ID NO: 351885 - DNA, 122 bp, Homo sapiens
aagatgaaggataagcgggcttgagagggatggagctagtgggggtgtgctgggagcccacggctgcctcagcctcagccttagccagactgctggagccagatggggttcatgatgcatct

SEQ ID NO: 351886 - DNA, 122 bp, Homo sapiens
cctctctctccccgctggtattcgactccgggcgcccccgcagagcgtgggccgcgattgcggggcaggcagaccccatgatagctcctttcgggctctttggcactctccgggtgaaaggc

SEQ ID NO: 351887 - DNA, 122 bp, Homo sapiens
ggccctggtgctcgacttccttgtatttgggaaagtgtggtggtgggtgcgcgctcgcggcggagggtaaacattcgacagtccccgctctgagagggagggacagagagcgaactgtcaga

SEQ ID NO: 351888 - DNA, 122 bp, Homo sapiens
gatctcgatgttgccggtgtaccagaggatccagcccagcaggctcaggaacaccagcagcgcgcccgagtagatgagcaggtccccgaagtcgcggccgcgcacctgcagctgcgcgaaca

SEQ ID NO: 351889 - DNA, 122 bp, Homo sapiens
aggcggctgcctccaaagcctgaccttgtaaccactaactggacaaggccccgtgagaaacggcataaatccacctaagaaagcaatgaccttagagcttcccttgtggtggggtgaagttt

SEQ ID NO: 351890 - DNA, 122 bp, Homo sapiens
acccactgctccagcgacttcttgcccaggcccaagttgcgcaaggtggacacggagaagcgcctctgctcgcgccacgcgggcccatagcgcgacaggaacacccctgggggcgggacgga

SEQ ID NO: 351891 - DNA, 122 bp, Homo sapiens
tatatagagaaagagccagaattcaaacccgggcagtcttaacttcagagctcatactgtcgacctcttcccctgcacaggccttagcagtctttgtctctttctgctcacaggatcggctt

SEQ ID NO: 351892 - DNA, 122 bp, Homo sapiens
ggcttttcttgggtagaagaaagcgcctcattcttttccaggcatataaggacgaacccacgggaaaagctgcggttctccaggagtctggttgttcctcgcagccgggacggaatgctcaa

SEQ ID NO: 351893 - DNA, 122 bp, Homo sapiens
agcgtcaactgctccccccaagcctggggcctccagtaactgatctgctgtgagacagggcgggagggtggagtgcagacaacaaggggtgggaagcggaggcttttctgtcatttgaaaag

SEQ ID NO: 351894 - DNA, 122 bp, Homo sapiens
gtcacaaggtccttcagtttgcccggggtcacacagatacaaaccagagctgaggccgggcgcggtggctcacgcctgtaatcccagcactttgggaggccgaggcgggcggatcacgaggt

SEQ ID NO: 351895 - DNA, 122 bp, Homo sapiens
ttttaaaaggttcattcctcatctcgctgtttgccgggtacccttcctctcccggacagccgcacctgcttccctgtgctaatgacagtttatgaagcgaggcacagtgagagggatctgaa

SEQ ID NO: 351896 - DNA, 122 bp, Homo sapiens
acaacattgtcaaaaaatctaggagacagtgatcactgcggtcaggggcgcttagtgggccgcagctcataggaatgctggggtttcccagattcttcccagacgggcatcgctttcctcta

SEQ ID NO: 351897 - DNA, 122 bp, Homo sapiens
attacaggcatgagccaccgttgccaccgcgcccggcccatgacacttttaaagtcacctcggtcttgtgcatcttttgttgctgacaggaagtctactctcaagccggtcgttgttcgttt

SEQ ID NO: 351898 - DNA, 122 bp, Homo sapiens
cggggcagcccgccccacccctccccccaggctcctccccatccctccctgcccaggccgcgagaatgaccactccacttgcaggcgaagcccctggccgctgtgctgaaggaggtgtgcga

SEQ ID NO: 351899 - DNA, 122 bp, Homo sapiens
cgatacctcatggggatggttccccagggcacctgcctcactgtacacaggtaggatgaccgtcttctggatgtgcacgtctcccagcaatcaggtgtgtaggtcattctgtgttagtgctt

SEQ ID NO: 351900 - DNA, 122 bp, Homo sapiens
cctggggatggggagataagagaagaccaggagggagttaaatagggaatgggttgggggcggcttggtaaatgtgctgggattaggctgttgcagataatgcaacaaggcttggaaggcta

SEQ ID NO: 351901 - DNA, 122 bp, Homo sapiens
gcaagcccccgtactcccgcaaggtaaggaggtgccgtccgggcggcccggggcgcgcggcgggaggggacacagcccagctgcctgtgccaaggctttgcaacccattccaggtgacgacg

SEQ ID NO: 351902 - DNA, 122 bp, Homo sapiens
ccctgggcagaatccagtacgatgaaatgagagagagatggaatgcagagcactcgagagcgtttggagatactgggtgttttctggcatcctaaacagcaaggacccaggatacccaccca

SEQ ID NO: 351903 - DNA, 122 bp, Homo sapiens
agtgccgcttcagacaatgaaatcagcgtgtccgatcatcaattctcatcatgatcgtgacgtcacaaaagacagcggccaatgggagcctgcgatcagctcaggacagtccctggcctcag

SEQ ID NO: 351904 - DNA, 122 bp, Homo sapiens
aacacagctctacttggtgaaaaagtaggtggctctgaaaagaacctttttggtttggaccgaggtatgagtaatgaactgctccagccccgctacttgcccttggccttgtggtggctctc

SEQ ID NO: 351905 - DNA, 122 bp, Homo sapiens
ccctgaggcagagggaaggtttcagctgtgacaagggaggctttcatgggcagggacaagcgcctctgggcagtcccagctgggggtgcagccaggcctctccctccagctccaaggcttcc

SEQ ID NO: 351906 - DNA, 122 bp, Homo sapiens
gatccctaaccagtgatcccatgaatgaggtggatgccctatggatggagaagctcacaccggcctctgctttttttgtggtatattttatcccgagagcttgattaataatctagactggg

SEQ ID NO: 351907 - DNA, 122 bp, Homo sapiens
gggtgcaaacctttgggcatccagggagagctttcttgttagagcccacacacaatcgggcgcatcaagtgggtaagtccccctcccccgccgccaccttctgaaacaagtagctcttattt

SEQ ID NO: 351908 - DNA, 122 bp, Homo sapiens
gccagccgggtggcacagcggtgtcgtggccgtgttgctgatcgcctgggtggttgttggcgtgtccctgcagcgaaggatcctggttggtaaggggagcggcgggcgagcaggcgggcggg

SEQ ID NO: 351909 - DNA, 122 bp, Homo sapiens
tcaacatcccacagtcccaaatgttccttcttcgtccccctccccacctaggctcctctgcgaggctatccgcctaagcctagtggccacaactgatggggcggtgcttaaacacgtcgtga

SEQ ID NO: 351910 - DNA, 122 bp, Homo sapiens
agcaagctgtttcccagctcccacgtgctgcagctgcacctcagtgcccacttccgtgagcgagacagcacccgggcccggctctcacccgacggcgtggcacccacctgcccgctctgtgg

SEQ ID NO: 351911 - DNA, 122 bp, Homo sapiens
gagctgagcttctctttcagaagcccagattattggaggcagcagggaaaccctcagagacgttcaaagtggagagacctccagtgaaggtggaagcatttgcagggccattaaaagactgt

SEQ ID NO: 351912 - DNA, 122 bp, Homo sapiens
cgccagctgtgtgacaatgctggctttgatgccacaaacattctcaacaagctgcgggctcggcatgcccaggtgggtcctttctctccccagggttcagggtttgggcgggtggggctaga

SEQ ID NO: 351913 - DNA, 122 bp, Homo sapiens
gcggaagaggtgagtgcagcgggaaccgggagggagcgggcaggcggccgggccaccccgcgacccctctgggacccgcggcactgcaactccgcagaagtgtccggggagcgggtctcgtc

SEQ ID NO: 351914 - DNA, 122 bp, Homo sapiens
ctgcccctgtgataatgattcattacacgcttcctccattgttttactccagtgacctcacgtcaagggaacctgtgatctcaggcttctaggaaagcgaaacttagccgcagcctgcctct

SEQ ID NO: 351915 - DNA, 122 bp, Homo sapiens
ggcgcttctaggcatgtcaatgttttttctctacttcctgggtttttctggtcccttcaccgactcagattcccttaaactgtagagggttctaggagttagttctaggataggtcaaagga

SEQ ID NO: 351916 - DNA, 122 bp, Homo sapiens
gctcctgtcgttatctctgatccttgcaccctggcaggaagctggtagctcacactttaacgggaggccttcacatattccagaaaagaaaccactttgcagtgccagactggaagaagtaa

SEQ ID NO: 351917 - DNA, 122 bp, Homo sapiens
atacaagctggactgctgcctgagcgagcgtgacacacatgtggtcagctgttctgaggacgggaaggtgttcttctgggacctggtggaggtgaggtgcccccagccctacttcataccta

SEQ ID NO: 351918 - DNA, 122 bp, Homo sapiens
ggcacccccatgacaaagtcacaggtgcactgcatccgcaccgagaagcgtcacagcagacgagactgctggcacggcagctagagtgcaactcctcggtcactttggggaagggcttcaaa

SEQ ID NO: 351919 - DNA, 122 bp, Homo sapiens
gcggctacaccagcactggcagaagctgcaggcacggtttcagacataacaacagagaaacgcaagatgtaataaccagcgaaaagcatgaaacacccgggcggcctcggggccttatatag

SEQ ID NO: 351920 - DNA, 122 bp, Homo sapiens
gaagctgcagaccttcgcggtgagtggtacagctcttaaggtggcgcgtctggagttgttcgttcttcctggtgggttcgtggtctccctggcttcaggagtgaagctgcagactttcgtgg

SEQ ID NO: 351921 - DNA, 122 bp, Homo sapiens
tggagccccccctgaagctggtttctacctgccctcgcctccccactgcagcccacagttcggctttcagggctgaacccagagcccagaggatggagaagccagaaagcggggaggtaagg

SEQ ID NO: 351922 - DNA, 122 bp, Homo sapiens
ctccagtgatccacccaccttgggctgccaaagtgttgggattagaggcttgagccacagcgccgggccttcaggggtatcgattttgttcccgtgcctcttgtgtgtgttctagtgtggaa

SEQ ID NO: 351923 - DNA, 122 bp, Homo sapiens
acaggtgtggcgggctggtcacctgggacagttgtgcggggcaggcgcgcggggtaggcgcgcgggaaccggacgaggcgagaggccggcgggcgcacttgcctgcgaaggctgcggcagcg

SEQ ID NO: 351924 - DNA, 122 bp, Homo sapiens
ccagccagaactgagaaagccctcaaaggtgcggaaaggggacttttccctcaggaaagccggcaacagcagaggccctagcccacgtcgccacacccactccgcgcgcgcccctcgcctcc

SEQ ID NO: 351925 - DNA, 122 bp, Homo sapiens
gagcatgggctggccgaagggactcagtgggatattgagctaggcggagacgagaagagtcgagacagctggggatgctgagagcatcccaaaagaagcctctctcatcccagaagccccca

SEQ ID NO: 351926 - DNA, 122 bp, Homo sapiens
atgctgaggtgtgaggatcaccggagtccaggaggtcaacgctgcagtgagcagtgatctcgctactgcatgccagcctgggtgataaagtgagaccctgtctcacaacaaaacaaaacaaa

SEQ ID NO: 351927 - DNA, 122 bp, Homo sapiens
gtgaccttggccttcaacctgatccgcttctcgaccagcgatacactgtacctgcacggccgagtgaccctgtgtgacacgcgggcaagacgcccatgccaaccagtgagtgggcagccccg

SEQ ID NO: 351928 - DNA, 122 bp, Homo sapiens
gcgtggtcacagcctgccttttaaagccagcgtggatgtgaccctccaaacgggacgcagcgctgggaaatgacgaaaaacgctcgtgggctagcgcatgtgttaatcgaagttgatgagac

SEQ ID NO: 351929 - DNA, 122 bp, Homo sapiens
gtttgtgacctacttagagcagtttttcttttgtaacttatggtttttttttttcccactcgttctagtattttgcatagaaagtgaacggcagaaggcagttttaagtttttgtaaaagtt

SEQ ID NO: 351930 - DNA, 122 bp, Homo sapiens
ttccttttggaccgccgaggaggtaatcggaggaccccagaagacccctgcaggggtgaccgtcacgcctcagacataaatgcacttggaggttcccgttggcaaggggggctaactgtggg

SEQ ID NO: 351931 - DNA, 122 bp, Homo sapiens
atttttaaaatatttcttctctctctctctccttttctttttttcagggtctctttctgtcgcccaggctggaacgcagtggtgtgatcacagctcactgcagcctccacttcccaggctca

SEQ ID NO: 351932 - DNA, 122 bp, Homo sapiens
attgttctctccacttgccaaatgagaaaattgtgcctcagagaggggccatgactagaccgaggtcacatgctaggcttggtggagtcagggctagatgcaggcctgccagctccaggtct

SEQ ID NO: 351933 - DNA, 122 bp, Homo sapiens
ttgctgctcttgttcgcattggagataaagaaagccaagtcccgaacccactgctggccgcgcgcagagagcagatcccagcagtcagcttcctgaggcaggaccagggtgagggagggcaa

SEQ ID NO: 351934 - DNA, 122 bp, Homo sapiens
aagggtagctgataatctgagcgatgccagagtgacatgaaaagcttgccaagttactgtcgagggaaaatacgtggcgctgaaggccaagacaacagcgcatccaggttagcatgtcaggg

SEQ ID NO: 351935 - DNA, 122 bp, Homo sapiens
gctaatatgtactctgtctacaccctgcgttttagggagtcaatcgaaagcctccactcacgtgaccactccactacccggcgccaagacgcgctgatgtcacgacagcgtgcggcgtgcag

SEQ ID NO: 351936 - DNA, 122 bp, Homo sapiens
ccaggggccaaaagcttaggatatatcaaaccctctaggtgggtgacaaaagacgctaaacgctgggggcgggtctgagctacgccacgcccatgcgcgaaggggtgcagctgcgcagcgca

SEQ ID NO: 351937 - DNA, 122 bp, Homo sapiens
aactgttcaataccggtgactggtggcctcagcggatggtatatccataattcataatgccgtctaaattggagagaggagacactgtaatctcagaatcctttttaagggagaggaggaat

SEQ ID NO: 351938 - DNA, 122 bp, Homo sapiens
ctgggcaggggtccgagaggcccggggctgcgggcgggcgggcggttatcctccagagatcgcgcatcagcacagaacatctggactgatgttcttttaccgcgctgtccacaggcttaact

SEQ ID NO: 351939 - DNA, 122 bp, Homo sapiens
gcagcggggttcggagattcccctccagttggagcttctggatcacgtggctatagacagcggccagggctgccccgcaggcgggctccaccaggatcttctcatcatctgccagagaaggg

SEQ ID NO: 351940 - DNA, 122 bp, Homo sapiens
ccctcctgctggaatactgagttgggaaaatcttccgagcctgagctggcatgttgctagcgaggcagagatttcaggtgagaagtaaatgtgcagagcggatgcagtgacctttcttattt

SEQ ID NO: 351941 - DNA, 122 bp, Homo sapiens
gtcattgtgaggaagtgaggtacagtagggctgtgaacgtgggctggggccagaccacgtcggtggtgtacacagctgccactgtacatggctggtcattattcctttagcagccccaccag

SEQ ID NO: 351942 - DNA, 122 bp, Homo sapiens
ccacctatggctattggctgccttgcagaggtaactgccagaacgcccctgcagttctggcgggaaaaaccaacaactgacaaacatgtccaaatatgatgtaacatcactaggggctggct

SEQ ID NO: 351943 - DNA, 122 bp, Homo sapiens
aatccagtttcctccctggatactctactgactgcaaatatcagctccaccaatcccagccgttgcttctctgtcacattctcacttcaccctcctcttagtggtactcaccacaattggcc

SEQ ID NO: 351944 - DNA, 122 bp, Homo sapiens
caagctgttcttttcccctttccactcctatccccacatatcagacagtagatgctgttccggaattgcctcagtgctccagctctgggattctggggcaagaaagagtgggaagagtggaa

SEQ ID NO: 351945 - DNA, 122 bp, Homo sapiens
acctcgtgatccgcccgcctcggcctcccaaagtgctgggattacaggcgtgagccaccgcgcccggccccggctcctgctcctctaaatattagaggcaagcctcgaaccggagctccggg

SEQ ID NO: 351946 - DNA, 122 bp, Homo sapiens
tgtggcgtcgtgcaggtgacccaggacagcgaggggcaccgtggcgtcgtgcaggtgactcgggacagcgaggggcaccgtggcgtccgtgcaggtgactcgggacagcgaggggcaccgtg

SEQ ID NO: 351947 - DNA, 122 bp, Homo sapiens
ctgcggagtggctaagattgagttccattgcgatgtaattaggtcaccccattatgagcacgtttctttggaaaggacggggcgggccgaagagagcgcattctcaccacccccaacacaca

SEQ ID NO: 351948 - DNA, 122 bp, Homo sapiens
ggggccaggtctgttttattacttatccaaaacacatggcccaatgcttggtacattgtacgtggtcaagtttttcactgactgattataagtgagcatatgctattggaatctagaaagta

SEQ ID NO: 351949 - DNA, 122 bp, Homo sapiens
ctggcgccctctggctggagccctgcgcccggcccagcccaggccgctgagggtgccctgcgcgggcttcacagctttgccaggatttgcagccatcagacctgaggacagaagggttcggg

SEQ ID NO: 351950 - DNA, 122 bp, Homo sapiens
aaggggcaccggctggcagtgggatttaggatctagcccagccctgtcttaaactggctgcgcgaccttagccaagtcactgacctgtccgggtctcaagtacatatctattaaattagatg

SEQ ID NO: 351951 - DNA, 122 bp, Homo sapiens
cccctccccgcccgccccacccgggaggcgcacacccacatatccggggaagcctcccgccgccccgccaaccttcaaacgcacaagggccgtgcaagtgcacacgggctacgccgagacct

SEQ ID NO: 351952 - DNA, 122 bp, Homo sapiens
ttccttggttataaatagccttagtgtgttggctttctcacatgccatgtgtaatagtaacgaacaggtcacgtgggcagactcagggcctcctggttagccagggtgatgcaggtaatggt

SEQ ID NO: 351953 - DNA, 122 bp, Homo sapiens
gagtccaaacgtgatttagctgggtcctctgctcagagtttcacaaagctgcaagcaaggcgttggctggggctgggcttttatctgaggttcagatgcttcttccaagatcacatggttgt

SEQ ID NO: 351954 - DNA, 122 bp, Homo sapiens
ctttcctttctgctctattttaagtttctgctaacttgtccccgaccccacaactgctcacgaccttcgtgaaggtcaacctttcctaccgcgtggagtgagttgggatgcatactggggag

SEQ ID NO: 351955 - DNA, 122 bp, Homo sapiens
aagagtgacagacaggctccataaccagtagacgtagaaggcagaactgagtggcgggtacggcacccgatggctattcgagctctcgatctcggagactggagcgggccattcagaggcgc

SEQ ID NO: 351956 - DNA, 122 bp, Homo sapiens
actgagcctttagcagaatggtttcaagattgttttcatttattgcctgttgagaaaagccgcaggaaaatgtcaaagtagtactcaatgacatgttatactagttttaagcaaaggggtaa

SEQ ID NO: 351957 - DNA, 122 bp, Homo sapiens
catgtcgcccacgctgatgaggtggatgtggtcgatcacgctgccctccttgatgcgctgcgggggcggggagtcatcagcccttggggctctgccctggtttccggggtcccatggcccac

SEQ ID NO: 351958 - DNA, 122 bp, Homo sapiens
cacccacacatgggcacaatcacccccacacacatgggcacagtcacccgcctgcacattcgggcaccgtcaccccccgcaaacgggcaccgtcacaccccgcaaacgggcacactcacccc

SEQ ID NO: 351959 - DNA, 122 bp, Homo sapiens
ctccaccttctgggtgtgtgggcctcgtagcgtgcggcccattgcccgggcaaccgacgccgtgagcggtgcattgtggtctgcaacaaaatgcaggagaaagatcctgagggaaccatgga

SEQ ID NO: 351960 - DNA, 122 bp, Homo sapiens
cccgagaggcgcccggcactacggtttccttgtgcgctgctggaattttcagggttggagcgccggccgcgtaggggtggcagtgaggccgcgcagtgaggggacggactcgcccgaggtcg

SEQ ID NO: 351961 - DNA, 122 bp, Homo sapiens
aatggatgaggggtggcagccgaggttgccccagtcccctggctgcaggaacagacacctcgctgaggagagacccaggagcgaggcccctgccccgcccgaggcgaggtcccgcccagtcg

SEQ ID NO: 351962 - DNA, 122 bp, Homo sapiens
acgcaacgcatccggttaaacgtatagcgcaactgcgaacacgctcgcgtggattagaagcgaaagaagagaaatgcccgaggcagaaacccgctctgagtcccggctccatctagacccgg

SEQ ID NO: 351963 - DNA, 122 bp, Homo sapiens
gaagtgtcgatgagggaccccgctaagggcactcagagctggaagaggtgtggacgaggccgctcggtgcagaccacaggtttttagcagaaccaatctgcacagttctttgatttttatcc

SEQ ID NO: 351964 - DNA, 122 bp, Homo sapiens
ttcaactggcagaattaatgactcaatagcttcagttctaataaggttaccaaaccagtccgccaagtaacatatcttaaagaaaaaaaaaggtaaaaggagaaataccagagaggacattt

SEQ ID NO: 351965 - DNA, 122 bp, Homo sapiens
tagctttcgttcattagacctttgcggtcaccttaggagagagggaaaggggagtttggtcgtcaactcctccgccctcagcgctcactgagggagctcaagcctgagaacccaacaccgcc

SEQ ID NO: 351966 - DNA, 122 bp, Homo sapiens
ttttgtaatgccataagaatctggaacagttccagaaagatgtaaaggaaaatgatccgccgacaagttcgctttcaggaataaaacatgaaatgaagtgataacagaaaggagaagaggag

SEQ ID NO: 351967 - DNA, 122 bp, Homo sapiens
tcccgcactctgcagcctcagctccacctggaagcgcctcttcccggacactcccgttcccgcctgcattcccgtccaattcgactcccaaatggtgtgaactccctttaccagagctgtct

SEQ ID NO: 351968 - DNA, 122 bp, Homo sapiens
cccacgagtgaggcctctggttgcccgcaacctaaggggcatcgcagccccgagcaacaccgcccccaccagccttagctgagtgctcccattggccagaggccagcgggtgggggctccca

SEQ ID NO: 351969 - DNA, 122 bp, Homo sapiens
tgcaggccgaagcctttgacagtgttaccatctacttcagtgacattgtgggtttcacagcgctgtcggcggagagcacacccatgcaggtaggccagggttcagccacaggtgccaggcaa

SEQ ID NO: 351970 - DNA, 122 bp, Homo sapiens
tggaactgccctgtgaacaaaggttgtcttattatgcagatatagtcagccctccatatccgcagaggattggctccaggatcccctgcagataccaaaatcactgggtgctcaagtccctg

SEQ ID NO: 351971 - DNA, 122 bp, Homo sapiens
cctgaaactgcacgaggtcacctctcctatccccgtattccgtttggatccttatgccaacgtgttaggaaggccccctctggtgggttttgtactgtctctagcatttgacacttaatatt

SEQ ID NO: 351972 - DNA, 122 bp, Homo sapiens
tttttgtcagagctctctggactcccagttcagccttatgtccatcgtcttgcgctgtcacgtggcaggagctggaggcttcagtctttgttctcagcctttgctagcacaggtgtccccca

SEQ ID NO: 351973 - DNA, 122 bp, Homo sapiens
cccgaagacccggagaagtggaccacagggggcggccagtgtcaggggtcgagtcctccgcgctggccgcggttccggagatccgggctttgccgagcgccccgcgccgtggccggggccgg

SEQ ID NO: 351974 - DNA, 122 bp, Homo sapiens
cggtgagacccctcagccgagactgcagagcctttttgtcccccacaattccgggacgcccggtacccgatggggtgcgccccaagcaccccaatgaggagccccaatggccgccccgcccc

SEQ ID NO: 351975 - DNA, 122 bp, Homo sapiens
gatatcacaatgtctgttaatcaccattttacaaaagagacggaggttctgaggggaccacggagttcacactatgaaaagaccaggatgtacaggtgcctccccccaccgcaccccgagcc

SEQ ID NO: 351976 - DNA, 122 bp, Homo sapiens
gaagacgctccttggcaaccgcaccgtagggtaatgatgcaggaggaacgttgtccaaaacgtcagattttgaacaaaatgaccgtgaataatgtattcccaggcactgcttcctgggcagc

SEQ ID NO: 351977 - DNA, 122 bp, Homo sapiens
atcctgcgctcgcccgcggtgtctcggcaagcggtaggcttgtcgggaagagctggagggcgcaagtgcggcgctggccggacgtgccgcaccgtcagcgcagggctcgccgggaaatgtgg

SEQ ID NO: 351978 - DNA, 122 bp, Homo sapiens
cttgtgatgacgagcacaggtccgcctgtgtgcccgtgggctgctctctcaccggtggctcgtagtcgcgtaaagcagaagtagcagtttcagcggctgacactaagaacaatgcatactgg

SEQ ID NO: 351979 - DNA, 122 bp, Homo sapiens
aacaagtctcttttcaacatattctgctattctgatgcttgcctttgacgttgtcgttcacgtgaaaaccaaacattgtaaaatgtgtatgttaaagggaatttggaaaatagaaacacaaa

SEQ ID NO: 351980 - DNA, 122 bp, Homo sapiens
tgagattaaagctcatgatccaaaaaagctgcaactcttagagcaggaaagggcaggaatcgggtttccttctgacaaggtttagaagagcaagtctggtgcaatctgcccttgtgaatggc

SEQ ID NO: 351981 - DNA, 122 bp, Homo sapiens
caggatgcgcagtttaggctgggattcctgcaatagaaaagcggagctcgacggtcaaggcgtcagattgcaagtgtccatcaccctgcctgtcccaagggcttgggacaacgtcttaatgg

SEQ ID NO: 351982 - DNA, 122 bp, Homo sapiens
gttcaaagtacatgctttttctttctatccaggtcttgtccttatactgaatttgcagctcggtaagtcatggactccatgttttatcattgaatgtatatatacgagataaaccatactat

SEQ ID NO: 351983 - DNA, 122 bp, Homo sapiens
tggagcatttaacatgggccaggttcagtcttaagtgcttaaaatgcataatctcattctcgcctccccaaatcctttgaggaaggtattctttttttttttcttttcttttcttttttttt

SEQ ID NO: 351984 - DNA, 122 bp, Homo sapiens
aggcgagcgtgtgcctccccctgccggccagggaggcactgcggccccgaaacggccaggcggtgagtggaacccacgcagcgcctagagacgcacccctgccgggcccccgcccctcccgc

SEQ ID NO: 351985 - DNA, 122 bp, Homo sapiens
acaggagtatattgtctgtcagtcctggaggccagaagcctgagatcaaggtgtcatcagcgtggttccttctgagggctttgagggaagaatctattccatgcctctaccctagcttctgg

SEQ ID NO: 351986 - DNA, 122 bp, Homo sapiens
aaaaaaaccatcatcaccatcgttactgaaaggagactcaagggtcagtgtggccctcagcgcagacgtcgggggaccccggctgagggtcgggggcgaccaaagcgcggccactggtcctc

SEQ ID NO: 351987 - DNA, 122 bp, Homo sapiens
agttgacagatggagtcagtatcggccctggggagggcggccagggaggctccgagcagccgcacccgcagcagcaccactcggcccggcgggccaggaggaggaagggggcgcggaggggc

SEQ ID NO: 351988 - DNA, 122 bp, Homo sapiens
ggaatcagctctcagaattccacaccaaggccttctgggctcccccggtcttcccacggacgagacacaagtgacccttggaaacttctagagaaatgaaaggtgaaatgacaaattcccct

SEQ ID NO: 351989 - DNA, 122 bp, Homo sapiens
aggtacactttacaaactaccattatatatacaagctttagattgtgaaataatgcacttcggctttctccggtgtacattacaattacaaaccctcaactcaacctcccccttcgttgaaa

SEQ ID NO: 351990 - DNA, 122 bp, Homo sapiens
ggcacacggggcaggtggtctcctgctgcaggcactcggccacactcccggaggccatggcgccggcctgcgggggcgcacgggcatgggccccggcgccgagctctgcactgagcccaact

SEQ ID NO: 351991 - DNA, 122 bp, Homo sapiens
atcttgtccttctctttattctaaaggatgggcaagtaaacactgtcatcactactttaacgtggaaacactcgagcacttgatgaaactgactaccaacagcaagaaaagtacaagaaagc

SEQ ID NO: 351992 - DNA, 122 bp, Homo sapiens
tctttttcatgttcccagtcattttgcttcaggtgctcattttgaaggtatttagggagccgcagttgtcttctacgaggctgtgttcttccatttcatggtattcgttagtaaataaaagt

SEQ ID NO: 351993 - DNA, 122 bp, Homo sapiens
cttcccaccttcacatttctcttccaatcaactgctcaaaaagagtcaagttttggaaagcgaatacaagatggctatttttggtacaatacttgaaaaatcataattgagatgaagattta

SEQ ID NO: 351994 - DNA, 122 bp, Homo sapiens
ctctgcgctggaatcagtcactgtcagcgacagacccctcggggtgtccatcacaaaagccgaggtgggttctatcacaggtattcattctttcggcacatgtttcgctcgcagccactgtg

SEQ ID NO: 351995 - DNA, 122 bp, Homo sapiens
ccctggacagaatggggacacaacagggcctggagccctgggggaggctgcaaggctgagcgcatccggggacagactcccggctgactcctgtgggaggccggcgagcagcccggtgccag

SEQ ID NO: 351996 - DNA, 122 bp, Homo sapiens
aaaaggcagagtccaattccaccggcccccagtgtgggtgcagtgtgagcccaaagtgggcgccctttggcaaggactgcatgagctttcttctccctctttttcttgccctctctcccatc

SEQ ID NO: 351997 - DNA, 122 bp, Homo sapiens
ctgtcctctgcgtagtgaatctggattcccgtccctgttcctcggcggagcctgcccagccgtcgttcctcctggctgggtttttgtgccaaggcgtggaggtcatgcctcgtgcatgggag

SEQ ID NO: 351998 - DNA, 122 bp, Homo sapiens
caaaaggagatcatgtacagacattgtactgggtctttgggaatgccgcaggggatcctgcgggaacagcgagaaagagggagagaggggctcgcagttacaaaagaaggttcgggtggcgt

SEQ ID NO: 351999 - DNA, 122 bp, Homo sapiens
ggaggctgagatgggagattggcttgagccaggagttcgaggcagcagtgagtcagtgatcgcacccctgcattccggcccgggcgacagagcgagaccctgtcttgaacagcaacaacaac

SEQ ID NO: 352000 - DNA, 122 bp, Homo sapiens
gtgcctgtgagcagcgcctgcctcggggtctgcagcagcagcggaacggagaggccagcccggatcagggcccatgaaggtaaatgcgcgacttcttggagaagtagctttggcagacaacc

SEQ ID NO: 352001 - DNA, 122 bp, Homo sapiens
ggaaaaatagagaaggaagaggcttttatggtctgaataactgtttgactgcacagtttccggacatacgtactgggtatgttatcccaggtagtgattcaaagccctaactcccagtgagc

SEQ ID NO: 352002 - DNA, 122 bp, Homo sapiens
atgttccattggcagcagtcacctggccaaggccaagtcccagggcaggaatgtgtactccgtccaccacagcggggaccctgcagaaccccatggcacaggtcagacaggcaccaatctgt

SEQ ID NO: 352003 - DNA, 122 bp, Homo sapiens
tccctgatgcgcacaaatgcgggtgcagccgggctcagcgcgctcctcaccgcgctgcaccgccagctctgggcacagaacttggggctcacacagctcctagagagatttacaacctccct

SEQ ID NO: 352004 - DNA, 122 bp, Homo sapiens
aaggtcccgcacaacagcctggtggtgggtgtgggcgtcaggggagacctggggcggccccggggagaggcccacgcagaacgtgcagaagcctcctcgccggagggacagcgggagggaca

SEQ ID NO: 352005 - DNA, 122 bp, Homo sapiens
gcttgcgccaagggcgggggctgggagcgggggcagggtcactgccacccaagtcgtccgcgccggcggcaccctcctgggcggggagggaccgggtccacccagggtccgggaccccgccc

SEQ ID NO: 352006 - DNA, 122 bp, Homo sapiens
acctcggccccaggcactacgggtcctgcgggtcccgcgggtcccggattcgaggcgaagcggcccagagcctgcggctgctcagacctcctcaccgcgcccacctcccagccacctcctgg

SEQ ID NO: 352007 - DNA, 122 bp, Homo sapiens
gtgaccgggcccggggtgccggctggggacgcggagtccgtggggatgcggggtgggcggcggggtatttttgggacggaggcctacgggccgagccacgcgcggcctcgcccggcggcccc

SEQ ID NO: 352008 - DNA, 122 bp, Homo sapiens
gctgctggaggtgagggtggggtccctggaccctggctgctcacagctcacactgcacatcgcacccctctgctctgcagtgcatcctgtcctgcgggacgcccttgctagcggggtaccgg

SEQ ID NO: 352009 - DNA, 122 bp, Homo sapiens
ttgatgagccccccactccctaggtggctatgcctgtgcacccctaacacatgagagccacgttaggatggtgtctgggtcccttgtcattatttgggaggtgcagctgagcttcctggtag

SEQ ID NO: 352010 - DNA, 122 bp, Homo sapiens
aattccccggtgccagccagggaagctgcttgtggtgcgtctggtccagccatagccttgcggagagctggtacctatgccagcaccctgagctgcccaccctgctgcagcagccagcatgt

SEQ ID NO: 352011 - DNA, 122 bp, Homo sapiens
gcatgtagacagattttagtcccagcagataagcacacccaacatgtcattaaacccggccgaagccatcgccctggggatcccgtgtttgctgtgagtcactaagggctgtaaacactcca

SEQ ID NO: 352012 - DNA, 122 bp, Homo sapiens
tgcctgaacggtctcagcaatgggagctcattatttcacaaggcgagctgcccaacccagcgtaaccacaacgacaacaatcacagtgacaccatgtagggaccatacattgagcatttctt

SEQ ID NO: 352013 - DNA, 122 bp, Homo sapiens
ggcccctaaactcttttccaagccatcgttgcatttagcctttgcagcaaaagtgtgcatcggagaggagacatgaccctccttgcaatacagggaaactaagtctcccacaggtgaaagga

SEQ ID NO: 352014 - DNA, 122 bp, Homo sapiens
gtgcgcagggcttcgaactcatggaggcccccggggagtgctgtaagaagtgtgaacagacgcactgtatcatcaaacggcccgacaaccagcacgtcatcctgaaggtaggtgtgcactgc

SEQ ID NO: 352015 - DNA, 122 bp, Homo sapiens
agcgcggcacaggcctgcctcctaggtgttcgggtcgagatttacagcggagtctcatcccgggacgtgtgagtgcacttcagcgcaggactgccctggactggggagaccggagccgcgat

SEQ ID NO: 352016 - DNA, 122 bp, Homo sapiens
tacgtggcaggggattggagtttcctttcatgaggattagacatgaaatgaaatggcgttcggctgcttagagggctgactcaagtcagttcctgtttggtatgtgtaacattaacagatgt

SEQ ID NO: 352017 - DNA, 122 bp, Homo sapiens
tattcttttgtatggtttattttacttatgttggtttcattgtacagaattttctgctctcgtggagagaagtcttccaggaacaagtctccttccccgattggtattgtatccagatttgg

SEQ ID NO: 352018 - DNA, 122 bp, Homo sapiens
cgtggggcagagtgcacccgcagggctggggaacgggctcgtgcggctggggagcaggctcgtagtgaccggagggcatagtgactggagggcggggcgccctggttccctcgggaggatgt

SEQ ID NO: 352019 - DNA, 122 bp, Homo sapiens
cggaggtcgctgggaggtggcttcttcgttgaacttctagagcgccactgctccaccccccgccccccgccccgcgcatctcagccgacccgcgcaatgtgctctctcggtcctcactcaag

SEQ ID NO: 352020 - DNA, 122 bp, Homo sapiens
ggcctgcagcccccaggccgacagttagctgcagctgagcagttcccagtgccaggtagacggatgctccagccacctactcatggctgatctcttgtcatagtgaagtgtctggacagacc

SEQ ID NO: 352021 - DNA, 122 bp, Homo sapiens
tttaccagaaaatattacaggcttaagggaacgtgggcggggggtgcagagagggagcagcgctgcccccatatctctgaggctttgtcaggggctgcgtgggtgagagctttctgctgcct

SEQ ID NO: 352022 - DNA, 122 bp, Homo sapiens
actcctgctgttactcctcctctcctccccttcatcactaagtatctgccatctggcttccgcctcatcattctactgaaagtggaggtcacggtctccaaggcctgtgctcaggccaaaag

SEQ ID NO: 352023 - DNA, 122 bp, Homo sapiens
ccagccctaactatctttcaaccgttcttccagtctctatgtccatgagttcaattgtttcgatatttagatcccacaaataagtgagaacatgagatgtttgtctttctgttcctggctta

SEQ ID NO: 352024 - DNA, 122 bp, Homo sapiens
ctcgtggtgtgccgttgttttagcccgtcggaaaagcgcagtattcaggtgggagtgacccgattttccaggtgccatctgtcacccctttcttcgactaggaaagggaactccctgacccc

SEQ ID NO: 352025 - DNA, 122 bp, Homo sapiens
caaattttccgtcactcagggcatgaagggtggggcctcaaaccttatccaatcaggggccgtgaaatagaaactgtccaatcaggaatgcagcgggagagaacaggacgcttccgtaaggt

SEQ ID NO: 352026 - DNA, 122 bp, Homo sapiens
cgagcccagcactcctgggccacctccctgtccggtccgttgaagaagacctagaactcccgctagacagctccgccccaggctcttcccaagggacatccccggctcctcaccgcggactc

SEQ ID NO: 352027 - DNA, 122 bp, Homo sapiens
ttatctgtgctgccctctcagatccacccatgcgtcacaggcattaatctataccaaagccgtttggctgtgtgtttcagatttgccctttatgttcttctgacgactctttgagacaaagt

SEQ ID NO: 352028 - DNA, 122 bp, Homo sapiens
agggctgattacagaggacggaagcccaggagccccagggcctggcatcagctgcaccctcggcctccccaggccccaggaagccaccctgcacctctgtccctgtcctcgggatgactgac

SEQ ID NO: 352029 - DNA, 122 bp, Homo sapiens
aactgaacacaaaggaatttgatggatttgatggaattttcacagaacagtataggtttccgtgggaagctgggaccagaatggcatctctgacacctggctctgtgtggtttttctccctt

SEQ ID NO: 352030 - DNA, 122 bp, Homo sapiens
tttccggcttcttctgagctggcggaagatctagcacaagcctgtgttctaccctgaccacgatgggccggatctgagcagcagctggggggtctccacttccccacagtcacctccatctg

SEQ ID NO: 352031 - DNA, 122 bp, Homo sapiens
gctgcacagggatgggggcgggcggggcctcccagagccgccaggcgtcccgccccactccgcccacacgcacggcccagcccagggttccccgggaccaccccagaccagccccggccccc

SEQ ID NO: 352032 - DNA, 122 bp, Homo sapiens
gagacggggtttcaccgtgttagccatgatggcctcaatttcctgacctcgtgatccacccgcctcggcctcccaaagtgctgggattacaggcttgagccaccgcccccggcctggtaagc

SEQ ID NO: 352033 - DNA, 122 bp, Homo sapiens
ttgcaacatatatagcaaacacttgttgtcttgttttccaatgtgttgcctcctggaagccgctgatacagaagcctgagggaacacactcccccctacgtccttctccaacacagcagagc

SEQ ID NO: 352034 - DNA, 122 bp, Homo sapiens
ctgctgaaaaagaactggacgccaggaaattgggggttgagtccgaagcaaggtgaacgccggacatcgagacatggaatcctagaccggcccggaagtgcctctgctccgtccgccttcga

SEQ ID NO: 352035 - DNA, 122 bp, Homo sapiens
gggtaagcgtgtgcgcaccttgcgccgggcgctgcagggagtctccagctcctggaggtgcgcactcgctgggcggccgccctttgaaggcagctctaaccttgccggccgccaggcgcccg

SEQ ID NO: 352036 - DNA, 122 bp, Homo sapiens
accttcacccccagcccctcctggagggtctctccagaacaactgtaactttgtaccccacgacaaccacagcgttcactcctgccacacacagggctacctgggagaggtttgttcagcag

SEQ ID NO: 352037 - DNA, 122 bp, Homo sapiens
aaggaggttaaatataatcacctaaaaggaacttgggaaaagatccttgaatctgaatggcgtctataaagaagtattatacactgtcattcttgctgtggcacaaccctgggaaaacattt

SEQ ID NO: 352038 - DNA, 122 bp, Homo sapiens
gtcgggcgcccgctctgagagtcggtttcttttccccctcttgcgtggggcggggtggtgcgttccgagttcccaggagttcgacgcgggcgggtgccgaggggaggggagtggcggcggcg

SEQ ID NO: 352039 - DNA, 122 bp, Homo sapiens
tcttctgccggaggagggggggggccgagggggtggggaagagttcgttgtttgtttacacgatgtgagcggaaaaagagaccaataaagtttattctggaaacaaaaggaaaaaaaaacag

SEQ ID NO: 352040 - DNA, 122 bp, Homo sapiens
acctgcggctgcgcaaagcggccaaggccacggtgtttgtgagtctgacccacgttcagccggtcccctcctggagactccctcacaaaatctttccccaagctgttcccccttcccagtgt

SEQ ID NO: 352041 - DNA, 122 bp, Homo sapiens
caccctcagttcataactgatatactgctagaagttgagggtcaaatcgtggcaacacaccgtgcacttcaatggcattgttgagcatgaaacaactctgatagagccagaaattaagattc

SEQ ID NO: 352042 - DNA, 122 bp, Homo sapiens
cgctcatcttttcccgttttgttttatgttttggtttggtttgatttttcctccactgagcgcaaaacagaatcagccgcgactctggctggcctggagagcatccattatttaatgaaaaa

SEQ ID NO: 352043 - DNA, 122 bp, Homo sapiens
gaaaaaacagacccaatgtgtatttaaaataatggaaaatgtctcatttgtggatagcgtcgcttagtcaatgctgagatgcgtcttgtggaacagaatttttgggacatttgcaggtatgt

SEQ ID NO: 352044 - DNA, 122 bp, Homo sapiens
ggagcaaaagggagtttaggtggttccggtctggggagaagacgtgcagggtttcagatgcgaaagtcgcacccaaccgcttcactcgggctctaggccatccgcaggggccctgcttcctt

SEQ ID NO: 352045 - DNA, 122 bp, Homo sapiens
gggcttacacccgaggtccctctttggggtggctctttgctaagtgctgctgttgcttcccgtgtagaggtgagtggctgtcggcggccttggtgccttctgttagccagactggtcgcgct

SEQ ID NO: 352046 - DNA, 122 bp, Homo sapiens
tccgtgtgcacctggctcagtgtctgcatgcacatgtgagcgctgcaccctcatgcagggcgctacccgtgtgtcagtggatatggaagaaggaggtgtgaaaagctttgaggacacaggtg

SEQ ID NO: 352047 - DNA, 122 bp, Homo sapiens
gcacatgacttgcttctctattttagaaacagtctctcctgtacctgctgtatgttccttcgaggcagtgtctaacaatgtggtgtatttaacttgtttgtttttggtttctcccagtggaa

SEQ ID NO: 352048 - DNA, 122 bp, Homo sapiens
ggcgcctctgccccacacggctttgctgaggagctgagcaagtgtgtccaggtgcgggtccggcccaacaatgtgtcagtgacgtcacctggggtgcaggtgagcagcttgggggtgcccgg

SEQ ID NO: 352049 - DNA, 122 bp, Homo sapiens
gggagcgcgccgcccgggagtctggcgggcagatcttggcagacacctgtcaccttggcccgcgctaccttctggagattttccccagtgacgactgagccctgggagtagtgacaatgagt

SEQ ID NO: 352050 - DNA, 122 bp, Homo sapiens
tatcagaatgttaatgattagctgctgctaaatttggtcaaagaagtcacctacacagagcgtgttgttagagctgtgctgagcgggtgtttgggttgttggctgctttcttccccctttct

SEQ ID NO: 352051 - DNA, 122 bp, Homo sapiens
ctccgacaagactggtcccttcttgtcattaggccctaggcccgcagccctccgcggccccgacctctaggaggtgcccagcaccaacaggccgaccctatgctccctacccagccctccgc

SEQ ID NO: 352052 - DNA, 122 bp, Homo sapiens
ttgatttacagcttccacccccagtttccattctcccctaaagcactggattcaggtaatcgcggacgcacttggctcctcccgcactggccgctgccctcggcgggacaatgggcgcccta

SEQ ID NO: 352053 - DNA, 122 bp, Homo sapiens
aggaggtggaacaatgaatttatagcggcatgccatcctgcaatggcaatttcaacagttcgtcactgcacgctgcctcttaaagggagagcttcccccaccactcccacccttcccagtcc

SEQ ID NO: 352054 - DNA, 122 bp, Homo sapiens
ggggtctgggccaaggatcaagcaaccccacacagtgcccatgggttagcaagtcactcccgcaacagcactcaagtaccctaagtactcagtaacccacacttccccaagttatcatggtc

SEQ ID NO: 352055 - DNA, 122 bp, Homo sapiens
gcgacccggcggggccaggcacgggcagaagggccaagagggccacaggtgggcgcggagcggccggagtgggcggggactggatgagaggggcggggtctaggagagaggggcggggcggc

SEQ ID NO: 352056 - DNA, 122 bp, Homo sapiens
gagggagggacgacccgggggagggcgggacctgcagagccagctcctttccagtagccgcgaccccctgccgccagcgtgacacacaagtctttaaaaggctctctgctcaggggagagaa

SEQ ID NO: 352057 - DNA, 122 bp, Homo sapiens
cctctttggcagaacataatctccatgaaggcagggatttttttgtctgctttgttcactcgtctgatgtctagaaaagtaccgggcataaaataggcattcaattaagtatttgtagaatt

SEQ ID NO: 352058 - DNA, 122 bp, Homo sapiens
atttattttagaatctttattgttagcacagaaactagccttttacagtgctcaaaaaaacgtcttaatgctggaattttgctgaagaagtatttggggttaaagcattacaattggcaagc

SEQ ID NO: 352059 - DNA, 122 bp, Homo sapiens
aagtgccaagcagcacaggggcagtagattggtcaggagagccatggatacagcggacctcggccaaaagggagcgttcttgtcctcactaactctcctgtcagttaggcatctccacaggc

SEQ ID NO: 352060 - DNA, 122 bp, Homo sapiens
catgccagagagaaaagcagtagaggtcctccatgccagccccacggtggtccatgactgcggaactgcccagacataagcaggagcctccgaggaatccaccctctttctagaacactggt

SEQ ID NO: 352061 - DNA, 122 bp, Homo sapiens
tgcccgccgggtgcagcggcgtgccggcacggggccgtacctgcggtggtcagctggccccgcaggcgccggatctccatcatggctttgtaccgcagcccgttggcttcgcaaaactgggg

SEQ ID NO: 352062 - DNA, 122 bp, Homo sapiens
ccaactattgagtggactggaactgaccaactgcttacagctaacgaaatgtgacgtctacgtgtagttgttccttcctaacctctttatactctgctttcttctttatgccttcctacttg

SEQ ID NO: 352063 - DNA, 122 bp, Homo sapiens
cctccaccctgctgaaagggtctcctggctgcatcgcagctaacatcccttccttcctgtcgggcagccagagcagctgagttccagataaaaactgtcagacccggcctgtaggctgctcc

SEQ ID NO: 352064 - DNA, 122 bp, Homo sapiens
ccaactctcaattgagaagaacatgacttaagatttccattggggccatcatatctcaagcgctggagaaagacaaggggtggaaagacatataaagggggcgggagggtgagttgctcatc

SEQ ID NO: 352065 - DNA, 122 bp, Homo sapiens
ttgcaaatagcgaaatatataattaaggagagttcgggggcgtatcctgcaatgggatgccgagttcgataaagttgcaggatgctgggaaagtggattgatttgctgttgctaaatgaatg

SEQ ID NO: 352066 - DNA, 122 bp, Homo sapiens
ttctccttgtttccacatatttacatctgctgtaaatctacttaatttccccagattattcggtagtggagagttctagtcaaaatatcacataggcctaaagctctggctgggaagatcat

SEQ ID NO: 352067 - DNA, 122 bp, Homo sapiens
cctcccagtcgggttgcggcggaggccgttcctggctttgtagctcgctcaagatggcggcgcagccaccccgcgggatacgcctcagcgcggtgagcagccgcgaggggtggagcgggccg

SEQ ID NO: 352068 - DNA, 122 bp, Homo sapiens
taagggctcacaactctaagggggtgcacgtgagaaggtcgtgattgattgagcaagcagcgggtacctgactgggggctgcgtgcaccggtgattagatcagaacaaaaccagatagggat

SEQ ID NO: 352069 - DNA, 122 bp, Homo sapiens
gtatagaacctacctcataggattactgtgaacaacatctggttaccctttacttgtaagcgctgaacgtgttcattataacgtgtcaaccagagtcagagagaccgaaatccaagtaaaga

SEQ ID NO: 352070 - DNA, 122 bp, Homo sapiens
ggagggagcggctgctgcctgcactgacctcagttgctatgacgcactcatccttctcctcggatatgacgtacaccgactggtacttggtgtcttttgaagttgaacagcccgagtccggc

SEQ ID NO: 352071 - DNA, 122 bp, Homo sapiens
ttttttttttttaatttgccctgtcatctttgggggctgtctcccatgtcgtgattttgacgtgatctctccgtgacatcaccgcgccatcgtgaagtgtgatctcatcgccgccctgtcgt

SEQ ID NO: 352072 - DNA, 122 bp, Homo sapiens
gagtgctgtgaggctgagacacagcccggcttgctgacggcacaaatgccggtgcgccctcggcacagtttgtttgcttcatcgggcggagaaggccgagttccagctcagggagcccacaa

SEQ ID NO: 352073 - DNA, 122 bp, Homo sapiens
acccccggcctccaggcatgggcgcccctgcggtgcagagcagctcagggccggctggtgcgcgaccccggaaagcgggggtggagaggcgagcggagcccgcggggccaggtgaggggctg

SEQ ID NO: 352074 - DNA, 122 bp, Homo sapiens
gccgcagggtgaggtgcggacgtgcgcacttctccaacccgggaaggtccgccagccgcgcggcgcagcccacccagacgctggtgggctggctttcctagtttgatgcgagagcaaactgc

SEQ ID NO: 352075 - DNA, 122 bp, Homo sapiens
gatgaattggatcaaatcttgagaggagtaattttaactgccatgtcccagggaacagctcggtccccagaggctgctcttgtcttcagaccttatcttacccaaagcctctcccaaagagt

SEQ ID NO: 352076 - DNA, 122 bp, Homo sapiens
cttgaggttccagccccgccctctggctcctccccgacactctctccccgccccaggctccgccccgagattgcagcccagtccctaggcccggtccccgacctccgggccttcccggacat

SEQ ID NO: 352077 - DNA, 122 bp, Homo sapiens
gggcgtcgtcttccacggaactgctgcagaatcatcgttggaaaggaactctgagaccatcggatcccaaaactcagtccaccgactggggaccagggtacctgccctatgccacacagaaa

SEQ ID NO: 352078 - DNA, 122 bp, Homo sapiens
gtccaaaccgtgcatcccagggtgaaatcccacccgtaccctcaagagctggtcagactgcggctcttttctaatatgagtctacctaaaatagaaaaataaacacaaccacagaccctggc

SEQ ID NO: 352079 - DNA, 122 bp, Homo sapiens
gacccatgggactcctggatcttggttctggggccaaggaatacgaggttcacacggcgacgtgcactcagaagcacctcccgagcagatcggagccccagcctcgtcagtggcggaattgc

SEQ ID NO: 352080 - DNA, 122 bp, Homo sapiens
atccagttatgaccacagtttgggacgtttgacgtctgcgtagatacacacaggtgcagccgtccatccagttatgaccacagtttgggacgtttgacgtctgcgtagatacacacaggtga

SEQ ID NO: 352081 - DNA, 122 bp, Homo sapiens
tgtgactggaaacagtaactccacgttcatctccagcgggcaggtgatgaacttcaagggcgacatcatcgtggtctacgtcagccagacctcgcaggagggcgcggcggcggctgcggagc

SEQ ID NO: 352082 - DNA, 122 bp, Homo sapiens
ctggcctggcaacagctgcggacatcttcccgccagtcttcaaactcaaacctcccggcccgccccggaaccatagagttctccgtggcttaagtaacccgaaagccatagactcgtgggga

SEQ ID NO: 352083 - DNA, 122 bp, Homo sapiens
gccacgggacttggaggcaggggcggggtccgaccgagccgccccgccccgcccgggccacgtgacttcacctgcttgccccgcggccccacgaaaagttggcccgcggcgacttcctgcag

SEQ ID NO: 352084 - DNA, 122 bp, Homo sapiens
aaaattaatttttagaagtagaaggttctatatagagatttgttctgtttgttcttcgttcgttcaatatttgctgaatacctattatgtgccagatgctggtaggtaccaggaatacagct

SEQ ID NO: 352085 - DNA, 122 bp, Homo sapiens
acctcaggtgatccgcccaccttggcctcccaaagtcctgggattacaggcgtgagccaccgcgtctggcagaactcctgatatcaagttatccacctgcctcagcgtcccaaagtgctggg

SEQ ID NO: 352086 - DNA, 122 bp, Homo sapiens
ggcgccgccagcaggccaggcggactgggcggggctccgagcggggactgggacccagaccgactaggggactgggagcgggcggcgcggccatggcgggctgctgcgccgcgctggcggcc

SEQ ID NO: 352087 - DNA, 122 bp, Homo sapiens
gaccatgttattttcctgttggacatacactgtctcacaggacatcaacagcagacagggcggtgctagtctatgataaggtaagacaaaaaacggctgtgtgcaaccaccaaaataccact

SEQ ID NO: 352088 - DNA, 122 bp, Homo sapiens
gtaaacttacgtagactcagactgaagcctggtgctttgggccattgccgctgccctaggcgactctggccttggggtgcagtcctgtgtgatgcatgtgctgtggctttccagttagcttc

SEQ ID NO: 352089 - DNA, 122 bp, Homo sapiens
cgtctcgaccctttatttcgagcctggaagctgggcaggccctgtggcaggggatgtttacgtttgggggtgtcgtttctcgagtagcgcctcggtctctaaaagccactgggggcgagcct

SEQ ID NO: 352090 - DNA, 122 bp, Homo sapiens
cccttctgtgttacagaaccgcccgacctctcctccataattgagccgatcacagaggagcgagcctctcgaactctgtaccgcattgagctgctacggaagatccgcgagcaggttctcca

SEQ ID NO: 352091 - DNA, 122 bp, Homo sapiens
ggggatgcaaaatggtggaactggaactgctttagaatgcaattgggcagcttctacaagcgttaagcctatatccacctacggtctgagcactgcactctcagctacttcatggaaagcac

SEQ ID NO: 352092 - DNA, 122 bp, Homo sapiens
gaaagaggcggggctgtgtgggcgggacggggcagtgggcggagctgagcctgcggggcacgtcgagcaggcggggtcgcagcgctgacggcctctctgcggctcccggttgggggcgtggc

SEQ ID NO: 352093 - DNA, 122 bp, Homo sapiens
tgatgctttgctgggcacagtataaaatgcatgaagccagttcgtgcctcaccctctgggcgttcgcaagcgaaacgagagaccgggagactgagcaatcagcctgtgtgaacgctggctat

SEQ ID NO: 352094 - DNA, 122 bp, Homo sapiens
cgggggggcggcgggccccgcaccggcctccccgccgcccgcccgcccgcgggcaccgcgcgccccgcccgtcccgcctccgccccaccgagaaccgcgcgcgccctatcccgcggcccaaa

SEQ ID NO: 352095 - DNA, 122 bp, Homo sapiens
acaaaataacaaaaacccagtctaccaagccaccacctgaggccctgtctcctcctcgcacggtccccatttgaggttacagagagataaactgaggcacaagcagcacccgcggcccaaga

SEQ ID NO: 352096 - DNA, 122 bp, Homo sapiens
cagcccaccttcctgccctgggtccccgagcgcgggggtggcgagttggacctggtagtgcgggagctgcaggcactggaggaggagctgcgggaggctgcggagcgcaggcgggcggcctg

SEQ ID NO: 352097 - DNA, 122 bp, Homo sapiens
tagcgggcaacacagaggtggaccttccccgagtatctctgcttggaggtattggaattccgttcattctccatctgtgaaaaaggcaatgggtgtgtgggttattgaagctggaggtgtcc

SEQ ID NO: 352098 - DNA, 122 bp, Homo sapiens
gctggctcaggagtgaagctgcggatcttcgaggtgagtgttatagctcttaaggcggcacgtctgcagtcgttcgttccttctggtgggctcgtggtctcgctggcttcaggactgaagct

SEQ ID NO: 352099 - DNA, 122 bp, Homo sapiens
gtcatggtccttaaggcggggccatccccggaccaagggactgggcggaaccgattagggcggagcggagggaatgtgaggcaaggggcggagccctgggaatcggggccggagagggcggg

SEQ ID NO: 352100 - DNA, 122 bp, Homo sapiens
ccagcctgggcacacaccttgcgatgatcttcctctgtcttctctggaatcctctaaaaacgattcctgcataccccacatacatgtatacatatccatcctctcaccaaaaagttatcttt

SEQ ID NO: 352101 - DNA, 122 bp, Homo sapiens
ctgctgagtctagtcccttccagggcacacagtgggcgcttagtaactgtagaaagaagtcgaacgaaatcggaagggggagaggcagaggccacaatcaagacacggaaacgacagtcagt

SEQ ID NO: 352102 - DNA, 122 bp, Homo sapiens
aaacaaaccagcacgcctatcataccaaaagtagctatgtctttaaattaaattgccgttcgtaagttccttttacatagaaaatttggagcagtcagtgtcctcagcacccgtcagtgagt

SEQ ID NO: 352103 - DNA, 122 bp, Homo sapiens
gagctactgcgcaggcgcagtgcggggctgcgagggggcgtggtgcagcagggggcgtggcggggcggggcgtggcggctgagcccgggagaatgtgagttgttccctctctaattacctgt

SEQ ID NO: 352104 - DNA, 122 bp, Homo sapiens
gtccccacctaatataattaaacaatcttctttctattgttcagtaacatggtggtggtacgggtaattagctaaggtaggaaatgcagactggctcttggaaagaggtttggaatcttttt

SEQ ID NO: 352105 - DNA, 122 bp, Homo sapiens
acggatattgtaaccctctgggagcggtgtggtccagcaataataatcatcttcattgttcgaataacagctcccgaattccgagtgttcatgatgtgccaggcaccgggccaagcattgtc

SEQ ID NO: 352106 - DNA, 122 bp, Homo sapiens
gtggggtccccaagatggtctcacgggtctctgggatgagatgcggctaccaagaccctacgtgcagccaggagactgaccaggccgctttaaggctggaagagacatggccctgccagcat

SEQ ID NO: 352107 - DNA, 122 bp, Homo sapiens
cctccgctcctgcggaggttgggagggagagctaccggaagagtatgctgggaagtggttcgggggagggtttaataagttcccagcaccagccaaggtcaacaggtatacctgtcagccca

SEQ ID NO: 352108 - DNA, 122 bp, Homo sapiens
cgagaggatgctcagcgcagctgccaggcagagagtgtgtggggaggtcccttgcctttgcgcgcgcgcacacacacagacacgcacacacacagacacacatacacacaacacactcacac

SEQ ID NO: 352109 - DNA, 122 bp, Homo sapiens
cacgacaactggataccaacctttttcagcacccagtatttctggttcgtcttgaaggtccgttggcagcgactagaggacacgactgagctagggggtctggccccaaactgcccggtggt

SEQ ID NO: 352110 - DNA, 122 bp, Homo sapiens
ccggggaagcagaaggccgcactcagagtctctgcactcctttgttgctggggtccgttgcgttctgcatccagtccttgctgctccgagaggccccaggtgcctccgccacggctcctgtg

SEQ ID NO: 352111 - DNA, 122 bp, Homo sapiens
tttctccgcagcggaggtctgtgtcctggcttgggggttgcaggtgaattccagcctcctcgtgaggaggggagcacagacctgtgtaccctcgtggggcggcacgggcacgtgcgctcgtc

SEQ ID NO: 352112 - DNA, 122 bp, Homo sapiens
gaaatcaacaaaaccctgcgaaaatctgggggtgggagggaattcttaaaacttaacaaacgtcctcaaacgttatatgaataggagaattgagacaggaaatgttggtttgtggtcaggca

SEQ ID NO: 352113 - DNA, 122 bp, Homo sapiens
actcactgcaaccttcacttcccaggttcaagtgattctgattctcctgcctcggcctcccgagtaactgggattacaggtgccaccaccacgcccgactaattttggaatttttaatggag

SEQ ID NO: 352114 - DNA, 122 bp, Homo sapiens
ttttcaggtggcgcgtcaggcagcctgcttggtacctggagtcctgttttcccaagcccccgtccgtcagtgttcgcttcttctaaaattaccgatgacagggttataaatcagtttttagg

SEQ ID NO: 352115 - DNA, 122 bp, Homo sapiens
gctcacctgggccacagaacaatagaaggggaggtgggggcctcccctgggaccgggtcccgatccggattagatccgtggggcaggattagccctgttggtcccacgaagcctgggccact

SEQ ID NO: 352116 - DNA, 122 bp, Homo sapiens
tcccggctgggcaggtccaccaggcgggggcagggccggccgcggggattggctggcgagcgcgccgccccctcgcacaccagccccgcggcggggaggggagcgcagccggcagctggccg

SEQ ID NO: 352117 - DNA, 122 bp, Homo sapiens
tcgcgcggtggcgcgcagggccctgcagccagccgccccgcccgcgcccccggctccgcgcgcccctggccccaggcgccgtctccccactctgcgcgccctcggctgcggggtagcgggca

SEQ ID NO: 352118 - DNA, 122 bp, Homo sapiens
ggtcctgaaactttcagagtcacagagctttgtagaatctgatgaaaatcacatcccccacgctcctatggagatacaaatatatacttgtctttgcaggtcatttcaggtgttcaaagacc

SEQ ID NO: 352119 - DNA, 122 bp, Homo sapiens
tgggaagagacacacgggtctcggagatcaacaccaaaccaccccttcttcggacagatacggaaacttaggctgggagaatgaaacaggcaagggcactaaaaacaggtgcggagccaaag

SEQ ID NO: 352120 - DNA, 122 bp, Homo sapiens
tgggcatggacggggtgcaggctttcctgcagacctattcccatgaggtctccctcaccgcggactctcggaagagtcacctgatcttcccccagcccaactatgtagacatgctcatcagc

SEQ ID NO: 352121 - DNA, 122 bp, Homo sapiens
caatttaaatccattgatgggagaacctcagttagtttcaaaacaacaattcttgccaggcggggtgactcacgcctgtaatgccagcactttgggaggccgaagctggaagatcgcttgag

SEQ ID NO: 352122 - DNA, 122 bp, Homo sapiens
ctttactcgattttgttcatgcctgtgcatgaggacacattcaaaaataaaatttatggccgggcacggtggctcacgcctgtaatcccaacactttgggaggccgagacaggcggattatg

SEQ ID NO: 352123 - DNA, 122 bp, Homo sapiens
ctgactgttttgtgggaagccctctgtcccatctaaccctgttgtcctgggcatctttatcggctccggcctggagaagcgagcgggcggctcgggcgttgttcacggcagcagcccagtgc

SEQ ID NO: 352124 - DNA, 122 bp, Homo sapiens
aagcggtctccgcccggaacagccgcggcgccggaagtggacctgcgaggtggggccatgcgagtgcgcagcctcaaaaagcagctcgccccgctccctcgccatctgccccgcccctcgcc

SEQ ID NO: 352125 - DNA, 122 bp, Homo sapiens
gtattgagtcagaacttctgtaagtgagccgaggcacaggcagcatgaaaacagtcctggcgggcatcgacaggcccgggccgaagaacttctgctttacacccttccagttaacaacatat

SEQ ID NO: 352126 - DNA, 122 bp, Homo sapiens
tacccgttaattaaatggcactaattaaatggtgcttgaaatattacaaacatctatgttcgaccataccacctagagttctgggcaagaaggttgggacccacaggtcaagcctagcccct

SEQ ID NO: 352127 - DNA, 122 bp, Homo sapiens
gtcccactataggtaactctggaagggactggcagcttccagtgtggttctcccgcctgtcgattggaccttgcaggaagccccgcctcatcaactcagtcaagggctttagttggcccggc

SEQ ID NO: 352128 - DNA, 122 bp, Homo sapiens
tcaaagaaatccctttgagagggtagcccctgggtttcacccgttagctgagaacctgtccgctctgccatggtgatctccattcttcaagtgtttccgggagacttggtttctttgctcag

SEQ ID NO: 352129 - DNA, 122 bp, Homo sapiens
cagaagtttgaggttgcaatgagctgtgattatgccagcctaggtgacagatcatgccaccgcactttactctgtctcaaaaaaaaaaaaaagaaaagaaaagaaaagaaaatgaatacaca

SEQ ID NO: 352130 - DNA, 122 bp, Homo sapiens
ggggacagcggaagaggccagggatttggcgtgcacaccaggggggcgtccaggcaggcccgagagcgctaggctgcctccgctgacagggggctcgcacaggcggaaggggagcggcgaga

SEQ ID NO: 352131 - DNA, 122 bp, Homo sapiens
ccccttgggggcgtcaagcccctctgagatcctgacggtttgtgggaggagcctacaaagcgctcggccccgcccactcctggtaccctcccacccaggctcaacccgcatccgaggccgtc

SEQ ID NO: 352132 - DNA, 122 bp, Homo sapiens
gaccaggacacaggctctggctggctctacccagaaccaagttcaagtccagcactgtcccgcctcccacccacttccaagccagacagcctgagagctcagcctcccctgtttgagatcca

SEQ ID NO: 352133 - DNA, 122 bp, Homo sapiens
aaaaatggcagcctaccaactgcctacaacaaaatctaacaactttttgcaaacaagagacgcacaaaccaaaatcatcatcaagagagtagcaatgtttgaggatattcccatgtgaacag

SEQ ID NO: 352134 - DNA, 122 bp, Homo sapiens
ccagaaggaagtgcggcaccttagtgatcccgagtttaagccgagagttgctcacgtgaccgagatctcacatgacgtaggcgctcacgtgattactcgcttacgtgagcagaagtagttct

SEQ ID NO: 352135 - DNA, 122 bp, Homo sapiens
ccgacgccgccgctcgcttgtgaaactggaaggctgccatggctagcccagccgcctcctcggtgcgaccaccgaggcccaagaaagagccgcagacgctcgtcatccccaagaatgcggcg

SEQ ID NO: 352136 - DNA, 122 bp, Homo sapiens
caggaggaattcaagttctgagtttctaaagtcaggacccggtgccgcacccaacgtgggcgtggggagtggctaagtcagggtctgaggggcagggccggggcctggctgcgagctggggc

SEQ ID NO: 352137 - DNA, 122 bp, Homo sapiens
ccttctgaaaacacttagaccaactgccgctgtttagagtggaaaaccaagaccctgggacgtgcaaagccggagaacgggcccagaggtcaggtctcccagacagggactctttagcagcc

SEQ ID NO: 352138 - DNA, 122 bp, Homo sapiens
cgtcaccttcccgtccagagcgctttctttcagaccctgcctacctgcaggcagatggaccggagggttttctgcttcctttcaaccagataacttcctaagtggagatggcctgtaggtag

SEQ ID NO: 352139 - DNA, 122 bp, Homo sapiens
cacaacagcaaataaacagagaaaattgtggcgctgagacaatatgtcagctatggagggcgtacagggcagcagggctgtgggaaaacaatgtgagaaagaaagagagacagagagacaga

SEQ ID NO: 352140 - DNA, 122 bp, Homo sapiens
agtcacttgatccagtggatcaagtggctcctgaagaggtcacctccttacccaggccaccgggttctcttgtcagttggaaaagttgaggtgggtcatttaaaaaatccctcccaactttg

SEQ ID NO: 352141 - DNA, 122 bp, Homo sapiens
ccgcttggtccccctgaggggcggtggccttctgctgccccattctgcggtggaggagcacgctagccccctccccagtccccaggcccggccgcccccctacctcgccggagccggagctg

SEQ ID NO: 352142 - DNA, 122 bp, Homo sapiens
agaaatcaggctctcgaagctcataaaattcaacgtgaggaagcaagtgacaaggacgcccgaagcacagtggacggtcatgaaggagcgggggtgtggcaggcgggtgacgtccaggagag

SEQ ID NO: 352143 - DNA, 122 bp, Homo sapiens
ctgcaccgggagccaccggctgcaaacaggctgcaaacaccggggagctgcaagcgagggcggccagtccatcgagccagcagagggcgctgaaacgcggcccagtgaactagggacgtcca

SEQ ID NO: 352144 - DNA, 122 bp, Homo sapiens
ggaatgggctgaagcagctgcccaggttacggcagctccttgctttagaggctgagagctcgcacctggagggccatcctggtggttttcagttttttctaggtggtttgggttcctaaagg

SEQ ID NO: 352145 - DNA, 122 bp, Homo sapiens
ctcaagcgcgatgcattaatttattgtccgcgccgtggcgagggtgagacgagcagctcccggcggggtccggggaccggccgccgaaccgcccggcggggcgggagcgagaaaggcggaaa

SEQ ID NO: 352146 - DNA, 122 bp, Homo sapiens
gtttgtgttttatcgcatcacagtcttagaattcccagggctgtaggtctcctcagcctacggtgcggcataatagttctgagcagggccctgggtttgaatctcgactcagtcgttcacta

SEQ ID NO: 352147 - DNA, 122 bp, Homo sapiens
ggctgggctttcccctgggcaggtcccaagtcctcacctcccctctcaagtctcccacgacgttcccacccactcctgagagcagagctggccgcagccatgaccccgcagcttctcctggc

SEQ ID NO: 352148 - DNA, 122 bp, Homo sapiens
aggtgaggaggcctcctgttctctggggttctttttctcacacttaattgtccttggtgtcgctctccgaggatgacagccttgcccctggagcctaaattcccccgtgctgctgaaatgtg

SEQ ID NO: 352149 - DNA, 122 bp, Homo sapiens
tcggcagagctgtgacttctgggtaaacacgcacaggcctgggatccccctgtagacagccggcgtgcacacagaggaagtggcactcactagacgcgtgggtgcccatgtgaacaccctcg

SEQ ID NO: 352150 - DNA, 122 bp, Homo sapiens
agaccctttatttgggcggcctcttgtggagtctgtgggtgcccccgcagacctggccagcgagagaggagctgccaatatcaggcgcgcctacctcaaaccagctgctcatttggatcatt

SEQ ID NO: 352151 - DNA, 122 bp, Homo sapiens
gaggccgggcccgggcagcaggtggccccaggtagctcagtggcgtggcagtctccttctcgcccggtccggagcggaggggagcggctcaggtgccggctcgggggaggcccgggcacctc

SEQ ID NO: 352152 - DNA, 122 bp, Homo sapiens
ctgactcaaccgattggtccccaagccatctccctcctagagggctttttgtccatttctcgcccttcatcctcaagacctctctccctgctctggagtcactgtctcctcctgaaccccta

SEQ ID NO: 352153 - DNA, 122 bp, Homo sapiens
ttggctagagcggcccaaagtcagcgtggttcttccacaccctggaccaccaccggaaaacgaccacgtctctggctgtgtgaagctgcgtagtgaatgtccatgtctccagcagcaggctg

SEQ ID NO: 352154 - DNA, 122 bp, Homo sapiens
acccgaagtagtggagagagcacaggactagagcgcagacctcaggacgtggatccgagccggcgcgatgggcggagagcaggaggaggagcggttcgatggcatgttgctggccatggctc

SEQ ID NO: 352155 - DNA, 122 bp, Homo sapiens
atttctttcttctgcctccctcagaagcctgggctgcacagcttgggctgctagctggcgcggggccacgcgcctgtctgtactgcccagccgccgggagtgccagtcacccagtgctctgc

SEQ ID NO: 352156 - DNA, 122 bp, Homo sapiens
ggcgccccgccacccccaacactgccccgaggcccggtgacaatgaagcggccggacggccggggtgagcagcggcggcagctagcaaccagcctggcaccacctccccagcccgtcacgcc

SEQ ID NO: 352157 - DNA, 122 bp, Homo sapiens
ggcggagggcgcgtgtgtgcgcgcgtgcgcagtgtgtgcgggccggggtcgccgcggctgcggcctgctgtggttggtgggttcctctgagattttgttgtttcggtcctacagataaaact

SEQ ID NO: 352158 - DNA, 122 bp, Homo sapiens
agttgcagcggccaagagtgagacccgccttgaggactactatgtatcccacagacctcgcggggccgcgtgacgccatcaggatgcgcgaggctcggggagggggcgggattagagtccaa

SEQ ID NO: 352159 - DNA, 122 bp, Homo sapiens
ccggtcaccaaaatggcccggggaaatacacggaccagcccagcctcccgcaagacgtgccgcacactcaggaaagcaggcgtcgcccccgccccaattcaatttcaaccctggggtcccgg

SEQ ID NO: 352160 - DNA, 122 bp, Homo sapiens
gtctagagaccaattacaacctccgcgtggtccccgagctctcagggagctgcgcacaggcgttcctagcccaggcggggcgctggcaaccctgcccgccctctgcctgtgtcgccaccaca

SEQ ID NO: 352161 - DNA, 122 bp, Homo sapiens
gagggggcggggcccggagggggcggggccgtaggaaacttgagcgcccgcctctggccgcgcgccccgccccggcccccgcctccgggtcccgcctccaggtcccgccttcgcgtcccttc

SEQ ID NO: 352162 - DNA, 122 bp, Homo sapiens
agccaccgtgcccagctgagaatttgttttataaagcaggaggccccatcctctgggggccgtggaccagtaccagtccatggcctgttaggaatctggttgtggcttgttaggaagtgggc

SEQ ID NO: 352163 - DNA, 122 bp, Homo sapiens
ctctttgacaacagcgcaggtaagtgatgggaagcgaggtctcctcagagctccaggtggcgttttcagccgctccgtcctacctcggcggcgtcaggcctgaagatggattgttattctgt

SEQ ID NO: 352164 - DNA, 122 bp, Homo sapiens
gctgagcatgtgctactctgtaagtgctggtatactttccagtccccagtgagaaaatcacggcatatgcactgaaacctgaaaccctgactattccaagagcctcatcatatctttcaagt

SEQ ID NO: 352165 - DNA, 122 bp, Homo sapiens
cgcggcgcccgtggcgccgccagcccgatcgctcctcgcttctggagggagccgggaagccgggctggggaaaccctcgcaagggttgagctctgcaaacgcagcagaaccgagctgcccgc

SEQ ID NO: 352166 - DNA, 122 bp, Homo sapiens
gctgtgcacattgaggctgaagaagtagatgccacgcaggggagcagcaaactggccggtcgccatgtcaaagcacccatcaaggttcacaaagaccctttcgaagagcagcgtctggaagt

SEQ ID NO: 352167 - DNA, 122 bp, Homo sapiens
ggggggctgcagagcggcagcggcgtcggggggcctcagtggggtgggtctgttcgtgggcggggccttcccggagacggggcctcggtgggactgggtctgttcgggggcggggcctgttt

SEQ ID NO: 352168 - DNA, 122 bp, Homo sapiens
gggtccgcggttccggctggagacgggcggccccacgctgggcgaggggaggcctgtgtccgatgctctgggacccttccctgcaggaagcaaactctgtggatgccagtgacaattattta

SEQ ID NO: 352169 - DNA, 122 bp, Homo sapiens
tgaccttgtagaacctgagttatgacaagcttcctgaagtattttggaagatagtacttccggaaaggacattaggaaagactaaacagtggacaatcaatcttgggactatgaattttatg

SEQ ID NO: 352170 - DNA, 122 bp, Homo sapiens
caactagtcatgcgcctcggatgccgccggccacggggctcccggaggggggtccgacaccgcccggtgcccgggatccccaatctggccggtggatgaggccccatcccatgcacccgagt

SEQ ID NO: 352171 - DNA, 122 bp, Homo sapiens
gtggcgtctcaggacgcagcgtgatgacgtaggtccccgacattccatatacaagatggccgcagtcggcaaggagagacgtcgctgaggggcttgcctgaagcgaggggtgagtgacccac

SEQ ID NO: 352172 - DNA, 122 bp, Homo sapiens
aaggacaagtcactgaaataattgtcttcctgcctatttcctgatttagtggaatgagcacgaaatcaagagtcataaagaccaattgtgtgggctaattacttatcttttctgggctccat

SEQ ID NO: 352173 - DNA, 122 bp, Homo sapiens
ggtggcggccccggtggtgaaagagctgagactagccttgctggccccggcggagctgagcgccctggaagagcagaaccggcaggaaccactcatcccggtggggacgcggggaaccggcc

SEQ ID NO: 352174 - DNA, 122 bp, Homo sapiens
gggaggagagtggctctggggtctgggtgcagctttgttgctgtgtgaccttagcttactcgccctttctccctgggtaaaatgaggctgtcatcactaggagagctctgagacctccccag

SEQ ID NO: 352175 - DNA, 122 bp, Homo sapiens
gtgttggagtcacagctgttccctttctctccccctattcccttggtgttcctccgaggacgcagaactgaaagttagccagattccctcgcaggaatctgagaaatgctgctgggctcatg

SEQ ID NO: 352176 - DNA, 122 bp, Homo sapiens
tgtggctcccatcttattgttgttgtcctcttctatgggtcaggaatattcacctacatgcgaccaaactccaagactacaaaagaactggataaaatgatatctgtgttctatacagcggt

SEQ ID NO: 352177 - DNA, 122 bp, Homo sapiens
gcgcgcgcaacctttcgggctagcgggccggcaacaagtgagcaactttattgataggcgcggacatggacatggatcgcgcgcacgcgccggggaccggcctggaggaagagagtagcacg

SEQ ID NO: 352178 - DNA, 122 bp, Homo sapiens
tttatgcaagaggtacttgagaatgctgtactgtagagctttgtttctcatgggaacacacggggaagtggaaaaccctccaaattgtttggtgagaaaacataacatttatccctttcttt

SEQ ID NO: 352179 - DNA, 122 bp, Homo sapiens
tagcctgcatttctaatacaatgctgttatgctaatcaggtgacatcaccgcccagcacacggcgagtggctcctgataaaattacaaaccggcggccgccgcgggcagctgggaggaggtg

SEQ ID NO: 352180 - DNA, 122 bp, Homo sapiens
gtggatgggtggcaggaggggtgggtgaagggaaagaaggtctgggtgaggcttgggggacggggatgccagacacttggacctcagggctagaagggtcagaccgaggctggggagtgagg

SEQ ID NO: 352181 - DNA, 122 bp, Homo sapiens
cttatcacaaagtatcattcttcttttttccagccatttaaattgtaaaaatccggctggcgcggtggcccatgcctgtaatcccagaactttgggaggccgaggtgggcggatcacctgac

SEQ ID NO: 352182 - DNA, 122 bp, Homo sapiens
aggaaagggagattgtaaccaccccgaggctgcacagctaatacccagagagcagaatttcgccacatgcgaagattctagctaatcctaaaatctgtttttcaccagacgacgccggccct

SEQ ID NO: 352183 - DNA, 122 bp, Homo sapiens
caggaattgccaccgaccccagggctgcatttattgctggacatttgtcacggtctgagccgtgtggaccggccccgctcagccagagccaggagggctacgaggggaggcggggcagggtt

SEQ ID NO: 352184 - DNA, 122 bp, Homo sapiens
aaggctacacagtttggtaagttgttttgttttccatctctgcccagtctgttgtcagagcgacagaaaagaggaaatgagaaacaggggacctggacgctttacaatctggattaactctg

SEQ ID NO: 352185 - DNA, 122 bp, Homo sapiens
agggcagagcccagatgctggccacgccaaccgcgggctgaagggagaggtttccaggggcgggatagggtgccttcgtcacagaggacagcctccgaaccagtttattctctggggacctt

SEQ ID NO: 352186 - DNA, 122 bp, Homo sapiens
ttgtaaatgaaattgttttctctatttcttttgggattgttcattgttcgtatgtagaaacgcacctgatttttgtgggttaattttgtatcttccaactttgctgaaattattgattaatt

SEQ ID NO: 352187 - DNA, 122 bp, Homo sapiens
gcgggcagggaatgtgttgtattcaccagtgtctggcacctaaaggctccacaataaatgcgtggttgttggcacaatgaatgaacaaatgaataaatgaatcttggccctccctgcctcca

SEQ ID NO: 352188 - DNA, 122 bp, Homo sapiens
tcttgtggagcggggagctaataagagccgatcgggattggtcgtggatttccagatccccgtggagtcagctgaagttctttcctgggcagacgtggagacctgaaattctccatttcact

SEQ ID NO: 352189 - DNA, 122 bp, Homo sapiens
gaccagccgacgtttttaaagacatagtgtccccctcaaggcatattccagttcctatcacgaggattcccccacggacactcagtgcccccttcctgatcctcagcgcttccctcgcgacc

SEQ ID NO: 352190 - DNA, 122 bp, Homo sapiens
ccaagattaatgagatggggtggaggcaagggttgggtgatggggcctgggcagagagaccgttcgcatcagggctcatgggacagcccatgtttccaaggatcatgtctgttgcccttata

SEQ ID NO: 352191 - DNA, 122 bp, Homo sapiens
accccaggtgattcacccacctcggcctcccaaagtgctgggattacaggcgtgagccaccgcgcctggccaagggcaaagcgctttcatgagattggctagttctttccttatttattaaa

SEQ ID NO: 352192 - DNA, 122 bp, Homo sapiens
accgccgccggcgaggagagtctggggctccagacagccgcccggtgagcccaccaaaggcgcgctcctccagtggccgggacacagcaagaaggggcttggccgtctggccgccgccaggt

SEQ ID NO: 352193 - DNA, 122 bp, Homo sapiens
tacgactcccgggaagacgtgggtgggtgcggggaatgcggactgatccctcccagcggccgttgggggctggcccacaatccctcgcgagggcgggaaaagcaatgtggtcgttgcggggg

SEQ ID NO: 352194 - DNA, 122 bp, Homo sapiens
cgagggggctcagagcgcagtagccccctgtgccaagagcagaagttacttcgtgcggctcggacccccctccctctctatctcccttccccaccttttctcccccaccccctccccctact

SEQ ID NO: 352195 - DNA, 122 bp, Homo sapiens
acctgggctgtgtcctaaaggctatctcacctttttccttttctttagctcaggatagcgcgtctaaaggacagggagggctccaaaagttagggaatattgagccatggggccccagtttt

SEQ ID NO: 352196 - DNA, 122 bp, Homo sapiens
cgccctcgcgagtgtgtctgcgcgcaaggttctagccgggggccagttgtgctcccagctcgtgttccagccacccttaggggatgtctgcacctggactggtggcaagacccctccgtgcc

SEQ ID NO: 352197 - DNA, 122 bp, Homo sapiens
caaacctttcccctcttgactttctgtatcccttcatttgttcaacagctcttcattgagcgtccactatgccctcgggtgttgagttacatcccacacatgaaggtccctgtcctcgtgaa

SEQ ID NO: 352198 - DNA, 122 bp, Homo sapiens
aattgctgtatgttccactttttcctgtccaaaagtggacagccatgacagtgttttccacggatgccagtgctctcctcaccaatttattgttctaagtcttggtgaagggggcattctct

SEQ ID NO: 352199 - DNA, 122 bp, Homo sapiens
agggaactccctgaccccttgcgcttcccaagtgaggcaatgcctcgccctgctttggctcgcgcacggtgcacgcacccactgacctgcgcccactatctggcactccctagtgagatgaa

SEQ ID NO: 352200 - DNA, 122 bp, Homo sapiens
gtcaacaaacagccgctacgggcaacgggggcggagcttgggaatgcaaggcgggacaggcgccgttggggaggggaacggaggccgggtggctggtaaggggcaggctcaggcacagcgga

SEQ ID NO: 352201 - DNA, 122 bp, Homo sapiens
acttgttacaaatgagaatctcagaccccatcccagacatactgaaccggaaactgtgggcggacagcccaacaatcggtgttttaataagcccccgggtaatcttatacacgctaaagtct

SEQ ID NO: 352202 - DNA, 122 bp, Homo sapiens
caggttctgcccagaacacaaacactgtgaagcggctagaattccaggtgctggctggggcgcccatggggggtggggcctgagagccgactgaggccttgtggactgcagtgggccctccg

SEQ ID NO: 352203 - DNA, 122 bp, Homo sapiens
tctggagccccaggcttccatcaaaactgataagattggcatgcgcagggcggctgggaacgcgccaccctgggtgtctataggctcatctggccctgctgataggccctgcccaggacggg

SEQ ID NO: 352204 - DNA, 122 bp, Homo sapiens
gaataggagtttgtgaggtggctatgtgtgggaagggcattccaagcaaagggaacaagacgtgcaaaggcaaagacacacaaatgactaccatgtgtcctaggcactaaatgtgagtcagc

SEQ ID NO: 352205 - DNA, 122 bp, Homo sapiens
tccgaggtcataaatccctgaacagcaaagaagctccccccaccccccgttttttttaagcgaaagatttttcaagggaaacttgtaaggaattagtgccgccttgttccccaatttgctgt

SEQ ID NO: 352206 - DNA, 122 bp, Homo sapiens
gctgcttgagacaggctcataatgggtctttgggtcagaactgcaaggacgctgggaagtcgtctggtgcagctccctcctaggacagttggagaaactgagcccttactccgggaaggggt

SEQ ID NO: 352207 - DNA, 122 bp, Homo sapiens
tcatttcgtttgaaaattctgccatttattttccagttcattatgcttcctttccttgtgcgattccctctcatcaattatgtgtgcaggcagcttcatttatttgttcattaactcatttg

SEQ ID NO: 352208 - DNA, 122 bp, Homo sapiens
gcggggctgcactcgcacctgggcaggtgggcaggcgggcaggtgggcagcggggcggcgcgcggggccgcggcaggcaggtgcggccggcaggcgcggcactttggactctgcggtgtgcg

SEQ ID NO: 352209 - DNA, 122 bp, Homo sapiens
ccgcgtcttccacaacctccgcggtctggagctggcctcccccaccgccgccccaaccaccggccccgccgccatcaccaccaccgtcacctccgccgctgcctccttggggccctcctcct

SEQ ID NO: 352210 - DNA, 122 bp, Homo sapiens
agcaaggtcgtgcggtgtgtgtagaaggtaggtggccgtgggttacctctctcagacctgcgtggtgttggcctctgggtggggataaaagtcacgaaaaagacctttggacccagagtcta

SEQ ID NO: 352211 - DNA, 122 bp, Homo sapiens
ctcccaggaagaggcttccatggaaagccagaagaccctttaatcagagaagattctagccggtctcaaaggaaggatgcagtttgcgccgtcgaaaatggaaatcaaaggaacgcgatgct

SEQ ID NO: 352212 - DNA, 122 bp, Homo sapiens
caacctctctgagccccagggctcagcctggagcagggattcaatgacatcatgtgtcagcgtactggacgcacgccaggcccagtcacccaaaggcccctggacccggctgctgtctccaa

SEQ ID NO: 352213 - DNA, 122 bp, Homo sapiens
ctaatcggcaccttgcccaagaacagaactttgaaccctcgggtggtgcagctcatggaacgctacttcactgaagcagttgcagcctggccatttccctggatcagcagttcctgaattta

SEQ ID NO: 352214 - DNA, 122 bp, Homo sapiens
accctccgacttgtgcccatagtaaagcggcggccctaagacgacgcgggggtccttgtgcgcacttaaatggagtcggctgcgcttggtgagttcccacacccggtagatgtgagggaaaa

SEQ ID NO: 352215 - DNA, 122 bp, Homo sapiens
cagctacagatgtgcgaggtaaggcggtggtgaaggcaggtcctacagcccaggctgtgccggctctgccctcacctgtgggagcatctcaccggtaccagcggcttcagagaaaacaccac

SEQ ID NO: 352216 - DNA, 122 bp, Homo sapiens
tctagttttgcttttctcaatgagtcttttcactgtctgagaggtataggtgacataggccggccaggggtcatgtttttcaagtagcttccggggaagtccagtgttttctgtgagtccta

SEQ ID NO: 352217 - DNA, 122 bp, Homo sapiens
gaactctctcatctgcagcagttcagaggaccagttgtctccgtggcaaagtaattagcacgttaggataaaactgtcatctttgatggacttaaaactgtcattcttccagaagagaaaga

SEQ ID NO: 352218 - DNA, 122 bp, Homo sapiens
agatctctagagggttccaagaaacttggggggaattaagcatttcacgtaggaacagcacgttattgggagtttacctacagagataaatattttttctttggcagatcgttccacaaggc

SEQ ID NO: 352219 - DNA, 122 bp, Homo sapiens
tgaattttgctgtcacgacagcagttgcaccaccgacctaatgagtcggtgctcatgagccgactgctcgtgagtgctggtaacatgagtgaacagtgtcctgttacgtgttcggtggaaac

SEQ ID NO: 352220 - DNA, 122 bp, Homo sapiens
tttgcttccttttgtggttttgaatttaatttcactatttgactaacactatttttactccgacttcctcaaacactgtgggacttaagctgtgacaggtgaaactcagtgccttagatgaa

SEQ ID NO: 352221 - DNA, 122 bp, Homo sapiens
aacttctggcctcaagtgatctgcctgccttggctttgcaaagtgctgggattctaggcacgcgccacagtgcccagcccggcggtttcattgttttaatatgatagaatataccacacaaa

SEQ ID NO: 352222 - DNA, 122 bp, Homo sapiens
ttgagaacatgaagcgcaaacagaacgacgtctttggagaagctgagcagtgattgtggccgcccccagcccctgctgccccagcctgtgtctgttctcctcgagggctccagcatcctctg

SEQ ID NO: 352223 - DNA, 122 bp, Homo sapiens
ccctggcatcactaaaccacatccacactcccagttccatcagagaggaggacttggatccggcatcctggatctaatgtctagtagaagtttccttaagtaaattatggcaaattcatttg

SEQ ID NO: 352224 - DNA, 122 bp, Homo sapiens
gatggatggggaaactgaggcagcccagagcagcccccaccctaggtcctgcccgggacacgcccacgcgggacctgtgtcaccaggttaaaaatggaaacagctaggaccttttttttttc

SEQ ID NO: 352225 - DNA, 122 bp, Homo sapiens
catgcaggaaatactgtctggttggtgacataaaaatgctccacaaaacatgcaaattaccgagtattagaaactgcattggctgctagcgccatgctgcaaagactccatcatgggagcaa

SEQ ID NO: 352226 - DNA, 122 bp, Homo sapiens
tgttcagaggaaagaaaattccatgtcacagtccccattcagcatcagcaacccccaacacgacttttgcatttgaaaatgttgagaattcaaagctgattagcctagtgatttggaaacca

SEQ ID NO: 352227 - DNA, 122 bp, Homo sapiens
tgggagccgttctttggtggctgaagcccctctcctgctgctcctcctgcaggtcattcccgcctccgagagcccagagccgagatggaaacggtccaggagctgatccccctggccaagga

SEQ ID NO: 352228 - DNA, 122 bp, Homo sapiens
ttcatcccggatcccgagtctgcatcagaaaacagggcacaaagtgagccagagagactccgggagggtttgggggcacgagtactcggcgcagccggctgctgggttggcatgaccacgga

SEQ ID NO: 352229 - DNA, 122 bp, Homo sapiens
ccaggcggagtggagcggcgctcacgggcagggccaggcgtccagtggtgtcccaggggacgcggggtgggaagcgacccaaggctctaaggggaatggacaggggagggcgccgacctcac

SEQ ID NO: 352230 - DNA, 122 bp, Homo sapiens
cagccgccgctgggtgctctcggctgcgcactgcttccaaaagtgagtctggggggcggccggggcctcagacttgctaatggcctccaggatgagcaaacagtagccacccagcagcttgg

SEQ ID NO: 352231 - DNA, 122 bp, Homo sapiens
ttcagcctgcacatattagtaattaccttggagcagcagttttctattgaaaacacctatcgtttttatctctccagatactgaagagatacccttctgtatctgtgaccctttagctttct

SEQ ID NO: 352232 - DNA, 122 bp, Homo sapiens
agggaggaaacagcctcttcataggcaaatggcttgtactcgttgcatctcaaactctgccggcaaagccattttcctcctcagttcacttcacatgctcaagtacttcagtaaagcctcac

SEQ ID NO: 352233 - DNA, 122 bp, Homo sapiens
gtctacacccgcgtggccaactatgtggactggatcaacgaccggatacggcctcccaggcggcttgtggctccctcctgaccctccagcgggacaccctggttcccaccattccctgcctt

SEQ ID NO: 352234 - DNA, 122 bp, Homo sapiens
cctccgccaatccgagatccgtactcattccggtccccaaagccgccttggtcacgttcccggaggatgtccatcaccatctcacaggcttgctgcaaacacacaggaagcagcccccatgg

SEQ ID NO: 352235 - DNA, 122 bp, Homo sapiens
agcacacaagggggtggtgcttcccaagctgctgccaccccggggtccctaatctacctccgtgtcccaccactgccgggaaggtggtccaatcccccagtagaccctggattagcacaacc

SEQ ID NO: 352236 - DNA, 122 bp, Homo sapiens
ccgggatagcggaaaaagtccccacgcgctcggggagattcattatctctgcttcagcagcgccgcatttgagcttgttcatgcattcccccgccaaaggtctgcagtgttcaggggataag

SEQ ID NO: 352237 - DNA, 122 bp, Homo sapiens
tggcaggtactgtgctgagtagtcagcgataccttgataaaagagccactgttggccgggcgtggtcatgcctgtaatcttaactctttgggaggctgaggctgcagatcgcccctagctct

SEQ ID NO: 352238 - DNA, 122 bp, Homo sapiens
ccgttccaagcgggtgaggaggatcccgggcctgggtcccagccgccagtggctcaggtgcgccatgggccctgtcccagcacaggcagcttcatgactctgcctgccaatgaccaaaccca

SEQ ID NO: 352239 - DNA, 122 bp, Homo sapiens
agcgtggatggacctcacggatctcatgtgtgtcagtgtggacagacctcactgaccccacgtgtatcagtgtggacggacctcatggacctcatgtgtgccagtgtggatggatctcacag

SEQ ID NO: 352240 - DNA, 122 bp, Homo sapiens
actgggctggaggaaccagttgaaccataaccccaaggagataatcagataaatcaagaacgtgaagcattctataagacaactattttatagaagataagacataaagatcaaggaaaatc

SEQ ID NO: 352241 - DNA, 122 bp, Homo sapiens
ttagcattacatattttctgaatggcaaatttggggttaatccaaaacaccaacagtatccgtaattgcacacacacacacacacacacacgcagacaaacgtgcactgaacttgctgcccg

SEQ ID NO: 352242 - DNA, 122 bp, Homo sapiens
ggggaggggtgttggcaagtctggtaaataacacaggaggaaggggtcctctgacaagaacggtgaagggttgtttgaaggactacagttgaagcataagcccagttctcatgacaagttgg

SEQ ID NO: 352243 - DNA, 122 bp, Homo sapiens
ggaaaggcatggggaaaattgaattcagtctgaaagtgacttcccgcatgatgagctcaacgcagaaagggaggtggggcaggaaattatggtttgtgaggcaaaggaattgttcataacag

SEQ ID NO: 352244 - DNA, 122 bp, Homo sapiens
gggatcttctgacttctgaagactgacatctggcttatctaagatgatccagggaaggggcggagctagaagtctctgcgggaagattgttagtatttgctgggattctttggtggcaagca

SEQ ID NO: 352245 - DNA, 122 bp, Homo sapiens
ggccttggaagcctttgacctggatcctgcacagtggggagtcaatgtccagccctactccgggtccccagccaacctggccgtctacacagcccttctgcaacctcacgaccggatcatgg

SEQ ID NO: 352246 - DNA, 122 bp, Homo sapiens
ccaactcctctcgggcgctggctggggaggggccgagacctccagcagaggaggaaggggcgctggaagctgccaggccctacgtgggccacctcggtggggtccagacagctccgtgcagg

SEQ ID NO: 352247 - DNA, 122 bp, Homo sapiens
agaagatgacgtttcccgagaaaccaaggtaagcgccgtacggggagatgagcaggcgagcgggccgatcgtgggcatggaggatgtggtggcaggaagaaaagagaagctgggccaagcta

SEQ ID NO: 352248 - DNA, 122 bp, Homo sapiens
gttcaagtgatcctcccgcctcccacttttttttttttttttttttttgagacggagtctcgctgtgtcgcccagactggagtgcaatggcacgatctctgctcgctgcaacctccgcctcc

SEQ ID NO: 352249 - DNA, 122 bp, Homo sapiens
ggtttgcgtcccggggcccgatgccggcgcagaaggaggctcagtgggttcaggaccccacgctgccattgactggttgcgtcgctaacttcgggccagtcacttcctgcctctgaaccccc

SEQ ID NO: 352250 - DNA, 122 bp, Homo sapiens
caataaactgtgtctgtcccaggaggccgagtctctttactggtggggggtgcgtggaggcgcgcagggccagagcagaggggagggtgaactgggtctccaagtcccaatccagacctaag

SEQ ID NO: 352251 - DNA, 122 bp, Homo sapiens
aaatacaatttaattttatttcttattactgttaacacccgaggaccaaaactgtgctcccgctgggacagggtccagggcttgcatatgggatgggtcagggcggccgagaacgccagccc

SEQ ID NO: 352252 - DNA, 122 bp, Homo sapiens
gcccaccgagtcgaatatgatgcggttctgctcggcgcgctcccgctggctctgcgtccgcgccagctccagcagggtccgcagcaggtgaaaggtgaggtcaatggacagagaagggttgt

SEQ ID NO: 352253 - DNA, 122 bp, Homo sapiens
ccacatcctcaccaacacttggttaccttctcttttgtttttttccaatagccatcctaacggtatgaagtggtgtcccattgtgattttaatttgcatttctctaatgactagtgagattg

SEQ ID NO: 352254 - DNA, 122 bp, Homo sapiens
gtgtcttcgcctttcagaggccttatagcctcggcgaagcatgctgggtgcgggcggaggcggcccctctgctcggctcactgaggcgccagccggtctccaagacgacggcgtgcaggctg

SEQ ID NO: 352255 - DNA, 122 bp, Homo sapiens
cagtccctacaaaaattcaatttcagttgaggctatggctcctatgccttgggatggtttcgaacttcaaaactgaaaaatactgctaaaatctcacttccttaacacaaaatttgattata

SEQ ID NO: 352256 - DNA, 122 bp, Homo sapiens
ttatctctgcaatctaaacacttttcagtaaagttcgggggcgcaattgcgcgctgaggtcgctgtaactcctgtcggccttctctggcactcgagtttcttcagttttgtctgcgcacccc

SEQ ID NO: 352257 - DNA, 122 bp, Homo sapiens
aatccccggccacacactgcaagattccatttctacgactcgcttcaactgacgacattacggagatggagagcagactggtggctcccaggagttaaggaagggttcatggcagaagcaag

SEQ ID NO: 352258 - DNA, 122 bp, Homo sapiens
tccgataaacgcgtaccctgaactcagctttttaacctagtgttttggcctcatggaagccgcacgttcttcatttcacgccctcacaaaacccatgtaaatctggacacgggcaaatgtag

SEQ ID NO: 352259 - DNA, 122 bp, Homo sapiens
agctgcccctggggcttcacgcagccagacccggggatggccaccctggccaggtgatctcggctttcagccaaggcaccttccttgtgtcgccagcttgttgggagcctttaggacgtctc

SEQ ID NO: 352260 - DNA, 122 bp, Homo sapiens
agtagctgaaactagtctctctcaaaaataaatgaaataggtttgtatgaactctaaggacggactgggcttagcaaaccctgccccagtgccatgctgcgctcacaccagagacttgatgg

SEQ ID NO: 352261 - DNA, 122 bp, Homo sapiens
acatgtgagccatcgtgccctgcccaatgaccactaaatttgaccagtggctctcaacagcgtgtgtgtgagagtgtgtgtgtgtgtgtgtgtgtgtgtgtgtgtgtgtcgggggggcgggg

SEQ ID NO: 352262 - DNA, 122 bp, Homo sapiens
ggcggattagcgccaaggcgttgtgcagccgcgtatactcggccatgtttcctctatcaccgagggcacctctgcctctcgccgtcaggcaaaccacttttccgggcgcgcccggcctcctc

SEQ ID NO: 352263 - DNA, 122 bp, Homo sapiens
agtggaaaagggtttttccccatccgcgtgacaaggtgtgtgtgagcgtgtatgtgtgtgcgcgtgtgtggcgatttttgtcctggggtttcctttggaaatgcactgttctcagcccagct

SEQ ID NO: 352264 - DNA, 122 bp, Homo sapiens
tctctcagatgcattctccactccagctggagcgattctcctaaatcccagatctgatcccgtaactttcgctaaaaacctgttcagggcttccctggctttggggacaaaaagtccatatt

SEQ ID NO: 352265 - DNA, 122 bp, Homo sapiens
ctgaagacaggtccaaagcaaatttcttatatgtgtctgctgtgtttctttctggaagggcgggagactgcttctttactgtgttttgaaatgggaggtagagagaatggattgcctttaat

SEQ ID NO: 352266 - DNA, 122 bp, Homo sapiens
cgcgcgggttcgcgggcggggggagtgcagcaggggcggggccagggaaaccccaggccgcggcggtcagccaatcagcgccgtcggcctcatccctcccgacctgcggcatccgcccagaa

SEQ ID NO: 352267 - DNA, 122 bp, Homo sapiens
cgggggagccagtgcagctaggctggggccgagttagggctgggcttgattgctgccacccggaagtccacggcctgcctatgggcacttctggccactgttccccaccccaatagcagtac

SEQ ID NO: 352268 - DNA, 122 bp, Homo sapiens
atcacaccccagatacgtcccccgaacggagtgatggcgagggcttcaccaaagtggctgcgtgaaggccagaccggcagaaaatgaatcgcaaacgaaaaagagagagagagaaacacaca

SEQ ID NO: 352269 - DNA, 122 bp, Homo sapiens
ctacttcctcctggctccccagaagacctggagacctcgggaagtgttctcatctatgttcgctccaacccgggggctcaggcccacctcgatcccgccttcccgggaggtccaggaaggtc

SEQ ID NO: 352270 - DNA, 122 bp, Homo sapiens
gactcccacttccgcccttttggctctctgaccagcaccatggcggttggcaagaacaagcgccttacgaaaggcggcaaaaagggagccaagaagaaagtgtaagtcgcgactgtcgtggc

SEQ ID NO: 352271 - DNA, 122 bp, Homo sapiens
ctaagaaatccagtaatgaagacaatcccatgatatgatccacagaggattgctgctttgcggggagagggggctagaattgcagaagagcaacagagtgagaaggaatttgcatccagctc

SEQ ID NO: 352272 - DNA, 122 bp, Homo sapiens
tccccccgcgggaagaatacttacagccgagcgacccaggacgggagtggctcgggaagacgcgctagccgcttacgactgcagtccagcaggtccccgaggcagcggcaggtagtggggca

SEQ ID NO: 352273 - DNA, 122 bp, Homo sapiens
ggtgaactccagagtctgccctgtaacaccctagtagattcctactgggaggaaacaccccgttatatcccttacctcactcagccgcaccatgccaggagcctagtaggctgacagcaatt

SEQ ID NO: 352274 - DNA, 122 bp, Homo sapiens
tcaggggagaggggagacaagcgaggatttgtttctgtattaattggcaaacctctttgccgcctgcttcctggacctctcagggctcgctcttcctgtctctttcttctcaatcatttcgc

SEQ ID NO: 352275 - DNA, 122 bp, Homo sapiens
gggtagtactgccgctctgcacaaacagaaaactttgggatagacaactagggagtcttgcgccttcacattgttaaaaattgacagtaaagaggtttccataacccctcccccgccgccag

SEQ ID NO: 352276 - DNA, 122 bp, Homo sapiens
tttgacaagaagggtcagcaaagtatctttaaaaaaatatttaatccacagcaagatggccgtgagttgttctgttgtgttacaagtgctggtaaataaatcatgagcaataatctttaaat

SEQ ID NO: 352277 - DNA, 122 bp, Homo sapiens
gtaaggtatgtgtagtaggcaatgctttttctggagacagaactcaggaggattgtccctcgatgatctaggctaacctgctgagactttgaagcaaggaactggagatggtccttttaggg

SEQ ID NO: 352278 - DNA, 122 bp, Homo sapiens
aatgcacgacagaattgggatttgacctctatcctttctattctaggtccacttttctctcgatcacaatatggtccagcatggctggacaaatgatggctttataacttgaaagacagact

SEQ ID NO: 352279 - DNA, 122 bp, Homo sapiens
gcacgcgccgcgactcctgcggcagccgcgactcggtcacggtgcgcgagtcctacgggccgggagtgactggggttcgcaggcagccctgccgcttccaccaacccccaacccccctaccc

SEQ ID NO: 352280 - DNA, 122 bp, Homo sapiens
actctcctgcaacacctctcactaagcatctctacagtgttgcatagatgctgactaaaccgttcttctcacctgaacagccatgacttcttttaggaatgaaatagcagcttatctctaag

SEQ ID NO: 352281 - DNA, 122 bp, Homo sapiens
aggagacaggtggtggtgcaagtcggggaaagatggtgagactcgccgtggagggacgcacgcagcatcccttagctgagacagaggcatccagacacccatgctgctcagccaggctctgt

SEQ ID NO: 352282 - DNA, 122 bp, Homo sapiens
aggtttgatatcatattctcatgcaaaaagtcctgtcctcaagaactggcctttgcagctcgctcctctcctcactctgagtttattcaagttacgtactggatgtatatccactctattaa

SEQ ID NO: 352283 - DNA, 122 bp, Homo sapiens
aagaaatcagttctctctaaggtcctcaaggatagctgtcatcacctcccatttaagaggcgtgattatgtagtccaaggtcatgtagccagcaagaagtcaggccgcgttagaaccatgtc

SEQ ID NO: 352284 - DNA, 122 bp, Homo sapiens
ttgtgggcggattgccaggacctggatcgcaacacttgggaagacccccgccccgcccagcgatctccgtgccctgagtcccagtgacggccccctggacagcggagcctgctgcagcgacg

SEQ ID NO: 352285 - DNA, 122 bp, Homo sapiens
ggctaccgccagaggcgtgaagccgtcctggccagaggaggaaaatgctttgctctgactcgtctgacgccagccgcccttcacacgggacacacccttgcccctcgggcttatgctcccag

SEQ ID NO: 352286 - DNA, 122 bp, Homo sapiens
atctgagatgtggggagcgcctctgccccattgccccatctgggatgtgaggagcgactccgcccagcagccgcccagtccaggaggtggggggcagcccccacccggccagccgccccgtc

SEQ ID NO: 352287 - DNA, 122 bp, Homo sapiens
ttttttgcagacctctttggggtaactgaattttttcttttggctaccatgtcatatgatcgctatgtggccatctgcaaacccttgcattatatggcaatcatgagcaacaaagtgtgcaa

SEQ ID NO: 352288 - DNA, 122 bp, Homo sapiens
tatcatgctgagttttgttttggaagagagcagtaagaatggtttatttatagtagccatcgtaatgctaaccattatctgaaattagacaaggctcccaacaggcagacgaggtagacaca

SEQ ID NO: 352289 - DNA, 122 bp, Homo sapiens
cgagccgagcggatcgctgggcgctgtgcagaggaaaggcgggagtgcccggctcgctgtcgcagagccgaggtgggtaagctagcgaccacctggacttcccagcgcccaaccgtggcttt

SEQ ID NO: 352290 - DNA, 122 bp, Homo sapiens
catcttccccattgtgtaggccagaggcttcatgatgggagcggctcagctgcgggatctcggttgctttgttgcaggcgctggggcaacgaagggtgaactgggttaataaaatgtgctgg

SEQ ID NO: 352291 - DNA, 122 bp, Homo sapiens
gttgaactgcaaaggagaaacacggggaacggacccaggggagtaaagaacaatgaatgtcgtggccaagaagcaagggagaaaacaacacaatttctcaagaagataatatttctccattg

SEQ ID NO: 352292 - DNA, 122 bp, Homo sapiens
ttctggagcctccggagctagctcccggcgcggagctccgcctacggcccgtccccggcgcggaaccccgcccacgagcccgtttccagcgtggaacaccgcccatagcccgtccccagcgc

SEQ ID NO: 352293 - DNA, 122 bp, Homo sapiens
cgccgggctagcactgacgtgtctctcggcggagctgctgtgcagtggaacgcgctgggccgcgggcagcgtcgcctcacgcggagcagagctgagctgaagcgggacccggagcccgagca

SEQ ID NO: 352294 - DNA, 122 bp, Homo sapiens
tcgaagagacaggagactaagagacaatgagctgagtgaggagcccaggaacccgggttccgaacagctgcgtagaatgcgagcggccaaatggtggagaatctggccgggtaaaaggagac

SEQ ID NO: 352295 - DNA, 122 bp, Homo sapiens
cccacctatagccttaacttcaattctgagatgtccatcgttccccggaggaggtctcctcgggccccttctcccttcgagtcattcacattcagaccaaacgctttcatttgtttattcag

SEQ ID NO: 352296 - DNA, 122 bp, Homo sapiens
tctctaccttccactgcagcatctccaacttctcctctttcaagcgctggcggagcttctcgtgccgtgcacgggcttgctcctgcgcaaactcagccaaagagaagcgacggcaagcactg

SEQ ID NO: 352297 - DNA, 122 bp, Homo sapiens
tctgcaataggcggcttagagggaggggctttttcgcctatacctactgtagcttctccacgtatggaccctaaaggctactgctgctactacggggctagacagttactgtctcagctcta

SEQ ID NO: 352298 - DNA, 122 bp, Homo sapiens
ctgccccagttagttaggatcgcccgtgtggtcttcatcagctccgggcaccgagctcagcgggagaacaaatcccacaaaggcctcttggagtccttttggaactttacgggggttagggg

SEQ ID NO: 352299 - DNA, 122 bp, Homo sapiens
tgatgcagacagggaggtgagcagcctaacagaccgggcattccggagtttgtgcatctccgaggacacatccttccatgactcctatctggctgtgtccccggatatcacccgacaggtgt

SEQ ID NO: 352300 - DNA, 122 bp, Homo sapiens
ggtcgggggcgaaaagcgccaggaggctggcagcccgggctggaacccgggactcgggctcgcccgcctcggcagctactccacggtctgcctggccccggagctcgccttcggcctgggcg

SEQ ID NO: 352301 - DNA, 122 bp, Homo sapiens
ttgtggatttttaaaaatttggctccgaggaggaccatttcctctcgacatgcatccctccggatagactgaacatccctccgttcacccccccgccccgcgcggtcagaggcaggcgctga

SEQ ID NO: 352302 - DNA, 122 bp, Homo sapiens
tgtcgggtctcaaattcaacctcaatcggcgacttaatctaggtggaggtaaagaggaagcgacccctcgacctttgagtacgggaataacttcctgagcgttacatttagcaaatgtatgt

SEQ ID NO: 352303 - DNA, 122 bp, Homo sapiens
gttgcatccataggatgcaataatatgtgaccatcaaaggtgacaatagatatagaagtacgttgatgtgcaaagatgtattttgttttagccagcgaggaaaaaagaatcagtttgattat

SEQ ID NO: 352304 - DNA, 122 bp, Homo sapiens
gaggtagcctcctccaatctgcacattgccactgggccccaaggggctccgaggggaacacgttgcccagggccccagagggtcaggcctccagacaccaccagtgcactcgccctgctgac

SEQ ID NO: 352305 - DNA, 122 bp, Homo sapiens
atggcacactttggggtgtacagtcctcaatctgtataaccatacccagtttccttaagacgaatatctgtaggacatgaagttgatcataccatttccacttaaaacccactggtgggttg

SEQ ID NO: 352306 - DNA, 122 bp, Homo sapiens
tgtgcttcttcgggatctgattcctagatttcgaccgcccttatggatcggctcagacaacgggcctgcatttttggctgccttggtacagaagacggcaaaggtattggggatcacacgga

SEQ ID NO: 352307 - DNA, 122 bp, Homo sapiens
aggccatctctacttgccttgatagtgtctcccctcaccttatgtgtgatggaaagcccccgaacacggaggttctagcacaaaactctagagactctcttctcttgagttttaagaacgtg

SEQ ID NO: 352308 - DNA, 122 bp, Homo sapiens
gaaaacactgatctcagagaggctgaggaaccagtgaacaaggcagatcagactgactcccgaaccccatcctctttgcactgtatgagaccatgcagacagacgagttggcactaaggctg

SEQ ID NO: 352309 - DNA, 122 bp, Homo sapiens
aacaagccagagccgggagatgacagcctcagcccagactcccttccagttcttgcctagcgtggggacttattctttggtcgttgggtgggggagagggggcgggagttgatgcccaggcc

SEQ ID NO: 352310 - DNA, 122 bp, Homo sapiens
tcgcgggcagccagcgctaggccgattcgaactcgaccttgttttggcgttgctaggagacgcggctcctgcgcgccccctacaggccggcgcccgggcggcgcgcgggcagggggcgggga

SEQ ID NO: 352311 - DNA, 122 bp, Homo sapiens
ccggaggcagcagaggaagccgaggggcggccatcttggctccgtgaggctctgaggtgccggggtgcggcggcggcagcggcggccagcagggcggaggctgaggcagcaagctcgctaga

SEQ ID NO: 352312 - DNA, 122 bp, Homo sapiens
ctaggagcctcaagtcctacctgggacacgaggcgctggttctcgctgagccaggtctcccgcatggcagccttgcggtcgaagcgggcggccagctgctccagcttctcctggcggatgag

SEQ ID NO: 352313 - DNA, 122 bp, Homo sapiens
ctgagcatggcagctgccccctgagctcctatgaggtggagacgtcacacagtggctgagcgtaagctcaaggatctggtgcgggtggaaggaggaagaagggcgcaccccctgctggctcc

SEQ ID NO: 352314 - DNA, 122 bp, Homo sapiens
aggaactcaatagagacttagtaaacgtttattgagtataaatggccgtggaagatataacgatgtagatgtgctctgtgacataatggatgtatttatttttctgttcactatttcattac

SEQ ID NO: 352315 - DNA, 122 bp, Homo sapiens
aactaaaactgattggaaggaaaaagcagggagaaccaggactctcctttcccctctgcccgttatcctgatcctactgtcccaaaggaatgtctgataagtcatcttcacagcagccagac

SEQ ID NO: 352316 - DNA, 122 bp, Homo sapiens
gtctttcacagttgtccttgggtgggatgctacttgtgtgtatcttcctaacaatacctacgaaagaaatacaagtgtatgcatttaggggggcactgaatagaaggctagctagagctaga

SEQ ID NO: 352317 - DNA, 122 bp, Homo sapiens
gccgcccttttcgtggtcccagggcccttccaagaaccggctaaaccaacccaagccgcgcgcacacacacttgtgcacacagggagtgtggagccagattcgataaggcaccccgtgtgcc

SEQ ID NO: 352318 - DNA, 122 bp, Homo sapiens
atgagccccagtgactagcgagaaagccaggaatggctgaatgcagtgctggagcccctgcgggaaagagctgagtcccagccccttgtctgtctctaaccctgctgccacatcttgggcaa

SEQ ID NO: 352319 - DNA, 122 bp, Homo sapiens
gccgcgcctccgcgcacgcgctaccgcatcccgtggagaggcagtgcgcaggcgcgcttccgtggagcagtcctttggccccagcagagggcttgaccgtggtcctggccccggactgaggt

SEQ ID NO: 352320 - DNA, 122 bp, Homo sapiens
ttcctcaacgctaaattgatcactacagttccttctagtgtaaacagtcccacgaagaatcgtgctgaatggatgactacataatggcctgctcctagagttcttaaatcaatccttaaaac

SEQ ID NO: 352321 - DNA, 122 bp, Homo sapiens
tgttcctcccagaagtctaaagccaggcactgtttagcctgtggcagaatctcctttagccgctctgtggcacctcagtctgagggctccggggaaccctgaccgagaacactgcagctcca

SEQ ID NO: 352322 - DNA, 122 bp, Homo sapiens
ccaatccgtaatcgcttttcctgttatggacaggcaatagtcaccaataattgtgggtcacggaagagcatctttccccaccccccggtgggcggggcctgaggcgtaccggaggccctgaa

SEQ ID NO: 352323 - DNA, 122 bp, Homo sapiens
ggaccactgtcatggggaacacagtgcggcatcacggcacacagactggcatcgcctgggcgtgcgctgctccatgtttctcagaaaaagaggagttgatgcactttttcagctgctttttg

SEQ ID NO: 352324 - DNA, 122 bp, Homo sapiens
aggtccgcgccacttcctctacggaagccgaagaggggacaaatcccggccgcagccccacggccacctcccatctaatccccacccccggaaggccaatggagaatcagcgcgggcggagc

SEQ ID NO: 352325 - DNA, 122 bp, Homo sapiens
agacatttcacgtttatggtgatttcccagaacacatagcgacatgcaaatattgcagggcgccactcccctgtccctcacagccatcttcctgccagggcgcacgcgcgctgggtgttccc

SEQ ID NO: 352326 - DNA, 122 bp, Homo sapiens
aataatacattttgtctaaatgtctattttatctgatattcacagagcttctctagtattcgtatacttactgtttgcatggtattttcttttcctttcatttactttcaatcaatatgtct

SEQ ID NO: 352327 - DNA, 122 bp, Homo sapiens
catggccctgcatagacacgagctggaatctgcaggtggcagccaggacgctgcgtgtgtcgagtgcacagtgtggcttggtgccaaccatggcgagggtggagagccccgtgcctgcagcg

SEQ ID NO: 352328 - DNA, 122 bp, Homo sapiens
gggtgctgacatggtttcagaacatggagattcacttggtccatatccaatgctagggcacggacggcctccatatgtcaggttaacagacaacatttagacctcaatattatttggtaagt

SEQ ID NO: 352329 - DNA, 122 bp, Homo sapiens
attcaggacgtaccggccatcagcgggtgcctgttttgcagggctgctaacccgggtccccgacacgtttctctgcccacggtagccagccccgctgtccttcggcctggacgcggtcctgt

SEQ ID NO: 352330 - DNA, 122 bp, Homo sapiens
cttttctgcccataagcagtcactaaatgttagctgataacccctggagaagcacagacacgaccgactgagccttcctctccaaacatcttcttaatgtaggcattttttttttttttttt

SEQ ID NO: 352331 - DNA, 122 bp, Homo sapiens
ttcaagggcctgagcatgtggaaacaatgtggcagtgctttaaggcatgcatgcaggcaccgtggtaaaggaagggcaagacaaggaagatcagcttctatttcaagggcttcctttgtttt

SEQ ID NO: 352332 - DNA, 122 bp, Homo sapiens
ccatgcctgagcctcccacccccttcctgggctcctgtgcggccgagcctcccagatgagcgacgccccctgctccacggcgcccagtcccatcgaccacccgtcggctgaggagtgcgggc

SEQ ID NO: 352333 - DNA, 122 bp, Homo sapiens
ctgctccatgtagactaaacacagcattaaaaagtcatacaaaattcttgcaatcttgaccgctggtagccatttgggtacggtataaaaaagtgtagagtatttttagtcagaattaaaca

SEQ ID NO: 352334 - DNA, 122 bp, Homo sapiens
gaggcactcacagcaaggcctgcgtgcacctgcaattacaagtggtttgatcaaatgatgcgaatggatagaacaagtcagctctttcttgaaatctggtagatccaagctagccttcatac

SEQ ID NO: 352335 - DNA, 122 bp, Homo sapiens
cgcgagcagagcgatgttactgagtgagtccctgaatggggagcgctgctgtccccaagccgattggtacttcttgtcaggaagaaacgccaagaggtgggagtgcctggggagggaggcag

SEQ ID NO: 352336 - DNA, 122 bp, Homo sapiens
gcccccgggagctgattgggcgggacgggcttatttgcatacagggcgtcaccctggaggcggcgatgggcgtgcacttgggcgtggccccgacccgggagttcatgggcctgggactcaga

SEQ ID NO: 352337 - DNA, 122 bp, Homo sapiens
gagttagacaaagagaaagaagcaggacattctaggaagaaggaacggcccaggcaaaagcgacgcgtacattggcgtggtaagttgtgttcctctgtgaaatcgaagaacatctttttttt

SEQ ID NO: 352338 - DNA, 122 bp, Homo sapiens
gagtcgtcggagcgaccgcagcgccctcgagcgggaatcaaaatcaaaaatcgccgaggacgaacagatcaacgccagcaagaacgaggaggacgcagcaaaaatgctcgttggtggcctga

SEQ ID NO: 352339 - DNA, 122 bp, Homo sapiens
cctgaggtgcttagcgtagcctccagccagggaaggggatggaagtgaggactcatctgccgggtgggagatctcttgaggagaagaaaataccgaaatcacagcaatgaccactgtagtct

SEQ ID NO: 352340 - DNA, 122 bp, Homo sapiens
gatttggggctaataattgatgggaaaatggtcagacattcagtggaaatacgtgttaatcgataatgttactgtaacaaaaataattgtaactgagtttgagcagatatgtgagggtgtgt

SEQ ID NO: 352341 - DNA, 122 bp, Homo sapiens
ccttcttatcacgggctggtgggaaacgagaccagaggacgtcatcaaaggcccttcccgcggtgtgagcccccgtggcactgggcatggcgagggccgctggccgagggcacactggggcc

SEQ ID NO: 352342 - DNA, 122 bp, Homo sapiens
gatggctcacacctgtaatcccaacactttggaaggccacaccaggaggatcattgaagccgtgagttcaatatcagacttggcaacatagcaagacaccatctctacacaaaataaaaaac

SEQ ID NO: 352343 - DNA, 122 bp, Homo sapiens
gcgagcccgggcgcgagcctgcggccccgccggccgctggcgtgcgtgcgtgcgtgcatgcgtgcgcgccaccgccatcgccatcgccttcctggtttggacagctctaccggctcctcccg

SEQ ID NO: 352344 - DNA, 122 bp, Homo sapiens
aaaagccaaatgcagaaaattaattgttaagtattctatcaccacagctctatcctcctccgcccacccacccttgaggaagacaagcccaaagttagttgatgctatggaatcacaaggat

SEQ ID NO: 352345 - DNA, 122 bp, Homo sapiens
agagcggggcgcccccggccgagcctgtgcccgcagcctcgggctcctcctcctcctcttcgccgctccgctccccatcagcaccggctgctgtcgccgcctcctctgcccttgtggtgtag

SEQ ID NO: 352346 - DNA, 122 bp, Homo sapiens
ctccccgaccggaggggccgctctttctgcgcggtgcattctggggaccgaggtggagcccgccgctgccgccatcgcctgagggaagcgagaagaggccgcgaccgggagaaaacgcagag

SEQ ID NO: 352347 - DNA, 122 bp, Homo sapiens
gaatcagaacgccaggcgcccaggaacgtgcgggacgggtgagagtctaagaacagagctcggcgaggccagggctgagtccaggagagggcggaccttcctcggcttatagcagaaggggg

SEQ ID NO: 352348 - DNA, 122 bp, Homo sapiens
actcaccaaacgcatgcgtccttcgtctccttttgttttccccgctcccgcccactaaaccggatgtgacgttgacctaccttagtcacattgttagggaaggaagtgtgccgcgcctacct

SEQ ID NO: 352349 - DNA, 122 bp, Homo sapiens
tggtctaaggtttctaaagtcagggtagatccctttcccaagtgacagccacaaatccaacgctgtatcataccctatctaaagaaaagataaaagtaaactggcttggcacagtggctcat

SEQ ID NO: 352350 - DNA, 122 bp, Homo sapiens
tgtggtgctcctagtagggctatggtggcaagctttaggaccttgtgagcctgattcacccggtaatctccacctcggaacgccctttctccccgctgcagagcatggggctgggggggagt

SEQ ID NO: 352351 - DNA, 122 bp, Homo sapiens
tgtcagtttcccctactcctcatcccctcgcaacttctgatcccctatcacttccgttcccgtttgcctgctaggctggaagcaggatgtgtctacgccctcagcccataagaagtgctaca

SEQ ID NO: 352352 - DNA, 122 bp, Homo sapiens
cactaaagagccaataaaatagaaacgcaacacacatgtgccaagagttcaacaacaaggcggaagtggcttaggtttgtggtctgttaccacatgacaacattgagttggggccaaggcat

SEQ ID NO: 352353 - DNA, 122 bp, Homo sapiens
tgattaataaagaacagtgtagtaaaagtgtagagactttggaaccagacagatcttcatcggaatcccggttctgtctctacacttgctctgtgctgtggttaagttgtttcacatctcta

SEQ ID NO: 352354 - DNA, 122 bp, Homo sapiens
tcgtgtgaggcaggcaacccgtttccccagaaaggtcagttttcattgctgtaagtctcccggctgcggggtgccgatggaggaccgccttgaaacccggctccccaggcagtttcctcctc

SEQ ID NO: 352355 - DNA, 122 bp, Homo sapiens
gtcatccctttttttctgagtgaccccagagtcgtcctcacttcctgagggggatcctggcgtcatccgcccttcttgaggggaccctgctgtcactaccctgtcctgatggccagcaccgc

SEQ ID NO: 352356 - DNA, 122 bp, Homo sapiens
ggcgctcccgtctttcggcttgcctcagttgccactgccatcttggatcagggtaattcccgcctcttgggcgctcccggttacaacctcggcgccatcttggattagttcaatgtagccac

SEQ ID NO: 352357 - DNA, 122 bp, Homo sapiens
tcaagcctgtgtgcacgcgagcagccgagggacagtgtgtctcagacggcgtggcagggacggggcgtgtccccacggaggtgggtgcagttgtgaatgtgtgacgggctgacagggtgcgt

SEQ ID NO: 352358 - DNA, 122 bp, Homo sapiens
gagccgttgcggccagtggggaccctctgctgagacaggctctgtgtccagcacctgctccgggtcacgctctgggggagtaggagtcgcacgactgtctcagccttggatttgactttggc

SEQ ID NO: 352359 - DNA, 122 bp, Homo sapiens
gacattccaaagagtgagtcttcagagccatgtcctgtctagagcgctcttcagcaactacgccggtagattcaggaagaagctgtatttttcagtcacttgggcaaagctgttcattcaga

SEQ ID NO: 352360 - DNA, 122 bp, Homo sapiens
ccacctataggctgtcttttccctttactccccacgcccaaccctccaccaccttctcaccggacaacattgggatgctcaaaagcctccagtcgcctcagtaaagccacctcacgaactgt

SEQ ID NO: 352361 - DNA, 122 bp, Homo sapiens
gagggcgatgacagccaatgaaaagcagtcatgggcgtggcgctgtcaaacttcgaggggcgggaccgaggacacagagccggggcggagcccaaggtgaaaccaatgagaagcctccgggt

SEQ ID NO: 352362 - DNA, 122 bp, Homo sapiens
gccgcctggcgctggttcacccgcttccatttggcactgcaggcagcgaggctggccctgcgtgtgcctgtgagccgggtggggtggctcacgaaggggcccaaggacaggctcatggtggg

SEQ ID NO: 352363 - DNA, 122 bp, Homo sapiens
gtggcactggagttttggcttgcaggatatgctgcaagctgctgctaaagctactaacatcgcagcttggccttttaaagaaacatttaaacagaaattgacaaggcttttaaacagacata

SEQ ID NO: 352364 - DNA, 122 bp, Homo sapiens
cctggagttacgcagctgactggcagaggtcagtacccagttctacccagtgtggccacccgatccaactctgtgactcattttaaatcataagtagtttgaacaaagacttaaaattaacg

SEQ ID NO: 352365 - DNA, 122 bp, Homo sapiens
ggtgagcagatcacctgaggtcaggagtttgagatcaggcgggctaacatggtaaaactccgtttctactaaaaatacaaaaaattagccgggtgtggtggcatgcacctgtaatcccagct

SEQ ID NO: 352366 - DNA, 122 bp, Homo sapiens
cttctgggctgcggtcgaagtgtggctggagaggccgcaggtggcaaacaaacggctttgcggcgcccgcctggaggcccgctggagcgccgccctgccctgcgcggaggcccgcggccccg

SEQ ID NO: 352367 - DNA, 122 bp, Homo sapiens
ggggaaatattcgaggagtgagtgagggcatgtgcagagggctcagagcgtttgttgcgccgctggtccacagggcatagtaatctcgccaactcaaagagttggcaccaaaaggtccccag

SEQ ID NO: 352368 - DNA, 122 bp, Homo sapiens
ctggccccagttcagctgatctccagtctgtctgcccatgagagtcccaggagagcatgccgtctaactaagccgcctgggctttgctctggacccctaaggagtccctacaggtcaggtct

SEQ ID NO: 352369 - DNA, 122 bp, Homo sapiens
ctgggcggcggccctgggctgctttggctaacttggctgcggggcaggcgcgaggagcggcgcgccgaccgggccgagcggagaggccgcccattggccggccagcgccacgtggccgcccc

SEQ ID NO: 352370 - DNA, 122 bp, Homo sapiens
gatccagcccgctccggggcagggttcaatcccgcatttgccgaagtccctggggctggccggggtggaagacggggagggctctatgtctgggaaggggctctgaagaccacgtgggggcg

SEQ ID NO: 352371 - DNA, 122 bp, Homo sapiens
ggggctggagaagtgggggggcttgctgccctcactctcgctggagctgctctcggtctccgagtcagatccggagctgctctctgagtcgctggaggagctgctgctgccgctgctgctgc

SEQ ID NO: 352372 - DNA, 122 bp, Homo sapiens
cggaggtttgtttttcacgctccaaggcgcaatggtaggtacggcagtgcgggcacagagcgggtgccgaccgcagggtcacaagggtagagcgggaccctgggggcttggcgaggggcgag

SEQ ID NO: 352373 - DNA, 122 bp, Homo sapiens
cgcggccaatggcgcctggggggcgggccgatggagggtggcgcgggcggggtcgggggccgggtcgggcgcccgaggtcctgggccggggttccgcgggttcttcgcccccgggcctttca

SEQ ID NO: 352374 - DNA, 122 bp, Homo sapiens
aacggagcctgggcaggaggtggctgatgtgggtttcatctgcatagagattccggctgacgcctctatttggaagaatgcaatagtatttgcgtatttgaacccacagccagtccttgggc

SEQ ID NO: 352375 - DNA, 122 bp, Homo sapiens
gctggccctgaggcctttccctcattttgatgccactccggagttctaatacctgtctcacgaggtgactgtagaaattaaaaataaagactgtgacttgtttagttaatataaaacggaaa

SEQ ID NO: 352376 - DNA, 122 bp, Homo sapiens
accttgctgtttggcccaaggccaggtgaggcccctccctttccaccattgccctggccccgtggccattcattcttggggtttgtctgagtcttccacagagagcagcaaagagatatggg

SEQ ID NO: 352377 - DNA, 122 bp, Homo sapiens
gcacgcagaccaatcacccgtgaggatgcgagtgtcgtgaagcgaagagcgagtgaacgccggggacacgtgaccttggtagcgcgtcctcctagcttctgttagcgggccttctgggggat

SEQ ID NO: 352378 - DNA, 122 bp, Homo sapiens
aataattcgaccgtgcacttgttaagttgtgaagatgaacgaagtagcaactcaaggaaacgtcaaccaatggtatgatttcacattaagttgtctaatttgctttgtggtggtgggttcat

SEQ ID NO: 352379 - DNA, 122 bp, Homo sapiens
acaagagggacgggggtgtggggaggcaggtagtgagccctcagggacatccacgttgagcgtctggcccagctggcacttggatatttgggtctgcaaatccagatttggttggcattagt

SEQ ID NO: 352380 - DNA, 122 bp, Homo sapiens
gtctccaggccccaaacggcctccggtcggtgggcttctccaggcccagcttgggcctcccggcggcctctgcaggcccatgtggtcctgaaggcagcctctccaggcccagctccggcctc

SEQ ID NO: 352381 - DNA, 122 bp, Homo sapiens
agcagaggactcgccgccctttctactccggcatccccattccccgctccgcgagcaccgcgggcctccccaggcctcctccaaggagaactttgcgccccgggtctcccgtcgcgcttgcc

SEQ ID NO: 352382 - DNA, 122 bp, Homo sapiens
tccgcccaacagcgaacccgcggcgagggggcggggcctgcgagacctggaggcccggagcgtcccgccctctgcgcgtgctcggtttggaacttaggctcccttgcacgcggggcggcagc

SEQ ID NO: 352383 - DNA, 122 bp, Homo sapiens
ttttacaaactcggccttcatggtcgaggatgcctggacagagcatccaagaagtgtgggcgcagtgacctgcagagggctcggaaagcatgccaagagcagccaggggacccacaccaagt

SEQ ID NO: 352384 - DNA, 122 bp, Homo sapiens
attctcagttcagacctgaataagtgtcagtagtaatttaccatctcagagacgggaggacggttgagactgcataaatatgtaccaagagattctctaacttcaacttgctaagatgatgc

SEQ ID NO: 352385 - DNA, 122 bp, Homo sapiens
agtcgtcagaagggtcccaccgtttctaaccatgtgacctgggcggttgctttacttctccgcacctcaatgtccttgtctgtaaaatggggcggatcagcccacctactgtttgggattaa

SEQ ID NO: 352386 - DNA, 122 bp, Homo sapiens
tggaaagctttatgtggtggattccataaatgacttaaacaaactaaacctctgtccagccggatcgcagcatctgttccgtatgtgtgctggggaaggcacagcagcccttcctagcttct

SEQ ID NO: 352387 - DNA, 122 bp, Homo sapiens
agggctgtacaattaatatctcacttgattctcattacagtacttttaggtgataatattcgtcatcccatctgaactaaagttcagagaggttaagtaacttggtaaaggatggaggtaat

SEQ ID NO: 352388 - DNA, 122 bp, Homo sapiens
tacgtgaagagctcaagttcacataacgaggttttcctgccgggatcacgtggccctcggcgaaggaaatccaaacaacattttgtggaaaaaaacaagctcactttgggattacccacccc

SEQ ID NO: 352389 - DNA, 122 bp, Homo sapiens
tgacgcctgctcatgtagccacactttccgcctctgcgccttagcctacttcctattggtcgagagaagtggagccgggggctgattggcttaaactcttaacagctacaaccggccttcgc

SEQ ID NO: 352390 - DNA, 122 bp, Homo sapiens
cgtttgtgcagtccggggagcgtgcgtgcagccaggacttggcttgttcgatctggggaccggcagcgacaggcacaacaacaacaaccgagtttggcacttccttcccagtataaataatg

SEQ ID NO: 352391 - DNA, 122 bp, Homo sapiens
gggggcttaggatgcagctacctcagtgcgcagggcccgtctgtcctctgggggctgcttcgggcccgcggtgctcggggcctggtgtggggcgagtagagacttccccagcctggacgggc

SEQ ID NO: 352392 - DNA, 122 bp, Homo sapiens
tctccttgtgaggctcactcagacctcctttctatgtgtgttgtatgttgagtgtgaattcgtagctttgagtcttggctcagtggtttcgggaattatcatgcaaatgtcctctctgagaa

SEQ ID NO: 352393 - DNA, 122 bp, Homo sapiens
tccaacctggttgtacagatttaccctcatactggcagtgtacaaaaatggcagtttctccgcatccttgcaaacattcggtattacatgttttagattttaagccgttctggtgggggcgt

SEQ ID NO: 352394 - DNA, 122 bp, Homo sapiens
tgtgtgggcagttggacaggatggaactcttcaggattctagtttccctccgcgtgggtgcggaggtatcaaggggtcggctcagtgcctgggtgggcaagagagaaatggacccacagaga

SEQ ID NO: 352395 - DNA, 122 bp, Homo sapiens
gtgaagtgaggtcaggggttagggtctttctgcttctcctgcaggccctccggacccgggcgcctcccagccgctgctggcctggctgctactgccgctgctgctcctcctcctcgtgctcc

SEQ ID NO: 352396 - DNA, 122 bp, Homo sapiens
ctcgatttcccgacctcgtgatccgcccgcctcggcctcccaaagtgctgggattacaggcgtgagacaccatgcccggcctaaatttcatgctcttggttaacaatgtaaagaaaacaaca

SEQ ID NO: 352397 - DNA, 122 bp, Homo sapiens
aagagagagagagagctcaagggagccttcttggaaaggtttaacccgacagcttgaaggcggcgggtagtaaagcagcgaactggtgaacgggcgtcctgacccgccacacttccctcacc

SEQ ID NO: 352398 - DNA, 122 bp, Homo sapiens
ggatctgtgtcccctctaaacctcatggtgaaacataatctccaatattggaggtggggccgggtgggaggtgatcggatcacagaggcagatccctcgtggcttagtgctgtcctcacaat

SEQ ID NO: 352399 - DNA, 122 bp, Homo sapiens
gcgggggcaggccgggctgcgaatacactccgaagttgtcgccgcagtagagggccatgtcggcggccgtgggcggctgcggcgcggccgcggcgaggggcgagcggggctggtctcgccgc

SEQ ID NO: 352400 - DNA, 122 bp, Homo sapiens
tccggtgcccaggccttgttccccaagacccacgggtgcagagcagaagcgcggccccagcgcccgaggcctgaaagctgttctttaccttcgcagctttccaagttactataataggtaaa

SEQ ID NO: 352401 - DNA, 122 bp, Homo sapiens
taaattataatgctgatcttggaaaagacagacatccaggcagaaactggctgggaaacccggagggaacactggtatcactgcgccccctgctgggtgccctgcccagaccctccagccct

SEQ ID NO: 352402 - DNA, 122 bp, Homo sapiens
ttattttggattgtcgtgtgcccaaataaaaagtgtatcgcaatgtgagaaggagagggccgctattgggagaactagttccctctgctaagtgacctttctagttgctttcatggctccaa

SEQ ID NO: 352403 - DNA, 122 bp, Homo sapiens
atgaacccttgcagaataaaggaccggctcatccccagcacctggctcagtgcgtgcaagcggctacacactacggcataagatgttcccattttgcagacggggaaacggaggctggggaa

SEQ ID NO: 352404 - DNA, 122 bp, Homo sapiens
ggatggaggtgccgggcgctgtcggatggggggcttcacgtcactccgggtcctcccggccggtcctgccatattagggcttcctgcttcccatatatggccatgtacgtcacgacggaggc

SEQ ID NO: 352405 - DNA, 122 bp, Homo sapiens
attaacctttttttgctcctctgacttaactgtttgacctgcaaaatgaatctacaagaacgttcttcccttgtgtgaccaaattctctcccttttccaaactcacacagagaggaaagata

SEQ ID NO: 352406 - DNA, 122 bp, Homo sapiens
actcacctgcagcttccccatggtcccctgcaaggtccggtgggtttccccacacagaatcgcccccagtccctggggctgaggctgctgcctctggctccttctgggccaaggccaccggg

SEQ ID NO: 352407 - DNA, 122 bp, Homo sapiens
gtggcaggggcggggcgtgagccgagaggacaggactggaaggtggctagggatgtgtagcgggagaagggtcagtctcgatcttcccctgtgaagctgtcagcgaccatcagagggtacgc

SEQ ID NO: 352408 - DNA, 122 bp, Homo sapiens
aagacgaagaactgcttttttccccggagcaaattgctttcatcatctttcccagtggctcgggtcctctgggcaggtcagccagggcctgtaggagcagcagcgctagcctctgaatcagg

SEQ ID NO: 352409 - DNA, 122 bp, Homo sapiens
acagctgcggcctgggaagggaaggagatggagcggggagagggggaagaggttgctccgcgttttccgcccgcccgcctgctttccgcgaggcactgaggcctgaaaaccgcgaggccgcc

SEQ ID NO: 352410 - DNA, 122 bp, Homo sapiens
gcggagagaaaggggtgggggaagggggtggggagacgccagcggcaggcacacctcgctcgccagccagctctgggaagttagaccacaggacagtggctgcagctgccaaggagacattt

SEQ ID NO: 352411 - DNA, 122 bp, Homo sapiens
acggctcgacctcacgtctcccgcgcgccctccgctcaccggagcgctgagcggctcctccggaccgcgttcgcctcccagacataacttaggctccgtctcgagctcctccagcgccgccg

SEQ ID NO: 352412 - DNA, 122 bp, Homo sapiens
agcggaccatgctggaccttcaacagagaaggatggctggcagagccctagtctgataggcgcccccttcctagtgcctctggagcaggagcacagtgaaaacccagctgtctgcgctgata

SEQ ID NO: 352413 - DNA, 122 bp, Homo sapiens
tgaggctggtgtgaccttgaccaggactgtccaattcaatgcgtcctgtgagtgctgggccgggatgcctgggtccctggtggggtggggtgttgctgagagcagcaggattggggtcaagg

SEQ ID NO: 352414 - DNA, 122 bp, Homo sapiens
acagtttcacctagctggagacctaggctctgagtcctagcttcctaaccaggctgtgagcgctctgaaggaagggctcactccatttatatcttcatattcattaaacacctaggtcagtg

SEQ ID NO: 352415 - DNA, 122 bp, Homo sapiens
tctttttcctcctggggcccctcgccccacaccgcccgctgcgctctcagcgcggctgcacgttagaaccagctggggtaaacctcccttaccagtcccccgccccaagagctggccatggg

SEQ ID NO: 352416 - DNA, 122 bp, Homo sapiens
ccatgaagacccggtccgggagcagtcgactgccggagactcgggaggctgagctttcctcggcctgagccagccagaccccgggcaccgcgctcacccctcttcgccgccacgtccgcgaa

SEQ ID NO: 352417 - DNA, 122 bp, Homo sapiens
gtttacggcaccggcaggccccggatgaaagaactgaaatccagaaaagttcacatgcaacgaacaatgggacagaattggaaccagtgaagccggaactcactacaccgtcccctaagtga

SEQ ID NO: 352418 - DNA, 122 bp, Homo sapiens
gtttataaagttagtaggatttctcagtatcctcagacctcatccttcagttaacattcacgttaccttgtgtatttatcttcttcctatgtcttaagatatttccactaggaattctaact

SEQ ID NO: 352419 - DNA, 122 bp, Homo sapiens
ggtatcactattgggttccctcacctctgccctgcactcatccccttttctctcacttcccggcttcccgtgttacaatctatctgccctaggagtagagcagctactgtcctggggggtgg

SEQ ID NO: 352420 - DNA, 122 bp, Homo sapiens
tccactcactgggcaaacattcctacacccgccctccccggggagctccagggtgcagggcgtggacctgcccagcccttcagggccagaaggcacggtggagccggtctgcattccgcaat

SEQ ID NO: 352421 - DNA, 122 bp, Homo sapiens
ggcaaaataggaacctaggtcatctgatgccagagtcagccttcctaactgtttatgatccgacttccctttctgtactggattttctatttctgccataacagatgaccacagacatagtg

SEQ ID NO: 352422 - DNA, 122 bp, Homo sapiens
actcacgcagcaatgcagtcattcattcattcaacagctgtctgggagcccagcactctgcgggactccatttacacacgcaccacccacctaaactgcgtaactctttatgctacgtgttt

SEQ ID NO: 352423 - DNA, 122 bp, Homo sapiens
agtctcttctgcctcattttactcctctctaaattgtcaaatgctcataaggttcttttccgagggggtcagcgcagtgcctgacccagggtgagcctcagcgagcaagagcccacgatggg

SEQ ID NO: 352424 - DNA, 122 bp, Homo sapiens
acacacacacacacacaccccgggtccccagtctcaggtggatgaatcctcaggcggaggcgaccttctcccgggccgacacaccctctgcatagtcactgcatcacgcgtgtgcccacacc

SEQ ID NO: 352425 - DNA, 122 bp, Homo sapiens
gtcacccaggctggagtgcagtggcgcgatctcagcttactgcagcctcctgggttcaagcgattgaacccagggttcaacctcctgggttcaagcggttctcctgtctcagcctcccgagt

SEQ ID NO: 352426 - DNA, 122 bp, Homo sapiens
agcccccgcatgaggcggccatccttcctgtactgctcaatgggcagccacagcaggtcccggaacccttggactagggggaaggagcgctcagagacacccgaggctgccctgcccccacc

SEQ ID NO: 352427 - DNA, 122 bp, Homo sapiens
acctgtgcccggccacctgatgcaagatgggcacacagccactgaggaagcggagtctgccgcctgccggctgcagggtgcccttaggggtggcctcgatcgccggtggggtccgcatttct

SEQ ID NO: 352428 - DNA, 122 bp, Homo sapiens
ccaacccctggctccccagagagtttgcaaagattgtgggctccaccttccctcctgattcgccacccgcaggagaatttactatttctctttcatttgtggggagaagacaccgttaacgc

SEQ ID NO: 352429 - DNA, 122 bp, Homo sapiens
tgttctccaggcctttctctgcccactcacacccaggaatgtgacctgggaggtatctaacgtgtgatcttccgggcaggtcgggaggttcctcccgccgctgccttcgaggagctgtttat

SEQ ID NO: 352430 - DNA, 122 bp, Homo sapiens
cattttgcagctgtagaaactgaggctcagagagaagtgactttgagctcacagtgtcaccgcctgctgatgggagagctgaattcaaaaccaggtgacctgacctagagtctttgctccta

SEQ ID NO: 352431 - DNA, 122 bp, Homo sapiens
ttttcaaaaataataaaatggcattgatttatgtggtcagttagcacctcggttccgctgcgtgtggtgtagacttgcggcctagaggtcagggtgcatgctggacggttcgttcaagaagg

SEQ ID NO: 352432 - DNA, 122 bp, Homo sapiens
gcccgcgggcgccctttccccgactacggggaagtccttgggggctcgcagagttgcaggcgttggcgaagtaggaacagtttgttgcggggtgaagcgtcaggcagagccgccgggactgc

SEQ ID NO: 352433 - DNA, 122 bp, Homo sapiens
aacaataaggagcaagtcgccttgaaatgcaaatatctgatgaccagggctcaaggaaggcgctcgcttagagaggctgttcgcttagagaggctgctcgcttagagaggctgctcgctcag

SEQ ID NO: 352434 - DNA, 122 bp, Homo sapiens
acgcggcctggagggtgtcactgctctaggctgtctgcagggcctctccgcagacctggacggatttcagtgggagactagagcgtcacttaagatgtttgaatgtaaaagcatcctgaatg

SEQ ID NO: 352435 - DNA, 122 bp, Homo sapiens
ctctgaggttgttgaagacaagacaatcagatgaaattattgattgctcctaagttgtatcggctttgagacacagactgaattaaagttagctttcagatctgagttaacttttgattaga

SEQ ID NO: 352436 - DNA, 122 bp, Homo sapiens
acgccccgcgccaattggctgagcgctgtcacgtgttaagagcgagcccgccctgccgagcgcctgctggccccacctcgttttcgtccaattctgggaggggcagcgagcaaatccacgcc

SEQ ID NO: 352437 - DNA, 122 bp, Homo sapiens
tttagaaagaggctgacacatcgggtaactagtttaaggtcatctgatcatgcgggtaagcgacatttttcagaaaccaaggccctccctctcatctcactagtgggaagggtggaaagaac

SEQ ID NO: 352438 - DNA, 122 bp, Homo sapiens
agccgagcagcgaggcactgtgagcacacgggatgatgggtgctgggtgctggagttgaccggctggcccggcagagctggttcccgcggggaaccccgggggcgtggtgctcacagcaacc

SEQ ID NO: 352439 - DNA, 122 bp, Homo sapiens
gggcctggcgggtgagggcggggcctggcaggtggggcggaggccttccgggggtggagccggggccttcctggggtggagccagcggccctgggcacagggcccgccggggctctggcagg

SEQ ID NO: 352440 - DNA, 122 bp, Homo sapiens
atgacagtagcgtcgcgagggcaggaagaggttaaagaccccccccaaccccacactccacgtctactgccccctgggggctactgcatccaggtttgagcccgtcacccgcagtccacgca

SEQ ID NO: 352441 - DNA, 122 bp, Homo sapiens
cctaagtcacagtttactcatttacaaattggaaataatattgtggtagtctctctgctgcgttgctgcctttcaatggcccagcctcatgttatttatacctttacgtagccccttccact

SEQ ID NO: 352442 - DNA, 122 bp, Homo sapiens
attccccacgccgagtagccgggctaagagcgcccaggacactgggaacgcaagggagcccggcaaagcaagcagactgcggaaagagcttggccacccttctcctgccaccccccagctct

SEQ ID NO: 352443 - DNA, 122 bp, Homo sapiens
gacttgagatttgaaccttgtcaggaacaaagcaattaactgagttccccgtaagttggccggacaagtgaagtgagctggaaaattgaggtaattttctggaccagtcagactagaaacaa

SEQ ID NO: 352444 - DNA, 122 bp, Homo sapiens
ttcatagagatttttaataatcaccagctatgggagatacagcttaactttgatgcctcacgttgttccttctaaattgttttcacctttctaagcaagaaaattaagtattaaagtagttc

SEQ ID NO: 352445 - DNA, 122 bp, Homo sapiens
tcgagcaccctccttgcttcagtctgcctggcagatacctacctatccttttggtctcatcgcacacattaatgaggtaaaatccaatctatgccactatatgatttggggcaagttactta

SEQ ID NO: 352446 - DNA, 122 bp, Homo sapiens
ctttctcctggtccccttcttctgcatttgtctgggaggatcctggagtgttcttttgatcgactcaatctttctctggcacttgagttctgattggctgaaggacttagaggggaaaaaaa

SEQ ID NO: 352447 - DNA, 122 bp, Homo sapiens
cttaatataaaggaaaagtattggtagcccacataactttaattaagatgaaagggtttccgagtatctgcttcctcgacaatcttatgtttaaagatgtgtgttgagctcagcatgaagga

SEQ ID NO: 352448 - DNA, 122 bp, Homo sapiens
ggcaccttcgttggccgcgttgctcaggacctgggactggagctggcggagctggtgcctcgcctgttccgggtggcgtccaaaacacacagggaccttctggaggtaaatctgcagaatgg

SEQ ID NO: 352449 - DNA, 122 bp, Homo sapiens
gaataactatagcttcagggataatatagctttaaggaaacttttggcagatgtggacgtcgtaacatctgggcagtgttaacagaatcccggaggccgggacagaccaggagccactcgtt

SEQ ID NO: 352450 - DNA, 122 bp, Homo sapiens
gcggaggggcgaggggcgcgggtacttgaacttgctcagggatcatcgcggagccagaatcgcctctttctctcgctgctggggtgggagctcgcctctgcgtttccctcgcgttttccgat

SEQ ID NO: 352451 - DNA, 122 bp, Homo sapiens
gaggagaatgataaaatgcccctcttaattttcctaagcattcagtgagtgcgcgtatgacgcaagaacacacagaggttctgcgtgtcacccatgaaaatgtgacagcacccgggaagacg

SEQ ID NO: 352452 - DNA, 122 bp, Homo sapiens
actacctcaagcaggaggctcagtccccgccaacactcgctgggataactctcgataggacggaggaggagccccccagtgggaccctcctcagtgcaatggatgggaccctcctcagtgca

SEQ ID NO: 352453 - DNA, 122 bp, Homo sapiens
gagctggcccaacgagacccaaacctaagtgatcacagatagcaggtattctatagtcaacgatcacaagggtcccccatcaccctccaagaaaaatcccacttcagtgactctcatcgcaa

SEQ ID NO: 352454 - DNA, 122 bp, Homo sapiens
caagcccatgcaccaagcttccccaggactctgatctaaaacattcacaaacctaaaagtcggaccgggcgcggtggctccggcctgtaatcccagcactttgagaggcagaggtggatgga

SEQ ID NO: 352455 - DNA, 122 bp, Homo sapiens
tgtgcggaggccaggcctcccggccaactctgagctggacgggccagccatggtccgagacgtccgtcccagccaagcccggagcagcccccggtctgccgtcccctcagccgcccccgagc

SEQ ID NO: 352456 - DNA, 122 bp, Homo sapiens
cttagggccctggtgaggggcgatggcggcggcatgattcactcctctcagttctaggcacgggcgcggaggtggattacctggagcagtttggaacttcctcggtaggtaccaggcaattc

SEQ ID NO: 352457 - DNA, 122 bp, Homo sapiens
agactggcagttgctcaagataggaagctcccgggaccagacccgagcgccagccggctacgccgtccgctggcctgagcaaataaacgcgtgtcttcaaaaaactacaatccccatggtgg

SEQ ID NO: 352458 - DNA, 122 bp, Homo sapiens
tcacccagcagttccttcagaggtggcttcccaagtcagacactgagtgcacgcgctgtccgcctgcctgcagaagtggctctgagagctgtttgaggagaaaatgggggactttgggcttc

SEQ ID NO: 352459 - DNA, 122 bp, Homo sapiens
cctaacgctctttcgtccaccgcccccacccccacccccaaagcccatggtctttcatcccgacttcccttacccgtttggggatcttggccagggagtcacacatactgacatactcggga

SEQ ID NO: 352460 - DNA, 122 bp, Homo sapiens
tccatcaatctgtcgggacccaaagcaaactgcccccactctgaagagaaaatgaaaggacggtcagcccctgccaggggacttcatgccaggacacaggacgtggccaggcatggaggctt

SEQ ID NO: 352461 - DNA, 122 bp, Homo sapiens
gtcttaactaagaaggctcccacagctggtgccaatcaggtggagaacatggcaagtccccgaaatgcacttccaaagacaggaaagattgcagtgggacagaacccagaaaatctctcaca

SEQ ID NO: 352462 - DNA, 122 bp, Homo sapiens
ccttgcaagctgagtgtgcacatacgggccaagtggcgattcataggacacaggtgtgagcgtgcctacagctgaccggatcccagctgtaaatgcctctgtggccagcccaggagttgggg

SEQ ID NO: 352463 - DNA, 122 bp, Homo sapiens
cccataaagaaaactcctattccctcaagtgtaatcaatctgactgcttttgtcccaaatcgtacttaagtatgaatgaatgaatagacctgtaatccacccagagattattgttcttatat

SEQ ID NO: 352464 - DNA, 122 bp, Homo sapiens
attactcccccattatataggttaaggccaggatgcttttacttaccccagcaaagctgacgtccctattgagcagactccagtagaagaaaacagtgcttgaaagtggcggtatttctctc

SEQ ID NO: 352465 - DNA, 122 bp, Homo sapiens
ttacaggcgtgagcaaccctgcaggcctggtattgatctcttgagggtgccatctgcgaccgtgtttttttggcagaacttaatcagtgtcccctaaaacagcttgaacgcattattggaag

SEQ ID NO: 352466 - DNA, 122 bp, Homo sapiens
atggtgaaataaatgttcttggaaattcctacccggactggctagtccttgcggaagcagcgtccgggccctcgggtaacgtttgaagagctggcagcgtctcaggctgctgcgtggcgaag

SEQ ID NO: 352467 - DNA, 122 bp, Homo sapiens
actttaacataaaaaatgaaaaactggtgtttacttgaaattatatacttctaggccgggcgcggtggctcacccctgtaattccagcactttgggaggccgaggcgggcggatcacgagtt

SEQ ID NO: 352468 - DNA, 122 bp, Homo sapiens
cacgctgggatggagaggggctgggccaggacaggggactgggcagggctgcccgaaagtcggggccggggccggggccggggccggggcggggccgcgccgggggcggaccccgggcccgg

SEQ ID NO: 352469 - DNA, 122 bp, Homo sapiens
cttccacgcttgtcacttacctgagcgcagccaatcagcacctagaggttgggctactttcggccaaaggagaacggggacttgtgggggacgctccctgcgcaccaatgaatgtgcatgga

SEQ ID NO: 352470 - DNA, 122 bp, Homo sapiens
cccacttctcaaagccaatcagcaaattgaaaagaatgagtcaatttctctccccgcggccgctcttgattggtcacagcgggggcctgctgattccgcagaacctaggcagcctgctaagc

SEQ ID NO: 352471 - DNA, 122 bp, Homo sapiens
tacacagtgtttccaataccctttccctcctttggatctttgagaacctcgtcttaaaatcggaccacagccacagcttgtctggcttttgtcacccacaagagccaatatttcaaagtcaa

SEQ ID NO: 352472 - DNA, 122 bp, Homo sapiens
ggggagggcagattttctcctgcgtgtgggtaacttgtaaggtggcaaggctgcgttccccggacccccatctgcgaggattctctgaggtccaggtttccaacgcctttctctggaaaggt

SEQ ID NO: 352473 - DNA, 122 bp, Homo sapiens
acactgcgcccgtgggcgcctagagcactggggtggatgagaacttccacctgggcttaacggagacaagctagcctagaagaatgcaagcccccagctggcgagatcaaatcgcctcgagg

SEQ ID NO: 352474 - DNA, 122 bp, Homo sapiens
tgcacatctgctcacatgttgcaatggaagaggactgagacccgctgcaaggaagtattccgtacatgtatagtgaggtcattaatgaacagctgggtgaatggctgcctcccttttggttg

SEQ ID NO: 352475 - DNA, 122 bp, Homo sapiens
acaggggaaaaagagaacaaaaatcattttctgtactctccagaatacagttgagtgtcccgattgcctcatacctccagtgagaacagcagcagcatttatgggctatctcagtgagccac

SEQ ID NO: 352476 - DNA, 122 bp, Homo sapiens
tgagtgtgtgtgtgtgtgtgtgtgtgtgtgtgtgtgtgtgcgcgcgcgcgcgtgcgcatgcgcgtgcatgctcataagggctgagttcacagtattgaaggggggaggttggtggaccacgg

SEQ ID NO: 352477 - DNA, 122 bp, Homo sapiens
ccagcaatcaggacttgtattggtcagaggacgatcaagagctcataatcccatgccttgcgctggtgagagcatccaaagcctgcctgaagaaaattcggatgttagtggcagagaatggg

SEQ ID NO: 352478 - DNA, 122 bp, Homo sapiens
cgagttcgtggctgggagcgccactgcagcaggaaagtgtgtgtgtgcgcggcgggcgggcgggcgggcgaggtgggggggttgtatagactggaaaataaagtgcgcgcggggaggggtgt

SEQ ID NO: 352479 - DNA, 122 bp, Homo sapiens
cgcgcacacaccccctttggggctggctgcaaacctgcatgactcacgcccaaagaatgccgcggaaagcaaggggagctttctggaagccgggaggtgggggccggtgcagcaccgggctg

SEQ ID NO: 352480 - DNA, 122 bp, Homo sapiens
ggaaatacggtaaatacacacccacggaaaacacaatcgtacaacagggtacagcacagccgttagaaagaaggaggcggattagcagcgtggatgtgaaaagatctgccgagatgtgtttt

SEQ ID NO: 352481 - DNA, 122 bp, Homo sapiens
accagatctcatgagaactcactattgtgatgacagcatcaagagtggatggtgttaaaccgtgagaaaccacccccactattacctccccccaggccccacctccaacgttgggtattgta

SEQ ID NO: 352482 - DNA, 122 bp, Homo sapiens
cccacaccaccctgggaggccatggccagccgcagagcggacgggtggcacctgtaagtacgtcttgaagatgtgcttggccgagcgggtgatgagttctccaatgccgattttctggaagg

SEQ ID NO: 352483 - DNA, 122 bp, Homo sapiens
aggggaggaatcaagggatgagcgccggaagggcgtcgggggccctgagccgcactaggacgcccctggagccggaaccccagcagaagccggaaccagaaccaaatcaccggtaccgggtc

SEQ ID NO: 352484 - DNA, 122 bp, Homo sapiens
acaagtgccttatcagatatcatttgtaaatattttgttccattctgcacattctcttttcgcttccgtgatatccgttgaagcacagaagtgtttcattgtacttacagtcgatttttctt

SEQ ID NO: 352485 - DNA, 122 bp, Homo sapiens
ttaagtaaggctctgacaatgtcactgattctgccttttgcctccggtgccaatattgctcggctcagcactgttactgatcctgtctttgtgtaaaattctaatgtttagaaatatattgc

SEQ ID NO: 352486 - DNA, 122 bp, Homo sapiens
atctggaccgtctagccggggagggcgtcaaggccaggtacctcatgccaccctttgtcacgatgacctcccggtcccgcttcaccgccatcccgggtaagcgccactctgcccatttcacc

SEQ ID NO: 352487 - DNA, 122 bp, Homo sapiens
ctggaatccctgtgttaaaaatactaaagaatcaaacacctttctctagacccttagatccgtctccatctcttaccctgtttctctgtctccttttatttatttttttatgtttatttttt

SEQ ID NO: 352488 - DNA, 122 bp, Homo sapiens
ccgccccccgcccccttgcctctgccgcaaagtttatttgcaacaaaagggtgccaggagcgagcagccaagggcgttgggcaggcggacgcagagtcgaggaaccaagcgctgggatcccg

SEQ ID NO: 352489 - DNA, 122 bp, Homo sapiens
ggccaggccctgttcccctcctcgctgtccctgaggaacggggtctccacacatggcccgcggtgcccaggccacagatggcagtgagctcttccgagcacccaaactaggacagcaggagc

SEQ ID NO: 352490 - DNA, 122 bp, Homo sapiens
agttagtgagatcagggctcgccccgcgtgctggtgttagtgagatcagggctcaccccgcgtgctggtgttcttgagatcagggctcaccccgcgtgctggtgttagtgagatcagggctc

SEQ ID NO: 352491 - DNA, 122 bp, Homo sapiens
gcgactgcagctctccctgcacctctgtcccatcttcagctacagaaccggagctccatacgcgggcctgggggtcatctgaatgtaaacttcactttagagtcaccatactctcataatct

SEQ ID NO: 352492 - DNA, 122 bp, Homo sapiens
ttgggctgtaagctttcgctacatcacagaattgtgccagtgtttctctttggagtgcctcgccagctttaacaaccgtttggatatgacttgctcgggcaaaagttgtgcattggcccgat

SEQ ID NO: 352493 - DNA, 122 bp, Homo sapiens
tacctttaatacctcattcactgactgaatggatgaataaaactgtctacttctccagcacgtggaggtcttggacagtactgtgttataacaaaggccatctgtgttgtgtcgacaggcca

SEQ ID NO: 352494 - DNA, 122 bp, Homo sapiens
cgaactcctgacctcaagtgattcacctgcctcagcctcccaaactgctgggattacaggcgtgagccaccatgcccagctgcacatcccagcattcaaagaccaaagagcctggagttctg

SEQ ID NO: 352495 - DNA, 122 bp, Homo sapiens
actgtttggactgtcttctatgtgacagacactgtgtatagggctagtaccatcactgaacgctttatagaacatcggtattagtgtttctgcatattattggccccatttttccaaaggag

SEQ ID NO: 352496 - DNA, 122 bp, Homo sapiens
cctgtatgccagaaaacagaagtgaatgggtatggtgagcaacagaagtctcttccacaacgacaaaccactactgagtctttattatggtttggacactgtattatggttcagcacttggc

SEQ ID NO: 352497 - DNA, 122 bp, Homo sapiens
acaggacgggggctacgagacagaggtggccctagtgatttctagttttgggtttgtagccgtgaacattttccacactctgcagcttctttcagtttctttctgacagcctgggaaaggaa

SEQ ID NO: 352498 - DNA, 122 bp, Homo sapiens
tctccaacaccaccgccgcctctcgcttgcagagctccacctgaagcagaagggggataacgaaggaggtctctataccatggctcgtacaaggtggactgcccgcaaatctaccggtggta

SEQ ID NO: 352499 - DNA, 122 bp, Homo sapiens
ggctgcaacctccgtcccgcagtccaattagcagccgcgacccggcgcccgcccacgccgcgtcacgagtcagccaaagatggctgcgcccaggtaatttgagcaaaggccacagtgaactc

SEQ ID NO: 352500 - DNA, 122 bp, Homo sapiens
gggggagtcacggcacagggggggtcacggcacgggggggtcacggcacggggggagtcacggcacggggggggtcacggcacggggggagtcacggcacggggggggtcacggcacggggg

SEQ ID NO: 352501 - DNA, 122 bp, Homo sapiens
actcggtgtctgaggggttttgcccgtggcttgttctgctacatttcttggttccctgaccgggaagcgaggtgattaacagacagtcggacggtcgaggcagccccttaggtggcttaggc

SEQ ID NO: 352502 - DNA, 122 bp, Homo sapiens
ggccttgaggcctcacgaagttcttaagcgcccaccgcacctgtcctctttccccccatgcggggtgagatggcccgggaatgagccttcccagcagaaaaacttacatctagaatgtcgat

SEQ ID NO: 352503 - DNA, 122 bp, Homo sapiens
attcaggctatgttccaacgtaggtgcccagaaaggtggggtgagcccggggacctgttgcgacctacacttgttcttaacaaaaccgaaggaagcctgcataaaacttctccacgtctcat

SEQ ID NO: 352504 - DNA, 122 bp, Homo sapiens
ccacagttaaattgagcagctgggccagggtaagcaatttgagactcagtgtgaatttcacgagggactgttaaccatgaccgtcctcatagattaaattaggtacttgctaattttttccg

SEQ ID NO: 352505 - DNA, 122 bp, Homo sapiens
cctcattaccgagggagagctgccggggctggcaggggagccagacggcggcggagggggcggggaggcctccttggctccctggcccggattaaatatttactatgttttgtttggccttt

SEQ ID NO: 352506 - DNA, 122 bp, Homo sapiens
gccttcgggcggcctcggaaactcttggtgcctggacctggagcctggacagggaccgggcggggcgagaccggccgtcgggggcgcggcccgtctgggggcggggcctgtcctctctcgcc

SEQ ID NO: 352507 - DNA, 122 bp, Homo sapiens
cctgggggcgggtgtctctttgtcagggaggtgggggtgtgaggaaggggagggggtctccgggcctgggaaggtgacagagcccatcagtttcatgactggtgcctggtgtgtgggtgggt

SEQ ID NO: 352508 - DNA, 122 bp, Homo sapiens
agctctatatcctgctggactgggccgccaacgtctacggcaggtgagtctcggccagggcgcccagtggcgaggacagctgccgcttcctccgcaggccttggggagccggctttgaggag

SEQ ID NO: 352509 - DNA, 122 bp, Homo sapiens
actctttgtgctccagggagcttggatttacctgccaaaagtaaaaagtaaactcaggtccgtggatgtgtctttaaaaaacagccaaactggctgggctgtcagcagaaaggagcgtcctg

SEQ ID NO: 352510 - DNA, 122 bp, Homo sapiens
ggctaatgaggtttatagaacatttaacagagttttttgaaaatttggaaacaatgcagccgttatctttgagagcatccttgcccttgagtttcccagctgagatctcctccctggggtct

SEQ ID NO: 352511 - DNA, 122 bp, Homo sapiens
ccgggccgcgaaagactgaaacgcctacccggcccagcaggggggttgggggcggggtctcggctggccacgcccctccctcaagccctccctcagagtagccagtcaaccgtcaactcctg

SEQ ID NO: 352512 - DNA, 122 bp, Homo sapiens
cctgccctcagcatttagtgtcctcgttcatccaacaagcatctaataagcactggggtacgcagtggtgggtgtccgccccgtcactgggtgtccagcgtggggtgcggaggtggatgtcc

SEQ ID NO: 352513 - DNA, 122 bp, Homo sapiens
ggccgcgtgaatggagggaaacagtacaagtgctttgcaaccgagtcattgagtagtcagcgccaggtcgtaagagacacctggactcagagctgaagagctgtcagtacgaacacccagca

SEQ ID NO: 352514 - DNA, 122 bp, Homo sapiens
agagccccgccccccgcccgggagaacccattgggcagacccgacccctcccactgggcacgaccccgccaccgccccgtctgcccctggtcttccggaggagcctgcggctgaatcctgcc

SEQ ID NO: 352515 - DNA, 122 bp, Homo sapiens
acagctgcccggtccccccacctccccttttttcttcctttttttttttttttttttaaacggggctcctggggattagcaatacaaacagcagcatcaggactgacttggcttcttaaagg

SEQ ID NO: 352516 - DNA, 122 bp, Homo sapiens
gagccagtgtccactagttcacaaaagatctgattattccctttttctaatgcacagttacgttggtaaaggttgtacatccctttgcggaggactaggagaaagactaacagtataaacat

SEQ ID NO: 352517 - DNA, 122 bp, Homo sapiens
gggctttgttttcctgaaagcttttgttcttctgtcagcatattcaaaacaaccaaaaggcgttacctgctctgaaatccctgagatgcctatcctcagaggtgcttttggctgtcttatgc

SEQ ID NO: 352518 - DNA, 122 bp, Homo sapiens
aaaagttaaaaagtgaagggatgagcacacccgtcctgagccggccgatgtggtggagctcggagctcgggagccggggacgccctggagcgtgggcggaagggaggccgccccgagagccg

SEQ ID NO: 352519 - DNA, 122 bp, Homo sapiens
tagttcgaaggccctcgagagcggctagagtctggcggccgagaggactagttgtcccagcgtgccctgcgcctcagcccgcgcgctcgcagcttctcgctctcgcctgcctgcccgctccc

SEQ ID NO: 352520 - DNA, 122 bp, Homo sapiens
acgctccacagatgccagttacgcccgaaaacgacacagaacacaggtgcggacagggaacggcatcctcagagcatggtcaggggagaaaagcaagctggaaggagagatgattccatctg

SEQ ID NO: 352521 - DNA, 122 bp, Homo sapiens
cactacaatcggactttcacttccagttattaccattaaccccttccagatcattagtgccgatgagacaatcattccaaaatttaggacttgataatagagctgcaagaacaaaacagaag

SEQ ID NO: 352522 - DNA, 122 bp, Homo sapiens
tgtgagccactgtgcctgggctgttagtaagtgttattcaaagaaagcctcctggggtcacgtcaggtgggaggatggggctgaagagcattgaaggcggttctgtgcctctctgagcctct

SEQ ID NO: 352523 - DNA, 122 bp, Homo sapiens
gcgtaacggttcacacactgatggcgcctggaggtttggcgaaatactgacaggatgcgacgtcaacgggagcgcagggccaaggtacaggccccgcccagtccggtcacatcccccggaat

SEQ ID NO: 352524 - DNA, 122 bp, Homo sapiens
ctgtccagtgcgcccggccacggcggcaccagggagtctctcccgctgcccacctccccacgaagatacagaaaatgccaccggagacgtgcggacagcgctcactagctatggagagctcg

SEQ ID NO: 352525 - DNA, 122 bp, Homo sapiens
gctgctgctttgctccctggaccgagtgggaagccaaggggccttgtggtccctccgccgcgaccctcgccctggcccccggcccacgcagccaggtggctgtccccaacccattccccggc

SEQ ID NO: 352526 - DNA, 122 bp, Homo sapiens
gaatttaaaaccaaaacaattggacagcacttgttttgacaactgtgcggcactgtgccacgggaccctggtctttgaaaccttggcgtgcgcgagaatttcccagtgagtttgttaaaatg

SEQ ID NO: 352527 - DNA, 122 bp, Homo sapiens
ataactaattatagcagaggcctgacccgactttcggctgttggcctcccttccccacatcgaaaaattcaaatcatgacccagggtccatcctagaagtgtgccatctgtatttatgaatg

SEQ ID NO: 352528 - DNA, 122 bp, Homo sapiens
attttattttgcataattcctgcccttgtattgccttaccttgtgtttgtttcattttgccgggcgatatagctggatgtagggagatttgtggggaatcggactgagcttgaaaggcagtt

SEQ ID NO: 352529 - DNA, 122 bp, Homo sapiens
ttcatgaatgtcaggacagtgaggccccgtgggtgagccggaggcaggcgagggtgtggtcgggagggaacgcgtgcttgatccctccttggtggtacggagacaggattgtggggccgcct

SEQ ID NO: 352530 - DNA, 122 bp, Homo sapiens
ctcctgcctgcccatcctcaaggatggcaggacatgcagcatccctaggaggaatttggccgagactagaaaagcagggacgatgccgcctcctagggaaggagcatttttcacaaggcggt

SEQ ID NO: 352531 - DNA, 122 bp, Homo sapiens
ccctggctgttagtaccttctttcccggagtcctggtccacgagttggatttactgctgtcgcgggtgggcctcacgccattccctgtccctcggccccctgagtgagtccggtctcccggc

SEQ ID NO: 352532 - DNA, 122 bp, Homo sapiens
cacctctaccactttccccctcagtcattcccctcagccactacggtcatccttcacttgcggggatatgccaagtgtttgctgcctaaggacctttgcacacgtgttccctctccttggaa

SEQ ID NO: 352533 - DNA, 122 bp, Homo sapiens
tgtcctaccaaggtctcctaaaagctgcagagctaaaacattctccttcccaggccctcccgaataaggacaaaggctaagttgtctcctaccaatggtggctgagtatgcaaacgagacag

SEQ ID NO: 352534 - DNA, 122 bp, Homo sapiens
gtcccaagtcctggcctcagtgctcctagtgtcccctgggcttgagaagaggtggtgaaccgtctgcagggccagaccttggagcacgcctccactgccctcccggaactggatgtgctgag

SEQ ID NO: 352535 - DNA, 122 bp, Homo sapiens
tccacctgttcctgtcagggcgcggacaggcctccctgtccacctgcacctgtcagagctcggacaggcctccctgtccacctgcacctgtcagggctcggataggcctccctgtccacctg

SEQ ID NO: 352536 - DNA, 122 bp, Homo sapiens
gacatcagacagtaggctattgacagtgtaccccggggaaagctaaatgcaaaagagaagcgaactgcctcatgaagtgagatcaggattacacggtcagaaatgtggagagggtgattcag

SEQ ID NO: 352537 - DNA, 122 bp, Homo sapiens
ggcctcccctcgtccctcttctagtggtaccgcccaggccttaatcacccccattccgtgcggtggtatctcccaggctctacattctcgggagcggcgcctcccaagggggtcctgggacc

SEQ ID NO: 352538 - DNA, 122 bp, Homo sapiens
attctggagaaacaaagccaggatccatttcctcttgatggctggcaaactgagcccgggcgggaagtcctggaagactgagcctggggtggcgttggacaccaactcccaggtcctcgccc

SEQ ID NO: 352539 - DNA, 122 bp, Homo sapiens
gttgccaactaatgaaaatgtgctctgaaatccagtcagctgggtgggcctgaggcataccgtgggaaagtttcccacaggctgattttctgtccatctcaagaacctgtatgttctcttct

SEQ ID NO: 352540 - DNA, 122 bp, Homo sapiens
ccccgtttttgactgggacacgtcacgagtgacctttgccctgtgagagaagccgtactgcgagaacaagcagagcaccccggcttcacctccggagggtgtggcataggccagggcccgga

SEQ ID NO: 352541 - DNA, 122 bp, Homo sapiens
ttcccacatcagttttcttgtctttaaatattcccagtcttggcagggagtggtggctcacgcctgtaatcccaccatgctggtaggcccaggcggatggatcagctgaggtcggagttcga

SEQ ID NO: 352542 - DNA, 122 bp, Homo sapiens
cggcggtgacagagaactttgtttggctgcccaaatacagcctcctgcagaaggaccctgcgcccggggaaggggaggaatctcttcccctctgggcgcccgccctcctcgccatggcccgg

SEQ ID NO: 352543 - DNA, 122 bp, Homo sapiens
cggccaggcgctaaataaggccacggcccgtttcctccttcaaaagtcccttgtaaagggcgatagcagaccccatcaggcaaaaagctgagaagccagggttgaaatagaggcctctttct

SEQ ID NO: 352544 - DNA, 122 bp, Homo sapiens
gtgtcgatagggcgggtccctgctgagtgggctgacccccaagatcagatcagagagcatcgtcttaccagggcctgggactcagagccacagaggggccgttgagaagctgtccaaaggca

SEQ ID NO: 352545 - DNA, 122 bp, Homo sapiens
gtcttttctttcatctctttgtcttgtgtctttatttctacactctcttgtctctgcacacggagagaaacccaccaaacctgtggggctggaccctacactattccaggtagttgttggaa

SEQ ID NO: 352546 - DNA, 122 bp, Homo sapiens
cgagcggagcgaccgggttaagcctggggggacggtcaggagcagggctgcggagtcctccggcgcgcgtccggcgggcgcagtgaaccggagctgaagcgggcactggcgcccgggcctgg

SEQ ID NO: 352547 - DNA, 122 bp, Homo sapiens
ccggccctgccccactcacctctcctgcccttcccgctgcaggctaaccttgccgcgggccgagccctgcctcgccatggaccaggactatgagcggcgcctgcttcgccagatcgtcatcc

SEQ ID NO: 352548 - DNA, 122 bp, Homo sapiens
tatagagtacaaatggaagtaaaagagtaattgcaatttgaccccaaaaaagctacgtggcgctcccatctggctgttcctgtactgaagttctcagtaagtttctactttaaaacagattg

SEQ ID NO: 352549 - DNA, 122 bp, Homo sapiens
cgccccggttactccatcccagcgagaagacgaggctgcctgggtcctggttttctcgggcgggggtcaggggtccgccgatcccctctagcgctccgggcggcggggcccgagaaccaagg

SEQ ID NO: 352550 - DNA, 122 bp, Homo sapiens
cggaaagcagccgagcggagttcaaatttgagagcgtttggaaattggaagacttggtggcgaacgagggtcaggacctgcatcctgcctcagagagttatcgacgtatccggaatgtggga

SEQ ID NO: 352551 - DNA, 122 bp, Homo sapiens
ttttataaaatgagagcggggagggcggccgaagacgagtgtgcggagccttaggccccccgctcgggtccgcttttcgtatattcgggtaggatcggatgtggtgtcttccgttgaagtcc

SEQ ID NO: 352552 - DNA, 122 bp, Homo sapiens
ggagagccaagggtgccccacattggtgacgagtcagtattttgcatggatctcatcacacgtgaccatgaaggacgagcaagcatgagctggcaccagccacccccttctccgcgtggagg

SEQ ID NO: 352553 - DNA, 122 bp, Homo sapiens
cattttggaaaaaagaggatcccctcaagagcaaataggcggaaacaatgaccccgcgcccggagtttttctgagctcctaaatagggagagagacccgacaaaacaaacaagcgaaggcga

SEQ ID NO: 352554 - DNA, 122 bp, Homo sapiens
aaatgtctttctgtttctgttattaccacagtgcacagttctaccttcaaggtatcacttcgactatatcattctcagaattttttcctaaagataataatgacatcaatataagtgattgt

SEQ ID NO: 352555 - DNA, 122 bp, Homo sapiens
aaatttcctctctctcactgcattagtccattctcatgctgctgccaatcaagacatacccgagactggataatttataaaataaaaaggtttaattaacttacagtttagcatggctgggg

SEQ ID NO: 352556 - DNA, 122 bp, Homo sapiens
gtcgtcaggcaggaagaacgatggtgggtacctgctcgggggtcaggtgtggcgtgggggcgggggagctccttctgaacctgccccaagcggagacctgggagtctctacctggggaagct

SEQ ID NO: 352557 - DNA, 122 bp, Homo sapiens
tggagacggggtttcgctgtgttggccgggcgggtctccatcccctaactgcgagtgatccgccagcctcggcctcccgaggtgccgggattgcagacggagtctcgttcactcagtgctca

SEQ ID NO: 352558 - DNA, 122 bp, Homo sapiens
tccgcgtgagaggtggaggaagaggggagtggggattagagcagtgtagtgggagggagacgctatcagccactgtgggctttgaaggtggaggaaggccactagtcacagaatgcaggtgg

SEQ ID NO: 352559 - DNA, 122 bp, Homo sapiens
attagggggagcagattagtgtttgatttagtggtaggaactccgatgagcctaacgtttcgttttagtggtgccggggatgggatgagggtccctggttcctcatagcccttgtggtggtg

SEQ ID NO: 352560 - DNA, 122 bp, Homo sapiens
ttgcctccaaagataaccactattaattattttacctgtatgcacatgctactttcccatcgagaagtgaagtctcttcttctaactccttgaatccaatttgtgctttgaccaatagatac

SEQ ID NO: 352561 - DNA, 122 bp, Homo sapiens
tcctcacttttctaacaaaacaggcccaggcttccacagggtcaagcggtctcaagccggcggctctccctggtggattcctgcaggtgagttcactctgagagctcagccagggccagcag

SEQ ID NO: 352562 - DNA, 122 bp, Homo sapiens
gtcaggatcaggctgaactcaacaaggcgaaaggacctgaacttcttgtctttccaaggacgtttcagaggatgaaagcgcctcacttcttgtcccactaggacaccgaggtgatcgtctcc

SEQ ID NO: 352563 - DNA, 122 bp, Homo sapiens
ccctgcacataaaagccagcatggtccgtcgaggcactgttgcccaggtggagactgctccggacgccccccaggggacagtggccggcagcacctgctgcagcacgaggcacagagggtgc

SEQ ID NO: 352564 - DNA, 122 bp, Homo sapiens
ctcctctgaaaagatcgccgccatcgcggagaagctggacctgaagaaaaacgtggtgcgcgtctggttctgcaaccagaggcagaaacagaaaagaatgaaatattccgccggcatttaga

SEQ ID NO: 352565 - DNA, 122 bp, Homo sapiens
tgctttctgttcccccaacatacacacaaatataaggtttataagggcagagctctcacccgttcattaatgtatcttcagtgattgacacatagaagatcctcaataaatatttatggaat

SEQ ID NO: 352566 - DNA, 122 bp, Homo sapiens
gcaggggctaggcttgaggggttttggggggtgtagaaggtggccctctgctcctccaggcggcgggactgggcttcagccaccaggtccagaaggagttcagtctgcagggagagcaggga

SEQ ID NO: 352567 - DNA, 122 bp, Homo sapiens
ttaaaaaaaaaaaattaagtgggtgtggtggtgtgcacctgtaataccagctactctactcgggaggctgaggcaggagaatagcttgaacccgggaggcggaggctgcagtgagcagagat

SEQ ID NO: 352568 - DNA, 122 bp, Homo sapiens
cgaggcgccggcggccggtcccagctggggtgggaagcagcttagcggaggcttggacctcgggccctacactcacccttccagggccctcgaccaggccttcccttctccccctctagccc

SEQ ID NO: 352569 - DNA, 122 bp, Homo sapiens
atgggtcggattccacgctgggagccggcctggatctgcgctttaggaagccactgcgggcgaccctatcttgtcgccaggacttcgcatctgatgagcctcagggcacacaagttagagag

SEQ ID NO: 352570 - DNA, 122 bp, Homo sapiens
tccaaacacggctgataaccccaagcccaagctggcatcagtggccacgttctgtacacccgagaaacttgaagacttcctatgtcaaactgggaaccccacctgcttgccggcctgtccca

SEQ ID NO: 352571 - DNA, 122 bp, Homo sapiens
attctaatcagaagagttgacacaatcaaatagccacacggcacgaagacgcatgcgtggcgacaacaacaacaaaaaccacaacccacattacttgagggctcgggcgtgcgcaaagctcc

SEQ ID NO: 352572 - DNA, 122 bp, Homo sapiens
agtgagatgctcagatgctgctgccctctagtggccgccagttccctgcaactcagaccacgtgatttctgggaaaaggccctccctggaggagaactgaaacttagggtggggactgtaga

SEQ ID NO: 352573 - DNA, 122 bp, Homo sapiens
tatttgcttaaacacaaataccactgtggcttcactgtggctttcgctgggtccaggcgtcgagcctcctgattcagtgagtgctttaaaaagggggtgatgtgggcgacacaacctggggc

SEQ ID NO: 352574 - DNA, 122 bp, Homo sapiens
gcaagtgagaaggtcttggctttgagcctccaatttcaatcagacagaaagcagaccagtcggcaggacagtatatgcctctggagatccgtgctgatgtgggggcctcagatacaagatgc

SEQ ID NO: 352575 - DNA, 122 bp, Homo sapiens
tgatattactcacaatacgataaacaggctgtgagtccatcgcgggtcctaagagccaggcgggcaagaggggctggctctcactctccgcaccgggagtacatccccccgtgaccttgtta

SEQ ID NO: 352576 - DNA, 122 bp, Homo sapiens
agcgcctgaggagacagacagtgtagactttagggtacaattgcttcccctctgtcgcggcggggtggggagcgtgggaaggggacagccgcgcaaggggccagcctgctccaggtttgagc

SEQ ID NO: 352577 - DNA, 122 bp, Homo sapiens
ccaggaactcgtcgttgaaggcggccgggtcgatgtaggcgctgatgtcgatggacgtctcgtgctcgcagatgccgcccagcggctccggggcggcaggtggggcgggaggctgcgcgggg

SEQ ID NO: 352578 - DNA, 122 bp, Homo sapiens
ctcaggcaggatagtgacgggccgtgtgactgtgacgccatcatcaggttggtgagatggcgtgaccgcgtgctgcctatcagtctcctgtatgttcctccaccatctatcttgatattcag

SEQ ID NO: 352579 - DNA, 122 bp, Homo sapiens
gtgtggtgcttccttctgaccttgggcacctccgtcttcagttgcccctcctgtgaaaggcgaaatgtatcgttgggttctttgaggccctttacagctctgacatcctataacattctgta

SEQ ID NO: 352580 - DNA, 122 bp, Homo sapiens
cctcctggcggtgcctgcagcaggtgggccgggccgtgcattgtctccttccacaactgtcggcctccgtggcacacccgtcctgtgctccggtggagcgatgctgtagtatatgcactcta

SEQ ID NO: 352581 - DNA, 122 bp, Homo sapiens
tattcctggattctagagttttgtttcccaagcatattcacatactttccaactgcatagcgtttagcagaaggcaaaactgttgtttccctaagaaaattttaaattcctatttccctgga

SEQ ID NO: 352582 - DNA, 122 bp, Homo sapiens
atcgggagccctccgtaagcaagacaagcacccacctgcggtcagagcaggggtccggctcgcggtcggggttgtccggcccctcccggcttctcacctgcgcaccgcacggtccagccccg

SEQ ID NO: 352583 - DNA, 122 bp, Homo sapiens
ccctgctgctgtccccggagggactcggcgctcagggaagctgcggtgtctcagcgtcgccgccgcctctgctgcaactccgccgagccgctgcctgccgctcttcccgcttcagctcctcc

SEQ ID NO: 352584 - DNA, 122 bp, Homo sapiens
gggcactgtttatcagcatagttttgagtttgtgcctctttgtaggatgtatttgagttccgttatgccaagatgccagatgaaccactagaaccagggcctttaccagtctctactgccat

SEQ ID NO: 352585 - DNA, 122 bp, Homo sapiens
gtgaggtcggcgatccgggtgtagctggggttgcaggcttggcaggcacggcggcggtatcgggaggcacagcgatcttgagggactcaaaaggctgggacaactgagaccccgtgttctgg

SEQ ID NO: 352586 - DNA, 122 bp, Homo sapiens
cagcagcagcggcggcggcggcgcctccgagacacagaccagggtttgttcaaaatcacgcgcccagccccattccaccgccgcatcccataatacgctgggccctccccgcccgcgcgccc

SEQ ID NO: 352587 - DNA, 122 bp, Homo sapiens
ctcctgtgacccagcaaggccatctgtgtattatatacatatgtacgcacatttaatccacgtgcacacgtgtgtgttatcctatgtggagggcacgtgtctgccgtgacccagcaaggcca

SEQ ID NO: 352588 - DNA, 122 bp, Homo sapiens
aagtcatggcacaggcaaacggggtcagcccttgtctgtctcgtacattcaaatggatatcggggtgagaaaccaacagctgaatgatgacaccgtgttggctgctgatggccacgtggatg

SEQ ID NO: 352589 - DNA, 122 bp, Homo sapiens
cggagcttctttgaccgcggcgtgagcggttgcttgggccagaaggttctctggtggaggcgctcttcctggtgtcccgcccagtaggttcgttcgcaccgcttcttccacactctttctcc

SEQ ID NO: 352590 - DNA, 122 bp, Homo sapiens
cccccggaggctgtgcgcaggcgcagtggctgctaccgcaggcagggggcggcaacatggcggagtgagcggcggcgtcggggcttcacaacaacagtggtggccgtagcagcggcggcagc

SEQ ID NO: 352591 - DNA, 122 bp, Homo sapiens
cttgcaaatgaataagttatggaacagagtgtaagttgctcctggtgacaagggagtgatcgagaatgacttctaaggttgaaaactgagtggccaatgaatgttgatgccttaactgagat

SEQ ID NO: 352592 - DNA, 122 bp, Homo sapiens
cccagggacagtcacactggcccacactaacaaattactaaccgatgtctcaccttcccccgccccattcccaaagataagggtgtcagggcacctgcatctgaagaagaaagacatcagaa

SEQ ID NO: 352593 - DNA, 122 bp, Homo sapiens
gcggcccgggtctggccacctgggtcagctgcacgcccccgccccgggctggccggacctcgtagcccaggtcccaccacgccgtgaagtttgcggaaagttttgcagttgcttccccgccc

SEQ ID NO: 352594 - DNA, 122 bp, Homo sapiens
aggccgggggcggagccgcagagggacccgcggccggccaatcagagacgtagcggagcccggcggactacattgcccagtaacctcctgggctccgctgtgtttttctattctggggtgta

SEQ ID NO: 352595 - DNA, 122 bp, Homo sapiens
cccagtctgcgccgccgcagctccggaaaccgctgaattacagccccttcagccaatcctcgcccagccccagcctggccgaggcacgccgtcatgcataattcatgaaaggccagctcgtt

SEQ ID NO: 352596 - DNA, 122 bp, Homo sapiens
gaattaagaaaaccaaaacaattgcaaagcccgccctgtgctctaacaatcttccctcttcgatctcttcattggccagtgtcatgcaaacactctggattaaacatgcatggtctaacatt

SEQ ID NO: 352597 - DNA, 122 bp, Homo sapiens
agacagagccaagcagggagctgagggcgccccggcggaggctgctggtgcggggcagggcgtcctgcccgtctccccgccggggcagtgacgccttccctcgcctctgctggctggaaggg

SEQ ID NO: 352598 - DNA, 122 bp, Homo sapiens
ccttctgagcctccctcccccacccgaggttcggcgtcatcgtcaccacagaggcagccccgggtgcagcagggacatttatgtcctaaccagcaggatggaagggcatgtggctccctcgg

SEQ ID NO: 352599 - DNA, 122 bp, Homo sapiens
aggctccggcaatgagaataggccccgcccccccgcgcagccaagtctacggaccaagtccgagcctgcagacaagctccgcccccacgagggcctgctccggctgacagcgtccggcagcg

SEQ ID NO: 352600 - DNA, 122 bp, Homo sapiens
aggtggtgcgccgtggcgccgcctgcgaccggcagctcgttcgccgcactttggaggcttcggctgcccctccgacccacgtagggcccggacccgggcctccttgtgaacagcgtgccggc

SEQ ID NO: 352601 - DNA, 122 bp, Homo sapiens
acagcaggcattgcatcacactgttgtaccagctctgcgaaagcacggttgggtatcctgcgcccagcgttgcaccttgacttggagtcacagctcaacaaccccctaaaaggagcctacta

SEQ ID NO: 352602 - DNA, 122 bp, Homo sapiens
cgtgatctgcccacctcagcctcccaaagtgctgggattacaggcgtgagccaccgtgcccggccagtacaagtgttttttaagaagtacaagaggccgggcacaatggctcacgcctgtaa

SEQ ID NO: 352603 - DNA, 122 bp, Homo sapiens
gtggcaccctctggtgttttcttttagcctaatgttcctgaattttcattcctggagttacgtaccttttgaattataattcacttttacaatacagcctagagttggaatctgtcaaatca

SEQ ID NO: 352604 - DNA, 122 bp, Homo sapiens
ggccacgacctgtccttgtctaaatgtgctagttcccctgtccctctgtgcccttatggccggtgggaggagggagaaaggaactggcaagcttggattgcctggagatctccaacagccga

SEQ ID NO: 352605 - DNA, 122 bp, Homo sapiens
ggggactggaggcgacagcgacaacagcggccgtccccggagaccccttcctcaggggtgcgggtcagcgtcggcgccggggagtcactaaaccccgcctaccctgccctgccctatggggc

SEQ ID NO: 352606 - DNA, 122 bp, Homo sapiens
tgggggcggatccgctggaccaggcggggtagcgaagggtggagttgcacagagcggcctcgagtccggactggggaaggctcagacagggggtggaacaaaggccagaaaggaggcggggg

SEQ ID NO: 352607 - DNA, 122 bp, Homo sapiens
cggccgggcggggcggagtcgacgctcggcccggcctctgctcacctcatccacgggagacggaagtcttggccctgctccgctcccccgagaatcgggcctcgccctgctgggcggctgga

SEQ ID NO: 352608 - DNA, 122 bp, Homo sapiens
gaggttggggcctggctcaccaggggcctcaaggcccccctggcctgtccctggcctcatcggccctcagggtcagaggtccttgtggcctgacttgcagtgtgggctccctagagagtggt

SEQ ID NO: 352609 - DNA, 122 bp, Homo sapiens
agtagtcgtgtaggcccagtgcctccacgtccacaggcttgtagaagggccaggcgtaggcggcgtgcttcttggcaaacatctccttgaggatgccgctgcagcacttgagctgctccgag

SEQ ID NO: 352610 - DNA, 122 bp, Homo sapiens
tttgttatctagaaaagaaattcattttatctatttcaattcagtcatataacctacctacgaatagaattttaataattaatacaatgtcctgaactgtaatataaaggagaaatagaaag

SEQ ID NO: 352611 - DNA, 122 bp, Homo sapiens
aaaaaagttggctcggtgcagtggcttatgcctgtaatcctttttagcactttgggaggccgaggcaggtggatcacctgaggtcaagagttcaagaccagcctggccaacatggtgaaatg

SEQ ID NO: 352612 - DNA, 122 bp, Homo sapiens
cgctcccgacctccccgacccttcccgtgtccccgcgccccgccgggtcctaaagcccggcgcgcaatgggttagtccacgcccgcttcctgagaccggctcagaccacgattcccagcaag

SEQ ID NO: 352613 - DNA, 122 bp, Homo sapiens
ctgcgctgctgcagcacatgaagctggccctgacctcagagagattctaaacctcggccccggggcgcagaggcccaggaagtgcctgtacttggctgaccggtggtagtgagacacctgga

SEQ ID NO: 352614 - DNA, 122 bp, Homo sapiens
aagcggccagcgcaggggctgaccactcagacctcactcctcgcaggggtgagcgggcgacgctgcctcacgtcattgtcctgccctccaaggcccgcgctcgtcctctgacaggatgccct

SEQ ID NO: 352615 - DNA, 122 bp, Homo sapiens
tggagtcagaacctgcttggctcccggtaactcctgtgggggtgtgatatatttcctgaccgtctagccgaggggcacgggggaacccctggtctgggaatctagctctgattctgttgtta

SEQ ID NO: 352616 - DNA, 122 bp, Homo sapiens
cgggggtggaggagcacggaggctgtcatagcccgagccgcatggagaagaccccagtggcgctgttttaaaaagcccccaagaagtgaagagcgcgcggcgcggggccggggcccgagcga

SEQ ID NO: 352617 - DNA, 122 bp, Homo sapiens
aggtttccgccccgggccagcagtagccagtccccgagggcccatcttccagccctgaagcggtaaacgcctcacctctagtggcgagtgcgaggaaccgcaccctagcccgcctgactgtc

SEQ ID NO: 352618 - DNA, 122 bp, Homo sapiens
tcgggggtgatccagggggaaccaggtatcaccctcacccctgcccccaccaggtgccaccgactgcagcagctacttccgcctgggcgtgaagggcgtgctcttccagccctgcgagcgga

SEQ ID NO: 352619 - DNA, 122 bp, Homo sapiens
tttttcatctatgaaatgcgggtgatgacgcgcggctgcgagttaggactgcccagtacacgaagaaccctggacaaatgtacttttattagtcttactagaacccacattctcatttaatg

SEQ ID NO: 352620 - DNA, 122 bp, Homo sapiens
ctgcccttctgtgagtttccccgagccccaacaacaagcttcctcctcccatccccagcccgcagtaagagtcaggctgaaaagcaaatcagtgacactcagagagaagcaagaggctgttt

SEQ ID NO: 352621 - DNA, 122 bp, Homo sapiens
tgaatctgatcctcccaggtccgtcggaagttagagctggaagctgctgtgacccgcctgcgggcagaaatccaggaactcgaccagagcctggagctgatggagcgagacactgaggctca

SEQ ID NO: 352622 - DNA, 122 bp, Homo sapiens
tgacgctgaagctcagacgctgcagctgctgcacatagcgacccagtccgttgtggagaacgctggccaagaagcggctcggagtcccgcgcgccgtcatagctacagcttggaggccgcgg

SEQ ID NO: 352623 - DNA, 122 bp, Homo sapiens
aagcacagagagccctttaaagatgttgacctgacagcagcagggggcccagggtgaccacggagcaaatcagggaaaggaaacttaggtcgccacacatttgatttaaaagaaaataactt

SEQ ID NO: 352624 - DNA, 122 bp, Homo sapiens
tggggcctctgcggcccctcctcctggacccctgcagtctctgttcttctctgggttggtcgcttatcccactggtaatcaaatttcctcctaagtgtctgtctccacaccagacagtggtt

SEQ ID NO: 352625 - DNA, 122 bp, Homo sapiens
cggcgaagggtggtagacgaggatccggacgagaggcggcggaaatttctggaacggaaccgggcagctgccacccgctgcagacagaagaggaaggtctgggtgatgtcattggaaaagaa

SEQ ID NO: 352626 - DNA, 122 bp, Homo sapiens
gaactggttgctgtggagattaaaaactttgtacacagcacattgcacacaggcgatacgcggttgttagaatctcattaccattgacaatggctaattatagatgtgaacatctaaatgtg

SEQ ID NO: 352627 - DNA, 122 bp, Homo sapiens
gggctctgagggggcacaggtagaggcccttcgcgaagggattagcatagtcccaccccccggcgcgagcctcgggccgggcgctgattgggcaggcagcggccgacgcggcggcgccgggc

SEQ ID NO: 352628 - DNA, 122 bp, Homo sapiens
cgggcactatgctgagcaactgcagctcaggtcctgcagagtccccgagagtactttgcacgaagagagctcgagttctgtagtcaggcatatctgacctaccgaacaggtgccctggtcaa

SEQ ID NO: 352629 - DNA, 122 bp, Homo sapiens
aaccaccgccccaggctaccagtttattatttggagctgttcaaccactatcccgtccaacgttttttgagcgctatgtgccagggcactttgctagttgtggaggtgttttaaagatatgc

SEQ ID NO: 352630 - DNA, 122 bp, Homo sapiens
caccaagttcagctcccaggtgtccaagcccaggcggtgagtgactgtggggtgcatgtgcgtgcacttgtgtattcgtgggagggggttacgcgctgtctccttatcctgtgcacacttgc

SEQ ID NO: 352631 - DNA, 122 bp, Homo sapiens
tccgctcttcctcagtgcactctctgactgaagcccggcgcgtggggtgcagcgggagtgcgaggggactggacaggtgggaagatgggaatgaggaccgggcggcgggaatgttctcactt

SEQ ID NO: 352632 - DNA, 122 bp, Homo sapiens
ctgggcctttgcacccggagcgccccgcgccccagcgcagtcgtccccacgcgccgggatcgccaaattcccacctggggcccgcctttactggggggctgcaaaagagacttagaagcaga

SEQ ID NO: 352633 - DNA, 122 bp, Homo sapiens
ccctgcctgggccctgcctgggattttcctgccaagtccatggtctccttgggctccctccgcaactgtgcccccgtttcctgtgctcatcccacacccagcctggccccgaacaccgtggg

SEQ ID NO: 352634 - DNA, 122 bp, Homo sapiens
caccgcatgtaaattaactctcaataaagttccaggaaaagtaattccaattccagcaaccggattttgggctcagttcggaggctagcctgcaagccttgctggtgggtggcctgtagggg

SEQ ID NO: 352635 - DNA, 122 bp, Homo sapiens
cagagccccgcagcggcagcagcagcgcggactccccggtcgctgcctctcccagcccggcggcctgggccgtcaatcaagctggccctgccccgccctcgggctgcagggggcggccaatc

SEQ ID NO: 352636 - DNA, 122 bp, Homo sapiens
tggggcccgagggatgcgcacagctgtgcctgagaggtgctgctctcccgccaccgaagtcgctgggaaattctgctgcactgagacattttaatgtcggatgttctaatcctgcgggcaaa

SEQ ID NO: 352637 - DNA, 122 bp, Homo sapiens
aatgagtggcttagctctgaaggtgacgatgcatgtgggctagctctccagaaatcaggccgacttgctataaacgccccattccgtccagctcaatgaatggccttccttcttttctctcc

SEQ ID NO: 352638 - DNA, 122 bp, Homo sapiens
ccgcggcgacccgggcctcggccgctgttcctgcccgaactgagggcacatcgcgcttcgcgcgggatttcccataaattcaggctccgggcaagattgtgtgttttttcctctccgcgggc

SEQ ID NO: 352639 - DNA, 122 bp, Homo sapiens
tggtctgggtccctgcttcctgagcgggaagtcatcagcccgggccgatggctggggtggcgctcgtgtggggtagtggctttgtggtccctgctgttactcggtccgtgagtgtgcatgtt

SEQ ID NO: 352640 - DNA, 122 bp, Homo sapiens
tcgctcctgttccattagctgcggctgtaatcttctcatttaaaatcgctgctgttcggccgcagcggctctggcagggctgggggtttgatttgtgtatgtgatttgttttactctttatg

SEQ ID NO: 352641 - DNA, 122 bp, Homo sapiens
ctggtcctcagtgggtgggtcactgtccagggacagcctccaagcagaggggagcacccacgccctgcagcaggtctcagtcagcttctacatctgggtgtccctgacataggactgggaca

SEQ ID NO: 352642 - DNA, 122 bp, Homo sapiens
gtagaatgtctgggcaagagggctacatgcagtttctctcctttcataactatgaggtagcgtcaccattttacaaatgctggtgctggcctctgagaggttatgtcactttcccaaggtca

SEQ ID NO: 352643 - DNA, 122 bp, Homo sapiens
gtgctgcccacgcctggaggcccccactgaccctcagacccgcgtctgcgcccctctccccgcaccccgaggcagagttgggaaagcagtggtcttagaccccccacctcgggcactcggaa

SEQ ID NO: 352644 - DNA, 122 bp, Homo sapiens
gcgagagcgcgcgctgacacaggctaggtccaggccgccagcagccaggactcagggaagcgtgagccggccagtgcgctgaggacagtattgctctccgcgcgacgcgtgggaagcccctg

SEQ ID NO: 352645 - DNA, 122 bp, Homo sapiens
gtgttttggaagaaacactgttttttgatggcaaataagatttctcagagcagccaaatacgtagaagcagctgtgagatctctcctatgcaatagtgccaacctgacattaacctaagtct

SEQ ID NO: 352646 - DNA, 122 bp, Homo sapiens
tctgtcatggaactcaacagagtatcctggtgcggataaccagtgttgggagttagagcacggactctctccacctgcacggtgctggagctctgcacaccccctctgcagccatccctcgc

SEQ ID NO: 352647 - DNA, 122 bp, Homo sapiens
ggccatgtaatttaaaacctctgaaaagtgtgctgcggtccgtgcacagcattagtataacgtgagggctgaatgcagcccattctctggagaacttcctcacacaccgcagcaaagagaag

SEQ ID NO: 352648 - DNA, 122 bp, Homo sapiens
tagtcctcaacaggctttgaatttccaagtggcagagactatatcacactatatcatattcgttttttttttttgtggtagagtatcactctgtcaccctggagtacggtggcacgatctcg

SEQ ID NO: 352649 - DNA, 122 bp, Homo sapiens
gtacagcctgtcaattccaggccccaagcctgcataccatgttgctgtgcgggacgctgccggcggctgtagcacaatgctaagtatctgtgtatctcaacacagaagaggtagagtaaagt

SEQ ID NO: 352650 - DNA, 122 bp, Homo sapiens
cgtagctttccttgggtcattctggagcttgggcagggacataggccactcataggcttccgggctggccccaggcagatgtgagggggtgatgcctacctttgcccctccctctcgtcccc

SEQ ID NO: 352651 - DNA, 122 bp, Homo sapiens
ttatgagattcgtaagggcagatcctttgtcatatttatctcccataccaagtggcctgccgtggaagagagggagtgttgaaaacaaatgtgtcagtgcttaatgactgttggtcaggtga

SEQ ID NO: 352652 - DNA, 122 bp, Homo sapiens
ctgccataattcctggtccagctgcccgaccctgactctctcccgctcttttcctcaggtcgaaggtttcctttaagatcacgctgacgtcggacccacggctgccgtacaaagtgtgagta

SEQ ID NO: 352653 - DNA, 122 bp, Homo sapiens
gggacagcctcctgcactgctggttgccttacaggccagctctgtgctgttttcctaattcgtgcaattccacctcagatctcattcacatcagctcacactgcagggtaacttgacatgga

SEQ ID NO: 352654 - DNA, 122 bp, Homo sapiens
ggctccggcagcggtggtcaggggtgaagcccaggaagacgatgcccacgtagatgggcgcgaaggtagccgagagcagagccaagaggaaaaacatttgcttctggaaaaagtgaaactcc

SEQ ID NO: 352655 - DNA, 122 bp, Homo sapiens
gcagcctcagcccattggcctgcgggaagtggagttcccgaacagaagcccctcagtctccggaagccccgcccggcagactgttcccaggatgcaacacgggctcgcgtctaaaagagctg

SEQ ID NO: 352656 - DNA, 122 bp, Homo sapiens
aggcaagaagtctgctgacctcgcagtacccgaattttgtttctgaattccacatcacagcgctgtccttggccaagtacaacatgaagatgctacatgttggcccagcaggaaggggcaca

SEQ ID NO: 352657 - DNA, 122 bp, Homo sapiens
gccggtagcccggcgggcgcgtgggctgagctgcagcagaactggggtgcggggacggaccgggagcaatccgtgctggaggcagtctcttgctgtgcagggggtggtgcggcctgaggaag

SEQ ID NO: 352658 - DNA, 122 bp, Homo sapiens
aataaccaaagaaaataatagactttttcaaggaggagaatcaccaagaatggagagcagcgaggctctcaggttggagaagacgattagctgtttggccacagggaataggccacatatga

SEQ ID NO: 352659 - DNA, 122 bp, Homo sapiens
gccccgggggcgcagcagctcggaaatgcggcgccgggacacacgtgccgccgcgggccgcgcctccgctggtcgcgtgccctaccatcgccgccctcccggcttccgcagctcggcggccc

SEQ ID NO: 352660 - DNA, 122 bp, Homo sapiens
ctccctggggaccctcagtactttttgtcacagacatgactgcttaagaaacaaggagctcggggtgacaaagaggtctgctctggaaggagggaagcaggaaggtgtctagtgtagatgta

SEQ ID NO: 352661 - DNA, 122 bp, Homo sapiens
cgagatgtaaccgtagtcatctgaccctcccgtccggactctgattgggctttggagatacgcgtccctcccggcgctgtacggcgaccccgccccagcagcctgagggggcgggaacagat

SEQ ID NO: 352662 - DNA, 122 bp, Homo sapiens
accgtcatgaaatgtcctcccggccctgctgcttgagctactcgtgggcggggaccttgtcggtgtatcactgctgtttcccggtacctgctcagagcaggtgctccacaaatatcgagccc

SEQ ID NO: 352663 - DNA, 122 bp, Homo sapiens
gaggttagacttgggaccggttagagggagcactcgctgtggtgagactgtgctgaggaacgtggggacaagttagggagagtacctgctgaggccgggccactcgggggaacgctatccaa

SEQ ID NO: 352664 - DNA, 122 bp, Homo sapiens
aaggcagttttgacttttttttcctcgctccttcctgattgcttctgttttctccggaagcgagtcatccactgggagtgtggtgttgctgaagctccatgcagtggctcaggtgctgctgg

SEQ ID NO: 352665 - DNA, 122 bp, Homo sapiens
cgcttctgtgtttgtcaagaagcccacctggtcttctagacctgaagcggcaggaccctccgttcccaataatacaagtcaccaaaaggagcgtcccagagtccagttttaccttcatgtgc

SEQ ID NO: 352666 - DNA, 122 bp, Homo sapiens
tgaggacgctgtatgtgaacactcagatatcctgatacctaacccaatccttgtatttgccgcccaggagtccccggttgggtccaccttgctatacggcctcagaatctcatttcctcttt

SEQ ID NO: 352667 - DNA, 122 bp, Homo sapiens
ccggcgttcaaggacaggaggccttgggggcaggagtgggaccaagagcggggcatgtcccggggcctcaccatacaggctctgcacggccagcacgtcgtcccagctgagcagcgcgtcgc

SEQ ID NO: 352668 - DNA, 122 bp, Homo sapiens
tgcaggtaccaggaagagctaaacaacttcacctgttgaagactggctagtgatggggaacggtcctcctgcttcccgcttttgtttccacttcccccattaactgttgtactctgttgagg

SEQ ID NO: 352669 - DNA, 122 bp, Homo sapiens
acttgctgcagctggtgctgctgctcgacctgcccagggacctgggcggaatggggtgttcgtctccaccctgcgagtgccatcaggaggaggacttcagagtcacctgcaaggatattcaa

SEQ ID NO: 352670 - DNA, 122 bp, Homo sapiens
gctgccagactacctgagagtgggttgattggactttaagatctcatcctcccttatccacggttttgctttccacaattttagttacatatggtcaactgcagtctgaaaatattaagtgg

SEQ ID NO: 352671 - DNA, 122 bp, Homo sapiens
gctgcctttcgagcctggctgcgctgctatggcatgccaggcatgagctccctgcaggaccggcatggccgtaccatctggttccaggttgggccctactgttcacacaggcagagacccca

SEQ ID NO: 352672 - DNA, 122 bp, Homo sapiens
atgctgttgccgctgctgctgctgctacccatgtgctgggccgtggaggtcaagaggccccggggcgtctccctcaccagtgagtcctcctgttcaccctcccgccaggctggaggtgggag

SEQ ID NO: 352673 - DNA, 122 bp, Homo sapiens
tcctccttattggaactcgtatgtgatttgttaataatcagacatcagggctcaaatgagcgcttcactcccgttccttgatgtcactgtcttcttttggccgtccccaaatgcgaagccag

SEQ ID NO: 352674 - DNA, 122 bp, Homo sapiens
tgggtagaacaggcaaacattgtttcagcctgtagttgggaatgtgaatatttatcctgtcgacttaattcatacaaacagaactgcaggcaggcaggcagaagtattttatggctctaggt

SEQ ID NO: 352675 - DNA, 122 bp, Homo sapiens
agttcagtgcttttatcttcctcatttttcagatgaggaaactgagcaacagagctgtatcgctaatacatggtagagcctggacttgagctcacgtggcctgtgttcagagctgccatctt

SEQ ID NO: 352676 - DNA, 122 bp, Homo sapiens
gccgccacgcctgactggtttttgtattttttggtggagatggggtttcgccgtgttggccgggctggtctccagctcctgacctcgagtcatctgcctgcctcggcctcccgaggtgccgg

SEQ ID NO: 352677 - DNA, 122 bp, Homo sapiens
cagagggcgtggccacatccacagttgtccacgccacactgtgggacgacccacaagccacgcgtgtgatcttctggccttctaagccttgcacgagtgtgggcttcctgttaaccgtggtc

SEQ ID NO: 352678 - DNA, 122 bp, Homo sapiens
gaagacatctgctgtttacattggtcatttgtctcagaggtcaaaatacagttctatcatcgtccttatggcaatcgtgatgacaacctaacagccaggaagtagcctctcattttactctt

SEQ ID NO: 352679 - DNA, 122 bp, Homo sapiens
tttttaagcccgtcggaaaagcgcgttgttggggtgggagtgacccgattttctaggtgccgtctgtcacccctttctttgactaggaaagggaactccctgaccccttgtgcttccggagt

SEQ ID NO: 352680 - DNA, 122 bp, Homo sapiens
gcagggagagaggcccagaggggcttgcgggtagccgagttagtgcaaccaaaaggacgccgcacggacgaacagtatctggggctattcatcggcgatgctgggaaaagcacgtcagcctc

SEQ ID NO: 352681 - DNA, 122 bp, Homo sapiens
tgctatgtcccttcaggaggaagcgtcttagcctcgctgggcctcggtgtcctgtccgtacggtggcggctgtaatacctttcttgtagggtcatgggaggaggatgtaaaacataggtaaa

SEQ ID NO: 352682 - DNA, 122 bp, Homo sapiens
ctgctcagtcaagatgctcagggccatggtgggaccctgctccgcgtggcctgtggcaggcggcctctgcctctgcaggagagggtctgtgcagctgggatccacatacaactgctgggtct

SEQ ID NO: 352683 - DNA, 122 bp, Homo sapiens
gaaggaagccgggagctttaaaaataaccccggcactgcccagagcgcggctgttcctggcgagtcacgctgactcagcacattgcctctgcctccccgccgcgcccgcactccctggcccg

SEQ ID NO: 352684 - DNA, 122 bp, Homo sapiens
gccagaagcgcattccttactctatgcatgcaactgaaacatgggtcctgcacttacgtccggtgttgcaagcaagattaaaccactcctaactagcagtgaaaagtctaggaaggatcccc

SEQ ID NO: 352685 - DNA, 122 bp, Homo sapiens
cctcgcgctctcttgctgtctctctctctcacacacatacacatactcacacccactcctcgagagggagaaacaaagacaaatacatgtggaagagagggtatgcacacacattaccctga

SEQ ID NO: 352686 - DNA, 122 bp, Homo sapiens
tggccgaggtgcaggtgcctttggtccaggtggggccgaggggtcccctgggtgagaccccgtcgtggtcgaggttgtgttttctgtctcccgtgctgccggcccctccagcacgtgccgcc

SEQ ID NO: 352687 - DNA, 122 bp, Homo sapiens
cgacgtcctgtggggcggctggaagcagcgattacagaacacccagttggccatgccaggcgggcgaccgcagcggcgaggccgggcccacgcgaagcccacgcaaggttgggaccagcctc

SEQ ID NO: 352688 - DNA, 122 bp, Homo sapiens
agtattccccgattttaagaaaaaatgggttttgtgtttgtgacagaaagaaaaatggcacggggggggtcacaaagaccagcgctctagccagaactgccccatggttgtcatgtgacctt

SEQ ID NO: 352689 - DNA, 122 bp, Homo sapiens
ctcccacttctctctccagccacgctttcagttccagggttagggctagtggctacagtacgtgccgtgatttcaggcagctcctcgttggtctggtccttggctggagctccctccagctc

SEQ ID NO: 352690 - DNA, 122 bp, Homo sapiens
cccttctgctctctcccctcacccagagaaatacatggagtttgaccttaatggaaatggcgatattggtgagaaacgggtgatttgcgggggcagggtggtgtgcaggcctaagaagacag

SEQ ID NO: 352691 - DNA, 122 bp, Homo sapiens
ttcctggcttcaagaagcttacagaggtgtgtggagggacagatacataaagattagaagcgaaagcagttattatgtaaaatttaaagagacagaaaaagagagtgtgtgttattcctccc

SEQ ID NO: 352692 - DNA, 122 bp, Homo sapiens
tgttatgttttcccttgaccatcccaggcctaagggcagtgcctctcacagtctactatgcgtatgaatcacctaggatcttgttaaaatgcaaactctcactgagcaaatagggagtatgg

SEQ ID NO: 352693 - DNA, 122 bp, Homo sapiens
ccgctcccaaggagtccccgttctccatcaagaacctgctcaacggagaccaccaccggccgccccctaagcctcagccgcccccacggacgctcttcgcgccagcctcggctgccgccgcc

SEQ ID NO: 352694 - DNA, 122 bp, Homo sapiens
aatgaaacagctaatttccattttgaaaattaaaagaaaacagcacagagaagttaaatgcggtgtagcaaagttatggggtctgcttgagggcactaacctcaacagattattcctcctct

SEQ ID NO: 352695 - DNA, 122 bp, Homo sapiens
caaacctgtagacatgtccctcggctcagaattcattaaagagcagtggttctgctgacacgggccgccccccgggatgcagcggccagtctcagaatgagagggatggctccgtctccacc

SEQ ID NO: 352696 - DNA, 122 bp, Homo sapiens
taatctccacttagactaactccactagcacttcaaacataacccaccaaaaatgaaatacgcatgtcctcccctcctatcctgtacttcataactcagtcataccaacctttattcagaaa

SEQ ID NO: 352697 - DNA, 122 bp, Homo sapiens
cgatcatcgcctcctagaatacccagctcaacgtctacctggagtcggctctacaggacgcgctcatctcaaacccagagctcaggcttttagggcagagagcgagagaaaggcttgcttta

SEQ ID NO: 352698 - DNA, 122 bp, Homo sapiens
gtcttgaactcctgacctcaggagtcccgcctcggcctctcaaagtgctgagattacaggcgtgagctaccctgcccaggctgaccatgtatattcctaatttttgtacttttttttttttg

SEQ ID NO: 352699 - DNA, 122 bp, Homo sapiens
aataatccactgttgttctccaaggtccatctttcttttgcaagggccaagttaattgagcgaaatgtggcagaaatcactactcagcatctttcaagtctttgatagcacatcagccactg

SEQ ID NO: 352700 - DNA, 122 bp, Homo sapiens
tggaaaggggtcccaatccagaccccaagagagggttctttaatctcatgcaagaattcccggggagtccacagagtaaagggaaagcaagtttattagagaagcaagagaacaaaagattg

SEQ ID NO: 352701 - DNA, 122 bp, Homo sapiens
gccaaattttgttgaatgaatgaagaaacaagaggaggggctggggaagggctggaagggcgggcagatgtgggaccagactttcccgaggctccagatgaggcctttggaatacaacgctc

SEQ ID NO: 352702 - DNA, 122 bp, Homo sapiens
atactggacttctttccttatcgctgtagaaaaaactagataagcctgctagattctgaccgatttcactctgacattggaaagggtcctacaaagaattaggttccaccgttataggtgct

SEQ ID NO: 352703 - DNA, 122 bp, Homo sapiens
agagctgctcctttaagaacttcctttcccttttactctatgtttacataacacaggggccgagcctccgccgggccgaggggggcggggagtgggcgcggacggccccacgcgccggggga

SEQ ID NO: 352704 - DNA, 122 bp, Homo sapiens
aaaatagtcggggcaagcaggagcagacggtgtgggagggtgaatctagagaagggggtgcgggatggactctgaccagcctcctgtgtcactctaggggatgtggacttcatcttgcagcg

SEQ ID NO: 352705 - DNA, 122 bp, Homo sapiens
ccggaggggccaggcaaacttttctttctcttttgccccctccagaggtaaagtcccgaacgcggactttccggcggggacgcgatcggggggcatctgagagggaccccgggctgcgagac

SEQ ID NO: 352706 - DNA, 122 bp, Homo sapiens
tctttggtccccagtaaaggcgctgaagcactgcatgatgttgctgagaacttggggactcggttctgtgagggggaaaagaggttgaaaagagggtttcctcttatttcttccctgtgcgt

SEQ ID NO: 352707 - DNA, 122 bp, Homo sapiens
ctgactcactaacaaagcctccattgtcagaaaagatgagtgatttgggggacagagtagcgtctgatatgtgtttgtttgcctgtgggccaaggccctgctacccaacctctgtggtcatg

SEQ ID NO: 352708 - DNA, 122 bp, Homo sapiens
cccacctgattcagaataggggaaagtctaacaaactggttggcaaaagacttggaaaagcgaggaagggcctaggctctgtccttaaaaagggttgtccttaataagggttgttggaatcc

SEQ ID NO: 352709 - DNA, 122 bp, Homo sapiens
tgcgcttttccgatgggcttaaaaaacggcacactacgagattatatcccgtacctggctcggagggtcctacgcccacggagtctcgctgattgctagcacagcagtctgagatcaaactg

SEQ ID NO: 352710 - DNA, 122 bp, Homo sapiens
atgcttggcaacaaggcccttcccagctaggcttctcctcgctgaggtttccctggtccacgaagcatctgttgttggcagttccttgcactcacctcaccaacccccatctccacccattc

SEQ ID NO: 352711 - DNA, 122 bp, Homo sapiens
cctggctgccctggagccccacgtgtacgagtggacggccgggcagcagggcagcgtcagcgcggagcacggagtgggcttcaggaagagggacgtcctgggctacagcaagccaccggggg

SEQ ID NO: 352712 - DNA, 122 bp, Homo sapiens
tgcccccgctcccagcagtcacctggaacagccacctggccagagtccacgcctcaacttcgaggctggcgatccagaaagagcacctcacgccctgggctgcaagcgcagccggacgcgcg

SEQ ID NO: 352713 - DNA, 122 bp, Homo sapiens
gagagaccagggacgctgcgggtcggcccctcgggccctgccgccagtctggactctgcgcgctctcgaaccacgcccgccggcccagctcgcgccgcagcgcactccacttccggctcggc

SEQ ID NO: 352714 - DNA, 122 bp, Homo sapiens
aatcctgctttctcaacctgggggcagaataataccaccatctagccctcagtcagccatcggttcacctggtaaaccattggccacatttatggaaggttttagaaagaggtccctattga

SEQ ID NO: 352715 - DNA, 122 bp, Homo sapiens
gggggccttttatgaggcagggtccctgactgatgagcaaaccaccagaggagggtcaggcgagaggcccagtggagggtaacacacatggagttcagtgacccctttgttccttgaggaga

SEQ ID NO: 352716 - DNA, 122 bp, Homo sapiens
agtgggttgagagaaacaccatctcctgtttagtgactgactatgatattttaatcacttcgacatactcacaagtcacatggaaaccaagcattccttaaaatgcttcctgggtttcctta

SEQ ID NO: 352717 - DNA, 122 bp, Homo sapiens
gcacccggggccccgcggtctccacgctggcggcgccagagcggccctggtgccctcccgcggccgcgcctgccgagaaaagcttctctgcctgggagccatcacgccccgccccaggaaac

SEQ ID NO: 352718 - DNA, 122 bp, Homo sapiens
gttttctctcgctctcagcgggctgccaggcggggtgaaagttgctgcacctgctttaggcgaattatggtagcactagaagttggtctcccctccctccgccgcttgctctctcgctccct

SEQ ID NO: 352719 - DNA, 122 bp, Homo sapiens
ccagcaaggacctggagcccttgcccaggctgcgagaaggtgcagctccgtcctcccaggcgcagctgcagccaccttagttggggacccaggcctccctgtgctcttgggggcgggcagcc

SEQ ID NO: 352720 - DNA, 122 bp, Homo sapiens
ctcatgagggacaggagcaaaaatgtgacctcgtccctagagcacagcttctgaagtctgcgaggttttgttttgctttaaaatgcattgaaatctaaagctgtaaagcattgcatggcttg

SEQ ID NO: 352721 - DNA, 122 bp, Homo sapiens
cgagacccgcggactgctgaggagtggtccctgggagactgtcacctgctccgttagcatcgggggaagggagtagaaacggaatcaaaatatgtgtcccctctttaattcaccctaggtgt

SEQ ID NO: 352722 - DNA, 122 bp, Homo sapiens
caggacacttgcacgaccaggcatgcttatgctccctagatgtggacaccagaaatgccccgttgtcctctctgctctcccccgtcacaggtcagaggccgggattctctacgttttcgaac

SEQ ID NO: 352723 - DNA, 122 bp, Homo sapiens
ttggttggtgagaccaatagcgatactttttcttgtctaatttggtttccgggaaagcttcgttcaagtcgtcaatggtcatctgatcaaatggtattaagttcctcatcttctccagctgt

SEQ ID NO: 352724 - DNA, 122 bp, Homo sapiens
acgtcctggggcaggtccctacgcctttctggacggaggaggtcagatgagatgcaggaacgcctgctgatggagagcagggcagccggctccgaaagtaccgggtccaatttccttcaccg

SEQ ID NO: 352725 - DNA, 122 bp, Homo sapiens
tgcagccattaaagcaaagattcaggaatttgcatttgtgtggagtcattagacaagcaacgagatgagagtgcctgtgaggtgatcaagtgctggttacagagaaacttggaggagaagtc

SEQ ID NO: 352726 - DNA, 122 bp, Homo sapiens
gcagctgccaacaatgagctgtgtttcttagggctttggccacagttaatataggcatttcggaaaggcggagcgagagcctccagggcgggcggcgccaagacgcggattccggaacaccg

SEQ ID NO: 352727 - DNA, 122 bp, Homo sapiens
tggagcaggaccaacttaccagctcgcggtgctccctagaagctggattcttcgcaggtgcgagcacaccccagatgccagcgtggacccttgagcaactggaagttaaaaacccacgaaaa

SEQ ID NO: 352728 - DNA, 122 bp, Homo sapiens
actctgcctggcacctgcagtcctctgacgacggggatttctacgcccctcccagctccccgcctctctccggactccctgcagaggttgctggagccaaattcaggcccctgccccctcgc

SEQ ID NO: 352729 - DNA, 122 bp, Homo sapiens
ggctggccaccatcttgggagctctgtgagcaaggacccccggtaacattttggtgaccacgaaggggcatccaaagcgtttgtctcttccagaattgaaactgtaaaactacaaatcattc

SEQ ID NO: 352730 - DNA, 122 bp, Homo sapiens
caggtcctgggcccgctcgccgaggcgcacgcccttaagatccagagagaggatgaggcgcgggttggccgtgtcgggatccaaggtgagctccactgcagacagagacagggagaaatgtc

SEQ ID NO: 352731 - DNA, 122 bp, Homo sapiens
agtgagaattctagcactgcttgggcgggccggcagtgctgggggacccagcgcaccctacgcagctgttggcccgggtgctaagcccctcactgcctggggccggcggcacccgcaggcca

SEQ ID NO: 352732 - DNA, 122 bp, Homo sapiens
cgggctgaggggaaggaaatggggccggacgtttccaggataagtccttgcgtccacaggcgccacctctgagttgctcctcccccttcctcatccctccattttaccacctcgaaatcaaa

SEQ ID NO: 352733 - DNA, 122 bp, Homo sapiens
cgctcccagcgtctccctatgggggccccactccagcctcttacactaccgccagcaccccggctggcccagccttccccgtgcaagtgaaggtggcacagccagtgaggggctgcggccca

SEQ ID NO: 352734 - DNA, 122 bp, Homo sapiens
ttcagcgggcctctccgagagcacggcgcgtctgaggatgcgtagtaaggataacgggcccggaagccggaagttcaaagccggcctccagccagagtgacggcctgcgcggactcccgcct

SEQ ID NO: 352735 - DNA, 122 bp, Homo sapiens
ggcttctggactgcgcgatgactggacggtgagtgatgaacgagcaggagagtgcttgggcgtccatggagcatcccctccgacccaggactgccaccaggcagggacgctgaagcctgggc

SEQ ID NO: 352736 - DNA, 122 bp, Homo sapiens
acctgcacggctgctcctccccagtgccgttcttctcttactgcagagactatgtcagcacgttatgattatgatgcagcagcaacagaacaatgcccagagcagcctggcctgtgcttctt

SEQ ID NO: 352737 - DNA, 122 bp, Homo sapiens
ggctatgaaaagggcaacaggagggtcccttgtggtgatagaaatgacgtgtattttgaccgtagtaatatcaatactctggttatagtattgtactatgtagttttgcaagatattgtcat

SEQ ID NO: 352738 - DNA, 122 bp, Homo sapiens
gtgtggtgcactggcagaaagcacttcattttggccaagcattaaaaacaggtccaaacccgacatgcttggagtatctagaatggagaaaggtggattggatgatagctataattagatgc

SEQ ID NO: 352739 - DNA, 122 bp, Homo sapiens
cgcggcccgtgctcgctctgtgccgcctggcagccaggcaggagcacctctcgagaggggcgactgccctgcgtctcaggcagggaacagcccagggttatagcttcactttatttgttaaa

SEQ ID NO: 352740 - DNA, 122 bp, Homo sapiens
ttatgagctataacactcactgcgaaggtttgcagcttccctcctgagccagggagaccacgaacccaccagaaggaagaaactccaaacacatccgaagatcagaaggaaccaactctgga

SEQ ID NO: 352741 - DNA, 122 bp, Homo sapiens
ccttagccggtagcttccgggtttcctgggctactacgatggcgatgagtttcgagtggccgtggcagtatcgcttcccacccttctttacgtgaggctcagaccccaagaagcaccgctgt

SEQ ID NO: 352742 - DNA, 122 bp, Homo sapiens
ccaacccgccgggggtcagcgccggtggggggtggtcaccaggtggcccccgaggtgacccgggtgcgctctgccctcgcagagagccgcggcttggagcgtgaacggccgaggtggctgga

SEQ ID NO: 352743 - DNA, 122 bp, Homo sapiens
aggacggtccttagagctgcccgcaggggcgcagcctcatctgagaagactgggcgcgggcgggagggcggcggggccgcaaagcgcctcctcgatgtcctccaggcagcccagcaggtcca

SEQ ID NO: 352744 - DNA, 122 bp, Homo sapiens
gttgtatattcttcccttccccttccgccaaaaagtggagatccaaacctagattgtcatcgactggggctggctgaaggtctctgaatagccgagtgggagctggcggcgctgagcccagc

SEQ ID NO: 352745 - DNA, 122 bp, Homo sapiens
tctcccgagggagggccggtggccattacaagacaagaggcaccgtcctaaaggccacgccggtggggcctctcaagtgggttgtgcggaacgccccggccggcctagagagaaaacaggtc

SEQ ID NO: 352746 - DNA, 122 bp, Homo sapiens
tgatgcaacagacttagctcatgggaggcagaagcctgaatgctctggaatcaggaagaccgggctcccagacggcctcagtggaatccactttgcagtcacccttggctgctttttgcctg

SEQ ID NO: 352747 - DNA, 122 bp, Homo sapiens
gccagcctctcttcactctggggagcttttaccatttaaggtcaatgttacatctggctccggagctcagagccgagaagcctctggctgcagaacctcggccgcacgcctcctctgagagg

SEQ ID NO: 352748 - DNA, 122 bp, Homo sapiens
ccttactatcccatttcttcaaacgctaagaggccctttcaaaagttttcatttgggggccgggcacggtggctcacgcctgtaatcccagcactctgggaggctgaggcgggcggatcacc

SEQ ID NO: 352749 - DNA, 122 bp, Homo sapiens
cctggacggcctcgcgtcctcccagagcctgaccttctcttatctctgcagcctaagtcgcggaagcgtagacacccggcttttcccgcgtgctctatcgggctcccctggacacggagggt

SEQ ID NO: 352750 - DNA, 122 bp, Homo sapiens
tactcctttgaaagaacagtggactgcgcggcttctaaaagctctgggcctccggaaagccgacagtgctttacaggacacgtgtatacaggaacaggggtgaatccaaagtggagaccatg

SEQ ID NO: 352751 - DNA, 122 bp, Homo sapiens
atttccccagggctggagcccctactgagcctgcaggggcccaaacaccctcccttggcccgggacacctgagcccagtcctgtcccatgagatgtgaagggcagagtgtagcccttgccac

SEQ ID NO: 352752 - DNA, 122 bp, Homo sapiens
caaacagggaaacatggttttccagacaattctcctccgaggcttgcctccttctaccaacgttctcccaaaaaggagtttgcagctcagaaagacaactcctgatagcactgtgtgccagg

SEQ ID NO: 352753 - DNA, 122 bp, Homo sapiens
ggtgagacggaacacgacccccaacccccttagccggtgccccacccgatttctctcctgcgtcctgggagggcatggttgaggcgccaccggtgcccagcaacctccccaggctgtggttg

SEQ ID NO: 352754 - DNA, 122 bp, Homo sapiens
cgttgttcattcccacaacggccatcaccacctctccgcaccctctgtctccttccttctcgggcctcacccctggccctcgctttcagtgcccagcccggaccgcagcactccagttccgc

SEQ ID NO: 352755 - DNA, 122 bp, Homo sapiens
aaaaaacattccttggaaaagctgaacaaaatgagtgagaactcataccgtcgttctcatcggaactgaggtccagcacatttgcctctgccggggactgtaggattgagggacaacttcca

SEQ ID NO: 352756 - DNA, 122 bp, Homo sapiens
cattggcttcaaattttatcacagcatggaagacttctggtacacttccaggagcctgaacgattttctaacacctcaaggtcaacatgccaccaaggtttattttaatccttttctccatt

SEQ ID NO: 352757 - DNA, 122 bp, Homo sapiens
caatagtaaattaggacgcctggtggcgctgcaggctaagagtgtggatagtgggctctgcggataactcagacgccattaagctggggaatccaaactctaaaagaaggacgcattttagg

SEQ ID NO: 352758 - DNA, 122 bp, Homo sapiens
gtaactcacatattccccactcactttctcctcagttatcaaggcattacaggataagtacgtgtatcaaagtttaacatcgttcagaattgccagtaaagcccctcagttcccacctcttt

SEQ ID NO: 352759 - DNA, 122 bp, Homo sapiens
ccctctggcagaagcatcagacttcgcagatcagtcagataagagggacacgagaggaggcgaggaagacataaaaacaaaagtagaattcagctgagagctagttggagctctggggtgtc

SEQ ID NO: 352760 - DNA, 122 bp, Homo sapiens
actccagtccgcgccccaaactcttggaggacccgtcgaccacaccggatgtgctgtttgcgcatgcgcaccctcgtgacctaactccgccctccccggtgtgccaatttgcgcaggcgctg

SEQ ID NO: 352761 - DNA, 122 bp, Homo sapiens
ttggcagtaaatagtaaattctaaacagaaacaagtgggctacatctttgtcttaatatgcgtatggtattttaataaaaatcttttaaatacattatttaagttgatcttcaaactttagt

SEQ ID NO: 352762 - DNA, 122 bp, Homo sapiens
gaacggcgtggttgacgtcaaggggccgcgcaagcgcgctgacggtctcgggcgatctcccggaagttactgggttttgtgctaagagggggatattcagtccctgcttgcgactgttggcg

SEQ ID NO: 352763 - DNA, 122 bp, Homo sapiens
gatgcgcctacaaggccagctgcacctccccatgccggccacatgtgacccagccagacccggtcattccagaggacaccaccctgtggccgctgctctagcaagggcagtggctctgggca

SEQ ID NO: 352764 - DNA, 122 bp, Homo sapiens
cgatggaggaaggcagacctgccgtcacacgtgtgcttgcacgagtgcgtgtacctggtgcgggactcacccggccgccagactgcctgggcctgcccagatggccacctcgtggtgctgcg

SEQ ID NO: 352765 - DNA, 122 bp, Homo sapiens
tttttaattagctgggggatggtggtgagcctatagtcccaactactcaggaggctaaggcgggggcaggcaggcggaattgcttgagtccaggaatttgagcctacagtgaaccatgacca

SEQ ID NO: 352766 - DNA, 122 bp, Homo sapiens
gtgggccgcgcactggctgtgtgatcggggacagcgtggtgcgcgcactggctgtgtgatcggggacagtgtgggctgcgcactgactgtgtgatcggagacacctggcctcacctctctga

SEQ ID NO: 352767 - DNA, 122 bp, Homo sapiens
ggtcacagcctaacaaatgaggcaggcctggaggatggcgtcggaaacccaggcaagcaacggaccgaggacggctggccgccccacctgtgggctggagccctcacaagagcaccctcaat

SEQ ID NO: 352768 - DNA, 122 bp, Homo sapiens
gaaaggaacgtacagcaggtagaacgtcaaagaggacgttccaacagttggacaagttaacgacaataaaatacgcaaatgttaactttccccctaactgctgagcgctccctaaatcggta

SEQ ID NO: 352769 - DNA, 122 bp, Homo sapiens
aggtatctgtggtcggattccaggccagagagggtgatgtcattccggtcacctcctatgcggaccatttggagttgcccgtctctatctgtgtactggatttcgaaggagtcaaattctcc

SEQ ID NO: 352770 - DNA, 122 bp, Homo sapiens
atgtactataccagtaattttcatggatgttagagctctaggatgtttttcaccttttaccgtatgaattgacctccagaactttcccatggggtctcagctcttgtacatgaagagcataa

SEQ ID NO: 352771 - DNA, 122 bp, Homo sapiens
ggggaggaggtgggtattggcgtgcagtagccgctctagaggttgttacttgtttttttgcggggtgcagcgaggggaacttacctgaaggtagaagtggagcgacctcctccttcatttgg

SEQ ID NO: 352772 - DNA, 122 bp, Homo sapiens
aaagggtatggggcaggtggttgtggatgtttactcgatatctactgatttgccctaattcgtttggcaagtcattcattcattctgcaaatatattctgcggatttcctgtgggccacaca

SEQ ID NO: 352773 - DNA, 122 bp, Homo sapiens
cggttttcatcggccggtttgtgaaacggacaagagaggtagggtactgttcagttcttgcgtttgcacgcgtctgttcactttctaagctatctgcctgctgtatttgcaggcactccgag

SEQ ID NO: 352774 - DNA, 122 bp, Homo sapiens
agcactgacgcttgtacccgtcaccaacgagcagcagctacatagggagccaacagccaacgcaggcaaccctgacagtcccaggtagaagccactggcctgagtctcatcacctgcgtccc

SEQ ID NO: 352775 - DNA, 122 bp, Homo sapiens
tttgaaggattgggtgaccggcactggaagttgattttcaactccgaggaagagattcaccgttctaagcttctttccaggaattggagtgaacgggatcttaatgggattgcgcgtttaca

SEQ ID NO: 352776 - DNA, 122 bp, Homo sapiens
gggccctccatgccatcggagctggcatctccagctagaaaatggccagttgttctgattcgtagctctcctagtcagcttccagtccagggcagagggcagggactgctagggacctgggc

SEQ ID NO: 352777 - DNA, 122 bp, Homo sapiens
ccccaaaaagggagtaaaaatgtcaccctcctcctctggaacgtctgtgcggcctgagaccggccggcgagaaaagtcaaatcagaaaacggcttcggacgaaaggaaaaaacgctgagcgc

SEQ ID NO: 352778 - DNA, 122 bp, Homo sapiens
tatacatgctgtcaactgcaaccctgcaaggaaggtggtattagccccattttcccaatgcgcgaactgagattcagagggctactgtggctacaccactgtatgcccaggtggttggacaa

SEQ ID NO: 352779 - DNA, 122 bp, Homo sapiens
ggctagtggctgtgtagcatcctcagtgcaaaacccagctccagaattttcacctggtaacgaatttcaactgacagtgaaatgaataggcctttaaactttataacattgcaattgtgatg

SEQ ID NO: 352780 - DNA, 122 bp, Homo sapiens
aacctgtgtttgtgagaagcagcgaagaagctctaaagcccacacttttctccccttaaacggtcatcacagcatcgaagttccaaaaggggacacctattacaggcctctaatgattattt

SEQ ID NO: 352781 - DNA, 122 bp, Homo sapiens
tcattgaggtcctcagcgagtcaggagcttttctgtcttacctcgattctcatgttttctcgcagcattatattagagaaccttgttgtattcaatacagggagctgggaaccatgccaatt

SEQ ID NO: 352782 - DNA, 122 bp, Homo sapiens
cgcgagcctattcggaggcgcccgtgtgcacgtccgtgtgtgggacgcgtgcggccggaacgttcatccttgcgtccatacacctgtgtgcgggtggaggtgccttctcacctagggttccg

SEQ ID NO: 352783 - DNA, 122 bp, Homo sapiens
ccgcgccgggctggccgccaggggcacgctggcgatgatgcagatgacggcaccgaggaacgccagcatgcccgcggccagcagcacggccaggaacttcagcgtgaggcgggcggcggggg

SEQ ID NO: 352784 - DNA, 122 bp, Homo sapiens
cttcccaaagctcaaataagaggggccggcggcgcggggaagaggaggagccaggaggctcggccgctccattcactcagcagcccaagcccggccaggcagcgcgcgctgctccttggggg

SEQ ID NO: 352785 - DNA, 122 bp, Homo sapiens
ggaggggattgttgaaccccaaggctggctgagaggggtgtctgtcaccttgattaagagcgcgagcagcgtgtccatcgaaagcgtccagcaggccgctgagcaggtagaaggaggaggcc

SEQ ID NO: 352786 - DNA, 122 bp, Homo sapiens
cggtgccgagcccctcaggtccctaccccaacctctcccgccccgggccccgtatccctgcgcccggtactcacctcccacccggtacatgttggccgccatggccgttcccgccgccgcct

SEQ ID NO: 352787 - DNA, 122 bp, Homo sapiens
gagatatagcgggaaggagggagtggctgcctggctcgctttgattagctttataacaagcggtcgttctgaaatactcgctcatgatggctaacagacaacacaatcgccaaatgtcttaa

SEQ ID NO: 352788 - DNA, 122 bp, Homo sapiens
tcacaggctagacggatgggggccggagcactcaggaaggttttcaggtggggtaaagaacgtctgagggtgccagtgacttgcccccacctcacgcagctgatgagagatgcatgcgtgaa

SEQ ID NO: 352789 - DNA, 122 bp, Homo sapiens
ccgcatcctacctgcggctggtgtgggacgctggcagcctccgaaaagcgcggggactgacgtgcgcctgcgcgctgctgtcgccctcggactcgcgccgtacgtgcgtgcgtgagtgcgtg

SEQ ID NO: 352790 - DNA, 122 bp, Homo sapiens
ttcttgctcatggggagagggaagggagagaaaaaaaagagcgagcaggaaggcgcccagcgtcccacacaggggactcgcagccctgcccccaagagcgctggctccgcagcagcagtgcc

SEQ ID NO: 352791 - DNA, 122 bp, Homo sapiens
ttagaaaagcatgacgtattgtttacttgagcatgaattgattgttgaatccaaaccaaacgggtgtatttattgtaaggatgtactttacattcatattgaatagcgtatgttatttgttt

SEQ ID NO: 352792 - DNA, 122 bp, Homo sapiens
agagtcagcgagggcccgaggggcaggtactttaacgaatggctctcttggtgtcccctgcgccccgtcggcccatttttctttttacaaaacgggcccagtctctagtatccacctctcgc

SEQ ID NO: 352793 - DNA, 122 bp, Homo sapiens
cgcccccaagccctggtggcggaggcggggcgcgaataaactccacccctccggctcgcccgccccctcactcacccggtcaggtgggcgtttcctgtgggcgtctccaactccgcaggtgc

SEQ ID NO: 352794 - DNA, 122 bp, Homo sapiens
ttttcctatatactttccttttgagcttttgctaaaatctggagacgtggaatccacccgcggaaactccgagcccctccgactgagcatgcgccatcgccaggcggcttttggtcacaggc

SEQ ID NO: 352795 - DNA, 122 bp, Homo sapiens
ttcttgagctccaccataaggtggtgaatgttgatgagctcagcccgggcagggagggctcggagctgcggctgggacagcacccggtggaagcgatgatagagctggatcagctgggtcag

SEQ ID NO: 352796 - DNA, 122 bp, Homo sapiens
attccagagataaaggggttcgcagggacccgaccggccaggggatgggcagaggggtcccgagggccggagtgggtagaagggaatctcacgagtcgcagaagttggagaaaagttcggtc

SEQ ID NO: 352797 - DNA, 122 bp, Homo sapiens
tgatgtgttgcagctctccttacccttcctgataaatcctcagcctctgtaagtgggtctcgcttcaaatgcattctcagaacctccgtgctgccacccctggtttgtcaatgaagtctaac

SEQ ID NO: 352798 - DNA, 122 bp, Homo sapiens
caggggacggtggccgcggccatgcagtcctgtgccagggcgttggggctgctcctgggccgcggggtcgggggcggccgccgcctggctgggggatcggggctgtgctgggcgccgtgggg

SEQ ID NO: 352799 - DNA, 122 bp, Homo sapiens
cgacttccgcactctgcgcctgcgcgcggcccagccagcgcggcgcgcccctcccgcgcgcgcccgcgctcactcacaatcgcgcccgcggagtgctttccgcaccgcctccggtgcgtggg

SEQ ID NO: 352800 - DNA, 122 bp, Homo sapiens
cactaagagatggggtaagtcctacggttatccctattttacagctggagacctgagactcggtgaagttaaggaagtgaccacggtaatcagcagaagtgaccgaatcccgaacgtgccct

SEQ ID NO: 352801 - DNA, 122 bp, Homo sapiens
gctcactgctcctttatctctcttatcgaattcctgatgctgtttccatgaaagaagtcgcgacggagcagccagctggccaaggtcaaatcatccctccatgcgattcctcccttcttctg

SEQ ID NO: 352802 - DNA, 122 bp, Homo sapiens
acttggggtcagtgtttaggcacatgagagaagatgaggaaccaggacaggaaatggcagcgtttccaccaaaggtcaaggggaacattaatgggctacattccagacccaaggctgacgat

SEQ ID NO: 352803 - DNA, 122 bp, Homo sapiens
tcttcctcctgcagtgcagccctagactaaagcgtgaaagccgagtatcgcgtgagagtccggaggcgctgaagggagggtcgcagcgccgtgactttcgctttactaggaatggaggcaca

SEQ ID NO: 352804 - DNA, 122 bp, Homo sapiens
gcaagtcattgaagctttaaagaccaaataatctatttgtgaacctgggaaaaacaagaacgggaagtggaatccatctcctgacatagttgagcaactgtctagaaaataagcaaccattc

SEQ ID NO: 352805 - DNA, 122 bp, Homo sapiens
ggcggggccagacgcgcgcgagatttgaatttcctctgcgtgcggtcagtgcccgcgcagcgttgagttgcacagcggtattctcaccaggccctgcaatcggtgggccacagtgccggcca

SEQ ID NO: 352806 - DNA, 122 bp, Homo sapiens
agcaagagggcattggttggtgggtcaccctccttctcagaacacattataaaaaccttccgtttccacaggattgtctcccgggctggcagcagggccccagcggcaccatgtctgccctc

SEQ ID NO: 352807 - DNA, 122 bp, Homo sapiens
taacatctgctccatgaaggcaggtttttacctgttctgtgtactgtgtgtgcagtgcaccgggaaatagggttagccacatttctcagccactgaggtgctgagaaatgttagctgctaga

SEQ ID NO: 352808 - DNA, 122 bp, Homo sapiens
tccagaagcgtcctattggcctggagccagccaacgggggagcggtccgggaggcggacccggctcctgccagggttgggtgcgccgctgaacggatggctgagggagccccgcggatcgtt

SEQ ID NO: 352809 - DNA, 122 bp, Homo sapiens
tggacgtgggagtcacctgaaagccaggaaatggtgagtgtgagcccccgctgggagtcccgagacttgggggagggtaggcggaggctggttggaactggctggaaccggctgtgccggga

SEQ ID NO: 352810 - DNA, 122 bp, Homo sapiens
gaacgcggaggagagcctgggggagtggtcagtgctgtgaccattctgctcggctgtggtcgtgaaggaaaccggtactggccgggagctcagtgaagggatgtagggtggggaaggagaag

SEQ ID NO: 352811 - DNA, 122 bp, Homo sapiens
ggtcttcggctttttgttctccttttttaagagactggccgcagtccccagcgattcagccggcccaaccaaaggcagtggatctactgaaatgaaaaggatcgagataatacacaggcaga

SEQ ID NO: 352812 - DNA, 122 bp, Homo sapiens
atgaagtccgggaaggactccacgccctgcccctgaaggggagggagcactcttggaccacgcctgtcccagccacgggacccccgctccgcagctggggaccctgtgaagttggccctggg

SEQ ID NO: 352813 - DNA, 122 bp, Homo sapiens
gggagcgggactgcgcaggcttggcctctgggctgacccgccgacctttgatctcggctgcggtcgggttgctgaagttctggctgcgttcacccccaccgtttacgacctttgcaagtgtg

SEQ ID NO: 352814 - DNA, 122 bp, Homo sapiens
gcttccccctggcttcccgctcacacccgctttaccggctgcttgaaacagccagagacccgccccccgccccgcttccccgtggctcagttgactcccggctggacggcacggaggcagct

SEQ ID NO: 352815 - DNA, 122 bp, Homo sapiens
cctccaatccagcacctctgcccagcaaagcctcaccttttcatcccactggaagtctggcgtgatggtcagctccaccttcagggtggagcgtgtgataggctgcaggtgcactgacaact

SEQ ID NO: 352816 - DNA, 122 bp, Homo sapiens
cgggagggtcagacgaggccagcaggttcagggaaagcttgacgggtgcctgcgcagctgcggggaggtgggggaggctgtcagcctctggccacgggggcactgggagagaagtggggccg

SEQ ID NO: 352817 - DNA, 122 bp, Homo sapiens
tcaggatggtgatgatccactggctctgaaaccacagaaatgttcatcagtgtctgctgccgcctacctgtggccttcttgttaaatgagagaaataaacccgatttcttttggttgttcta

SEQ ID NO: 352818 - DNA, 122 bp, Homo sapiens
gcactccaatcggtcccttcagcctgagtgcctttatgcctaaagtttttgttgttgtttcgttttttgtttttttttttttccgttgctgttgaaacggcatctcgttctgtggcccaggc

SEQ ID NO: 352819 - DNA, 122 bp, Homo sapiens
ccacccctgccctgagccctgcatcccgggaagccccctctgcaggtactcactaaacatcgtggaatgagggaaacagagacccggagagaggagcgcggggagaagagagcccacgatgt

SEQ ID NO: 352820 - DNA, 122 bp, Homo sapiens
tcccggaattcgctctcgggctccatcagcgacagcctggggagctgagggcccggcagccgccttagagtcctggcttggccctgggccctgcgcctctgacccaccgccccttcccgggc

SEQ ID NO: 352821 - DNA, 122 bp, Homo sapiens
aggaccacagaattagtaatttaaatgatatactaaatttgtgtatgggcataagtattacgccttcccaccaggcaatttggactgtctttgaatcctgtctttggtactgtcttggacat

SEQ ID NO: 352822 - DNA, 122 bp, Homo sapiens
accaagcacagtctgagcaggaccccgcccggtacctgtggaaggtgtgcagcctccgggcgagcaggtgctccagtgccagcaccttccccagcagcaggcggcgcacagctgtctcctcg

SEQ ID NO: 352823 - DNA, 122 bp, Homo sapiens
ctggtgttttctcctctgtgggatgtgccagtaagaatgacctggaagctcccagacatacgtagcaggctcaacgtggcgggggagttggaaggaaaaatggaatccacaactgctgcgca

SEQ ID NO: 352824 - DNA, 122 bp, Homo sapiens
aaaaaattaaaagtggtaagaaaattgcttcgggtcaaaaatgtgtcatgcaaaagccaccgcagagccggaagcgtgacagcgccgcagaacgccctggcctccccgcccttccccgggcg

SEQ ID NO: 352825 - DNA, 122 bp, Homo sapiens
atggtccagcctgaacgagcgggcctcttgcttcattttgcaggggagctgctgcttgcccgcggtcaccccagcggtctggcggagcccttagcgcgcagggccgccgtctgcgggcgctc

SEQ ID NO: 352826 - DNA, 122 bp, Homo sapiens
ccttgttaccgtggcccatgggtctctgtgcccctttgtctcctgtggtcttggtcgtcccgtgccctccaggctcgcgttggacgacgccattcgacacaagccgctgaacatgtcatccc

SEQ ID NO: 352827 - DNA, 122 bp, Homo sapiens
tccagccttcctaagctgacgtgcactccaagctgctcctgttagagcaccccagcaggacggggccccggtggccacaggagcagcccagcgtcaccgcagcctctgggacgtcctctcct

SEQ ID NO: 352828 - DNA, 122 bp, Homo sapiens
ggaccacacaaattataatgaagccttggttaatatcttgccctcattcttttttttaatcgtactattgctttctttttaaaatttttaaatatattttttaatagctttggggctacaag

SEQ ID NO: 352829 - DNA, 122 bp, Homo sapiens
agcggtgcgggtgacggccgtactgcaaactcggtgcggcgaaggtttagttcaatcacccggttctagaagccgcgtcgctgagccgcagcgcgtcgcgcccgggcagcgggtgaacgcaa

SEQ ID NO: 352830 - DNA, 122 bp, Homo sapiens
cctggcagagcctcccatcaagacataaactgggctccctcttaccttatggataactgacgtgtggaggtggatctatggattagactcatgctgcattccagcactttgcctaggaccca

SEQ ID NO: 352831 - DNA, 122 bp, Homo sapiens
aatagcatagatagaatattagtatttctaccagttctcctacccacaatttccagagggcgatgtgaaatgggccaggtgatatgagcacatagagtgggttgtgttacagaagaggaaat

SEQ ID NO: 352832 - DNA, 122 bp, Homo sapiens
gcacacggcagcagccttgagccattcagtctccttaggtgtcctgaaatatgccgagaacgctgcccgccacagccgtgagtgtatgcgttgctgctgccccagccctcatttggcaaggg

SEQ ID NO: 352833 - DNA, 122 bp, Homo sapiens
tactccagaggctgaggcaggagaatcatttgaacccaggagacggaggttgcaatgagccgagatagcaccattgtactcaagcctagtcgacagagggagactctgtcaacaaagaaaga

SEQ ID NO: 352834 - DNA, 122 bp, Homo sapiens
agtccactgaatgaggaagagaataacgtttagtttcggactaaaagttcatctggactacggaaaacacgtttgcctcaatcagtgaagaaggtatgctgagagctgaaagaaaaggaaag

SEQ ID NO: 352835 - DNA, 122 bp, Homo sapiens
gcgggagggcattatgagttagaggccccggtttttctccatttatccaaatcaggtagccgaaaggtaaatgaggcttcaagttgggcggcgggcagcgaacttgacagaacctcgaaact

SEQ ID NO: 352836 - DNA, 122 bp, Homo sapiens
ggacctcaggccccaaactctcctacagggctccatgaagaggctgtgccggggaagccccgggttggagtgggggtggcttggagccttggggcttcccctggagggggccggggggggcg

SEQ ID NO: 352837 - DNA, 122 bp, Homo sapiens
tgttgggggcaaccaaccccgcgttgactcctgcgaagtgctaaaggaagcgatagatgtcgcctaaggagactacggacgctcggtggaacctcattccagacctatgttctcatgctcgc

SEQ ID NO: 352838 - DNA, 122 bp, Homo sapiens
ggagactagcggtcggggaggcagttgtggagccagagaggtggtccccccttcccatatcgccggccgtccactggccccaggcttggggtagtcctcaggagtcgggcaccccctcaaag

SEQ ID NO: 352839 - DNA, 122 bp, Homo sapiens
gcttacccacggagaggaggcgccacgtgacggcgggcgtggcaaagcaggcaaacacgtcgtcagtgcaggagaagtgggtgaggtgcgggaggatcacggactgaccccggcactggccc

SEQ ID NO: 352840 - DNA, 122 bp, Homo sapiens
ttgatttgacagaatgagtccccatgctagctcatggcacttatcagttagtcagccttccgcagggacaggaatttagagtgcaccatattccacttccaaatcaactgctgtcccctcag

SEQ ID NO: 352841 - DNA, 122 bp, Homo sapiens
tcctccatgcgagttgctgtgcgtttctctgttgtctcggtagaaggccagagtcacacacggtcctaagagctgggcaccaggaagcgaaggctggtaagggagagacgttccggctacca

SEQ ID NO: 352842 - DNA, 122 bp, Homo sapiens
atcattcattcattcattcattcacccattcactaatcagtaaaatttaagtgtccactacgttccaggacttgcactagactttaaggataacagggtggacaagttccactttggagacc

SEQ ID NO: 352843 - DNA, 122 bp, Homo sapiens
tttgcctatttacatacagcaggctgtgtgggtggggggtgagggaaggcaaggaataaacgaccaggatggagcgggctggcagtagagaaaatgagccccccgccctttgcgggaacagc

SEQ ID NO: 352844 - DNA, 122 bp, Homo sapiens
gccctggagcactgggaccttttccttgtgctccggagctgttggcagaggtgagtggggcgggcagctgcccggggcacagtccgctcttgtcttctttccttagcgcttgcttcaggaat

SEQ ID NO: 352845 - DNA, 122 bp, Homo sapiens
ctgtgaaattagcttactgatttatctgttccagtttttatgatctggcccctgctttcccgcctttgcactagaatatacagggactgtctgtcttgctcagtgtttgacagccaccctac

SEQ ID NO: 352846 - DNA, 122 bp, Homo sapiens
gtgcgccctttctttgccacgtgctccagtgactgtcgccagcaccgcgtgggatagcgccgcctgcgagcagagtcgatagctaggcgatctctgcgcctagcaactacaacagagctcaa

SEQ ID NO: 352847 - DNA, 122 bp, Homo sapiens
ctcccgtcacaactcgcgattatgacctgagggtcccattggtcgctgcggcgcggggcacgttgggcccgccccggaactaccgctcccatgacaccccgcgattgtgattcggggcgcca

SEQ ID NO: 352848 - DNA, 122 bp, Homo sapiens
ccctcccagccgaaagcagggtaccaagccgacctagccattaaagcagcttcctgtgggcgcggcgcaggacttcaacagtcccccctcccccgctcaggcccgcgaaaacctcgcgcaac

SEQ ID NO: 352849 - DNA, 122 bp, Homo sapiens
tgcaaagtgccaactgttcttcatcgagcacgtgattacgtcactttcttcctttttgtgcgttttgtgcagcccctgccaaaccagccccctaggatgggggccgagctaagcggtgcacc

SEQ ID NO: 352850 - DNA, 122 bp, Homo sapiens
ccctctcccccaggatgtaaggcctcagcaggcccataagcatcaagtgacacttcaaagcgatcagctgcctagagcctccacacagccaaaataagggtctctcatctacctttctggtg

SEQ ID NO: 352851 - DNA, 122 bp, Homo sapiens
ctcagacgtaggaaataagtcagcaccgaagcagtggttaagccggagggctcggaagaacggcaccttttctttctcgaaaaagttatatgggggctgaatgagcttctggaggcttgttt

SEQ ID NO: 352852 - DNA, 122 bp, Homo sapiens
tatgagagctgaaacaaggcagcagagcatctccttgatcaacctcacctgggtactgtgcgtgtctgcaaaagatcctgaaagtgctgcgactttattggtaaccttttgaggttaccaat

SEQ ID NO: 352853 - DNA, 122 bp, Homo sapiens
acacgtggaggtcggtggtgcgatttcctcaccctcaagggactcaagggaccacgcgctcgcaaagaacccagggcctcttccatcagctcgcagcaggtacgcagtaaacctttaccgaa

SEQ ID NO: 352854 - DNA, 122 bp, Homo sapiens
ggccggcgctccgcgggttcggttccgcccgcgtttgtgttggcagcggcccacggcgcgcggccgggcgcatgaaaggggcctctgtctgcgccccagccaccccgctcccctttcactct

SEQ ID NO: 352855 - DNA, 122 bp, Homo sapiens
tgggaggcggaggctgcagtgagccgagttgttgccactgcaatccagcttgggcaacggcgtggagaatccgtctcaggaaaaaaaaaattagttgggcatggtggactgcctgtagtcct

SEQ ID NO: 352856 - DNA, 122 bp, Homo sapiens
gagcatctcgcgtccccaacgggcccccgggtcggtttccgcggtggccatgactgcggccgtgttcttcggctgcgccttcattgccttcgggcctgcgctcgccctttatgtcttcacca

SEQ ID NO: 352857 - DNA, 122 bp, Homo sapiens
cttaccttttttgcaaaaacaaaacaaccaaccaaactaaaaaagactttagatcttccacgggcttgcaaacccactgtttttctggcttctgagacagaagggggcctccagtggtgcag

SEQ ID NO: 352858 - DNA, 122 bp, Homo sapiens
ccgggcgacggcaggtacgtcagtccgcgagggtcgccgcagcgccccttgcgccccttgcgccccttgcgccccctcagctttccggtgcaccctccctgactgggagcaccgagtcgacc

SEQ ID NO: 352859 - DNA, 122 bp, Homo sapiens
aggagttccagggcgatggggccgtggtccgggctgatgctttgacagctgaaaagagcgcggagccagcgcctggtcgggagggaggggagcgcggcgaggagagcgccagctagcgagag

SEQ ID NO: 352860 - DNA, 122 bp, Homo sapiens
cactacactctggcccgggcaacagtgcgaccctgaatcagaaaaattgagacaggtactcgctgttgacaggtcaccacgccgggctaattgtttttgttttgtagagatggggttttgcc

SEQ ID NO: 352861 - DNA, 122 bp, Homo sapiens
cccggccgcacaataacctctattcatgcagagaatttcgaaatggaaagcagcctgttccgcagtcccggcctacttgctgccaacacatgccccctccgtgccccgccctcgcccgccac

SEQ ID NO: 352862 - DNA, 122 bp, Homo sapiens
attcgattggatcataagccatatttttaaatgcatggcatagtttattaacaacagtttcgtgtgattgagccaagaatttttggccacgaagatggaaatcactgggtgcagcaaatcac

SEQ ID NO: 352863 - DNA, 122 bp, Homo sapiens
cagtggatgtgggtccttacataggctggggagagaccccttctacccacaaaaaatgtacgccatgctgtgcctcaattccaatccctgcttcaccatggactcgatgagcgagccccgcc

SEQ ID NO: 352864 - DNA, 122 bp, Homo sapiens
gtaaaattatctcccaaaatgctgccttctctatactccggtttgctcctgtcctgggcacgtgttcagcaaccccttaggggaatccagagctgcgtgtttaacacagacctgttgggacg

SEQ ID NO: 352865 - DNA, 122 bp, Homo sapiens
cagaagagcgggatccacatccacccacgtttgaatctcaacttggctattttctgattgcgagatctctggagtcaagtcattttgcttatctaagcctcatgttcccccagtgaaaatgg

SEQ ID NO: 352866 - DNA, 122 bp, Homo sapiens
ctcaagtgatccacccgcctcagcctcccaaagtggtgggattacaggtgtgagccaccgcgcccggcctaagtgaataacttttagaaagcatgcttagtagtagggtttgaaaaatgtta

SEQ ID NO: 352867 - DNA, 122 bp, Homo sapiens
tctccctgcgggtgctgagtgagcgcctcctacacaagagcatccaggtgagaacctcctcgtccttctcctcctcccccctcctccccctcctccccctcctcctcacccatctccatttc

SEQ ID NO: 352868 - DNA, 122 bp, Homo sapiens
ctcatcccactgagacagcagcaatttattaattaccctagaagaagtttcccaattatacgttatgcagcaccagaaaaaaatgttactaaggattttttatctacctcctctcctgcttt

SEQ ID NO: 352869 - DNA, 122 bp, Homo sapiens
acacacactcagattcccagctcacggggactcaggccccgcccgcggccatgctcacctcgccgctgcactgtgaagctctccacaaccccgtagttgtgtctgcagtaggtgtccaccgc

SEQ ID NO: 352870 - DNA, 122 bp, Homo sapiens
cataatgaattagaaaccaagtcatcaggtataagcaaggtgaactaaaaacgaggaatgcgctccattaatgcacgagttattgttatttgggacttactgtttttgaaacatagtcttat

SEQ ID NO: 352871 - DNA, 122 bp, Homo sapiens
tctcaggattccgaacatttcacatttttatctttatttttagtcagtgtctcactctgtcgcccaggctggagtgtagttgcatgatctaggctcaatgcagcctctgcctcccaggttca

SEQ ID NO: 352872 - DNA, 122 bp, Homo sapiens
gatggggtaggggtggaataccggccacaaagccattccaggcacgtccctcccctcccgcgccgatgactcccgccccaaaattgttatgcaaaggagtcaagtatgtgatcttctggcga

SEQ ID NO: 352873 - DNA, 122 bp, Homo sapiens
cagccctggcaggtgagccgtgactgggctctgcccatctcacctggaaacgagatcattcggtaaagtcgccagggaaaaagagaagacagtgttgaaagcacatcagaaactgtggtgag

SEQ ID NO: 352874 - DNA, 122 bp, Homo sapiens
tactctgaggcaccgtgcactgcaaagctggggattcacaggcaagtttaggtgaatcctcggaacacgtgactgatgaattccgggcccgtgtcgggctctcagccagcgcctgctccgtg

SEQ ID NO: 352875 - DNA, 122 bp, Homo sapiens
ctccccctcctcccgctgctccattcacctccatctcagatccccctcctccccccagtccggtggggtaaagaaagcctcctccaggcagcacaatggctggcactctgaggaagccggac

SEQ ID NO: 352876 - DNA, 122 bp, Homo sapiens
aaagaataataaaggaggggggaggcaatataatatctgtgcaaatttgctgaagtgtgacgtggcatggaaagtttaccctcctggaattcggatctagaatgtttttttcggttgtttac

SEQ ID NO: 352877 - DNA, 122 bp, Homo sapiens
ccgagttggggcagcaggcgcaggcgacagcagcagcagcaggggcccgggcaggagcggcggcggcccgaggggcgctccgtggcatgcgccagtctcccggaggccggggcgcgcgcggg

SEQ ID NO: 352878 - DNA, 122 bp, Homo sapiens
ggccggcccggtcagacctgctccgaggccgtgcgctctccaaggtgctgaaccccggcccggccaaccgcagcgctgctccaggctctgggctgccctggaaccaccacctcccgcatctc

SEQ ID NO: 352879 - DNA, 122 bp, Homo sapiens
ttgggcctacctgggtaatccagactctccccatctcaagacccttaatttcatcacacccgcaaaggtcctcttgccatggaaggcagcatatgcacagtttcagtgactatgatgtgaat

SEQ ID NO: 352880 - DNA, 122 bp, Homo sapiens
cgaatgacgaatttcttaatggccttgtccttgggcacgcatcgggtacagttagtgcagcgaataggatgcacgtggccgcggccctttttggcatgaccgttgttccttcttttctttgt

SEQ ID NO: 352881 - DNA, 122 bp, Homo sapiens
tattttaatcactattaatctcctgagttaggtgttactcttttttctttaacagcaattcgatgatctaaatagttgagtaaataacccaaagttgcatggccaataagtaacaggattat

SEQ ID NO: 352882 - DNA, 122 bp, Homo sapiens
gcccagtagctgaaaccgaattaaaattggctgatggaactgttgtgatgatgccatccacgggaatagatgagaatttctgagaacagaactatttggctcattcatgatttgctgccatt

SEQ ID NO: 352883 - DNA, 122 bp, Homo sapiens
tttaatgtgcgttctgtgccattcacggattttggcaaggtctggcgaggtggcatggcacgctcaggcttgtgctaagccaaacagggcatgggggagagagggactggaggccgacgaag

SEQ ID NO: 352884 - DNA, 122 bp, Homo sapiens
ggtccgtggtgagggcggcgatgggtcctaagctttctctgaatgcaaattggaagctcccgccatagacggtccccaaccccgcgcccagttgccttaataaaagttaaggaaggggcgct

SEQ ID NO: 352885 - DNA, 122 bp, Homo sapiens
ccagtgcccatctcacagaagtggggtttatggctagagcggtaggggagccaagtcagccgcttcaggcaattataaggaaatgccctcacataaatcataattgctttggatggggagag

SEQ ID NO: 352886 - DNA, 122 bp, Homo sapiens
ccttccttgcccgccctgggtttccgcagccgccagccttcgatcgactttcctacccgccgtggaccctccttgggttatttcgagctgtggggacccactgggaaccccagagtggatgt

SEQ ID NO: 352887 - DNA, 122 bp, Homo sapiens
gcaactctgaggagaaaaagcccaaagttcttgttcggtttcgcctggcactggaaatgccgtcaaaccagagcgcgaaacggtctggtggagtatttctggtatcagcatcttgcaattat

SEQ ID NO: 352888 - DNA, 122 bp, Homo sapiens
catgtgctgcccagcatctgtcctggttcggtaatgacactttgatttttcctttagcaacgactcctctcttacttcttccatgggctctagtgctgccaactctaccctcagagctaggg

SEQ ID NO: 352889 - DNA, 122 bp, Homo sapiens
catatgggagatgaggaactccttggatgttccagaagcttcacctgcaagaggaggagccggagcttctctctgctgtgcactccccagggacggctccgccactatcccgaggctgcccg

SEQ ID NO: 352890 - DNA, 122 bp, Homo sapiens
aactgtgcttcacacctgggcattctcctgaatttgcactcaaaagggcccattttctggcgtttttctcatagtcctggaataatcttcatttgacatgagagtcttgataaaaacaagat

SEQ ID NO: 352891 - DNA, 122 bp, Homo sapiens
cacacatttgcacaccggggagagagggagggcgcggcggccgcccccgctgtcagtcagcgccatgctgtccaatccgggccttgtcgccacagcctctcggccaatcccaaaattccaag

SEQ ID NO: 352892 - DNA, 122 bp, Homo sapiens
cattgatccctgccccagctctgtcagtgtctagcacacagtaggtactccatgcattttcggtgaatgaataaaaacattgtttggagcagtgagggaggcccggggaagctgctttttgg

SEQ ID NO: 352893 - DNA, 122 bp, Homo sapiens
tggtttttctcaacaatttccaaagaaaattctggcttcaaatactggaatatgttcatccgactgaggtctgagaaagaagaaaattaaaattgaacaacttgcttttttcttccttgatt

SEQ ID NO: 352894 - DNA, 122 bp, Homo sapiens
accacgcaccgttccccagaagcacacactggctggaaagttccagctggagccaaaggtcgcagtccaggtgctgcatctttttaaaggaaacacacccaaaggcactaggacagagcctt

SEQ ID NO: 352895 - DNA, 122 bp, Homo sapiens
ttatctggagaacatcaagaataaacatacttcttacagtttattctgttgctattgtcgcgtggattcttctttttggacaatgaaaagttaaacggagggaaaaatactaagtcagaatg

SEQ ID NO: 352896 - DNA, 122 bp, Homo sapiens
tcaccctcggcggggccaccttcttctcatttcagtctggggccacattctccgggcctgcggggcatggcaggaggcaaagccaaaggcgaagtggccacaaattccggtgggggcgctgg

SEQ ID NO: 352897 - DNA, 122 bp, Homo sapiens
aggagactgctgcagcagacgtgcgataggaaatttccccaggccgggtttgaccgagtgcgcatgcgggccgagggctggcgcctgcgcagtgggacagcgccgatggcgtagtttcctgg

SEQ ID NO: 352898 - DNA, 122 bp, Homo sapiens
ctggactacaactcccggcaggctctgcgccagaggccgtgggagacgcagagaagtgctcgaccttcgtcaggagatctgtggaagagtgctgctgccagctgccagctgcctgcagcacg

SEQ ID NO: 352899 - DNA, 122 bp, Homo sapiens
ggcattgagcctgtgtttaagttttatgttagcatttgttgggtaatgacttcttaaattcgggatttgactctgatgaactctgagttttggtcttaagtttggaatgtgtgtgtgtatcc

SEQ ID NO: 352900 - DNA, 122 bp, Homo sapiens
tccaatgactaagatgtctttaccttctccagggtgatcatatattgaaaataagtacaacgaaaggggcagagactgtgtgccttttttatggcccctcaactatcctattttaattctgg

SEQ ID NO: 352901 - DNA, 122 bp, Homo sapiens
atagcagggcacagaaagctgtttaggttacaggtactggaatacagtgacggcacagtacgcggagctgaattgctgcaaggaacatggctgtgctttggtcaagcacaggccgaggtata

SEQ ID NO: 352902 - DNA, 122 bp, Homo sapiens
tgggcagatattctgtggaaagtgttcttccaagtactccaccatccccaagtttggcatcgagaaggaggtgcgcgtgtgtgagccctgctacgagcagctgaacaggtgagtccccgccc

SEQ ID NO: 352903 - DNA, 122 bp, Homo sapiens
taggtattaagaacgcagcatcacagggagaggctgtctagggcaggatagtcatgtacacgcagttgccagagtgtaaaggaaaaaaaaaagtttttttttgttttttattttgtggaaaa

SEQ ID NO: 352904 - DNA, 122 bp, Homo sapiens
ggcagtctggtcctgtgtgcccctcgccacccctctcagagggcaggcgctggcagctgccggcaccacactccattagaccacaatgaccagtcgggggcccagctggaaacagagggcac

SEQ ID NO: 352905 - DNA, 122 bp, Homo sapiens
cagcagcagcagcatctcccttctgtgtctctccgtagatacagcctggatcctgtcttccgtccccttgttccctggctcactgtttctggctttcctctctttactatttttcacctatg

SEQ ID NO: 352906 - DNA, 122 bp, Homo sapiens
ggaggtctacatcgtccaggtgggccacccaccctacccctggcctcttacacattgccacgaatggtttctcatgggaaccagtgcaaggatctgccatgaagttgcatcgagcccaggag

SEQ ID NO: 352907 - DNA, 122 bp, Homo sapiens
actgggtagaggatgagggagaaaggcacattctaggcagacccaatagaattttctaaacggctcatttggggatgtacagaaaagaggggactcaaggatgacttctgggtttttggcct

SEQ ID NO: 352908 - DNA, 122 bp, Homo sapiens
ggcgaagggtagatactcatgttgtcggtggtgtagtccaggaacttggcccgggcgtagcgctcaatgtcgtgggaatcatagtccccccagcgcaactggatgtcaatccagtatttctg

SEQ ID NO: 352909 - DNA, 122 bp, Homo sapiens
cagcgagccaggtgttattcctggcagctttcctctttccccagaaaagtcccaaggaggcgcagacaaaggcaggaagcccggagcccaggcgcctgacccctgatgttggctcctccagc

SEQ ID NO: 352910 - DNA, 122 bp, Homo sapiens
ataaatgcgagaacccagagcccctagtacccaactaggctagcctcggagttggcacggcgtgcagaaagtggctactgagcagccgggcctggctcacccgcttcacacgtcagtttgac

SEQ ID NO: 352911 - DNA, 122 bp, Homo sapiens
cttcctgcctggcttccccttgttgacaggcgttgctccttctcctgggcctctgtctggcggtctggctctgtctgtcttatccttggcttcctatatctctctggtctcctatttctagg

SEQ ID NO: 352912 - DNA, 122 bp, Homo sapiens
cgcccggcccccgactgcttactcttcacacttgtttcctgactgttgttcatattcccccggtccagtagctcaggcttgagaggaacagtggcttcaggtgtttaggtagaactcttggg

SEQ ID NO: 352913 - DNA, 122 bp, Homo sapiens
agcaactccaaagatggggatgctgtcgaggtggtagttccgtgcaaaccttgctattaccgttgcaaatagacgcggagcccaaggtaagggaggctttcgtgctgatccttggtgtactg

SEQ ID NO: 352914 - DNA, 122 bp, Homo sapiens
ccgcagctcctcctggccgctcatcgcttcctagccacaggtagcatgaggaggaccttccggtcttggtggaaatacggtcacgggggagaagtcctgggtttccggctgctttcccccca

SEQ ID NO: 352915 - DNA, 122 bp, Homo sapiens
tctaagtgtacttcactttgttttcattcctcctctaaagctttttaacaaactgtcactcgtgttctaaaaacaaacaaatgtctttcatctcattttttactcagcattatctatcaaag

SEQ ID NO: 352916 - DNA, 122 bp, Homo sapiens
cgttcaaaggctaccccgtaagctatgttggcgttattgtccatgcggtcagccacaactcggcactggggcggcaaggagaaacgctccagaagctgctgggctgctgcacatcgatcttc

SEQ ID NO: 352917 - DNA, 122 bp, Homo sapiens
ccagagcccacgcccacagtcactagacctctccctataatggcgttaatccattcacgacggaggagtcctcactgcctaatcacctctgaaagggtccaccttttaatactgttacaatt

SEQ ID NO: 352918 - DNA, 122 bp, Homo sapiens
agcttgggagtcgcccggcgcctgtagctgggtgcccaggtggtggagcatgccctgggccgcctctggatcgcgggtgcccctggcctgagagcctgccagaccctgccccggcccggctc

SEQ ID NO: 352919 - DNA, 122 bp, Homo sapiens
ttaaaatgcttagccatcagcgtatgcctctattttttaagggctttttataagcaaatacgggtagaaaaacattggcagtttgagagtaaaataaacatatataactcaccaactgactg

SEQ ID NO: 352920 - DNA, 122 bp, Homo sapiens
ccactcagttctgcaggtgcccacatgaaccagtggcccaaaaagcctgatagtgtgacacgtggaagtgtgaaggacccggtggatgggaggaatgcctgagtgaggtcatcatggttgct

SEQ ID NO: 352921 - DNA, 122 bp, Homo sapiens
gtatttaagaattaaagaaaaactattctcttttctacttacgtgtatcactttctcaaacgccagctgagtaattagcatatacgtgcttgttgggtggcttggacctaactacttaataa

SEQ ID NO: 352922 - DNA, 122 bp, Homo sapiens
gtattcggatgctgcaagggacctcgacgcgggttccttgcctcagcagaggttttcgatcggccttatgtcccgcggctggcaggacacttagagctcacttgctgttttcgttgaaagac

SEQ ID NO: 352923 - DNA, 122 bp, Homo sapiens
tccataaaagcacagattggaggtggcaagaataaaaggatagagagccagttaggagaccgtttaaatgttccaagctgaaggtgaaggtaacccggacaagggcacaccaacggagatga

SEQ ID NO: 352924 - DNA, 122 bp, Homo sapiens
gtcgccatagagacaaggagttcaccacaggaccgcgccagggctgaaacgaagagtgcacgcaccgcccccacgcccgcacgtcgccacaccccttatgcgcatgcgcgcgtgagcaaaag

SEQ ID NO: 352925 - DNA, 122 bp, Homo sapiens
taagcgacccgggacagtgagcagtatgacccctgactgggggcgacctacccggggagtcgttgccacctccacacccaccccgacccgcgcctgcgcacttcccttggctcacctggcgc

SEQ ID NO: 352926 - DNA, 122 bp, Homo sapiens
acaggactaaaccgcagctaagtctaatatttcagtcttgctgaaacagctgttcccactcgggtccgagagcgggtgggagtagagatggtgtgtgggggggtccccacttcagttcccca

SEQ ID NO: 352927 - DNA, 122 bp, Homo sapiens
cagggctgagctgtgcactctcttaggcggattctccttcctcctgctactgataccaggcgagggggccaagggtggatccctcagagagaggtgacaacagagggggtagggcccggggt

SEQ ID NO: 352928 - DNA, 122 bp, Homo sapiens
gggcgggctcctcaagtgggggatccgcggcagtgaggactgtagggtgcgcgggtactccgggtagccgccagcggaggaagcggctccgcccttcccggaagctgcccttgctacacccg

SEQ ID NO: 352929 - DNA, 122 bp, Homo sapiens
ctggacaacatagcaaaaccaccttaaaaaaaaaaaaaagactgagtttctagaatgaggcgatgtacctaacaaaatgaagaatgcctcggggacaacagttctatcttctgaagttatct

SEQ ID NO: 352930 - DNA, 122 bp, Homo sapiens
tggaggacacatgacgaggcaggcctgagcaaactggatgtgccttgatacaggccacggcgagaatcagagatgggggtccgacgggccccggggggggtaccgtgggggaacacatcgga

SEQ ID NO: 352931 - DNA, 122 bp, Homo sapiens
acatgactgggtaatgagtcaccggtagaagtcggcttgatggggcttttagggaaacaacggctttcctgtttttgtttttcttcttcttctttttaaattttctcctgctacccctcccc

SEQ ID NO: 352932 - DNA, 122 bp, Homo sapiens
atgacgccccctgccgaccttcaggaggggataggctgagggcctggacgaggtcggaagcgcttctactgcagctccggaaagggcttaccccatggggcaacagggtggactcgttctcc

SEQ ID NO: 352933 - DNA, 122 bp, Homo sapiens
tggtgaaactgagaccctgtaaggacacttgaattggccaggagagacaatctgtccctccgtatatattccattttggttggtatcatcaaaaagatttacctacaacctgtggagctcaa

SEQ ID NO: 352934 - DNA, 122 bp, Homo sapiens
ccaactagagaattaactcttgcggggcacaaaacagcctctatttctttgcgtccccagcgcctgtttgttgaagactgagttgaaggagtagcaggtggtgttaatttgtcaaaaagatg

SEQ ID NO: 352935 - DNA, 122 bp, Homo sapiens
cgcgcgcctcgccccaggcctcgggctcttcctccgcacctcgtaaagccgagaccccctcgcagtcccccactccgagaggcggaaaagttacctgggatcagcagggagcccgggcgcgc

SEQ ID NO: 352936 - DNA, 122 bp, Homo sapiens
actgattgaagcattgtcctcaaggagggctgatgaatccgtgcatgctcaccattagcacggagggtcatggttctactactgagccacagggtgctgcattcattcattaattcatccag

SEQ ID NO: 352937 - DNA, 122 bp, Homo sapiens
tggacgcagtccttcaccagattcttaatgctctggtgggcccctgacttgtgtctcttgcggtaaagactaatgcttttgaacactgtcctcatgtctgtcgtcgatgaaaaaacgtgcag

SEQ ID NO: 352938 - DNA, 122 bp, Homo sapiens
ctcggccccatgaccgatagtgggttcagttcctccaggggcgggggagcctagtggccccgccccctgactcatggcctgaccctcctcaaacgcacccagaggagactcctggtcccctg

SEQ ID NO: 352939 - DNA, 122 bp, Homo sapiens
ccgcacagcgcagcggcgggctgaagggctcctcgagcctggccgatgctaaggaggcaccgagagcaagcgaaggctgctagtgagaggtgacgacgtgctggcagtcctcagagccctcg

SEQ ID NO: 352940 - DNA, 122 bp, Homo sapiens
tgaattagcggtgggagttaacatagaggtgaactccagatcggccgatagcttgcaggccgctgctgtttgtcctgacttcagcgcatctctgatagacctttgacaccttccaacaaaga

SEQ ID NO: 352941 - DNA, 122 bp, Homo sapiens
ctcaggggcgctggggggcgctcatacgggttccagtcttcgctccgccggcggccgcaccgggagctctccggtctttgtcagccccctgcacgccgccccaaatacacactcgccctgaa

SEQ ID NO: 352942 - DNA, 122 bp, Homo sapiens
aaaatggacggctttccttgctcaccctgtggcctcacaggccccgaccacacacccacacggcactaaggccctcccggcctcggccctgcagaaagccggagacctccgggaaccctccc

SEQ ID NO: 352943 - DNA, 122 bp, Homo sapiens
cagaaacatccagctaaccagatgtacgggacagtagcccacacacgaaccaacctttgacgttattctaagatactgaatgccaaaagtgcgggaagaaagataatgatctccacgtgagc

SEQ ID NO: 352944 - DNA, 122 bp, Homo sapiens
ggcctccgggcttcgttgcgtcgcccgcagctctgatcgttcgtgagcgtcgccccacgtcgctcccgcctgcccctgcccatacgactcgcccgcgcccgtgggttaaggctgtctcccgc

SEQ ID NO: 352945 - DNA, 122 bp, Homo sapiens
actctcctccaggcattgacagtgttatgacatatctgaaagaaaagaacattgtattgacgagtaaatcaatacagtatatttggtctaatgtcctgaaggagatcaggcagaggagagaa

SEQ ID NO: 352946 - DNA, 122 bp, Homo sapiens
aaaggacggaaaacaataaggcttcccgaatgaatggcagccactctgtagcctgatttacgctccatttccttctttggtgtcaggggccttgattggaaaagaaatccagagttcagtaa

SEQ ID NO: 352947 - DNA, 122 bp, Homo sapiens
gcctgagggagccacttccggaagtgtctaggacgcaggtcctccgtccatgctctatggcgccccgcgccgaggggcttcggccccgcccccttcccggacaggaggtgcgggctgggccc

SEQ ID NO: 352948 - DNA, 122 bp, Homo sapiens
aaaaatcaaaaaccagttccccatcgtgaataatctttgacctattttgatcagtaagagcgtagtgaaaattaaagcaattaaaatattaaaaagaacaattttctgcagggaagaactga

SEQ ID NO: 352949 - DNA, 122 bp, Homo sapiens
ccccgctcgtggccccgcccacccaagcctaggccggccttcgtggacacgcatttccggcgacgcctcggtactgacctctgcagagccgggtggagcccattgacgtccagcgaagcgag

SEQ ID NO: 352950 - DNA, 122 bp, Homo sapiens
ctgaattacagaaagtcccataacaagtcaggggcagcacaaggattaaattggaattggcgttcattgacgactggcccagcaatactccctcaacaggtaacgaatttctaaggttctat

SEQ ID NO: 352951 - DNA, 122 bp, Homo sapiens
ggttgccttttgctctttgctcctgtttcagctcttcttaatcaagcgagcctcatgaaccgcattcacctttgtgccagtttgcaactaacagtgtggcattttgctaactcactcccttc

SEQ ID NO: 352952 - DNA, 122 bp, Homo sapiens
ataaagtcatcagatatacgctgaattactgtgatcataaaaaatggaagctaatctagacgatgagctggcacacttatctgttaagggctgcatagtaaagatttttagactttgtggat

SEQ ID NO: 352953 - DNA, 122 bp, Homo sapiens
gaggctggagttttctcggacagtgaactctaccgccccgtgagaccctgccctatgtgtcgcgggaacacatgtcaccccacagctctctttgagtgacctcccgaccacccattcctgcc

SEQ ID NO: 352954 - DNA, 122 bp, Homo sapiens
tatatcataaaatgttcccatgcggggaatgattcgttggggtctcagcctgaggccagacgcagcagagagatcgggagttgggggatggcgggcggggagcggagaggaggccgcccgcc

SEQ ID NO: 352955 - DNA, 122 bp, Homo sapiens
ctggaattgtagtcgatgaattgcttttttgacttagaagctgaagaaaatagacatagccggcatatctcatggtcaggagctggacgattctggtaacttaggctttttttctctcttct

SEQ ID NO: 352956 - DNA, 122 bp, Homo sapiens
ccgcctaactccggccgccggagacgccgtgcggaccccaagccagtgcgcggaagacaccgtcctaccctcggcatggctgcctcccacccggtcacgtcggtccccgcgccccacgccga

SEQ ID NO: 352957 - DNA, 122 bp, Homo sapiens
attacaaagacaaaatgtggtgcagaaactatcttgcacctgtgtgcataaactgttagtcgtgactgacttggtgtgttgctattgtgtttctatatactccgtccaatatagataatgtt

SEQ ID NO: 352958 - DNA, 122 bp, Homo sapiens
gcattgagccaacacacagatttgtcgcctctgtccccgaagacacctgcaccctccatgcggagccaagatggggaatggaactgaggaagattataactttgtcttcaagggtgagttgg

SEQ ID NO: 352959 - DNA, 122 bp, Homo sapiens
ctgtaaccagcctgacatctccccgcttctcatcctgtggtatctgccaggagatagccgcggccgcccctgattctttccaagaggcccttcagtttctcggagcggtatcacacagatcc

SEQ ID NO: 352960 - DNA, 122 bp, Homo sapiens
ctttggggtccagactgccagcgtttagcgcagcggggtcctcctgccccttggtggaagcgcaggctcctccccccgcgcgtggcacccacgtggggctttctcactcctcccagcttggt

SEQ ID NO: 352961 - DNA, 122 bp, Homo sapiens
ggagggaggcggtggcgcgcccggccccgcccgcccgaccaagcgtcggacgcggcccggcgccgagccatggtgagtccagcgtcgcagccccctgggtcccctcggccttcgcgcagccc

SEQ ID NO: 352962 - DNA, 122 bp, Homo sapiens
gtgcaggaggagagggtgtctcatctctgaacacttctaaaagggtaaaaatcccaagcacgcctcactcaggggcctcagctcatgccccacttgagctgcattagtgagcttgtgcattc

SEQ ID NO: 352963 - DNA, 122 bp, Homo sapiens
gctggagcagaagttgctggtgcgccgagctgccttgcggtttaggcccagaggttcacgcgagcgagcgcgctgtggtgagcgcgataaccggcgagccgcgaggcgattcggagaatttc

SEQ ID NO: 352964 - DNA, 122 bp, Homo sapiens
catggtgatggagaaggaaatcagggacagatctacaccatttgtttgctatttactgcacgtaaacagaatgaaatcaacacattaagtatttcacttgatttcatccaccatctcctgca

SEQ ID NO: 352965 - DNA, 122 bp, Homo sapiens
tatccccacctgtttggaaccagcttccaaaccgtggtccccagccttcagcaggcctaccgcgcaggcgcaaccaccagcctggcgcgaggcggacaaacgccgaggccgaggcaaggtga

SEQ ID NO: 352966 - DNA, 122 bp, Homo sapiens
gtcacttgtcactgctatcattgaacctgcctctggtcattgccatttctacttctgacacgtggcagctactctttgtggttgttaaaactagacaagcatacttgttctcattacgcata

SEQ ID NO: 352967 - DNA, 122 bp, Homo sapiens
tcggaagcagaagccgcctgggaaccacctgcacaccaagcaggctgcgaggacggggagcgctccagtgcaaagttctgtattttaaagcccctcctcgctcacaggcttcacagcgaact

SEQ ID NO: 352968 - DNA, 122 bp, Homo sapiens
acaatggcaggaaccttggacccggccggcatcactgagtcatggaaccaaagccagtagcggcctccttccaaggaatttgttagttaataatgaaaggaatttatctatttgaaccactc

SEQ ID NO: 352969 - DNA, 122 bp, Homo sapiens
cggggctcgggtgctgcctggctctgccaacgttctgggccctcgagtgtgaatgagctccgcccgccatccgccttgtagtcctcgcgtccggccaccggcgcggggctcccacccatccc

SEQ ID NO: 352970 - DNA, 122 bp, Homo sapiens
ggactgaggccggagatgaagtgcagtcaccgctccctcgactccagaggggcttgggcacggcgctccggggcccaggaggtgccgtgcgtgtggttttgggtgtgctcagagctgacctg

SEQ ID NO: 352971 - DNA, 122 bp, Homo sapiens
ccagaggactccttggtctagcggtaacgccagtgtctgggaagacgcccgttgccaagccgactgtggtctagcggtagcgtcagtgtcaaggaaaagcacccgctacttagcagaccggg

SEQ ID NO: 352972 - DNA, 122 bp, Homo sapiens
gatccgcctccggccccttgcccacttggccactgtggccttccccactcccgccctccgcggcctccctgctaccctccagccccaccagtgggccccgactgatggccagcctgtctctt

SEQ ID NO: 352973 - DNA, 122 bp, Homo sapiens
ctttcactattacccaattccccactcatggtcacatcatgaatcagctgataaatggcacggttttggtcgaaagcttcaccttggatcagatcatagagagttccagcattatttatgag

SEQ ID NO: 352974 - DNA, 122 bp, Homo sapiens
gcccaggtcagggggtccgggcaggccgcccagagtacgacaggatgtcccagctgagggcggaaggatggggggaaagaggtgggggaaagaaggggccgagaggctctggtgcgtgtgag

SEQ ID NO: 352975 - DNA, 122 bp, Homo sapiens
gaggacccgagtggggccgaggccagtagccccggggccctgagcagaggccgtagcttgcgccgcacccgcggccaggcggagccaaagatgccggcctctgctgcgcggccccgcccggg

SEQ ID NO: 352976 - DNA, 122 bp, Homo sapiens
ctttctgaaaaagtgggtcaggcaccagaacatgttacagggactggggtctttacagggcgcccctggaatccctgagggcagggccacagctggctctcgcatgcgtgcccaccctgtgc

SEQ ID NO: 352977 - DNA, 122 bp, Homo sapiens
ggccgaggggagtcgcccagtcccgccgcttccccaccccctctcctccctcggccggcccggcagccctgctccccgccttggcctcccggagaggccccgccccgtccccgcccgccgcg

SEQ ID NO: 352978 - DNA, 122 bp, Homo sapiens
acatgctgtgctgggaaaagccagcaggtctccacttctccctttcacagcctcctcccccgcccccaccctcggggccttccgagcaggggtggcctgtgctccccagggggctggggctc

SEQ ID NO: 352979 - DNA, 122 bp, Homo sapiens
tccagacaagctccggatgcttggatccttgtcgtgggtcaaggcatggatggccctctgcgagaaacaaggacctgagaatccacactcacacgacaattacagggggttgaagaagccgt

SEQ ID NO: 352980 - DNA, 122 bp, Homo sapiens
aaagcctgcgccccctgggcttcctggagcttcccagatcgaaactccaaaaagcgctttcgcgccgcagcgccgggacctgcagcgccagccactccccgcacgggccgcactcgctctgg

SEQ ID NO: 352981 - DNA, 122 bp, Homo sapiens
catcatccactcgattcccaatccccaccctacccttgcaacttcgcctcgtgcgtgacccgagtcacccccaggcttcggctcagacatggtgactctggtgctggccatcgggagaagcc

SEQ ID NO: 352982 - DNA, 122 bp, Homo sapiens
tgcctgacacctggtgtcgtaaccagaaggagcaaggccacggttgtactgtgataggaacgtgtcctacgggacctggaacagggagtaccggttgtggaggagagatgaggcttgatata

SEQ ID NO: 352983 - DNA, 122 bp, Homo sapiens
ctccaagaggagcagaaggagagagactgcacctctgagcttgctctggaactcattgaccgctatgaaccttcagacagtggtaagagaaatcaggtggagaggcaccagacataggggtt

SEQ ID NO: 352984 - DNA, 122 bp, Homo sapiens
agcctggcgagtgaggcgcgaaaccggaggggtcggcgaggatgcgggcgaaggaccgagcgtggaggcctcatgcctccggggaaaggaaggggtggtggtgtttgcgcagggggagcgag

SEQ ID NO: 352985 - DNA, 122 bp, Homo sapiens
ggtttttcacatgagcagctgggaagaatgagcccagctgcactccaaagtcatgccccacgtgttcttactgacagctcccctgtggactcaagtgcaccctaagggttcttggggaatac

SEQ ID NO: 352986 - DNA, 122 bp, Homo sapiens
caattctgaggttgtgttaagttgccctctataccaaagtattaaattatctccgccaggcgcagtggctcacgcctgtaatcccagcactttgggaggccgaggcggatggatcacgaggt

SEQ ID NO: 352987 - DNA, 122 bp, Homo sapiens
taagttggaggtccagcttctgggctcagacgggtatagggaccaggaagtctcacaatccgatcattctgatatttcagggcatattaggtttggggtgcaaaggaagtacttgggactta

SEQ ID NO: 352988 - DNA, 122 bp, Homo sapiens
tgacctcctgatctgcccgcctcagcctcccaaagtactgggattacagacatgagccgccgcgcctggccaacaggtgtttcttaaaagcagaagcagagagagggcaggagagaacaaac

SEQ ID NO: 352989 - DNA, 122 bp, Homo sapiens
cccatgacacatgcccaggactcaggttccctaggcttccttccaaaggctcagcagtgacgagccagcccttgaaccagcctcttcccccacccaagcagccacctctcaggggaattgtg

SEQ ID NO: 352990 - DNA, 122 bp, Homo sapiens
tcctgactccaaggactcaccaggggacgtccagagaagtaaactctctcctgtcttggacggggtctctgagcttcgtcacagtttcgatggctctgctgcagatcgctacctcctctctc

SEQ ID NO: 352991 - DNA, 122 bp, Homo sapiens
cctactccagaaagatattattctacaaataagggctcagcatgacatttatgagaaagccggggtcctcctgtgcaaagctgattggtgatcagccagtgggttccggggcgctgcaaata

SEQ ID NO: 352992 - DNA, 122 bp, Homo sapiens
aaacagcctgcctcttaacatattctgctgggacaaagcgccaggaacaccacattctgccggaaccacctcatcctgggaacacgttaacatcttcccggacagcaagccatactgcctag

SEQ ID NO: 352993 - DNA, 122 bp, Homo sapiens
ccaattcaaagggttggccctaactttgaacgccccacccaccacgtggaatgttccaaacgccccgccccccgcactgtcactcaccgcaagtcccgctgcagcacgtcactgatgaaggt

SEQ ID NO: 352994 - DNA, 122 bp, Homo sapiens
aaaatttggatgccctcctgaaccagctgaaaagcttccctgcccggttgcgacagtatgcgtcctatgagtttgttcagaggcttctgaaaggttacatgaaggtaggtggccagtatcgc

SEQ ID NO: 352995 - DNA, 122 bp, Homo sapiens
tttttggcacaataatctacagttgtcccctgtccaaccaagggagttttaagccacgaccgagctgccaggcggcagacctgagcccggggagcccgcgccgaccactcggggacaccgga

SEQ ID NO: 352996 - DNA, 122 bp, Homo sapiens
agagagtctcagcaggacagcgagcaagccgacaggtcccagagcgtctcagcaggacagcgagcaaggggacaggtcccagagagtctcagcaggacagcgagcaagcggacaggtcccag

SEQ ID NO: 352997 - DNA, 122 bp, Homo sapiens
tcgtacaaaacacataaaattagcacaaaattaacaaaacgcttgcctgaagaaaagaaccgagaatccagggtttccccaattgggccccagtgcaagcctggttctacggagaggatgtg

SEQ ID NO: 352998 - DNA, 122 bp, Homo sapiens
ccagacaggaaagtgactgattttgaggagttattaacatatcccagggcagtgcggagccgggacagtcgcggcgctgacgcccgcgggccccagctgcagatatgaagcggagccgctgc

SEQ ID NO: 352999 - DNA, 122 bp, Homo sapiens
accacaacccatttcagtgacagataacttcagacaacttatcagagggccttggagggccggaggcagcaacacacacagcctgattctgggagcagcatttccttccaaaaaccttaaat

SEQ ID NO: 353000 - DNA, 122 bp, Homo sapiens
atgtacaggccctaatggtccctctgtatggaagcgaacacttgcaggggaggggcccagcgggataggccgggaacaaggaggcagatctcagcctgccacacctgaagacaagtaccttg

SEQ ID NO: 353001 - DNA, 122 bp, Homo sapiens
ggacgcggaggagaggtggggcgggcgtcaccaccggagtggagggcgaggcccgggtcccgcgctcccctgggcgccccacggcagcctcagagccccgcggggagcgcgcagccctcggg

SEQ ID NO: 353002 - DNA, 122 bp, Homo sapiens
ccactgctaacaacaggagacagtaccaaggatattcctagctcttagcataaggccctacgtatgaaagtcccctaataaatacttgttgttttttaacaataatgatggtaagagtccaa

SEQ ID NO: 353003 - DNA, 122 bp, Homo sapiens
gcctggtggctggacctccttcctccctccggaggtgacctcatccccagaccctgggcccgcccccagagaactggaattgggaagtgaaaccaaaaccagcctctcctgctggtttctct

SEQ ID NO: 353004 - DNA, 122 bp, Homo sapiens
ttttcagctcacttcaagggtacctgaagcgaattggcaccaaagcagcagctgtattgccgcagttctagcttcaccttcacgatgtttcccttggtcaaaagcgcactaaatcgtctcca

SEQ ID NO: 353005 - DNA, 122 bp, Homo sapiens
gctgggccccttgcttatgaaatgttttgaaagttcaggtgacccttggtttgagcagtacgctccagggaatatatgtaaacagaatcctttttcaaaaaaatttagagaaactctcttga

SEQ ID NO: 353006 - DNA, 122 bp, Homo sapiens
tctgttggttttgataccacatttctcaaatgagaagcaaacagttcacttccttggatccgtggtttcgcctgtggccttcagggggcgacgttgcactaaggaggcatctgtgttcattg

SEQ ID NO: 353007 - DNA, 122 bp, Homo sapiens
aagccccaaaggggagcgtgcaccgcgatgacgtcctcaaggcgcgccacgtccgcccggcggcgcagctgcccagcgcaacctcggccccgcctcgatagccccggacccctgccccgccc

SEQ ID NO: 353008 - DNA, 122 bp, Homo sapiens
aggaggagccagaggaggggccgattggaagcagccacctcagcgaagctgcaggatttccgcagggcgggagctgtttatctcccggaagaaaacggctcctgtcacagaagtctcgtgat

SEQ ID NO: 353009 - DNA, 122 bp, Homo sapiens
tgcaacagccccgcagtctggaaagaagccgccagcagcccgcgcggccccgcggttccacggggcctcgtccccgcccctgccccgctgtaggccccgcctgctataggccccgccccgct

SEQ ID NO: 353010 - DNA, 122 bp, Homo sapiens
gtctgtgtgtagggagcatttcagtggaaacccggtttgaaatgcatgttctgttgatttcggcagcctgcgccggctggggttttgagatgcagcattctcaggggaagaggtgatgggcc

SEQ ID NO: 353011 - DNA, 122 bp, Homo sapiens
cgtctcgagtgcaggcccagtccactgtagatgcgcttccggcggagccgaggccggaagcggaagaaggggacacagacctgcgtccaagctgtgccacctgagacgtgggcggtcccagt

SEQ ID NO: 353012 - DNA, 122 bp, Homo sapiens
gggttttctgttacactcctccgagtgcagagaggcagctcccttgtgaagctatccacacggtcttccgcctctcgcttgcctgtctcctgtctctccagggaggtgctggctgctgttgg

SEQ ID NO: 353013 - DNA, 122 bp, Homo sapiens
ggagagggcaggggagggagctcccacctgttgtccagccagttgtgcagctgcaggaagcgcagccggtcgcggctctcctccaggctcaggcccagctcctgcacgtagcccccgctgtc

SEQ ID NO: 353014 - DNA, 122 bp, Homo sapiens
ggaagaaaggggtactccaccacgggtaccctccgcctcccgcctcccgcctaccccctccgccacgattgctttggtggaaagtgcttgggcctagagcaccagtgggccagtcacgctgc

SEQ ID NO: 353015 - DNA, 122 bp, Homo sapiens
aggtctataatagtactgtgctaaaggaccagtttctttttattttcagtaagtagcagacgtaggtaggtgtacagcttgtgacatatgcaacatgaacaggtctatatcctctctataat

SEQ ID NO: 353016 - DNA, 122 bp, Homo sapiens
ccatctccgggagcccggggggctgggaatgacaggatgctcctgggtccagtcctgtcccgcacaagggaggcaggcccggccttctgggatgtggaggtcacatgcatggggccttccca

SEQ ID NO: 353017 - DNA, 122 bp, Homo sapiens
tgacacgttccctcaccccgcatttttgggttagtcaatgtctcctggttttcttcgtaccgctctgacagtcggtcaaagtcccgcttcacgttttcctctgtcgcccaacccctcgctct

SEQ ID NO: 353018 - DNA, 122 bp, Homo sapiens
tgttggttagcaaaagtgcagcctcaagatggctgatggcaacgaggatctgcgggctgacgacttgcctgggccagccttcgagagctatgagtccatggagcttgcctgccccgctgagc

SEQ ID NO: 353019 - DNA, 122 bp, Homo sapiens
acttggtgaagagatatgtcatgtggttttgatttgcatttccctaatgacatgggttgccgtttatatatcttctttgcagaaatgtttatcgaaattttctgcccattttaaattggatt

SEQ ID NO: 353020 - DNA, 122 bp, Homo sapiens
gcagcgtcctgactagatccggggattgcattagacacagcagtacttttgaccagactgcggagcgggacagcggcctgggcgccaccggagggtcggtggtggtagtagtggcctccatg

SEQ ID NO: 353021 - DNA, 122 bp, Homo sapiens
aacccagggaagcgcgtgctggtggaaagggggttgggttccttcaggggctgatagtcccgagttgggccgaactccaccactttcgaactttgtgaacttgggcaagttttttaacctct

SEQ ID NO: 353022 - DNA, 122 bp, Homo sapiens
gccccctcccctatctgagccggacagggagccggggtggaaactgcgcccgcatcccagcgccaagcagacgtgaactctgcgcccgttccccgggaccttcagcgttaaggagaactccg

SEQ ID NO: 353023 - DNA, 122 bp, Homo sapiens
gggccgcgcggaggtcccacaggagggtcagagcggcatcttcccttcagggccctcgcccgggcaccccccggccaatggaccacagctgcacccggttcatccaccgccggggaccaccc

SEQ ID NO: 353024 - DNA, 122 bp, Homo sapiens
gcaggcggcggaggcggaggcgcaggctcttctttaggacctggcgagcccaggtctaagcggcggccccgcgaggcccttgcacggcgccccgggtcgaggccctccccgcctcgccctac

SEQ ID NO: 353025 - DNA, 122 bp, Homo sapiens
ccgcagacagaagcacgcatgcgcacatcgctgtgccggtatcgccaacagatggaagcacgcatgcgcgcaccgctgcgtacctagcactccgacagatgtacgcatgcgcacaacgctct

SEQ ID NO: 353026 - DNA, 122 bp, Homo sapiens
ccttgatgctaattagtgccctggcacaggtggtggggctgcattgcaggccctgccccccgggactcacagctgagcaaatcacagcaacagggacagaaaccgagggagcaggacatgca

SEQ ID NO: 353027 - DNA, 122 bp, Homo sapiens
gggcgggagagaggcgggacggggcgcgggccctggtcgggaggcggacgggctggaaggcgacccggctgcaccgcgaggcacctgtacctcagccgcggtcgccgcccgcccagcccggc

SEQ ID NO: 353028 - DNA, 122 bp, Homo sapiens
ggagaggactgatgagaagggcttgttgggaaaccctggctccgtcaggaccccaccctgcgagctctccctggaacccgggagcagggttcttctggctgcccggctgcagagagctgacc

SEQ ID NO: 353029 - DNA, 122 bp, Homo sapiens
acacaattcctttccgtgcggaaagtctgaaatctttttaacacttcggacacagagcatcgtaaggtcccagaatagagggtgtgagcaatttcagcgctcacctcggcccaagcgaagct

SEQ ID NO: 353030 - DNA, 122 bp, Homo sapiens
aagttcttcaagagacacagagggagaattatgccaaaggtaactatcaccaccagaacgcggccatccacgtaccaggctctgaaaggcatttaagtgattaggttatatttttttagaaa

SEQ ID NO: 353031 - DNA, 122 bp, Homo sapiens
gcgattctccaccttggggctcgccttcctgccgcgttcctcttccttccatccctaaagcgcgtacgccctgcagagtcaaacctggcgcatcctcaagcttccagggggcaacgtgaccg

SEQ ID NO: 353032 - DNA, 122 bp, Homo sapiens
ggatcttgaagccctttctcagcctggctgccaatgtgagaggggatatccctgcaggaacgccaaaagtacagagcctttctccaacctgggctgctcgcaaaagagcctgctttctctcc

SEQ ID NO: 353033 - DNA, 122 bp, Homo sapiens
aaaccgaatgcatggacccacctgactcccgccactctccgaccccgcaccctctccccgcggagggctccagctcagtgaacaggagctcacgtcaccacggggaccaaaatgccgggatt

SEQ ID NO: 353034 - DNA, 122 bp, Homo sapiens
tttattttagtctctactgaaagttagaatatagaaagcttccatttatttagaggttaccgtgtggcaggccccgtgctatccaagctgtttctggcttcccagggttgtgagctcattct

SEQ ID NO: 353035 - DNA, 122 bp, Homo sapiens
agcgcggcggttccttgaaaaagcgggagcctggtctcagctggggcctggggcctgccccgcccatgcaggggtcgcgggagcaggggctcggcctccttcccaggccgtggcggcgccgc

SEQ ID NO: 353036 - DNA, 122 bp, Homo sapiens
atagcatcctgtaacctcaaactcttggcctcaagtgagccaacccacttggcctgtttccgcttttctttgtgaagtgcagccgtgtttttcaggacttgggacgtggctttctttctcct

SEQ ID NO: 353037 - DNA, 122 bp, Homo sapiens
ttctatttctgtgcctgtgggccatgctgttgttgattcatatgcaaatggattatcactcgctttagccaacttgagctgagagagactgagaaagggggaagagaggcacagacacagat

SEQ ID NO: 353038 - DNA, 122 bp, Homo sapiens
tcaattgtattataacctgtgtgaaaaatgcgctaactgaagggtctggttcaatatcctcgttttccccgctgcttctagatcttcatctggaggagaaaaccttttggcattttcttccc

SEQ ID NO: 353039 - DNA, 122 bp, Homo sapiens
ccaggcgctgagccggaatgtggactgtaccacagtgactgcgaagggaggggaagacgacggcaaggaggcctactacacgagcagtaaggtccacacttttgcagacagatttcacagga

SEQ ID NO: 353040 - DNA, 122 bp, Homo sapiens
cactgttaaacctgaaagtagaatcttggtacataattctcctgggaccatgtatcaaatcgtaatttccaggccctgtgattgcaactgtaattttccatcgacagagctctctgccatac

SEQ ID NO: 353041 - DNA, 122 bp, Homo sapiens
ctttgtgacttgaagaaccctgactttgtttctgcaaaggcacctgcatgtgtctgtgttcgtgtaggcataatgtgaggaggtggggagaccaccccacccccatgtccaccatgaccctc

SEQ ID NO: 353042 - DNA, 122 bp, Homo sapiens
ctgtgattaacgggcaaattaaacccaagcccttaactctctcctggcagaggacttgaacgcagagccctgggccagtgaggttggagggaggtagttgcatctgtacctggggaccagga

SEQ ID NO: 353043 - DNA, 122 bp, Homo sapiens
agcggaggctcggcctagagggcgggcggcagagggcaaggaccgggcttggggagcccccgggcggtggccgctgagggcccggacgcgctactcccgagcccggggtgcggttcctcccc

SEQ ID NO: 353044 - DNA, 122 bp, Homo sapiens
accagcaatgccatatttaattcttctctctcttcaaatcactttgacttccttcagtaccgccagatggagaaagctctcagctttttgtgtgtgattaggttaagtcgacctggataatc

SEQ ID NO: 353045 - DNA, 122 bp, Homo sapiens
aatcttgaggactgaaagacaactaatgcctttcaggacgatcatcatggaggatcctcccgcctcggccttgggtctacaggcctgtattatcccacccctgttttttttttttttttttt

SEQ ID NO: 353046 - DNA, 122 bp, Homo sapiens
cccagttaacctcgagggagcctctgtcctagaggagttccacactaggaggctggatgtcggtggggccgtggtggaagaatcagctacgtattttcaaactaccgctcactctacaccct

SEQ ID NO: 353047 - DNA, 122 bp, Homo sapiens
aaactccagacctggaatccagaacctcaaatctgtgagtggaatgtcttgagatgggcacgtggaagtcaaagggtttctctttttttttttttccccttttagaagctatacataaaaag

SEQ ID NO: 353048 - DNA, 122 bp, Homo sapiens
ttaaatcttccaactgcacactcttccggtccgtgtttgttccggctcgagctgagctttcgctcgccgtcgaccactgctgaatgacaccgtcacagacccgccactgacttccatccctc

SEQ ID NO: 353049 - DNA, 122 bp, Homo sapiens
gtcaggctgcctgcctagggccacacagcctggaggtgggggccggccggggggcgcagacgcgcaaagcctgtccccacctcacggccccctccccgccggcccgggcggggctgctggcc

SEQ ID NO: 353050 - DNA, 122 bp, Homo sapiens
aggggccctccctctctgtctgccttctgccacagccctggcttgtggggacctggtggccgagagcctcctccacctacctccagagccacaggctggcctctgccaggtgcaccgagcag

SEQ ID NO: 353051 - DNA, 122 bp, Homo sapiens
cctcccttagcgggggcgcgcggcgctgaggaccgcacggaaacggggaagtcaggtggccgctgccgccgccgccgccgcggtttgtcgccagaaggaagatggcggatctggaggagcag

SEQ ID NO: 353052 - DNA, 122 bp, Homo sapiens
tcccgtcccccaccaggtcctggccttcttccgcttctctggactgctcctaggctatgccgtgctgcggctccggcactggtgggtgattgcggtaagatgccactttcctggcagcttct

SEQ ID NO: 353053 - DNA, 122 bp, Homo sapiens
caacccagaggccactgggtgtggaggagggacagatagggccctccgagtttctgtagacgcggttgcgctaaggggagagctgccttgataagacctcttgggcacccatacaactgcca

SEQ ID NO: 353054 - DNA, 122 bp, Homo sapiens
ggcctccaagaattctcaggcgtttagcacaagcaccagctcattaccaggagatgcgttcggggagtggggacatggagaatgaatcccaacttgtgactccattctccactaactttatt

SEQ ID NO: 353055 - DNA, 122 bp, Homo sapiens
agccaccacgcccggccaataaattattgttgactatagtttccctgttgggccatccagcgctaaatcatattaatcctatctaaatatttttgtaccagttaaccatccccacttccacc

SEQ ID NO: 353056 - DNA, 122 bp, Homo sapiens
gggaaaaatgtcaactcaaaacaagtaacctgcatagctcgggaatgcctgtataatttacgtcaagtctctccttgggacggaccggtgaaattgcacgcagcacaaagaccggctcttac

SEQ ID NO: 353057 - DNA, 122 bp, Homo sapiens
ttctccagtcaccaaatccaagaaaggtgaagaggaactgccccagtggcgtctgcgaggcgtttcctctataaagctgtcgtccctagctctggtcagtgctgaccaagtcaccctggcct

SEQ ID NO: 353058 - DNA, 122 bp, Homo sapiens
ggaaaagtcattttaagtaaagacaacgagttaatcaggaggcgatgagcccagtccttccgccccgctttcccgcttccagccctcgaacgaaccctcctctaacccccgggaggcaggag

SEQ ID NO: 353059 - DNA, 122 bp, Homo sapiens
cccaccctccagtcccagcaggaggcaggagtagactggggcagggtgtgtgcgggcggacgttacagttgcttaaataaaccggcctgacgttgctggcccaggaagatgccgggtgaggg

SEQ ID NO: 353060 - DNA, 122 bp, Homo sapiens
caggggtggagtgggcggtgcttgcgccaagagggtgagcctgagtgtgggcggggcgtgcgataagaggctcgctcggtagcgctcttcgcagagccgtatttgtgcgctacgccgcagcc

SEQ ID NO: 353061 - DNA, 122 bp, Homo sapiens
acagggaaagagaaccgggaggctcgaccggtgggaatccagctgctctgctcagtgttccgttcaataaactagcattgttgcttcgcaaagtgcttttgcttacattattcatttactcc

SEQ ID NO: 353062 - DNA, 122 bp, Homo sapiens
gtgtataatttaaaaaagacctaataggttactgtctttttaatgcatttgttattctttcgtattttttaagcatcggactggagttagtaccatcatctcttgagtctttcataactaca

SEQ ID NO: 353063 - DNA, 122 bp, Homo sapiens
tgcataaaatacctgcaggtgacctgtttagtccagctgccgccgctgccatcgctgccgcggccccctcgcctgccccctggggacagaatggtgactgtggggatcctggtaggggaggc

SEQ ID NO: 353064 - DNA, 122 bp, Homo sapiens
tttggggccagtggactagcctgggcgcatcctcctgggatcagtgtctggagttgggctcgtgataggttcacaatcacttccatcccttctgtgaagcaccacagctggccagaccctga

SEQ ID NO: 353065 - DNA, 122 bp, Homo sapiens
tgatacagcaaagtgaacaaaactggagaaaacaggggcagaggcgaaggcgaacgcacacgtggccgccctgctaatggggctctgagcatcttgtttcgctgtcaccgcaggtggccttg

SEQ ID NO: 353066 - DNA, 122 bp, Homo sapiens
aggagacacgcgggcaggtcatcttttggccggcgcttgacttccaaagctttcctttcccgtgtcccggctgcacgcgggagtggggaaggcggaggcggggggccaggatggccacggct

SEQ ID NO: 353067 - DNA, 122 bp, Homo sapiens
ctggagacagacactgccctgggaaaaccaggcacccacgaagaggcactgaccaaggcccggagggggcccaagtcacagagggagggatcccaagtcacagacgcctctcagtgtttgat

SEQ ID NO: 353068 - DNA, 122 bp, Homo sapiens
cgaccgcaccaactgccctcaagctctgcccggactccagccactagagtttcattttaacggcgcggaggggacaccctccccgccccatgctgcccacccgctgaggcgccacccaaccg

SEQ ID NO: 353069 - DNA, 122 bp, Homo sapiens
tgcacctcccacttgttgccagcgttttatttttcctctgctgaggcggggggttgcttgcggtggtccccggcttccccaatagtggctcacagcgtccccttcccacccccccaatccgc

SEQ ID NO: 353070 - DNA, 122 bp, Homo sapiens
caggttgcgtttcctcctcctgttccagggacattttgcgctggttagagtggccgccgccgccaggccgcgcgtggaggaggagccgggcggcgagccccgccccgggccgcgcgcacccg

SEQ ID NO: 353071 - DNA, 122 bp, Homo sapiens
ggtcccggtcactgcctgcctgggccggttccaggcagccctgcgcgcctgtgcaccgtgcgcctgtgattggacatctctgggtctctggacagctgccggggtcacgcgccgccggtgaa

SEQ ID NO: 353072 - DNA, 122 bp, Homo sapiens
cgcccttcacgtccagatacttgggttcgggttacatgaaacaggattagttcagaaaatcgtgccacttcacagccaagacaaaaacccaagaatgaaaaccatgtatacagccaacacaa

SEQ ID NO: 353073 - DNA, 122 bp, Homo sapiens
tcatccctagggtgcctggccgcaacctctgcaactctgagcttcttgtgacctcccccacgaggccatcgtgccttgggctgggttcccccagagcagactctcaggcgggggttcgaggg

SEQ ID NO: 353074 - DNA, 122 bp, Homo sapiens
tgatcaccacattaccgtctgtggtccggctcctggtgacagctggtgccagccccatggcgctggaccgccatggccagacggccgctcacctggcgtgcgagcaccgcagcccgacctgc

SEQ ID NO: 353075 - DNA, 122 bp, Homo sapiens
tgcagctgggcctgagcactccaggggagggtgtgttttttttttttctaaacgattcttcgtgcttggttgttcctgcgcagtagcccaccagtgccccgtagtgaaagagctgcggaccc

SEQ ID NO: 353076 - DNA, 122 bp, Homo sapiens
gccggataaggtgggctttgggcggggtgctgctgcagcggcgcttcctggtggtcagggcgccatggcgctgtcctggctgcagcgcgtcgagcttgcgctctttgctgccgccttcctgt

SEQ ID NO: 353077 - DNA, 122 bp, Homo sapiens
catcagtattatttaaggaagacttcctggagtgggtaggatttgagtaggacctagagacgaggaggctgcaaaaagcaaaccttgttagctggtggacctggccaaggtacgccttcgcc

SEQ ID NO: 353078 - DNA, 122 bp, Homo sapiens
agaaggcggctctgatcaatgtgggctgaattcacgccccctacccaccctacccgatcccgccaaagccactgcctcccctgtggcagccgctggggaaaagggagagaactgccatagct

SEQ ID NO: 353079 - DNA, 122 bp, Homo sapiens
ttaacagcactcttgccctgttagaaatccacaggggtggatgataatccttccactgaccgtggcaaagattcctccattagcgctctgtggagtccatctgtctatttcctttccggcat

SEQ ID NO: 353080 - DNA, 122 bp, Homo sapiens
gtagaggaggttgttgatgacgcggtggcaccatcgctgcgggtcgcatggatccggagccgccagacgcgccgaccccagaacaaagtcgtccagggcgcgtagcggtggcagccgcacct

SEQ ID NO: 353081 - DNA, 122 bp, Homo sapiens
gtgggcggcggcggggcctggggtctggggctcgggctgtgggcgctgctgtggccgacgcgcgcgggtcccggcgaggcggcgctgcaggagctgtgcgggcagctggaacgctatctggg

SEQ ID NO: 353082 - DNA, 122 bp, Homo sapiens
gaagctgcccaggccttcgtgtccctcagtgcttccctacctcatcgccgtctcccctcacggtacttcagcccactgtccccaccgttcctggggctcgccaggcgccctctcccccgccc

SEQ ID NO: 353083 - DNA, 122 bp, Homo sapiens
aggagtccagcgtggattgctccaaagctcacccaccacgccctgactgcaggtgtgattcggggcccccgtggctctgctgggtccaggtgcaagcaggcacagaggtgctggcgtcagct

SEQ ID NO: 353084 - DNA, 122 bp, Homo sapiens
tttcttttaaacaaatgagaatttacaagatgtgtaactttctaactctattttatcatacgtcggcaacctctttccatctagaagggctagatgtgacaaatgttttctattaaaaggtt

SEQ ID NO: 353085 - DNA, 122 bp, Homo sapiens
cctggctggtgtccctgggcccaaagggggctggggctccatgggagagagacgggcaggcggcaccccagtgtggggctccacaagctggaggggcccctggacccaccaggaggacaggt

SEQ ID NO: 353086 - DNA, 122 bp, Homo sapiens
aaggacgtttttgggatggctggggacatttggagagagactgtataaccagaggtacagcgctgagtcaacagtgctgacagctgatgcgacatcaacactgaatcaatgctgagctgctt

SEQ ID NO: 353087 - DNA, 122 bp, Homo sapiens
acccgctaacgaccgagacgcctggatcatcgctggtcaccgtctgtgtgtgtaatctgacgtgatgaaagcaaagtcaaccaacaggcagaacctgcgcctaattgtctgggcttcacttt

SEQ ID NO: 353088 - DNA, 122 bp, Homo sapiens
gagttctccgcggccgcagacaatggactcattgacgcgggcgcacagagattaggtgcccgggccccacggcctttcactctctgcccccaccaaaactgcaggtggcacttttccctgaa

SEQ ID NO: 353089 - DNA, 122 bp, Homo sapiens
tgtggacgagggtgtcactgctctagggctggccgagtggtcactctgtggctgtctttccgggagctgctcaattcttcccatagttgctgccccattcgtgccccgtcgagtggtgtgga

SEQ ID NO: 353090 - DNA, 122 bp, Homo sapiens
tcaggcatttacatatatttttctgatgaattacttcttactcattttggtttttcccaccgtaatatgttgcttctggtgaaccagtgactatttaatgaatcagcgagtcaaacaagtac

SEQ ID NO: 353091 - DNA, 122 bp, Homo sapiens
tgtcccgatgattaacaccaggtcggcatgctgagagaaaaacgacacagacgcagtgagcgcgcggcatccggtttgccggcacatcctaatgagcacgatggtcaaatgccctgggtttg

SEQ ID NO: 353092 - DNA, 122 bp, Homo sapiens
tgagtggactaaaataagtgtcggattctgactgaaagcctgcccacagatgcagctgtacgatggaagtacatcaactcacttgccactataaagcctgccaccaggcagcattaagctac

SEQ ID NO: 353093 - DNA, 122 bp, Homo sapiens
ctcagtggagctggggccaagctgggcctctccagtcggctgcgggggcgcacccccgggcgctgggagtccaggcccggttttgcatcaggccctgccgaggtgtttcctcctcctccgtg

SEQ ID NO: 353094 - DNA, 122 bp, Homo sapiens
aatacagccaccccagcccacaggggggcgccggcgaagggtggtagacgaggatccggacgagaggcggcggaaatttctggaacggaaccgggcagctgccacccgctgcagacagaaga

SEQ ID NO: 353095 - DNA, 122 bp, Homo sapiens
tgagctgtgatcaggagcttagtatcacaaagccgagctgctgtgagcaaaaggaggtatcgaatgcaggcacagcatgatgccttggaaaaaggcctgcagagtcaaccatgagatctgtg

SEQ ID NO: 353096 - DNA, 122 bp, Homo sapiens
cgaggacagtcatatagctgcaaagcatttcagcagcacacggagtcagtttagggttggcggcaaaagaagaaggaaatgcctgatagtccagtgtctgccacttgcagaggatcatgcta

SEQ ID NO: 353097 - DNA, 122 bp, Homo sapiens
cccgaggcgcaggcatcgcagagcggggtgctgccgtcgatgttgcgagcatccacctcacgggaggaagaaacaagtgtcaaagggcagagaaatgccacgcaacccactttcccatcctg

SEQ ID NO: 353098 - DNA, 122 bp, Homo sapiens
gtgccccacggagatcatcgcgttcagcgaccatgccgaggacttccgcaagctgggctgcgaagtgctgggcatctcagtggactctcagttcacccacctggcttggatcaacaaccccc

SEQ ID NO: 353099 - DNA, 122 bp, Homo sapiens
tgcctgcgttccccaaattcatgtgtcgaagtccttgcccccagtgtgagggtgttaggacgtgaggccttcggaaggtgattagttcatgagtgtggaagcttcatgaatgggattagtgc

SEQ ID NO: 353100 - DNA, 122 bp, Homo sapiens
cggctgggcgggtttcgccagccgacccagggatccgaagaagggcgcacccagcctccccgacctaggtgtagacactgcccacccgctgcggctccactctactccacccctgcccgctc

SEQ ID NO: 353101 - DNA, 122 bp, Homo sapiens
acctggcgaaagttactttcatcacagcggccctggcgctccagtgccaataagaagtcacgtccatttcggatgagtccacgctcgtggtcatcaatgacatcaacaaagaggaaagaaag

SEQ ID NO: 353102 - DNA, 122 bp, Homo sapiens
ctcagccacgtatcctagttcccgccccttccggccttatgattggttcgacctgagcgccgccgggcagctgtctcattggtagagtgcgcactccaaattatcgcagggggcggggcttc

SEQ ID NO: 353103 - DNA, 122 bp, Homo sapiens
tgccctaagagtagcccaggctaggcaaggctgtggtgaaaacttgagcaagatgattaccgcgaagtggagcgttgaactgggtctaagattttgggccattccctctacaatgctgaggg

SEQ ID NO: 353104 - DNA, 122 bp, Homo sapiens
tccctgcagcggtggtggagtgagtggcccctccatgcggaggccgcagctcagggcgggcgggagcctggaggctcccggggccccggctgggcagtgagcgcagcccggtcgagtcccga

SEQ ID NO: 353105 - DNA, 122 bp, Homo sapiens
gagaggaggaggatggctacatagaggactgctatgttccacaacggtctatatatgatacgatgaggataaatgagcaaattgaccaggggtcaaagcttaaccagacttcaaaaagcacc

SEQ ID NO: 353106 - DNA, 122 bp, Homo sapiens
ttcgtgttgtgttagacacggtgggctcgtttgtgttgtgttagacacggtgggctcgttcgtgttagacattgcccattgacttcctcagtggatgtgaggaatgggacctgagacattgc

SEQ ID NO: 353107 - DNA, 122 bp, Homo sapiens
catcatgaaagctgcggagaacggtccacaaccaggcgcccccatcgttgccaagtggggcggccacctgagacacacacaccttactgtagccaccagaacgcccagggacactgggatac

SEQ ID NO: 353108 - DNA, 122 bp, Homo sapiens
ccgtggaagcaagatgctaagaaaatacacctgcgaacagtgatgtatcaatggctggagcgagacaggtgggccaagaagatatgaggtagagcatatgaattgtctagcacaggaggaat

SEQ ID NO: 353109 - DNA, 122 bp, Homo sapiens
agcggatctccccaaagaaccaagcaaaatgagtgtcaaggcatttggcagtcgggatgccgtgggtggccttagcaagagcaatttgggtggagtgattggggcagaaggaataaaaactg

SEQ ID NO: 353110 - DNA, 122 bp, Homo sapiens
tggggcaatcagttgaatgcaccaggcatcgccttaacaaaaaaaaaatgaagtggcagacgtggcagcatgatgcaggatgaatacatgcagaaccatctttaaacagatgaggtcctgtg

SEQ ID NO: 353111 - DNA, 122 bp, Homo sapiens
acccagaagggtagcccacacagagcctgtccctgagcaccgccaggcactgcacgctgccgggagccacaatctcattgaactttctgtggaatggcttcgttctctggatctcatagcaa

SEQ ID NO: 353112 - DNA, 122 bp, Homo sapiens
tgggaacttggagtctgtatttttacagaactcttcaggtaagtgactcttaaggtcagccgggcttatgaaccactgggtgagaacactgggcacagttagacagcagttgggtggtgggc

SEQ ID NO: 353113 - DNA, 122 bp, Homo sapiens
cagctaacatttagcattttctgataccttttatctcaaaacctttagataaacttcaaacgccatgtcatgacaatattagaattgtatttacattatgtatacacatctcttccttccaa

SEQ ID NO: 353114 - DNA, 122 bp, Homo sapiens
gaagcgtgcctgctctttggaataactgcgagaaactggcagcaatagaaaatgaatcaccgtgctacaattatttgaccttattacatttcaagacattgacccacgactttatcactatt

SEQ ID NO: 353115 - DNA, 122 bp, Homo sapiens
tgggtgcgctggccgcctggaggtctggcatggcgggcgctggggcaccgtgtgtgatgacggctgggacctgcgcgatgccgccgtggcctgccggcagctgggctgcggaggggcactgg

SEQ ID NO: 353116 - DNA, 122 bp, Homo sapiens
tcgttgcattgccgatggcacctgccaggatgcagctgggtgcggaatccagggcaccaccggcagtggggagctgtgcagagtgggctgctctccggccccagccacggggtgccggggca

SEQ ID NO: 353117 - DNA, 122 bp, Homo sapiens
cccacgtcttgcgtcacgtgtcccgcaacgcaggagcgctttctctggccagcggagaagcgaggagaaagactccaaatcagtcagggagaggagtggaaggagccaaaacgtccctgcga

SEQ ID NO: 353118 - DNA, 122 bp, Homo sapiens
ggccgacctcacgtctggctgctgagggcagggaagcactgcagccattccatttaccctcgaggcgaatccatgctgcgccttgtcccacaggcaaattccattctaactctgactctttt

SEQ ID NO: 353119 - DNA, 122 bp, Homo sapiens
cagctgcgtctgctggaggatgcccgtgacgggctgcggcgggagctgctggaggcccagcgcaagctgcgtgagagccaggagggccgggaggtgcagcgccaggaggcaggcgagctgcg

SEQ ID NO: 353120 - DNA, 122 bp, Homo sapiens
tagccctgagaataactaatttgaatagtgtaagtaaacagttttcttgaggaaggaaatcgggtggctggaacacaggtaggagacaccctgcaagtcaaacaagcttaatcaaaacaaga

SEQ ID NO: 353121 - DNA, 122 bp, Homo sapiens
ggaacacgtcgagaggctcggcggcaagcaagactgccgcctccgtgccggcgccgtagtcgggccccagcagctcaaagaactccacggcctccgcgcccttctccaggtcgcccaagctc

SEQ ID NO: 353122 - DNA, 122 bp, Homo sapiens
gcggggaggcctggcgaggtggggctgctccggggaggaccaggctctgcccctcgcttccgtccgatggcgggctcttcccggcagcctcgctccccggcggacgccgtttcccgcagcgt

SEQ ID NO: 353123 - DNA, 122 bp, Homo sapiens
ggcgccgcggagtggaggtgcacgggcgggggcggggacgagcggagagccgctcggctccgcggccggtggcggaggctggggccgcgttgttgccgccgcgctccgcccctgggggcagg

SEQ ID NO: 353124 - DNA, 122 bp, Homo sapiens
aaatgcccaaggacttaaaatgacaaattctcgggcgtgactgaaaggctgaaaatggggcgctcagtggaggtcggtgaggaggctcaccaggctctcttcaacctggagttcttctgcac

SEQ ID NO: 353125 - DNA, 122 bp, Homo sapiens
tgtgttggtacatctataccatttagtggcacagaataatcattttttaaagccacgatgcgcggagcacgccacagcgtctgatgtcattttgctaaatgaccctctatagaatgcacatt

SEQ ID NO: 353126 - DNA, 122 bp, Homo sapiens
agggggctgaaattattccctctgaagaagaagaagaagaagaaaacatactgcagctcccgatttggtaaaaagccagtggcttgctgcaatccagagtcactgtggggagcgctggccgg

SEQ ID NO: 353127 - DNA, 122 bp, Homo sapiens
actgttaccacatgtgactgtgtggccctgtgtgactgtgtgaccgtgtgtgactgtgaccgcgtgtgactgtgtggccacgtgtgactgtgtgactgtgtgtgactgtgtaaccgcgtgtg

SEQ ID NO: 353128 - DNA, 122 bp, Homo sapiens
ttcatctccgggctagacacagcttttcccatcaggacccagggaaccatggctgggccccgggtggaccagtctgggtctggagatctgctgggttcaaatcctggctcagctgctccata

SEQ ID NO: 353129 - DNA, 122 bp, Homo sapiens
gctcggccagcgcagcggaccccggcaggacgctgttaggtttcccggggcaacagaaggcgcgcgcgctgggcccggcgattggccaggcgacaggccgtcgtccagcgccttctccccgc

SEQ ID NO: 353130 - DNA, 122 bp, Homo sapiens
gcgcgcccccgcaccccgcgcgtccccggccctgggccccaggagcgccggcctgggacacgcagtggggtttcctcggcgttgctttggttttgcccttaaaacgggtccaagtgtcctcc

SEQ ID NO: 353131 - DNA, 122 bp, Homo sapiens
cgccgcatctgattgagccgtggcctcgtgacgtcatgggccattccacgtgcggagcagcgcgggggacgcaaggcgggcggcgtgaccactgctaaacaggagaggggatttaaagggcc

SEQ ID NO: 353132 - DNA, 122 bp, Homo sapiens
tgttttagcttgttagtgacagctgcataacccaggtgaattttcaacaagtctttcattcgagaagatatcattagattactttttttttttttttttgcaattcattgagcctttgctga

SEQ ID NO: 353133 - DNA, 122 bp, Homo sapiens
gtggagacttcaggcttaggtcctggggggatgggtcctccagttctccctctgggtctccgcgggaacccgggtactgcctgtaaagccccagccctcccctcacttggcttaaaccgctg

SEQ ID NO: 353134 - DNA, 122 bp, Homo sapiens
tttacatttatgggctagctaatttttcccttcgtcttagtaaagtttatattacagaagcgcccagccaagaaccttatcccacatccagatctgtaaaatgatgttcagattttataatc

SEQ ID NO: 353135 - DNA, 122 bp, Homo sapiens
tcagctgagctctgtgctgctctaagctgggggagcctactccctgagaagcaggacacccggaaggtgtttccccctggcgttgaggctggttatacaattcctttcctctagcagattaa

SEQ ID NO: 353136 - DNA, 122 bp, Homo sapiens
cttgagcccctccgagcctcggcgtcctcgtgtgtaaaacagggatggtttccgtgacctcggcgggatgccggaggctcagagcggaccgtgagactgagaggctctgaacacgccacagg

SEQ ID NO: 353137 - DNA, 122 bp, Homo sapiens
ggggcaaccccgttaaaagtcattcctgcagggcgcatccaaaacggaacgccgaggtcccggagccgagcgcgcagccagactgaaccgggtgcccgggtgtcgccgcggcgtctcgggca

SEQ ID NO: 353138 - DNA, 122 bp, Homo sapiens
aatgcttatggcttgactggaataatgacaaataggaggaatacttggaaaatttcactgcgtgtgtgtaggtttaagcaaaatatttaaccgttctgggcctcagtttcttcatgtgcacg

SEQ ID NO: 353139 - DNA, 122 bp, Homo sapiens
agttacgcagcctctccctgtcacccgcagagagcagcatcggtggccgctcagaagccacgacctacaagtaacccttcagacacgttcaaagctcctcgccgagagcctatcaggctttt

SEQ ID NO: 353140 - DNA, 122 bp, Homo sapiens
gtccaggattgtgcagcccctccccaaccggccgttgggaatcttcgcagcagcagaacccgctgcctccaggtccgaccagacctgcataggtagagagtccccgcacagggcggccagca

SEQ ID NO: 353141 - DNA, 122 bp, Homo sapiens
attgtcaagcagtctttctagagtaattctcctgtttttttggagcctagactcacagtccggtagccttcattgaagctgtctagagtaccacctgccccaccccgccacccccacaactc

SEQ ID NO: 353142 - DNA, 122 bp, Homo sapiens
acaaatcctggaacctccctggtccccatcttccagggctgggctgcagctgaggaactgcgggacgcacacccgccgggcgtccagggggcgccgccccatccgggggtcgcgggaagctc

SEQ ID NO: 353143 - DNA, 122 bp, Homo sapiens
gccccacttggggcaccagtgggggctcctggccctggccctgggtgggagtggccaatccgcaaatgaggcctgtgtgtctgccccgccggcccctgccgtcgtgatgtaagcggacacag

SEQ ID NO: 353144 - DNA, 122 bp, Homo sapiens
ttgccggcaagcgcggggactccgcagtggagggcactgcggagtctcggggagtcacagcgggggcctcgggcccaaatgcctctgcccggagctcgagccgacacacacactcagtccga

SEQ ID NO: 353145 - DNA, 122 bp, Homo sapiens
catcgggagactgtttctaaccctgtttctgaaccaggaactcgggttcctgcctcctaccgagacactgtggcactctctaaaatgtggagtagctgtaataaatctactcctgtattatg

SEQ ID NO: 353146 - DNA, 122 bp, Homo sapiens
agcaccttggaatgtcagaaaaggaaggaagtgctcaaaaaacaaagcaaaggagcatagcgaaagcacacaggagcaaacctgaaagagctcccaatggccaaagctggaataatttgagc

SEQ ID NO: 353147 - DNA, 122 bp, Homo sapiens
gttggggtgttgcaaaagacgcaatacatgaatgatctcaggtaattctcaggcaacccccggaggctggtgttgctagcacccctctgcaggagaagaagctggggctcgggagctgactg

SEQ ID NO: 353148 - DNA, 122 bp, Homo sapiens
cggcatcctgccccaggttgtagatgaaaatgcaccagccggaggaggcgtttcctggcacgttgacgccagagagcccgctcatgtgatcgacgcccatgggggagaacctggcagacaga

SEQ ID NO: 353149 - DNA, 122 bp, Homo sapiens
agacatacagggtgctgggagaggacaaggaagccagcccctagagcagcaggtgctcaccgggccgcccaccacactgaggccacgccagctggaccagcccctccagggcccctgcgctt

SEQ ID NO: 353150 - DNA, 122 bp, Homo sapiens
ggcgggagctgaggaatggaagttacctcagtacggtcccgactgctaggctgtgggcagcggacagagctggcggtcccgggcggccgagcagatccggcgcggcgcggcgcggcggcggc

SEQ ID NO: 353151 - DNA, 122 bp, Homo sapiens
gcagccccgccggcgttggcacggtgacagtagccaagtgtgcaaacttgtcccattgtccgcaggccagggggagccatggaaactggctaatatgacacaggaaaatgtttgctgatggc

SEQ ID NO: 353152 - DNA, 122 bp, Homo sapiens
gctttgaagatcagagtgcatcttccagctgacgatctcttcggtcggggacaatgcattcgattcgcacggtggagattaaagtccccgagatagaggaaacgtttttcgcgcccaggttc

SEQ ID NO: 353153 - DNA, 122 bp, Homo sapiens
tctaggcccagctcacgcctgacggtggtctctcaaggcccagctcccgcccaccccgaccggcccaaggctttctcaagttggcccatccagggcccaattcctgccctccgctgatggcc

SEQ ID NO: 353154 - DNA, 122 bp, Homo sapiens
ggtgggaagaagactcaacccgtagctaaatgtttggcctttggctattttttaaggaaacgaatctcagggaggtcggggcgcgggggatgggggcatcatcgcgcctcggagatgggaag

SEQ ID NO: 353155 - DNA, 122 bp, Homo sapiens
gtaactctgttaaagctcctactgcaccacgtttaaacaatggatttcaaatggaactttcggttttgtacaagtgatgatttgtgttcttgcctggcttccactctagaccagcactatga

SEQ ID NO: 353156 - DNA, 122 bp, Homo sapiens
ctcttcagcatggactcggttagtgttcacgggtcgtaggtccacagctccatggaacttcgtaagatgaacacgtctgtggaactggtaccacaagaagtggcagcgttcccacaccgagg

SEQ ID NO: 353157 - DNA, 122 bp, Homo sapiens
gagattcgcggagcggagactgagccagcgagtgcgcgcctagaagtttttataagtggccgccgccgatgatgaaacgcgctctccctcctccctcttttcctcgggtgtcaaaggcgcta

SEQ ID NO: 353158 - DNA, 122 bp, Homo sapiens
caaggaactctgcttggagttgtcacccctacgactgacctcagacccaggacccaagggcggggccctcttgcatctggaatccagcctcggccttgacccctttcgcttgttcggagtgc

SEQ ID NO: 353159 - DNA, 122 bp, Homo sapiens
aagcccttcgactcatgtccctggctagggctgagatttctaggaggaggtagggaggatcggggaaagatatgaattctctttagataagtggctgattgaaaaatgtaaaaggatgcttc

SEQ ID NO: 353160 - DNA, 122 bp, Homo sapiens
gggtcatgggggtatccctcctcggatgtggttcgtgttgcaggagctgcggtctgtggccgccccccacagtcccgcctttctcccgttaaaaatttagagtttatttgagcaaacagcgg

SEQ ID NO: 353161 - DNA, 122 bp, Homo sapiens
gctggtaggccacagtgcatgcctctgcctccgaggggacctaggcccaggtctgaagaacggggctctcccctggacttagcgctatgcctggtcaggctccacctaatgccttgctcccg

SEQ ID NO: 353162 - DNA, 122 bp, Homo sapiens
acccgccgcgtcggcggcatctctcgcgtgctcttgcttgcgcactaatttgtcctccaccgcctcccgttcaggccggctctcctgcggggcggggaaaggggtgggaagaggctgggagc

SEQ ID NO: 353163 - DNA, 122 bp, Homo sapiens
aaagctgctgtgaccgcacattccccagggagggtgcaaggccaaggggcagaacgatcacgactgaccccaggctctgcaggcgcagcccaccaggcagccccacctccgcacgtgggcct

SEQ ID NO: 353164 - DNA, 122 bp, Homo sapiens
gctcagtgccccatcgtggagtgcctcacttactccatgatgacgcacggccgcaacaaccgcaagaagctcatgatcatgcgcatcgtcaagcacgccttcgagatcatccagctgctcac

SEQ ID NO: 353165 - DNA, 122 bp, Homo sapiens
ctccaagcacagagcccatctgcaaacacggccggggagaacggtcagtggtgcccagggcggggccgcagcggaaggaaggcccaggccggggagaacagtcagcggcgcccagggcgggg

SEQ ID NO: 353166 - DNA, 122 bp, Homo sapiens
acaataaataaataaaggttgtaaatagtctcatatcagttcaaatgagtttactccaagcgtggggaaaaactaatttggaggactttctgcatttcagaattgaaaataaggtatgttgt

SEQ ID NO: 353167 - DNA, 122 bp, Homo sapiens
atgcattcaatgatgaaacataaggaggcagcctgagaggcggattaaagggaagggcttcgaatgagaatgctacacacaagcccaaatctgctacttagcatatgtttgtgggcaagtta

SEQ ID NO: 353168 - DNA, 122 bp, Homo sapiens
agcgcctctccttggctgctactaacttgagctcccctggttggtcccaaaggcggagggcgttaggagggaggctgggttgccgccgtcgaggccaaaaaaggtggaggtttgttcgggct

SEQ ID NO: 353169 - DNA, 122 bp, Homo sapiens
cagggagttagactccgtagcttatcacttttgggaaatgcttagatagcgctaatgtagcgaggtcaggaaaataagggtcacttagtccttacatacaaaggagacgcaagtgttggtat

SEQ ID NO: 353170 - DNA, 122 bp, Homo sapiens
ggagaccaatgtgagtgacagtcaacattcttggtttcagtgttttttaaaaaagatattcgtagtattattaagaagtgttaaatacaatcattgaaggtaaactctggcccatttgtaaa

SEQ ID NO: 353171 - DNA, 122 bp, Homo sapiens
gaagactcaagagaaaggtaaggacgacactcagtgcaggagtccatattaccacataggcgtttcggatgggggattcccttctccggggacttggaagaagtgtggtcaagaagctatgt

SEQ ID NO: 353172 - DNA, 122 bp, Homo sapiens
ttggtaaggaacatatgtctatttgcttttcactctcaagacagtctcttttacaacgaccgtaacgtttggtgcaacgatcagcattcaccaaggtacatgtggctacggtaaaagaagag

SEQ ID NO: 353173 - DNA, 122 bp, Homo sapiens
cagaggcctgcgagaaaccaaacgagagggtcagcaggcaggaggcgtgcgctccgcggccgcgccgggcagagccgggcacagcgggcacggccgggcaaccccgcggggccccgtccgtg

SEQ ID NO: 353174 - DNA, 122 bp, Homo sapiens
tccctcctcctcctcattcccaagcactgagcaccgcaggccctgagcaaaggctcaaagcgggtacgggttatcttgaaagctacattcaggctcgtgtttacccctctgcagatgcatga

SEQ ID NO: 353175 - DNA, 122 bp, Homo sapiens
atccagtatctccaagccctgacagatgatcaggcctcagacccagcggcgtccggcatgcggctggctgttcctgacttgaagcaatcagtgggctgccttagaggccggcaccttcagct

SEQ ID NO: 353176 - DNA, 122 bp, Homo sapiens
agaagctccctgcaaatgaattcacaggaagcagagttcacccgccttccatgacaccctcgccattctccatgatcaccagcccaccaagtccatgtctgaacagctaagacatctgatat

SEQ ID NO: 353177 - DNA, 122 bp, Homo sapiens
ggcgcgctcagccggctcctggagcagggagggagctcctgccggccgcgcccccaccgccgggctgggcctcgaggaccctgccgtcaccctcccgagcgcccccaaacccggccgggaag

SEQ ID NO: 353178 - DNA, 122 bp, Homo sapiens
ggaaccggcagggacgggcgagaaggctaccctgcaggccgcaccaggaagacaggtacgcggagccgggcctggcccagcgcagccgcgctcctcgctatcccgccagcctccgggagccg

SEQ ID NO: 353179 - DNA, 122 bp, Homo sapiens
cttcgagagaggtgaggtaggaagtctgagcattgccgacgggccggagcaaatcgctcccgggctagaccctgcctacaccgcggcggggacaggtggaggtttcaacccctgtttggcaa

SEQ ID NO: 353180 - DNA, 122 bp, Homo sapiens
agaattgcaatatacaagtgaaagtgacttcaggtgcttactgtccgtctgtgccatcctcgctgcagtccgaatactggagctctggagaggagaggtcgtcatccagcatgtcatgggga

SEQ ID NO: 353181 - DNA, 122 bp, Homo sapiens
cccggtttcccgaagcacgacccgcgtctctggcggagctgcctcctggagtccctagtgcgccaggagcctcgctctgttctgattcgtatgggctccaccgagttccgcttgcgtcaggc

SEQ ID NO: 353182 - DNA, 122 bp, Homo sapiens
gctccaccgacgcaatgcccaggcataaaaaggccaggccggagagaccgccaccagtcacggaccctggacccagcgcacccgcaccatggccggccccagcctcgcttgctgtctgctcg

SEQ ID NO: 353183 - DNA, 122 bp, Homo sapiens
agaaggaaactcatcagacattgaagccctcctgccatcttccgtctatatcccgtcttgcgtccaaactcctgacataggtccatcctcactttgcaaaacctgttactgagtgagttcaa

SEQ ID NO: 353184 - DNA, 122 bp, Homo sapiens
accccaccccacccccattctaggagggaggggaggaaagaaggtaagggacagtgactccgctgtctgcctgtccctcgaaaagtcgcaagttctacatcctggcgtggccttctccttcc

SEQ ID NO: 353185 - DNA, 122 bp, Homo sapiens
gcaaaacaccccattcaagcctaaaacagtctgaaagctgaaagacccgactgccggtcccgtaagaaacccgcaacccagagggagaacacccttgtctgccctcccttccccgacagctt

SEQ ID NO: 353186 - DNA, 122 bp, Homo sapiens
tctgaagacacttggttaggtgatattttttcaattttattctattgtaacaatgatcagcgaagttatagtgattcaaatgctgtttctgcatgcattttccaaggtgaggaatactatac

SEQ ID NO: 353187 - DNA, 122 bp, Homo sapiens
tggtagcgcatgcctagtttttataggaagctgccagactgttctccagagtggctaaggcgttttccctttccaccgacaatggaggggtgattccgtttctccacatcctcaccagcttt

SEQ ID NO: 353188 - DNA, 122 bp, Homo sapiens
ctcaccctattcctcattccgtcagtgactttcagccacccgcaggcttacaaggttctgcgtcgccctaggcattttcttaatactcatccttttacaaaagacgtaatccgcaacagctt

SEQ ID NO: 353189 - DNA, 122 bp, Homo sapiens
ggcacagctgccggcattcacctgcacaagcttccagcttgcttatctatgtctgcagctcgattttactggctgctgtttgttagaaaagaaatggttttggggctgttttttgttaaaag

SEQ ID NO: 353190 - DNA, 122 bp, Homo sapiens
cagaaacccgcagggcagtctgtcggaaacccccgctttactcagcaggaatttagtctccgcgctccccctaaaacccgggcgtcctctcctctgtaccctcgctcctgaggccctcacac

SEQ ID NO: 353191 - DNA, 122 bp, Homo sapiens
aaagtttgaatcaaagttcagtgttgacatctggaagtgtgtagacccatagagctaaagcgatatatctttgggggatcccaaacgtttcccagggtccaactgtgttcgcctccttccgt

SEQ ID NO: 353192 - DNA, 122 bp, Homo sapiens
tgccgtcgtagtcatacctgggacgttgaaatgggctttggggatagagctcactcccagcgcgccccacaggagaagcccgcagctcaggcctgggccgtgcagaccgctgggcgggctcg

SEQ ID NO: 353193 - DNA, 122 bp, Homo sapiens
gcctaggagtccagagagccaacgccggggaggcagcgaggaggcaggcgggcgggcgagcgctccttcttcccgctcctctggcgctctcgccctcgggcggcggcaacccaccctcttcc

SEQ ID NO: 353194 - DNA, 122 bp, Homo sapiens
gctcaggaggcggggcaggggcggggcgttgactatgtcgtagcacatggccaggcggtgcgcggactctgggaggcgaagcttaggacgggcccacttggggaggggcccagggcccggga

SEQ ID NO: 353195 - DNA, 122 bp, Homo sapiens
gtatgtgatgaccaggaactggcgggtgggcgccctgcagaggctgctgcagtttgggatcgtggtctatgtggtagggtaagagagaagagcttttggccaggctggaggggcaagggaag

SEQ ID NO: 353196 - DNA, 122 bp, Homo sapiens
ccaccagaagaatgaacaaagcaaaagcaactttatatttcaaatactttggcagaaagacgatcttttcagtgtaactactgaaacatgcggcttagacgatggcataatctgacattaaa

SEQ ID NO: 353197 - DNA, 122 bp, Homo sapiens
tcagcctgccgagtgcctgcgattgcaggcgcactggttttcgtatttttttggtggagacggggtttcgctgtgttggccgggctggtctccagctcctaaccgcgagtgatccgccagcc

SEQ ID NO: 353198 - DNA, 122 bp, Homo sapiens
ttggtagagagagaagcaatttcttcatattccctgtagcagcaagaacagtgggctgcacgtcaccagcaaatcatcgtatccaaggtttcgctccagcaacttacagaaaccaggagaag

SEQ ID NO: 353199 - DNA, 122 bp, Homo sapiens
gtctcggctcactgcaacctctgccttctgggttcaagagattctgctgcctcagcctcccgagtagctggaattacaggcacgcacaaccacacccgactagtgttttgtattttagtaga

SEQ ID NO: 353200 - DNA, 122 bp, Homo sapiens
tccacctagccggggaggcctggagagcccggcgcactcctgcgcctagaggaggagacccgccccgttagccgggggccgcgcccaccccagacccactaaacttcgtttatactgccact

SEQ ID NO: 353201 - DNA, 122 bp, Homo sapiens
ggatgccctcaaggacgttggtgatgtcatagatgcgccgcttctgcaccttcagcacctcggcagcccagttcaggtcgacgacaccgtcagccgagtggctcagcagctccaggaagcgc

SEQ ID NO: 353202 - DNA, 122 bp, Homo sapiens
aaagctggaagaacagatgttttggaagttctttcgcgttccagaatagttttttttgtgcgttccccaagccaagccgtctatcagtctgaccgtggccgccttttttccctttctctgaa

SEQ ID NO: 353203 - DNA, 122 bp, Homo sapiens
ttgaggaaaatgaaagcggtcgtggccaggactggcgcagctgccgtttcaggcgaggggcgcagaatgcagcggccgccagcctggagcgcgggccctggggccgcaacccgcgccgggcg

SEQ ID NO: 353204 - DNA, 122 bp, Homo sapiens
ttctcctcggcatggaaggaagctggtaaaaggttagaaatgcaggcaatggctgcaagtcgagattgcagttgactgttacatcagggaacaggcattatgatctctagcttcaaagctct

SEQ ID NO: 353205 - DNA, 122 bp, Homo sapiens
aggacagggcttcagggacccgagagccgctctgagcaccgggggatgtgactgcctcagcggcagagctggaagggccctcgaatgccattcacaggaacagcccaggaacccagggactt

SEQ ID NO: 353206 - DNA, 122 bp, Homo sapiens
tcaggggtccagggtcacctgcaggccgcctcctgtaccctcttgttgccatccaggatgcgtttgagcagctctgtcatcaggggcttgaggtgcatgtcgggtggctggctgaccaccca

SEQ ID NO: 353207 - DNA, 122 bp, Homo sapiens
ttaagtagctttctggcataaacatattgcagctgggtagcgtggccgagcggtctaaggcgctggattaaggctccagtctcttcgggggcgtgggttcgaatcccaccgctgccagggtt

SEQ ID NO: 353208 - DNA, 122 bp, Homo sapiens
ttatttttaaaaattcacctgttgacggcgaaatacaataatcatcctctacagactggccgtagagatcatcatcttcaaaatctaaaataaagacaaaagagataaattcatttacaagt

SEQ ID NO: 353209 - DNA, 122 bp, Homo sapiens
attgtggttcaggaatttgaggaggatcatgcagctgtgcacagcccgctgccgctcatgcgccttctccgacgccagccagatgtacaggtgctgtggggcgggcagggtcagggagagga

SEQ ID NO: 353210 - DNA, 122 bp, Homo sapiens
tggcatgtctgttcgtgacgtcaggagttcgtgcctctttggtgcaacgcagtcttccatcgtgtgaatgaggcacagtttgctgctgatccgtcgccagctgcaggacatcttggtggttt

SEQ ID NO: 353211 - DNA, 122 bp, Homo sapiens
cgccttctcgatgagctgcttctgcatggcctggaacagcgggatcgtgtctcctgtggccggatccctgtagcccgtggcagctctttcagccttcaggagcctctcccgcagctcctcgt

SEQ ID NO: 353212 - DNA, 122 bp, Homo sapiens
ctaagctgcagagaagggttcttcagggaaggggccgctctaactctctccagccccagccgcactttcccctggcgtctcacctccagaaggacagggactacagtgctaggctgaggggc

SEQ ID NO: 353213 - DNA, 122 bp, Homo sapiens
atcctcaaggggggtggggtggcgggcgggcaggctggcgggggagacttgaaaccgttccggtgctccgattggctctcttggagaaaaggggcgtggcccctccttactatgcggtgaga

SEQ ID NO: 353214 - DNA, 122 bp, Homo sapiens
ggtctggcccagcctggatgggttgggtgcctctaagcagtccgcgtccccttcggtcgccggagagggaactttcaaacttagttaggaagccagactgtccgcgcgtccgccagtcggtg

SEQ ID NO: 353215 - DNA, 122 bp, Homo sapiens
tgtactccatgcccaaagccttatcaggaagcattagtgatgctcctctttaggcaccagcggcgtccccataccacagataaggaggggactttgtgtgtcagaatctgggcagcatggag

SEQ ID NO: 353216 - DNA, 122 bp, Homo sapiens
cggcctcacgcagcatgctcctcttcttccacttgccctcatcgatgttgtacatctccacgaccttcaggggcagctgattggtgcccacgcccccaatcaccatgatccgcttccccagg

SEQ ID NO: 353217 - DNA, 122 bp, Homo sapiens
gggtggctcaggtaaaatgtgcttctttggttgtcttaggaaaatgcagccccgtctttccgccaaacgcatcgactacggccaggcgcctgctaacccagcaagctctccgcagtaacacg

SEQ ID NO: 353218 - DNA, 122 bp, Homo sapiens
cagggcccgcccgaacgttcccgttcctgggccgccattggccaagtctgaacggccccacgtcgaggctccttatgggaaatgtagttcacgtcccgcttcaggagctagcggcgccctcc

SEQ ID NO: 353219 - DNA, 122 bp, Homo sapiens
gagttagctcacttaatcctgtaaatctctgcaaagactaactttgttccctggctcctccgtggttgccaggtggtggatatacattctacaacagaagaaactggaatcgctagaggtgt

SEQ ID NO: 353220 - DNA, 122 bp, Homo sapiens
acctgcccacagcccacagctctcctggcctcctgcggacaatgcccccctcgcggacatcgccaggccgtccacacctgcccatgcccacacctgactgcccgtccctccccgcccccggc

SEQ ID NO: 353221 - DNA, 122 bp, Homo sapiens
agccccagagatcgggaatcctctcagtccttagttacaaggctccatcctcactttgttcgctcctcagtcgtccaggcggattcctttttcgccaggtaaggctggcccgggtgcatggg

SEQ ID NO: 353222 - DNA, 122 bp, Homo sapiens
cggcggcagcaggaggtgggggaccgatcgcgccgggggccgaagaggaacgccgccccgcgccctctcgctccccgcacgctccggctgccggccccacgctgctcgcccacagatcgcac

SEQ ID NO: 353223 - DNA, 122 bp, Homo sapiens
tgcaccccgactgggtgcgggtcagcgtccgggcccgggcaagactcaggcttgcgcccccggccccctgcgcaccccccgatcagtctccagtctctagcgagcctccgggagtgcgcggc

SEQ ID NO: 353224 - DNA, 122 bp, Homo sapiens
aaaaagcccttagacacagtggagaaaatccgggccaggggccggcaggcgagccggtgacgcctgactgaagcagggcagctgatcaccctcccgggaccctgagaagcctctctggaagg

SEQ ID NO: 353225 - DNA, 122 bp, Homo sapiens
ctgctctgcagtggagcaaagttgcgactatgtcctgatagccgagcccaggcgctgtagcgacccagccaggtgtgtgcacactcgcggtagtgctgacacgccagctccccgctgtctcg

SEQ ID NO: 353226 - DNA, 122 bp, Homo sapiens
gtctgaccgggtttgtgagacattgaggctgtcttgggcttcactggcagtgtgggccttcgtacccgggctacaggggtgcggctctgcctgttactgtcgagtgggtcgggccgtgggta

SEQ ID NO: 353227 - DNA, 122 bp, Homo sapiens
acccaccctctcattttcctatttattggttgctcttcttcgactcttctgctgattcctcgttttcttccgagtctaaacactagaatttcctagtgctcaagccttatacctaaactctt

SEQ ID NO: 353228 - DNA, 122 bp, Homo sapiens
accctgaggggcggggcgggagctggcgctagaaatgcgccggggcctgcggggcagttgcgcaagttgtgatcgggccgctataagaggggcgggcaggcatggagccccgtaggaatcgc

SEQ ID NO: 353229 - DNA, 122 bp, Homo sapiens
agctggccctgccccgccctcgggctgcagggggcggccaatcagagctaagctccgcagcgatgagctcagccggctggtttcccattggacggctatattaagaaagtggccggactctt

SEQ ID NO: 353230 - DNA, 122 bp, Homo sapiens
gagctcggcagagacacccacgtggtgctggattccacgcacgaggaaccgacgggcagacgtggagctaaatgatggtcaacagctacgaagtgcctgtgctctagaaatggccaatttga

SEQ ID NO: 353231 - DNA, 122 bp, Homo sapiens
actgtgtaaaattaagttctatattatctggcatattctggaagtactgtcggaattcagcggaaaaattattaaataagtactgaagtgaaacagagcaggattcctaaggagataggatt

SEQ ID NO: 353232 - DNA, 122 bp, Homo sapiens
cggaatggaatgaatacccctgtgcatctcatttccggggaaggggagcacttgttttttcggccgccttggggaaaaaaaaacccaacggtccctgggaataatcattatgctgggatttt

SEQ ID NO: 353233 - DNA, 122 bp, Homo sapiens
aagagttgccacttatatggctgtaggaaagatgtttcacagctgtgagtgtggtggtggcgtccacacctgtcaggacaggcagggcccagggtcggagctgatagtaagtcagtttcatt

SEQ ID NO: 353234 - DNA, 122 bp, Homo sapiens
cagaaggcgcattggcaacctgctggggtctccttccgcattgtggctgctttgttctttcgctctttgcagtaaatcttgctactgctcagtctttgggtccacgctgcttttatgagctg

SEQ ID NO: 353235 - DNA, 122 bp, Homo sapiens
cggggctgctcctgctcgacctgtcagcggaagtggcgccatatgctggaccagtggctgcgcatgcggatgcggagcctcgtccatgacactcactgcgcggggaatctgtattcaaaacg

SEQ ID NO: 353236 - DNA, 122 bp, Homo sapiens
gcccccagaccctccgctcgcccgtgcgccgaggtcgttgggttttagacccagagagcacgttccgtaagctcccggcccaaatcccctcggaaaaattaatcacaaccaccagcggatgc

SEQ ID NO: 353237 - DNA, 122 bp, Homo sapiens
ttgcaggatgtcgtgattttgcctggaacatagtagagggctgcttgtcatcattctcatcgtcataatttttgtggggtggagtgggttatttaggggtcccagaggctgatagttgggtt

SEQ ID NO: 353238 - DNA, 122 bp, Homo sapiens
aaaaaataaactttttttaaccaagaataaattgcagtaacaggttaagactctgggtgtcgctgttcaccaatcagggggaaaagacaaaccagaaatttaatcagaatcacaagatttct

SEQ ID NO: 353239 - DNA, 122 bp, Homo sapiens
gtctcggccgcggccagcagcccctgccccccgggggacgctgacggccgcccggcgcgccgccctagcagacggacagggggcgctgcgcgcggcctggggcaacccgggccacaggggca

SEQ ID NO: 353240 - DNA, 122 bp, Homo sapiens
gacaaacccccttacagcacagcttcatggaggacatggtgggcatcctcatgcggcactcggaggagggagagaccccggaccgccgggctggaggccagatgaaggggctcctgctgaag

SEQ ID NO: 353241 - DNA, 122 bp, Homo sapiens
gccgcgcacatcagccccgccgacgggcacgggcggctcacatcgatcccctcgcggccacgctcacgccctgagttgttgggatcgcgggcagaagtcatcccgacagccacccgtgcgac

SEQ ID NO: 353242 - DNA, 122 bp, Homo sapiens
tgcagagatgggaagggaggaacaggaggaagctagattagatggcaatgggctagggagcgtggtgggatcttgtggccattgagaaatccccgggtggtaagacagccaaaataactttt

SEQ ID NO: 353243 - DNA, 122 bp, Homo sapiens
tgctccaccatgcaaaatccccatgcctctgtggagcacactcctggaggacttctgggccggtagcatcaagctccccactcagccagggtctttctatctcagcctggtcctgagacatc

SEQ ID NO: 353244 - DNA, 122 bp, Homo sapiens
cagagggacattgtctaaaaaagcaagcctttgggaaatgtgtgtggagaagccagagtccgaaaataagaccaccctattcatgttcctaaattgagcctggggggcagggctggtctgaa

SEQ ID NO: 353245 - DNA, 122 bp, Homo sapiens
acgtcccccacccctggatggctctcggtgccgcggagcgggcccccatctccgtgtccccgccccccgcccaacccgaggcggcgatcccggcccccacagtcgctcccccttacctgcgg

SEQ ID NO: 353246 - DNA, 122 bp, Homo sapiens
tctctgaatccttcctggaccttcttgtcttaatggaagacccctgatgacagcttccctcgcagtcctcctcttgagtttaacagaggtaggggtggtgctcttcttcttcactgttgctg

SEQ ID NO: 353247 - DNA, 122 bp, Homo sapiens
aagtgaggaagtcgctgtagagcagccggccctggtcgtccgccgccagcacgcggtccccggggctcaggtccttcaccagcttggtgccgccctgctccaggtgcaccgtggccgagccc

SEQ ID NO: 353248 - DNA, 122 bp, Homo sapiens
aggaggaagttcgccccgcgcctgcctcgcaaccgcagccgcctccgtgcgcttcctgcccgcgccgccctccacactgcgctccgtgtctggcagcagcccccgcctcgctgggcgcgttc

SEQ ID NO: 353249 - DNA, 122 bp, Homo sapiens
ttccttccagtgaagggggctttttataaaagggaattaggctggctggggcactgagaacgcggtactggagttgggacttgcccttgcccatatggtgttttcaaacaaaccacagaaag

SEQ ID NO: 353250 - DNA, 122 bp, Homo sapiens
gcactgcgggaaaactcgcagggcctggctcaagggaggcctggcattttctcctccccgcgctcaggcggagaaaggtgcggtccaacccgcggaggctcgacccggaagccgccgtggcc

SEQ ID NO: 353251 - DNA, 122 bp, Homo sapiens
gggcgatatggggtgcctgctgtttctgctgctctgggcgctcctccaggcttggggaagcgctgaaggtgggtggaacgagggcgcttgagtgcactcgcgggagggcggagagagggagc

SEQ ID NO: 353252 - DNA, 122 bp, Homo sapiens
gcgcaagctcccgcagccgctcacttccaagtagtgcagcagcggcagggtgaaaagccgcggcggcagctgcccacccgccgcccgcactcgctcctccagcccgggccccgtcagcagca

SEQ ID NO: 353253 - DNA, 122 bp, Homo sapiens
ctttccattgacaggcatccttgttgtgtcccgtttttagcttcttcttgaagattgtttcgtagcgtggcttcatttctcagagaagagccgtgaggagaaaaaccatctcctttcacatt

SEQ ID NO: 353254 - DNA, 122 bp, Homo sapiens
tctaggattcacccagtacgcgggcgagttaggaacggacggtgcgggatctttgactttcggtctgaagcgtattctttgtctcattcatttttctgtagcctcacatctgctgtgggtgc

SEQ ID NO: 353255 - DNA, 122 bp, Homo sapiens
aagcctccagtcacccactgggaatctctacctggaaatcccagaggcactcaaacttaacgtgtccaaaactaaattatccgtcaccttcccacctcatatccccccaaatgccccagatt

SEQ ID NO: 353256 - DNA, 122 bp, Homo sapiens
aaatatgcctaaatttcctctttgggaacgcaagacttgcagagatgactccatggagagcggactctgccggcgggaactggagtcgttggtgacgtcatcccagtctgatctgtgaaggg

SEQ ID NO: 353257 - DNA, 122 bp, Homo sapiens
gcggcggcatggcccgctccgggggcagcagaggggccagcccgggtctcggcttcgctgcgctcggtgaagcaggtcccgctggctgcctctgactgaatgggtccaggctgggcgagtcg

SEQ ID NO: 353258 - DNA, 122 bp, Homo sapiens
ccacagtaccccaggacccatgtgcatgtaggctcaggcttccagtgccatcccgccctccgccccctctctcttttctctccttcccggcttcaaacaggaaccacgggcggagcagcaca

SEQ ID NO: 353259 - DNA, 122 bp, Homo sapiens
tccgggtaaaagaccaaaagctgtttgtttcagaatccagaatgccagactctcggtttccgctagagggcgcgtccgatgcagatgttggagctaactccgtgttaacctacaggcttagc

SEQ ID NO: 353260 - DNA, 122 bp, Homo sapiens
cgtgcccttctcgggctccaaaaatcagcagtgctccgggcgccccctgctagtcgcggccgtaaaaggcagacaaaagccctagcctcctccaatcggagggctcgagcttcagctcgctc

SEQ ID NO: 353261 - DNA, 122 bp, Homo sapiens
cacctgccgggcggtccggaaggtgaagcgcgtggacgtggggtgcacctgaagacaggccgcgcagtgaatcccgggtcccgtgcccttctccccgagccgccccgctctccccagcacgc

SEQ ID NO: 353262 - DNA, 122 bp, Homo sapiens
aagcacagaaagcagctcagttccttgaaaataaagtccactaaaatgttgttgcccaggcgcggtggctcatgtctgtaatcccagcactttgggaggccaaggcaggtggatcacttgag

SEQ ID NO: 353263 - DNA, 122 bp, Homo sapiens
ggcaggtaacaccaacatgggatgaacttgaactcttccatcctctcagcctcaggaggtcgatcttaaccaaacaccactccacagatgaggaagctgaggcacatttaagttgcagtgca

SEQ ID NO: 353264 - DNA, 122 bp, Homo sapiens
gggattgtctccatagttaacaggggaaggccaccggctgcctgtaagagagaaacgttgcgatgcttgtctatttcacttttgggaagacaagattaaaggctgctcttgataaaaaacag

SEQ ID NO: 353265 - DNA, 122 bp, Homo sapiens
acagttctgaaggtaaatgttatctctatagatgaggaactgagctcgggcaggttgagtcgcttgtcaaggtgacacagtaattgagtggtggcactgggatttaaatccagacctgtctg

SEQ ID NO: 353266 - DNA, 122 bp, Homo sapiens
ccacgttccattggatcgctacatatcttcccccgagggcatttctctcgctttagcaggcgccggaagagggctggggagggacgggggagcgcgcagctggggactaacggcagccacat

SEQ ID NO: 353267 - DNA, 122 bp, Homo sapiens
ggcgacggagcctttgggaaagtgtacaaggtaagagggggaaaacgggaagttgtactgcgaaggtaaaacagccactggcctggagtggcgggaggacttctgctcccctggtccttatc

SEQ ID NO: 353268 - DNA, 122 bp, Homo sapiens
tccacctttcctctggatggccctgggaggaggcccgccatgaaggccttcctaagccgccgggcagcacaaaggtgatttcacatcttcccagctgtttaggcctaagatgtggacatcga

SEQ ID NO: 353269 - DNA, 122 bp, Homo sapiens
tagagacagggttgggtttcactatgttgcccaggcttgtcttgaactccccagttcaagcggtccacctgcctcagccccccaaggtgctgggattacagtcatgagccaccacctgtact

SEQ ID NO: 353270 - DNA, 122 bp, Homo sapiens
accggcccgccctccgcgttcgctgactggctggctggccggctcgcgggcagttgggcccgcccacctgccccgcggggcgctgacccactgccctgggcgcctcccccgctcctcctcct

SEQ ID NO: 353271 - DNA, 122 bp, Homo sapiens
gaccagagttgaggctgtttagagggcaagcaagggggccagtggagagggtgggagcagcgagaaagccagctgcctgctcagtgtgagcatttggatgtctgacaggcctccccaactta

SEQ ID NO: 353272 - DNA, 122 bp, Homo sapiens
tgaaggaggtgttttatcccttggaatttcccctgaaatacagatttttgcaggctggctcggaaagtgggaatgagtaggactaaacaataccagaccgggggcaggagaaagttgaggag

SEQ ID NO: 353273 - DNA, 122 bp, Homo sapiens
cgcaggtgccacggagatgggcagccgggcgggtggcgcagtgcaggcagctgtatcaatcgcttcccctccagggacccgccggtgcctggggaccgcgggctgtgcagctgtgccgggcc

SEQ ID NO: 353274 - DNA, 122 bp, Homo sapiens
ctcaggtgatccacccgcctcagcctcccaaagtgctggaattacaggcatgagccaccgcgcctggcctccaggtgggttttttgagtaatgcagagcctcagtgaatatggggttaccta

SEQ ID NO: 353275 - DNA, 122 bp, Homo sapiens
aatgctccaggcaccccctgatggtattcacccctgactctttcatgcagacaagggtcgcgggccaggaaataagttaccccacatcaccgagctgagaagcaaccgatccacagggagtg

SEQ ID NO: 353276 - DNA, 122 bp, Homo sapiens
agtaatcgtaggcggggcgcgggtccagagctccgattggccagagtcggagtaaacatccggcgggacggggcggggccggaagtggaagtggaagtagaaggcggtggctgaggcggttc

SEQ ID NO: 353277 - DNA, 122 bp, Homo sapiens
ttccagtaagaaacgtcttatgaaaatgtgacattaaaaatgaatgctggaaagtaatttcgagtggtcccatggaaccaaatatgattaaggcattttcaatctgtcctccgtggcatttc

SEQ ID NO: 353278 - DNA, 122 bp, Homo sapiens
gaagagggaacacctctacactgctgatggatagtacaaccactgtggaaaatagtatggcgattccttaaataactaaaaatagaactaccatttgatccagcaatcccactactgggtat

SEQ ID NO: 353279 - DNA, 122 bp, Homo sapiens
ttgcccataaataaaacattttattatttagcttgaacattaaatttcatcggcatgcagcgtgtgttttattatctgtgccagacactaacatgtacttaaaaatgaaattctggaacgct

SEQ ID NO: 353280 - DNA, 122 bp, Homo sapiens
gcggcggcgtgcaggaggcaggcggcgtgcggcggcggcggcaggcgagtgtgcagtgcgcgcagccgccgatgggcggggagtgagggactcgcggcgcgccgccggcggggctagagggc

SEQ ID NO: 353281 - DNA, 122 bp, Homo sapiens
cgaataaggaaatgagtttttgttgggggttgaggaggaaggaaagtcatggtgttctgacgtggaaaacttctttaaaaggctgcttagtctttagtttgaaaataaaccaaaaaggttta

SEQ ID NO: 353282 - DNA, 122 bp, Homo sapiens
ctaacgtcaaagcctctcttcttatttacataattttattcagtgataacacaatgttgccgaataagtttctatgggtctctgatatttctgcatgttggggagtaattcttcatgggtct

SEQ ID NO: 353283 - DNA, 122 bp, Homo sapiens
cttctgggaaggaggagagcagacacagagacacacaggagggcgacacggaggcacaggcggagactgcagtggaatcatgcttccacaagccgaggaacaccgacggctgccggcacacc

SEQ ID NO: 353284 - DNA, 122 bp, Homo sapiens
aaccacttgaatgaacctgaaagcagtttctccagacccagttaggccttgagatgactacggatctggcaaacaccttgactgcaatctggtaacagatccagagcaaaaaccacccagct

SEQ ID NO: 353285 - DNA, 122 bp, Homo sapiens
tgccacctctggcttgggttcatggaggacgtgtgcatgggggagggccaggaccacccccgccacactgtgctcccctacaaaacatgacgtctctgaatcttaacaggggggtctgctcc

SEQ ID NO: 353286 - DNA, 122 bp, Homo sapiens
acctccgctcgtattgggctgggagttcagagccgcgcgcagaacccgggttggccgcaacgtctgtgttctcagcggtggccgggaacctgggatcagggtcacctgagctgacggggtgg

SEQ ID NO: 353287 - DNA, 122 bp, Homo sapiens
acttccctccacgaccccaggtggccccgttattcgtccaggtgcccagggaggaggacccgcctgcagcatgaacctgtggctcctggcctgcctggtggccggcttcctgggagcctggg

SEQ ID NO: 353288 - DNA, 122 bp, Homo sapiens
ggcacttctactttcccggacccgcctcccgctccagccggttacacgcgccgttagcagcgtgggcggagttggttctgccttcgcggaaccaactggtccagcttctggtgtctcccctc

SEQ ID NO: 353289 - DNA, 122 bp, Homo sapiens
aaaaaggccttaatgtagaacaaaaatcgctagccagaacgcagggggggccccctgccccgccgcgcacgccgcggagaccccgcgcggctgaggcgtcgccagagccggcctcgaccccg

SEQ ID NO: 353290 - DNA, 122 bp, Homo sapiens
acatttctagacatgtagtattaacagatcaaggaacagaaagcaaaacagggaaagcaacgtaaaattctgataatcacaatgattgctgaaaaagtccccaaataggcagcaaacattct

SEQ ID NO: 353291 - DNA, 122 bp, Homo sapiens
ctggggatacttactttaaactatgcctcctattcccccaaagacttcttgctttttagccgactgtcctgcttattctcacagcataccttagttctcgtaatagtggccagtgtgccatg

SEQ ID NO: 353292 - DNA, 122 bp, Homo sapiens
gggtcttgctctgtagcccaggccgaaatgcagccgtgcaaccttagctcactgtaacctcgaactcccacctcagcctctcaagtagttaggactgcaggcatgcactatgttgcccaggt

SEQ ID NO: 353293 - DNA, 122 bp, Homo sapiens
atggccatgtactggggcacgtcacgctggagctccatggagatcatggtacggtggccgcgcagcatgtgtgtgtccaggcacagactcccggcaccggctgcgtatggagaccccaaagc

SEQ ID NO: 353294 - DNA, 122 bp, Homo sapiens
cacccccctcgcacactcacactcgcacacgcacacacactcgcacacaccactcccctccgcttttcaaagtagctatcaagaaattaaagatgagcgtctctggagtgaaaacacgtcca

SEQ ID NO: 353295 - DNA, 122 bp, Homo sapiens
caacacagtgaaaccccgtctccaccagaaaaatatgaaaaccagtcaggtgtggtggcgcgcgcctgcaattgcaggcactcggcaggctgaggcaggagaatcaggcagggaggttgcag

SEQ ID NO: 353296 - DNA, 122 bp, Homo sapiens
aggagggcttcgcatggcggcggcggcagagggaacggtgctgtgaaggccctggcagcacgagaacaggtccacggggtggggggggggcgtggggggggcatcggaataaatggaagaag

SEQ ID NO: 353297 - DNA, 122 bp, Homo sapiens
acgttgcaggactcaccaagagcctgacttaacccagcaagactaagaggctggacaccccgaagcaggcctggagccttaacctcaaatatcagcaactcctgttcttcacatcagattgt

SEQ ID NO: 353298 - DNA, 122 bp, Homo sapiens
tcaaaaccaggagaaagtctgtgccgttatgactggctgactggcgctcactgtcggtttcgtgacgaggggtggcacgcacaggtgaagccaggtgtgaggggtcaggcaggtgacgacac

SEQ ID NO: 353299 - DNA, 122 bp, Homo sapiens
tgacatattgacagttggtaaataaaagcaatcatttttattttgcctttattctgttttcgtttttcttttgcagaaggtgaagaagatgcacaacgaagttctacagaacaaagtgggga

SEQ ID NO: 353300 - DNA, 122 bp, Homo sapiens
gcacgccggctctagcggtggtggtctttgctaggtctggaggtagagcagatgctgaggcgttcaaaggaaggcggtgcctgtggacaagcaggcttgcacaggatctggcccgtgccgac

SEQ ID NO: 353301 - DNA, 122 bp, Homo sapiens
tcaatttcttgtatattatatgatcatgagacaacctccctgggctgatcaacagcaggacgctaaaaagattgagtatctgagtcaggaaggtagagggccagaccctacatgtagctaat

SEQ ID NO: 353302 - DNA, 122 bp, Homo sapiens
cgcggactcggaggccatcacgtttcagaagctggtgaaggggcacgcgtactcggtcaccggagccgaggaggtaacggccggcgcggatgtgcaggggtcctgctgtcctgacacgatgg

SEQ ID NO: 353303 - DNA, 122 bp, Homo sapiens
ttgtcctgggcatctgccggaatgtgacaggcggccaagccacgtgctgtgcctctgagacgatgccggtgaactaaggagtgacacacctttgcaagtcagggctttcggcagcctccccc

SEQ ID NO: 353304 - DNA, 122 bp, Homo sapiens
ccaggccaggagagtaccccagcccctggagcctgggacaccttcctggagcccagatggcgggtcaggggccagaggggaattcctaggctggagttcccgggaagggggtttccactgtg

SEQ ID NO: 353305 - DNA, 122 bp, Homo sapiens
ggagctctgataggcgaagatgctaggcatcttgtctcagtggccaccaccagccggctgcgcccggcagagagaaggcgagcttgggaaggctgggccctgatgaggcggggagaggacag

SEQ ID NO: 353306 - DNA, 122 bp, Homo sapiens
cccacttgccaggaagaatcaagcaaattttctgagtgagacaccttgtcctcactcaggcgtcctgcaggcggcttcagcgagttgttggggcagatgcgccgggagctcccgagggcagg

SEQ ID NO: 353307 - DNA, 122 bp, Homo sapiens
cctcccgcagctcattgcagccccgaggaaatcaccgggggagggctcgggagtgcggcgcggcagccccataatttccagggcccttctcctacactgacacgtaattgtcagattgtttt

SEQ ID NO: 353308 - DNA, 122 bp, Homo sapiens
ccttccagactagggtcgggatttctgttcgcagcgggaaggggccccgctggtgaatcccgcccaccgccctcccactccgcggatgtctcccaccctcaacctgagaccacccaggtttc

SEQ ID NO: 353309 - DNA, 122 bp, Homo sapiens
cctgcagtcattaacaaagtaatccattaatcttcaaagttttgacacccgagggccctgcgtcccagccacataagttctgttaaagcaggagaaaggagcagaggaagagaggagatgag

SEQ ID NO: 353310 - DNA, 122 bp, Homo sapiens
acggttggggctgcgcgtgagaaggtggcggtgtaggcacctgcgctcggggaaggctggcggcggcggccgagccatggcgggagacccccttctctgggctccctgaagtctcggggagc

SEQ ID NO: 353311 - DNA, 122 bp, Homo sapiens
ggactctggcgcgcagggtgcatttcgggatggagcaagcgcagcgcgaagttgggcgcccgccggctgcagcagaaccccgcccgcggcgctctaggactgcatctcggcctccgggtcgc

SEQ ID NO: 353312 - DNA, 122 bp, Homo sapiens
agcaccccacatcacagccgcagaaacggaggctcaggctgcccggaggcaagccccaagcggcaggcaggatctgaccagtgttcacgtgtgctcacactggcacccgtgggaaggacagg

SEQ ID NO: 353313 - DNA, 122 bp, Homo sapiens
gggccggcccttcccgttggtgacaggcagcgggaacatctgcagggaggggaggggagacgtgagcggggcgggtggcaaaccaaaccctacagtcccgggttcaaacccaagctgggagc

SEQ ID NO: 353314 - DNA, 122 bp, Homo sapiens
agtcagtccctactataactgtttctcaagacattctccccatgcatttatttgctctcccggggaaagagcgaagtgtgggatgactcatagtggctagatcgttcctctaactcctccct

SEQ ID NO: 353315 - DNA, 122 bp, Homo sapiens
atcccggaagccgccctgtctgctccagctgcatgcctgattggacagttcccagcccagcgtccctgactggataatgattaaaaccccacccctcaggtcctgagtgacagaagatgtga

SEQ ID NO: 353316 - DNA, 122 bp, Homo sapiens
tacaaattgtgtaagcctctttatatttaaaattagaaattattacacatcagccgggcacggtggctcacgcctgtaatcccagcactttgggaggccgagtcgggcagatcacaaggtca

SEQ ID NO: 353317 - DNA, 122 bp, Homo sapiens
tgtgcctcctgcatcacttatcggattgaatggggctactccctacttaccaagaaccagcgaggcatgtttgatccctcgctcttcctttgcttcacattcagccagccctggttctatat

SEQ ID NO: 353318 - DNA, 122 bp, Homo sapiens
tcttccagctaagggtccaatcagtgcctaggactttcttccaccagctcaaagggccttcgtatgtatgtccctggcttcagctttggtcatgccaaagaggcagagttcaggattccctc

SEQ ID NO: 353319 - DNA, 122 bp, Homo sapiens
gcttcaaccgaactcactccctctgcgcgcgctccatctggtgcccgactgctgggccggcgcctgggagaagccacgccctttcccgcgcctgacagccaatgagcgggcgcctcccggcg

SEQ ID NO: 353320 - DNA, 122 bp, Homo sapiens
ggggccgaacatctgccgtgcccatcagggatccggctccgctacagctcctcactgccacgtgagaacgtgtgcgctgagtggccagatctctgtaccacatcttgtaatttctaaagaga

SEQ ID NO: 353321 - DNA, 122 bp, Homo sapiens
gcagcacagtgcggtagccgccggaaatgggcgtgaacaggcgcatgacctccttgatgacgcagtccaggtagcgcagcccactgagcgtgtccaggcgcagtgtgccctcgcaggggcag

SEQ ID NO: 353322 - DNA, 122 bp, Homo sapiens
tgtgtaattagtaaaaacccgctcgcagcatccaggaggagtgacccaggcctgagcactcgtccagtcctggactttccccagagcacatctggaaggtgagggggagcagagctaccatg

SEQ ID NO: 353323 - DNA, 122 bp, Homo sapiens
taatgttgtctctgaagatgacttgtgatttttttttcttttttttaaaccatgaagagccgtttgacagagcatgctctgcgttgttggtttcaccagcttctgccctcacatgcacaggg

SEQ ID NO: 353324 - DNA, 122 bp, Homo sapiens
ggtcattttggggaaaatggattagaaggcaaagaggctctacaccacctggcccccaaccgggccctgctgtagactcctgccagccaggtgagtcatccgcagtgtcagggccggggaca

SEQ ID NO: 353325 - DNA, 122 bp, Homo sapiens
tccatctgctcttaatttacaggacagagagcaacaggacccgggagtcaggctgtcagccgcacagcaaacacacttggtctctttcgggtcacagtgccctccttccggtttgtgcgatg

SEQ ID NO: 353326 - DNA, 122 bp, Homo sapiens
tctgcgcgcttgcccggcaggccggtgaaccccagcatccttggctctgcgcttcctgcccgggaaacagagaccatgggacttgcccaaggtcacacagcgaggaaggtgagaataggagt

SEQ ID NO: 353327 - DNA, 122 bp, Homo sapiens
ccccctggcctaggccaacccccaggagattcagccctcccaggagaatgttgccaccaccgcctatgtggctcaggtctcccccacggatgaggagaaggtcccgctccccgaggcgcagg

SEQ ID NO: 353328 - DNA, 122 bp, Homo sapiens
aattcaaactctaagaattaaaggacaaaaacatctcttttggtttcagctctaatgtaacgttagggagaaagacatcaggttttatccctggaaagaagttaggtccttaatgttacttt

SEQ ID NO: 353329 - DNA, 122 bp, Homo sapiens
tgcaggaaccgtcggctagagcccagaagaggcagaaactgagtccaaactgaggatctccgagtttttgcattttaaaatttatttaaagtcttggttgttcaggtcctaggggttccaag

SEQ ID NO: 353330 - DNA, 122 bp, Homo sapiens
gcatttgatagtataacagaagaaacaagttccttcccaatttggacactcaagggtattcgtggttaagtccagtatattctgtcctcttctttagagaagttcactaaaaatgtgaagta

SEQ ID NO: 353331 - DNA, 122 bp, Homo sapiens
tcagggctaaaagggagccagggcccttcctggaggcgggaacccaagtgggaggcagagcgcctgggcccgctcctcgatctgctgagtgacgaccctgtacaagtcatttctcttccgag

SEQ ID NO: 353332 - DNA, 122 bp, Homo sapiens
tagaataaggaaaagtaatgtgatcacatttatattctaagagtatggtattgttcatatcggttaaacatctaactatgggtggccctcagttctgagctctacactggtgtaaccagtag

SEQ ID NO: 353333 - DNA, 122 bp, Homo sapiens
atttagcaacaaaatatgctaggtttgaataggtaaaacatatgcatgtttttcttcccacgtttcctgatcctatttcaaagcatatgcaaagtctccctgcaaggaagtccaggatgtag

SEQ ID NO: 353334 - DNA, 122 bp, Homo sapiens
tgcttgcttcctcctgggcaatactagtgtgctgccaatgacgacggctcatactcccgccgtacgcctcatcactaggacacaggtccaggtgcggatcttttcccccgttcacacttgca

SEQ ID NO: 353335 - DNA, 122 bp, Homo sapiens
aagagaggagatggatttcagttgggagttaggaggagagtaggtgagatgatcagacaccggagttcaacgtcccagcagtcttggtaaaaggagggagcctgctgagccaggagggagaa

SEQ ID NO: 353336 - DNA, 122 bp, Homo sapiens
ccatcttttccctggctttggtgattcaggtcagcttctcaggaacctttcaaacttccccgaaatgcacttgtggtcagcagctagcggtcttttgtttggggaaaaaaaggagtagcggc

SEQ ID NO: 353337 - DNA, 122 bp, Homo sapiens
gagagctcttctcctgttctctgttgatcaggagtttccctcatcaacctgctgactttgcgtggtggtttcattacaagttgtgagccccttattgggggtatagggaggagaagtgaggg

SEQ ID NO: 353338 - DNA, 122 bp, Homo sapiens
tatatttatagaacaaaactagttcctacattggcagtgcaggtagggcagaaccagaagcgggacaacacacacagacaccactaacaacagggccgctcccttaggtctggtcttaacca

SEQ ID NO: 353339 - DNA, 122 bp, Homo sapiens
gtgagggtggcggccgcctggccactgtgtccagtgctttcaaggtgttctcagtgtcctcgtttatgccacggcttagaagattgtccttgccatctttagcaactgtctcagccgtcact

SEQ ID NO: 353340 - DNA, 122 bp, Homo sapiens
gctaatcagtttgcctatttgactcacagggtttgcatttgtcacggggactgaaacacacgcttgttttgatttctttttgtaaaattagaagcgtttgatgtaatgactctacctagaca

SEQ ID NO: 353341 - DNA, 122 bp, Homo sapiens
atcccgaggtcagtccctcccattctggggcacccctggagcagctagctccctgcctagcggtggcaaactccagagccccaaggagcagaacggggattccctgtgcgcaggctcctggt

SEQ ID NO: 353342 - DNA, 122 bp, Homo sapiens
gccagattcctcatcagcactttatacctgcaacgtgaagacacacagggtcaccttctgcgatggttccctgttttctccaacccctttgaaaagaaagagaatccaattcagctccctct

SEQ ID NO: 353343 - DNA, 122 bp, Homo sapiens
agggggcaaggctgaggagcgctgagtcgccagacccagagagccacccacctggagggacgtgccgccacccgcgccgccggagctccggctccagcccggattccacctgttttggtctc

SEQ ID NO: 353344 - DNA, 122 bp, Homo sapiens
caaaggaaaaggaggctgcctttacatctgacacatgcttatagatggggattatcaacacgcctccagagacatggatggacattcctcccctaccttgcagagatccgggtagaagcctc

SEQ ID NO: 353345 - DNA, 122 bp, Homo sapiens
ctccgcccccacctcctcctcctctgtctccgcctcctccccaccccacagcagtgataccgctttacagatggcactaccacctcaggtgctgcaatgacatgtttgcagatgcaaagctc

SEQ ID NO: 353346 - DNA, 122 bp, Homo sapiens
gcggggcctgaggctcctggacttgaggtattaggctggtgcagaagtaattgcggcggccgggtgcgggggctcaggcctgcaatcccagcactttgggaggccgaggcgggcggatcacc

SEQ ID NO: 353347 - DNA, 122 bp, Homo sapiens
cttagagtcccaaggcctccagctagtgatccgcagatgccattagagggcaaaagtgctcgctgctctctcatttgtcaacaagaagagctggtatggccctggccttaaggataagttag

SEQ ID NO: 353348 - DNA, 122 bp, Homo sapiens
aggtgaggaaatgacacactctgactcacaggagcaggaccactgtggagagaacagtcacgtagcaggtaatgggacaatgctagagccacaatttagaagtgacagggtggtggggacta

SEQ ID NO: 353349 - DNA, 122 bp, Homo sapiens
cttgggaaggcatcgccatctcccgcagcgccctcccggactagcgcagcaggctggcatcgcttcctgaggtttggccccaagttttacggcttaatgaggcacataaatagataaattgt

SEQ ID NO: 353350 - DNA, 122 bp, Homo sapiens
gaacaaagacaggtagaatttggggtgtaggctgtgtaaaccaatgggtctggaaaggaccggccattgctaactttggaacttcgagacacgtggtctgtgtgtgaatgatgaagcaggga

SEQ ID NO: 353351 - DNA, 122 bp, Homo sapiens
ttctttctcacttttttttccctgcctgtgaaactgacttgtacacattcttgggagctgcgtcatgacaagtcccgtaaatgattcacactgaagtgacctttaaagagcagagtagaaac

SEQ ID NO: 353352 - DNA, 122 bp, Homo sapiens
ttctgtagctcttcaagatgagccttcctgggtgaatgccttcgcaggcgggaaggtgcccgtttctaaagccacttgggcagagcacctccccagggcaccgtgaacacaaccctcctgca

SEQ ID NO: 353353 - DNA, 122 bp, Homo sapiens
gctgatcccacagtgtcctttgagattcaggtgggaccccctcttcgagcacaggcatgccggccacggacctcctggatgggttcagcggctctccatcttgttgccacacttgaacttac

SEQ ID NO: 353354 - DNA, 122 bp, Homo sapiens
ttacatcttggaacacagccttttgaatatagcccttcgggattggcggggagaagggaccgcgatggaaaaagtcatcatccaaagaatgaagagggaggatccaacatttaggatatttt

SEQ ID NO: 353355 - DNA, 122 bp, Homo sapiens
ataatcaggaggcgaatgaccttttgtagcatgtatctgaagctggtttatcagacacttcgtcagccaactgtccaggaggcaaaatgactatctatgatgatagatagacagacagatag

SEQ ID NO: 353356 - DNA, 122 bp, Homo sapiens
gcggcgagttccggcagccggtcggcgaccgcacctccgggcgcgagtgcctgggtcccgcgttcctgcccggcagccccgcagccccgcagccccgcagccccgcagccccgcaggcctgg

SEQ ID NO: 353357 - DNA, 122 bp, Homo sapiens
tctaataatggagctctgagatgctgctaaacaccatccaattgctgccaaacatcctaccgtgcacaggacagccgcccaacaataaagaattagctcaaaatgtcagtagttccactgtt

SEQ ID NO: 353358 - DNA, 122 bp, Homo sapiens
gccgagactaaacggtgcaagctgcctgctgtggggggactgtctagctccaggctcagacgtggtgtctgctcttcctggctggggtccgggagtcccccggggagtgggcactgccggcc

SEQ ID NO: 353359 - DNA, 122 bp, Homo sapiens
taccttatttatcttatgcacagcctctgtgaccaccaatcacaatcacaggactgaaaccgctgcttcactgcctgcttcgcccaccgctgtgccacatgtattcccctgttacaaaatac

SEQ ID NO: 353360 - DNA, 122 bp, Homo sapiens
atgtgtcaggagggggtatacagcacaagacacagtccctgctgctaagagacatagacacgggaaccattaagttataatacaaagtttttataccaaacaagcagttaagacagcagctg

SEQ ID NO: 353361 - DNA, 122 bp, Homo sapiens
ttctaattaacgaggctgccgctgagtgccagagtgagggcgtccacatgcgcgtgcacccgccgcctcatcgccaactcacgtggcatcgctgagtctcagctgcaacctgtgcccgggag

SEQ ID NO: 353362 - DNA, 122 bp, Homo sapiens
tgtgtgtgtgtgtgtgtgtcctacaaagtctaaaactcagcatgcaaatggtgctcagcacgtggttccttgcccaatgcgtctgtttgtggctctccagaaggaactaacatgcttcctcc

SEQ ID NO: 353363 - DNA, 122 bp, Homo sapiens
cgcacacgcgaactgacggctcgctggcgatgctggaggctttcacagcccccctccggacgcgttaagctctcccaggtcccacccctgacaccgtggcacccccagacccactgcgccct

SEQ ID NO: 353364 - DNA, 122 bp, Homo sapiens
tggtggctcactgacctggctggcaaattagtgctgtgggcaggaggcctcagctctcaccgcatggacctctccacagcatggctggggtgtcctcaaacatggcagctggctcctccaaa

SEQ ID NO: 353365 - DNA, 122 bp, Homo sapiens
agatgatgcgctggagggactgtcctataaaattaggatggcacataatctgcagaactgcggcacagatcgccagtaaccaacaccaggtacacgcagcaaagcctgcaaataacaggtgt

SEQ ID NO: 353366 - DNA, 122 bp, Homo sapiens
ggcttggaggccgagctccggtcatccaagccaggtgtctggggaagggtcctggtctgccgcaggaagctgggtggagccggtcttgcctgctgtggcggtcccagctgccctctggtggc

SEQ ID NO: 353367 - DNA, 122 bp, Homo sapiens
gaacgtgagcgggccgaggcagagggccgggagcgtgaggctcgggccctgtcactgacacgggcactggaggaggagcaggaggcacgtgaggagctggagcggcagaaccgggccctgcg

SEQ ID NO: 353368 - DNA, 122 bp, Homo sapiens
ggcggtgccacaggtagctacactcctcttgcagtgcctgcgccttcttctgcagttccacgcccgccgcctcggcctcctgcaagaagccgccaacagcacaagccttgacctctttgtgc

SEQ ID NO: 353369 - DNA, 122 bp, Homo sapiens
acaggggtgctcgcctgttctgtccccgttactgctcaaaaccccttacaggatggggagcgcgcaggcaggtgaaggagcccaagtgggcgtgtgttacagtgcgccattttagctttgcc

SEQ ID NO: 353370 - DNA, 122 bp, Homo sapiens
cgctccatccccagcctcaacctctccgagaccggccgcaccttccctggcctcaagggtcggttccttctgcaccagaaaacggggtgtcactgtcaccccgggacccagcctcctggccc

SEQ ID NO: 353371 - DNA, 122 bp, Homo sapiens
atcattcttacataactgatacctcccaacatttaaatggccttcatttctaagatctctcgttacctcataattttctttctctctctttttgactcccaatatttaataattaattattt

SEQ ID NO: 353372 - DNA, 122 bp, Homo sapiens
actttggtgctacgtacacaaagcgctgtatgtggacagatgtaaatgtatgcgtgtgtgcgctgggtcatgacttaagatctggctcattagggttgatgcagacaagcccgtttctaaga

SEQ ID NO: 353373 - DNA, 122 bp, Homo sapiens
ctgggcccactctagccatttggcctcggcatcacggtgcgggagcgtggggcgcagactcgcattgtcacaggaacctcccggccttccgaagagccccgcgccggggcctttgtctcgca

SEQ ID NO: 353374 - DNA, 122 bp, Homo sapiens
tgcccaggacaggggttggcagtggcagatgccgaagatgtggatgaccacacgggcgaacgaaggcccatgtcgttcaggaggccccgagcattggacacccaggccctgagacgtactca

SEQ ID NO: 353375 - DNA, 122 bp, Homo sapiens
aagtctgggtggggcgtggctgagagcctgagtgactgagtgggccctggtggtgctgcgcgcagcgggatataacgagcgacagaggtcgctgttggaccacttttccacgccagcctaga

SEQ ID NO: 353376 - DNA, 122 bp, Homo sapiens
agcacggcccgcaagacccggcgggacaaggaagaactgcgggcccagcggaggcgagagcgctccaagacaccacccagtaacttgtcacccatcgaggatgcctccccgacggaggagct

SEQ ID NO: 353377 - DNA, 122 bp, Homo sapiens
gacatactgagctcaacaacaggctctgtgccgcgccgctccgcacagccttcagctcagcgtgctaccctcactccgaaccgccaccgcaccagcagccaataggagagcgtgaccccata

SEQ ID NO: 353378 - DNA, 122 bp, Homo sapiens
gtaccacagatccgtttttcccattccagaacgtcacacgctgagacccagggaacgtggcggcacccgcctgctttccctgtgctagtgtgttgagccagttccgtgttgtcacacactgt

SEQ ID NO: 353379 - DNA, 122 bp, Homo sapiens
gtggcacaactacctagccacatggaaaagaataaggctactcgtctgcctccttgcgcgcgtgccagcacgcacagacacccgtttgatcaaaaagttaagaatttaaaatgaattttgtt

SEQ ID NO: 353380 - DNA, 122 bp, Homo sapiens
tccgattagactgtgggtctccaatggggacagagatggtgggtatccccatttgacagccggaaaagacagttgactcaggcaagggggctggaaaatccctgacgacacagacaggcttc

SEQ ID NO: 353381 - DNA, 122 bp, Homo sapiens
atgaaatgcagcgaggagaagcgacgccgcaacttctcacagtcgatgttggagccagtgcgggtgcggagcccggactcacggcagaagttcacattgttgataatgaggcagtggccaca

SEQ ID NO: 353382 - DNA, 122 bp, Homo sapiens
gcttggcttagaacccggcacatggtgcccagccagtgttggctagtattatctttaaaacgggaaagatcccttcccccagtttgctcaagggaggtgatatggtttggctgtgtccccac

SEQ ID NO: 353383 - DNA, 122 bp, Homo sapiens
gccaagatcctcttccatccttgggtaatcagggaagtgacacaagtcttctgacaattgcggaaatggcacactaatcggtacttagaaagtttaatctccattccgcaccattgctcagt

SEQ ID NO: 353384 - DNA, 122 bp, Homo sapiens
cagatcaaggacttcccgtaatctcacccagatctgcaaattaggagataaatcagcaagcgtaccaccgtttttaaagccaaagcccttctcagaaagggctttgcaatcaaagaggttcc

SEQ ID NO: 353385 - DNA, 122 bp, Homo sapiens
attgcagtgtatgttctattacatatgaaaaagagacaataaagtagaggataagtaggacgctaaagaagtaaggaaaggagagaatccagtgtttgtaaggagctttgttttattttccc

SEQ ID NO: 353386 - DNA, 122 bp, Homo sapiens
gggcggagcacgatgggcttccccgcggcaggcaggcaggctgctgctgcaggtgggtcccggcgcccgcgccgccccgcgcctccggcggtcgccccgcccctgcccgcccgctccgctcc

SEQ ID NO: 353387 - DNA, 122 bp, Homo sapiens
tcacttactcaaagggctcccttccgatcggaacacttgtgaagttcttctgtgacttcacgatgttccagatgaagtacgtcttcttcccttttggaatcaaatgcccctctaggattgag

SEQ ID NO: 353388 - DNA, 122 bp, Homo sapiens
atggttccacccctgaccccggactccgctccccagacctcctaagtgaagccacctccacggaggggccctccccgccatcaccccccagcccggcacccagcatcaaatctgcatgtctt

SEQ ID NO: 353389 - DNA, 122 bp, Homo sapiens
accggaaagcccattttctagaggcggaaaccgaagcgcccagtgggaaaggcgacccgccggggatgcggggtgctcaacgcgctgccacctggggcccaacgcgttgacctcgcggtcag

SEQ ID NO: 353390 - DNA, 122 bp, Homo sapiens
ctttccctcccctgggagccgcaggcaaaacgcggcaagtggattcagagtttgcgggcccgggtgccggccgagcatgcgcagtggcgcgagcgcagcggctacgcgggcgcggagaggta

SEQ ID NO: 353391 - DNA, 122 bp, Homo sapiens
tacaatgagtagccagccgcctgccccacctaccccgccgttccggactgccgcctgcgccgagcctaggccgcccagcctgactgaaactgccgctgctgaactcagcgtatccagtcccg

SEQ ID NO: 353392 - DNA, 122 bp, Homo sapiens
gagaaaagatcctgtttccagacaatacctgcatttggtttttctccagctgagggacaccggtagggggggggaggacagaaacgagcagggggtggggccaaggcgagtgggcgggaccg

SEQ ID NO: 353393 - DNA, 122 bp, Homo sapiens
aacaaagattattgaacatccaggggcacattctcatgccagcaaagaatgcatcttcagcgttgtgggttgaaattgtggcccctcaaatgatactcctgtgtcttaatcccttgaacctg

SEQ ID NO: 353394 - DNA, 122 bp, Homo sapiens
atggggatccgttgcttgagggtgcggctgcaagagccaggctgcgagagcttagactgccggcccagagcctctcgaaccgccgccaaccccccgccacccctaacagcgtccgccttacg

SEQ ID NO: 353395 - DNA, 122 bp, Homo sapiens
tccctggggaggagaccttgattcttcccggaatcagtgccattccatggtgctcaatgacgtggttgactacgctacgcttattcagtagacaccgtgacctgcttcttctcagcgtcaaa

SEQ ID NO: 353396 - DNA, 122 bp, Homo sapiens
ccgagggcttgtgggagcctcagctcaggggcgggcagggggcgtggggaagtctgcagccgagagtccaggtaggagtctcctgcgtggtcccgggagaggaaggggcctggcccggggcg

SEQ ID NO: 353397 - DNA, 122 bp, Homo sapiens
catcgcctcctcccctcttctcctactcagccctagaaaagctggaggggaagctgggcacggtggctcactcctataatccatcaatttgggagactcaggcaggaggatcgcttgaggcc

SEQ ID NO: 353398 - DNA, 122 bp, Homo sapiens
acacccgcaggcacttcatatgcatctgcttcataaccatggctgaactgaggcacccgccgggccactgggaacagcagaagaggaggggaagccctggcgggagcgggtgggaggtgctg

SEQ ID NO: 353399 - DNA, 122 bp, Homo sapiens
gcccactgaaacagcagcactagggtttcagttcaaatgtcacccaccttagcagcctctcgttagcacctaaacaattactgccacactctcctccgtgcctccagccccctaaccttatt

SEQ ID NO: 353400 - DNA, 122 bp, Homo sapiens
agacgtcagcgccaggagacttcgggtggcggctgcgccataggcgggccacggcctggacgcgctgcggggaggggcggagcgagcgggcgggagcgcgcgctgggcccgccttggccgcc

SEQ ID NO: 353401 - DNA, 122 bp, Homo sapiens
aactaaaatatagagtgctggtcccactccccttcttctccccgccccacccccccaccccgtgtttctgactcagtcctggagtcgggccctagaatttgcacttttaacaggttcccggg

SEQ ID NO: 353402 - DNA, 122 bp, Homo sapiens
cgtctttaccccgcagcacttgggtggagcgatgccctttgcttcccccacggaaaagaccgagagatggcgttgaggaaagcgcggaaagttcagcagcccaaacatgcgaaagtgaactt

SEQ ID NO: 353403 - DNA, 122 bp, Homo sapiens
atcagtgaacaagacaggtagggttctgctgtgatggagttttgattgtaatagaggaagcggatagtaaacaagcacacatagaaataaagctgggtggctgggcatggtggctcacgcct

SEQ ID NO: 353404 - DNA, 122 bp, Homo sapiens
ggcctgaggcctggcgcccgcgtggagagacggcagctccgggatcggggcgctggtgagcgcggccccaggcattgccgctgccagggtgctaacactgcctgaggcacctctgcttttga

SEQ ID NO: 353405 - DNA, 122 bp, Homo sapiens
tctctcctctcctattttttctatctctgtgggtttttaaaaaaagggaaaaattacttgcgtttatactggggctagaaggttgaaattagttatatattttcaatttgctatcttaactc

SEQ ID NO: 353406 - DNA, 122 bp, Homo sapiens
cgggggtattaagctctgtggattccaaatggcaccatcaggctgcattcctccatgagccggctcttgagcagtgacaggactggagttatatgatttatcgtcaagctttatgtcttcac

SEQ ID NO: 353407 - DNA, 122 bp, Homo sapiens
cagttctgatttggttcaaccgcgggagggaggggaaagagaaagaaagaaacccccagccgtacgcctctcctggcatccaatcgactttctggaaaaaggtcccatcccggcctggtgcc

SEQ ID NO: 353408 - DNA, 122 bp, Homo sapiens
ggtggatacacaccaggggctccgtgtagagccagacaggctcgttgccaatcagcgagccgtccacggattggaccggctgtgggtacggcttctcgtagagctcgacgtagtgctcttgg

SEQ ID NO: 353409 - DNA, 122 bp, Homo sapiens
ccgggaaccctggactgaggctcccgtttctgtcctttctattgggcgcacttccgatggcgtcaggaatttcagccaataggagccagccaggaagtacctctctgagcggttggtgccgg

SEQ ID NO: 353410 - DNA, 122 bp, Homo sapiens
agatctgggcctgggtgaaatgcctctcaatcactggcgcgcacggagcagctgtacctgcgcccacatgggctgagagacagggacggttatagccatctcgcgtccatctggaacgcccc

SEQ ID NO: 353411 - DNA, 122 bp, Homo sapiens
attttttttgtatattgtaattttaaaaatttacaattttttaaatgaaatacacaaaaacgagtctatgcgtgtattccagcaagctagtttattatgtctgggtggtgtaagtggtggga

SEQ ID NO: 353412 - DNA, 122 bp, Homo sapiens
tatgaactttctagaaaagcgggtcattatattgcatcctttcataggagctcattatcacgacctgaaagatacctactttaccttccctccaaaatatcacatttgaaactaacccaaac

SEQ ID NO: 353413 - DNA, 122 bp, Homo sapiens
aactttgttaatttcgacgccaagctggaatgaagacgctaagtggacgctaaaaagacacgctgtttgtcacacaaggcctccaactgggacggcgtccaccgcgccccgccccgcccgcg

SEQ ID NO: 353414 - DNA, 122 bp, Homo sapiens
gagtccctcggaaatagtggagttttgctcctgcacaaaaataagaccctgttctgaggacgtgagtgagccgagcatgtctgtgcttccgtctggaggagccgggagccctggttggccca

SEQ ID NO: 353415 - DNA, 122 bp, Homo sapiens
tggcccagttctcctcccagtcttcaaagtcaggcaccctccttaggtgctgttgttctccgaggacttggggtctgatgagcaaggacgctgaggtccagatcagagtctggctctcagct

SEQ ID NO: 353416 - DNA, 122 bp, Homo sapiens
tgcaggacgactcggtggaaacagtcacgtccatagaacaggtgaggtggcaggactgggcgaggcgcccgcgcgatgtgttctgggagcgcgagtcccgttcgtagggccgcccgggtgcg

SEQ ID NO: 353417 - DNA, 122 bp, Homo sapiens
gcaccaagtgcatcaagtacctgctcttcgtcttcaatttcgtcttctgggtaagggctgcgccgggggccggggcgggagggggcaggcacacactccacgttgggcaggtcccgcggcag

SEQ ID NO: 353418 - DNA, 122 bp, Homo sapiens
caagcgcctacattgtgttaccggacagtaacatgctgcacagctgtgtggcccaggagccgccggccaccttacagcccaggtgccagcagccctgccacgtaggtgtgagtgatgttgct

SEQ ID NO: 353419 - DNA, 122 bp, Homo sapiens
acagttggccgatactgttactattatcagcgttattagcggccaggacagtgtggggggcgggcgggggtaaggggcctccccgcgcctcccagcccttcgcgctcggctccagctctttg

SEQ ID NO: 353420 - DNA, 122 bp, Homo sapiens
ccaaggcaccgtcagggagcccagccaggctctggggcttcgctccttatccccctcccccggccaggattaggcgctgccaggctcacctgccggcctgagtgagtccagccgagagggct

SEQ ID NO: 353421 - DNA, 122 bp, Homo sapiens
tgggtcaaagaaaagaccctggcagcttagcctgaggagaagggtgctagtatcacatcacgcatctataaaatgtgggccgcttttggaaatacgtgggtgagttgccaattgcatcagcc

SEQ ID NO: 353422 - DNA, 122 bp, Homo sapiens
gccccttggcaaccagagcaaggaagggtaggttacgcagctggaggtgcagggcaaacccgtaagtggaccctgcatgaaaagattagggctgcttcctaaacagcccaactacacgcttg

SEQ ID NO: 353423 - DNA, 122 bp, Homo sapiens
ataagtaaaaagtagccgtaaagataaagacaacagaaacaaatgtattaaagcctggcacgtcctcagaagactctgctcctgagccttgatagttcaccacaagtataagactgtcatgt

SEQ ID NO: 353424 - DNA, 122 bp, Homo sapiens
cgtcgagataaagcggggagccgcgggacggcggcccagcgccggggccccgggtggggccggccagggagataagggcctcccagccccatgaattattcaccggcactgcctcctctggc

SEQ ID NO: 353425 - DNA, 122 bp, Homo sapiens
cctgctctggcacgccacacctcagacgaggctttgaaagtagggcgcagcctgagaggccggccggaccccgagtgctgtaggcgggctgggagatgggggccgccgccacccacattccc

SEQ ID NO: 353426 - DNA, 122 bp, Homo sapiens
tacgttcgaatgcctccaccctgattttagaaggttataggcgcacaatcaaggaaatgtcgacagagggcgtccttgctctaagcagcattgtccacctgcttcctgagcggggttcagtg

SEQ ID NO: 353427 - DNA, 122 bp, Homo sapiens
gccaatgtatccttcattgtccaagttagagaactacctgctcaatagactccatgcatacgcatgcatgtcatttaatattatccttaaagcatgatttatcgaacacaactgtatgattt

SEQ ID NO: 353428 - DNA, 122 bp, Homo sapiens
cgccccatctgttaccagcttctctcctgaccttaaaggaaatttccgaggctcttaaatcgctccacggcatttctaggtggaccagtaatcgtgttgggcaggttgaaatttcatcgcgg

SEQ ID NO: 353429 - DNA, 122 bp, Homo sapiens
cagtgcgtctggcaacagagaaccagacagacaaggcctggctcccatggagttcctgaccgcgtgggaacacacgagcctcatatttcttccatgtgccctgcagctagtgggagagggct

SEQ ID NO: 353430 - DNA, 122 bp, Homo sapiens
ccatgagttggctggtgcaactcctgcaaggtagggttacaggaggagctgagatgagaacgtgggcagctcacgaagtatggtgtgtccttgctctagatctgtctgcattgcttaggccc

SEQ ID NO: 353431 - DNA, 122 bp, Homo sapiens
cacccaaatactgcgcttttccgacgggcttaaaaaacggtgcaccacgagattatatcccgtacctggcttggagggtcatacgcccacggagtctctgattgctagcacagcagtctgag

SEQ ID NO: 353432 - DNA, 122 bp, Homo sapiens
tcatggtggcttgcatggcatcattgaaagtcattgtgagcctcatctgctcaggcacagcgggtggcagtagggaatttagcaacagatgaggacaaaaacttcctggggctgaatagcgg

SEQ ID NO: 353433 - DNA, 122 bp, Homo sapiens
cgggttctctggctacatgtgaccgagaaggcagcaggctctgctgctgtctgtgcaggacgacctgggcaggggaggggcgtgtccaattccaacgtgtttggaacatggggctcgcgaga

SEQ ID NO: 353434 - DNA, 122 bp, Homo sapiens
gatgggtgcagcaaaccaccatggtacatgtatatgtaacaaatctgcacgttctgtacacgtaccctagaacttaaagtataataaaaagaaaatagagtctttgcagatgtaatcaagtt

SEQ ID NO: 353435 - DNA, 122 bp, Homo sapiens
tttgtgtccccgggtgtggggtgcggggcgcggggcttcctgggggcggccgtggcccggcggtcttacttcgggaagggagccgcggtgtgggcgtgtgttccgcctggcctttgggggcg

SEQ ID NO: 353436 - DNA, 122 bp, Homo sapiens
gacccggagggactctgaccgcaccgaggagaaacaccaggacggcagggcagcgggctacggtgcacttgggacaggcacagacacctctggggagtgtctcgtgagcttttctgcagaaa

SEQ ID NO: 353437 - DNA, 122 bp, Homo sapiens
agcccgaggcacagcagcgggccggggtggtgcagccggaaatccaggcggctcaggatgcgacgctcggcgcgcagcagctccgcccgtgagaaggagtccgcgctcaggaggcagaggaa

SEQ ID NO: 353438 - DNA, 122 bp, Homo sapiens
gtgttaaaggctaagcgtgtctagctggacccgtggccccgaagaagcgagacaaggcgacgcggagctgtccctgacaccccgaggaccgagggacagcgaagggccggggccgccggcca

SEQ ID NO: 353439 - DNA, 122 bp, Homo sapiens
gcggcgggctgaagggctcctcaagcgcggccagagtgggcaccaaggcggaggaggcgccgagagcgagtgagggctgacagcacggtgtcacctctcattactaccttcatgtacttcat

SEQ ID NO: 353440 - DNA, 122 bp, Homo sapiens
ggtggacgcccgaccccacccctgccctcggccctccagcgcagctgcccagcctggagccgcgcctgaagtgggcccgcagtccaggaaaggcgttcaccaaaccctaggccaagggctgg

SEQ ID NO: 353441 - DNA, 122 bp, Homo sapiens
gaataacagctaattcacacctttatgtaatatcggcgaactcacaccttcatgtgataacggctaactcacaccttcatgtgataataacagctaactcacgcctttagttgtaggtgtta

SEQ ID NO: 353442 - DNA, 122 bp, Homo sapiens
tttctaagggtatgtgtttggggcagtgattttgtttttctgggcaccttagtaacactgcggccacgcttccccaactaaaggtaaaagtccatagcaacaatcctccctttctctctgca

SEQ ID NO: 353443 - DNA, 122 bp, Homo sapiens
gacacacagaggtgaggaggctcttagggccgtgtggcgggtgggcgccctgcagccctgcgtgctgacctgctggcgacgtcctcctcggcgcccgtgtccagcacgctgctcaggttgtg

SEQ ID NO: 353444 - DNA, 122 bp, Homo sapiens
atagtgccttacacataggagatatccagtacatcctgcctgattgaatgtctgaatgtccgggccttttctttttgctttctcttggggaaatcctattttctcccagggcttaaattcct

SEQ ID NO: 353445 - DNA, 122 bp, Homo sapiens
gccatatccccctaggttgtcttgatccatgaaccagaaccacagggcggtatcccaggccgtgtgctggccctgccccagcctagctgagtgtgctggcaaagttccccacaggactcagc

SEQ ID NO: 353446 - DNA, 122 bp, Homo sapiens
attctggattccagaaaacacacaaatagaaaacagggcaaataaatgcatctttcttttcgagtccattttaacctggttaaggaagattccaacaaaaaatccacggtgccacagcaaga

SEQ ID NO: 353447 - DNA, 122 bp, Homo sapiens
tcatctgcctggtggaggatgaagcggctgcagtggccccagcctcagcagcggcaccggcggtggctgcggtgtgggtggccggaactggggtggtgaagaagcggtggtggcggctgaag

SEQ ID NO: 353448 - DNA, 122 bp, Homo sapiens
gaggaagccaagtagttggatcagccctgtaagctcctggcactgactgccctgcaggggcgacaaccccgtgcacccacactggggccctcacgaggctccaagaaaatggctcaagggag

SEQ ID NO: 353449 - DNA, 122 bp, Homo sapiens
actcaccaccacctcttcgaaaatgctctgcagttgcgtctccatctgtactatcacccccgcctttccagggtgcccggcaaggcccggatcagactcgagctctgggaatataggggcag

SEQ ID NO: 353450 - DNA, 122 bp, Homo sapiens
gctttcagggaaaaatactttaatagtaaaaagattctctgcgagcaacagtgccccctccgtccactacgctcctgtctccaagaatgttttgctagagctaacagacatagactgcaaaa

SEQ ID NO: 353451 - DNA, 122 bp, Homo sapiens
gtccaaggtctttagcaagacattcaaggccctttgcagtcgggatccttcctccctgtccggcctcatcgctcagcctccctcctcaaggcaccacgtgtctggccagactgagctgcact

SEQ ID NO: 353452 - DNA, 122 bp, Homo sapiens
gacacgcgggcgcgtggccggctgggacagtggaggaccgagtcctcccagcccgcaacccggcccgggacctgcgctcccagtccccgcccatcgtagccatgtttacggaggcctgggcc

SEQ ID NO: 353453 - DNA, 122 bp, Homo sapiens
tctgtaaaacgaggctcacggcccctacctcacagaattggcagttcctgtctcctaggtcgtaaggatggaataacgcactccatgtacataccgagcacgggtctggctcagagacaggg

SEQ ID NO: 353454 - DNA, 122 bp, Homo sapiens
gccagccccctcccctggctacaggagggtgtgttgggcgctgtcagtggggccagatcacgtccagctgctccctctggtggtcatactcggcaggacctctgcccggccccaagccctta

SEQ ID NO: 353455 - DNA, 122 bp, Homo sapiens
gggaggcgcctgtcaggggcaccagccgagactgaggacaggctgggcagcactccaggtcgctgtgtggcagctgatttagggggctggaaatgtccagagccatcagaagcagctgggcg

SEQ ID NO: 353456 - DNA, 122 bp, Homo sapiens
ggcaatccgcctacctcagcctcccaaagtgctaggattagaggcatgagccactgcgcccggctagacactgtcttaaagacattctttgaacgatgtcattggctgtctctcctcaacca

SEQ ID NO: 353457 - DNA, 122 bp, Homo sapiens
ggcgcttggagggcagcgcgggttcccagccattccttgggtccaggtcgaggaaggcctcgggagacgagtcccacagtgagatatttgatgaaatgggtcggggctggaaagctcggaca

SEQ ID NO: 353458 - DNA, 122 bp, Homo sapiens
cagtgagcccctctgtgtccctggtggaaggcccactctctcaggcttggtcaggtgtaccgggacccagaacttgtacaatgccctgataagcttcttagaggaggtgggtattagccacg

SEQ ID NO: 353459 - DNA, 122 bp, Homo sapiens
agctgtgttgctcaagttgagctttgaagcaccgatccccaaagaaaatccagttccccccgaagcaagagtcgctgttccaaaagtgaagcctgtcgtctgtgtggccggagtctgggtgg

SEQ ID NO: 353460 - DNA, 122 bp, Homo sapiens
gcttgtacacattcgggcccctttcagtgtaacaattctgaatgtaaacacacaaatatgcgttctctcatcaagaggaacaaaagcagaaggaaggttggcatttaaagaagagaacgatg

SEQ ID NO: 353461 - DNA, 122 bp, Homo sapiens
ccatcagcaccccagatttaatttgatggagaattttctctatttgtttatgtgtgtgcccgtctttattagactgtctgtttgcctttcaagggctgggactgtgcctcattcaccttcat

SEQ ID NO: 353462 - DNA, 122 bp, Homo sapiens
ctggcagagacatgctgttttgtttaaatcctccacattctttgccatttccccattggccggatggggctaccctccccgccgcggccgctgctgatgtcagcctcgctcgcgctcgctcc

SEQ ID NO: 353463 - DNA, 122 bp, Homo sapiens
agaaagggcagagctcactgaggaggcaacagagaaagtccgctaacaatttttgaaggccgtaagttaaacatgttaaaaactgtagctactcactcagccgacatctagtaaaaaagatg

SEQ ID NO: 353464 - DNA, 122 bp, Homo sapiens
ttgtgcgctccggtaacgcaggaagacagcgccactgacactctagagaccagcgggcaccgcctggaggcgccttcaccacttggcggttccgggtccgcgccccaccgcgccacaagact

SEQ ID NO: 353465 - DNA, 122 bp, Homo sapiens
taagaggtcaaaggaacatatttattgacacctcagcaaaatctagcttctacagaaaaacgacccagtttcatcccaaataaattacaagaaaaaagagtgaggattacaaaagacttgag

SEQ ID NO: 353466 - DNA, 122 bp, Homo sapiens
cggttcccgccctaagccccaaagagacgaaggtcgtgagacgggaagcccgggacccagcgcagcgagcgaccgggagcagcgcgcacaccccagccccgctccctccacatcccgcccag

SEQ ID NO: 353467 - DNA, 122 bp, Homo sapiens
gaactctggacacaggtggctgagcacagtgactctctgcgggcttcactgggaacatgccgggtgtgtggccaggagggagggtgggagcagtcaaggccttcagcagccattgccaggag

SEQ ID NO: 353468 - DNA, 122 bp, Homo sapiens
ccaacagccaatcagagcgcaaggttgtgttgccagcatcccagtttcagggacagtcaccgccaagcccgaccctgcaaagggtcgtaaccggacttcggggcaaacttcaggtcccccgc

SEQ ID NO: 353469 - DNA, 122 bp, Homo sapiens
ggggcctgtggggttggcggggtcgcaggtgaggattgggtactgggacctggctgtgggcgaggggcccgctgggacagtgtggtggcctgggaggccccgcgcagtcagaggctggtctc

SEQ ID NO: 353470 - DNA, 122 bp, Homo sapiens
tggctgggaccggcctggccgagcgcgccggcgccgcggccgcagacaaagggcggctcgcgcccgggccgccacgctctcgggctctgcctcggtaagtggctcccctccgctggctttct

SEQ ID NO: 353471 - DNA, 122 bp, Homo sapiens
caaccccagctccaagagccttcccagtgccgggcactcagcgggaggcaggcaggggaccggccctgtcctttgaaatggcagcctggggccagcccgccttgtcgtgtgaccccaggcac

SEQ ID NO: 353472 - DNA, 122 bp, Homo sapiens
gggcagacacgcagtcaggctagcacctgcccactccacctgtgagtgtacacaggtgtccgcgtaaaagccggtgcctgcacgcagcttacatacagagagcggaacgagggtccccagca

SEQ ID NO: 353473 - DNA, 122 bp, Homo sapiens
acactgcgttgccgtatctggacagactggggcactcgatcatgagaggtgcttcgacgtcgtccctgcaaagtagtgcggttagggacgacctggttataatccatcgtgctttgagatgc

SEQ ID NO: 353474 - DNA, 122 bp, Homo sapiens
catcctgatgttgggtcttcttccaattaaattcattcgttccttcaacaaatatttttgcgctcctactatgcaccaggtactgtgctaggctctggggatgggatagggtgtggaggtgg

SEQ ID NO: 353475 - DNA, 122 bp, Homo sapiens
tctgggttgggatgacaagtgcccctgtgggatacacagccccaggcctcatcggtcactcggcttacctctggttccgccggctggcccgtgcgtccttggccggggcaggagcagcgctg

SEQ ID NO: 353476 - DNA, 122 bp, Homo sapiens
gatcttggggccagattgcaaattcgcggtgactcagtctggtcggctccttgcgctcggcggccgcggcggcagcagcagcagacgctggcggccgggctgccaggagcagttccgccggg

SEQ ID NO: 353477 - DNA, 122 bp, Homo sapiens
aaggaccggcgggaggaagagagagagagacagagagacagactcacagactgggaggaccggagactcgacgcgaggagagacagtgaaaataagtgaacaaacatagagacacgggtcca

SEQ ID NO: 353478 - DNA, 122 bp, Homo sapiens
tgatgatctctaatctgcctaattccagtcccacaagatctatcagcacaaggcctgtcccggtacctaaatttaaaaaagaacctcccttaactgactggatcaggcagcatctcctattc

SEQ ID NO: 353479 - DNA, 122 bp, Homo sapiens
atgttttccagtgaaaccaatttacttgttcccacttcccatgactcagtactagatattcgggctttctaaactatttttttggcaccaaactcttggaatagtcatctttccttcaagtt

SEQ ID NO: 353480 - DNA, 122 bp, Homo sapiens
cgctccccgacggcggggcggggcgggacgggccggggcagagctcgcggccaggtgaggcgccccgcccctcggcggctccaggtgcggctgtgggacctcggaccgcggcggggccgggg

SEQ ID NO: 353481 - DNA, 122 bp, Homo sapiens
ctgaagagcaaggaaaactaagccccttcttatctcctcaatgctcagccactagaaactcgtaattagagctattaatagccaccatttatgtagaagctgccatgagccaggcacagtgg

SEQ ID NO: 353482 - DNA, 122 bp, Homo sapiens
agcttgccagaaggcagtgtcagctgtggctcagccaagacagtagtcctagcagctttccgtgtagctgtccacatagccatccagcagagttgtcaagtacaatacggatgtccagttca

SEQ ID NO: 353483 - DNA, 122 bp, Homo sapiens
aggctgtgccaggctgggaggctcggggctccccacgcccccatgcagtgaccgcttccccgatgtgagccgcctcggagtgtggcctggatccatcctgctagcacctccccagacagggc

SEQ ID NO: 353484 - DNA, 122 bp, Homo sapiens
ggaccccggaacgaggcaggaaaccttcctggttgcacctcaggccaaccactcagcagccgggtgaccccaaaaattcacttcatcttctggtcttggtttcttcctccatagacttggcc

SEQ ID NO: 353485 - DNA, 122 bp, Homo sapiens
aaattctaaggctctaacttttcacatttgttccatgttaccagtcatcaggtggaaaagcggaaatgcaacactgccacatgtgcaacgcagcgcctggcaaattttttagttcattccag

SEQ ID NO: 353486 - DNA, 122 bp, Homo sapiens
tcgtgggctcaggtcagcacaggtactctgcaggacccccaggggaagggaggaagacagcgcccaccgatgggtagagcgtggccgtcatctgctatcatgagccctggagacaggcccct

SEQ ID NO: 353487 - DNA, 122 bp, Homo sapiens
ggcggcgtccagccatgcaagcaagacccagcggcccgaggggatttcggttgctctctgcgtgggggcgcagtctccactgcagatcagcacccgcccgcggggaggtggccacgtttctc

SEQ ID NO: 353488 - DNA, 122 bp, Homo sapiens
tcctgggccgcaccagcgccacctcggggcctgctccagtctcctccccggggtcctctgcgccctcccgccgagacgcccgccccagctccccggtgcacagccccgccgcagccacgcgg

SEQ ID NO: 353489 - DNA, 122 bp, Homo sapiens
caggagcagcagaggatcctggatctgggcatcacgggccccgagggacatgtgctgagccgacctgaggaggtgaatgttcaccaagcggaatgcgtgaatcagtgtcccttgggcactgt

SEQ ID NO: 353490 - DNA, 122 bp, Homo sapiens
actccacgcacacatgcagcttcagtttcaaaacatgcgtggaaggatcttttggaaacacgcccagactgcagacacccaggtccctctaccagggagtctgactctgtcccaggtggggc

SEQ ID NO: 353491 - DNA, 122 bp, Homo sapiens
ctagaagccagggcccctctctctgccgcgggaagttctagcgacaagcccagaaagtgacgtcctctctacctggcacccctcctcagagcgcgcgggtgaagagtttgggtccgaaaacc

SEQ ID NO: 353492 - DNA, 122 bp, Homo sapiens
aggtaagcagggcaccaaacaagagagggtggtggctttgattatggtggtggcattggacggggagagaagtacacagatttcaggtactttttggatgtgggaggtgatcaacaataaag

SEQ ID NO: 353493 - DNA, 122 bp, Homo sapiens
tctaacactctcttcgccgccatctttttcaagattttaaattgaaaatactttttttgacggctcttgccattatgtctggacgttttaatttcaacaaaacgaaataatagtgttaagtt

SEQ ID NO: 353494 - DNA, 122 bp, Homo sapiens
gttctcaagtgcgccccctggcggctgcggggagaacagccttggcgggggcggtggaggcgccaggtgagagaccagatgagatggtcccaacgaaaggatggcgtggaccacggtgggag

SEQ ID NO: 353495 - DNA, 122 bp, Homo sapiens
ttcaagcgattctcctgcctcagcctccagagtagctgggattacaggtgcccaccaccacgcccagctaatttttatagttttagtagagacaggggtttcaccacgttggccaggctggt

SEQ ID NO: 353496 - DNA, 122 bp, Homo sapiens
cccacctaggtgggctggcaaccagccaccagtttccaactctttctccaacagggaagccgcaatgacacagccgactaggccctcggtcacctgtgaccagggatcctccacgatcggcg

SEQ ID NO: 353497 - DNA, 122 bp, Homo sapiens
acccggggaggcggcgctgcggtgaaagtcccagcggtggagaacagggcaagcatctaccgcgcgcgccgggacccacgcgtcctccccttcctcggggtttgtctggaggcagggactcc

SEQ ID NO: 353498 - DNA, 122 bp, Homo sapiens
tttctctaactctttgggccacgctttcaggaagacccaggaatcctcctctgggtacctcgccatgaagctatttacagcctagtggcagagagcttgccacaggcctccctagaatatta

SEQ ID NO: 353499 - DNA, 122 bp, Homo sapiens
ccttgggaacaaccatccacagtggctcagtgtctcagatggatggatgcccctccctaccgcccagcctgctgatttctggtcagctgtcttgcagtctgcactctcctcgaacctctcac

SEQ ID NO: 353500 - DNA, 122 bp, Homo sapiens
ttttctcctagctctagcggctcaagatagctgaacggtctctggagggccggattgccacggcacctcccgcggccgcgcagtgtggttcagcccggactccgcggggcgagctgcccttc

SEQ ID NO: 353501 - DNA, 122 bp, Homo sapiens
acggacctcgctctgctccctcctcctcacggctgaccctgctgggtcgtcctgccagctcggacacttgtttgttgtggcttttgtaaaatactctgtagtcattttcctgtgggtgtgtc

SEQ ID NO: 353502 - DNA, 122 bp, Homo sapiens
agcgtgggagtcacgcggagaagccagacccagacgccgaccgggcactggtggcgctgccggggtcccgggggttcctggaccccctaccccaggcccctccaaagcaactggggtaaacc

SEQ ID NO: 353503 - DNA, 122 bp, Homo sapiens
gcaagaaaggtcaccagtgagagaaagcaaaggactcttggtaccttccggctaaatcctcgatatcttttatgaacaggcctccttggtgcttgcacatattcttgcatgccctcagtcgg

SEQ ID NO: 353504 - DNA, 122 bp, Homo sapiens
aaatgctcggcgcggctggtgagttccctgcagcagctggaagtggagctataaatagagcggggagggaagcgccctcctgaggggagcgggcgggagattcccggctctcccctccgccg

SEQ ID NO: 353505 - DNA, 122 bp, Homo sapiens
tctacttagaacgggcgctggggaacggtgtgttgaacaagtacttgctaattcatatatcggctgattcacaaatcttgatagaagataaataatttgggggaaggagtgggactggaact

SEQ ID NO: 353506 - DNA, 122 bp, Homo sapiens
agtatttaatttatattttgagatagtcccgcgccgcagaaacctttgtgtgtgcccagacgccagggcgcggatcctcaggccgcacccgggagtcgagcacaccccgggtgaccgccact

SEQ ID NO: 353507 - DNA, 122 bp, Homo sapiens
cagtttctcccatggagctggtctgcaggcccggcatccacaagccccaccgcactgcaccgctctgcaggtcgctggcgcctgttctggcctcgctgggacccccacccagacgcacccca

SEQ ID NO: 353508 - DNA, 122 bp, Homo sapiens
aaagagagaacttggcctcctgtagacagtggttcccaacaatgggttcctgacatgtggcgtatgcaatcagatattatgtacgtcccaaataataagaactcaaataataaaaatatgac

SEQ ID NO: 353509 - DNA, 122 bp, Homo sapiens
gattaggtcaggcacggtgactcatgtctgtaacccagctctctgagaggccaaggtggacggatcacttgaggtcaggagttcatgatcagcctggctaacatggtgaaaccccgtctcta

SEQ ID NO: 353510 - DNA, 122 bp, Homo sapiens
gctcctagaagccacggagtgctcaaaaccagtcttagaatctgtctttaccattgcacccgtagccccttcctttcaaaatcatttctcccactccttttttcacctttagtatcgaggtc

SEQ ID NO: 353511 - DNA, 122 bp, Homo sapiens
ggagttggtgcgggtttctttggtgtccccggcctcttccgcgcttaggcttttggggtacgggaagcaaggagtcaacttgggtgccgggccgggtctacgccgtagccctctttcgggcg

SEQ ID NO: 353512 - DNA, 122 bp, Homo sapiens
gggtcatttacacactctcatccccaaacccccctcccgcacggggattcagacgaaaatcgcgaagaggaataataaaacaaaatgcaaagtcctcagggagtcggcagcggagtcggtcc

SEQ ID NO: 353513 - DNA, 122 bp, Homo sapiens
tcctctcgtgaagctctgccgggacaaggctgacgtgggacgacgtgggacgccgtgggccgcgagcacgccccggcactactgcggctaagtttggcctttcctggttgccgtcctcccct

SEQ ID NO: 353514 - DNA, 122 bp, Homo sapiens
atggcaataactgcctggtgtacacactggtctatgtactcttgtcttagtgcattgtcccggagaatatacaattctctttctagtgatgagtaactgtttactcctactctttgttaaga

SEQ ID NO: 353515 - DNA, 122 bp, Homo sapiens
gtgactgttcccttcctcctgttttgctaataactcttttcacaaatttaggagagtctccgagtctgggccttgccactcctcactcagcatctgaccatccccacctcctggatctacag

SEQ ID NO: 353516 - DNA, 122 bp, Homo sapiens
ctcgtcacccaggctggaatgtagtgacatgatcatagcccactgcagccttgaacacctcggctcaagtgatcctcctgccttagcctcccaagcagctaggactacagatgcatgccacc

SEQ ID NO: 353517 - DNA, 122 bp, Homo sapiens
accttgatcatgaacgtcacatccagtgcgcgcgcgcgtgcacacacacacacacacacacgcccttgcatcaaagaacagccagccaccttgatcatgaacgtcacatccagtgcacgcgc

SEQ ID NO: 353518 - DNA, 122 bp, Homo sapiens
ggggggacacaggcagggactgtgcgactccacccaacacaaagactcaacgagtatgcacgtgactacacgtgagtgtggagggcttggccacagccctgtcttcatgacagcacagcaca

SEQ ID NO: 353519 - DNA, 122 bp, Homo sapiens
agtctccctgctgcttctgcagccgctttgggagggctctgcctcccctgtctctgagaacgcaaggggtgtgaacggtttgccccaagtccttcagtgggttggtgggggcgtatctccac

SEQ ID NO: 353520 - DNA, 122 bp, Homo sapiens
tgcaggggctgcgccggggtttgcgcgggcccgagcggagctggggcgcggtggggagggcggaatgcgaaccccgctggacttgggcagaacttgctgcttttgcacgcccaagttgtggg

SEQ ID NO: 353521 - DNA, 122 bp, Homo sapiens
acggggtcgcggccaggcagaggcgctcttcacatctcagatgggccggcggggcagaggcgctccccacatcccagaggatgggcggccgggcagagacgctcctcacttcctagacgggg

SEQ ID NO: 353522 - DNA, 122 bp, Homo sapiens
agtgcgcgactggcgggcgctgccagcacggcgagtgtgcaaacacgcgcggcgggtacacgtgtgtgtgccccgacggctttctgctcgactcgtcccgcagcagctgcatctgtgagcaa

SEQ ID NO: 353523 - DNA, 122 bp, Homo sapiens
tccgaacgccccactcctcgctctccccctcccccaaagccattgagctggggagaaaatcggggcactgaggcatgcagttaataactgccgagtgccttgcaattccgggtccgcactcg

SEQ ID NO: 353524 - DNA, 122 bp, Homo sapiens
tgtagcgagcaaaggaggagggcgcgttaactgaaaggctgggcaacagagctcctgcggcgggccgggcacccagaagcgggcttaggacaaacacaggtgctccagacccgccaggccgc

SEQ ID NO: 353525 - DNA, 122 bp, Homo sapiens
cagaagggcctgggccgctcgctggagacgctgaccgctgccgaggccactgccttcgagcgcaacgcccgcacagaatccgccaaatccacacccctgcacaaacttcgcgacgtgatcat

SEQ ID NO: 353526 - DNA, 122 bp, Homo sapiens
aaaaagtgtcttgatttttaatcctacaagtagtaaaggaatggtagtcagaagttgaatcgtacttttaatgcctcaggcaggatagaatagtattgttttgttttgtatcccaatatgcc

SEQ ID NO: 353527 - DNA, 122 bp, Homo sapiens
acggcctcgaaagcagtttcgaggacgatggctcctgcgtcccgggagtcgccatgacgccgcggcctgtcccagacccggcgagggaggggaccaaccaccatctccccctcaaggcccaa

SEQ ID NO: 353528 - DNA, 122 bp, Homo sapiens
ctgggttgaaggctcccctcctcccagcgtgatttgccccaagtaacttggctgatttctcggtgatttcctgggtcagtgggtaaagccaccccctcactggcctctcactgcagatcgac

SEQ ID NO: 353529 - DNA, 122 bp, Homo sapiens
tagtcccaagccgtctgcttcctgggccctttcattggctccgcccccgtaaaccttgctcgtccactctggaagcgctctcctgactacaggccgcgcccctcgcgtcggctccgcccacc

SEQ ID NO: 353530 - DNA, 122 bp, Homo sapiens
tgacttggcttggcctctctcttagttattcacagctcagcccgataggcacctctggggcggcgacggcaaagagggtgcgcttattaagtgcagctccacggggactggcctctctgcac

SEQ ID NO: 353531 - DNA, 122 bp, Homo sapiens
ttgccccgccccttgcaaccccgccccgcgccggccccgcccctgctctcgcgccggcgtcggctgcgtctccggcgtttgaattgcgcttccgccatctttccagcctcagtcggacgggc

SEQ ID NO: 353532 - DNA, 122 bp, Homo sapiens
cttccccaaagggagaatccgccctcaagggaaaaaccacaaggaagccactacccgccccgcctctgccagcttgccccagtgtctggcagcagtccccatgcacctgctcacctgtctat

SEQ ID NO: 353533 - DNA, 122 bp, Homo sapiens
ccagtgcggggcgtagctggggagagtcccatgctgaatttgggaggtgcctgtgagccccgactaaaggagggcctggggatgcgggaaaggggaggtgtccctgtcacctgcaggcgctg

SEQ ID NO: 353534 - DNA, 122 bp, Homo sapiens
cggccggtgtcgcgggtggggagaccccgaggtgctacctgggcgtggcgggtgggcaggcggcccgggcgaggggctcgcagcctgggcgtcagcgtggtcatggccgtcgtggcttccgc

SEQ ID NO: 353535 - DNA, 122 bp, Homo sapiens
cgctgcattgctttccctttgtggggaatccgcacccatgcccttcccggtccagactttcgacaacaccctggagctgccctggcgccatagagccaagcccagagggctaggaatagccc

SEQ ID NO: 353536 - DNA, 122 bp, Homo sapiens
gttcctctccaccatcacctgccacagtgcacacggacagctccatcaggagaagcagggcgaggcaaggcagcatggtgagcctgcactgtcctggaatctctgggagcccctctcagctt

SEQ ID NO: 353537 - DNA, 122 bp, Homo sapiens
agacgttcaccttctcaaagtgctctagagcacgggttcccaaccccggggccatggacccgtgctggcagtggcctgtcaggaaccgggctgcacagcagcaggtgagtggctggtgagca

SEQ ID NO: 353538 - DNA, 122 bp, Homo sapiens
accaacgtgaaagcattggaatcagcacaacagccatggaatcaggcaggcaggggaggacgggctgtgtccttctgagctctatagtacagcaagatttcaagcagtttccagaaaaacaa

SEQ ID NO: 353539 - DNA, 122 bp, Homo sapiens
gttcgcaggctccattgacaaaagtgacttcccacgctttgcccacagagggcatccctgcgcattgatacgcagaccaggcaaatgcagctcctggaagcctcctcggtccgctctttttt

SEQ ID NO: 353540 - DNA, 122 bp, Homo sapiens
tccccagtcacgcagcactaggaggaaacggactccacttcccagcagccctgctgactccggaaactggggacttggctccaccctctcggctactccctgagaggtgcaagctgggaaga

SEQ ID NO: 353541 - DNA, 122 bp, Homo sapiens
agcgggcggaggcaaaaatgttcctcagacgcgggcggaggcgtagggtgacaaggctgtcgactcgcgcatgcgcagaagcacacttctgattcctctttcggcgctgcaaatggcgtatg

SEQ ID NO: 353542 - DNA, 122 bp, Homo sapiens
attaaatcaacaataaacaagtagtttcaagtcccccaactggctcaccatcttggctgacgaaaaataccccctctcgtgggaccgcggccaccacctcccgccgcaaacgcagcagccag

SEQ ID NO: 353543 - DNA, 122 bp, Homo sapiens
gatcaggtttcagccaagttgggtggtgacacaggcggggcaggctggcgaggccttggccgggggagggtcccgcagcctcttttcctgtggggtcgtgaccctggggtgacagtgtggtg

SEQ ID NO: 353544 - DNA, 122 bp, Homo sapiens
ttgaagacattccttatgtgtagtgtccctggcaggcatttaccaggccatgtgctttaacgttacggtaatactttactttaggcatccctcctgttgctagcagccttttgacctatctg

SEQ ID NO: 353545 - DNA, 122 bp, Homo sapiens
cctatttcagcagcagggggagcctgaacaccgcataggaaaggcttgggaggtcagacacgtggtagcagggactccaggtcttactgggggtggagagaggggagggctagaaccagggc

SEQ ID NO: 353546 - DNA, 122 bp, Homo sapiens
attctgtgttagcactggcttcaataagtttgccggaagtttaattgtttggagctgtcacggaagctgtactctgccttctgcagaggtgagggagaaaaaattagagaggtgcaagtttt

SEQ ID NO: 353547 - DNA, 122 bp, Homo sapiens
ctgccgcctccagctgccccgcccccggcgcggcgtcagcgctcggcggccggggagcgacgctctaggctgtcagctcggtggtttccagctctccccgaccgcagggctggggcgaccag

SEQ ID NO: 353548 - DNA, 122 bp, Homo sapiens
gttaattcttccccccaaataaagatccatggaacagggtgggtgtgggagcctatccagcgtcatgatgatcttggcacatgcctatcagctgtgagcctcaggtgagcactcagcctagc

SEQ ID NO: 353549 - DNA, 122 bp, Homo sapiens
gtcactaaatgttccccctattgacattggcttgccttgcgaccctgaccctcacagacacgcaagtctaggcaatgtttataagccacaaggaaggtgccagtcagctgctccctggaaat

SEQ ID NO: 353550 - DNA, 122 bp, Homo sapiens
acttggcccaagctcctcggttcacccggagctgtgacagccactcccagggaacagtcacgctgccctaccaagcccacctccagcggcctggattccccaggcagaggttgtgggatttt

SEQ ID NO: 353551 - DNA, 122 bp, Homo sapiens
ttttaaataaatgagtggatttgcatttataaaatctgcaacagcaaaatataaaaacaacgactggagcaatactctgaatgaagcaaataaaaatgcaataccaataaaatgtcacacct

SEQ ID NO: 353552 - DNA, 122 bp, Homo sapiens
atctcctcctcgcaaaccccaagccaaggcaagctggatgaagcgctccctgggcaggcccggctctccgtgtccctccatcacctgaccccgctggctctcgcagaccccttcctccacac

SEQ ID NO: 353553 - DNA, 122 bp, Homo sapiens
ttaaataataataatactaaattttcttagtaatagaggtcttgctatgttacccaggctcgtctcgaactcctgggcttaagcagtcctcctgcctcagcctcccaaggtgctgagattat

SEQ ID NO: 353554 - DNA, 122 bp, Homo sapiens
gggcccaggaacaggcctgggggccccagccgtcatcaggcccagggcatgcccagggtgcgggcaggggagccacggccaccgggggccagtggggagacgccccgagtcctctcccgcag

SEQ ID NO: 353555 - DNA, 122 bp, Homo sapiens
taaacagctctacagaaaatcacaattaaataaataccacttaatagtagagatttgtttcgctgccagagtatttgtgggaagagaaagaggaggttggatgaatcacttaatctttaatt

SEQ ID NO: 353556 - DNA, 122 bp, Homo sapiens
cttggacggtcgatgggaccaggtgccgtggagcggggcgcggtgcttgtcggggatgctcgggctgcacaggagcccatggaggcaggggggaggctcgggcatggcaggctgcaggtcct

SEQ ID NO: 353557 - DNA, 122 bp, Homo sapiens
ccgcccgccccgggagcccgagccccgcccttccccggccccgccctcgcctcccgagcgcgcccaccggagccaccgcgctcctcgcgacactcgcaggctctgcgaacttccgagcggct

SEQ ID NO: 353558 - DNA, 122 bp, Homo sapiens
gctgtcccgccgccgcgcccgagcctggggcctgcgctcgccggccggctccgcaagccgcgtcccagcgccccgcgactgcgtcaccggccccccgcacgtaaccacagctgcctccgccc

SEQ ID NO: 353559 - DNA, 122 bp, Homo sapiens
tcacagcccagcccttcagacaaatgattttgcaacaaccatgtctgttcatagtgaacccggatacttcagaggttgtttaaagccttacaatttgtggctcctattctcatatagcttat

SEQ ID NO: 353560 - DNA, 122 bp, Homo sapiens
cagagtggtgctccttgtgtgccctttctgaggattggtagaaactgcattttttaatctcggctttcatgtttgtccaagatctttaaagggaggggaaaaaagagagagagaggcaggca

SEQ ID NO: 353561 - DNA, 122 bp, Homo sapiens
ctgggcgagggtggggggtgtgggggcgggggcatgcaggtgcttgcgcggctcctatctcgagtggcaccactcaggtggaggaagaacagcacttagtcatttatctcccttggtggcac

SEQ ID NO: 353562 - DNA, 122 bp, Homo sapiens
ataataataataaatacttctgtggaatgccctccaaggagagctaaagtgatttgcagacgttcactagtcagtctggagtgactgtggctgcagcccagtgatgttcccgtgtcgtgatg

SEQ ID NO: 353563 - DNA, 122 bp, Homo sapiens
agcacaaagtctctgctcttcagagtgtgacgggctgcccctgtctgcaaaagctgtccccgaataggctttctctgagcttgttaccgtggagggctgggcccggtttctaatcgccccct

SEQ ID NO: 353564 - DNA, 122 bp, Homo sapiens
cagcatggtgaattctcctccagtagaagtcatatagcaatgttttataattaacttttacgtgagcaaatgagctccaggagagaagattaaggaatattgctttccatatatctggatgg

SEQ ID NO: 353565 - DNA, 122 bp, Homo sapiens
tggcttggggtctcagggaaccgaaccgccctccccccagacctgctaccccaggccccacgttggtgcccatttcacaggtgataaaaccgagacccaaagagccggtgtccggcccaagg

SEQ ID NO: 353566 - DNA, 122 bp, Homo sapiens
ccagaaagtgacttttttttggtctctttagctctatgtgcgccgtgtattcatcacagacgacttccatgatatgatgcctaaatacctcaattttgtcaagggtgtggtaagtatctgaa

SEQ ID NO: 353567 - DNA, 122 bp, Homo sapiens
acaggaggaggtgacgcctgcgggcaaggggcggcgaggtgagcggcctgcagtcccgctcgtggccacaagacggcgggcgagagcagcagacgctccttcaaatcccagaaaaattcctc

SEQ ID NO: 353568 - DNA, 122 bp, Homo sapiens
catagttttaaatggccatagtaacgcaaggcttcaaacagaagtcctcaggtctcacttcgcagaggcagtggcttttaaagcatcctgattaacagtctgagctgctattcactgagttt

SEQ ID NO: 353569 - DNA, 122 bp, Homo sapiens
cgtgaggaggaggaggagaaaccaaatttaataatatttggcgtggaaatgggatttgggcgggggaggcatcttcaaagcaagtaaagagaaatcaacattatcccccttcccctgcacat

SEQ ID NO: 353570 - DNA, 122 bp, Homo sapiens
agctgaaactgtgtgctcaagtttgtagttctcagacctggagtgtgtggtaaagcacttcgccttgcccaaagagaggtctggtctttgtccttggggtctgggtgatctctattggggta

SEQ ID NO: 353571 - DNA, 122 bp, Homo sapiens
gagagtctgctccggggctccggctccggccccgccgcggcctggcccgcgcgccgccgccgccgccaccgccgccgccaattcatcacctgtcagggatcactcgcggggtcacgggcgga

SEQ ID NO: 353572 - DNA, 122 bp, Homo sapiens
aatgcctggaggaggagaccgaggtccaagctaggaggttgagactggcttagagctcctcgcgcttggctcccgagccagcgcgcttttgccctaggccttcctggaggggcgaggagggc

SEQ ID NO: 353573 - DNA, 122 bp, Homo sapiens
gtgacctgtcaaaggataccgaagacaggcccatgcgaaacatttaatttctggcattttcgtgcatgtgagactcatctgatgtgaactgaaggtatgttatccttccttttaatgatacc

SEQ ID NO: 353574 - DNA, 122 bp, Homo sapiens
gtcttttgcagcagaaatcaagaggtcaggcagctctgctcatcctgactagtttatcatcgtttgcatacaaggtatatttatgtaaagctgattccacgccaagtattgcaaccataatc

SEQ ID NO: 353575 - DNA, 122 bp, Homo sapiens
ctcaggcaatcctactgccttggactcccaaagtgctgggattatgggtgtgcactaccacgcccagccaaggcttagacattttagaatgaggcgatcctgatttcagttctaccagagtc

SEQ ID NO: 353576 - DNA, 122 bp, Homo sapiens
ggagctccagagacacctgctgcaggccactcagcctctacaaatgggaaggctgagaggcgacagaagcaaggaataggaaacccttgtgtccttgtttctatagccacattccctgcaca

SEQ ID NO: 353577 - DNA, 122 bp, Homo sapiens
cctgtggagtgcttagctcaccctgctatgcggggatgcacgcagccctacagcacgcatcgcaaaagaaaatctgagctcccctgggccccggatgaacccttagcaagtccacggctgtt

SEQ ID NO: 353578 - DNA, 122 bp, Homo sapiens
cgcaaattcgtgaagcgttccatattttgcgcggttcaacgaaggtcgttgggcaagatacggtggtgttcctagaggttgttcaagatctctcggggcctgcattttcctgctcgcgagct

SEQ ID NO: 353579 - DNA, 122 bp, Homo sapiens
ctaggtgtgaactcacttaccgtggggcctatgaagcaggagtgtgtggccttcgaagttcgaatgtgttcatgtgggtgtgtagcgtgtgaatcggacatggaaaaaaaaaaatcccctat

SEQ ID NO: 353580 - DNA, 122 bp, Homo sapiens
tcaacacaataggtacctcctcatcgccagctgtatgacagtaaaagcaattttaagccacgctttacttttttaagtaacttgtcactttagttcttgcagtccaccttctacactaacat

SEQ ID NO: 353581 - DNA, 122 bp, Homo sapiens
gggaagctagtaatcacttttttataaattttggttttgttttgttttttgagacaatctcgctctctcatccaggctgggtgtggtggccagatcttagctcactgcaacctatgcctccc

SEQ ID NO: 353582 - DNA, 122 bp, Homo sapiens
ggcggagcctgaacggcctctggggccgctcaagggtccagtttgggctctgtgcctgcccgcggaatggggtcggggtccgacgtagaagagccagagaagcccttcagacccctccccta

SEQ ID NO: 353583 - DNA, 122 bp, Homo sapiens
tagtgaaggtctgcagctgcactcctgaagccagggagaccacgaacccaccgggaggaacgagcaactccagacgcactgccttaagagctgtaacactcaccgcggaggtccgcagcttc

SEQ ID NO: 353584 - DNA, 122 bp, Homo sapiens
ggctgcggcaggcggtcctggaatgtgcgaggggcgtgatgacagcggccagcctctttgcgcaacaccttcgccatatatacccggggcgctgcgctccacctggccgccgcctccagccc

SEQ ID NO: 353585 - DNA, 122 bp, Homo sapiens
cttctcagcatggggatgtggggagccgctcagggagagaaaacgaggcctttacagcaccggtttaacagcctcggccacgcatctgcccgcacagatctaaggcttggcttcgggtccgg

SEQ ID NO: 353586 - DNA, 122 bp, Homo sapiens
gaaataaagcctggctggctagccacggcagcctcttacctgagcggttgttgggagacacgcgcacaggggagatggagggcgtgcgggaggaggagtagggcctttgccggtccctctcg

SEQ ID NO: 353587 - DNA, 122 bp, Homo sapiens
tgtggtcaagaagggaccatgtaccatgggatgggccactttctaaaagtccctacccctcggggaatgaggaacagagctgaagtaggctagagtaaggattttacctgtccactgccagc

SEQ ID NO: 353588 - DNA, 122 bp, Homo sapiens
catgcaaataaaggcgtttgattggctggggccaaccgaggcccaggtgccgaggtgagccgcgggaaggcgcgccctagcctgcgggccagtggagtggccattggccggctgagggcggc

SEQ ID NO: 353589 - DNA, 122 bp, Homo sapiens
atgctgaccagatgacagggcaggaaacccggttttcatccttcagaaaccatggggaagcgagcccactggctcctaggcagcaggtcttccccggctggggccagccccagtgcctcctt

SEQ ID NO: 353590 - DNA, 122 bp, Homo sapiens
agagatgctcagctgcacaaaagacttgtgataagcgaggcttttttctgagaaagtgtgcgggccttttgcatctcacctggttacaaagcgacgtgaattaaagtccacatgaaggatca

SEQ ID NO: 353591 - DNA, 122 bp, Homo sapiens
agcccaagcacttgctgtctgggaagaggaaagctggtaaaaaggacaggagatagtatccgtttggttggcgtggcttcgctagagtgttgctgtttatttcctggtttggcacagtatgg

SEQ ID NO: 353592 - DNA, 122 bp, Homo sapiens
gagggccaaaacattaatgaaccagaatcagcccaggtttgtgatctctgaagaggctgccgacccggagcccaagtaaacagtggagagcagctgcagggcaatcccaccaacccattccc

SEQ ID NO: 353593 - DNA, 122 bp, Homo sapiens
cagctgtaaaaagagtcttgggaattgcagaaacaaaatatttaatgatgtaatcccagccgcttgggttatttgttatgccagaaagaattttctctgagattaatggatgaaattgtctt

SEQ ID NO: 353594 - DNA, 122 bp, Homo sapiens
gggagctggagcagcggtaccttacctggaacacttgttatgtaaagccctcacctggaacgcttgttgttatgtaaagataactacctctcacttttttaggtgtgattttttttcttcta

SEQ ID NO: 353595 - DNA, 122 bp, Homo sapiens
aagggccggaagttgtgtgtggttattttacaaggcagccgtcttaacagggatggttaacgagttgaacaagttcctgtgcataaaaaatgctatctctgacatttagttgctcacctcac

SEQ ID NO: 353596 - DNA, 122 bp, Homo sapiens
ttcagtaaccaaattatccaatcaccccctgtgggccccagagctctataggatttccatcgtttgactttaacttaagccgtttctgggctctttaacctcaggcaatcaaccgtatgttg

SEQ ID NO: 353597 - DNA, 122 bp, Homo sapiens
ccagaggaagctggtgaggcgggcgggcgggggcgggcgggggcgggcagcgggcctcggcgcaggcgcagtcccagccccagccccatagcgagggccctgcggcgagctccgcacacgcc

SEQ ID NO: 353598 - DNA, 122 bp, Homo sapiens
attttaggtgcccatcggaattgtaccccttcatgagcacacactcagccaaagcagcaacgtgcatataacctgcacttgtctggttagcactttgctttttgtcttttaaatcaaactaa

SEQ ID NO: 353599 - DNA, 122 bp, Homo sapiens
tggctgctcggggtgggtctgtgctggtgtgtacagggtcatgccatgctctgtggggaccggggtctggccggagtagtcctgcgtggggtgcggtgggggcggggcgtactcggcaggga

SEQ ID NO: 353600 - DNA, 122 bp, Homo sapiens
cctgctgacgctgatgtttctgtctggcctgtttagtgcccctccaggtagctgggcctgcgagtcagggctgtctgaggggctggggttggaacatggggtaggaggaaggagggccaggg

SEQ ID NO: 353601 - DNA, 122 bp, Homo sapiens
cagcgccccttccccggcactccacttacccctgcgcggtcccggagctccgccaaggcccgggaaagttggagaactcgctttgcaaaaaagacatcccctccaggctgccgcgccggggc

SEQ ID NO: 353602 - DNA, 122 bp, Homo sapiens
gtgggcggaacgcgagtgcagcggtgggaggcttccgggggagctgcacgggcgacgggtcggcggagacagaaaagcgccggacgccggggtgatcatggacgcttgacaacctgcgggca

SEQ ID NO: 353603 - DNA, 122 bp, Homo sapiens
cgcctctaccttacttgcgcacacggaaacgccttcaatgtgaactctcactggctctgccgtgctgtcatttgacgcagagctttctgggtaatgtagtttcccaggttccaaggccgtaa

SEQ ID NO: 353604 - DNA, 122 bp, Homo sapiens
cgcatgccccttagcgtacctggggctccggctcctttacaaatgaaacccaaagtgctccgcaagcacagccagcgaaagcgaaaaactctgaaacggacaagatggctgccacctcttcg

SEQ ID NO: 353605 - DNA, 122 bp, Homo sapiens
ccctgcgcaggaggagatccccaggctgctctctccatctctcctacagctccctgcaaacgagggggaagctgctgagagtccctatcactgctggccttttaatgttgtatgcaaggagg

SEQ ID NO: 353606 - DNA, 122 bp, Homo sapiens
tccttttctcggggctcccgtgggtaggtgcacttggagcaaccgggcctgcggggtgtgcgggggtggaggttggggagggcaccggaaggggtaggccggagggaagggagctccaggtg

SEQ ID NO: 353607 - DNA, 122 bp, Homo sapiens
gtactcccattatcctagctaaacatagtgttttcacaaagttaaacaaagttaaagtaccgtaataattcagtccagtctgtccttcattttattactgttatcaggggaacatgggctgg

SEQ ID NO: 353608 - DNA, 122 bp, Homo sapiens
ggtgcgcggcgctcctgccactggccccgcagccgggcggggagcgggtggtggggcgggcggcagagcccgcccctgccgcgcctccgccccctgcgccctctcgcagccgcccgggcctg

SEQ ID NO: 353609 - DNA, 122 bp, Homo sapiens
ggttcccagagagaaatgagcctggattccagagaatgcaaatttcttcaaacttgcagccggcttccagactccctgcaaaggtctcttaagcctctaaatatttcctctcttaaatcaca

SEQ ID NO: 353610 - DNA, 122 bp, Homo sapiens
ctgctccgcgggccggcgggcggcgagggggccccgggggccgggcgcacgggctccgggcgcggaggaggcttcctgctgcctttgtctctcgcccgcttttcaaacctcccagccccggg

SEQ ID NO: 353611 - DNA, 122 bp, Homo sapiens
aggaatcagcagtcgaaggaacagcgggccaagcgcagtcgtgacgtggcgttcagagagcggaagttgtcagatttcaccgggccgtaaagcgcgctggctgtgtcatcttccggttagcg

SEQ ID NO: 353612 - DNA, 122 bp, Homo sapiens
agcttcccccgtggccgggtctccaaagcagccggtgcgtggctactaccgtggcgctgtcggtggcacgtttgaccgcctgcacaacgcccacaaggtgttgctcagtgtcgcgtgcatcc

SEQ ID NO: 353613 - DNA, 122 bp, Homo sapiens
gaagagtcccagttctgcaggccgctccagggctaggggtagagatggtggcaggtggtgcgtcaactctctagggaagaggaacttgcattacaaagacttgtctttctgagctgaagtca

SEQ ID NO: 353614 - DNA, 122 bp, Homo sapiens
aatttctccacacttccataaacctgtgtccaaaggtcaccttgaagaggcaatcacagccgcctgttagtctaacaaagatggctggtttaaatgcttcatttttttcctatcgccttccc

SEQ ID NO: 353615 - DNA, 122 bp, Homo sapiens
ccagcccccacatctccccacccccacccaccccacccgctggaaacacaagcccggcctcggcgcgccatgtgtggtaacacgctcagccgctgccacgctatttaaacgcgggctatgga

SEQ ID NO: 353616 - DNA, 122 bp, Homo sapiens
ccaagaaccccagggcaaggctaagaggtactgagccctcacctcaagccaggctggcctcgtctgctttgctttggcatgtgagccttgcccaaggaggtatatctgggtccctagaaggc

SEQ ID NO: 353617 - DNA, 122 bp, Homo sapiens
cactcatggatttattacatcatctggcactaggaagtccttcagtttccacactgagcacgtggatgggcaatgagtatttaatagtctatatttctaggtggaacagtcttaaaccttta

SEQ ID NO: 353618 - DNA, 122 bp, Homo sapiens
cctgctgctgtctgaaccggaaacaccctgctcctgctgctgtctgactctgagacaacacggccgcgccaactcgctaagaccggcccagcccacggagtaatcctcaatacgctgtcaca

SEQ ID NO: 353619 - DNA, 122 bp, Homo sapiens
tccacctcttgtctctctgcctcccgctcggggtccgtcttcttggctaccaccctagagcgtggctgggtgactggtaccccagctttgccaatggccctgtttcatcattgcaagtccca

SEQ ID NO: 353620 - DNA, 122 bp, Homo sapiens
ggtggaagaggggcctcagaaaatggaatggacaagagaggaacagagggacaagacggtcggaccactggatattatgcaaggagattaattttgtggggagaggactggcaaagacctca

SEQ ID NO: 353621 - DNA, 122 bp, Homo sapiens
gcagccctcacagcctttgctcgctctccgcgcctcctcggccttggcgcccactctggtcgcgcttaagaggcccttcagcccgcggctgcactgtgggagcccccttctgggctggccaa

SEQ ID NO: 353622 - DNA, 122 bp, Homo sapiens
ctccaccaggcaattgtcccggtctgatgagaaggtgtagacacattaagggattggccccgggtcactcgtgaaggagggaacgaggtagtgagtcattcccagccaagaacgcagcgtgc

SEQ ID NO: 353623 - DNA, 122 bp, Homo sapiens
agaaacctctgcccattttggcctttattaaaataaattatgactaatttaccacagagacgttcagataaacaagttctaacctagcaacttggtatttcctgattatttataaatcgaca

SEQ ID NO: 353624 - DNA, 122 bp, Homo sapiens
aaatcccagcaccacaggccacatggccggcaggtctcacggggtgagcacagcagaggccgcttttacacagggacccctggggccccctccaagggctgctgcctgagagggagcgtggc

SEQ ID NO: 353625 - DNA, 122 bp, Homo sapiens
taatttattctccccacacacgaaagagcaattagttctaaacagggcttaatcagtcaccgcgagattgatttctggagccctgggttttcgggctcctggcgccacgccaggctggagag

SEQ ID NO: 353626 - DNA, 122 bp, Homo sapiens
gtgtggcagtaaagctctctttgacacagcactatcactttatcttaatctgtgctgtttcgaggggagagggagatgatgcaatcgctaccctgagtttaaagagaagatttattgtgtca

SEQ ID NO: 353627 - DNA, 122 bp, Homo sapiens
tccaaacaaataagcaacaagtgtgggctctgcactcctctccacctctcttgctccttccgttgatgctcccctaacatttatctgaccataagctaagagcagtcatgagaacaagatag

SEQ ID NO: 353628 - DNA, 122 bp, Homo sapiens
tgtatctttccacagtgtcaggctttgattgatgctatttcaatcacaaaagccatgagccgcctggagttcccaaagaggcttgtgatggttaatattaagtgtcaacttgattggattga

SEQ ID NO: 353629 - DNA, 122 bp, Homo sapiens
ctttcattcattccatccagtcagtatttattgagcatcaattacgtgccagaggccgggcgcggtggctcacgcctgtaatccctgcacattgggagactgaggcaggtggatcacctgag

SEQ ID NO: 353630 - DNA, 122 bp, Homo sapiens
aaggaggcgggctgcggctgcggctggggctgaagctggggctggggttgggggactgcccggggcttagatggctccgagcccgtttgagcgtggtctcggactgctaactggaccaacgg

SEQ ID NO: 353631 - DNA, 122 bp, Homo sapiens
tgcttgtcccattcccaggaacccaactcatctgaaacaacagggcacaaccgccggcctcgggttgctcagccgccaccccagaaatccccgttggaggtacctcctctgagccactgcaa

SEQ ID NO: 353632 - DNA, 122 bp, Homo sapiens
gtcattttcctccgagctcagctgctggatatcttgaaagtccttggccatgatggggcccgggctggagctggagctggagctgggctgggctgggctgaggttgctctgagggctggggc

SEQ ID NO: 353633 - DNA, 122 bp, Homo sapiens
ccaaccctcaccgccagcgcttccacaccaccaacaagcgagcgggggcagcctggtcatcggagcatcctggcctccatccaccagagcccctggcagagggccgctgccccagagtgagc

SEQ ID NO: 353634 - DNA, 122 bp, Homo sapiens
aataattgctgtgtttaacaactggtttgtagcattcctgaaaatgtaacaaccagctctcgtgacctgttttggtctggctccagcatacaactgtgccactgccttctcctttgcccact

SEQ ID NO: 353635 - DNA, 122 bp, Homo sapiens
catccgtctccaacttctgaggagagacccggagcagccagcagattaaaaaccccatcccggccctcaccgaggtgttacaactctgtcccagttgcctggcaaccgcgcaggtgtgtgat

SEQ ID NO: 353636 - DNA, 122 bp, Homo sapiens
cgcgcctcagcagcctagggaacagcagcgcgggccctgggccggctggtccagccacaccgcctgtctccgctcgctgagccgctgcttcatcgcactgcagcctcaccccccttcctgcg

SEQ ID NO: 353637 - DNA, 122 bp, Homo sapiens
acacgggcccaggacgcacagatcactcccgtccggccgggagctgacacgggcccaggacggacagatcactctggtccagcccaaacccagtggcatggacgggacttgctcagaacctg

SEQ ID NO: 353638 - DNA, 122 bp, Homo sapiens
ccggcaggaggagatggggtatgtccgtggcaggcggacaccaccaggtggttttggcagcgcagggcgagtgtgaggaggcagggggcggggaggctttggaggcaggtggccagacggtg

SEQ ID NO: 353639 - DNA, 122 bp, Homo sapiens
cgggtgtgtcgatgcatctctgcgtttgtagagcttgttagcgtatttggaggttttgtgcgccagagtgatcagagtgattgtttcccacgcgtttgcaaaggtgtgcatgtacttgagtg

SEQ ID NO: 353640 - DNA, 122 bp, Homo sapiens
ttgaggccagagctattctcagaatcccgccggaggggccttgcctggaggagggcacaacgacacttacttgtccccatcagctgacccagggctggggttgggctgggtcacacagttca

SEQ ID NO: 353641 - DNA, 122 bp, Homo sapiens
gacattcagaatggtttcctgttgcgatacgccgtgatcaaaagcaatcactcttattgccgaatgttccttcagagaggggcagacacaaacttgggtcgcttagaagacggacagactcc

SEQ ID NO: 353642 - DNA, 122 bp, Homo sapiens
tcctccgctcttttccctttcccgagccgccggctctgccaaccagctcccagcgcgagccgccgcagcgccccgccagcaggacctgatgcgcatccatattagccgtccgagcgcaggaa

SEQ ID NO: 353643 - DNA, 122 bp, Homo sapiens
cagcgggacgctgtcaccccgactcaggagctcctgggcccgcgggctcccggaagctgccgaccacgtgattcgctggctcagctcacgtgacaaagctcccggaggtgggagccctgggc

SEQ ID NO: 353644 - DNA, 122 bp, Homo sapiens
gaattgagcgaactctcccagtggctctcctcaccgggatccccttccacgcctcctccccgtgccgcgcctcagtccgcactgctcattggccgcgtgccctgccaatccgatgcacgtcg

SEQ ID NO: 353645 - DNA, 122 bp, Homo sapiens
gccgtgcgtgcagccgccgggcatgtgagcagctctgtccccggcagtgtgtgcagcccccgggtgtgtgaacagctctgtccctggccatatgtgcagcccccagttgtgtgaacagctct

SEQ ID NO: 353646 - DNA, 122 bp, Homo sapiens
gaggaagaatttgacagggctgagcaacatattggatggaagagataactttattctctgcgtttaaattttggtgaatttagtattcccaaataagtgcaagtgagtggatttcttaaaac

SEQ ID NO: 353647 - DNA, 122 bp, Homo sapiens
gggcataaattccaccttttaaataataaaggattgttttcaagagaagatttttgccagcgttttgtccaagacattttctaatgaggtaaacatcagggaagtcatgtcctctaattgtt

SEQ ID NO: 353648 - DNA, 122 bp, Homo sapiens
gttctcctgtggctggattatagacagggaacactctcccactctctgagttctgccactcgttgtttataaagatctaagggagtagataacagaatgggatctgtgacacaggtgataag

SEQ ID NO: 353649 - DNA, 122 bp, Homo sapiens
aaataggctgccagccataaacctgaaaggtgtgtatacatttccacttgtttccatgcacggctgggcttgctcactcctgaacctctgccatggcctgagagcgagaccaggctagctgc

SEQ ID NO: 353650 - DNA, 122 bp, Homo sapiens
tggtgtgggagttaggcaggagaggaagccctcagggccagggctgccccctctgcctcccggcctgcccatcccggagagttccctcctggccccatgacccaggagtccacccttgacat

SEQ ID NO: 353651 - DNA, 122 bp, Homo sapiens
aaactttagggcatgtatttgcagaaagccttttcagccagaccctgggcctgggctctgcgcgaagagaggggattgggctacaagggttaagtttgggtagaggccaagttcaagccctg

SEQ ID NO: 353652 - DNA, 122 bp, Homo sapiens
ttaatccctccgtactcagccctctttttgcaggtactattttctaaaacaatatggtgacggacttttaaaaatccgtgctgtcatgcactcaaaatcgttccagactatttgtagtatca

SEQ ID NO: 353653 - DNA, 122 bp, Homo sapiens
cacgcagctggtcctgggccaccttcttcttctccagtaggatgtctctttggatctcctcgggcagcttctgcagggtctccttggcttccctgagagcccgctcgtggttttcgcggatc

SEQ ID NO: 353654 - DNA, 122 bp, Homo sapiens
acctcaaattacagggcccctctttatgcatggcattgtctgagcccttttcggggagttcgcaatcattcatcttcaagtttacataaaccatgtagtaggaatttttctaactaatgtct

SEQ ID NO: 353655 - DNA, 122 bp, Homo sapiens
gatggtttctggttctgccagttttgtggagccatgctgcggctgctcgctctctaaagccgagtgcattgctgtcatcccagggctgtgttgtctcagggtatcctttgtgtaggctgtgc

SEQ ID NO: 353656 - DNA, 122 bp, Homo sapiens
gaatgattctaaggaaggaagaagccccttttctctgacaaggcactggggaagtctagtcgagatctcactggggaaagcaggacttgctgctgctatgggaggcaggaagcaggccaggc

SEQ ID NO: 353657 - DNA, 122 bp, Homo sapiens
ctcgagtgccgccctctttccccccattccgtgacgtcatccagccgctcgcgcgcctcgcgttagaatcactagctaggcagccttactgcgcgccggaagtttgggccaccgtgcggccc

SEQ ID NO: 353658 - DNA, 122 bp, Homo sapiens
atcccctgccctggcatggatgtggatggcactcaatacttcttgtgttctttgctaaaccgtcaaggccttgaaggctgggacaccatcttttaatggctcaacaaatatctggaacatca

SEQ ID NO: 353659 - DNA, 122 bp, Homo sapiens
cacccctttgcaggcaactttgtaaagaatttacggatctactggcgcaggaccggacaccgatagggaacagccgacccagccccatcctggagccggggatccagagctgcctcacgcac

SEQ ID NO: 353660 - DNA, 122 bp, Homo sapiens
ttgccccctttctttgcagttttccccccttcctgcctctccgggtttgaaaatggaggccgacgacgccgacagcccgccccggcgcgcctcgggttcccgactccgccgagccctgggcc

SEQ ID NO: 353661 - DNA, 122 bp, Homo sapiens
gtgagtcatcacttatggataggtttccacttcccagtcacttgaaggtaaacatgcttacgtggcgactttttcttttccctcccgagtgtggtttgtggtagaatttgagggaaatataa

SEQ ID NO: 353662 - DNA, 122 bp, Homo sapiens
ccccggcctccccggcgcccctcctcctggcccagctggcgggggagctgggccccttcccgggaatcctgaatgtcctcagtggccctgcgtccctggtgcccatcctggcctcccagcct

SEQ ID NO: 353663 - DNA, 122 bp, Homo sapiens
ctggcggcgcgcgcgttgagcttggcgtagagcacgtcgtccaggtcccaggccagtaggcgccgcagcagcactagcgactcgtcgaagtactcggcgatcatgacgagcgagaaaacctc

SEQ ID NO: 353664 - DNA, 122 bp, Homo sapiens
gtgacaggtgttcagctcgattaggacgaatccgggcacttagccatgcaggaacaatggcgagcctctagccgatccggagcggcaaagtctagctgggtcagaagctcagtggacactct

SEQ ID NO: 353665 - DNA, 122 bp, Homo sapiens
gcgggccgggaccagggcgcggccgcaccccccacccaccccggcgcgggggcccggccgcgggaacgccctcccggaatgaagcgcttcccggtgccttcaaggtagctcggttccggatc

SEQ ID NO: 353666 - DNA, 122 bp, Homo sapiens
gcagagccaggattcaaattcaagtgttgcaaatgcagggtttctcaaccaccatactatcggcttgctggactgcataagtctttgtgcattgcaggatgtttggcaatatccctggcctc

SEQ ID NO: 353667 - DNA, 122 bp, Homo sapiens
gcgagagtggggttcctatcccacaccattgtggatgcccgctgatgtggttgttgcaagcgtcctcacagcacgaagctaacatgtttgggacagtgagccagccaggttcccgggaggcc

SEQ ID NO: 353668 - DNA, 122 bp, Homo sapiens
ctgcacacctagtgttcttgaaaaatactcatgcctgggggtgcaacctgggcattgagacgtttttaaaagttcccaggtgattcttgtgagcggccgaatttgagctccacggggctaga

SEQ ID NO: 353669 - DNA, 122 bp, Homo sapiens
cgaagtaagtcattctctcttcaagggtcaaagccttggactagcagaggccactggactcggtgattaaccgtaacctgtgtcctgaatttacactcctataatctagagcaaattgatac

SEQ ID NO: 353670 - DNA, 122 bp, Homo sapiens
aaggaggaggcttgtcggctgagagagctaagggagggagctgaatgtgaattgagtagacgtcagtatgcagaacaggaattggaacaggtatttacattaaaaaaaaaatcacttgtaaa

SEQ ID NO: 353671 - DNA, 122 bp, Homo sapiens
ccaaatcctattttctatccctcaatacacagggaaagctccttgagaagccaggtcagccgaatcccttacacacttccaaattccccactctgtaggtggtggtattgagggtggaaatg

SEQ ID NO: 353672 - DNA, 122 bp, Homo sapiens
cggcctcctgcaagatcctcattgagccactccagtgagaatccccctaccctcgaaggccgccctaacaacttcccatccgctgacccctccaacgccatcaatctccagctgtggttgtt

SEQ ID NO: 353673 - DNA, 122 bp, Homo sapiens
gatgaaacctaacgctggcctataagagcagagcagccactacctctttctgcagaactacgccagtgctttaaaatcttcctgaagtggttaacatttagagggagtcagtagggtaggag

SEQ ID NO: 353674 - DNA, 122 bp, Homo sapiens
acccctgggacggcgggagacgggagaggcttcctgccctagtgtgaggaactgagccaccgacctgaccactaggaggcaggatcacattacctaactcactggcaggctcacccaggggc

SEQ ID NO: 353675 - DNA, 122 bp, Homo sapiens
tgcgtcaggatggatctgatgatgccatgctgtggccatcttttgaggccaggtgccagtcgtagcctggttgcctttgtcagcttgcctctctctgctcctaagagttatgtttaatctat

SEQ ID NO: 353676 - DNA, 122 bp, Homo sapiens
agggacttccttcctcatcttatttccttctctgggagcctctgggaggaagtacagcttcgggcgtttctcaacgtgtgacatagtcccattggcagaacatgacatgattttcgggatgt

SEQ ID NO: 353677 - DNA, 122 bp, Homo sapiens
acaaactctggggttctcttggcttttccatgcacgtggattggggcctcagggagcggacgtgtaactggggaatccccaagacccctgggcgcgcgtggagttaactgcgagcctgtcct

SEQ ID NO: 353678 - DNA, 122 bp, Homo sapiens
cctcagtttacctctggcagaagcgctttagaagaggcagcgatgtatagagcggtgggccggcagctgcggtatccgccacagggtgtcttcctggagccacaagggaaccaatgggacac

SEQ ID NO: 353679 - DNA, 122 bp, Homo sapiens
aaaaaaaaaaaaataactacaaagctgcacactccagtcctgtttaaatagcaatacttccggacacaatttttaagttattcaatagggctttggttaaataaatgtacaatggaatacga

SEQ ID NO: 353680 - DNA, 122 bp, Homo sapiens
gctggggctttctggaggatttaaccacagaggggtgggcttcacaggaggtggctgccacggcggggccgggtgcccgtgccccatcctgaggccgtgcatacgcgggtgccccttcgcct

SEQ ID NO: 353681 - DNA, 122 bp, Homo sapiens
ggaatatgtgtaattacatttttactaccagttccaccttcacaggcaagacagagaatccgtttagtagagaacacaaaagaatttcagccaaactggtggctttagtgctatatttatga

SEQ ID NO: 353682 - DNA, 122 bp, Homo sapiens
gacggggacgacaggccgaggattcacgctggaagcccacccaagccggcggggccctagcgcagaaattcagaaccccctgtcctgaaggtgaagcaaagtctaaagaaagggccagctcc

SEQ ID NO: 353683 - DNA, 122 bp, Homo sapiens
agagggcccgtgacccagctctggccaatgggacataagcagctgtgttgtgtgggcttccgggaaagctccttaaaagagaggggtgttgctggccactccctttcttcctgtttgcagcc

SEQ ID NO: 353684 - DNA, 122 bp, Homo sapiens
gtcttccagtttcccggcgtgcttagggcgcgccaaatgggagggggagacgcaagatggcggcagccgcgaactccggctctagcctcccgctgttcgactgcccaacctggtgagtggcg

SEQ ID NO: 353685 - DNA, 122 bp, Homo sapiens
ggcagagcaacggggcctatattttatgcattcctttaaattcagagtacctggggggcacgcgtagtgaacaggctcaggacctcgggatctgtcagctccctcctaagttctgtttgcgg

SEQ ID NO: 353686 - DNA, 122 bp, Homo sapiens
aagcaagagctgtcagagaagccgtgaacccagcggctctgtccacacacaggcaacctgcgtccttagcccctttcggctcatccgggcgtcctcaaaccttccgtccccctccctaatgc

SEQ ID NO: 353687 - DNA, 122 bp, Homo sapiens
ggcgagcgaggctggagtcatgcagggcagagccttaaatgctaagctggggtttgctctcggtaggaccagctagctgccccgagcgggggctggaaccagatctcccccacgtggactcg

SEQ ID NO: 353688 - DNA, 122 bp, Homo sapiens
tggcgtggcccttggccgtcgtcacctgtggagagcacgtcttctctgccgcgccctctgcgcaaggaggagactcgacaacatgtcacccgcgctccaagacctgtcgcaacccggtaacg

SEQ ID NO: 353689 - DNA, 122 bp, Homo sapiens
cctgggtgcaggtgggctgagtccgaaaagagagtcagcaaagggagataagggtggggccgttttataggattcgggaccaaatttcatatgcgtccgtgtgaagagaccaccaaacaggc

SEQ ID NO: 353690 - DNA, 122 bp, Homo sapiens
ggcgggggcatggctgggggcggagccagagccgtggggaataggggcggagcctaggcgcgggttccccaccagaaaatggggctctggcctggctcgcggaccacgtagtagtctttgtc

SEQ ID NO: 353691 - DNA, 122 bp, Homo sapiens
tcctaggggccactagaggtcactcttgtcctacacaatggtgccaggacagtctgacttcggggtggcacccaggaagccggaatgcgtccgcctgcctccaaatcccgcactccagtctc

SEQ ID NO: 353692 - DNA, 122 bp, Homo sapiens
taaatgctttaccattgctgttaggcaaagactgcatttgtcttgaaagttttaatcctccgtggtatacccgaaaaccctctcttgactggatttttgcacctttgagagattctggccct

SEQ ID NO: 353693 - DNA, 122 bp, Homo sapiens
cggcgaacagagccgcttccgcttccgctcgcgccgcgcacaccccggggtgacgtcacgcgcccacgactcgccccgcctgtctctgttagtgctctccagcccgctccccgcctcctccc

SEQ ID NO: 353694 - DNA, 122 bp, Homo sapiens
accttggtccagtggcccctgtggctgtcagaggcgcctgctgaagctgtggtgcagccccgggcgtttctgtggggacacaggggctggaatccccgctaacatcgcggtttgacgtcagc

SEQ ID NO: 353695 - DNA, 122 bp, Homo sapiens
ctgtcactcatccacagccacagagctactatggagggaaccccatttgttcctaaactgcgattaaaaataaaagtggggggagacaggccaagaaaaaaaacacgaaaagggttgaaaag

SEQ ID NO: 353696 - DNA, 122 bp, Homo sapiens
ccagtgagcggcagaaacccgtgggctgccgacctgccctgtgattgggaacatcccctgcgctgcgagagtggttttcctcacgctacctggctgggccatctaggctgcaacacaccagc

SEQ ID NO: 353697 - DNA, 122 bp, Homo sapiens
gatgactgttttgatctgcaggatgctggcggccgtgaggatctgcagagcttccgactgcgagacccgtagcacgccgctgtacatgaagtcaatgagcttttgcactgactgcactgaca

SEQ ID NO: 353698 - DNA, 122 bp, Homo sapiens
ggctgatgcatcacagtttggtctaggaaccagctggagtttagtgtttgactcccaaggcgtttatgttgacccctaccccatctttgacattcactgggcctttagagccctgggaattt

SEQ ID NO: 353699 - DNA, 122 bp, Homo sapiens
aggcgctgccttccctgcagcatacccaaggcgggctgggtcatgctggccaggagccagcgcgtcagctaccccggccggagaccgtaggtcggagcgctgagtgtccagatcccttgcag

SEQ ID NO: 353700 - DNA, 122 bp, Homo sapiens
tacttccaaaagcttcccaaagacattctaggcacagtggttctcaagagaggctgaatacgtttgtttaaaaacaaaaaaatgcaggttctctgggtctcatctcaaacgtactcagaatc

SEQ ID NO: 353701 - DNA, 122 bp, Homo sapiens
gacactttcccagtctccgtcccttccaccttccctggttcattggcttggagccatgagcgcggccagtggctccgcggctcccggagggacgctgggggtttgccctgggagtagggtgc

SEQ ID NO: 353702 - DNA, 122 bp, Homo sapiens
tttgtccatagttctcgcaagtgacgttgaaaacggagctccgtccgaagcagacaggggcgagggtttgacgagctccagggtggggtggtggagaaatggggaagaggcttggccagcct

SEQ ID NO: 353703 - DNA, 122 bp, Homo sapiens
aagttatagaattgtgtgtagaattgtgacttatctggcccttaaaatccaagagttattcgtttatccattcattcagcaacaatattttgtgcccttatgatgcttatcaagcactgtgc

SEQ ID NO: 353704 - DNA, 122 bp, Homo sapiens
gagggaacggggattagtggtccctgcctgggagggggacgtgtcggcaagtcccgagggcgcctccgtccgtgtcgaggcccctcgcgtgggtggcgcgctcagtcccgacccccggcgct

SEQ ID NO: 353705 - DNA, 122 bp, Homo sapiens
ctgaggacgagtagtgcggtcgcgcctggggcgcgtccggaaatcatcctcagcctgtggcggccactgccccacttaaactcttctgcggggagagttgagcggatccctggggggttggt

SEQ ID NO: 353706 - DNA, 122 bp, Homo sapiens
ggggcggtcgaggctgaggactgcgcaggaccgcccgggcgggacgtgccgtgtgtactgcgggacttgcataataccactctccaagtcagggtgccttccaggaaatcctgagcgagttg

SEQ ID NO: 353707 - DNA, 122 bp, Homo sapiens
atagccactaatcatatttccaatgaagtttaaaattcagttcctcagttccactggccacgcttcaattgcctatatgtggctagtggctactgtattggacagcacagaatagaatcttc

SEQ ID NO: 353708 - DNA, 122 bp, Homo sapiens
ggcggtggcccatgcatcacctccctcccgagcagagacagaaacactcggggccaggagcgctccccccacgagccgccgcactccctaaatgaatgaactggctgctccaaaaccgcggc

SEQ ID NO: 353709 - DNA, 122 bp, Homo sapiens
gtggagaagcggcgttcctcctccaacaccaaggctgtcaccacattcaccatcactgtgcgtcccaagaacgcagccctgggtcccgggagggctcagtccagcgagctgatcctcaaacg

SEQ ID NO: 353710 - DNA, 122 bp, Homo sapiens
tacgggaagataacccaggtgtgccctaaaagtccccttccccagcttcttccagaaggccgtttcctgaagtggtccctggggatggcccctgaggacctcccccagcccccccgagcccc

SEQ ID NO: 353711 - DNA, 122 bp, Homo sapiens
cgccggctgtcgcctcaccacctttgctcctatctcctccccacatgtctcaccttcagacggtggctcccagaagctcctgcccctctgacagctgtcgcttgggcagcccgagagaagaa

SEQ ID NO: 353712 - DNA, 122 bp, Homo sapiens
ttcctttctacagagaatttctatgaagcccactcacttgccattccagggccaaaggaccggaggtttgcatatccgccccttgtatttgatttgcttccttttggtttcttggtttttgt

SEQ ID NO: 353713 - DNA, 122 bp, Homo sapiens
acttgcagtcaggagcaacaatgacgtccttcagggagtcaaacactttggaaagaaacgcgaactgaaaatgctattggaggacgcaagaaaaccgaaaacgctcggtcgagtttttctgt

SEQ ID NO: 353714 - DNA, 122 bp, Homo sapiens
actgaataatctacccctgaatttcagtgattcagactcaggtccaccgctaaggccaaacgtcctgtgctgccacctcatggcaggcagagggcaatgaaactcatctttccggccatgca

SEQ ID NO: 353715 - DNA, 122 bp, Homo sapiens
gagcggtgagttgcgctggtcacattggatacctgcgcgttaggagattctggagccagacggagagccgaatggccttcgcccgccctgcccctctcttgcttcagaagcccccagaaact

SEQ ID NO: 353716 - DNA, 122 bp, Homo sapiens
ctgtaggtggggaggcaggcaggccagaccttggcccctggctgcattgtcccttctgggcgcccccactcctcctgggcccttttaaagcacatacctagcgaaacatctggacctcagag

SEQ ID NO: 353717 - DNA, 122 bp, Homo sapiens
actgtatttgagaatataaaaaacttttttcagggaagaagcatacaactttggacatagcgaatacaaaattggaagctgtcataaaaagacaactcagaggccaggcgcaggggctcaca

SEQ ID NO: 353718 - DNA, 122 bp, Homo sapiens
ctgacctcaggtaatccacccgcctcggcctcccaaagtgctgggattacaggcataagccgctgggcctggtggaaaaatgtataccaatttcttgaggtcaccctagcactagagattta

SEQ ID NO: 353719 - DNA, 122 bp, Homo sapiens
tgcgacgatggctgggacctggcggacgcggaggtcgtgtgccgccagctgggctgtggtcgggccgtcgccgccctgggggccgccgcctttggccctggctccgggcccgtgtggctgga

SEQ ID NO: 353720 - DNA, 122 bp, Homo sapiens
aatcccagtggcgtccacacccggaggtgtcttctctccaggtcgcccctccgtctcatgcgacaccccaatccccgcagcctctgctcagcgtgggaccaagaatggggagtcctacccct

SEQ ID NO: 353721 - DNA, 122 bp, Homo sapiens
gtcaacacctggcttcacattctagatctctttgcctgtctgtcttctgccgcatgagagcgtgagctctgtgagggcagggacttgtgtgaactggattgcaccccagtgcctggaacagg

SEQ ID NO: 353722 - DNA, 122 bp, Homo sapiens
aagccctactgggatgatggtggtccaggcaggaaagggttccttcacccagctgagactcggtgttccagtaaggcctcaaggacctccctgccacatgaaggggcccagaggggctacga

SEQ ID NO: 353723 - DNA, 122 bp, Homo sapiens
tacattggctgtgaccggcagagaagaggaggggtgccggcccgctcagctgccggatcccggccccaaaccctggcccagcgcgaccccttacccccgcgagcttagcagccaccgcttcg

SEQ ID NO: 353724 - DNA, 122 bp, Homo sapiens
ggggagcaaaggtgtgcggtgggcaccgcctgggccgggcggggcggggtgggtggggcccgggtgtgtgctggggtgagagtgaaggacatgtgacaatacgacggtggcggctgcaggat

SEQ ID NO: 353725 - DNA, 122 bp, Homo sapiens
ggcgcttcatttgaatgattgcatccggccgccaatcgctatctgcggaggaggtgagaacggtagcggaatcctggccaccgtctaaaacccggggcttagaattgaaattcgtctttata

SEQ ID NO: 353726 - DNA, 122 bp, Homo sapiens
ggagaatggagtctcgcagatctttctgtaattgacaggcagagcctctagaggcaagcgcggccagcagacattcctgcaaggagctcacatctctttccagcctcaactcctgctttggc

SEQ ID NO: 353727 - DNA, 122 bp, Homo sapiens
gagcggcccgcaggggcagatgggactcggccactttcggcacgctgggctgaaagtgggcgcgtctgcgactgggagggggtcggagagaagccacaaagcccgggctgcagaggcggttc

SEQ ID NO: 353728 - DNA, 122 bp, Homo sapiens
gttaaaaatagccaaggattaggcaaaccctgaggacacaaaagaacagcatctccttcccggctttcgctttgctgtccctccttctgaaatacacacgctcatgcgcgtgttaatttagc

SEQ ID NO: 353729 - DNA, 122 bp, Homo sapiens
gggctgagggaaatcttaaggtggtcttggacagcgtatgcgtgtgtgtacaaactaagacgagacatcttaagctaagggactagtacctgggtggaaagttctttggagtgagttttcag

SEQ ID NO: 353730 - DNA, 122 bp, Homo sapiens
aaccatcatcagtgcagcatggcttcctccttcattcctccttcaccagctctgtactgccgcctgccaggttccaggaagggcggtgatgcagatccgtgaataaccaagacaacatcccc

SEQ ID NO: 353731 - DNA, 122 bp, Homo sapiens
cagcctcagacgcagacacgcaggaagctcaggtgggaaggaacacggctccatcccaaacgacctgacgcagtgctcgggttccccaggagaggccaagcccactcggagccaggcttcag

SEQ ID NO: 353732 - DNA, 122 bp, Homo sapiens
gcactcttcagcccttgggccgtccatgggacctggggcctcggagcagggggcgaggtccgtcgggaaggctcgtgcggtgcaaggggtgggcatgagggcttgggcatggcaggctgcag

SEQ ID NO: 353733 - DNA, 122 bp, Homo sapiens
tggctggtgttcaagtgcatcttccagcctgagaccgcgtggactcgctcatcgtgagggcgagaggaggataagcccattgggctgtcggctgagagtgaggtgcggggtaagggagtaga

SEQ ID NO: 353734 - DNA, 122 bp, Homo sapiens
catacttgaaccttgaacttctgttttggcagatatctatgcacatcttacagagcagtgcgaagtgatgagaatacaggttgagcagcttcccttatccgagatgcttgagaccagaaacc

SEQ ID NO: 353735 - DNA, 122 bp, Homo sapiens
taagtgtttaccccttcgaatttttgttggaaaactacgagggtaggtatttcagtgcatcgtctataaaacatattaaacttaatgtacgacttaagggtgtcttggaaatgccatgtatg

SEQ ID NO: 353736 - DNA, 122 bp, Homo sapiens
atcctgctaaaatatgaacatctgagtgtcttattttccaacatcgtcaatagctgtgagcgtcagcattaaatattctcccaaggagtgccatgatattgaagtcactttattaataacag

SEQ ID NO: 353737 - DNA, 122 bp, Homo sapiens
caaggaccgttcaacatctggattcaactagaaattaagaatggcccccaaacagaaagccgggcctaggaaccaattagcgcaggtcaagtccctacccggactcattttttttcagccct

SEQ ID NO: 353738 - DNA, 122 bp, Homo sapiens
cgggctgcgttccgtcgcctctgcattgtgtttctgttttgcttcggggcgggccagggtcgcggctcctcctcccagctccctcctagtctcccagcagctgtcgtccgcgggcgaggcct

SEQ ID NO: 353739 - DNA, 122 bp, Homo sapiens
gttgatgggaaatgtagttctgggcgggggcgcccctcacaccagctctcacccctgtggcggaggcctgcatgtgaccctgggccagctaagctggtccttagacgcgtgcctctgcgtct

SEQ ID NO: 353740 - DNA, 122 bp, Homo sapiens
ttcatcaggagcacttcgaggaggaggaggaggaggccggggtggaggggtgggctctggcggcctctgtcgagccctccgctcctatgcgctctgcactcggcgcaccgcccgcacctgcc

SEQ ID NO: 353741 - DNA, 122 bp, Homo sapiens
agctccagaggctaggtgggcgtcgctggtgggtggactcctgggcgctgcgcggagccgcgccggctgggttagcgcgggcggggcgcttagtcccacccccagaggaggcggaagaggag

SEQ ID NO: 353742 - DNA, 122 bp, Homo sapiens
gccgcccatggcacgtgaagagaaaggagggagagttgggagccacgagagaagccggctcggagccgcttccgtcggggcccatgtttcgccccaacagacccgtctctcctttctctccc

SEQ ID NO: 353743 - DNA, 122 bp, Homo sapiens
actcacattgaaaacttaagttcttcaccaaatgcagagactctgaaggccacgccgctgcgggctgcctccacaattcgaccgtctcggcgggccacgagatcctggccacggatgcggtg

SEQ ID NO: 353744 - DNA, 122 bp, Homo sapiens
agctatccagtctggcctcacttaataagaaggcgctaacttaactacggggatggctgccgcggccccgtccgcgccgggcaccggctaccgcgccggaagcaccgaagggtacacctgtc

SEQ ID NO: 353745 - DNA, 122 bp, Homo sapiens
gatttcaaaacacttaattaaatatttaaaaatatttttgccatgaagtgaaagagaatacggggcttaattataaagaaagtaaagaaaattttgcaaacaggtttaatatttcaaactat

SEQ ID NO: 353746 - DNA, 122 bp, Homo sapiens
ggcacaaatatttattggaacatgaataaacttgggatgaataaattaaaaagggaaatccggtgactgagggctgttggggaaagtcaaggttaaagctgaaagtatcctttgcatctatc

SEQ ID NO: 353747 - DNA, 122 bp, Homo sapiens
gactgttcaaatagacaaaccacgcggccagtggcaggtgaaaacaggcttgggtccactcgggagaaccaatcggtcgtgagttcacctcagtcacttccactcacacatccggtacggcg

SEQ ID NO: 353748 - DNA, 122 bp, Homo sapiens
ttacaacagtagagagggaacatcctaagacagaggaactccagagatgagtgtctggagcgcttcagttcagctttaaaggccaggacgggccacacgtggctggcggcctcgttccagtg

SEQ ID NO: 353749 - DNA, 122 bp, Homo sapiens
gatattatgcttgtcagtccagctgagagtccgggccacttacagactccctggagagtgcggtaaacagttgtgaccatggcctcgactagccagtgagactcgcatttattcagtaaaga

SEQ ID NO: 353750 - DNA, 122 bp, Homo sapiens
ggtagtcttccacgatccctcctgtgatacaacgacgagccatctcccaaatgattaggccgaagctgtagatatcagccatgatgtagggctggaagtggtttttgttcaggctttcgtcc

SEQ ID NO: 353751 - DNA, 122 bp, Homo sapiens
ccgcaggggccccttactggacacggcccgagcggatggacaagaagctgctggccgtgccggccgccaacaccgtccgcttccgctgcccagccgctggcaaccccactccctccatctcc

SEQ ID NO: 353752 - DNA, 122 bp, Homo sapiens
aatgtgagcgactcacaggaggcacccagagtctgcagattcacagagacagaaggcagacgggggtgccggggctgggggtggagggggcatttcatggcggcagacgctcagtctgggaa

SEQ ID NO: 353753 - DNA, 122 bp, Homo sapiens
gtggcgccatctcagctcactgcaaccgccgcctcccgggttcaagcaattctctgcctccgcctcccgaccagctgggattacagtgacgcgccaccatgcccggctaatttttgtatttt

SEQ ID NO: 353754 - DNA, 122 bp, Homo sapiens
agaccttgtgatccacccgcctcagcctcccaaagtgctgggattacaggcatgagccaccgtgcctggcctaggattttttttagcacggccaaaaagactgaggtccaagaaccctgggg

SEQ ID NO: 353755 - DNA, 122 bp, Homo sapiens
gactacatgctactgcctagagcttgtctcaatggatctagaccttcatcgccctctgatcgccgatcacctctgagacccaacttgctcataaacaaaactgcccatctcggtcctctgcc

SEQ ID NO: 353756 - DNA, 122 bp, Homo sapiens
gttccctaggcgccgggtccggacagcgccgcgcagcccccgcgcaccccgcgccccccgcgccccccgggcccgccccgtatccctgaccgcgtcccctggagacactgcggcagcggcgg

SEQ ID NO: 353757 - DNA, 122 bp, Homo sapiens
agcaaacctttggcatatatgggtactatgatatcatgggacccacaagagctggtctaacgtaagcctgaaaaccaccaatggcaaggcagaaatgccctgcacgagaagagccaaaactc

SEQ ID NO: 353758 - DNA, 122 bp, Homo sapiens
tggtacaatcgcttcgacgtcctagtgctgatttttccacctgccttctgcttagggcaccggcagcagttttccgtctgtgcctactccacctgctgtccttgttgggtcagcgaacatcg

SEQ ID NO: 353759 - DNA, 122 bp, Homo sapiens
agaaccctttcttccctgtctgccccgaccgaccctcggacccagtaggatggcaaatgccgccagcttgaacccctatggggaaaagatgcaaaagtgttcagccaagtgacgtttactaa

SEQ ID NO: 353760 - DNA, 122 bp, Homo sapiens
caacaaataagtgttatgggacatctggtggaaatgcaccctagagataagacaggccgtcggtccacctgcagtcagccattgttagttttattacctccggtggatgaggccaggtgaaa

SEQ ID NO: 353761 - DNA, 122 bp, Homo sapiens
aagcgcatggacgggacccagagcatgagcgtgtgcccactatcggggacagaaacctaccgcgttcgagttttgacatatttctcgcagttgttgaaaactatgaggcatgaaatccagat

SEQ ID NO: 353762 - DNA, 122 bp, Homo sapiens
gacatgatgggaagcaggaccagctacaaaatcttcaggaccagctcagaatgaaaatgccggggctcgtgttaaatcttaggatttcaacatggtgacagcagagcactaaaccaagcagg

SEQ ID NO: 353763 - DNA, 122 bp, Homo sapiens
accctaaaaaagcattactttcattcccatttttcagatgagaaaacggaggagtgaggtcgttattttctcaagatcatagaattagcatggttcataactggtatttaaatagcagatcc

SEQ ID NO: 353764 - DNA, 122 bp, Homo sapiens
ctcggccatggcgaggacaggtcaggtcaggggctacggacggcccgggcgacggggagccgcgggctcatggggccggtgcagccgcggagcgcgcgggaggaggagacaaaggccgcgcc

SEQ ID NO: 353765 - DNA, 122 bp, Homo sapiens
aggtaggcagctgagcccacgatgacacagcggcagtcatcagtgaagagactacactcccggttcaggtgctcaccattggccgcaacattggtaatgtgcagcaggacaaaaaagcgttc

SEQ ID NO: 353766 - DNA, 122 bp, Homo sapiens
gtcccattaagaggaacctggcctgggcgacgtttgaggaccacggggaggacacagtcgcggtccccttctcggagtccagtctgtgccacaggctcttgccgtctgcggcaactcattgt

SEQ ID NO: 353767 - DNA, 122 bp, Homo sapiens
aggaagcggagatcatggggtctcggaagaaggtttggtcgtgaactgtcagaaaggaggcgaaagctgtgcacgtggaacaaagtgaacagtgcaagttgtatgggaggtagtttaaatat

SEQ ID NO: 353768 - DNA, 122 bp, Homo sapiens
tccaattggcaaatatttccaagacaatgtaaacgcgcgcgcgcgcccgggtgagggccgcgcttcgcacctgggactttcctgccaggactcttactttgggatctaaacttttagtttct

SEQ ID NO: 353769 - DNA, 122 bp, Homo sapiens
gacgcctccccaagtccggctgcagccttttcaccgggatgggcccggctcggcgttccccggaggctgcgggcccgcccccctgacgtagctgcccatacatggtgtaacttcctcgccgc

SEQ ID NO: 353770 - DNA, 122 bp, Homo sapiens
cccagaggccctgtgaaatcagaaggacagatgttcattatttgcacttgacaaatgagccgttgaggttcagagggggaagggacttgcccaaggtcacacagcaagtcagaggcagggct

SEQ ID NO: 353771 - DNA, 122 bp, Homo sapiens
tttcctgttcactgcactcttccctccttcatatgcacacacctgctgcttttcagtcagcgcctgataaaaagcccacttttctttgccttcagaaatgcaactcagaatctatcaccctg

SEQ ID NO: 353772 - DNA, 122 bp, Homo sapiens
gacggctttagcttcctaccccgggttgtgaccgggtggggtcacataagttcaggtccacgccctgctcggtgccggcgccaggagagccaggaagacgcggcccggcttgcggggggtag

SEQ ID NO: 353773 - DNA, 122 bp, Homo sapiens
gaggccagcaggcctgaagcagaagagcagtcactggggtgggcagtgggtatgccaggccgtctcctcagaggggcacacagggaggctggaggtccacacagccccaccacagtggcctc

SEQ ID NO: 353774 - DNA, 122 bp, Homo sapiens
tcaggaactctggcttggactatataagcagaggccacggccaaaccccaaaccactatccggccagaggcaggaaagtgaatcagaggagacgaggaagaagcctgaggttaacctcgtgc

SEQ ID NO: 353775 - DNA, 122 bp, Homo sapiens
acaaaccagacccgaagccactcatgtctttccgcccagggcaccagcggctgtcggtgacgagcctgctcgtctgccacggattgctgatggtcggcaccagcctgggagtcctcgtggcc

SEQ ID NO: 353776 - DNA, 122 bp, Homo sapiens
cagcgggctgaggccctgtgtggcatcagttgagcaggggcacagcagcccccataacctcgcccttgccctctgccccaccaggctcacctttcgagtgcggagggtgacggacgcccccc

SEQ ID NO: 353777 - DNA, 122 bp, Homo sapiens
tcaagattctcaaagtctacatagaaaaggttgcctctgttaggatgatttttgtagagacgagtactgagccatgcttatggagtagataatatcgtagagagatgtttaggagagagatc

SEQ ID NO: 353778 - DNA, 122 bp, Homo sapiens
aggcactgaagaagaggaaactgggagtctgacagcaaaattcaacggctccccagtccgcgcagggtctcttcccgggactcaagactcaactgggaccggcacgaaccacgacacacagg

SEQ ID NO: 353779 - DNA, 122 bp, Homo sapiens
ccagccttcagggcagggcctttccttggtccagctgacttcaaaggtgcacccctccagcgggggtgcatgtccttctgcacttcccaaatgccctgagctcactcccaggatgcctgtcg

SEQ ID NO: 353780 - DNA, 122 bp, Homo sapiens
atgatggcctggagcatgctcaggaggcaggtgatgcagatggagagtccctcatcaccccgctcacctagaaatgcatcttacacttgaaatcatcttgaaaatgaagggacttaaaaagg

SEQ ID NO: 353781 - DNA, 122 bp, Homo sapiens
ggcgtggctacgagctgtggcggggaaggcgggtggaatcccggagcccgagctggaaaccgttccccgctcagccatgacccgggctgtttattcgcatcaggaggcgcgggtggctcgca

SEQ ID NO: 353782 - DNA, 122 bp, Homo sapiens
gcaattcaaccaatccaagtactcggtgttgaagggctcagtgacaattaaagatggctgcgcccatgtaacatcactagcgaccggtgacctctttttcccccttgcctggctcctgtggt

SEQ ID NO: 353783 - DNA, 122 bp, Homo sapiens
gagcctagccaggggcgcctgccatcagtggagcctctgctctggggctgccggtcgggccgtgtgtgctgtgtctctttaaggaccaggcctcttcaaggcaagttccctctgcagtccag

SEQ ID NO: 353784 - DNA, 122 bp, Homo sapiens
gtccagtttcccatcccactcccgcacgcttagccctcgcccccgactccaagctgggggcgacggtgcagattcccagctcatgaaagcagcccaggcgtctgcccagaggtcgcctgcct

SEQ ID NO: 353785 - DNA, 122 bp, Homo sapiens
tgagtcaacccgacacggacagacctgcaagtgtgtttccatctcgtctcgctccttctgcgccgactggagatgcccttcaaggtccgccatgtgctgacggacctgggccacctctctgt

SEQ ID NO: 353786 - DNA, 122 bp, Homo sapiens
cggggccttaaagggacccggcggcctcttctgcacaacgggttcgagcaggttaggggccgcgcaggcggaggaaaggagtaacccaggggaaggaccgagtgcagcggggacggggaaat

SEQ ID NO: 353787 - DNA, 122 bp, Homo sapiens
gaggggagtgagaggtcacttactgcagccggacataacggcgctggccccgccccttctcgagaactcgcagagctgggctggtaaaattgcagtgctgaagacactggacccggtaagga

SEQ ID NO: 353788 - DNA, 122 bp, Homo sapiens
aaaccccgtctccaccaaaaaaatacgaaaacagtcggggtggcggcgtgcgcctgcaatcgcaggcactcgcaggctgaggcaggagaatcaggcagggaggttgcagtgagcggagatgg

SEQ ID NO: 353789 - DNA, 122 bp, Homo sapiens
ttcccaggttcacgccattctcctgcctcagcctcccgagtagctgggactacaggcgcccgccaccacacccggctaatttttttgtgtttttggtagaaacgaggtttcaccatgttagc

SEQ ID NO: 353790 - DNA, 122 bp, Homo sapiens
agctcggacgcacggaccaggcccatttccctttcatctgtgagtttgctgctaccccgtcgcttcccttctccccatccccttccgcctcggctctgctccgggctttgagaccggatgcc

SEQ ID NO: 353791 - DNA, 122 bp, Homo sapiens
ctgtctgcctacggtgcctgtttccggaagcagcttgagtccggacaccaacgacggggacgctgggaagccgacttccggcgccctattttctcacctggttcccgcggcgagccagcggc

SEQ ID NO: 353792 - DNA, 122 bp, Homo sapiens
ttaagggacccgcgatgcaggaaggatgaagtgtcattttgccgaccgtgtcccagtttgcgtccatcccccaccgggcctgggctccacgcacctggagcagagccagacacgcacaggaa

SEQ ID NO: 353793 - DNA, 122 bp, Homo sapiens
ggggtccgtgagggcgcgtgggggcggcggcaggggtgcgaaaccagggcccgaggggcgcgcgtggccgggagcggacttgcaaggcgccttccaaggctgcccgctcgcatgccacttgc

SEQ ID NO: 353794 - DNA, 122 bp, Homo sapiens
tcagggaccctcaggggcggcaccgggaaatcagctttgcggagaggaaccgcagggctccggggacgggctagggcagccggcgggcagcagaggcaagcctggcaaactcttcccggctt

SEQ ID NO: 353795 - DNA, 122 bp, Homo sapiens
cccgctgcccaccagggccgctgccgccgtcaatttcttcaacatcgaccccgcggagcccgagctgcggccgcatccacttggcatccccacgaactgacccgggcttggggctggccaat

SEQ ID NO: 353796 - DNA, 122 bp, Homo sapiens
ctacaaaaagggtatacatacaaaggctgtcttcattcacctgtcatttggtctgattcccgttcctagagccaaccgctgctaccagtttttgtatatcatttcagaaaggctccacgtca

SEQ ID NO: 353797 - DNA, 122 bp, Homo sapiens
tctgagagtagccctccttcaggaaaaggtgcatttctttcccgtctttccgtggcccgacggacatcactttcctgataaaattgtgtgggaaaggttgcaatagcattgcctttgcctca

SEQ ID NO: 353798 - DNA, 122 bp, Homo sapiens
gtattaactcaatcgcttgtttaatgagcacctactctgtgctaagcaagtttctaggcccgggggacacagcagtgagcaagacaaacatccctgtcctcctgtagaaagcagataagcat

SEQ ID NO: 353799 - DNA, 122 bp, Homo sapiens
caccaagtttcatgatatagtccagtctgataattccttcttaagtatgaactcattcctcggagaatctgaaataggagtgaggggcatcagcccattggtatgacccaagagaaacacat

SEQ ID NO: 353800 - DNA, 122 bp, Homo sapiens
caggggctagaaccctggggattccaggaaccagaggggctcgaaaatcctggaaatgaccgattctcaacccggtcaggcccatatctccttttaaacaacaatcacctgatttcgaaagc

SEQ ID NO: 353801 - DNA, 122 bp, Homo sapiens
attggtgacagggtggcccaaaaaggcctcagcagtctccttcaacttagtcaataccatcgaagagatttcctcagggtagaaagctttattctcccctttgtaggacacaaggactttgg

SEQ ID NO: 353802 - DNA, 122 bp, Homo sapiens
cgatgcctttgccccggtggcacagtttgtaaactggatcgactctatcatccaacgctccgaggacaacccctgtccccacccccgggacccggacccggccagcaggacccactgagaag

SEQ ID NO: 353803 - DNA, 122 bp, Homo sapiens
acttggaatcttgggggaagcctcggcaaagatgccgttctcccgtcagcttccattggccgatggatgtttctgttttgtcaccgagaatcctactataaactacccagtggaaacagggg

SEQ ID NO: 353804 - DNA, 122 bp, Homo sapiens
gagggaagatttgacctgggtgcccggcttaatagggatgaaccttaaaaagaatgcagacgccttactggggcgcccaccaggtgaacctgtctgggctttcccggagttgaacacctcaa

SEQ ID NO: 353805 - DNA, 122 bp, Homo sapiens
agaaatctagggttggcgatgggtggtgtgggctgggcctgtgaagagtgtgcacaacagcgtcctcagcctgatccccctaccccatgctggtgctgggcctggcaaaatggggcaaagtg

SEQ ID NO: 353806 - DNA, 122 bp, Homo sapiens
aagtcctgctttaactgcatggcagtgtcatttctgggcatgaatcactgagttcagagacggcctttctgaggctggagggacgttaccaggccgtgcggagggcaggacaatgggtggca

SEQ ID NO: 353807 - DNA, 122 bp, Homo sapiens
catagaggaagtcgtagaggtgttgtccttcaggatccccttgaggggccgttgcgaggccgtggaggccgccattgccgggtgctccgcctgtcggctcagggtcgctgcttggcgtgggg

SEQ ID NO: 353808 - DNA, 122 bp, Homo sapiens
tggcagtgcaaccggcccagtgccaagcatggcccggagaagctgtctgagaagttccagcgcttcacacctttcaccctgggcaaggagttcaaagaaggacacagctactactacatctg

SEQ ID NO: 353809 - DNA, 122 bp, Homo sapiens
aaaccacggccttcccccccaacccccacctaagcctggcccctgcgcgtgtggcagctccgcaaacaccaacacacaagggccgctttgagagacgaagggtgagtgagacagagacacag

SEQ ID NO: 353810 - DNA, 122 bp, Homo sapiens
agtttccagacctggctgcttgccgaaactcagattctcggcacctccagcagctggcttcgccaacggcgttgaacaagggtcgcagctcaatgacgtcatatctccctacctacctccag

SEQ ID NO: 353811 - DNA, 122 bp, Homo sapiens
tggacaggaagagaatatgaatgcctgtggctggtggcagggtgactcatctcgggccttcggtcacagcctcaaattcctgtgccagagcctggccctcctgtcattagtcctaagactgg

SEQ ID NO: 353812 - DNA, 122 bp, Homo sapiens
ttgaagaacagtggcagcttggaggtgtttaatcaccgtaaattcgagacggcagaaaggcgtccccgcctggagccccgggcgatcgctcactctgagcagcgtcgcccagcggacagagg

SEQ ID NO: 353813 - DNA, 122 bp, Homo sapiens
ggcgcccgccgcggcgtggggcgtggagagggtggcgacagagcgcgggcggggacagcgcgtgggccgcggggggcggggcgcggtggcgaaatggcttttccagattaggggcccagccc

SEQ ID NO: 353814 - DNA, 122 bp, Homo sapiens
tccagggtgtccagcaccacatctggcgcctgcttgaccgtgttctgcctctcgagttcccgcaactcgtgcagagccgtgctcatggtcttctcgatgtcctggggacagagggagctggg

SEQ ID NO: 353815 - DNA, 122 bp, Homo sapiens
tgggcctcgccactctgcacggctgctgcctggagcatggtcctggacatggcaggctttcgagaaatatttgttatgtgagtgactctgaaaatgtgcaccaagcagtaacagtttctcat

SEQ ID NO: 353816 - DNA, 122 bp, Homo sapiens
ttaaaaagcttgggtaagctattaatattagaaattaattcactttaggccaggtacagtcgctctaacctgtaatcccagcactttgggagactaaggcaggtggatcacttgaggctggg

SEQ ID NO: 353817 - DNA, 122 bp, Homo sapiens
ctgcaacgcgcgccgccaagcgctccagcgagagaaaggccttttttggtaacagccccgcggtaagcgggacccacttctctggcctgcgagatccgccttggagaagatgaaaacaaacg

SEQ ID NO: 353818 - DNA, 122 bp, Homo sapiens
acttcccaataagatctcaggagtggggagaaataacacaagatttaggaactatgccaacgtttacgaccccaggtctagaggtcaagccgtgcacttggtctctcaagtcgcctgcttgg

SEQ ID NO: 353819 - DNA, 122 bp, Homo sapiens
agcagccccgagaggccctgcggcctggcagttagagtgcacactcacgcaccccacacgcggcacacccaggcacacacttaggacagacacagtcacttgcagcacacgtagttccacac

SEQ ID NO: 353820 - DNA, 122 bp, Homo sapiens
ctgggggtgtaactttagggagtctcagcctgaggctggcagcctggccacccagatgctcggtctctttccgccctaaccaagccccctgcccagcttccaccacttccagggccctcctc

SEQ ID NO: 353821 - DNA, 122 bp, Homo sapiens
tccgagtgataaaaaagagatttaataacattgttcaaatgtgggaaaatgacactgcgccgtccttgtgagaagacaggactgcccgagccaccgctcagctctgctcagaactcctgggc

SEQ ID NO: 353822 - DNA, 122 bp, Homo sapiens
aattcatgaaacccccaaattataggattttattagccttgaaacaggccctgtggctgtcgtcccgctgggcacacagcaggggtgtctactggaggaatgcccggaggaagtcgttgtag

SEQ ID NO: 353823 - DNA, 122 bp, Homo sapiens
cccatcccagtctggccagcggctccacattcactcagactcacatcctggacccatggtcgggcattagagacctgccacgattcaacattccacggcctttccagcttaggtcctcatct

SEQ ID NO: 353824 - DNA, 122 bp, Homo sapiens
atctataaatagctaagaagcacaggaaaacatgtttaacatcactagccatctgggaaccggaaatcaatattgcaatcagatatcgcttcacacctgctaggatggctattatcaaaaag

SEQ ID NO: 353825 - DNA, 122 bp, Homo sapiens
gttaaagaggaccggagagccacctcgcatttacctctttcccccaccaccaaggagatgcgttccgagccatgcagcgtgtctcttctgtcacattttgatggcaaacatcttcccctccg

SEQ ID NO: 353826 - DNA, 122 bp, Homo sapiens
tgatacacgagtcccacccctagagcttttaacttaattggtctgcagtgcagacctaagcgtcaggatttttgaaagctccccagatacttctagtgagcgtcaaggttgtcatagatgga

SEQ ID NO: 353827 - DNA, 122 bp, Homo sapiens
cttttgagacggtgaagagcaggcgggggaaccagtgaagagcagacggtgaggagcaggcggccgtttggccgttggagtcccccagctgactctgcccgggtagaatgtccaaagtgccc

SEQ ID NO: 353828 - DNA, 122 bp, Homo sapiens
gccaacatggtgaaaccatgtctctactaaaaatactaaacttagtcaggcatggtggcacgcacttgtaatctcagctacttgagaggctgaggaagaagaatcgcttgaacccaagaggt

SEQ ID NO: 353829 - DNA, 122 bp, Homo sapiens
gttcccagcagccttcagaggacggaacgccatgggcacacggcagctgtgagaccgagccgcagggggacgcccggccctgacatcatgggaacaagctagagcagaacaccatgaggacc

SEQ ID NO: 353830 - DNA, 122 bp, Homo sapiens
aagagaaaattaacggcatgccatcaggaccacagcagttggagaaacaactctttatcccggcttgcagccacgaggtcttgattgggggaggggtggtgaagaatagtctgtgggctgct

SEQ ID NO: 353831 - DNA, 122 bp, Homo sapiens
tctcaccacggccgccgcttcatccaagaccggccgcaaaccagcaagatggcgtccggccggcagtgacgtcacagggacccacgccccgcccctcccgctgcaagccctgggaaaacgcg

SEQ ID NO: 353832 - DNA, 122 bp, Homo sapiens
tgtaaaacggaagctcaaccacgaatcttacctctcagcatgctgggagttgtagtccgccgctagaaagctggaaacaggaagtttggcgggggtaggaaatcaaggaaaccggaacacac

SEQ ID NO: 353833 - DNA, 122 bp, Homo sapiens
ccggctgtgcggtgaccggagttgcaggttgccaatcttgctgaggggggctccaccggacgccggcctacgggtcgtaggcgtgtgtggggtgaagggggaagaggacgggagaggattgg

SEQ ID NO: 353834 - DNA, 122 bp, Homo sapiens
atcccctcacccagatagttgccccagtcaggctccagtcccctgctgctgagacagccacgaaccacgttgaggcagaagccctggcagggcataagtgaggggaccccccggcacagggg

SEQ ID NO: 353835 - DNA, 122 bp, Homo sapiens
gaagtcacacacatcttgaagtggtaactgcatagtaaatactaccaagagtttttttcacgtgggagtatcctaaaactctgccatgggtgtaaatgttttacattaatttcataattgga

SEQ ID NO: 353836 - DNA, 122 bp, Homo sapiens
cctacagcccggcaagacagcttgaagcacctgcaagcagcagcatgggaggccctcagccgtgcagggcgtccgtgtccctctgcggcaggcgcgggggccactgggtggaggacaagccc

SEQ ID NO: 353837 - DNA, 122 bp, Homo sapiens
ccgcccgcacccgcctgagtcctgccccattccaagggtggcacatccaggtcccgagggcgccagccatgcccggagcacgggctgatctgcgtaactctgtcccttcgggagacttctgg

SEQ ID NO: 353838 - DNA, 122 bp, Homo sapiens
cgctcgccggccctggccgtctcgcccgctccagacccgcttccggcagccgcgtcaccacgccccgccctaagcctgcgcagcctcagttgcgcgccgagagctctgctgggggctgatgg

SEQ ID NO: 353839 - DNA, 122 bp, Homo sapiens
ggtggctactaaagttcgaaggcacgatatgcgtgtccatccttaccaaaggattgtgaccgcagaccgaggttagtttagttctgcagttcttgtctataagaaatgcgttgggtgtccat

SEQ ID NO: 353840 - DNA, 122 bp, Homo sapiens
cccaaaatattaatattacctagtttattttgcatgtggcacattagcctccgcattcaacgcctctgaggataagccacccccactgaggagtatgtcacatcctccatgggtactgggcc

SEQ ID NO: 353841 - DNA, 122 bp, Homo sapiens
ggcatggataagcccgccaggtccaagctgtccctcatccgcaagttccgcctcttcccgcgaccccaggtgaagctgtttgggaaggagaagctggaggtgcccctgccaccctctctgga

SEQ ID NO: 353842 - DNA, 122 bp, Homo sapiens
actcctcagcccttgggtgattgatgggactgggcgccgtgcagcagggggcggcgctcgcggggaggcttgggctgcaccggagcccacggaggcgggggaaggctcaggcatggccggct

SEQ ID NO: 353843 - DNA, 122 bp, Homo sapiens
cttgagttcgggctgcgggagaagctcccgcgctgcccatgacgtcacgggactgtgacgcgcccagaagccccgcccctcgcgtcccggtccgcggacccaggctctctgcgccgtgacgt

SEQ ID NO: 353844 - DNA, 122 bp, Homo sapiens
agactgcccttactccagagccattttgtcctggcagtctgaactccaaccttgatctcccggcactacagtactgctaaaggctttgctcagctttttagcctctccactgctgctttctg

SEQ ID NO: 353845 - DNA, 122 bp, Homo sapiens
ctggtgctgccccaacgtgtccgggggtggaacccggatgtctagacaggagttctggaacgtccagacctgggagcccccacccatacgagaggtctaagccatgggataaagttatgaga

SEQ ID NO: 353846 - DNA, 122 bp, Homo sapiens
tgtggccactgccctctgcggctgggaccgctctggccctgagctcttctacgtctatagcgacggcacccgcctgcagggggacatcttctctgtgggctctggatctccctatgcctacg

SEQ ID NO: 353847 - DNA, 122 bp, Homo sapiens
ggactttaaaaagcgcggggtgggaggagtcaacaaacggttgtgaacgggaaaactacgcgatacaaactgtatacattgccctatagcaaaaagaccgaggacagggcagcctcagggcg

SEQ ID NO: 353848 - DNA, 122 bp, Homo sapiens
ttctccatgctgcccagggaagttcgatgcctggtgctgggatgcgccagcgcttctgttcgcttctggcaatcctggcgtctcccaatgagagggctctcaaaatgaagcttttaataaac

SEQ ID NO: 353849 - DNA, 122 bp, Homo sapiens
acctgggcagcggcggactcattgcaggtcgctctgcggtgaggacgccacaggcaccagcgtgcttctcctcaggacatgcacttgtaacaacatgtctggcccttttttacccccttgtg

SEQ ID NO: 353850 - DNA, 122 bp, Homo sapiens
cttagtctttctagatgcctaagtctgacttcactctcctgctggactgagagtactcaccggctctcctcgccctccagcaggcgcctgtaggtggcgatctcgatgtccaggcccagctt

SEQ ID NO: 353851 - DNA, 122 bp, Homo sapiens
caaccagagccccagcagccagatgcattgggagggcaaccagctcccttgtctcccaaacgtaatcattccaatccaagctggggctgcctggaagtcaacactcaaggcacatttaataa

SEQ ID NO: 353852 - DNA, 122 bp, Homo sapiens
tggggaaagccaagggcagttgtgctcagcaaacttcctggggagcctgtggttttctcacggggaaatgggaaaatactggcaagagagaactttgtcattgttccctgcatttaagcagg

SEQ ID NO: 353853 - DNA, 122 bp, Homo sapiens
cgcggggcccccacgtggggctgcgggactcggcctacgactgggtgccgctgggcgcgacgtcacaatgccctcttgtgtctaaaactatgcatgaaaagtagcaatcaggccctacccgc

SEQ ID NO: 353854 - DNA, 122 bp, Homo sapiens
ccacccaccccgtacaggaactccccactgggtcttcagatgccagaggcgtacccagctcggagcctgccccgggtctcagggtcggtcccgaaagaacgggggaggaggaaggctctatc

SEQ ID NO: 353855 - DNA, 122 bp, Homo sapiens
tcttgtgcagaatcaaaggttctggtggaatggttcacttcggaagtcccaagggcagtgcggatgaccgatttggccatggaagacttatcttcatggcacagagaggttgtgcagagatg

SEQ ID NO: 353856 - DNA, 122 bp, Homo sapiens
gtgtggtacgcgggacccgggtactcgtggtcgatggagcccaggaccgcccggcccgggcgtctcccgaagctgaagagcttcctcatggggcgacttctcctcagacgcccaccaccggc

SEQ ID NO: 353857 - DNA, 122 bp, Homo sapiens
cacttccctccctgaatggcttcctgcaagaggtgctaattgcaagtaagggatggagtgcggcccggaccgcagagcttatttcgtgggtggtgtgttgccaccttcctgactctcagtat

SEQ ID NO: 353858 - DNA, 122 bp, Homo sapiens
tttcattcctgttgtctttgatgataatgataagaaatcttccaccgagcacttactatacgccaggcactaagtgtcgaaacacagctgcttcattcatcctcaaagcaatccgacaagac

SEQ ID NO: 353859 - DNA, 122 bp, Homo sapiens
tgtatagatgtatcacagtttatttatccattcacctacgaattacatcttggttgcttccgacttttgatacttaggagtaaagctactataaacatccatgtgcaggtgtttgtggaggt

SEQ ID NO: 353860 - DNA, 122 bp, Homo sapiens
cctaaatttccagtctcaagcgccgctttcattccctgccccgagcggcgctccccgctccgtgcacgcatctccgctgagggccgccctgacgcacggccttctgccttgaacacagaacc

SEQ ID NO: 353861 - DNA, 122 bp, Homo sapiens
agaggccaaggcttcactgtgagtgggagctggtaggcttagcagcagagggaaaagcagcgtcgagttttggaggtcactcgacttaggtaagaacagactgactgactgctaggcatttt

SEQ ID NO: 353862 - DNA, 122 bp, Homo sapiens
cctcccaaagtgctgggattacaggttacaggctctgcttctaaggaaaccaacccaagacgcttcttacactatcccccgcgccccctggactttcacccagttcctcaataaaaccccct

SEQ ID NO: 353863 - DNA, 122 bp, Homo sapiens
ctagaggcggcggcctgatctcggttgagagggcctgagagaaacccagacacaccccaccgccaccaggagcaaatccactcccccacacacagacacacccgggcgcgctcgcacgcgcg

SEQ ID NO: 353864 - DNA, 122 bp, Homo sapiens
ttcatggggtggctgcaagcagaagaggctggaaaggctttgggggctgggccaggaacacgatctgattgacttttgcaaggatccctggctgctgttgagaggtggagggcaggacctgc

SEQ ID NO: 353865 - DNA, 122 bp, Homo sapiens
tacagtaagaggagtgaggatggttagttggttagttggctgattgtacagatggttggacgggtggctcacagctagggcagtagcttgaatagttggttggctcattggttggttggtta

SEQ ID NO: 353866 - DNA, 122 bp, Homo sapiens
taatgtccattaagaaataactgtttcccgttttgttccatcagtcataaaatgtcatcacgtgagttgtgatcagtctgtaactctatccacatgatgcttcagcttttgttctctctttt

SEQ ID NO: 353867 - DNA, 122 bp, Homo sapiens
gtttgaccgcaggggacggaatctgcggcggcctggaaaactggcgggggcgcgaggcgccgctctctcttgggtcagattctcagctcccagctccccgctcccggctcccggcgcccggc

SEQ ID NO: 353868 - DNA, 122 bp, Homo sapiens
agtgattccaacctacagacaaggatgagaaaactctcctaaactcttgtataatgacatcggcatgaaaatgaactcacctgaaactgaccttcccaggacattaagtcactagttggctg

SEQ ID NO: 353869 - DNA, 122 bp, Homo sapiens
ctcctgcgcccccatgcatgatgtgaatcagtacgcacgagtacttccccacaggcggtgcggaatcgtgtgtccgcgtgtggacggcaggccgttctgcaggctgcagcgcgccgggggct

SEQ ID NO: 353870 - DNA, 122 bp, Homo sapiens
aatttaaaaataattgttatattcagatgtgaatagctatatgttatttataaatgcatacgaccttatacacaaggttaaatgcaaatgccctctggggtgggcctgactcagctcaggga

SEQ ID NO: 353871 - DNA, 122 bp, Homo sapiens
aaggctagcaaagttaggaaagggccagattgtaaaagtttttgactgtgtgggccacatcgtctctgttgcaaatagctggctctgtcacagttgcataggagcagccgtggttgtgtaaa

SEQ ID NO: 353872 - DNA, 122 bp, Homo sapiens
tctttttgaaagtcagctaatcgactgcacctttttatacccttgccctcaatttcatgtcgcctgctggcctagacgcgcaaggcggaggacagaactgtcacagtccctacccttttctc

SEQ ID NO: 353873 - DNA, 122 bp, Homo sapiens
cgcccggattggttcacccgacccggatgctatggcaacaggtggtgtttgatagctttccgcggagtccctgggtgtagtgggaactgtggtctcgatctggcgcggtgggtgatgggaca

SEQ ID NO: 353874 - DNA, 122 bp, Homo sapiens
aaataatcagcagttcctggtggcatgtaaccaagtaaaaaccagttacacagagagccacgaacccccaaggcaagaaagcagaatgtgaaaatgctttatatgggggggtggggaatggt

SEQ ID NO: 353875 - DNA, 122 bp, Homo sapiens
ctaatacctgctgcccctttccctaatgggtcacatggtctgtcttccactgtatagctgcgtcccgctatggatctgctcacttcccttttcttttttaactttacccttgttttctgccc

SEQ ID NO: 353876 - DNA, 122 bp, Homo sapiens
ttcaagcgattctcctgcctcagcctcctgagtagctgggactacaggcgtgtgccaccacgcccggctaattttttgtatttttaatagagaagaggtttcactgtgttagccaggatggt

SEQ ID NO: 353877 - DNA, 122 bp, Homo sapiens
tcgcgcccccattggaccccctccgctgcggcgcgcccaccttggcgccgatctggttgccgcactggcccgcctggatgtgcacgatctcacgcatggtgcctcgtcagcgtcctcctggt

SEQ ID NO: 353878 - DNA, 122 bp, Homo sapiens
gggctgggtcctgggacgggagctcagtggggattccaggggcactggccgttaaaagtgcgaggcgaccgtgggagggtcaagggagcgggtggctacaggtgtctgaataggaaacgtaa

SEQ ID NO: 353879 - DNA, 122 bp, Homo sapiens
catcttatagattgggggccaagcctgtaaaagaacaacagtaaaacagagccaacaggacgttgcttcgctccgaagggttcgcgcgtagcgcgctgagccggtgcccaggctggggcctg

SEQ ID NO: 353880 - DNA, 122 bp, Homo sapiens
ttctcctttcccgtcaggaccgcattcccaggttttctccatttctctttaaaggaaagtcgtccgcgttgcttcctgacctggagtgtttagccgcggaagacactggcctcctctggagt

SEQ ID NO: 353881 - DNA, 122 bp, Homo sapiens
gaaagccacctcggggcatcacaccggtggtgaatttgcaccgcgtcagtttagcaaagccgctattgcacttcctagaatttcttctgcggcacagttccagggagcctggcccacagggg

SEQ ID NO: 353882 - DNA, 122 bp, Homo sapiens
agaccttcattctggggacttttgtccctttggggtgcccgccgtgggcttgtcacacaccgtggctgcaggccagggacaccacgatcccccgggcaccacgcagggcctgctgggaaggc

SEQ ID NO: 353883 - DNA, 122 bp, Homo sapiens
gtcacgggggctggtgcctcacgggtttgtgtcctagacaggcgagtggatccaagtgggcgagagacattttaatctggaagagtcttgtgatttgggagacaggtttggtaaccgttcgt

SEQ ID NO: 353884 - DNA, 122 bp, Homo sapiens
tgcattctctccaccaattaaagagcatgtttgtttcctcatattaaccctttgtctatacgttgcaaatttttttttctaagtcgccatttgtctttttaccttgtttctgtgttttgaga

SEQ ID NO: 353885 - DNA, 122 bp, Homo sapiens
cgtctcccgcccctgcaccgtccgccgcccctgcaccatccctcgcccctgcaccgtccccgcccctgcaccgtccgccgcccctgcaccgtccgccgcccctgcaccgtccccgcccctgc

SEQ ID NO: 353886 - DNA, 122 bp, Homo sapiens
ggccctcatgaacttattctttagcgtttcattttgagagcgggattcacaagggaattgcggaaacagcagcgaggccccgcgacccctcggcccacgtgcgcgctgtccctcgggtcgcc

SEQ ID NO: 353887 - DNA, 122 bp, Homo sapiens
cgcggcgtcagctgaaagggcccagcagggctctgcgacgttgggctctcgaggcctggccggcaaagcccagtgcggcattgttcggctcctttctgtgggtgggccctacgaggagaaag

SEQ ID NO: 353888 - DNA, 122 bp, Homo sapiens
gtccctggatgttccttgtgagaggggagccctggagggtcccggcctgtcttgtggtaccgatggcagggcctgtggtggtggtcagtcactgacccacagctctgcccacctgcacatgg

SEQ ID NO: 353889 - DNA, 122 bp, Homo sapiens
gcaccgagccctggtccccagatgcaccgagcccgtggcatctgggtggagcggcctccgcggcacagatcacctgggtgtagtgagaggcagactctgggtccctgggcctgcgagcctga

SEQ ID NO: 353890 - DNA, 122 bp, Homo sapiens
ccagccttgctgggggccaggcactggcttgtctctatggcttcacaaaaaatacagcagcggtgaagagggggagaattcacagcaccatgctgtggcagaaagcagcatcccgagggctg

SEQ ID NO: 353891 - DNA, 122 bp, Homo sapiens
tcgtctcaggagaaggaagggaaagtggagttcacatgttgggaattgagtgaacgcaggcggtcctcacagaagctggagagacaattttcagctgtcttaaagaattaagagcggtggtg

SEQ ID NO: 353892 - DNA, 122 bp, Homo sapiens
aaagtgctggaattataggtgtgacccaccacacccagcctggggtcattttaattttaacgtactaatgaaagaagtctgaactccctccctacctctgaggataatttccttttactagg

SEQ ID NO: 353893 - DNA, 122 bp, Homo sapiens
tgccgtgcttgcggctcagcgggtaggccccgatggccgccaggatgctgcggtggcgctcggggtccatctccgtgtagtacatctccagggtcagcggcgtgcagatcttgtgctgcggg

SEQ ID NO: 353894 - DNA, 122 bp, Homo sapiens
tttgcgtggctccgatcgactcaccctgcagacaagctttcgggtatttgatgtaagacacggattttgtgcacaaggaccagacggttatccgcagctgttgggggaaaggggaaagagaa

SEQ ID NO: 353895 - DNA, 122 bp, Homo sapiens
agtagcaaacctggaagcacagaaaggcagatcccaagcagaggaacacttacagcgggccgtgacccaaccacagtcacttagcctgagtggcgggtgaggcagcagacaacagaatatgt

SEQ ID NO: 353896 - DNA, 122 bp, Homo sapiens
gcaggtggcatgcactgtcccagcccagccactgtgccccagctccttccacctgagctccgtggacaagggcacagccgtacccgccttgagctgctgtgaggtcatgcattggcctggcg

SEQ ID NO: 353897 - DNA, 122 bp, Homo sapiens
ttgaggtgtctgtgaggagagggaggcaggaaacgcaggcacacgcactcacagtggacgcgtctttagaaagctgcacattctctaattgagttaattgttcacgcactgaatggagctgt

SEQ ID NO: 353898 - DNA, 122 bp, Homo sapiens
gtgtgggccctcaggcagccctgaagcctggctgggtcatcagatgggggcagcctgtgacgggcaccagcggcctgattccagggaagagttcctggagggtgttggctgtttttgttagc

SEQ ID NO: 353899 - DNA, 122 bp, Homo sapiens
gcaggcttggcatggttggccggggcgggacgtacactgggtcgccgctagctgcaccttcgcacagatgcctccgagcagcgggtgggcgtgggccgcacagcgcggcagggccttggcta

SEQ ID NO: 353900 - DNA, 122 bp, Homo sapiens
ggcctggaggttctgacaagaattagagcggcggccgttgccccggggatgacctggaagcgaaagagaccggcacgaattctagagtttcggggtttccgcgggttgagattgtacgggaa

SEQ ID NO: 353901 - DNA, 122 bp, Homo sapiens
ggggcagctgtggccgactgggcgacgctgacgtccagcctcggttttcccctacctcctcggtctccacagcgcctcctggcgcccatgtcaccgttctaccaagattgtccctcccctca

SEQ ID NO: 353902 - DNA, 122 bp, Homo sapiens
tgtgctgagaagaatgctgctccgcctttaaggtgccccccaggtctgtgctgaacagaacgcagctccgccgtcgcagtgccctcagcccgcccgcccgggtctgacctgagaagaactct

SEQ ID NO: 353903 - DNA, 122 bp, Homo sapiens
gcgctccaccgagccggagggcagcccaggggcagcagccccacagtggggcctgaacagcgtccgcggacccgacccgcgctgcggccgcgctgccccgctcctctgggcgcctccccgag

SEQ ID NO: 353904 - DNA, 122 bp, Homo sapiens
acacgtcggaccccggttggccaatcacaacaggggggcgtggccttaccttctcctgctcgccctcagccgcggagcctctgcggaggctgagccccgcgaccggagcgccgctctccgct

SEQ ID NO: 353905 - DNA, 122 bp, Homo sapiens
tgcaccgcgcctgcgcatggtctccaaaggctgagcgagggcctgccagtgcgcatgctccgctctttagcgcttcctgagcaaagtttgaacgcctctcgagtccagttggcttatgcgca

SEQ ID NO: 353906 - DNA, 122 bp, Homo sapiens
gtagcaggcgaggagtggcaccagtttggggactctctccccgcgttctgtaagaatcggcggcagccagcaggcggggaggcgggggcacgtgtttggatgtgggtgcttgtgtaaccagt

SEQ ID NO: 353907 - DNA, 122 bp, Homo sapiens
tatgcgtttttcacttccattttttaatccttccagggtgaaaatttcaaaaggggcgaacgtgggtgaaagaaacgaagaaggggagggaggagacatgatgcctgggatttctgccatcc

SEQ ID NO: 353908 - DNA, 122 bp, Homo sapiens
cggcacctccggcatctccaactcaggctaccagcagaacccgtgctcgcttagctgccacggagacgcctccaaattctatggctacgaggcgctccccagacagtccctttatggggctc

SEQ ID NO: 353909 - DNA, 122 bp, Homo sapiens
atttataaagaaaataagtgtatttggctcatggcctggaggctgggaagtccaatggcacggtgacaccttctagtgagggcttttgtactgtgtcatggtagagggtgtcacatagcaag

SEQ ID NO: 353910 - DNA, 122 bp, Homo sapiens
tttcagtttgcttgtgttttgttttaggcttcttaggacttgggccggatgcttttatcacgtttgaagaatgaatagctgtgcgctggaaactacctgctaggcataactcattaacgtta

SEQ ID NO: 353911 - DNA, 122 bp, Homo sapiens
cagcaggagcagtccgtggcaccgcaatcaggggtggcgccaccccgccccgggcctcagcgaagacctccgcccggccaacatggctggcgccgcctctgccacgtcaagaggaggggacg

SEQ ID NO: 353912 - DNA, 122 bp, Homo sapiens
agaacctgaagcgccactccatcatctccgtgctgccttggaagagaatcgtggccgtgtcggccaagaagaagaactccaagaaggtgcagcccaacagcagctaccagaacaacatcacg

SEQ ID NO: 353913 - DNA, 122 bp, Homo sapiens
gcgggagctggggcaagagcactgactctgagacagcagcctccgctcactatttgaaggcggggtggcggggggccttgaaggagagcgaagtgcgagagaactcttcaggtgtcaccaag

SEQ ID NO: 353914 - DNA, 122 bp, Homo sapiens
gggagcctgaagattcccaggtcgcattgagagacctgatgcacaggttcaataccacatcgatctagaagtgacatgttctgaccaagtgtgatctgttcaaggaaagaatttcagaccac

SEQ ID NO: 353915 - DNA, 122 bp, Homo sapiens
tatccttcatattggtaaatatagccaataacttactaagtagcagaatccatgtaagatcgccataccaggaagatctgaattctagctctgccacttgctgttgatgtgactctagaggg

SEQ ID NO: 353916 - DNA, 122 bp, Homo sapiens
caagcagggtggcctgggactcttaagggtcagcgagaagagaacacacactccagctcccgctttattcggtcagatactgacggttgggatgcctgacaaggaatttcctttcgccacac

SEQ ID NO: 353917 - DNA, 122 bp, Homo sapiens
gcccaggttattttcttggtccataagtagaagattacctgtaaattatccaggatgattcggagggagtgcacctgtcgccgaacagcacctgaaaacctttcataggttgcagcatcgta

SEQ ID NO: 353918 - DNA, 122 bp, Homo sapiens
cgcgggggggtaagtgggggggcccggctagccattctggaagcggccgggcgcagtcttcgtagcgtacccgccggctgcgaggcgcagggcggaggcggagactgcgtggcgcaggcgcg

SEQ ID NO: 353919 - DNA, 122 bp, Homo sapiens
tggcgagccagccaggagtctccaggaaagacatctaggtcatcacgtggtgagtacaatcggacctctttcacttgctattgtgtcctgtccttccttggaatttggaggctaaacaccgg

SEQ ID NO: 353920 - DNA, 122 bp, Homo sapiens
aatgtttaaagcactgtttggaagacatctgagcaaaaggcctgatggagaaactgatgacggcagatttcctctgcagaactggcaggtgttccctcgctgagccggcttcaggccctgct

SEQ ID NO: 353921 - DNA, 122 bp, Homo sapiens
ggcaatctcaaaaggaaaatgactccactggagtgaacttttgtaagccaacagattcatcgtaaatctaatgatgaactgtcctaatttattaccacaagtccaaaaaagggtatatgcac

SEQ ID NO: 353922 - DNA, 122 bp, Homo sapiens
agcctcggaggtctgctctttcggggcttccccgggactgggacagccgcgtccatcatgcggggatgactgcaggacccatgtgatcagcctcaagcactaggagctatcccaggacatga

SEQ ID NO: 353923 - DNA, 122 bp, Homo sapiens
cctggggacacctcgaggctgaaggggggccgcggacctccgccgcccagcagcctgtctcggaagaggctgctgattgcggccaggatcacccgatgcaccccgtatacccgccccgcgac

SEQ ID NO: 353924 - DNA, 122 bp, Homo sapiens
aaggagagcgagatgaatgccatcgcggccgacatgtgcaccaacgcccgccgcgtcgtgcgcaagagctggatgcccaaggtcaaggtgctcaaggctgaggatgacgcctacaccacctt

SEQ ID NO: 353925 - DNA, 122 bp, Homo sapiens
actttcatctagtctccggggcaaacccctgggtaacccaaaggccatcagacggattcgcgtgctgggctttccactaccttaggccacgtgtcactatggagcgaagatcaagaaggtcc

SEQ ID NO: 353926 - DNA, 122 bp, Homo sapiens
tatttacctgctctgctaatgtcattttttctctgtaaaatttcactgtacaaaagtttacgttcaaaactctttatattacggcttggcctagactatcttaaaagtgctcagaacactta

SEQ ID NO: 353927 - DNA, 122 bp, Homo sapiens
tccagacatgagctgggaagtggacatccgcctgccacggtgaacgcagataggcaagtgcgggaatgagactcaggtggtcactgaagacatgaaaatggatgaactctccacggaggaaa

SEQ ID NO: 353928 - DNA, 122 bp, Homo sapiens
taatttccaccaggatgaatttccttctcatcactctgcctcaggtagtgctctgaaggtcgtcctttctgaacaaacgcagcaaagcaagccacaccatgggtgagatcaaccaagttgcc

SEQ ID NO: 353929 - DNA, 122 bp, Homo sapiens
ggtgcaagggaagcgcccccgatgcaagcactgggggagggggagctgcctccaggggcgcgaggtgccagtgccccagactggccccgtcactcaccggcaggtccacgctcacttcggtc

SEQ ID NO: 353930 - DNA, 122 bp, Homo sapiens
gcacggccaacagaccgatgggtgctggcgaggccctgcggagagtgctggagtgcctggcgtcgggcatcgtgatgccaggttggggccttgtgctttgcaggttgcagggaaaggacagg

SEQ ID NO: 353931 - DNA, 122 bp, Homo sapiens
ggcccggaagcgctcgcgcaggagaccccgggtgacggggcccggcgccgctaactggagcgaaccccagcgtccgccgacatggcctggaccaagtaccagctgttcctggccgggctcat

SEQ ID NO: 353932 - DNA, 122 bp, Homo sapiens
cacccgcagctgccgacgaccctgccagtcacgccgccgccggctgcctttttttagccacgacatctgaccctggcttcaacagcaccgttctgggagagaggtcccagggcgcgcccgcg

SEQ ID NO: 353933 - DNA, 122 bp, Homo sapiens
gttgctcccgctggcgatccgcttctgtcagtctcgctgctggtgtcgttgagtgtgtttcgggatgtccttgcgcctaacagcagtgaggcgcagaattggcccacgccctcacctgcggc

SEQ ID NO: 353934 - DNA, 122 bp, Homo sapiens
gcgctctcagtttatccactccatctgctcttaatttacaggacagagagcaacaggacccgggagtcaggctgtcagccgcacagcaaacacacttggtctctttcgggtcacagtgccct

SEQ ID NO: 353935 - DNA, 122 bp, Homo sapiens
gttggaatgctttgatgtcaaggctgggacaaaggtttccaaagcagttgaactctttgacgagagattgacaaattagcatgaactgttcagtgtcaatcaccagatatgccaggagtagg

SEQ ID NO: 353936 - DNA, 122 bp, Homo sapiens
gcttcggggcctgtcacacgtgttgtccgtgtgcacagatgggcttcggagcctgtcacacgtgttgtccgtgtacacagacaggctcctgggcctatcatgtgtgctgtctttgtaaacag

SEQ ID NO: 353937 - DNA, 122 bp, Homo sapiens
taaatgttaccctgacctcagctaacatttgtgtttcacttttctccgggacccaggggacgtggatgccagatgagtccacctcctctccctgctcttcccgcagggacagagcctgccag

SEQ ID NO: 353938 - DNA, 122 bp, Homo sapiens
tgtattgacatagatagcttggattaggctgcactaacaaaaacctcaagacttcagtggcgtaacagaacaaaacttgacttctcattcatgtgacgtgtccagcatgagtgtacaggaaa

SEQ ID NO: 353939 - DNA, 122 bp, Homo sapiens
acgcgtgggttcgatctgacagcagcctgtgccatcatagctactgctcatgcatgcattcggggtgcccaaagtgatgctgaggggggcattcctagattcaaccctccaggagaccatga

SEQ ID NO: 353940 - DNA, 122 bp, Homo sapiens
cgttgtagcaatggggatgtggtcaccacaatcggacgcgtgctggcggggacgccttaacgaagacaagtgcaggcctcacacccagaatcctctagggaaaacttccttaactaatgact

SEQ ID NO: 353941 - DNA, 122 bp, Homo sapiens
ctttcacatggcggtcaaggcaaacgagacaggaaatcacaacaatcacaacaatcacaccgagatcggagggtgagcttcccgaaggctcgttctgggctgattcagagccgcgtttccct

SEQ ID NO: 353942 - DNA, 122 bp, Homo sapiens
ctggctgccagagacccggaagcatcgatcggctctgtgctcggcttctagacttgtcggcgctcgattgaggagcgtggctacgttgcttccggtgcctggctccgtttcctgcttttggt

SEQ ID NO: 353943 - DNA, 122 bp, Homo sapiens
gcagggcctgcgcctccctacggagcctttgtttctggcgaccgtccccacccgggctcgcgtctccgtttctccgagaggcccaaggtgtctccgccgcagcctctgtcgcgccgtgacct

SEQ ID NO: 353944 - DNA, 122 bp, Homo sapiens
taaaaattgtattgtttgcttattagccatgtatctcttaaaattttgttatgtttacaacgatgtaccttattggcaacaagttattagtttgatgtttaacaatagtgcctttagtaaat

SEQ ID NO: 353945 - DNA, 122 bp, Homo sapiens
aatgccctctttgtctctctccttcccaccagacaagaccagcctcctcccacagccatacgttgacaacacgtgccaaggcctggggcaacagggtacccagggtgaagggctcacccaag

SEQ ID NO: 353946 - DNA, 122 bp, Homo sapiens
cgccaaggtcaagcttcccatcctaagaatcacagacagcccggccatgcaccaccacttcgagcctccgaccaactgatagctgctggtcccaagtagcgctaggattttcgctttcccag

SEQ ID NO: 353947 - DNA, 122 bp, Homo sapiens
ccccagactccgacatgtttacaccccttcacaaactctggaggaccgacgcgggtgtatcgaatttgtcctttcttttctctttttctgtttttagtctgagttttgccgagctccccgcc

SEQ ID NO: 353948 - DNA, 122 bp, Homo sapiens
gattctggagcctgggcagcacaaataaaggctctgactggctctggtttgggaaatctgcgtcttaaagacctttcctccattacaaatattctccccattcaacaaccagtttggaaatt

SEQ ID NO: 353949 - DNA, 122 bp, Homo sapiens
aaaactaacccaaagtacaaaaaacaaaacaaaaaaaaaaaaaacctcaccccagcgaggcggtgcaacagccccaaagcagaatgcgctttggatgcagactttgggcccaggcccacgtc

SEQ ID NO: 353950 - DNA, 122 bp, Homo sapiens
agagcacaacgtggggctgcaacggcttctgctgccacaatcatccatcctcggccaactcgatcttgggagagggcttcctgcccgccccatcctgtgctttggcgtaggccatcactgaa

SEQ ID NO: 353951 - DNA, 122 bp, Homo sapiens
ctgcaggctgcgaggcacacccagaacctcatgccttgagatccaagcagagcggcgagtcgccgctcctctcccgccagaatttcctccacacgggcatctgcatttccagaggactgtgc

SEQ ID NO: 353952 - DNA, 122 bp, Homo sapiens
ctggccaaaatggtgaaaccccacctctactaaacatggaccaatgatgaccactggtggcgtttgagtcatggacgatgaatactacgtgtctgaaactctgaggtccaacagaaaacata

SEQ ID NO: 353953 - DNA, 122 bp, Homo sapiens
atggtggcgaccgagagtagcgctgatgccctaagttttggtgacactctcagtgagagccgtttgggctaaactcccgcactaggtccaacaaaccaaaccagaatggccttactcatacc

SEQ ID NO: 353954 - DNA, 122 bp, Homo sapiens
agggttggtggagactacttgaggcaccaagagcaggaagggtggggcctgagtgccaggcggcaggtggaacacagctccaggaatagggaaaagggcttcgcgttctagctcactgcacc

SEQ ID NO: 353955 - DNA, 122 bp, Homo sapiens
tgagaattagcagaatgttacagttctttaacaatttgcgtaacaaaccgaggcgtcctacgccatctcgctgaaatgaaattcggatgtagacacccttgcgcttcaggactctacgctct

SEQ ID NO: 353956 - DNA, 122 bp, Homo sapiens
attcgtgctttctccaccactaccacaggctactatccacccctctatttttttatttagcgatccccacgaccaaacgggtcataatattttgtatttggcttgctctggtttctgctgga

SEQ ID NO: 353957 - DNA, 122 bp, Homo sapiens
ctgtggaaactggagcttcgcgctgctgcctctgattccgcccttttttgtggacacacgcggggtggatttgggatctccgcgcatttgcacctttgtttgcctttgcttagggatgttct

SEQ ID NO: 353958 - DNA, 122 bp, Homo sapiens
gcacctctggaaatctaatgcgacacactccgagagaaaatgtattcccgggctcggcgccgcggccgacggaaaatgtcccctccccgcccttcctcattgccattcactcagggcgacat

SEQ ID NO: 353959 - DNA, 122 bp, Homo sapiens
gtcggagcggccgccggccccgggactgaccggcctcgccgcacctcccgcaccgactagcgctcccgggcgctcctgcgcccgactcgccctcgcccccactccccggcggggtggcggcg

SEQ ID NO: 353960 - DNA, 122 bp, Homo sapiens
ggggcctccacatctgcgttcctgcagggcgctgagggaatgcccctggctgggcggccccgcccctgctgggatccaggccaacgctccacaaatgagagagcttgagcgcgcggcgggcg

SEQ ID NO: 353961 - DNA, 122 bp, Homo sapiens
gacttttctttcacgatttcattaatttgaaagcacacaggaaagttgctccattgataacgtgtatggagacttcggttttagtcaattccatatctcaatcttaatggtgattcttctct

SEQ ID NO: 353962 - DNA, 122 bp, Homo sapiens
taatgctgtttcgctttgaaagggggctcattttgtaaggatgtggcagaaaggcctccccgcccctgcacctgtggtctgtgtgtccagcacgcgcagtgatggaaaggtcagtccccagc

SEQ ID NO: 353963 - DNA, 122 bp, Homo sapiens
actcttacactaagtacactctagaggaatttataatatgctttaggaagcttcatgtgtcgaaatgcattttgttttcaggtgttcccatggcggtactgtttccgcagttttaagtagtt

SEQ ID NO: 353964 - DNA, 122 bp, Homo sapiens
tctctaggggcatgtgtgtgtgtttcccaatgagagactgggtttggcatgggaagagggcggaaggtaaagctaggtataaaggagcagatataatgtaaggcttattttcatcctgtttt

SEQ ID NO: 353965 - DNA, 122 bp, Homo sapiens
ccgcactcgccctcaccccatccccggacgctgcagccacactcgccctcaccccgtccccggacaccgcggcctcactcgccctcatcctgttcccagacgctgtggcctcactcgccctc

SEQ ID NO: 353966 - DNA, 122 bp, Homo sapiens
caaggctcctaggcagagatgccaagaggcggcagctctgtgcaacccatcatggggcagcggaaggatgggcccagacacagatgctgacaaggttgctctaggtgtctgctaagaacacc

SEQ ID NO: 353967 - DNA, 122 bp, Homo sapiens
ttattctcttatctggccccacctacatcctgctgattggtagagccgagtggcctgtttcgtcagggcgctgattggtgcgtttacaatccctgagctagatacaaaggttctccacgtcc

SEQ ID NO: 353968 - DNA, 122 bp, Homo sapiens
cgtgccccgcggagtggcagccttgaggaagcagtcttgtggtctcctggccccagcgctcggctaaccatggccgaatggaggttgggtgccccccagggtggtttccagggcgatccggt

SEQ ID NO: 353969 - DNA, 122 bp, Homo sapiens
ctgcatattctgctttgcttaaatgctatgcaaacaacatgaaacaacatgtaacaacaccgaagaaacttttcctgtgaacattagtttgaggagctcatgctgaactaaaacacatctga

SEQ ID NO: 353970 - DNA, 122 bp, Homo sapiens
ataagctctcagcctcatgggtgatggagacttagctgattataataaacacaatgcggccgggcgcggtggctcacgcctgtaatcccagcacttggcgaggccaaggcgggcggatcaca

SEQ ID NO: 353971 - DNA, 122 bp, Homo sapiens
ctgaaatgcatttttccacactcccgctccctcgcgtggagactcactttccgatcacctcgcacagctcgtacacatcctcgaacagcacgtcgtcgtcggccatggtccggaggggatag

SEQ ID NO: 353972 - DNA, 122 bp, Homo sapiens
ccagggggcgcggaagccctcctggtactaaggcggggacaacctgcccagcgagcacagcgggcagaaggaagtgtgccggacgcgagagagaactacggccgagacccgcggggccggct

SEQ ID NO: 353973 - DNA, 122 bp, Homo sapiens
gagaagttaggtgacacatcttcagtccctctccggggcctccactggctggggcagtgacgccggtaacggggagcactttaatgctggtcattatcgctgagaacgccttcctccccagg

SEQ ID NO: 353974 - DNA, 122 bp, Homo sapiens
gattgatcttggtgtctcacagctgatagaggcagaagaaaatccacatataagtggacgcgttcagttcaaaccgtgttgttcatgggtcaactgtactttgaaaagtgctccctctggtg

SEQ ID NO: 353975 - DNA, 122 bp, Homo sapiens
cctggctccacctgcaggcagctctgatgcccgtgcagcagctccttgggcagcagtggtcgaactcgcagggcaacccgcactggggcctcctcagcccctggcagcctctgagcctccag

SEQ ID NO: 353976 - DNA, 122 bp, Homo sapiens
gtgatggactggcagcggacgtcacaggcagccagcagtggggtccagccttcggcattgcgggcatcaggacatgccccccgtcttagaagcagatctgccagctccacatggccaagccg

SEQ ID NO: 353977 - DNA, 122 bp, Homo sapiens
cacacgaggcaggcgctcctaaggaaaagggggcggccagcggcccccaccgctgggtcacgctatcccctctgccagaaccactgggccactgggtcccgttagcgttcactctgtcagac

SEQ ID NO: 353978 - DNA, 122 bp, Homo sapiens
agtactgccgccgcagtggccactgccatcgtcaggcccgagggcccaccggcccctccacgggagttccgcagccgccgccttaccggaacccaagagaccacctgtacgcggagaacgct

SEQ ID NO: 353979 - DNA, 122 bp, Homo sapiens
aagacacactcgcggccagtgagcagatgaagaggtgaaagcaaaccagggccccacggccgctgcacccctgggacgcccagagtcaaaaaaacagcaaaacacgggtggaagggtgcgcg

SEQ ID NO: 353980 - DNA, 122 bp, Homo sapiens
tagcatggagattgcagcttgctaactagatggcgcactgttatttggtgttctctgctgcgtagcgcaggagtataaactgagcatgtagctgcttgcgaggtgttcttcaacatttacaa

SEQ ID NO: 353981 - DNA, 122 bp, Homo sapiens
gcgcacaccctgtgcatccacactccaggccgctcccaccctctccggagcgcacacgcgcgcccctgacctcagggatgcttgctcagaaagcttgggacacgtctttactgagactctcc

SEQ ID NO: 353982 - DNA, 122 bp, Homo sapiens
agattgcagcccctgcccggccgccaccccgtctggaaagaagtgaggagcatctctgcccggccgcccatcgtctgagatgtggggtgcacctctgccccgccaccccgtctgggatgtga

SEQ ID NO: 353983 - DNA, 122 bp, Homo sapiens
cttatccttacgggaagcatcttgactggatattcaggtcagggacagtgttcctcagcacgaggctggccttcagcacagaactctccagggaggggcagggctgggtgagcaagtgcagg

SEQ ID NO: 353984 - DNA, 122 bp, Homo sapiens
gctaccccgagtggagcgccggggcggcaggcgtgggatggctgcgggtggcggggccggcggagagggagctgcaccgggcggggcactgggactgtggcgggcacccgcgccgggggtcg

SEQ ID NO: 353985 - DNA, 122 bp, Homo sapiens
ggctgactgcacaacaaaagattacctgaagggctcatttaaatgacaagctcacctaaacgttttaaatagtatttaaattccaaaaccctgatttacagaaaaacctggaaaatgtgctc

SEQ ID NO: 353986 - DNA, 122 bp, Homo sapiens
attccttggactgcatgcctgctagaggaaaattaaagagcagcagccaaaatggttaaacgtcaacctggatgttgaagcactgatctcatggacttttcttggttagaatcgacccataa

SEQ ID NO: 353987 - DNA, 122 bp, Homo sapiens
gaaagcccggagggactagaatccttgcattcgacaagtttgtcggcaatttccgtcagccgaccagagggcggagctgaggtcggcccagcccggaggcgggaaggacaacttggacccgc

SEQ ID NO: 353988 - DNA, 122 bp, Homo sapiens
gggaactgcagagtgggactggtggctgggaaggcggctgtctcctcccccaacagcaagcggggaggccccctcttctcctcaccctggcccaacctctgtgagaggtcagggcagagagc

SEQ ID NO: 353989 - DNA, 122 bp, Homo sapiens
ccccgcccgccagcccaggcggccccagcagcagcgaccagaggagcccctgcagcagcgcgacggccaggtggacgcctccatctacagcctcatggcggacgggacctgttaggacacag

SEQ ID NO: 353990 - DNA, 122 bp, Homo sapiens
tctccctgcgcccgcgcacgtgcccgagggtggagaagcccacttgtgccaacggctacccggctgtgaaggtggctgaccaagatggctgctgccatcactaccagtgccagtgtgagtgg

SEQ ID NO: 353991 - DNA, 122 bp, Homo sapiens
gacttaagtcttccttggacttaactgtgcttcctgattgagagaattcatgcgtttcaccgattccctacacagtcttagccattatatttcaaaatacagcatcttaccattctctccat

SEQ ID NO: 353992 - DNA, 122 bp, Homo sapiens
tgttaggccagaccggctgtggaggtgcaggcagggccggcagggacggggttaagagcacggcgcctcccaggcctccctcctcgttccctttgaaatggctccctggttccagaatgact

SEQ ID NO: 353993 - DNA, 122 bp, Homo sapiens
cgcggggtggcaggggtgggccgggggcggggccgcgggcgtcggggaggtggcagtgggcgcagggcggggcgagctcagcggagggcgggtttgaatgtgccccggcgggagagggaagc

SEQ ID NO: 353994 - DNA, 122 bp, Homo sapiens
aaaaatggctggacccccaaaaaactcaaaatagaaaagtcagccaggcgtggtggctcacgcctgcaatcccagcactttgggaggctgaggcaggtggatcacttgaggttaggagttcg

SEQ ID NO: 353995 - DNA, 122 bp, Homo sapiens
ggggctcctcacttctcagacggggtggttgccaggcagaggtgctccccacctctcagacgatgggcggccaggcagagacgctcctcactttccagacggggtggcggccgggcagaggc

SEQ ID NO: 353996 - DNA, 122 bp, Homo sapiens
gagaaggaggcctgcagaaggaagagcaggcccttagaagtccagcagcagcaactccggcggcccacagtcagattcagcacctgcctcagatctccacgtctgtctcagctgcccctctc

SEQ ID NO: 353997 - DNA, 122 bp, Homo sapiens
ttgagggagtttgaagagcttcataggcggctggatgaagagcagcaggtgttgctttcacgactggaagaagaggaacaggacattctgcagcgactccgagaaaatgctgctcaccttgg

SEQ ID NO: 353998 - DNA, 122 bp, Homo sapiens
cttctctgatgttgtgcttccgctcctgctctctatggcctgagaaggaggtgaatatttcggtggaacccaagttaaacatgtgtctgtgggtccatgctgctgggaaaagctatggtatg

SEQ ID NO: 353999 - DNA, 122 bp, Homo sapiens
gctgccagggaacgccacggactggatctgggccggcctcgacccggacacggactacgacgtggcgctagtgcctgagtccaacgtgcgcctcctgaggccccagatcctgcgggtgcgca

SEQ ID NO: 354000 - DNA, 122 bp, Homo sapiens
ttcccagccaacaagcctcaggttcaggccatctgatccctaacccggcacccctgggctcgctgggtccagcacacttgggcactgccctgacctccttggggaggggccccggtcacaga

SEQ ID NO: 354001 - DNA, 122 bp, Homo sapiens
acaccagagaaagcccggagttcatgtgaccagctcagtgcagcccgggttccagggacgcgggctgtgcttccaaggggagccagggggttgggtgcttttgtgaaatgcccgagtgttgt

SEQ ID NO: 354002 - DNA, 122 bp, Homo sapiens
ccgagtatgagagtctccctgccccacccggcccttctcagctaccgccttgcctccttccgctgtcatccagctattagggagctggccacactagacaacaggccctggtcacccctgct

SEQ ID NO: 354003 - DNA, 122 bp, Homo sapiens
gccccaccgccaagactcgacggcgggagaagtaacgcgagagggtgcctagggcgggggcgaacaccagggcccaaccaaagcctgcgaatgaataggaggggatgggggccggcactggg

SEQ ID NO: 354004 - DNA, 122 bp, Homo sapiens
attagagacacgtgcaaagtctctctcctaaatacattgaatgcacattacagacacacacgttgtctcagcaccccacaaccgactcggtagccaagataatgatctctaagtggagtctg

SEQ ID NO: 354005 - DNA, 122 bp, Homo sapiens
gggaaatgatgtgattggtttgggtcagctcagttaagctgctggcctgtatcctgggggcgacatctgggctgagataaggttagggagacatcagcactgaggaagtagaggaagagagt

SEQ ID NO: 354006 - DNA, 122 bp, Homo sapiens
cccgaagaccgagaagtcgtaaagctcctcctcgcagtttatgtgcggcggcggccgggccgaagcctggggacacagaactgccagctcagcagccggttacatcccgcccggccacccgt

SEQ ID NO: 354007 - DNA, 122 bp, Homo sapiens
ttctccatccttcaccctctactgccaggtcgtctgacccagcgacaggcgcggtaaatgcgcgaccaaaccgcagaggtcccatgcaatctcatgctgacaggattacaggcatctctgta

SEQ ID NO: 354008 - DNA, 122 bp, Homo sapiens
ttttcctcgccagaaagcggttcgacaattggtccttcttttggcccctcctgcgatgcccgcggattggacggctgagtctggctacgcgggcctccgcgggagcgcgaccgggccaatca

SEQ ID NO: 354009 - DNA, 122 bp, Homo sapiens
gacctaaaagtcgctgtttcactaagctttggaacccgactccaggaaatctcattctttcgtcccaaaatttcaaccgtaaagagaaatccgcgcggcggcctcttcaagcgcccgggccg

SEQ ID NO: 354010 - DNA, 122 bp, Homo sapiens
ctcatttaattcaataattgtacaacccatagaataagtttgactactttcatttctcctcggcaaaaacagactcaaatgttttactaccatggtagtgcctggatttgaacccaagtggc

SEQ ID NO: 354011 - DNA, 122 bp, Homo sapiens
caaatagtgatgcctgggccctactccacatgaactaaatcagaatctctgtggtgggggcgtggactcctgcttattttaacagcttccagggtgactctagtgtgcagccagccagagca

SEQ ID NO: 354012 - DNA, 122 bp, Homo sapiens
tagtaacaattctggatgtatattctaatttggtgagcttttctttacactgaaatgttacgatggaactttggtaaattcaacctgcatacagggccaattctcattaaaatgacagtgaa

SEQ ID NO: 354013 - DNA, 122 bp, Homo sapiens
tgtgctgagaattcggccctcaaggccaggttctgacggccacgctcacagccgtcactgcgaaggatgggaaggctggctgcctcctcccacgccctaggtggcaaccagaaaggccagtg

SEQ ID NO: 354014 - DNA, 122 bp, Homo sapiens
acctacacctgcaaaaagacaggcgtccaaagcctggggagggcagcggacaggtgcgcccgcaaacgcgcgcctggaccccggcaccgccttcccaatccggacctcagctgcctgagaaa

SEQ ID NO: 354015 - DNA, 122 bp, Homo sapiens
ccccacacagtgaaagaaatcccagactgttcttctacccgagtccccctgcggcttaggcggtacctgacacaaagcctgggccccagctgggctggggagagcggggaggggagaggaag

SEQ ID NO: 354016 - DNA, 122 bp, Homo sapiens
ttcctgaagcgattcctttaagtgagctccctgagagcagaaactgagcatcggatgcagcgtctagcccaataatgtgccgacggagtgtttgattatcttctgtcataagcacgtcacat

SEQ ID NO: 354017 - DNA, 122 bp, Homo sapiens
agccacgtatcctagttcccgccccttccggccttatgattggttcgacctgagcgccgccgggcagctgtctcattggtagagtgcgcactccaaattatcgcagggggcggggcttcagg

SEQ ID NO: 354018 - DNA, 122 bp, Homo sapiens
gtagctaagagtgttgtctgaagagcttgcctgtatgggtttttgtgcagtggccctatacgtgaaggttgtggggaagatgggtcaatctggaggaagaatgagtgagtcttagccagaac

SEQ ID NO: 354019 - DNA, 122 bp, Homo sapiens
tcttctcgaaggtggagatcttggatttctgggccgtgagggaaggggtgatgcacacaccgttactaggcgcaccagggaccaagcaccgcataccctgcacaacgtgggttggggccttg

SEQ ID NO: 354020 - DNA, 122 bp, Homo sapiens
ccgcagaagcgaagcgcgcagccccaatcggactacaatttccgacgggccccgaggccccgccccgcactacgggttgcaatgagggccaactccactttgggctccctatccggacaggt

SEQ ID NO: 354021 - DNA, 122 bp, Homo sapiens
cagctccactcctggcttttcgcctgcaggacagaggggcctggagtggcctggccctgccgtgggcagcatggcgtgggcatgcaggtgaggcctgcctgaggtgcccaaccccctttctg

SEQ ID NO: 354022 - DNA, 122 bp, Homo sapiens
atcatcttttaaccctccggagcacgtcagcatccagccaccgcggcgctctcccagcagcggaggacccaggactatcccttcggcgagacggatggaaaccgagccccctggaggacctg

SEQ ID NO: 354023 - DNA, 122 bp, Homo sapiens
tacgacatgagcatttcattttgtattggctggtacacagtaaatggagcaagcgggagccggctgatttccagagagacagaaaactcgaaaactgcagctgagagtcatttattccctcc

SEQ ID NO: 354024 - DNA, 122 bp, Homo sapiens
gtgagccaccgcgcccagcctcacttttttttttttttttttttagcctgcattcattcgcgtgtatatgtgcatgtgtgcacatcggttttgagtgggggagtgacattggcatatgcgtt

SEQ ID NO: 354025 - DNA, 122 bp, Homo sapiens
tttgggtatccatatgtgcacagctcatcaaaaacggcaacggcccgcacccgagggcctcggcggtccccagataggccatctggagttggagggaaaacaaacctcggcgaattgtggga

SEQ ID NO: 354026 - DNA, 122 bp, Homo sapiens
atttccggatgggcgccggaaagggcttctctctgggccccggggggctcaggaaggccacggcccaatgcatgtcacacccctcggagcacagagggacggggcttggtcaggcccagggc

SEQ ID NO: 354027 - DNA, 122 bp, Homo sapiens
tgtttctgaatgacaaagaaacacataactattgacttcagacaaacctaagcacatgaacgagggactctgctgccctgggatattggataattaggatgatcattcctgttgtcttgaaa

SEQ ID NO: 354028 - DNA, 122 bp, Homo sapiens
accggcgtcctctggtggcagagagagagcgctactggcgattttcggaccgaatcggcacgctcgtcagatccaagcaggcgggactggcctggagcaaaaagaaagagagaggagggcgt

SEQ ID NO: 354029 - DNA, 122 bp, Homo sapiens
aaaaacaataaaagtggagcccttgaatagagtgggtaggagccttggctccagagaaaacgcatatatgtgcataggatcagaatgaaatgtcccattttaagtttaccttccctgctatg

SEQ ID NO: 354030 - DNA, 122 bp, Homo sapiens
agcttgcagtaagccgagatcgcgccactgcactccagcctgggcaacagagccagactccgtctcacaaaaaaaaagtaggcattgagtgcttatatggtaagcactgtgttaagcacttc

SEQ ID NO: 354031 - DNA, 122 bp, Homo sapiens
acaaggggttaacccagtctgccagccaagccaggagaaaaggagctgactcccagatgccgctgccagtaaaattaatcctggagcttagcttctggatgcttcacctgccaggtgggccc

SEQ ID NO: 354032 - DNA, 122 bp, Homo sapiens
gcagcggcgcaagttgcagcgcatggtggccggtggcttggcggcgggtgagcagtgcgccgggggcagcgtggcgcggtggtctgcgctcttgcaaaggaccacgcggtggcggaggcccg

SEQ ID NO: 354033 - DNA, 122 bp, Homo sapiens
gggtgtaacgctgcggtctgaggaccctgaaccctttttccttccttaaaaatgagatagcggccaggcgcggtgactcatgcctgtaatcccagcactttgggaggccaaggcagaaggtc

SEQ ID NO: 354034 - DNA, 122 bp, Homo sapiens
tgcccggccctccagatgcatttttaacagctgaattcatgtgtgaaatgacgtaaggtccgcgtagtccttctttctcagagaccagcgtgcgaggcccaagggacccaccttccgtcacc

SEQ ID NO: 354035 - DNA, 122 bp, Homo sapiens
cactatattggagatcaatgcgggcaactgcagccattggaaattgagaacttctattttcgggacaaaattctcctgttgtgaagatagatgactcaagaaaagtctatacatataactcc

SEQ ID NO: 354036 - DNA, 122 bp, Homo sapiens
aagtgggccaactctttttaggatctgatctgaatcccagagggaccacatctcctcccacggaccagggctaggcagcctcctgtttcagtcaagagggctgaaggtggtgttttccctcc

SEQ ID NO: 354037 - DNA, 122 bp, Homo sapiens
ttctttatcttcagaggagcaggagtttctttatctgcaaactggaggtcacaggcggggcgcagtggctcacacctctaaatcccagcactttgggaggccgaggcgggaggatggcttga

SEQ ID NO: 354038 - DNA, 122 bp, Homo sapiens
cccgatagaggagaagctctccagacaatcttaaatgcacatctttctgattataaatcccgtggccttaactggcttctcttcaagaagttcatatcacaactctgccacgtagaagctgt

SEQ ID NO: 354039 - DNA, 122 bp, Homo sapiens
ggcctgggccagggccctgggggcagctgaggggctttcctgcctggaccccgggctctgcgacctcaaagtcggccacgtggtggcagcagccgcccaggcaccctggtgccacacttggc

SEQ ID NO: 354040 - DNA, 122 bp, Homo sapiens
cgcccactgggagccaaccgttgcagccagttgtccccgcgagcgaggccggagaaggcgcggcggcccctggcctggccatttcgcccttgtcgcagctgaaccgccgactacgagctcct

SEQ ID NO: 354041 - DNA, 122 bp, Homo sapiens
agcaaagctcggtcgggcgtcttccggggtcgtcacgtccggttgccaaggtgactggctcgctaaagcccaacccttatgatgcaatccaatggcaagtgatatttgctatcttttcttcc

SEQ ID NO: 354042 - DNA, 122 bp, Homo sapiens
ttttcaagagtgctgacttctgcatttcttagtacaggattttgccaggcccttgacattcgtttaaaggaagaaagaattctttctccttgaacatctgtgcaaatcagtgggggtgggag

SEQ ID NO: 354043 - DNA, 122 bp, Homo sapiens
gctccatggctcagcattgcgctcagtagttaagatccagaggagaccgagggggctggacgtgggacggcccgagggccggggcagggggtcacctgttgcgcgcgctcagcgcgccccgt

SEQ ID NO: 354044 - DNA, 122 bp, Homo sapiens
attgttagaggcggagcctgtaggagcccgctgtgacgggtggagcccagggctggtaatcggatcgcattttgccatagccagcactttaaccacgagggagtcaaaaagtcaccatctga

SEQ ID NO: 354045 - DNA, 122 bp, Homo sapiens
cctcgctctcacataacacagaagagtgcacataatgaacgcagcctcctctctctctctcgaaggcccacctagcctgacagcaggaggggactggggcccacatggaggtagagggctca

SEQ ID NO: 354046 - DNA, 122 bp, Homo sapiens
tatatcagtataaatataaggtccattccctcggactctcacatatgcactaaagacagccgtgggaggtagaaaccagactgaacaattggcctgaaatcaaatggcctgaaatcaaaaag

SEQ ID NO: 354047 - DNA, 122 bp, Homo sapiens
aggaaatgtcatattccagggagagtaccccacccccaccaccactcaccttggaatttccgggagctgagcagtttaggtcagagcgctggggttaaaaccagccccatgttagatgcatg

SEQ ID NO: 354048 - DNA, 122 bp, Homo sapiens
gatggtccctcaggccagtccattggctggactgcagaaatgtctgcagcagatgtgacacgcctcttttatccccctcatttctctgcctccacccatcccttgtccttttctgttttcct

SEQ ID NO: 354049 - DNA, 122 bp, Homo sapiens
gggctgagcgcgctcggccgcttccggtgctgccctgcggtcctcagaggacttggtgctcggcaagcccagagactcaaacaccatgtccccagggggctcctcacgctgtgttcggcggg

SEQ ID NO: 354050 - DNA, 122 bp, Homo sapiens
tgaccggagaagaatgaatttagtttcaaacatactatcttcactgcagaataaataccacgaaggttgtaactagttatttcggttttgttcagagcaacagttcttaagtctttctgcag

SEQ ID NO: 354051 - DNA, 122 bp, Homo sapiens
aaggataatgattcttgtgttaccccaggaacaagacttgcacgaagagattcctactctcgacatgctccatggggtgggaagaaaaaacattcctgttctacaaagacccagagttcatt

SEQ ID NO: 354052 - DNA, 122 bp, Homo sapiens
aaaacctctctgagtttcggttgcttctgtaaaacgagggaattgggcgactggatcgcgcggttgcttctaattctaaaattacaaaatgtccaactgccaggcgagagactacggaagcc

SEQ ID NO: 354053 - DNA, 122 bp, Homo sapiens
tgcatcccatgggtggcttctgagtgacccccggaaaacagctgtccaagtggggggcctcgtcttttccccgaagtgtggccacatggtcctgaggggcctgcaggtcaggctctgggtcc

SEQ ID NO: 354054 - DNA, 122 bp, Homo sapiens
ctcctcccaccagaccccgcggcatgtgaccatagaaccatttcgcccctttccccttcccgggctccctgataatcttaaactctgattggccagtattctgggactttagctccgccctc

SEQ ID NO: 354055 - DNA, 122 bp, Homo sapiens
cgcgccgccgctgctgggagttgtagtccggccgtggttgggggagccgcggctcatgcgcggtgcacagaggcttgtttcacatctgtaacaacaggtgaattgggctttttattctcccc

SEQ ID NO: 354056 - DNA, 122 bp, Homo sapiens
ttggtttccgcgggaacacagaggacaggaggggcgggatctgggttgagttcccactctcgttatgaccttcaacctctcactgttcccaagggctgcacggagcctgctgagtctccaac

SEQ ID NO: 354057 - DNA, 122 bp, Homo sapiens
aagacgcccactggagacagggtcgggtcccactaccgcgcaggcccggctcgcccccgacgtcaggcacggggcgggacccttgcagctgtccgtccagtcccgttccccggaaagtgagg

SEQ ID NO: 354058 - DNA, 122 bp, Homo sapiens
gcgacggccgcagggggggcggccgggggaccggtcgggccgggaccaagggcaccatgtcgtccggggccaaggagggaggtgggggctctcccgcctaccacctcccccacccccacccc

SEQ ID NO: 354059 - DNA, 122 bp, Homo sapiens
tatctcctcgcacgcatcagcggcgtcagcagaggctgttgctaaggcctgtccaggctgcggtgggcacatctaatctacagcccttgccacgtgatctgaccgtccttcctgccctgccc

SEQ ID NO: 354060 - DNA, 122 bp, Homo sapiens
gttttcaggctgggattcccaccaccaacacgacaaggaagtgggcaccccaccagccaacgcaggacctcagggtcacggaaggctcgaaggagaagaggaccagaacacgcttattttgg

SEQ ID NO: 354061 - DNA, 122 bp, Homo sapiens
aactgctgtccgttggtgaaggcagcctcttctgtgctcctcgccgctgacttcctgaggcggacctacctgtggaggcataccaggaaccagacgatgaccccctccaaaagttgggtctt

SEQ ID NO: 354062 - DNA, 122 bp, Homo sapiens
ttctagccccaaacaaaacaggttgagctttttcctcccctcagaagctcctctctggctcgtggctgccttctgagtgttgcagacggcgccggccgggaaggggggcctgggccagccct

SEQ ID NO: 354063 - DNA, 122 bp, Homo sapiens
cggggaagctggcggctccttcttcctccctcagcttgtcccttgccctgaccggacacccggtggggctcagagttaatggggtcacaagagatctaccagctcaggaaagaagaaggtga

SEQ ID NO: 354064 - DNA, 122 bp, Homo sapiens
ccccgggcgcaggtcgcggtcacagtggtgacctgggattgctttcccaggactgcgagtcgggtttgggtttctcctccctgcattccacagctgctctggtcatcgcaacgtgtttattg

SEQ ID NO: 354065 - DNA, 122 bp, Homo sapiens
atgaactcaaaatggccattttcacttgtgtgcagccgccttctccacccgggcgtgtctcgtgccctccctgcctggcccttgtgatggagggctgggcagcttgacctcttgacctcttg

SEQ ID NO: 354066 - DNA, 122 bp, Homo sapiens
tataacagcacttaacacacagcatttatttgcacgggtgttggctttctagccctccagcgactgcttctaggtaggggccctctttcgtttttgcatcctccgagtctagcacagtgcct

SEQ ID NO: 354067 - DNA, 122 bp, Homo sapiens
tgagcaggatctgggaaaaggggacgaagtcagtgccccaggcaccttcccttaagacagcgcagcgttcaaagcccttcagtccttcacatcactgcgggaacatgcgcaattagacatgc

SEQ ID NO: 354068 - DNA, 122 bp, Homo sapiens
cagattgctttggcttcccgcagccaccaggatgccaaggtaccggtttgctgctgcgtgcgccacctcctgagaatgtcatgtgtgccgctggggtccagaagctgctttgctaaccatcc

SEQ ID NO: 354069 - DNA, 122 bp, Homo sapiens
cagaaaaagcacttgcaaaatcaagaccatttcatgacaaaatagctcagcaaacaaaatcgaaaggaatatcttcaatgtggttaaggacacccacgaaaagtttacagctaccctcatat

SEQ ID NO: 354070 - DNA, 122 bp, Homo sapiens
ttagcgtcccggccctcacacggcacccaggcctcgttggggcaaggccttgtgcagacacggtgggatctgcatgtgcactggggcctgtgcctgggctgctgctccccggccaccggtgt

SEQ ID NO: 354071 - DNA, 122 bp, Homo sapiens
cctgaactcacctgggacttgcctggtcctgggttggtccactgtgttaggggagctgcccgttatcttcaaagccccttgattaagataaagacattaaatttggtaaattgcaatctgtg

SEQ ID NO: 354072 - DNA, 122 bp, Homo sapiens
cctcggtgccgtggagactgcggggaacctgctctgcccacacctgctctggcccctagacggaagcacctggagccaaccacggaactccagatcccagctgtgtgactgaatccacgcca

SEQ ID NO: 354073 - DNA, 122 bp, Homo sapiens
ttgttcttttgtattgtgttttgtagagatgaggtctcgctgtgttgcccagcccggtctcgaacgcctgggctcaagcgatccttcccgctcagcttcccggagtgctgggattacaggcg

SEQ ID NO: 354074 - DNA, 122 bp, Homo sapiens
gagcaccaaccagcgggtgctgtggtggtccattctgcagaccctcatcctcgtggccatcggtgtctggcagatgcggcacctcaagagcttctttgaagccaagaagcttgtgtagctgt

SEQ ID NO: 354075 - DNA, 122 bp, Homo sapiens
cgagtgggcccaggctccctgcagccacagaggctgcctggggtctggggatccgtggggcgggttactggggtcttgcttagacctccaggagtaaaatgagggcgataatggaagcattc

SEQ ID NO: 354076 - DNA, 122 bp, Homo sapiens
cgaaggttttggaggtttctttaattagcaacatgatatccagagattgcgactgtggctcgagcggttccctgccagggagcaggaccattgacagccgagccttgactcaccggcccagg

SEQ ID NO: 354077 - DNA, 122 bp, Homo sapiens
cccaaactgtcatcctactgtttttatcttacagctgaaggaactgaatcccaaacagcccgagcaacccattcagaatcacaccacagatttcctcacccctcttccacaccacagagcct

SEQ ID NO: 354078 - DNA, 122 bp, Homo sapiens
gtcttccgcggctctcggggccgcgccccccgcaccagctcccgagccttggccttcgcccgagcgatctcccgcctagaaccccgcgcccacctgtgccacctgtgcccacctgcgccagc

SEQ ID NO: 354079 - DNA, 122 bp, Homo sapiens
ctgaatacatccttcccaccccatgctccctctgttcctattaaacttcaactactaaagcggctgcattcccagatgtccagtctgataaacaatgcggatgcatccctaatccctttttc

SEQ ID NO: 354080 - DNA, 122 bp, Homo sapiens
gcgtccacctgtgcgccgcggtgcccggcgggccgggggcggacccaaggggagcgcgcgcgcccggccccggcccccgcccccacttcctgttgtgccgcgcgcccctcggcccccgcccc

SEQ ID NO: 354081 - DNA, 122 bp, Homo sapiens
agtgatccacccacctcggcttcccaaagtgctaggattacaggcatgagccatcgcacccggccccattaagtgcttttattgaaaatgtatgttgtcatccacatttcagagggcgactt

SEQ ID NO: 354082 - DNA, 122 bp, Homo sapiens
gcgggccgacccgcggggctgcagccggggcccggtctgggtttctcagcggtcgggggtcgtaccctgggtccgcacctcctcccagggctctgcgtagtgggctgcgtcagaccctgggg

SEQ ID NO: 354083 - DNA, 122 bp, Homo sapiens
agggagaccggacccagaggcactggggtagggctcggcagggcgggtccgggcggagcgcggggtgcggagggcggaggcggctccggcgcccgctctgcccgccgctgggtccgaccgcg

SEQ ID NO: 354084 - DNA, 122 bp, Homo sapiens
gccagaaaagcagcagcctggggctctgaagtgggccgctgtggctggaggcatctcggtcgcgctgcacccacagactggggacagttctggggacagaacgtcagttctgccgggtaaga

SEQ ID NO: 354085 - DNA, 122 bp, Homo sapiens
tctccctctttctccaaaacggccttttttggacagaccttccaactgcagcagggctgccggcccccattcttgactaccctgaagggaattggcagatgcattggccaaaaatcacttaa

SEQ ID NO: 354086 - DNA, 122 bp, Homo sapiens
agcccaacagccatcaccaccagaaaatagatgacaatgactgagatgtcagcagcatttcggatgtggtcagacaatggaggtggctctggggtctcagctatggtgctggggctaaccgt

SEQ ID NO: 354087 - DNA, 122 bp, Homo sapiens
tccaagacatcttacagatcctcttatgaagtattactgtgcctatactgatcagattatcgttctcataatccataattcaaggaccaatgtaaacgcaagatcatagtttcctaggatat

SEQ ID NO: 354088 - DNA, 122 bp, Homo sapiens
ctgttcacttgcgacgtccacagagtcctggagcgtctccctctcaggcagagaggttgccgagtgattctgagaggaggctttacagccgatcctcagaccggagtggaagctgtagctca

SEQ ID NO: 354089 - DNA, 122 bp, Homo sapiens
cgagaggacatttgattgacggccctgcacgctctgccactcagagccgggcagagctgccgagggctcccacctgttagggattaactcccatgtgccagctccggagccgaggccgcggc

SEQ ID NO: 354090 - DNA, 122 bp, Homo sapiens
ggatgctgcctctgcctctgcagctgctcacgcgcagggcacgacgtagcccggcctcttcgacctgcacctccgcggctccctctgggggccctctgctcgcctccctgctgctccaatga

SEQ ID NO: 354091 - DNA, 122 bp, Homo sapiens
gagtagcctcttgtccttttgttacttgagcatggaaagttggggttttccttttgatttcgttctaggaggtcagcatggattgaccttaggttccctgcctccagaccttattgccctgc

SEQ ID NO: 354092 - DNA, 122 bp, Homo sapiens
gggcgccggggtgggaccagggcgcggttctggccgctacggcgcccccgccgccccctacgccaatcctgtgggtttggcaaagcagctggcagggacattagagcccattagtaaaggcg

SEQ ID NO: 354093 - DNA, 122 bp, Homo sapiens
ggggggtaggggaggggtggttgcctagcaaccggtggtgccaaacactggagctcagagcggggggcgcggagagcgaagcgggaaaggaggtaagggagctagggaagcgggggcgcccc

SEQ ID NO: 354094 - DNA, 122 bp, Homo sapiens
aaccacctcctatattaggttctcatactttagaccacctgctctaatcaccccccagggcgaggtaccaaacaactagggacagcccctgtgccccacggtcttctaaagttattcaaact

SEQ ID NO: 354095 - DNA, 122 bp, Homo sapiens
cggggcagatgcggaagcacagcccgcagagcgggagagtccggcgcgctaccttctcggcgatgctgtacaggacctcgtccatcttcatgcacgtaggatcccagtcgtggccgaagcgg

SEQ ID NO: 354096 - DNA, 122 bp, Homo sapiens
aagagactgcgtattgtgattccattacatggagagtcaaaatgctgtctccaggatgatcgaaagcagacagtggttgctggaggctgggactggggcaactgactctaaaggggcacaag

SEQ ID NO: 354097 - DNA, 122 bp, Homo sapiens
tggccacaggctagccgccgaggccggtcatccgctctctccgcggaggagtcaacgccacggaagcagcggcggaacctctctaagaatccttccagcttgtgctcttctgtccagggcag

SEQ ID NO: 354098 - DNA, 122 bp, Homo sapiens
ggaaggggcgaggcagccccgcccccggggcggtctcccgggacggccccgccccttgcccgcttccgcgtcagtgcctcaccaccacctgcccgcgcgccgccccatataaaggcgccgcc

SEQ ID NO: 354099 - DNA, 122 bp, Homo sapiens
cgccttcctgcattctcgcagactacgttgcggcgtcccctgctcccgccctgaggacgtcgcttttctggcactttcatcctatgcattctgttgagtctgctcactgtctcacactgtga

SEQ ID NO: 354100 - DNA, 122 bp, Homo sapiens
aaatcggcccgcctggcgtagcggctccggcacagtggacgtttacttcttgctccaggccggcgacccaggcagctccacaggtgacctgaggactcacggtccctcatctgggctccatg

SEQ ID NO: 354101 - DNA, 122 bp, Homo sapiens
acaacctgtgcgagcctcagctactgcacctgtacctgggaggtgctactgtcaatctatcggttacggcaaggggcggtggagtgattcctcttgctggccaatttcacttcagtttgcac

SEQ ID NO: 354102 - DNA, 122 bp, Homo sapiens
cagcctcctccgcagtcctggtgcccaggtccctaggctcacctaggcttctggggtggccgatgaccagcaacagcaacaaaccagcactggccagcaggcccatagcctccacgcaccgg

SEQ ID NO: 354103 - DNA, 122 bp, Homo sapiens
ctttctcatatgtagcatgttgttgttgttgttgtttccaaaatccatctttcactgacacgacaagggatgctgagtagctcttcacatttgctagccacagtctgagattatttgcaagg

SEQ ID NO: 354104 - DNA, 122 bp, Homo sapiens
ggttgtggtaggggcgtcacgggccgggctgcagccagttacctgccccgtggaggttgacgtgaactggaagattcctagcatcatgcgcaacagtgacaggaactctttgtccttatagt

SEQ ID NO: 354105 - DNA, 122 bp, Homo sapiens
tgcgcgggcctgaatggccttcaggagcacagtcggcctgaggagttgacggttactcaccgccgtgagcccaagtaactcgccctccttcggctagaaaccctccgcctgggcccgcgcga

SEQ ID NO: 354106 - DNA, 122 bp, Homo sapiens
gatagggctaccagggctggccatccccactcggtctctctggctatttccttctgggagcgccctcgggcgggctctccacaagtctgtccctatcccgcagagatgctgagctgcagtgg

SEQ ID NO: 354107 - DNA, 122 bp, Homo sapiens
atctggggaggcaattacgcgataattaagcgactcacacggctctttttatcttgtccgcggtgtggagtggggcgatcaaagtaaaggctgtccaagttcaagccctggtgaggatggag

SEQ ID NO: 354108 - DNA, 122 bp, Homo sapiens
gataagaatatctcagccaaggacactatattttgttcttctgataaaatacagattccccgtcaaaaaaacaaatttattatttcaaatgatttttgaaaacagtacttaaaaataactgt

SEQ ID NO: 354109 - DNA, 122 bp, Homo sapiens
ctgcaaggtggtggcgccgagaggcgtgtctgtgaagacaggtaccaggatggcaggacccgcacgcctcttcccacacctgtcagcttcggaagcatctctcgaggactctggtcccagga

SEQ ID NO: 354110 - DNA, 122 bp, Homo sapiens
tttgtagagattgaagatagaagagacagaaaagaaacacgtgaaacaattggctaagatcgtttctgacagtgataagtactgtgaaaagtataaacgcagttacatgaattagagaatga

SEQ ID NO: 354111 - DNA, 122 bp, Homo sapiens
agaactggatgaaagtaaatgcttttattttatgtcaaaatgaagtgagatattggagggcgcagaagactttggaggttgtatacgtattcagtggtcaacttctaaaaatgctcagccag

SEQ ID NO: 354112 - DNA, 122 bp, Homo sapiens
caaggttgtgcctgatgacctttgtctcccacacggccagacaaacccagttccaagtaccgtttcatgggcttctgctgcttccaaagcccatcttcacccccattctgtgtgttcattct

SEQ ID NO: 354113 - DNA, 122 bp, Homo sapiens
gtcctgagcgcccccgagcggtcacgtgtgcggcggcgacccaagaatttgaaagagtcgcggaaaactgcactcatcatagagcatctgaaggttcctagagggagctgtgaacggttaac

SEQ ID NO: 354114 - DNA, 122 bp, Homo sapiens
aggagtgaggcaacagcagctgagtctgagctttgactcaaaagagccaacaagttgcaccggtattcatcattcattcactctgtgaatgtagtcaggataacaatggcatttgcatccca

SEQ ID NO: 354115 - DNA, 122 bp, Homo sapiens
ccagggtgtatttgcctcgtgagctggacgcttggcactgataagtaccattatgtgttacgttgacgaagaacgggatccccaccggcacctcccggctggagccttccttcaaacaccgc

SEQ ID NO: 354116 - DNA, 122 bp, Homo sapiens
atccacggccaagtactactagtgagtaatacagtaattgctttttacatttgataaacacggagaaagggaaggcatttcgggtcattggggcagctaggacttataagagcagtgctagg

SEQ ID NO: 354117 - DNA, 122 bp, Homo sapiens
cctgcggcacataggcggatgcggctccctatatacaactcggtcaccatggggatgggccggggccttttcctgttggtccagacccccaatctgcccagagaagccatgacaggagactg

SEQ ID NO: 354118 - DNA, 122 bp, Homo sapiens
tgggcaggcatcacaccacccacccagcagggagcaccgtctggtgccatggagagtagccgaggctccgggaaggaccggccccaccatgggcggcccacaggccgcgaagtccatccccc

SEQ ID NO: 354119 - DNA, 122 bp, Homo sapiens
ccaggtgcgggatatcatctcgtggtgcgccgtttaagccagtcggaaaagcgcagtattcgggtgggagtgacccgattttccaggtgcgtccgtcacccctttctttgactcggaaaggg

SEQ ID NO: 354120 - DNA, 122 bp, Homo sapiens
aggtgaggcacacagagggggaggcccgcagctgcgtgggaggaggggtggtctgagggacgtgggatgccgggaatgaggctggtttgcaggttggcgcatggacattttcccagaaaggg

SEQ ID NO: 354121 - DNA, 122 bp, Homo sapiens
cagagtcccgggcgacaggcgcttccctcccggcgccgcggccccctcccacttccccgacgggacagcccggccccttcctgtgccaaagccggactcccctggtctcctcccgcacttgg

SEQ ID NO: 354122 - DNA, 122 bp, Homo sapiens
gtgactggcgtaggctttcaaacctttcaaaccacttctcctggagccccgtgttgtgtgcgtccctcagcccatgcaccccggaaggcacgcctcgcacccagctgtagagccccatgttg

SEQ ID NO: 354123 - DNA, 122 bp, Homo sapiens
cgttcttctagaaccacaaaccattgcctgactccttcactgactccaaggcctaccacacgagcagtataatctctgcagtcctgggcaaaaaggcctcaaactgttttctgctgctttgg

SEQ ID NO: 354124 - DNA, 122 bp, Homo sapiens
aactgaggcatgcaaaggccaggactgtcagggactctgagttccctcacccagaggagccggggctgagtgccaggagtgagagcgcacccacgtgaggtcaggctgcctcccacccaaca

SEQ ID NO: 354125 - DNA, 122 bp, Homo sapiens
tttatcactccagttttgccttttttcctccaaaacaatgccttttaagtctattttaatcgatagatttcctcttaatatcatttaaaaatatttctttacatttttagacaggaatcaga

SEQ ID NO: 354126 - DNA, 122 bp, Homo sapiens
tgcccatctttcacagctgtcagacagggacaacacgaaccctacccagacttcattgctcgtcttccagacgcagcagaaaaggctattcctgatagccacggccaaagacttgttgtaga

SEQ ID NO: 354127 - DNA, 122 bp, Homo sapiens
tcgccgggcctcccgcagcagagtctccttcgggcccgcacactagccgcactctagctgcgagacttcttggggttggagaaagccgctaaccttcatagcttctttaaccaccaccacct

SEQ ID NO: 354128 - DNA, 122 bp, Homo sapiens
cctcctcctcattctaggcggcagtggcgggcgaagcgtgagcgctgcggtattttgtcccgaacggtgacccctcctcccaggcaggctgcggcggcgtcggtggcagcggagcacggaga

SEQ ID NO: 354129 - DNA, 122 bp, Homo sapiens
ggggtagcttgagaattcacttatgcgaagaaccttctggactccaggtccctgagcccccgcttgccctcggggcgggaacttcccggatcacaggcacccgcggtggcagcgggccccgg

SEQ ID NO: 354130 - DNA, 122 bp, Homo sapiens
ctatgatgtcaccagcaggccagggcctcattcccaaatgcctcttcctgggctatagttcggaatcaagaattattgtgtcaaactccttcattgtaaatgaggaaaccgaggtcaagaaa

SEQ ID NO: 354131 - DNA, 122 bp, Homo sapiens
ggaacacgaacaccccaccttttccttcagcacagctctcaccgccagcacaaagggcttcgctagagatgtttttggagggaatcagtgggactatttgtggcatggatggcctattcctc

SEQ ID NO: 354132 - DNA, 122 bp, Homo sapiens
ccaaggatttggcccctggcttgtggggcacggggctccctggctgcctctgtctatggccgtgggtggaagagagcttctgaggtcaccctgcctctccaggagcttgagattccaaatgt

SEQ ID NO: 354133 - DNA, 122 bp, Homo sapiens
cacataaagagaaccctctaataatgtctcagatgagatacacctgaaatggagcatgtccgagtccatctgactagcggggaacacaaagtacagatgcatcatccatggattcattcact

SEQ ID NO: 354134 - DNA, 122 bp, Homo sapiens
accacccgccgactcctcccaggcatggtggtgggagcattggtctcttactattgacaacgcctccagaatagctgtctctgtgagtggcataagcaatagccctgcggccaaggtcatag

SEQ ID NO: 354135 - DNA, 122 bp, Homo sapiens
gctgctctgcttcgccttcctgtgggtgctgggcatcgcctactacatgtactcggggggcggctctgcgctggccgggggcgcgggcggcggcgccggcaggaaggtgagtggagcgccct

SEQ ID NO: 354136 - DNA, 122 bp, Homo sapiens
ccatccgtgtggaacactgttcccttctctcttggccttctcatccttcaggtctcagcccgccatttttttcacagggaagttttcctgaccaggtcaggtcctcctatcatgtgatatca

SEQ ID NO: 354137 - DNA, 122 bp, Homo sapiens
gagtgcagtggtgcaatctcagctaactgcaacctccacctcccaggctcaagcaattctcgtgtctcaacctcctgagtagctgaaatttcaggcatgtgccaccatgcctggctaatttt

SEQ ID NO: 354138 - DNA, 122 bp, Homo sapiens
gacctgcagcagcacatggcagatctccacggagcccttctgggcggctgcatgcaggggcgtgcgcttgctctgctggtcgctctggaagttggggtccaggttgtccactgcggggagag

SEQ ID NO: 354139 - DNA, 122 bp, Homo sapiens
ggattttaaattattttttaaaaattattttaaaagactacgaagcttttgcacagccaacgaaaccatcaatagagtgaagagaacctatggaatgggagactatatttggaaaccatata

SEQ ID NO: 354140 - DNA, 122 bp, Homo sapiens
ctcgccgctcacactggcccatagccgcgtccgtcagcccgttccgcccgcccctgagcacgacggactcttcaccttaccaactgcacggcgatactgaggaactttgcttttgattggac

SEQ ID NO: 354141 - DNA, 122 bp, Homo sapiens
tgtatttttattagaaaaaaaaaataatgtgactgctactttctttttaagatttggaagcgggcactagtgcacctttttgttacaactgtaacactatgtaaaaaataatcaggaagcca

SEQ ID NO: 354142 - DNA, 122 bp, Homo sapiens
cttcccaggatcccctggcaggcgcggcagcctcgcacccgggagcacagctggaaggagcgggggggaggggctgccaagctgctgcacccccaaatccctcagcgcccgcgccctgtcct

SEQ ID NO: 354143 - DNA, 122 bp, Homo sapiens
gccagctggcagatggggcccatccaggcctggcggtgctgagcagccagtagatggcttcgctcggtggtggtgagcaggaaggcaccggtgtcccgggggcagctctcgccgtcagccgg

SEQ ID NO: 354144 - DNA, 122 bp, Homo sapiens
agctcatcaccaggggcaagggggcgggcacgcccaacctcatcagcaccgagttctccgcggagctccactacaaggtggacgtcctgccctggattatctgcaagggtgactggagcagg

SEQ ID NO: 354145 - DNA, 122 bp, Homo sapiens
ttcccttaccttggatttagcggctgactacttcctcttgtacatggcctttctcattcccgtcctccggcctggcctacagaatgagactctgtcttaaaaaaagtaaaaaaaaattaaag

SEQ ID NO: 354146 - DNA, 122 bp, Homo sapiens
tccctcccccagctccagagtgggttttcctaatgagcaggtagggggtgaatatctcaccgcgcagcttccttacaggaggctttgaatgctgcctggagtatatttgaatccccaggccc

SEQ ID NO: 354147 - DNA, 122 bp, Homo sapiens
gcaagggccggccggggagtacgggactcgagccggggacctgaggcaggagccaagcatcgtcgcagggcaaccagcagaacggagagggaggcgcgggggcgaaggctggcgggagccgc

SEQ ID NO: 354148 - DNA, 122 bp, Homo sapiens
ctgcctctggcctgttagaacgattaacccatgatctgggccaagggcttcagagctgaacgtgggggtggcccgcgcgcccccgctgagatctgggcgcagaggcctgcgggcccgaggta

SEQ ID NO: 354149 - DNA, 122 bp, Homo sapiens
caaatcaaaaccacgatgagatgccacatcacagagagtaggatggctactataaacaaacgaacaaacagcacacaagtgtcaatgagattgtggagaaattggaacccttgtgatctact

SEQ ID NO: 354150 - DNA, 122 bp, Homo sapiens
ctctgccacaccccaatcttattaggaattgagaaaaagagccattcctcacaggctaggcgctgctaagcaaagaaagccaaagaaggccaaatatctttattgcctccctcccatcccca

SEQ ID NO: 354151 - DNA, 122 bp, Homo sapiens
agactgttcccagtgtacatgaaccattttatatacccactagctgtgtgagggtcccagcgtctctccatattcgagccaacatttattatcaactctctttttgataaagtcatcctagt

SEQ ID NO: 354152 - DNA, 122 bp, Homo sapiens
agtaagtaaatgacaagatccctattcaacagatctcctggactctcattttgagaatcacgtttctctccgcgtgagttgcaccaaaccattcagctattattaagtgtctcattgtctgt

SEQ ID NO: 354153 - DNA, 122 bp, Homo sapiens
atcgcggccacttcgctgggcgccgccatcttggggtcagggtcctgcaagcccctagggcgcctaccgcagtgcctgacgggccgcgccgcaggtccaccgcgcatgcctgaagaggaagc

SEQ ID NO: 354154 - DNA, 122 bp, Homo sapiens
ctggccatgagcaaggaggaggccgaccaggtactgggcgtgcagctggggctgtctgtccgccacccgcctccacgcctcacttcaggctccctcccagccaggcgtgggcctggccctca

SEQ ID NO: 354155 - DNA, 122 bp, Homo sapiens
agttcccggaactggctggcatcaatccggtactgctccaggtagggcaggctggggtcccgacggccggccattgtgcggctgcacccccagtactggctagccaggtgcttggcctgtgg

SEQ ID NO: 354156 - DNA, 122 bp, Homo sapiens
agacgggacagtcagggatcaggagccccgaaggctctccttggggcaggggccaggaaccgatgcccatgcggccttcccatctttgcagcgctgctccccggacaggtggcagcaagggg

SEQ ID NO: 354157 - DNA, 122 bp, Homo sapiens
ctgagggtgtaagccactgggtttgcagtacattgttacagcagctccaggacactcacacgccctccgcacctccatctaagccttgggactccttcctgccggagccccgaggccaaaaa

SEQ ID NO: 354158 - DNA, 122 bp, Homo sapiens
acaaggaactagataccgggtctcacagccctctcctcataccatctttgatcttctcttcgctgtgcaagcaatcaaaggcttaccaaggccggagcttcagtggtatcctcatctttact

SEQ ID NO: 354159 - DNA, 122 bp, Homo sapiens
aggatcgaactgcgactgccttccagcacgcatgcttctggagaatagaggagaggaactcgcttctgcttggaggaacaggagcagggaacactggaggctccaagtaaagaatgagtagg

SEQ ID NO: 354160 - DNA, 122 bp, Homo sapiens
ggaaagctgccggatctgcggaatccccatatactttccctctggtgacagtttacctttcggaaagctgccggatctgcggaatccccatatacttgtggaagtgctccaggacattcatc

SEQ ID NO: 354161 - DNA, 122 bp, Homo sapiens
ggagacgctcctcccgaggcctcgcgcgtcggaagcttctgtcccctggattccggttgacggacgcgtcccccgagcaggttctcggtagcagccgacacgccccaccccgggcacagcga

SEQ ID NO: 354162 - DNA, 122 bp, Homo sapiens
accgacaagtactccaacaaggactgccccgacagcgctgaagagtacgagcgtgccacgcgctacaactacaccagcgaggagaagtttgccctagtggaggtgaggatgctcggccgctc

SEQ ID NO: 354163 - DNA, 122 bp, Homo sapiens
ttcgcttccacctgcgggcccccagcgcagagcctggaattggctggacggagctagccgcgccggcgccccgtaggacggcgcgggggcggggccggcggaagcgctcgagtgccgttgtc

SEQ ID NO: 354164 - DNA, 122 bp, Homo sapiens
agagcagattctgactcagtgggcctgacgctggcatttctaacaagctcctggtgattccgaccactccatgctgagagtgaccaagtccccatcacgtgtgttatcatgaaagcaattct

SEQ ID NO: 354165 - DNA, 122 bp, Homo sapiens
cacaccatttaaaggattctgcccaaactgccaaccatgtgttacaaataaagcccttcccgaaaatggatcaaaaacactttgtaatgagtgaaggagctggtttaaaaagggccaacatc

SEQ ID NO: 354166 - DNA, 122 bp, Homo sapiens
agaatgacaggatgtgaagccagtgtctggagcatttgaatgtctccctgcacccaccaacgtaactcccagcaagctcaggaccagccagcgagctccagatcagagctggtgcctggcat

SEQ ID NO: 354167 - DNA, 122 bp, Homo sapiens
attggttttcgatggggttggaaaccacagctctgggggacactgccctgctttgccgcacgttcagatgatagcgaatggctatgtgttcaatgaggcagctctctgtgcacgcagtggaa

SEQ ID NO: 354168 - DNA, 122 bp, Homo sapiens
ccgtccgggaggtgggaccctgctcaacaaacacgggctttgtgattgcacagtgcctgccgggacgcgttgttctttccaaatgtgtgagaagtggtctgctcccgccctgagttggctgt

SEQ ID NO: 354169 - DNA, 122 bp, Homo sapiens
tcgagcatccctcggataggccgggtgtcaggcctggtctctcaggcccgtccaggtgggcgtctttcactgcagaccttcagggccgggatgctgtggccatccctcgactccgcgcaacg

SEQ ID NO: 354170 - DNA, 122 bp, Homo sapiens
gccccccgtcctggcacccggagctgtgcgggcttcgctgggggcttggttgcccgcgggcgcggagctgcgggcgaagccggagcaggggcggacgcggaagccggagcccgccaggcact

SEQ ID NO: 354171 - DNA, 122 bp, Homo sapiens
cgtgtcccgcccgtgtcggagcccatggctttttaggacaggaagcgctgcggggtagtgcgggcaggcaggcacgtcacaccggacagcgtcgagattgctgctttcggttccccagcggg

SEQ ID NO: 354172 - DNA, 122 bp, Homo sapiens
cggaggcgtgtcctggagtggaggtggaggtggaggcaaggagctgaaattctgcgtagccggagtgagaccgctctgcaaaccactgcgtgctttgcagagtgattatcagcacagttccc

SEQ ID NO: 354173 - DNA, 122 bp, Homo sapiens
acgcatgcgcaaatacgctttcaggcaccgcccagaggcggggcccccttatggagcgaccgctgtgtgtgcgccggaaggctagaccaagattgacaggaactcccagggtatctctgtcg

SEQ ID NO: 354174 - DNA, 122 bp, Homo sapiens
ctgggctacagagccgagccccacaccatcagacgccagggacagctcccacgtgccccgcggcctctggcacacggccagacgcccgccaggctgagcccccaccaggccctacctggcga

SEQ ID NO: 354175 - DNA, 122 bp, Homo sapiens
gaaagccgctactccctggctggctgagctacagctcccgcagcgcgcccaggagtgcgccggagattcggaaacccgcagagacttctcaagtcagcaggaacttggaaaccgctgttccc

SEQ ID NO: 354176 - DNA, 122 bp, Homo sapiens
ggacccgggcggagcgggcggggacccgggctactgcggtgtggactcgagggctgggcgcggggccggcgcagaaggtgagtccccccaccgtcccccggccgggctgcgggtcgcggggc

SEQ ID NO: 354177 - DNA, 122 bp, Homo sapiens
tctcagaatgtagccattttggatattactttcaatggtgaatgaaagggaaatacaaagcgattttcctttaaatgaaggccttactgcttgcggaaaaagaagtctggggcatcagcatg

SEQ ID NO: 354178 - DNA, 122 bp, Homo sapiens
ggcaggtagagtcggtaacctgggtctgtccctgacctcaaggcactgccagtctaatggcgggtaggcggggagacagtcatataatcactgtatattagtgactttaatcaatacataat

SEQ ID NO: 354179 - DNA, 122 bp, Homo sapiens
tcagtctgttaccccactgctgggcccttctccacccaagttcccttcccccagatagctcgaagggcttgtgctcatcctaggtcactaagttttctcactgaaacacaggagaccttctc

SEQ ID NO: 354180 - DNA, 122 bp, Homo sapiens
cacgccaggggagaaggaaaggtccttccagatggtaaaaacacgctcaacttgcccctgcgagtgttatagcttgaaaagctgaagtggaagacatgcttgagtagccataacttttagga

SEQ ID NO: 354181 - DNA, 122 bp, Homo sapiens
actttccctctcggaaatattccattggttcagtccagtcactggattactgcccctgcccgcctcggtctttaccactgacctctcccattctggaaaacccccacctttccttggtcctg

SEQ ID NO: 354182 - DNA, 122 bp, Homo sapiens
tggtggctctccgcccagatctggcactgctcaggtctacatcgaagtcctggatgtcaacgataatgcccctgaatttgagcagcctttctatagagtgcagatctctgaggacagtccgg

SEQ ID NO: 354183 - DNA, 122 bp, Homo sapiens
gtatttggccacaggagggagccagaccctttgggaagcagcaacaaccaaccagagcggcgccacactgtcccacccactttaggaaaacttcaccagaaacaaaccaagaaaaaccagag

SEQ ID NO: 354184 - DNA, 122 bp, Homo sapiens
cggtaaccgcgctcctcgatcaaatcagctcggctcgactccgctccgcggcggcgacggcgaaaggaagaggatggccccctagtctccttcacgccggccgacaacactcaactgtgcaa

SEQ ID NO: 354185 - DNA, 122 bp, Homo sapiens
ttcagagcacagtgatgattcgtgactttctttcccaatagaacttcaaatctctgaagacggggggtggggggatgtgcttgagtgtttgtactcatggtcttgttctagaagtgacaaag

SEQ ID NO: 354186 - DNA, 122 bp, Homo sapiens
ggctttcagcctctgggtctgagtcatggccgggtgggcggcacagccttctccactggccggagtcagtgccaggtccttgccctttgtggaaagtcacaggtcacacgaggggccccgtg

SEQ ID NO: 354187 - DNA, 122 bp, Homo sapiens
ccgggtgggcgtgggctcggcggacccagcactcggagcggcaggccggccccaccagcccgagcagtgaagggcttatcacctgggccagcagctgctgtgctcaatttctcgccaggctt

SEQ ID NO: 354188 - DNA, 122 bp, Homo sapiens
ggggcccctcctccccaactcctcccaaggtcagctgctccagggcttggatcagtaagtcggccaggcaagccggcaccgcccccgccatcagacaccatctcccgccccgcccgctgcag

SEQ ID NO: 354189 - DNA, 122 bp, Homo sapiens
gcctgcattgcgtcggacctgaccatttccaatgtgaaattcccggggaaggtcgcgagccgctaggggccgttcgtgggcggggcggcgggccacaggggaagtagagttagcggtcggct

SEQ ID NO: 354190 - DNA, 122 bp, Homo sapiens
cgctatgttctttttctaggacttggggggaatttagagcctcgaggcctggggtggggacgcgaggacaccagcgtagaagagcttacatcagaatcgagctttgtgggcgctccgggatt

SEQ ID NO: 354191 - DNA, 122 bp, Homo sapiens
cactccatgaggtagcaatgaatataaacatgagctcatgttcaggaatttaagactcaccgtgttttctttcgttttgtttaatctgtcttgcatttctcctctttgcaaacttgtgggtt

SEQ ID NO: 354192 - DNA, 122 bp, Homo sapiens
caaacattccctctgaaagtctttcacattcccttgtgttgcctagacacacctataaaacgtaattctattaaagagaaaagaaaagtagcgcccttgtttgcagctaggaggaaccactc

SEQ ID NO: 354193 - DNA, 122 bp, Homo sapiens
acggcacgggatgggctgcaccaccgcgttggtcattgtaatgggatgggctgcaccccgcgttggtcgtcggcaatttttggatgcactgtaaatgaaattattttcttaattttcttttc

SEQ ID NO: 354194 - DNA, 122 bp, Homo sapiens
agcagggctggaaaggcctctgccgctcagtggggacccagcaaagccaaaaatcaggtccgggggaagagcgaacggtgcgtgatggaggctccgagggggagcgagaggcggaggtcgca

SEQ ID NO: 354195 - DNA, 122 bp, Homo sapiens
cccgggccgagcgaactgctttgcctttggccacgttgagcgcgccgaggcagccgggggcgcggggctccaggacccgtctgctcctggtgcccccagctcctcagggtccggccgggtca

SEQ ID NO: 354196 - DNA, 122 bp, Homo sapiens
cacaaggccctgcagacgcagattctcgccctcggcctccccaagctggcccttcagctccgagcaccgctcctgaagcttccgctccgactgctccagctcggagagctcggcctcgtact

SEQ ID NO: 354197 - DNA, 122 bp, Homo sapiens
tgggggcgtgtgcctctgtggacacctttgaggtgagtgtgtgcgcttgggccctgggagcgccccctaggtgtgtgcctgtgtgaactcctgggtgtgtgtgtccacgtacaccctgtgag

SEQ ID NO: 354198 - DNA, 122 bp, Homo sapiens
tttagtagagacagggtttcaccatgttggccaggctggtctcgtgtgatctgcccacctcggcctccaaagtactgggagtacaagtgtgagccaccgcgcctggtcagctgagccatttt

SEQ ID NO: 354199 - DNA, 122 bp, Homo sapiens
tttcagctctgatttgtctccatcggttcctttctcagatttggaggggtaggtcagggtcgcttcgcattatagcaacaccatgtccaaaggctgacagagaaagaccatgaaagagagga

SEQ ID NO: 354200 - DNA, 122 bp, Homo sapiens
ttgacaagataaggccaaaattgaagactgagcagttccgttccgaatacactaacatctcgttactctcaacggctacctgtttctccttcttccaggagagacagtgattttcagcgtga

SEQ ID NO: 354201 - DNA, 122 bp, Homo sapiens
ctccaggcctcagtttacccgtgtgtaaatgtggaactaactgatttcccagggctcgggcgcctcacccgggccaggtggcgctctacccaaggggcgcgaccaaatcagtgacgtcactc

SEQ ID NO: 354202 - DNA, 122 bp, Homo sapiens
aaacaggaaatgggctcccatgggactccgatgctggtgtccacctatgtggagaatccacggacagcctccctcctgggaaatggaagacagatggccgtggcgccctcagattcagccct

SEQ ID NO: 354203 - DNA, 122 bp, Homo sapiens
ggtggaggtcggaagggaggttcgagcgccaggctccgaggacccgaggccagctctgagcgcccgagagtccgcccgccccgtcgcggccgcactcagcccgggtgcaacgcaagtgcagc

SEQ ID NO: 354204 - DNA, 122 bp, Homo sapiens
ctctgtctcttgcccccacagagatcctggcccagcccacagtcttggccaacagcacagcgctggtggaacgtcgagacaccctgcgccttatgtgcagcagccccagccccaccgccgag

SEQ ID NO: 354205 - DNA, 122 bp, Homo sapiens
tacgaggcaggggcagcaacggcagccgggcatgcaccaacggtgcctctgccccggcagcgatgactctacagcccatgatttccgcagcccacgattggctggggcacagcgataagaat

SEQ ID NO: 354206 - DNA, 122 bp, Homo sapiens
ggagggcggacctgtaagtgcccagccacgagggctgagagattcgaactcctttgctgccgcgaagaagggcctgttccccggaggccaggtgggctccaggccaagctcgcagaggggcc

SEQ ID NO: 354207 - DNA, 122 bp, Homo sapiens
cattggccggggggccggccgggggcgggacgcagaggaggtgcgccggttcatgggtcccggagggcccaagtgagccgctcccaggtgagtcttccccaggtgtgcctcccgccgccccc

SEQ ID NO: 354208 - DNA, 122 bp, Homo sapiens
cagtgccctgagccggcactcacacagcaccgtcagagacccccaaccatcctcagttcccgatgccaagggccccctggaccccagaacaatccaaaggcctcggggcaggattgctctga

SEQ ID NO: 354209 - DNA, 122 bp, Homo sapiens
ctcccttttccaatccagctttccctcctgcatcacctatctctctacatctggaaccatcggcagctgccttcataaggcacgtcggtctggcattcggaaaaccaccctgtcttgccaga

SEQ ID NO: 354210 - DNA, 122 bp, Homo sapiens
gcagccccggttcccccccccacgcctctccctccacacctcctggcaagcaaagggtgccggctccggcctcagccaagcccaaagaggggctcccacagtgcaacggtgagtgacgggct

SEQ ID NO: 354211 - DNA, 122 bp, Homo sapiens
accacaggccactttcatctggttttcccccttgtcctcttctctgagctcagcatttcacgtgctcattttggtgagattccatcacaatacatcaccaggaacacatgcgttccactggg

SEQ ID NO: 354212 - DNA, 122 bp, Homo sapiens
gcagctccgggttgaagctggcggaatcccgctccctgcgcaggtccgggttcatggcgacgaccagctggcagcgaagtaagcaccgaccgaggtggcagtgacaatctaaatccgcagct

SEQ ID NO: 354213 - DNA, 122 bp, Homo sapiens
ggccaagagaccctggagtgcgtctgactcggcctcgtgtttcacagggaatctgaggcccgcactggccaagtgacctgtctgtacttacacactctggaggcagcagagtggaggagagt

SEQ ID NO: 354214 - DNA, 122 bp, Homo sapiens
agacagtctggctctgttgcccaggctggagtgcagtgacatgatctcggctcactgcaacgtctgcctcacgggttcaaatgtggcatgatctcagctcactgcaacctctgcctcccagg

SEQ ID NO: 354215 - DNA, 122 bp, Homo sapiens
cgccagcgacgaggtcacccggctcaccaccacctccagcaccatgaacatgaaggtcagcgccagcatgcacagcagccggccccggttccgaccccaacaccccatggctgcggctgcgg

SEQ ID NO: 354216 - DNA, 122 bp, Homo sapiens
ttcctgtcctgggtaaacttccggaatcaacaacaggaagacccaatcagaatcttcctccgggagccaatgggagagcacattacaaagagccaatcccagcgccgctgtcactgttatgg

SEQ ID NO: 354217 - DNA, 122 bp, Homo sapiens
ccccgatcgcccagagtgtgccccgcgcctgggataaggtgcactggcccagagggagcccgcgccgccgggaacttagtagccccgcggaggcggttagcgcgtcccggggtccctggccc

SEQ ID NO: 354218 - DNA, 122 bp, Homo sapiens
ttcttcctctggaattattgagttctatgactggaccacttttagagtcagagagttctgcgtctatgggccaaaggcctgtttttaatttcaatgccttgggcttacgtcatcctaagata

SEQ ID NO: 354219 - DNA, 122 bp, Homo sapiens
gtctcccctcagcgtctcttggggcttgccgagatgggcggagccttgggttatgatgggcggggcctgaggctggagtgagcggggcccggatgggctcacggcggccgcgcccctcgccc

SEQ ID NO: 354220 - DNA, 122 bp, Homo sapiens
aaggtgaatcccagaacctaagctcttgttagcaaggtctgtcctgggacatgcgtcctccgcagggcccatgtcactgccgctagcccgggaggcccctgccgactgcacctatcctgtgc

SEQ ID NO: 354221 - DNA, 122 bp, Homo sapiens
tccaaacagcacctaccatatgactcagcctggactttggagatactgctcacattatctcggggtattcctgtgtttgtctcagagaaactccacgccctgcactgtacccaatacaaatg

SEQ ID NO: 354222 - DNA, 122 bp, Homo sapiens
aggaagtgactcactcctccgagggcttgtgggagcctcagctcaggggcgggcagggggcgtggggaagtctgcagccgagagtccaggtaggagtctcctgcgtggtcccgggagaggaa

SEQ ID NO: 354223 - DNA, 122 bp, Homo sapiens
caatttactttgcggatctaatgagcagatgagtagaaagtcgccagccccagccttggccgccacacacatcctggcccgctcctcctgggaaacgggtctgtactgcctggtgctgggcg

SEQ ID NO: 354224 - DNA, 122 bp, Homo sapiens
ctcaagccatttctgtctgattttgcaggcccactccataccagtatcatgcctactcgacggttttgctccaaatcccccacctagcacacccttgctacagctttaagccaaggactctc

SEQ ID NO: 354225 - DNA, 122 bp, Homo sapiens
gcggaacggaggaggggcccggggcggggcgggccccagtgcgccccccgcggggctccgcgccctctgaccccagtcccagcccccgcccccacccagagggagccccgcgctgccgagtg

SEQ ID NO: 354226 - DNA, 122 bp, Homo sapiens
tcaccacccggtgaacggcactgggagcagactcaagaggctcgagaggtcccaggagggcgggaagagagttcccccagctacagcctgagcatggtcgccagaaagcaggtgcggcgact

SEQ ID NO: 354227 - DNA, 122 bp, Homo sapiens
gtgtggcaggcattgattctgttcttttgtgaccttgtggtgacaccgtgggtgacactgcgtcagcctgtacgatagggtgtgggacgtgtgaggtgtgctacatggaagcgtgagactaa

SEQ ID NO: 354228 - DNA, 122 bp, Homo sapiens
cgggccgcgacctcccactaacgcctgccgcaacccaaggaggagacaaaagtcatcttccgggctgcaacattaaccgtcatcagcgcgcctcttcagcgcgcactgcgccaaccctgcgg

SEQ ID NO: 354229 - DNA, 122 bp, Homo sapiens
gcgaggagaggaagaaggacccggaaccctcgcctgcccaggaacagggggaggctgccacgttctgtgcccttattgctaactcccggctgcccactatgcaccctgacaaagcctctgct

SEQ ID NO: 354230 - DNA, 122 bp, Homo sapiens
caccagtattgttaagatatcaatactccggctgggtgtgttggctcacacctgtaataccggcactttgggaggccgaggcgggtggatcatctaaggtcgggagttcaagaccagcctga

SEQ ID NO: 354231 - DNA, 122 bp, Homo sapiens
tacccagcactcttctaagtgcttgggaaatagtaaacaacaaatcaagattccatccctcgtggagcctatattgtacaacattagaaactaactagtgcttttgggggaaattgaataag

SEQ ID NO: 354232 - DNA, 122 bp, Homo sapiens
ggatcgcgcacctgccctgggccgtgggtgtgccagcctcgaggcctcgtggcccctgctcgtgcctagaactgtgcctggcatggagagagcgctccccactgtgaagtgtgtggacagat

SEQ ID NO: 354233 - DNA, 122 bp, Homo sapiens
gaggcaatctgtcaggcgccgcccgggcggcagtatgcctgagggggtcctccgtgttcgcgcctcccgccgcctgcactgaaaggtctgtacctgagcctggatacttgaacagaggcaga

SEQ ID NO: 354234 - DNA, 122 bp, Homo sapiens
ctcttcaggcagttgttgtgtctctcagcgcttgttggtttcacaacctattaaataagccggctggtcttcaccctcccagacaagtcaactcaggggaggcagcagggtgcgggccttgg

SEQ ID NO: 354235 - DNA, 122 bp, Homo sapiens
aaataaaaatgtttggtttggaatctgttcctaccagtctggaaaaagcaagcctacccacggttgcctttcacatggacttcctactcttctttcctcttcctcttgcccctaccctgctg

SEQ ID NO: 354236 - DNA, 122 bp, Homo sapiens
cctggtcattttcattctcgagagacactggagagaaaaagaacattttgtgaatgatgtcgtgtgtccacaggtaactctgaagcgtgagctgccagaattcaaggccacctgcttaacag

SEQ ID NO: 354237 - DNA, 122 bp, Homo sapiens
gccactcccttcagccagtgtggcttcaggtcaagaggctgggcagggtcaaggtggcaacgaggggagaagccgggacacagttctccctgatttaaacccgggcagcctggagtgcagct

SEQ ID NO: 354238 - DNA, 122 bp, Homo sapiens
cacccgcccgtgatgtcctctcaccctgcccgcccgtgatgccctcttgccccgcctgcccgcagtgcataggttccatgtgacagtggctccaggcaccaagttggagagcggcccggcta

SEQ ID NO: 354239 - DNA, 122 bp, Homo sapiens
cgggcgccgcaccgccccgcacgctcgctcgctcgggagagtcgcgggcggccgcttgggcgcacttgccgggtcaccttgtcccggaggtaagtccagacctcccggccgcgggggcgggc

SEQ ID NO: 354240 - DNA, 122 bp, Homo sapiens
tgggggcgcggggcgggtggggcgctcggaaatcgaatgccagaagagagtacggcccggcgcgcgcgcgttcgtgaaggctgctccggccaagttcatgggcgctcgggcctgcggagacc

SEQ ID NO: 354241 - DNA, 122 bp, Homo sapiens
cgagctaatccacggcgagctaacccacggtgagctaatccacggcgagctaacccacggcgagcttaccggagcactcggtagctgtgctagaggcctgtgtggagcaaatgtgcctggtt

SEQ ID NO: 354242 - DNA, 122 bp, Homo sapiens
tgtggccagaacaagaaccttaactgtgccaaattttattctattcaataacagctgcctcgttttcagttgtgcacatctgaatgcaagcaatccctgtctgatgtggagtttcttgcact

SEQ ID NO: 354243 - DNA, 122 bp, Homo sapiens
ccagcaagccctcggaacgagcccactcccaggcgctctctcctagtgtgggagtggccacgcccctgctgggagtgactcacttgggttcagaggtcgtggcactgagatgggtctggcag

SEQ ID NO: 354244 - DNA, 122 bp, Homo sapiens
agcacaggaaggaagagaggtgcagactcacgtatggccctggggcacctgccatcctctcgcacccgtacagcccttacctgccagcacttaccctacccagcttgagttctgggccttct

SEQ ID NO: 354245 - DNA, 122 bp, Homo sapiens
cctctccgtgggcctgggggcgtggcctgaggggcggggactcgggggcacaccccgagccgcagctcccaggtgcgtgttaaaagctggaggggggatatgtgatcccaggaccaaaagcg

SEQ ID NO: 354246 - DNA, 122 bp, Homo sapiens
ccacatcctacccgtaaaacaaaggggctataggcaccttacagtgacagaggtacgttacggttggaggcttttgtgatttttgtcctcctctgccccggggaaattttcttggagtaaaa

SEQ ID NO: 354247 - DNA, 122 bp, Homo sapiens
tgggggatcaatcctctcattgtggggagacccaaggctggtggctggaaatcctttctgcgctacgtaggacagggcgccctctcctgaacaaaggcgggaacagctctaggccagagttt

SEQ ID NO: 354248 - DNA, 122 bp, Homo sapiens
gaggagggggacgcgcctcccacggggaaaacaagcgcgacccatgggatcccgacgcgccgcgtggttgccacagctaggtcgccgccaggaaagccccaggtttcctaaggcctcttagt

SEQ ID NO: 354249 - DNA, 122 bp, Homo sapiens
taatgagcctcttgagccggttcagaaacaatgaatcaaaaccagctggaagctgccctccgacccagctaatgacttgtttattgtcagagcagcagtgcgtcatataagggaatttcaaa

SEQ ID NO: 354250 - DNA, 122 bp, Homo sapiens
accaccgcgccgcggaggggccctagaagtggaagccagagccctagtgcagtggcctcccggagcgcccagctcaccaggtacccccgcagcgcgccgggagcgcctttctccccgccgcc

SEQ ID NO: 354251 - DNA, 122 bp, Homo sapiens
aaatgcaagcagatgttgatgaagcatacgaaatgggcaactccgtttctatttcggagccgcagcgactccgactttgtgccccaaccctgtaaagggcaaaacctcatcccttcggtgta

SEQ ID NO: 354252 - DNA, 122 bp, Homo sapiens
ctccccgctcccccgcttcaacaggcggctggccaagtcgggaccaccgccccctccccccgataaaagaaaccccgaaggccttttttagggtccccccaaaaccaagctgccaaaaacag

SEQ ID NO: 354253 - DNA, 122 bp, Homo sapiens
acgctcaagggccccggcagggatgcaggacagccaggggaccccgaggcacagatgccgcggcggccagcctgggctttctgccctcactgcctgtgcccaggggctccgcctgggccagc

SEQ ID NO: 354254 - DNA, 122 bp, Homo sapiens
acactgactttgaccatctgtactcctgggtatcatggtaagttataaagtagatcactacgcaatgccttttaaggtgcacactctgcttgtggtgcaaatagtaattcaggggcctggtt

SEQ ID NO: 354255 - DNA, 122 bp, Homo sapiens
cggtcccgcaagaggagctttctggggcgctgctgccagtgttgtgaggtctaaggtgtgcgttgaataaccaaagacactgggtgggtctcctccaatatcctctgattactgaagtagat

SEQ ID NO: 354256 - DNA, 122 bp, Homo sapiens
ctgcgattctcaactccccgccctggttgctaagggaggcgcgcagagcgcttgtgcctgcgcacttccacaccagcccgtgtagtgtgacgctgggccccgtccctgtgaccgggccaggc

SEQ ID NO: 354257 - DNA, 122 bp, Homo sapiens
tgcgggcgtgtggcgtggccaccacactctgcccattgatctcaatgatgcggtggccgacgcggatgcccccacgctcggcgatgccaccacggaggaggctgcagatctgggggagaaaa

SEQ ID NO: 354258 - DNA, 122 bp, Homo sapiens
tatggcatggagcgccgggacctctggtgcacagcctgccgctggaagaaagcctgccagcggttcctggactaagtccggctcgttcaagaacataagctaccaccttctccctccccacc

SEQ ID NO: 354259 - DNA, 122 bp, Homo sapiens
tttcgctttcgcttccccagccaaggccttcattctgggctgggccgccgggagggggcgcgcgagacccgcagacagcggaactggagcccgaactctggttcgcactgtacaggcctgca

SEQ ID NO: 354260 - DNA, 122 bp, Homo sapiens
caggctcccacaccatgctgcctccctcaccggggctccacactctcagcctggaaaacacgaattttaagaaaaccatgacttacgaaaagcagccaatcccagcattggaaccaacaggg

SEQ ID NO: 354261 - DNA, 122 bp, Homo sapiens
ggatcttccaccttgctgggattcctagggtggagtctgtaaaactcctgggttactgtgcgagcctgagtgactgttcttttgagacacggctctgtgtattgaacccaaggccctggtgg

SEQ ID NO: 354262 - DNA, 122 bp, Homo sapiens
tgtaaaacataatgctgacaatttacaataatgaaaaagctaaaagagaaaatagaaaaacgaaagcaaactaaaaagaaaattcaacatagaaaaagtgtattgcagggatagattatggg

SEQ ID NO: 354263 - DNA, 122 bp, Homo sapiens
agcctttggggcaaagacatagtataaatataaggtctggttatgactgttgttgctgttcgtagaaccatcttgcaaactttccaggtcttgaagtcacttaatcatggtaagttccaagt

SEQ ID NO: 354264 - DNA, 122 bp, Homo sapiens
acaatcacagagctgcttgatttgttttaattaccagcacaaaatgccatcagtctgggacgtgatcgggcagaggtgtactcacagtagtgtaaatactgctgtaaatagttgtctgatgg

SEQ ID NO: 354265 - DNA, 122 bp, Homo sapiens
cccttccggggaccaagggaagtcccgcctctgggtggggcgaggggtggggccaggcggcgggagggatcatcttccgggagcgtggctaggggcggagcgactgccgcgcgatagtcagg

SEQ ID NO: 354266 - DNA, 122 bp, Homo sapiens
gcccgccccctcatgaatagttaacaaacctccagccaatcactggccggagcgccactccgctttcggaagtccctgcgcgtgcgcagaaaagcgggcagagggcggagcgtgtccggggc

SEQ ID NO: 354267 - DNA, 122 bp, Homo sapiens
caaatcctgccctggtctttcttcctcccggtagctgcgctctcgcccttctctgggacgcgccgcataggccacccctaccaaaaccggacccctccgaagcggaagaagccgcgcacgtc

SEQ ID NO: 354268 - DNA, 122 bp, Homo sapiens
gtcacaaagtaaaagtgcaggcagtgaggaaacgctgcctcttggcccctcagaggctgacggcagcagcagaacagactttgctttcttccccacacgtggtggcaccagcagctgtgtat

SEQ ID NO: 354269 - DNA, 122 bp, Homo sapiens
gtttctctggcatctaagtaaccctggcatatagtaggtgcttaatagctttttgctgatcggatacctggaagtaaaacatacatctttataattttgtattagatttgattttatttaga

SEQ ID NO: 354270 - DNA, 122 bp, Homo sapiens
ccgcttgtcctcctccgagagggcgcccacatcttaccatgaagataaaaatgtggttctcggcgcccagcctgtggccccatgccaacttgctaaacagctccttccggaacttccgcttc

SEQ ID NO: 354271 - DNA, 122 bp, Homo sapiens
cgggcctggcctccacgtaagttgtgtgcagcgccagggagtggaggcggccgagaccctcggagactaggggagggggcgggcccgggggcgctgggggccctcggtctgcgcccagccgc

SEQ ID NO: 354272 - DNA, 122 bp, Homo sapiens
tcaggcttctggcctgctcccaccggaccagctgccctgacacccgactgcagctcccaccggaccagctgccctgacacccgactgcagctgagggcttgtgcttccgccatggcatcccc

SEQ ID NO: 354273 - DNA, 122 bp, Homo sapiens
cagagagatggaaaacacatgctggtaaaaacatgcacaggaatgtgcaccgcagcctcacgccacagtcaaattcaaatgctgcagcaacaggtgggtttctcaaaatgccacccccaaaa

SEQ ID NO: 354274 - DNA, 122 bp, Homo sapiens
acgggcgcccagctggaaacccctgctaagagcatctgcagtctgaacccacagtgactgcgcgtcttctctggatgccattaacagacctctgcgaagggaggcttcggctgctccacgtc

SEQ ID NO: 354275 - DNA, 122 bp, Homo sapiens
gcgcttttctgacgggcttgaaaaacggcgcaccacgagactatatcccgcacctggctccgagggtcctacgcccacggagtctcgctgattgctagcacagcaggctgagatcaaactgc

SEQ ID NO: 354276 - DNA, 122 bp, Homo sapiens
aggctgaggcaggagaatcacttgaaccagggaggcagaggttgtggtgagcagagatcgcgccattgctctccagcctgggcaacaagagcaaaagttcgtttaaaaaaaaaaaaaagtcc

SEQ ID NO: 354277 - DNA, 122 bp, Homo sapiens
gcctgcggaggcaagcaggtctctctgaggcaagccgtcacatccgtgtcaaacagctcccggaggccctgggactgcacccagcgcaggtgccggccctggagctggagatggacgagcag

SEQ ID NO: 354278 - DNA, 122 bp, Homo sapiens
accagacactgacctgccggcacctggagctcagacttcgagcctccagaagtgctagctcgttgtctaagtcactcagtctatggggatctggtgtagcagcctgaacagactaagacacc

SEQ ID NO: 354279 - DNA, 122 bp, Homo sapiens
cccgttgccgtctcccaaggccctcgtgtggggcgagcccggcctccggggagcggttcacgagcaaggaaaggttaaaatgtgctttatttacacttaattcagccaggtgtttccgcatc

SEQ ID NO: 354280 - DNA, 122 bp, Homo sapiens
tccagacactgattcgatctgtactgaaaccactggttagaaaatccacaaggcaaccaccgccttcgcacattccctacctgcaagtattgaccccgatcagccaggcctggccgccagaa

SEQ ID NO: 354281 - DNA, 122 bp, Homo sapiens
caggagccactctggggccggggtccccaacctctcccccctgcaagtcctaaaaggaatcgtagagcaattgatctcggaggagatgagcgcaccccggggctcattgctgcccctgagga

SEQ ID NO: 354282 - DNA, 122 bp, Homo sapiens
taggtccagagctgagctcttcaatgttagactgcttcctctgcttattactaataacaccgaactttggacagacgctgaatgactgattgtgacattccagcacgttttttttttttttt

SEQ ID NO: 354283 - DNA, 122 bp, Homo sapiens
ttcggggccgtgctgctcttttcctggacagtgtatctttgggagaccttcctagcacagcggcaggtgagcctagacagggtccaacctgacccccatacccggccagccctggagtagcc

SEQ ID NO: 354284 - DNA, 122 bp, Homo sapiens
cccggccggtgcgcagggaggtcggaggagcgggcactgcccaccctccggatgtataagcgtcctggccagaggcgggcggtgcgcgcaagtgcgcgtgacgctcgggctcgcgggctgcg

SEQ ID NO: 354285 - DNA, 122 bp, Homo sapiens
ttaaaacacgacgaccctcacacaccaaggtgaagttgaatattgttgttgttccttcaccgcatgaaaggaatccttcagaacttactttcagggacggcttcttctatctcgaatttttg

SEQ ID NO: 354286 - DNA, 122 bp, Homo sapiens
cagtcaggtaggcgttaggtgaccaagggggtcggggacccagaggataggacccaaagacgcaagcgtcgcgcgcccaaggctcagcgcgcctgcgcagggtagcggccgttcagccagcg

SEQ ID NO: 354287 - DNA, 122 bp, Homo sapiens
tcctgataatgggccctactattctcttcaggtctaaacactggtgccagacctgtattccggtggagtagagagtaactcattgcaggcttctaggtcattataccctcatgaaggggcga

SEQ ID NO: 354288 - DNA, 122 bp, Homo sapiens
atcgcattgaagaccacgtgtgccttgctggggtcccattcagacaagtcccgggtcgttcgctcatcgccctccacgcgaccagggggcgcccgcggtatcggcccggctagttcgcaggc

SEQ ID NO: 354289 - DNA, 122 bp, Homo sapiens
gactgaaagcaaacagaccttcccactttcacattccagcctctgttattccacttaaaacgctagggttaaactgcgtttaccttaaacaggcttactgtgttcactgctggacgcctctg

SEQ ID NO: 354290 - DNA, 122 bp, Homo sapiens
gcaagaaggaagccccgccaaggtccagtcaaagagctggcatcgccgggattcgaacctcgcgcccactgcgttccgtcgctggcccgcgccccaacgccacccattgccgtggaaacggc

SEQ ID NO: 354291 - DNA, 122 bp, Homo sapiens
gatgtgggttgggccagataagagaatataagcaggctgcccgagccagcagtggcaacgcgctcgggtccccttccacactgtggaggctttgtcctttcgctctttgcaataactcttgc

SEQ ID NO: 354292 - DNA, 122 bp, Homo sapiens
atttccaacttggcaaaaagcaacaggagaggccccggctgtgtctggtaccgcctcagccgagccctgaagggaaaggcccagaaaaagggatgtggccacaccctgggggccagcccaca

SEQ ID NO: 354293 - DNA, 122 bp, Homo sapiens
gcgaggaggggcgaggcggcgcggggagccctgggtcccgctcccggatccggggccccgcgcgcacaccagcccagagacagcctcgcagacactcgtaggcgcgcacgcgcaccctctcc

SEQ ID NO: 354294 - DNA, 122 bp, Homo sapiens
gggtactggcgtcaccagcgggtcatctttggcatgcgtctcgcagaaagccaggagttccgctgctgcctgcgacacctgcgagcacccgggtggagatgtcaccgccctgcccggctcct

SEQ ID NO: 354295 - DNA, 122 bp, Homo sapiens
ttcgactagtggtaagtatttatttttttccttcaagggggtttttgctttgctaagcctcgggcatttggttcgtgcaagaaatcacagaaactgctccagcggactccgaaaggagcgga

SEQ ID NO: 354296 - DNA, 122 bp, Homo sapiens
agcgtcctgcgtggggtctgtgggcgctgacccagcagccgtgcagggaacagccctgcccgcagaagcggatgccggggcaggtggcagtgcaccccgaggaagccttctggacggagtgg

SEQ ID NO: 354297 - DNA, 122 bp, Homo sapiens
tgccacaccctcactcctcatccactccaaaattcaacgcagcatgccgagccccaggtacgttgaggcggaaagctatggtccccgcccggaggagccatgcagttccccgcagcgtgggt

SEQ ID NO: 354298 - DNA, 122 bp, Homo sapiens
ctttgcatctacttaaaccgatgaagaaacagactgagacgtcagcgtagaaagtgtatccggtaaacacttctcaagctcctctcaaggcgctcaggcaagagggctggggccgcagtcgg

SEQ ID NO: 354299 - DNA, 122 bp, Homo sapiens
gatgagtgaattaatttctatagtgttacaatactttcacacccatcgtctgactccttccgacagcacagcgaggcaggtacggatcattcccattttgcaggtgagaaatattgaggcaa

SEQ ID NO: 354300 - DNA, 122 bp, Homo sapiens
agcattccatcactgtctttttaggcctgttgatctctgtgtggtttctccttttatcttcgattgttgtcagtcattgatcaatgtgtgagaccatctaaccttgctgtcttctgggtctg

SEQ ID NO: 354301 - DNA, 122 bp, Homo sapiens
ggtcccagcggccggcgcccggcctgccacctccctccccctcgtccccgccccctggagcgggagcatttgggttgagctgcgcctgtcctataaatccacatataattctcctctttcct

SEQ ID NO: 354302 - DNA, 122 bp, Homo sapiens
aaacccatggcctcaagccatccttgcaccatggccacccaaaagtgctgggatttcgggcgttagccaccggcaccaggctgcagtctccttttggatgtgttttttcacaagtctaaaga

SEQ ID NO: 354303 - DNA, 122 bp, Homo sapiens
gctgttctgcgacctcgtggcctctgagtgggagctcggactcaggagtgctgttgccagcgcctgcccagacgccctccgtagttttgcaacttgtggaagcactctggagagaggccgag

SEQ ID NO: 354304 - DNA, 122 bp, Homo sapiens
gtaggcatcattatccaccttagctgcccttcttttgggttttctgtaaaactggaaaaacgagaagaaactgttgcacttcaaatttagttgttttgttttgttttttggagacggagttt

SEQ ID NO: 354305 - DNA, 122 bp, Homo sapiens
cctggccctggtggaactgcttgcccgggctggtctcctcggggtggtagaaccacttgacgcggaccaccatgttgttgccccacgactcccacatgctctggatgcggccgatgtagggc

SEQ ID NO: 354306 - DNA, 122 bp, Homo sapiens
gattcaggagctccagggcggggctgaagacttgggtttctaacaagcaccccagtggtccggtgctgctgctgggtccatgcgtagaaagccctggagacctggagggagccctttgttcc

SEQ ID NO: 354307 - DNA, 122 bp, Homo sapiens
aggggcctccactaaagagcatcacccctggaggggcgcgggtctcagggtccttggccgcgtgtggattatgtcaccacaggagagggacgagtcctttccaggcacatgaggaggaggaa

SEQ ID NO: 354308 - DNA, 122 bp, Homo sapiens
ggcaggagtgggctcttggctgaggtgctgggcctgcccgcagcagcagctgtatgaagccggtgcgtcggctctgtgccctgcgtgagcccatgtgtgcggggcctttgtgttgcacttca

SEQ ID NO: 354309 - DNA, 122 bp, Homo sapiens
acaggtggcttcataagagtaatttaggtcttactgaaaaggcagattcctggtgcctgccgcagaggctgacttctcagttgagtctgcggaagaaacactgctccacttagtcggtgaca

SEQ ID NO: 354310 - DNA, 122 bp, Homo sapiens
gtgtctgggaaaagacagtaaaaacatttccttgagaggtgaagactaaaaggaagctaccggctcactgtgcacaggtgagaaaatgtcacggtaaaggagcaccatgtgttgattttaac

SEQ ID NO: 354311 - DNA, 122 bp, Homo sapiens
gcgggacaaggacaatgactcggcagatctcagggcgggcgtggccctaaagctggggaacgctcgagaactttccaggggagacactgcagaggagctgggtgtccaggttaaatttggaa

SEQ ID NO: 354312 - DNA, 122 bp, Homo sapiens
aagcaagatgtctagcaggctgggccttgagagaacagtaactgtttcgcaactgaaagtcgctactcgagccttgccaactggggagactatgcccatgatatccgcggcctcggaccccg

SEQ ID NO: 354313 - DNA, 122 bp, Homo sapiens
ccgccgcttttctagaaccttcccccccactaacgcgtcttccgctacgtcaggccgtcgcgtaaacgccctatccgccgccaatggcgggaaggctctacgccccaccttacgccaaatgc

SEQ ID NO: 354314 - DNA, 122 bp, Homo sapiens
gaagagtcggccctgggcgggtctggaggtaaatgtgtaaccgaccctggtgcccccacccgacctgcctggtcacgtgggtccagtggggcaaagtctcctggtggggtgcaaggagccga

SEQ ID NO: 354315 - DNA, 122 bp, Homo sapiens
gcggcggcagccccgcccagagagcaaatgagaccaatggtcgcgtgaaggcgggacttccgctgtcccgcgaagggcggggggagcgaactgttgtggtgcggagcgttcggcgggcggcg

SEQ ID NO: 354316 - DNA, 122 bp, Homo sapiens
gaaattcagcgagaagatcgcgctgcacaatcagaagcaggcggaggagacggcggccttcgaggaggtcatgaaggacctgagcctgacgcgggccgcgcgggtaagggggctgcccgcgc

SEQ ID NO: 354317 - DNA, 122 bp, Homo sapiens
acacaaatgcccgctctgggccaccgtagttcacagaaagtacaagctggcacctcctcccgcatgcgcagagaccgccttcggcgaatagtgtctcttagcaacggctttgagtccctccg

SEQ ID NO: 354318 - DNA, 122 bp, Homo sapiens
agtctcaggaagggaaacactttctggggcactgctgatacatggaaacctggggagacacggaattttaatcatgaaaacaacctagtaaaaataacaaacaattctatgatctggaaaat

SEQ ID NO: 354319 - DNA, 122 bp, Homo sapiens
ttagggcgaatacaaatctcattccaaatagcgctggaaggggacacgggctagaggagacgggatatacctgaatagggtggcttccttgagtgacacaaaccaactcctccaagaaaact

SEQ ID NO: 354320 - DNA, 122 bp, Homo sapiens
ctcgcgttgctgcaaaagccgcagcaagtgcagctgcaggctggcggctgggaaccggcccgagcaagccccaggcagctacactgggcatgctcagtagagcctgcggcttggggactctg

SEQ ID NO: 354321 - DNA, 122 bp, Homo sapiens
catcaaaaccctgactccatttcatgggttgctactgctcatttggctgcgggaaggccccgcttctgaaaataaaattgcctgtcagagaaaccctaaggatcaggattccggatctgggc

SEQ ID NO: 354322 - DNA, 122 bp, Homo sapiens
aggaaagaaagagaaaatacaaacaaaagctgagatttgctgagttcctaccatgtgctacgcaatgccaacaacaaggtggcatggaataatcctcatgtctgttaagtgggtgggggtag

SEQ ID NO: 354323 - DNA, 122 bp, Homo sapiens
tcggggtggtgactgggtccagaatggcttcggattcggggaaccaggggaccctctgcacggtgagggtcgaggcttcgtgtggagcctcgccgggcagagagcctcggcccctgggatga

SEQ ID NO: 354324 - DNA, 122 bp, Homo sapiens
cacctcccgcttcgtctgtgcgcttttcctctccgcagccttcctgggccgcctcacgcgcgctcagccctgcgcgagctgcgcctctccagctctcaacgtctcaactgctgttcatcgcc

SEQ ID NO: 354325 - DNA, 122 bp, Homo sapiens
caccccaggacgatggggagccccggtggggttatgagcagggcagagagccgatcagagcggcgcgtggcaggctcttccgggcgcctgcagagggacaactggtggacaagagtgaggat

SEQ ID NO: 354326 - DNA, 122 bp, Homo sapiens
gttcttcagcagcgctgtgcctggaggcccccagcccctcgccccccggctcgcgggaggcggcaccagacctcctcaggccctggtccctaggaaactgcagcccggcctcagtttccaga

SEQ ID NO: 354327 - DNA, 122 bp, Homo sapiens
aagcaggggcgaagttttcaagcacgatgggaacacctgtaggtgcaggtgcctgagggtcggccgaccacctcgcatctgaggctggatccgcacacggagaacgacaactgctcacaggg

SEQ ID NO: 354328 - DNA, 122 bp, Homo sapiens
gcgtctgcaggatcttaggaccaggcagaggacgcggcctcccgggaaccggggttgaggcgcggcgctcctgaagccgccgagagcgacggtgggaggcgcctagggctggaatccagctc

SEQ ID NO: 354329 - DNA, 122 bp, Homo sapiens
ggagcaccatgctaaataattcaaaaccatgttttcatttcaaaacaaacacagcagtgtcgccaaggcgaatgccaaatttgcatgaatgtttcagataaaatgagacctcaaagaaatgc

SEQ ID NO: 354330 - DNA, 122 bp, Homo sapiens
gcaactgaaagctgttatggatgatttcgcagcttttgtagagaagtgctgcaaggctgacgataaggagacctgctttgccgaggaggtactacagttctcttcattttaatatgtccagt

SEQ ID NO: 354331 - DNA, 122 bp, Homo sapiens
tagggcacagtgtctgccgcccacgtcggggaacctcagggaaggcggggttctgtctggcgggtcccggggaggggcgggccccctcccccagcctggagcccggctgacagggagagcca

SEQ ID NO: 354332 - DNA, 122 bp, Homo sapiens
gtgggaacgacctgagtgctcattcaccaggcagggctgtgcaaacgggaacagccacagcgcggggcatcatgtggccgtggggagcctggggggcctggggggactggggagaactcagg

SEQ ID NO: 354333 - DNA, 122 bp, Homo sapiens
actcaccgaaatcaggtgttgagctgggccagggcaggccggatccgccaggtccatggccgcggcttgggggcggggggcagagaaaggggggtgccggagccgcctcctgatgtcaaggc

SEQ ID NO: 354334 - DNA, 122 bp, Homo sapiens
tgttcaggctcaggagcgaggttgggggcccggcccgctgggcgctgttcaccggtagcccggaccagagcaggagtttcatcattacctgctgggataggtgggacacatgtatttccggg

SEQ ID NO: 354335 - DNA, 122 bp, Homo sapiens
atgagggagcgccacacatcaccgtacgtggggcaattagtgttcctgccaaatagttatcgtggtttcttctctaattacgccgctgggtgctcccaggaggctcaggggtgagagggtgg

SEQ ID NO: 354336 - DNA, 122 bp, Homo sapiens
ttcactcttttaacctaaaatttgagcaacaagaaagatgaatccttccctgttcattcacgtcctgcatgatgtttctgctctgttgagtgcagtaccaaagcgaacctcagaagccctat

SEQ ID NO: 354337 - DNA, 122 bp, Homo sapiens
gccttatgatagctaattgcaatcactcctcccacaggaggtgtgtctaacccacctgaacgtggttatccctgaagccattccaccctttcgttgcgtcagcattgacccagaagactcat

SEQ ID NO: 354338 - DNA, 122 bp, Homo sapiens
gtacaagcgacaagtctctccaggatacaagaaagtaggaggttcattgttaatgttacccggctacagacttcctgccgaacatatggctgtcatggataacgctgacctcaaggaagttc

SEQ ID NO: 354339 - DNA, 122 bp, Homo sapiens
ccgtgctgggggtcgggctcgcgtgtacacacttaccggggtgcaggtgagcgcgcaatgcgcgtgcacagaccaatgccccgagaggacagtgagcgcgtgcgcgaggcagatggtggcaa

SEQ ID NO: 354340 - DNA, 122 bp, Homo sapiens
acttccacccccctccagatccagcagggtgtccactgcgcttctgatccagcgaggcaccggttgctgctcccgggctagagactcgccattgttcccgcacagctaagtgcctgggttca

SEQ ID NO: 354341 - DNA, 122 bp, Homo sapiens
aataatgcatttttctgaccctgtattccatctgaaagcagttagtatcactggctgaatcgctatgcaagggcaaagctcttgtgtgtgtgagcatgcgagccagttctacatgaaacctt

SEQ ID NO: 354342 - DNA, 122 bp, Homo sapiens
tataccacccgcgggcgccgccgccgctgccgccgcacccactcccgctgccgccaacgacgctgccgccaccacggccgccgccgcctccagcaccatcctgcactgggcgccgcttaaga

SEQ ID NO: 354343 - DNA, 122 bp, Homo sapiens
ggtgggccacaccttgctcagccgtccgggccctcacctgcccctcctgcccgcagacggcgcctgcttggcctcagaccaagtcccacaggggctgccgtgcctgccgcctccaccccatt

SEQ ID NO: 354344 - DNA, 122 bp, Homo sapiens
gctgggcgcctggtctgccggacctcagcagggggcaccgcgggccggactgtggaggggcgcacgcccggaagcggcgagggtagccatgacggcctccgtgctgcgaagtatctcgctag

SEQ ID NO: 354345 - DNA, 122 bp, Homo sapiens
cggtccgtgtgtgtgtgtctgtatgtttgtgtgtgtgtgtgtgtgtgtgtataatgtgtgcgtgcaaggaggagcttagtgtgatgtcaaagcccctgggattctcttgccatgttcccttg

SEQ ID NO: 354346 - DNA, 122 bp, Homo sapiens
gagtttccgttttctatcctccaaccagaaagctggggctcaaatcaaagcaaagagcaacgattgacttcaccctcttgaattttgatgcagtgggtagggacttcaccagaccactggat

SEQ ID NO: 354347 - DNA, 122 bp, Homo sapiens
gtagctaggaccacaggtgcataccaccatgccaggctaatgttttattttctgtggagacggggtccactgtgttgcccaggctgatcttgaactccggggctcaagtgatccacctgcct

SEQ ID NO: 354348 - DNA, 122 bp, Homo sapiens
gcccaagctgttggtgagtttcacaagccagagttgcagcctgcaacatcgagtgccgtgcgtggagccgtgctgtccatgtccatggggaaacggccctgggagggcattgctccctcttg

SEQ ID NO: 354349 - DNA, 122 bp, Homo sapiens
agtttgctgtctggtttgaatagctcctatcagctcttcattcatgccaagtacgctcaccgtccagagacatgataaagccgtacttccttctggatttttacctcactattcaaaaaaca

SEQ ID NO: 354350 - DNA, 122 bp, Homo sapiens
cctgaggaagaggcatcagaggaggagacagagacaggagaagactgcagcccaggagaacggcccacaagttccctggtgtttgcttgaggatggatctccgcggcaccaagtcagggcag

SEQ ID NO: 354351 - DNA, 122 bp, Homo sapiens
tgggttgtggaatttccactgaaggctggagatgaaaaacatactcatttacactgtgtgcgaacttggtggactaacattggttaaactttgaaattaagagatttttttttcctgatttt

SEQ ID NO: 354352 - DNA, 122 bp, Homo sapiens
tggcgcggccccgtaccccgacttccggcctgtactgagttcctggtatttctctctctgcgccaaccagcactgcttgctcacgcctgtttctccttttccttgccggtggggaggtcatg

SEQ ID NO: 354353 - DNA, 122 bp, Homo sapiens
aatgggaacttacctggttggcactgtagttagtggccatgatcttgtgctgtttacactcgttgcttggcaactgcagaaggccgacctcctgggactaccaatgagcagaggctgccttt

SEQ ID NO: 354354 - DNA, 122 bp, Homo sapiens
agtaggagttatccaagcaaagctggtgactgaaccaaaatcaccactaaagaacttaaccgtgtaacccaaaaccatgtgtatccccaaaaagactgaaataataaaatgaaatgaaaaaa

SEQ ID NO: 354355 - DNA, 122 bp, Homo sapiens
tcgagggccgcccactccggagggcaagtggggccgtggcaggcctccagtacaggtgggcgcggctgcgggcatgcgctgtcgtccagcgccttctcctccgcggcagagacgcggcgctg

SEQ ID NO: 354356 - DNA, 122 bp, Homo sapiens
tgccccactaaaaacttgtccctctcctttctcggtgtccatggtgggtctggttcccaccgctccctccctccccgcacagtctgagacccccttccccgggccgccccgtcgatcccagg

SEQ ID NO: 354357 - DNA, 122 bp, Homo sapiens
caaagcctttgtgtcttcctcttctgctgtggacagataccatggggcaccaggaaaggacggggagcacacagccccggggaggcgcactctaaggagggccaaagccattctgcggggtg

SEQ ID NO: 354358 - DNA, 122 bp, Homo sapiens
cttgagaccccaaagcagccgactgcgccgccaccatcctcgcgttgccgggtggggcgacgtgctccccggccaggagcctccaccgctccggaccctggccctatgtcgccgctctcgcc

SEQ ID NO: 354359 - DNA, 122 bp, Homo sapiens
catacaccatgaaaatcaaacctcctcctctacgcagttaccccatcatgaaaggttgctcgtagacactcagcatttcctcatacaccatgaaaatcgaacctccctctctacgcagttac

SEQ ID NO: 354360 - DNA, 122 bp, Homo sapiens
acggcgcgtccgcccgcccttaaagggcccgcacctcggaaaactcgcagcccagcacggcgtcgggtagctaccacctatcacgcccctcactctgcgactcgccttcctccgcggccagc

SEQ ID NO: 354361 - DNA, 122 bp, Homo sapiens
ggcggaccgggtggtggctgcccaccctggttcccgaggtggaggttggggagacccagccggccccgcccataccttccctcctggtcccgcccacccaccttggccccgcctcgtacctc

SEQ ID NO: 354362 - DNA, 122 bp, Homo sapiens
aggtaattgtcaaagtcaccggaggctctatgatgtgaaatgtacaatcgaattagaactcgccccttaccaaccattccaaatagcttgtcctgtcctttcgaatttgggtttgcccaatg

SEQ ID NO: 354363 - DNA, 122 bp, Homo sapiens
ctttgaaggcaaaatggtaggtacaatataaaacactgcaacaaaccctgataattcccacgcttgtttctatcctaagtcttgcccacaaaagagaaaacctatagctgacaaaggtttgg

SEQ ID NO: 354364 - DNA, 122 bp, Homo sapiens
ccccgcactcggagcagctggcctgccctgccagccctgggcaatgaggggattagcacccgggccagcggcccaccagcgctgcactcgatttctcaccgggccttagctgccttccctca

SEQ ID NO: 354365 - DNA, 122 bp, Homo sapiens
cactacaaaaaacgctacaaaaacgatgcgattagccagcccgacaacagcgcttcattgcgctgcgaggcacatgaactgcagaggtacatgagctgcggaacaattcacacctaagatgc

SEQ ID NO: 354366 - DNA, 122 bp, Homo sapiens
ggcatgggggctgggggccgagatgcccaggtttctgggtgtaaggactcaccatgactccgccagccatcactgcacctgccgtctctccccacttcctctggtggggcaggaagctgagt

SEQ ID NO: 354367 - DNA, 122 bp, Homo sapiens
ggtcccccgaaacagactccgatagcaagatttgagtgtaggtttatcggagtgctcttgcgaatatcaccagtaggggaatgacgggttgggcggaagaagaagctgaactgctgatgtag

SEQ ID NO: 354368 - DNA, 122 bp, Homo sapiens
aggcggggaccagtctccccgaattaggcccattccgggcccgggcgccctcactcgccgcggggaaaagtccccaggtgcccctccgtgatccaggtcctcccacaacgctcccgctcctg

SEQ ID NO: 354369 - DNA, 122 bp, Homo sapiens
ttgggatcccattcttctttcttcctcatttctttttcaccttccttctgccgtcacaatcgccttcagtgatgtcgaagctcacggcatagaaatgggttataaatggaggcaacccattg

SEQ ID NO: 354370 - DNA, 122 bp, Homo sapiens
actctccggtcctgcaggacgggaatgtcatccaggccacgtcacttccacaccggcacccgccacactttatttttgtaaaaggaaagaaccacggcccttcctgagccgccctcaagcca

SEQ ID NO: 354371 - DNA, 122 bp, Homo sapiens
cctaagatcgaggtcagccctctgggtgttaagaggagacaccccctcaaggggagccaacgtcctcatgcaaaacagctcagtttcaactaatggcgggggagagcgggaggtgggcagga

SEQ ID NO: 354372 - DNA, 122 bp, Homo sapiens
gggcgtggtcggttaagtccccggccgtgacccaggcccggggagctagtctccgcccttcgctcttacggatcccctcggagtacgccgcaccatgcagctcaggctcttccggcgcctcc

SEQ ID NO: 354373 - DNA, 122 bp, Homo sapiens
tcaacgattacttcatgcacttctgcatctcttagcagcacagcaccctcaccttgtgaccgcccgaggggctcttcctacccactgcataaacttcatggcatcgtagcagagaaatagct

SEQ ID NO: 354374 - DNA, 122 bp, Homo sapiens
acactgcacgcttccacatcctcagagggcccgggacttgggtcctggccccgccccctgcggacccggcactctgtcagttccgtccccggtcctgggaaccgctctttaccccactctgc

SEQ ID NO: 354375 - DNA, 122 bp, Homo sapiens
cccagggcctctgcagcaagctccgcacgccagtcctggtctcctttcctcccccggtcccgcgaccccgtgttgaacctggctcccgggaccccgttccccagtccatcagagtgaaggct

SEQ ID NO: 354376 - DNA, 122 bp, Homo sapiens
tgggaggatcctttgagtctcgaggcagaggttgcagtgagcctagagcgtgccactgcacgccagcctgagcaacagagcaaggctccatctaaagaaaaaaaaaaaaagttacttaaact

SEQ ID NO: 354377 - DNA, 122 bp, Homo sapiens
ctggggaagtgctccaggacactcatcttgggcacaggttttttgggcacagggtttttacgtaagacctcaaaagcacaggcaactaaagcaaaaacagacaactgggatttcatcaagct

SEQ ID NO: 354378 - DNA, 122 bp, Homo sapiens
tttcagcaatgatgtaatttgatctcttcgggccaccgtcgctgagcatgcgcaaataaacgtggcgggacgtatgtgtcatggcgctctccatctaaagtctgtgcagcttccggagagtg

SEQ ID NO: 354379 - DNA, 122 bp, Homo sapiens
caggctcgcagttttgctgtttggggaactcaagctccctgaaatagccaaaacctgaaacgcagagcaaggtggagtggtaaggaaggaagggaaagataggggtactgatggcacgcagg

SEQ ID NO: 354380 - DNA, 122 bp, Homo sapiens
cgcacgcgcacgctaagaaacgcccaagggagtaactccactgtgacgttaaaattggggcggtgcgagtaagtcgtttcctgctgtcgtcgtgagatttaaagacacctcgcgagacctca

SEQ ID NO: 354381 - DNA, 122 bp, Homo sapiens
gcgcggaggactgtgggagcggcttccttggattccgcgcttggcaacggctcggcgtcgcgctttggccaaccgctgcgtcgtccctgggcccgaataactgtcgcccgcttccctcagcg

SEQ ID NO: 354382 - DNA, 122 bp, Homo sapiens
cccggccggatgcggagcacctgtgtcggccccgcccgggccctcgcctccgccccctcgcgccccgcccctcctagcaggccgagccgaggagggctccgccgcccacccggaacccggcg

SEQ ID NO: 354383 - DNA, 122 bp, Homo sapiens
gcggaccgacggactagctgactggcgggcgggcacctgggctggcgggtggcgggcgggcggcgggagagagggctgctcgggcccgtaaacaacgcggcccgtcagctgggccccgtgcg

SEQ ID NO: 354384 - DNA, 122 bp, Homo sapiens
gcatccttgagcccgagtcacccccttggaggcttcccctccctcctgcactcgctgatgcggcagccagaggacccgggaccaaccctcaccttgggcaggatttgtggagcgggtgcgtg

SEQ ID NO: 354385 - DNA, 122 bp, Homo sapiens
tttccctgtctgtgcaaagtgcactccccagacgccgctgcctcgagggaccaggaaatgcgtctgggggcgccaggaaagatgagaagataaagtcacgatgcgtccagctagctatagac

SEQ ID NO: 354386 - DNA, 122 bp, Homo sapiens
cgcattccaggggcaatgacgacgcaggagtgtatttcaggacggcgctggccacggtcccggacgcgccccacgcccagtccagacctcaggctgagcctctgctctccccatgcctggcc

SEQ ID NO: 354387 - DNA, 122 bp, Homo sapiens
tgctgggtggctggctggcagcctggtccagcaggtgcaaggcacaggaacacaggcgggcgtggaatggaagcacgatgaacactgtggacacttctgctgttttctctccccccccaccc

SEQ ID NO: 354388 - DNA, 122 bp, Homo sapiens
agggggtgacggatggcacctggaaaatcgggtcactcccacccgaatactgcgcttttccgacgggcttaaaaaacggcgcaccacgaaattatatcccgcacctggctcggagggtccta

SEQ ID NO: 354389 - DNA, 122 bp, Homo sapiens
cgccaggtccccatgcccactccacactctgggactgcctgggggtggatttggccctggcggtcgctcctggtcctgccgctggcctccggccaccttgggcggggacgcggagagtgggg

SEQ ID NO: 354390 - DNA, 122 bp, Homo sapiens
gttctcagctgaagtagagaatccagggaggaccccgcactccggccattggagctgtggcgtcctccctcctgtgtgtcccccggaacctcctgagcctctctggagctgttctctgccag

SEQ ID NO: 354391 - DNA, 122 bp, Homo sapiens
ggacatggttgtgccctgtccactaggttcggaatttcactttaggatgtcgtgtgtgtgcgtttgtgtgcacatgcacacacatatgtgtgtagcggtctccttgcaccctcaatctcagc

SEQ ID NO: 354392 - DNA, 122 bp, Homo sapiens
tactcaacgccaggttcattcgaaacctgcaggaacgtcgcagcaccaggccttggtgaccgcagccccgtcaaacatcttcaaagtattatttctccctcactacaggaaagagccaaagc

SEQ ID NO: 354393 - DNA, 122 bp, Homo sapiens
atttactactcacctccacttagcagtagggagctgtattgcaaagggggctgatgagcgcggcttgacgcccctacacaccccgccaagggggttgctgcagttacggtttcgccgaatgt

SEQ ID NO: 354394 - DNA, 122 bp, Homo sapiens
acttgccgcacttccgggctgccaggcagctgctgtggctccaggatgatggagacagagcgacttggtgagggggaggggagggaaatggaacggagtagccgatatggaatgaactttga

SEQ ID NO: 354395 - DNA, 122 bp, Homo sapiens
ctgatgacctttctcatcgtgacagtggcctgggcagcacacacaaggtgggggcccgggcgcttccagcggtccatagctgctctcaaggttcccgtaccccgcaccacatcacgcacggg

SEQ ID NO: 354396 - DNA, 122 bp, Homo sapiens
ctgaagcaggggctggggtaggtgccctggcacaggcacagaaccagagagaacccttgccgctgctccggaatgtcgggccacaccctccggatacgggaaaggctttcttctccatttca

SEQ ID NO: 354397 - DNA, 122 bp, Homo sapiens
agtctaataacatcttgttgacatggatgtagtaagatacaaacttacatgagttactgacgagaatatagtgttaattcagtattgcctagtaaagttgaagaattgcagaccctacaaac

SEQ ID NO: 354398 - DNA, 122 bp, Homo sapiens
aagtgagccgcccgcctcggcctcccaaattgctgggattacggggtgaaccattgcgcccgacctcaaacgaggatttctaatcgccaatgagaccaatgactgaatatccgaggtgcctt

SEQ ID NO: 354399 - DNA, 122 bp, Homo sapiens
gagattgcagtgagccaaggttgcaccactgcactccagcctgatgacagagtgagactccgtctcaaaatcaccctaatttcacttggggataagtacattgttagtgaagaggtcacctg

SEQ ID NO: 354400 - DNA, 122 bp, Homo sapiens
taagtaacctcagcaaaaacgaggcctctgcaagccacttttccatgccaagcatccacccggcccacaggcatgtttctgccgccactccgcaagatggacagggagccagcaggcaggcg

SEQ ID NO: 354401 - DNA, 122 bp, Homo sapiens
aagcgctactggactctttaggatctcacactccccagaaactagtgccccccgataagccggcagacagtggctacgaaacagagaacttggagtctcccgagtggaccttgcatcccgct

SEQ ID NO: 354402 - DNA, 122 bp, Homo sapiens
tcgtcctagagcgagtcccgccatcttgtggttgaagatgttgactgccacagagaatagcgggctttgacatcaacagttctgattgggtaaaaagaccctcgtcttggggtagttctctt

SEQ ID NO: 354403 - DNA, 122 bp, Homo sapiens
ctgcggcagatggcatacatgcggttgaccggagaaatgcggaagggctcagacttggcccggctcaggctgctgctcagggtgcccagaccgaggcgctggtagtcgcgacagcaagccct

SEQ ID NO: 354404 - DNA, 122 bp, Homo sapiens
tcagcaaattcaggaaatagagagtttttaagcagagcaacaccatttgcctcgcttattcgtgcagttgcaggaaactccccccatcaaattagccccttgaattaccttaaatatcacga

SEQ ID NO: 354405 - DNA, 122 bp, Homo sapiens
agaagaggggtcgagatacaagcagccccacgcctcgggccgatggtctctcgtcgacgccgccctggttaagttgggcgagcccaaagctgcagccacaaaggaagattcgtggcgtgggc

SEQ ID NO: 354406 - DNA, 122 bp, Homo sapiens
gtgctgccgagggcccagaacaagacccggagcgcagccgcggcgcagccctgctgtgtgcgcattctgggctcctgcaccggctgctgatgccctcccctactggtgtcagacctcacgag

SEQ ID NO: 354407 - DNA, 122 bp, Homo sapiens
tctgaaggctgttatttactgttcttgctattttttttttcccggggagtgtagtaatttcgatgtgcctcccacaggagaccacagcaaacaacaaggatacattttcacaatactcagca

SEQ ID NO: 354408 - DNA, 122 bp, Homo sapiens
ttaagagctgtaacactcaccgcgaaggtctgcagcttcactcctgagccagcgagaccacgaacccagcagaaggaagaaactgaacacatccgaacatcagaaggaacaaactcctgtcg

SEQ ID NO: 354409 - DNA, 122 bp, Homo sapiens
cgcccgacgtggctctgaaaggtgaggcggggcctagatccctcacgctcagcacagccccgcccctgttacctgaacgccccacagcagtgcccgggggctgagcggccggggcgtcccac

SEQ ID NO: 354410 - DNA, 122 bp, Homo sapiens
ctgggactacaggtatgcactactacgtcaggctaattttttaaaaaatttttgtagtgacgcaggtctctctatattgcccggggtggtcttgagctcctgggctcaagcaatcctctggc

SEQ ID NO: 354411 - DNA, 122 bp, Homo sapiens
aatggttaagaataaggtcactcaaaccttagtttgtgtctgggcttggtcattacttcccgttaccttaggcaagccatttgatgtctcattgcctcatcctcctcatgtgtgaaaaggga

SEQ ID NO: 354412 - DNA, 122 bp, Homo sapiens
ggagcttgaggtgcttttgcaccaaaatataaattatcatgtgcactgtcacctcggggacgaaatgcagccctgcctaggagcagttggccaagatgcaaccagtcagtttggagccacgg

SEQ ID NO: 354413 - DNA, 122 bp, Homo sapiens
ccaccctggttacatgtgacatcccaaagccttcactattcctagagccatcttgcagcccgtccttcagacatgtgctgcttccctcagcccttcccttgacatgtgctgcttcctccacc

SEQ ID NO: 354414 - DNA, 122 bp, Homo sapiens
gagtccctgccgagtgccgggcacacagcacatactcagtagactggaccattctgcgggcgactggggaaacgtggacccaggagctggatcctccaggactgctctccctccagcaccag

SEQ ID NO: 354415 - DNA, 122 bp, Homo sapiens
gcctattgtattagtacttctgcacacaccacttaaggcctaagctcagaactcccacagcgtcattcttgccacattctattggttaaatcaagtcacaagcctggtccagattcaaaagg

SEQ ID NO: 354416 - DNA, 122 bp, Homo sapiens
gtgatcctctttaagaaaccactacattctacccccacttcagaagaggggcactcatcacggggagaatgtccaagaaccccctgggctgggaagatagagcagcagcaatcactttttaa

SEQ ID NO: 354417 - DNA, 122 bp, Homo sapiens
ccgcatgccgcggcctctggtgagctgggtggggatgctcctagtgccccgcctgcgtggcgccccccaggggccacccgccacggcgctcgtggtgtctgacccgcaagggcgcccctagt

SEQ ID NO: 354418 - DNA, 122 bp, Homo sapiens
gggaacgtacaacttctgggacacagggagaagaatgcagggagctgggcatttgcaccacggtaaaagccgttaaacttagtccagcgggctgagatgaaatcagttccaggaggtggcat

SEQ ID NO: 354419 - DNA, 122 bp, Homo sapiens
ctgccagtgcgcatgcgtttgaaggcggtgcagggcggggagcacacccctgcgaagtgccgggcaccctttgggcggctcccgccggcgagctggacagcggcgcgcgccaggcgtggctt

SEQ ID NO: 354420 - DNA, 122 bp, Homo sapiens
tgtagtcaagacacaataatttctttttaaggatgtttacttttctagttagtaaatgtacgggatggttttcactaaaacataagtcagccagctgtttgtttgggttcttaaactgaatg

SEQ ID NO: 354421 - DNA, 122 bp, Homo sapiens
cagcagttcttgtaattcaggaatccatgtttaaatcctaggtagttctagctctagagacggcagtacaacagtggctttagatgtgtgtttatgacacaggaaggcgcttaggccgagct

SEQ ID NO: 354422 - DNA, 122 bp, Homo sapiens
caaagttaccaacccaagggagcaaatatgcccgtattagaaacagaaactgaggagagccgacactgagaagggttgaatagcaaaaccagggtgtttatatcagccatgacttccgggca

SEQ ID NO: 354423 - DNA, 122 bp, Homo sapiens
gcacggacgccctaagggacatcctggtgcccaggggaatggtgcacacctggacatgcccggtgatgcacgcagaaagcatcgaggtaaaaatgaacggggagacacctctaaggtgtacg

SEQ ID NO: 354424 - DNA, 122 bp, Homo sapiens
ttaaccagtcctaaaattataagacatcctttcctcacttaattacatgtagtgttgttgcgggacttttccttagttcagctgaagatggggttcttgtcacagggcattgaaaatttagg

SEQ ID NO: 354425 - DNA, 122 bp, Homo sapiens
gtgtcagtcaggagacttgttctctatcatccgaatttgacaattactgagaatttgttacgaacattttagtaaatgttaaaaacgccaactttaaaaattaaacccaattgtagtcattt

SEQ ID NO: 354426 - DNA, 122 bp, Homo sapiens
cgagtttataaataagtttgggaagctatagtgattctgcaacttgcatcccttctgctgcgttcctgctccttggtgtcctacatgtctgtctggcacatccgtcacttttgtgggacact

SEQ ID NO: 354427 - DNA, 122 bp, Homo sapiens
aggcgtgccgcggcctgtcctcacccccgtcccgggctctcttccacttccggtcggcggcggctcagcaggtgttacctgttactcgcctcggacccgccgggtctctggaaggctgagtg

SEQ ID NO: 354428 - DNA, 122 bp, Homo sapiens
cccgagtttccagatggaacttctcgcttggttgactcacgtccacatcctgtgatcggccggctgggcacattcctgctgcagggagccccaggccttccctggcacaggcagggcctctg

SEQ ID NO: 354429 - DNA, 122 bp, Homo sapiens
ggcatctatgccatcaactttaactgcgggatgctgctcctgacttgcattagcatggaccggtacatcgccattgtacaggcgactaagtcattccggctccgatccagaacactaccgcg

SEQ ID NO: 354430 - DNA, 122 bp, Homo sapiens
ctcgtagaataacactgcgcagttggtttacagtcacaaagcactttcaagacagtgtttcgtctcctggtcaccacagtccggtgaagccggcaaagcagataaaagcatccccattttac

SEQ ID NO: 354431 - DNA, 122 bp, Homo sapiens
ttctcttgactgtacataaaggttagacaagatatcaaggcatgaaactcccaagtattgcgtcattgacaactgaaattgcctaagtgtgagatcatacttctgcccgaaaacttgcaaga

SEQ ID NO: 354432 - DNA, 122 bp, Homo sapiens
tttatgaagagctcgactctgactccgaggacctagaccccaatcctgaagatctggacccggtttctgaagacccagagcctgatcctgaagacctcaacactgtcccggaagacgtggac

SEQ ID NO: 354433 - DNA, 122 bp, Homo sapiens
actccagatgatccacccacctcagcctcccaaagtgctgggattacatgtgtgagccaccgcacccggcctaataatttttttaagttagcagaatccagagatagaagaactttccctca

SEQ ID NO: 354434 - DNA, 122 bp, Homo sapiens
gtctgtaacctgtgccacctttccctccctgctccagcttaatgaattccagtgaagcagcgatgaaaaaaactttacccaagagccatttatctcgggtgattattcatgataaccgcatc

SEQ ID NO: 354435 - DNA, 122 bp, Homo sapiens
agtgacgcctctcctaggaaagtccccgcggcagatacacggactccgtaatggaaactccggcgtgcctaacaacagcgtcactgtcacacacgcgtgagctttgacagccagggactggt

SEQ ID NO: 354436 - DNA, 122 bp, Homo sapiens
tcagccgatttcctctgcgtaatggcaacttatctaaatctggcttgtgggcaaccgcaacgctgccgcagtgaactgtgggagttgcggttcacggcgtagcctcagtttttttcctgggg

SEQ ID NO: 354437 - DNA, 122 bp, Homo sapiens
taaacgcgtgatggaaggcgctcgggccaatagggatgcgctttagtgactggtgggtcacgagactcgcatgggccaatgactgatagagaccggtcagagggcgacccagtttcgtgcag

SEQ ID NO: 354438 - DNA, 122 bp, Homo sapiens
tgggacaggggtgggggtgcaggagctgcagtgccggccggtggggtcaccccgtcaccccgggggatggtcacctcttgagcttcagaagcatcctccccacagtggggacagaagaccat

SEQ ID NO: 354439 - DNA, 122 bp, Homo sapiens
tctcggtcaagggcggcgcccaaagaccagagcagacgtgagcagacggactttggcatgcgagctaagagtgtcttagaagtgaggtgggggtgagggtgggagtgtggtgacagcggcgg

SEQ ID NO: 354440 - DNA, 122 bp, Homo sapiens
ccaaggacttagcaggggcgaacgacgtcaacagatgtccctccagactccggcaccagccggccgagcccaaacgagttctcgcccccgaccccacccaccgcgggagcagggttcggtca

SEQ ID NO: 354441 - DNA, 122 bp, Homo sapiens
agagctgctgcgggagatggaggagctgcgctcggagaacgactatctcaaggtgagccgcgcctcggccgcaggtgtcccggggcgcccccggagggcctggctgcggcggggacccgcca

SEQ ID NO: 354442 - DNA, 122 bp, Homo sapiens
atcaggactacgggcggcagcggtcgcgggttcagggggcgcaccatggcgagctgtaggcgccgggctccgcgctcccctcgctcctcccctggagctctgagagcggggctccctcgacc

SEQ ID NO: 354443 - DNA, 122 bp, Homo sapiens
tattaatggtgcccaagggccttggggctttgacttttatttccttattgtctgcagtcacggcctagaaagagagatgttggggttcccaggaccaggacagaggtggtagtgaactctca

SEQ ID NO: 354444 - DNA, 122 bp, Homo sapiens
cttcctccccggacacccggaggcctgcgggcggctcagaggacgttcggcccggcccgccgccaaagactagggcctgatgttccgctacagccagaaggtccgtctcgggcccgggccgc

SEQ ID NO: 354445 - DNA, 122 bp, Homo sapiens
cccctggataagataaactcttagcagttttctgagcctagctgatacgtgaatgaagctcggctcctaggaagccctcctggcccctgggctgtgtcccccaccctccccctgctgcagta

SEQ ID NO: 354446 - DNA, 122 bp, Homo sapiens
ttaatcaaaacagtctctgaatatgatgaaagatctgttacatttttaagtgtgcacatgcggaatatgttcccaaatgtgaaggctcatggatctgctttcaggatgaataataggaaatt

SEQ ID NO: 354447 - DNA, 122 bp, Homo sapiens
tcatactgaataggaggcttgaaatcttttcttaacagcttccggatgctgctgctgaatcgcagaccacacttttagtagcaagactccagaacactggtttttcaactggaatgattttg

SEQ ID NO: 354448 - DNA, 122 bp, Homo sapiens
aaaacaaaacaaaaaaaacctttcgtatgcataaatctctacccttgaagatccagcccccggtgctcctcagctgcatcctaaaccacaggtggtagagttttatagagctggttgcatca

SEQ ID NO: 354449 - DNA, 122 bp, Homo sapiens
tctgaatggctagacagccgccaggtgggagaggcggagggtgaagaggcgggttccgcacgcggttagcctggggctgatctagtcttcagctttcaccggctgggagtccggagctgcag

SEQ ID NO: 354450 - DNA, 122 bp, Homo sapiens
tgttggatttcactcatagccacgagaacgggtggtggtctcttctgcagtgaactgatgcgatgtgtgatgtcactagttctcatccaaagcagatgacaattccagttactcctcaccag

SEQ ID NO: 354451 - DNA, 122 bp, Homo sapiens
accgagaaagccgccgccctggaaatcctctatgccccacctgtttaccctgcaccctcccgttgaactctgacaaccactgatcctttgactgtctcatttggcatgttttaaaattttat

SEQ ID NO: 354452 - DNA, 122 bp, Homo sapiens
cccttccccctgcgcacgcctggcacagagacgcgagcagcgccgtgcctgagaacagtgcgcggatcccactgtgcacgctcgcaaaggcagggttcacctggcctggcgatgtggacgga

SEQ ID NO: 354453 - DNA, 122 bp, Homo sapiens
tgagtgtcaccgacagctgcggaggcactggggcaatctgtgtgtttctcagcctggcgtcgggggttaagggggcgggaattactcggcgaggtcgggaggtcgcgcggtggaacccgggg

SEQ ID NO: 354454 - DNA, 122 bp, Homo sapiens
cgagcggaactgcgcctaggaggccgagggaggaggcgctccgcagaccctggcgcgccgcggagaagctcaaactttggcagggtaaggatttttaggggctcttgagctggaattttttg

SEQ ID NO: 354455 - DNA, 122 bp, Homo sapiens
aagatcattctgctgtctcttgaacatcttcaaggtagccctaagcctgctggcctcacccgccccagtaggaagcatgcccaagatggtcctttccccacccagagagagaatcaccatgc

SEQ ID NO: 354456 - DNA, 122 bp, Homo sapiens
aggggtgtcccctttggtctggcagctcactttaaacggcgcggggactacatctcccagcggccccgggccttcctgacgcagccccccctttcagcccgcggggaggtgcgggccgggtg

SEQ ID NO: 354457 - DNA, 122 bp, Homo sapiens
atgttaaaggtacacgtggtccggacaaaaggcgccaaagtcggaacgatttccatttagcggacggagtcttgggacatcttcgctgtaggaatcaataactctcattttttttttttgag

SEQ ID NO: 354458 - DNA, 122 bp, Homo sapiens
ccagaaggaagaaactccgaacacatccagacatcagaaggaacaaactcctgacacggccgcctttaagaactgtaacacccgccgtgagggtccgcggcttaattcttgaagtcagtgag

SEQ ID NO: 354459 - DNA, 122 bp, Homo sapiens
ccagcaccgacgtccttttccgtcaccgtcaagcctcaaaactgggaccgtgggtaatggcgtcaccccatccgccgtctctctctagctgccaacggcgccttcaccagacacgcccggca

SEQ ID NO: 354460 - DNA, 122 bp, Homo sapiens
ctgtgccaccagctggacgtgttttatctcagtcccaaaatgcacggtttctagacctcccgtggcacctctctcgcgactcaaagccagtgcagtgagttcctggaggcccatgcagcttc

SEQ ID NO: 354461 - DNA, 122 bp, Homo sapiens
cttcttggacacctcaaccccctcagctaaacctgagatccaagcgctccggattccaaacgtttcctcgagcaggtcctctctagccggccgcttatctatggtttctgctatagggcgct

SEQ ID NO: 354462 - DNA, 122 bp, Homo sapiens
gttggccaagacgggcgagtgggcttctcgggttctactctgtgaaggccaaggcaagggcgtcgtcgcgcgctgcctggcggagcccagccccttccccacactgtcgctgacacgcccgc

SEQ ID NO: 354463 - DNA, 122 bp, Homo sapiens
gacggagacccagaggggaataggaggttgcggccccctcccctcagccgcaggtgtttccgttcgggtggggctgctgtgtttacaacaacagcccggctccccggtttcctccctgattg

SEQ ID NO: 354464 - DNA, 122 bp, Homo sapiens
acttctggactccgcagccacttcaggctgctgctccatcgcatgaattccagcaggtggcgctgcaccccgcgcggacccggcttgcctctcggccccagggaggtcggttgatgagcagt

SEQ ID NO: 354465 - DNA, 122 bp, Homo sapiens
aacagccatgaggcaggcaactgaagcttgagctcttccctatgcagtagcacattacaccgctcctttcctttcttgctgatggaaacagaaagttaatcatgaaatactgtctgggcttg

SEQ ID NO: 354466 - DNA, 122 bp, Homo sapiens
tggataagactgcgaggttccaacagcagagcaatcctccaagccgcagctggcactgtccggcaccagaggggctgctgacaaacacgtcttctgcagctggcctgcagtctgctaacact

SEQ ID NO: 354467 - DNA, 122 bp, Homo sapiens
cgtgactcgcttcctgcaagatgacaatggagcctcaaaacaggccaccagcccgggtgccgcctttgtggccagaaaccgagtgccgcccgctgtgcagggaagggccactctccagccca

SEQ ID NO: 354468 - DNA, 122 bp, Homo sapiens
tgcctgtcgccgcttgccccgctcccagggctcattggctcccagtctcgacgtcagacccgtagcctctcacctattgggccagccaggacctgaggcggagtgcagaagcgagggcctgg

SEQ ID NO: 354469 - DNA, 122 bp, Homo sapiens
cggcgccggccgctcacaggtggccacccccgcccgggcccccccatcccatgcgcgccgcggcccggtcagtccccagccccaggcccggggagcactccccgctccgacggccctgctcg

SEQ ID NO: 354470 - DNA, 122 bp, Homo sapiens
cccgcagaattgcgcgctgcgtgggcgctcgggtctcaaggtgtggactgatacctggcccgcctgggcccggggagctactaggggaacgaccggcacgttcaccccatccctcaggcttt

SEQ ID NO: 354471 - DNA, 122 bp, Homo sapiens
gacgagcctgcctgcagggcatggccacccgctgtgttctgcgactagtgaactgtcatccgcctccttcatctctaggtctcggacagcccgggagacgagccctcggagtccccatacga

SEQ ID NO: 354472 - DNA, 122 bp, Homo sapiens
cgagttgtatgtctgccattaccagtttgtctttctgtcgttcaccatggatgagaaagccgcttcgtccattgccttcggggtgcatgaccttacagaccccgacgcgactgatcccgcct

SEQ ID NO: 354473 - DNA, 122 bp, Homo sapiens
gtaagatttattttttagtacaatcagtttaagtatttctaagggcaggggaatgtattgcgaactaacaaatgaactagacattgtactgaaaactgtggacttcatggatctggaccagt

SEQ ID NO: 354474 - DNA, 122 bp, Homo sapiens
gtaagccacgcgccacccaggtgggcagggtggtgacgcgaaagcccggatagacttccgcgcaggggcggggcggggcgaggaggcggcagcgcgtttaagtgacgtcttggctgtccgcg

SEQ ID NO: 354475 - DNA, 122 bp, Homo sapiens
cttcggctcgcgattgtgaggaaattggttgaggaacggagtgggacgcccatgccgcttcgccagcacttgccaggcgttccgtggggcagcatctcctctgaagggccgccgacagtacc

SEQ ID NO: 354476 - DNA, 122 bp, Homo sapiens
taaacttccactcctgctctgaaacttgcctcggtctttttctgccttatgcccctccttcgaattatttcttctaaggaggcaagaattgaggttgctgcggacccgtgcggattcgctgc

SEQ ID NO: 354477 - DNA, 122 bp, Homo sapiens
acgtcataacagtgtcttcacagggaatcgctgtccctagggaagccattgtggggaaaccgttgcagggttgtctgtgggggagccattgtggggaaaccgttgcggggttgtccaaaggg

SEQ ID NO: 354478 - DNA, 122 bp, Homo sapiens
gcgcctggctccgtgcaatccctgccggcactgccggctgcccgccttcctccaggacgccgggccggccccctctgactcagcagcatgggcggcccctcccacccacagccgacggggcc

SEQ ID NO: 354479 - DNA, 122 bp, Homo sapiens
ctcagctgcgaaggctgcaagggcttcttccggcgcagtgtggtccgtggtggggccaggcgctatgcctgccggggtggcggaacctgccagatggacgctttcatgcggcgcaagtgcca

SEQ ID NO: 354480 - DNA, 122 bp, Homo sapiens
aaacccggccgtaggtcttttccagagaccacacacaggacttgatactaacagatttaacgccatcatttcttctacccttaggaacgtagtatgtgatgtgaataaaatatagacctcat

SEQ ID NO: 354481 - DNA, 122 bp, Homo sapiens
tttctgcttgcagcagatacccaaagagtggaattaaagtagcctctttgtatattaatacgtgttttctttctaggatcagttataaatctgagggaattggaatcttctcaatggtgatt

SEQ ID NO: 354482 - DNA, 122 bp, Homo sapiens
acccattaaccttaactaaatgtatgattcatttgttaaacaaatactgagttccagctacgtgtaaggcatcataggggcagaagatacagcagtgaacataacaggtaaaaccctccccc

SEQ ID NO: 354483 - DNA, 122 bp, Homo sapiens
ggcctgctctgagggaaaccctactcgtcctcctcctggagtgtactgcaaacctggatccggtatccgctgagaaccactcattcatcagtctgcactaactggagaaggtgagcaggccc

SEQ ID NO: 354484 - DNA, 122 bp, Homo sapiens
tctccgcgttcccgcctccaatctgtttcacttacttaactttcctttaaacgccaactacggcttctagcaatattttttttacatccaaaaaaacaaaaaaacatattcccccttccctt

SEQ ID NO: 354485 - DNA, 122 bp, Homo sapiens
gacaccgagcagggctctcttgcctggattcgcctttacaaagtaactcgcgaaggtccccggaggggcgtcaagcggcgacagcggcccgcccgcccgcagtccgaagcccccagccctgc

SEQ ID NO: 354486 - DNA, 122 bp, Homo sapiens
aggatcctctggaaccaagaggggccggggcagtagaacgacaggtggcggggctttgggcggctccctccagcccagggagacgcgagtgccaggccgggcgcgcgcttcacttccgggaa

SEQ ID NO: 354487 - DNA, 122 bp, Homo sapiens
acagggaatagtcaaagatctctgaatccacagcattcagagttcagcaggggggcctgtcgagaagcccagcagataggtgaaatgccccacgtgtgacacgcatgaggctgttttaagag

SEQ ID NO: 354488 - DNA, 122 bp, Homo sapiens
tcttccacttgcaatttcctggtcttacttgctctgccacatcctggccttgcctctagacgtcttgcggggtgagatgaccttcctatttgtatttttacatgaaaactataaatgcctct

SEQ ID NO: 354489 - DNA, 122 bp, Homo sapiens
gccctgaactcagcagagagctgaggactggtttccctgggtgggactgacccacttcagcgggaagaagagggtatgtggactggaggttgtgccagcgtgggctgggatggggacagagg

SEQ ID NO: 354490 - DNA, 122 bp, Homo sapiens
ccctggtggagagccccagaccagaaaagcaaagtgtatcaggcccatcctgatagggtacgtgaatgcccagcacacagaaggctgtgcagccagtatctgtcccattgcttctcttcttc

SEQ ID NO: 354491 - DNA, 122 bp, Homo sapiens
gtgcgcgccacaaagttcaggaagcgtggctgacctctgagaccccgaccctcttcctcacgccttgcatttggtgccagcagcagtggtagaagcagggctagggaggccagcgccagctg

SEQ ID NO: 354492 - DNA, 122 bp, Homo sapiens
ttccccttctgctgttcttgttgctgcttggtgctgtgtgaagcgcaccagggcagagcccgctgggggctcacaagtgggagcggtaattgcgattggctgtgggaaaggacaggtttgca

SEQ ID NO: 354493 - DNA, 122 bp, Homo sapiens
atgtgaaagaagagcagcgctcattcagaatacctctttccctcttggaaaagggggtgacggttataaaacatgtgtgggaaagagtagagacagggggcccaggttaacccaaccttggt

SEQ ID NO: 354494 - DNA, 122 bp, Homo sapiens
cgccctcccgtagctctccggagagcatgtgaccaggccgttagcagcgccgcgagtgcccggcaatggcagggatggtgcctcaaatatccctggaagctctggtgtcacttgaatgaagg

SEQ ID NO: 354495 - DNA, 122 bp, Homo sapiens
cgggacgtggggcagaggatgagagcagggggtgctgagagaaaggccagctgactccctcgcctccctggtgggtgatcacacatcaagagcagcctggggcttagacctcatgcccctcg

SEQ ID NO: 354496 - DNA, 122 bp, Homo sapiens
agccagagagccaaggatttgagtaaacggagcttctcaagtcagcggccaggcatggaacggcagaatcggcgccctggcccagggggcaaggctggcagcagtggcagcagcagtggagg

SEQ ID NO: 354497 - DNA, 122 bp, Homo sapiens
attccgttaccatgtccttcatctgggccacgccagacaacaggccctggaaagggtcgccgtcacccggcgcctcacaggacacccgcagcttctgcggcttcccttcctgcccgacgtac

SEQ ID NO: 354498 - DNA, 122 bp, Homo sapiens
tccttccccaaggcgaatctgcagagcccacgtggctcagtctcaaattccaacaaaagtcgcaaagagcctgtccgtctcactgttccttttaattccgcaatcttgggaggaggtctctg

SEQ ID NO: 354499 - DNA, 122 bp, Homo sapiens
tgagacgaggccagagcatgcatggggcttttcttcaggctgtttggacagccgagaagccgagccacacccaggagggttgtttcacagcgtgtgccgcaggggcgcaggggccgcgctct

SEQ ID NO: 354500 - DNA, 122 bp, Homo sapiens
ctgacccgtcgcctcctggtcgcctgatgtgtctggtggggtgtgggcgtggccctctcccgcgctgctcctgtctgaccagccgcccacggtaacacagaaacatctggcaggatggagtg

SEQ ID NO: 354501 - DNA, 122 bp, Homo sapiens
gcagctaagggaataaacatccaggggctgtctgcagaaggtgagtcagagcgcttgtcacgaagctgcctcttcatcattagaaatgcccacctgttacttatgaatgatattaacaccat

SEQ ID NO: 354502 - DNA, 122 bp, Homo sapiens
ggaggtggaagttgcagtgagccaagattgcaccactgtactccagcctgggtaacagagcgagactccatctcaaaagagaatagagaagttgaaaaagacatagccttattttatttttg

SEQ ID NO: 354503 - DNA, 122 bp, Homo sapiens
atctcaaatttaggttttgcgtccctctttgctgacagctgagcaaaccgcattctacaccgaaggccctctattgatggccctgggatttttctgctcgtcagtccggagtcacttaccgg

SEQ ID NO: 354504 - DNA, 122 bp, Homo sapiens
ttccattgcccaaggaagcatcaaatacgtatgtttgttcacctactcttatagtcaatgcgttcatcgtttcagcctaaaaataatagtctgtccctttagccagttttcatgtctgcaca

SEQ ID NO: 354505 - DNA, 122 bp, Homo sapiens
tgaatgggagagttcacatccgcgactggcgagaggagacactgtggaagacaaagcaaccggaagcgaaacagagactgctctctgaagcctgcaaaacccgcctctgctggttcttcatg

SEQ ID NO: 354506 - DNA, 122 bp, Homo sapiens
ctgtcacctcccaggcactgcctcactgaggacaacggactggcccgtgtggctggcggccggcacgtaggctaggtcagatgagagccaccctgggacccaaacccccacaggcccccaga

SEQ ID NO: 354507 - DNA, 122 bp, Homo sapiens
aggatgctgccaacagggttctcagcctgcccgtggagcctgtcttcctaacttggcactcgtgccatcgttggaccaagatgtcattgggcaccgtcccctccggacagatgctttccagc

SEQ ID NO: 354508 - DNA, 122 bp, Homo sapiens
gtgggggtggtgacagagtgatcaggcccacagggtcaggctgcagtgtttcaaggatcgcgcccacctgtggccctgaatgggaccgatgctgttgagcaatgagccatcccagtggctcc

SEQ ID NO: 354509 - DNA, 122 bp, Homo sapiens
cacctcgagtcccttgttagcgtttgtcgagagtcagcgggaaaactcgatacctaacagcgtttccaccgaaggcagctctctgaggggcttcaccatcaagagcaagcgaaccaggctgg

SEQ ID NO: 354510 - DNA, 122 bp, Homo sapiens
attaagaagtttctgggttaggagtgaaggaaggctagataagtaattctgccactgagccgttcacagaactggtccgcactgccccaagctctaacttaccagaaacatcaccagcagtc

SEQ ID NO: 354511 - DNA, 122 bp, Homo sapiens
ccccagggagggggcctggcccgtggggggcgtcaggccggtcatgtgggtcccagctcccgcactcgggaaccggaggagggcgcgcggccagggacagccggccggcctgggcgccgcgc

SEQ ID NO: 354512 - DNA, 122 bp, Homo sapiens
agagactgaggagagacagcatgagggtgaggagtgtagcagagatagaaaatcccaggccggaagacagctgaaggagtaacatgagaagattctcctggccacatctgtgtattagcaga

SEQ ID NO: 354513 - DNA, 122 bp, Homo sapiens
tgtttttactacttatattttgacatttcttcacagttcaggcgatcattaccaaatattcgaggtgggagtactggccaatcccaaaaatgttctagcaacagccaagtcagaaaacaaat

SEQ ID NO: 354514 - DNA, 122 bp, Homo sapiens
tcacagttttggggtgagggggccttaagtcagagacagaagggcccgtggtgtccgtgccgcctcacttcccaccatggccttcagtggtgcctgtgccctgtcccctgcaggtctgagtt

SEQ ID NO: 354515 - DNA, 122 bp, Homo sapiens
gtgcagtgctctctggggttctcccagggggactgtcggtgaggctgcggcgcccgagaccgctccacgtgcagctccacggcgtgcccaccagggggcgcggcccgcatccttcctcggag

SEQ ID NO: 354516 - DNA, 122 bp, Homo sapiens
gcgaaggatgccatcctccgccgctaccgtttgcttttctgggatgcgcggtgagctgaacgcctttccgtgtgtttttcaccacggctgttcttcccgcatgagctccctctccgtgtaca

SEQ ID NO: 354517 - DNA, 122 bp, Homo sapiens
tttttttcttattaatttttaggagctctttatataataatattatccccttgcttgtcacgtcatgaagactttatccctgtttgtcttttaactttaaacactcttttgccttatagaag

SEQ ID NO: 354518 - DNA, 122 bp, Homo sapiens
caccagatgccagaaaatcagggtggggcacgcaggccaggggctccagcggctgggcaccgtgtccttcccgaacctggtgctggaagtgcgcccgcctccgcctctcccaggcacccacc

SEQ ID NO: 354519 - DNA, 122 bp, Homo sapiens
ctggaaaatcgggtcactcccacccgaatactgcgcttttccgacaggcttaagaaacggcgcaccacgagattataacccgcacctgactcggagggtcctacgcccacggagtctcgctg

SEQ ID NO: 354520 - DNA, 122 bp, Homo sapiens
tgggaaactgaggcacatgattacttgcttaagttcacaccgttagtaagtggggaagtccggaattcaaaccaggctccagaactctatgctaacaggagtgggcagtgctgtgggattct

SEQ ID NO: 354521 - DNA, 122 bp, Homo sapiens
ggccttccatctgtgcaacgaagtggccattgctcaggaagagcgccagggaggggctgccgggcctcagacgggcagtgaagaggaggaggcctcgggagcttcgcgggaggacgtgcatg

SEQ ID NO: 354522 - DNA, 122 bp, Homo sapiens
ctttgacctagagttgttaggcgtgggtgaagcaatcaattgccaggaattctttcagcacggaggttttctctgcaaactcatcctccttttatcttttttcttaaaacacattcttgtcc

SEQ ID NO: 354523 - DNA, 122 bp, Homo sapiens
agatactccagggacggcatcaccttctcctaccaagcacaactccctgcgccggctgaacgctagggtttcagctgatcggagggaaactgaatttccccaagagagggcttggtcctttc

SEQ ID NO: 354524 - DNA, 122 bp, Homo sapiens
accaaattattcacttcctatttctatgacatcacctatcacaatataccatgaagatttcgtttagacgcccttctgtaccagtttccgaatacttggagatctgggactattctgcctct

SEQ ID NO: 354525 - DNA, 122 bp, Homo sapiens
ttgtctaagtgtaatggaaagtttatgctgagcgttagtgtgtatgtatgtgcgtacatgcgccaggtgcctgtgccctctgtaggatggtttgcttaatatggttttataattcagtttac

SEQ ID NO: 354526 - DNA, 122 bp, Homo sapiens
accccattcgggaacacatacgtaatccaacacactagctctggcacacacactggaatgcgcgcaaaaccacacagacacagaacacacgcggttaccaaacctcattctcagaggccaca

SEQ ID NO: 354527 - DNA, 122 bp, Homo sapiens
gttcctattattagtataaaaccgatgaggctgacatgaatattttctctcatgataagacgggctatctattgtgggtccaatatccaggcacaactacatatactcagaggctgttgttc

SEQ ID NO: 354528 - DNA, 122 bp, Homo sapiens
cggcgcagctcctgctcgtctttcccccttcctgggcgagaggtgcctatggcgcctgatcgccgccgccgccgctgccgccgccgctaccgccacagccatcgccgctgggctgggtgcag

SEQ ID NO: 354529 - DNA, 122 bp, Homo sapiens
cacactgctttgcagctctttcctagctcttttcccctgcagaagtttccaaagagactacggggctccgggagagcaggcgcttttaaatagccggcccctggctgccagccagtttgtag

SEQ ID NO: 354530 - DNA, 122 bp, Homo sapiens
gaagtgtcctcctcgctctcttataaaaacaggacttgttgccgaggtcagcgcgcgcatcgagtgtgccaggcgtgtgcgtggtttctgctgtgtcattgctttcacggaaggtgggagaa

SEQ ID NO: 354531 - DNA, 122 bp, Homo sapiens
agcggtcctcaccccctgtgttctgtcagctggggtggtgaagccgtgagtccctggcagcgtggtgcatcacagggctgctaagtgggcatgggctgacatctccccatccccagggatga

SEQ ID NO: 354532 - DNA, 122 bp, Homo sapiens
ccatatcaatgtagagaattatgaaacacaggtgggagtcagtagaaagtgaagaaacagcgccacaaatgagtaaagcaggtctagcaggcttgtctgttgagttactgactactggcatg

SEQ ID NO: 354533 - DNA, 122 bp, Homo sapiens
ccttgccttctctaaaatgcggacacgtgcttttcccgcattagggggggtctcccggcgcgcgccccgccgccacctgttgaggaaagcgagcgcacctcctgcagctcaggctccgggcg

SEQ ID NO: 354534 - DNA, 122 bp, Homo sapiens
ttttgctcctcttggtggtcaccgcactcagtgccaaggacggcgtcgtcttttacctcccggggtcagaaaatgcagctctcctgccagttattctacacaggcacacttcagtctggccc

SEQ ID NO: 354535 - DNA, 122 bp, Homo sapiens
ggctcagcggaatgcccttgatgacctttaacaatcacccttttatcatggggacaagagcggcctagaaggaggtttttggagtcaccagacccccatggcccctcaccaggccccttcaa

SEQ ID NO: 354536 - DNA, 122 bp, Homo sapiens
ctgtccagggaggtaggctggaggtgtttccttcctcctcctgcccatccccccgtctcccgcctctgtaaccgtcacaggaaatggcctcaccaagcccttgaacgacagcgcatggtgag

SEQ ID NO: 354537 - DNA, 122 bp, Homo sapiens
gtggcggggatgccctcttggcaccctgggccacacctcctggcaggagcccggcccgtgcgctgaggcctgcccttacgccggcccggtgcgctggccttgcttttcacagtcgatctttg

SEQ ID NO: 354538 - DNA, 122 bp, Homo sapiens
ggtgagccttgctgtctacctcttcctcctccatctcgaaggctgagtggtcttggctgtcgaaacaggaggcgctgaggaagacagggggagccggcggggactggggtggggtccccgga

SEQ ID NO: 354539 - DNA, 122 bp, Homo sapiens
ttggagagttgatgacagacaatttagataatttaggttaaagtacttgataccagactgcggcttctgggccacatgctatggcatgatgggggtttgggaatgagattcccacagttctt

SEQ ID NO: 354540 - DNA, 122 bp, Homo sapiens
gagggtcagagcccatgggcggttctgggacatggaagctggtgtcgagtcagtcggggacgtggcctccccagcacagccagggtgagtgtcctctctctctaaggcgaggcaggaggggc

SEQ ID NO: 354541 - DNA, 122 bp, Homo sapiens
gtacacaggtgcttctttctaaattcaagttactgaagctagaccccgcggcgcgctctgcgtctgggtctaggacacgccttctagctgcgatccacgttgaccccgcacaagccgaggtg

SEQ ID NO: 354542 - DNA, 122 bp, Homo sapiens
agtaattgtgtccataaataacgaggcagttaaacaggaaaagaaaggatttttacctgacgttcacatcgcttcacaaggtttagtggattcagaaggacatctggactccaggaaaattt

SEQ ID NO: 354543 - DNA, 122 bp, Homo sapiens
gggtggaccctctgatacattacatgttgagaagatcctcagcttcttgccatgtttcaacgtggactaaacaaagctattctatcctctgagcttttaagctcccttttcaataaataaat

SEQ ID NO: 354544 - DNA, 122 bp, Homo sapiens
ctgcttctgtctccggaggcaccaccttgacttgccttagcgtgagctgcagacagtctgcgaagaatctcccacctgtgctcatctcttgctccgggattcccctgagcaactgttctagg

SEQ ID NO: 354545 - DNA, 122 bp, Homo sapiens
agaagccgagtgcgaaacgggacttggcgtgtcatgggcgctaaggaaacggagtaaggccgactcacaggcaggaacatcgggacacacacaaagaggcaacacccactgcggacggggaa

SEQ ID NO: 354546 - DNA, 122 bp, Homo sapiens
gcagagaagggtgccccaccgggacgactggaacacctcagtaggatatgggtgggcaaacgtgggccacacgatcccaccggcctcttttgtcctaagtcccgaggcacgggtgcagctag

SEQ ID NO: 354547 - DNA, 122 bp, Homo sapiens
taacgcactagggcggggccggcgctggagcctcttaagtagcggctgcggaggggcgggcgggcacaggcggtgccgcggtcgctggcccctcctccggccccgcgcgcccactccgcgcc

SEQ ID NO: 354548 - DNA, 122 bp, Homo sapiens
tgaaagccaaagcctttcattccaccaccgtcacggaactagtttagagaagaggaagggcgtgcattttgccttgttaaatatctactgcactaagaacttctggtgtggttcagatttct

SEQ ID NO: 354549 - DNA, 122 bp, Homo sapiens
ttagaggactcacagttcctgatttcaaaactgactgcgaagcttcagtgtcctgaacagcgtggaacgggcaccaggactgtcatgcagtcactaagccaaactgaggatccagaaatgag

SEQ ID NO: 354550 - DNA, 122 bp, Homo sapiens
aacaggccctacagacgctgtggtggcggcggagcctgtttccctttgcagaagaacagacgcgggcacgcgggcactgaggcatgctctggaagggcccatacacgcggccgctggacggt

SEQ ID NO: 354551 - DNA, 122 bp, Homo sapiens
agaagttctggggaggggctgccagggcagcagccctcagggggcctggtgagggaactccggcccgcctgtgggtttcggtttggcactgttggcagcaagaacccgagaagggccgggaa

SEQ ID NO: 354552 - DNA, 122 bp, Homo sapiens
gggctctctccttcgcccttcttggcccgctcgccttcagctcccacccgcagcagcaaccgcagcctgcttccggggactgagcagccctgggtcagccaaggttaagcagcgggtgggga

SEQ ID NO: 354553 - DNA, 122 bp, Homo sapiens
atttaactctggagttcatgttctactgcttggttgctgcatcaaatacagagcctagcccgtaatagttgctcaaaaatatttgttgaacctgatctataaggtcagattcttactagtga

SEQ ID NO: 354554 - DNA, 122 bp, Homo sapiens
tgaggcgcagtttcctactcacccggatccgaatcctccgcggtgctgtttcaagagagccggattccagatcacgctccagcccggactcggaattcctgccctgcgggtctgcattttca

SEQ ID NO: 354555 - DNA, 122 bp, Homo sapiens
tggattccagggctggggcggggattcggggccttaggcacaggtcccctcttgcagtcacggccaggggctcgctctcgcgcaatccccgccctcactgtctcgcctgttgcgcccggagt

SEQ ID NO: 354556 - DNA, 122 bp, Homo sapiens
ggtgcgggatataatctcgtgatgctccgttttttaagcctgtcggaaaagtgcagtattcgggtgggagtgacccgattttccaggtgccatctgtcacccctttctttgactcagaaagg

SEQ ID NO: 354557 - DNA, 122 bp, Homo sapiens
agggaaaaggcgggtctccgtgacgacttataaaagcccaggggcaagcggtccggataacggctagcctgaggagctgctgcgacagtccactacctttttcgagagtgactcccgttgtc

SEQ ID NO: 354558 - DNA, 122 bp, Homo sapiens
aaaatctttaggtgttcagtagttctctagagattttaagtggtatcacaacagcccatccggagaacttatttctaaataatttgaaaaacaaacaagaaaccattagggttttcatgcag

SEQ ID NO: 354559 - DNA, 122 bp, Homo sapiens
attccaggaggcagctttggtagcatcccaggtgcccagaggggagtcagtacagcagaccggagccatcaagttcttgatcaagaacagcttgatcaccatcaaaaccagcttaatctcca

SEQ ID NO: 354560 - DNA, 122 bp, Homo sapiens
cggggcactgtgcattgttactgtagctccagtgcgttgccactgatctgctgactcacccggtggcggctcggggcagccagccctgcagttcctcagcagctgccccatatccctcttta

SEQ ID NO: 354561 - DNA, 122 bp, Homo sapiens
atattaactacgatcattgaacatcttctctttacctttcaagtatgttaatattgactacgtcatcctttaggattcttttacacacacagtacagcctcccagactctgctgtttgaaat

SEQ ID NO: 354562 - DNA, 122 bp, Homo sapiens
taggcagcatagccagaacatgtctccaaaaagtgttttaaaattacccatggccagtgccgggcgtggtgtctcacacctgtaatcccagcagagattacataccttgggagaccgaggtg

SEQ ID NO: 354563 - DNA, 122 bp, Homo sapiens
tgtggcagacgatggtgcagcctgggctcagagcagctcacatcacgtacacggcaccctcggctgttggggaaagaccgttaaagatgaggagacaaggccttcttccagggcgctgggcc

SEQ ID NO: 354564 - DNA, 122 bp, Homo sapiens
ttcactgtcccgcctgcctcaaggcttccccacaagactcccacagcctggaggctgctgcgataccccagaggaaagctgcacccccgtaaataacccttcagcctcccgccgtgcccctg

SEQ ID NO: 354565 - DNA, 122 bp, Homo sapiens
gcggccgagcagaacaaggaggccatccgctccgccaaggaagagatcgccgagtaccggcgccagctgcagtccaagagcatcgagctagagtcggtgcgcggcaccaaggagtccctgga

SEQ ID NO: 354566 - DNA, 122 bp, Homo sapiens
taaggggaaatggagaagtgcaaagggacgagcagaatggctggcaccacctcaggttagcgcactgggacgttccagttctcacaccgcccaccccaccccacccaagtccctacgcacgg

SEQ ID NO: 354567 - DNA, 122 bp, Homo sapiens
gcgcggggcaccctgggagagcggggccaggccccgccccttaaagggggcgcgccccagcgcaggctcagcaggtcagctcgcagggactcccttgcaagaagaccccggactctgccaaa

SEQ ID NO: 354568 - DNA, 122 bp, Homo sapiens
ccacctgcccttgtgtatctctgttcaaatgttactgagaagcatttacgggataatgcccggaggatgtttgtgtgtgtgacagtgtacattcttcaacatcttagattccattttggatg

SEQ ID NO: 354569 - DNA, 122 bp, Homo sapiens
tttaaattttcactgtaaactctccagatggtcacatatgggggcttctaaggcagaacacgcttcccaataacattagagcaagcagccttctctaggaggcatccatttccagcagtcta

SEQ ID NO: 354570 - DNA, 122 bp, Homo sapiens
ctctgagtaccagatcctccctgatacccccgaccccatgggcatcctctatcccctcagcggccctgggagagcctcagctctgctatatcctggatgccatcctgtttctgtatggaatt

SEQ ID NO: 354571 - DNA, 122 bp, Homo sapiens
atgaggaaccacccaaggatgtcggggaggggggagagaaagggattccctcaccttttccggcacattcctcgttaatttccaccaggaggaggcgcgcagcccagctcccctagtctctc

SEQ ID NO: 354572 - DNA, 122 bp, Homo sapiens
gtgtcctcaagagtggctcccagggcttacctcccttcttctggctgcagtgccggagtgcgggccccagcttgggctgtcatttcagactgagagctggaagccattgaggttgactcagc

SEQ ID NO: 354573 - DNA, 122 bp, Homo sapiens
acctgggagatcgggtcactcccacccgaatactgcgcttttccgaagggcttataaaaacggtgcaccaagagattgtgtcccgcacctggctcggagggtcctacgtccacggagtctcg

SEQ ID NO: 354574 - DNA, 122 bp, Homo sapiens
tttggctttgcaagccgtgtgatctctgttccaaccactcaactctgctatcttagagagcggccatagaagatactttaacaaatgggcgtggcttttattcaacaaaaatatttggccaa

SEQ ID NO: 354575 - DNA, 122 bp, Homo sapiens
tcgcatggctccccctgcgctgggaggaccgaactgcagcccagggctactgggtgtgatcggcgttcctcggaccccgctggggtcatcgcctcctcccctcttctcctactcagccctag

SEQ ID NO: 354576 - DNA, 122 bp, Homo sapiens
atcccctgggcgcctgtcccttcgcactggcccagggagttcatgtgtctgatcagagggcgcagtccaccctcactatctagctgggaagtttttgtcatctgcctgtccgagaggcagct

SEQ ID NO: 354577 - DNA, 122 bp, Homo sapiens
cgggcggcgggcggcggggaacaggctgcggggcccaggccaggggtggggtcctggggccgggactcctgcagcgggcggggaagcccccggcaggccggtcccttccgcctctcctttgg

SEQ ID NO: 354578 - DNA, 122 bp, Homo sapiens
ggtgatgtaaaaatgtcatgtttcattgcttcatcctcattttttctttactccaaagggcgtggtgactccaaggtaaaggggccaagcccatgagtcaaggaggcaggtttacaggaaca

SEQ ID NO: 354579 - DNA, 122 bp, Homo sapiens
aggcgactgctctactgccagcgttccctgctggacaaggtctgacgcccaccgccggcccgcccactcctaccacaaggactttgcctctgaaggccagtggcagcaggtggtggtgggtg

SEQ ID NO: 354580 - DNA, 122 bp, Homo sapiens
gaggggatggagagccgtaggtgtaggctggcccttcatccaccccataggggtaaggctcgtaggtctcatacgggtaagggtcatagggatcgtagtaggtggactgctggctgcggagg

SEQ ID NO: 354581 - DNA, 122 bp, Homo sapiens
aaacaacacgtcggacacctcttgcattttcctagttatgaaccctcttggttgctagtgcggttcttggcgggccggtgggaagcaactgagtggctgctgggcggcgggagctccttcgg

SEQ ID NO: 354582 - DNA, 122 bp, Homo sapiens
caacctacaggttctctgtagaggtgtaaacggaccatagcctactcttgcaccaatcaccgagttttggccagtcaaaggtggccaactgttcaaaccatgctcaaacaccacaagtgccg

SEQ ID NO: 354583 - DNA, 122 bp, Homo sapiens
cccatccccaagagggtgagcgcaatcagcttcgccatggtcggggatagacaaagggatcgatgggcgcagacaccgacgggctaggaggctctgcctgcctgcagccgcagccctgctgg

SEQ ID NO: 354584 - DNA, 122 bp, Homo sapiens
ggccaagcacaggctggtggtgctggtcaaggacaatggcgagcctcctcgctcggccaccgccacgctgcacgtgctcctggtggacggcttctcccagccctacctgccgctccctgagg

SEQ ID NO: 354585 - DNA, 122 bp, Homo sapiens
cattcttcttaagcattagattagaatatattaattgcttattttagagctggtgtcaatcgtgctgatttctttatgtggtcagagcaaaattcacatttttttaagtgttcagagactgc

SEQ ID NO: 354586 - DNA, 122 bp, Homo sapiens
gtgctgtgggcacgagccaggcccggtctggcctgctgcctgggttcctgtcggtcctgccggctttctctcggcctgagtctgctgcctcaatcacaagtgcaggggagctacctcaggag

SEQ ID NO: 354587 - DNA, 122 bp, Homo sapiens
ccatgtgctgtgtggagtaattatccatgttggcagtcttcttcactcccctttcagctccgttctccaattgacagggaggatggggaaaggcgtcatttgaaaggtgacatttcaaggct

SEQ ID NO: 354588 - DNA, 122 bp, Homo sapiens
gacaagattcttggtgtcaccattgagaactcccggattgtcttgcagattgacacccgccgcctggctgcagatcacttccgaaccaagtctgagatggagcagtctctgcgaaggagctt

SEQ ID NO: 354589 - DNA, 122 bp, Homo sapiens
cgttcgcacctggagtttcttcttggacctggcttccctgatgcccacagatgtggtctacgtgcggctgggcccgcacacacccaccctgaggctgaaccgctttctccgcgcgccccgcc

SEQ ID NO: 354590 - DNA, 122 bp, Homo sapiens
tcctgagagccgggtggagcagagacccggccattgcctagggagccttccaagggagcccgggccgggcgcgtcccgggccagcgactgcgggactccgcggagctggggcgcccgtggcc

SEQ ID NO: 354591 - DNA, 122 bp, Homo sapiens
aaaccaccgccaccagacggccacctacaggccgacgggaaacggctcagagaaaaccaacgccaccagacggccacctacaggccagagaaaaggcctcaaaacaagccagcaccaccaac

SEQ ID NO: 354592 - DNA, 122 bp, Homo sapiens
gggagttaccacgtctggctaaagtggtattgtcttaaggaaaacctatgaatttgcctgcgttggcttggtgctgaggaaagtggaagagagaggctggggtacacctttcaacatgaatg

SEQ ID NO: 354593 - DNA, 122 bp, Homo sapiens
atttttttgcccctgagtctgagcacgcacattttgaccttcctctctcacaccagtgaacgggcagttgcaacacaatgtgttagggtgcccttggggaattgccaagtcttctgagaaga

SEQ ID NO: 354594 - DNA, 122 bp, Homo sapiens
tggggaacgctccctgagcacattgctgccccagattgagcaaaaccaggatgctgttagcgaggggcggcactgtggaggctgctgggcgagttccttgggggtctacctcttgctctctg

SEQ ID NO: 354595 - DNA, 122 bp, Homo sapiens
ctgcctcctgggttcaagcaaatctcctgcctcaacctcccaagtagctgggattacaggcgtgggactaattttatatttttagtagatatggggtttcaacatgttggtcaggctggtct

SEQ ID NO: 354596 - DNA, 122 bp, Homo sapiens
aaggagaggtaagttcttgctaaggtggtcaggctcctagctgggacactgggaaggtggcgggagattggaacatgcagtagttgcattctggagtttactgaggctttccgagtggggat

SEQ ID NO: 354597 - DNA, 122 bp, Homo sapiens
actagaattcggacttctaggaagggctgtattgtccttatcatcagaatccctccctcccgtccctgtgacctcccaacttcacaaacatgtcttgcctgcaccctaggcaaacgtggaaa

SEQ ID NO: 354598 - DNA, 122 bp, Homo sapiens
tggggtccccagcttggagcttccaagaccctggtctgtcccggggatcagggatgggggcggaagcaaccgacaccaggtggctgaccccggatgggctcccatgacaggctgtgaggtcc

SEQ ID NO: 354599 - DNA, 122 bp, Homo sapiens
cagtgcgaactggctacttcccaactgttctaaaagaggcacaaagggcagggacattttcgtaaacagagatcatttctaagtcacatcttcataaacagggaaaggcatatagtaaaacc

SEQ ID NO: 354600 - DNA, 122 bp, Homo sapiens
tcgaagtccggagaaacacagaaaagctctagacctgctgggtcctgcacatgcgcagtccgctggcgctcggacgccgcggagcggaaaccccagccttggcgggaagatcctggaggatt

SEQ ID NO: 354601 - DNA, 122 bp, Homo sapiens
tatcagcaaggctaggatcattatatatcaacaatttaaaatgtaagtctttagagttgacgtggagtaacctatggataatttttggcaagtagttcaggtgatttaatttttaatccctg

SEQ ID NO: 354602 - DNA, 122 bp, Homo sapiens
cattttagcttcaaaataaaaataaagcagaggacaaatgcctgtcacagcgtcgcagcccggttcatttggtaacaacaagtctcacacgtcggctgagcccaccggagagaagcatacag

SEQ ID NO: 354603 - DNA, 122 bp, Homo sapiens
taaaaacaaattgatatgctctaattgcaaatgtctggattgtttgtctccgacagcaatcgtctgaaagcaaacagctgattggtccagctgggggaggttgtttcctgacaaacacgctc

SEQ ID NO: 354604 - DNA, 122 bp, Homo sapiens
ggagcgtgtcgcttttgtaattatgatgtaaactccgggcacgcggggaccctcgcgcttcgctcactaatttgtccccagaccctactacctggcacagtaggcgctcaatactgttgatt

SEQ ID NO: 354605 - DNA, 122 bp, Homo sapiens
catccataaatccaatccaaatttgctcctcactttgattactcttttagattgttacttcgtttcttcacaagcatagacttctttgtctgctgcttctgttgaagcacataaatccaagt

SEQ ID NO: 354606 - DNA, 122 bp, Homo sapiens
tgggtgatagggactcgggggctgggagcaggctgttctcagacgatagaggttcttggccgacacgtttgaacttgttcctgcagaccaggggtccagagaaggtgctgtgtggggaggaa

SEQ ID NO: 354607 - DNA, 122 bp, Homo sapiens
cccccacccccttctccaccctcacggactaggcagaggccgcccgcggtcaggccaggccgggtccaattaggggactcacagcctgccccgctgtgcaccccgaggaggcccggcccctg

SEQ ID NO: 354608 - DNA, 122 bp, Homo sapiens
accatcacctctaccgccaggtgtgtgtatgctgagtcccagcgttccagatcagtgtcccgcacgtcctcggccttctgccagtaggggaggagtcgggggcggagcgggaggagtggcgc

SEQ ID NO: 354609 - DNA, 122 bp, Homo sapiens
tttttaaagctgcagccacttctttcttttgaaacagagaaccacagggaggatcaaaggcgtgctgctgttaactgcggctctcaaggccttgccctccacctggcagaaaccctagagag

SEQ ID NO: 354610 - DNA, 122 bp, Homo sapiens
caaaacagcctggcaagcaccatttaacagaaatattaacgggctaggtgcagtggctcacgcctataatcctagcactttgggagccaaggcaggcggatcacttgagctcaggagttcga

SEQ ID NO: 354611 - DNA, 122 bp, Homo sapiens
attcaatgtccaagtccatgttttccttcttcatacccttttttaattaaccagggctgccgctagcccatagcatgcctctgtgcaaatcagaaattcctctgtgtagatgcagacccatg

SEQ ID NO: 354612 - DNA, 122 bp, Homo sapiens
tttccttgtgccggggatcctgtcccctactcgccagcgccaggctcctcccccccggcgcggatgacactagaacctccttaagttgcgtcgcgccacagctgtctgcgaacactgagctg

SEQ ID NO: 354613 - DNA, 122 bp, Homo sapiens
tggctttatcgaaatcatcaagagcaccttcagagacaagagacatggtgtgtgtgttggcgacagatgagaatgcaagcaaggctgggtggtttctgggcaaagcattaggaatatgattt

SEQ ID NO: 354614 - DNA, 122 bp, Homo sapiens
aaagttaaataaaatttaaaaattcaaaaattcaacaagttaaaatataaccaagtgctacggtttgaaaattcatggtgaaacttaatctccagtgcaacagtactgagagatggaacctt

SEQ ID NO: 354615 - DNA, 122 bp, Homo sapiens
atttctgggtctgttccagtcgattcaagatgaactggcttgtatcaatgaagcgctcaacgcagttcacaaaacaggcctcagcccgactgtccaactttggcccaggcttgtccatgcac

SEQ ID NO: 354616 - DNA, 122 bp, Homo sapiens
tctgagcagtatatggtagcatccttgagctgctgggatccactttgtataaggtcactccgtgtaggaatagtaccttcaggtttctagtttgtctcttttccttgtgatatttgcaagag

SEQ ID NO: 354617 - DNA, 122 bp, Homo sapiens
atcaggataaacggacttaactgtagtgtgagaacaggtttgaaaaagaaaagtttagggcgggggagaccactattggtggtctaattttaatatttcaaacagctgcgtattatagctag

SEQ ID NO: 354618 - DNA, 122 bp, Homo sapiens
caagcaagccccctcacaccttttgtctgaaaaaagcttgacttctttgcagcaatgtctcgcccattccagcagcagtatctcagttaacttggttccttttcctccaggctcaaaacaaa

SEQ ID NO: 354619 - DNA, 122 bp, Homo sapiens
cgtgagtaccaggaactcatgagcgtgaagctggccctggacatcgagatcgccacctaccgcaagctgctggagggcgaggagagccggtgaggacaaggaacctggaaaggggatgcttc

SEQ ID NO: 354620 - DNA, 122 bp, Homo sapiens
tctaaactcctcggggcaggcgctttctttagtgacactctcagtgttgtttgtgggagacgctccgcaaatgtggggagcaggtgggcgcctttggtccccgtcctcctggcaggcagtgg

SEQ ID NO: 354621 - DNA, 122 bp, Homo sapiens
ttgcttgcccttctcaccgactgcggagaggagtctcagagtgcacagtcgcagagaaggcgtgcgggggcgtgcaggggcgcacaggcgcctgcctctgcgggtgggaaaggaaggaggtg

SEQ ID NO: 354622 - DNA, 122 bp, Homo sapiens
catcttgttcctgagtgtgctgattaagcctttcaaataagtgagatgcacagctgaatccgcaacaggaatgtactgctttcatttgctctatctcaatatccagacatcttcagaatgaa

SEQ ID NO: 354623 - DNA, 122 bp, Homo sapiens
tctcctactttgacaaaatttagaccatctttaggactgcagtaattcagttaagatgctcggaataaacacttgcccagtaatggcagcgccaccaatgaactgaggacaactttgagctt

SEQ ID NO: 354624 - DNA, 122 bp, Homo sapiens
gactgatgctgctgcctggatatccacttgcaagcattcccgagcctcagaacgtgaactcgcaaacgctcaggcaccagctgtcttaagcctaaatctgctctccaccaaaagggtggcat

SEQ ID NO: 354625 - DNA, 122 bp, Homo sapiens
tccttccttcctcaggctggatatgggctctttaaaagcctattttcttagagcaaaacccgtttcccccacacctgatcgtcacaagccgtctaagacacgtggtctagggtttgctagtg

SEQ ID NO: 354626 - DNA, 122 bp, Homo sapiens
aggatgcataagtttctgtaagtgaaagttacacctgaaccaccaaaatgatgttgacagcgaatctccttttgagaaatggtgtgaaaaaaccctcattatttagacaacacagcgaaatg

SEQ ID NO: 354627 - DNA, 122 bp, Homo sapiens
atggtggtccaggcaggaaagttccttctgctcaatgcagggcagcacccagctgagactcggtgctccggtaaggcctccagaactgcccaggtcacataaggggggccagaggggctacg

SEQ ID NO: 354628 - DNA, 122 bp, Homo sapiens
acttcctgtctcagctgctactcggttcctgcccggccaccccccctccccaggggcaggcgggctagcccccccatcatatgcaaatcatggggaaattcacctctgtttccttctaaggg

SEQ ID NO: 354629 - DNA, 122 bp, Homo sapiens
cgcccagtttcgaaccggggacctttcgcgtgtgaggcgaacgtgataaccactacactacggaaaccacacgcggaacctgcgcggcaaaacataaccatgaaaatcttagatcagccgtt

SEQ ID NO: 354630 - DNA, 122 bp, Homo sapiens
tgtgaggagccagattatatataatgtaaaaatacacactgaggcaggcgcggtggctcacgcctgtaatcccagcactttgggaggacgaggcgggcggatcacctgaggtccaggagttc

SEQ ID NO: 354631 - DNA, 122 bp, Homo sapiens
agaaatacggggcgggccctagatcccctccaggctccagagcgcgctctgccgcagagccgactccgctgcccgaccttgagcgcagcgcacaaacgaccccaccatgttctcgcccacgc

SEQ ID NO: 354632 - DNA, 122 bp, Homo sapiens
ttctgagacactgatcccttatccttttattcctgaattaatggcactggggtcttaaaccgggggtgtgtgaggaatgtggaactgggcatcgggatatctgtgttttagttccagttctg

SEQ ID NO: 354633 - DNA, 122 bp, Homo sapiens
gcaggggattccgggccaccagggctggcgggcgcgaggtgtagtagatttcgggggggccggggggtgcgggagggggtgggggcagggcctcactgggcccctcagggctgctgtccggg

SEQ ID NO: 354634 - DNA, 122 bp, Homo sapiens
gggcgggggcggcgatggggcgggtcacgtgatggggtttaaatctcccgcagccggagccgcgggggcgccagtgccgcgcgtcgagcgggagcagaggaggcgagggaggagggccagag

SEQ ID NO: 354635 - DNA, 122 bp, Homo sapiens
accagcatataacagaaggtggcatccacccagctagaaagggctcatccagaagcacctcgttcagctcaccagggttgcccgtcagtttatgaacagtggaagaaaaaggtttctttctc

SEQ ID NO: 354636 - DNA, 122 bp, Homo sapiens
aaagcttgaattaaaaacaagtaaaagatttgtttacacctgtggcacaaaaatgagttccgccatgggacatgaactcagaagcatgtttggaatattatttaggataaatagccgcagtg

SEQ ID NO: 354637 - DNA, 122 bp, Homo sapiens
gctcccaaacctcctccccgaccgccctgcttacctggcgccagctccgggcgcgggccccgcgaccgccatgacctgagacccgagggactctggagcccagctgcccctagttcagtact

SEQ ID NO: 354638 - DNA, 122 bp, Homo sapiens
ccggactcaggagcccagttagctaataattctgggtcccaggagtgtctagacgcccctcggggagtgcgaagaatgcagtgtccttggaatccacctttgggaaagtcagctgacctccc

SEQ ID NO: 354639 - DNA, 122 bp, Homo sapiens
gagatgtggtccaaagcccggctgggcgattaaccctgtggatctcagcttctcctcttccgggcgagcatgagcctgagggtcccagggctccccaggtcccttccagcaattggtcacac

SEQ ID NO: 354640 - DNA, 122 bp, Homo sapiens
atagtaggcattcgacacgtttttttgtgaaataaacgaaatagcgatgagttgtggaaacgcttgagtagaagcagcccaaataaatatagtgataaatgccaacaatttttattttttaa

SEQ ID NO: 354641 - DNA, 122 bp, Homo sapiens
ggaaactcccagcccaccttaggcaggacaggttcgaactgcactggaagtggggcaggacgcggatggtggggctacctgaactgggtgctgtggcctcagaggtgctgcaggaggcagtg

SEQ ID NO: 354642 - DNA, 122 bp, Homo sapiens
gtcctcaactgggacagcaggactctggtgcgcctgcagctgtgggacatcgcgggtaagcgcggccgcgagtttcccactccagagccccgccgggccgcctggctcctctctgcttcttt

SEQ ID NO: 354643 - DNA, 122 bp, Homo sapiens
gctcgttcctggagcccgggctgcggacgccccctgcgtgctgcgaaacctgaggggtctcggtccttcctggccttttataggccgtgcctagaaacgcttggcttgaccagttagaagta

SEQ ID NO: 354644 - DNA, 122 bp, Homo sapiens
cctgggccctttcctggcattgtggacatgttcggaactggaggtggcctgctggagtatcgggctagtctgctggctgggaagggttttgctgtgatggctctggcttactataactatga

SEQ ID NO: 354645 - DNA, 122 bp, Homo sapiens
gaactcaggggaccgcgctcgggaccgccctgcagtcccagggtctcctacctcccgagccgctgcctgggaccctgcgctctgtctgggcacctgcccttggtgccccgtgactgagcccc

SEQ ID NO: 354646 - DNA, 122 bp, Homo sapiens
cggagcggcagtagtagcagcagcagcggcagcagtgcgggggccctcagggccatctcccgaggcccggttcctcaccggcccttccgcggttcagccgcagacgcgtgccctcctgaaac

SEQ ID NO: 354647 - DNA, 122 bp, Homo sapiens
agtgatccacccgcctcaacctcccaaagtgctgggattacaggcgtgagccaccgcgcccggccaggattcttttaatcaagtatgatgcagccatcagggttggagcattctaggaagag

SEQ ID NO: 354648 - DNA, 122 bp, Homo sapiens
gataactgagaaagctcaaggtagttgctcagttaactactgttgagttagtatacatgacgtcctcgacacggtggaagcaggtaaaaggactgtttattcattgtgacctctcctgagtg

SEQ ID NO: 354649 - DNA, 122 bp, Homo sapiens
gcctacacaggtaaccgaacaaaagctgcttgtagagaagtggagtaaacccagcaggaacgctgagcgctgaggacctccaggcacttagccctggaaaaaggctttctgtacattcaaat

SEQ ID NO: 354650 - DNA, 122 bp, Homo sapiens
gcccgttggctctcccggagtgaaagtttcggggccgagacgagcccacgttgtgcagggcgccgaacgccggaggccgcgggccgcgggccgggtagcgccgggcagagttgggctcctag

SEQ ID NO: 354651 - DNA, 122 bp, Homo sapiens
acagacagctgagaacccatctcagggaggaggaggtggggaggtgacaggaggcaggaccgtgtatgaaccaaggctccaaataaccagtgtgtgctccactgctccacccaacttttctt

SEQ ID NO: 354652 - DNA, 122 bp, Homo sapiens
gataggctgcccacgagctgggtggctccccggagagcggagtccacacccaggcattctcgcagcccctgcccccgaggcttctgtgggtgcagactgtgtcctccaagcccctgtcttcc

SEQ ID NO: 354653 - DNA, 122 bp, Homo sapiens
agcaggggtgacgtatgtagaatgcttagggtgtcctccccacagagcagatacttgaaccgactcaattcctgtgtaaagagcactttgtcctgcttcacggacctccccaaagtgtgcag

SEQ ID NO: 354654 - DNA, 122 bp, Homo sapiens
agaaaggagctacaagggcaccaaagaagaatcagatctggttcttgccttcaaggagctcgcagacgggggtaggtaaagaataaagtggctcaaggcaaaatgaagaaagcacagagaga

SEQ ID NO: 354655 - DNA, 122 bp, Homo sapiens
cctcaatttttttttccaggtcaacttaccatttttcttttttttcctgtgcttctgtcacgcacctgtcctcgaggccctacttgtcctccatcaggctcccaactgccagtcctctggtg

SEQ ID NO: 354656 - DNA, 122 bp, Homo sapiens
ttacatgctgggcaccagtattgtggggctgggctggtgatagctgctcaatgtgatctacggttttgttttttgagacagagtttcactcttgttgcccaggctggagtgccatggcgcga

SEQ ID NO: 354657 - DNA, 122 bp, Homo sapiens
ttcctaatgctctccctcccaggagcctggtctctaggcgcaactgagctggtgactcaccggacaactgtgcaaggtacctctctatgactcagttgcctcatctgcaaaatgaaaggaat

SEQ ID NO: 354658 - DNA, 122 bp, Homo sapiens
ccttattccatctctgacttggtcagatagttcaggatctttcctcatcatccttcgctgcgtcccccttattcccccttttcccagtgtctaccctaatgaccccctgattcagagtattt

SEQ ID NO: 354659 - DNA, 122 bp, Homo sapiens
gggcagcttaggagtagaagaggaaaggtgaatggaaaccaggccttgggttatgagctgcgcaggattttccagcatctcagatgcaggcgtttagagaaagagatataatggagcaggcc

SEQ ID NO: 354660 - DNA, 122 bp, Homo sapiens
agtgatccgcccacgtcaaccttccaaaatgctgggattacagatatgagccaccacgttcggctttatcagtaatttttagggcacttttattttgggaactctattacagcagttttatc

SEQ ID NO: 354661 - DNA, 122 bp, Homo sapiens
gccagcctcttagtgtcatggatctcctgccctcctcagaatattcaaaagaacattacacggccaggcgctgtggctcatgcctgtaatcccagcactttgggaggccgaggcgggtggat

SEQ ID NO: 354662 - DNA, 122 bp, Homo sapiens
agagaggaagatctctctccctcctaaggttccagggaaaggaagactcagggccaacgtcggcttttactctgggactgttccaatttccagagataccaggagtggaagggagtgagtga

SEQ ID NO: 354663 - DNA, 122 bp, Homo sapiens
cagcccacaacttccccaaagcctggcagtcacttgaatagccaaatgagtcctagaaagcgagagacgagaggggaatgagcgccgaaaatcaaagcaggttcccctcctgacaactccag

SEQ ID NO: 354664 - DNA, 122 bp, Homo sapiens
ctgctactcaatactgagcaagcacgtgaagggagagaatgggaagaatgaagtgggatgcgtctgtcgaatcctgcacaagtctgcgtttggatttgctatgaaagtgactcatttcataa

SEQ ID NO: 354665 - DNA, 122 bp, Homo sapiens
gccacgtcctgcgtccgggggccgggctgctgccggaccgaccacctacagtacacccgccgccgcctctgctcgcgcctttcctgcagcccccgccgccgcgtccctcccgggctcgcgtg

SEQ ID NO: 354666 - DNA, 122 bp, Homo sapiens
agcataaactgaggcagctgttaagcagttcgaaagctgaaagcgatttaagtctgcccccgcccccccccgccctccgccccgcccccgccctccgccccgcgtgtagggtcttgttgctc

SEQ ID NO: 354667 - DNA, 122 bp, Homo sapiens
atggtgttggctgtccgaggactttcgcctttccatatgaactttagactcaggtggcatcgcctgcagaatgccttgctgggattggccgggattgaacgttagactcaggtggcatcacc

SEQ ID NO: 354668 - DNA, 122 bp, Homo sapiens
ccaggtccacatttgatggtggcttttaatgcactgcagggtgtgtccccttgaccttcacgaattttcaggtagtaagaaagcaatttttcttattggaaaggagaaaactaagtgactgt

SEQ ID NO: 354669 - DNA, 122 bp, Homo sapiens
tggacacaaaagctatttgggggctggacagctgccaggtgaaaggacaatgatctcatccgaattctctccatgcctctctctgcactagtccctgttacctttcccaatatgaggcagaa

SEQ ID NO: 354670 - DNA, 122 bp, Homo sapiens
gtgggacagagcccttaacctgtggggtctccactagctcagggtagttagtgtcataaccgaattgtagtttacccatctggtgtcagtagggttggatgattgcttaatgtgaaggaaaa

SEQ ID NO: 354671 - DNA, 122 bp, Homo sapiens
tgattagctacaaattaggaagaacagaggggacatcacctctccctctgctgggtgacccggcaacttcctcacacctcgtggagtacaaagggcaggagaggcccgcagagcgaggggcc

SEQ ID NO: 354672 - DNA, 122 bp, Homo sapiens
gtgtggagccgcccagagactggcactcacctgtgtcactgtgcggggagggcagggtctcgccagcagccggtggcacatgcgggcggcacgggggctgcgtggtggcctctgtgatgtca

SEQ ID NO: 354673 - DNA, 122 bp, Homo sapiens
gcagcagatccgagccccgtgccaccggcagcctcaccttctcatgcttgcgcagcagctcgtgccgctggaggaagtactggtctttgagctgctgcttcaccagctggtgcctctcctgc

SEQ ID NO: 354674 - DNA, 122 bp, Homo sapiens
tcccagtttcagggacagtcaccgccaagcccgaccctgcaaagggtcgtaaccggacttcggggcaaacttcaggtcccccgcctgctagcccgccaaccccctccgccaggcagccggcg

SEQ ID NO: 354675 - DNA, 122 bp, Homo sapiens
gcatatgatgagggggctacaggctacaaaatgccagatgcaaatgttgaagttatagcacgtttctgaaatggcaacttgaagtcagccccttcacactcactctttccaaaccctggttt

SEQ ID NO: 354676 - DNA, 122 bp, Homo sapiens
attcagaccccacggtgtgaataattaaataatgaaaagctgccctccagtttgctatagcgacactgtaagaaattcccatctttggagcagcctggagagctgagcttaaagcaagcatt

SEQ ID NO: 354677 - DNA, 122 bp, Homo sapiens
tattattatgcaggattaaccaagccagttgtgtataattagacagtagctaccttgcaacgtagaggcagtaaataggcccacaggggggctgccagaaggctgaggtgtttacaaggcac

SEQ ID NO: 354678 - DNA, 122 bp, Homo sapiens
tgaaatacatgaggaggatgaaaacactatatgcgatgtgtaaaaaccaatctaagagtacgaacccagaaggaaaatacaagaaggaaggctgaacagccgactacccttaagagatacag

SEQ ID NO: 354679 - DNA, 122 bp, Homo sapiens
ccacttttgcctcatcacgcaggcgctggtaggcggcatcactgggcgggtcagaaaccacgcgcatgcgcagacaccctcaggcgactggcgggtcgcggcttccaagctctaaatggaga

SEQ ID NO: 354680 - DNA, 122 bp, Homo sapiens
gtgtgggcggcatcgcctggggacagtgggatggggcttccacccggcggagggcagaagcgtcttcttggctggctagagaagctccgccggagtggcctcctcccctcccccaggccggg

SEQ ID NO: 354681 - DNA, 122 bp, Homo sapiens
ctcgggtgatccgcccgcctcggcctcccaaagtgctgggattacagatgtgagccactgcgcccagtggcactggtgcttttcatgtctgcagtttcaaccccttacccccaaccccaagg

SEQ ID NO: 354682 - DNA, 122 bp, Homo sapiens
ctacaactcccaggagtctccccgcgagcccgcccgccgggccgtgggtctcggcggccccggcttcccaagagctctgtgggaaatgtagttctctggcgcgccctgcgctcgggccccgc

SEQ ID NO: 354683 - DNA, 122 bp, Homo sapiens
ggtctgctgccaggactctgggtcctgggagggaagaggccggaaggccagggcccagcccgggtcagcaagcacccatcacccgagcattgcccggctggcccggctcaaaatagctttcc

SEQ ID NO: 354684 - DNA, 122 bp, Homo sapiens
ttcgttaaaatgttttcaaatatctccctgtggtgaaccagaattgcttcctgatatcatcggtggagtaatagtttcattagggtttggggatgttaacagtgtttgaagagctgccaagg

SEQ ID NO: 354685 - DNA, 122 bp, Homo sapiens
cagaggaggctggacccgcagccacgtcaaccggcaaccccctccccgccaacacgtgaccggacccccaccccaacaggagccggagccttccaggtggaaggagccttggggttgtttca

SEQ ID NO: 354686 - DNA, 122 bp, Homo sapiens
tcacgggtggttgtgcggagtgaggaaacgcgcggccgcccagggctgccaatgccccggcggcgctgttctgaacaaactgttttggccagcctgtgaaatccctggaaattgacgattcc

SEQ ID NO: 354687 - DNA, 122 bp, Homo sapiens
gtgtttccccaggatgtggttctgagacagtccctgtccctgatggcccacggagcgactcggtggaaggaagtcccttccgtcccccgtcacactccttctctgccgtcttcgatgaagac

SEQ ID NO: 354688 - DNA, 122 bp, Homo sapiens
tgctgttgaactgctcctcccgtggctttgtcttggcattatgcacctccacgccgtccacgtaccagttgaactggacctcggggtcttcgtggctcacgtccaccaccacgcacgtgacc

SEQ ID NO: 354689 - DNA, 122 bp, Homo sapiens
cggggacagggggcagcagctgggggcgtggcctgtgaacaggggcggggcctgcgggggcggggccgggccggacagcggtcccagcactaggcggggcgggctgccggggtccggcgccg

SEQ ID NO: 354690 - DNA, 122 bp, Homo sapiens
cagtgatccttcagttcgatggggatctctggatctggaatgaccttctggagttgtccccgttgagtcaagggttggggccagaaggtacccctgcaaaggtgcattgcccctgtggtgca

SEQ ID NO: 354691 - DNA, 122 bp, Homo sapiens
ttgtgagacactgtttctgagagcagcttttgtggcatcttacagggcagatttctggtacgttctaaaagttgaatttctaactttggctggttgtggcccctgactgttttttttttttt

SEQ ID NO: 354692 - DNA, 122 bp, Homo sapiens
tcctcattctacccctccctgttctaagtgggaagtacttctgtaggactttgtgcacaacgagatcatggcatttacttcactccactataattgtctgttcactgctccatctcttccag

SEQ ID NO: 354693 - DNA, 122 bp, Homo sapiens
caggctatgcccaaaaagtcaaatgattactaacaagcaagttacttaaaaaacagtatccggtatttgtgaaagaagagttttacatttcacctaaatgccaaatctcccaataatattaa

SEQ ID NO: 354694 - DNA, 122 bp, Homo sapiens
tgccaccaggaaatgtatcagttattaagtgcaagctctttttgctgctatatgagtgcacgcttataatcccacacctgaaccttgtatagtctgggccttaggaactgtcagtatttaga

SEQ ID NO: 354695 - DNA, 122 bp, Homo sapiens
actcttccccttaccagaatctctgtctatgtagcagccttccccaaatagacatttgtgcgtgcacacacactcccctctctgcttttagacctagatatttacataggcatcttcagaga

SEQ ID NO: 354696 - DNA, 122 bp, Homo sapiens
ggcttcggaggaagctgtttatgtgatccccgcactaattaggctcatgaactaacaaatcgtttgcacaacttgtgaagaagcgaacacttccatggattgtccttggacttagggcgccc

SEQ ID NO: 354697 - DNA, 122 bp, Homo sapiens
caatggcgccctcttaccctttgtgaactgcagggacgcggggcaggaccgagccgggggcgaagaggacgcgggctgtgtgcgcgcgcggggtcgaccgagtgaggaggagctccaggaca

SEQ ID NO: 354698 - DNA, 122 bp, Homo sapiens
cctgagctgaggaagcaggggcggggggaggatgggggctagggagtcctcagaagttcccggagatactccctcactggacagagtggggttcccgatgacgttacttgaggcctgggaga

SEQ ID NO: 354699 - DNA, 122 bp, Homo sapiens
tggtagtgcccatctctcacaatctcattcaaataggatcctccaggcctctgaatggcccgagctcatcagcagtgacaccacctcacatgtggagcccagctgagttcctgcagtacttg

SEQ ID NO: 354700 - DNA, 122 bp, Homo sapiens
cacaagaccacaaggctggctgttggctctcagggcaccatctgccgacacaggggctgacgcatctttacttgggaagaaggacacactgtggggggtgatgtggggggctcagaggggaa

SEQ ID NO: 354701 - DNA, 122 bp, Homo sapiens
ctgcagtgaagacgtgcggcggtgagcctgcctctcctgcctgcgttgggaggtgaggttcggatgtgatcaacagcgacctctagcgtgagcctgagactttgcatttggttaagcgtaca

SEQ ID NO: 354702 - DNA, 122 bp, Homo sapiens
cctgcacttcccggagtccttcgcaggcatagcctgcgcccccgtcctgctgccccgggccgggaccaggaggtagcccccaagacccccgggaccctggcctgaccgcatgttgtctccaa

SEQ ID NO: 354703 - DNA, 122 bp, Homo sapiens
aggccaagcaagcttctctggagttggagaaagtcctcaggtgaagaggataactggacacggttgttcaaggtaagaagtttctgcatgggggaataatctgctgcagctgctggtaaatt

SEQ ID NO: 354704 - DNA, 122 bp, Homo sapiens
gcccacctctccatagcctaagccatgcctcacctgtgcttcctggtacctcttagcgctcgcattctaagtacaccggtgagtacactactgaactacgtgttgagatgggtaccatggaa

SEQ ID NO: 354705 - DNA, 122 bp, Homo sapiens
gaactggagggccgggctgggaaggcctgaagcgggtacagcctttaggctggggagggtcgaggggagaactcggagcctgagtcgggcgaggttttgctccactctggcttctaagtgtg

SEQ ID NO: 354706 - DNA, 122 bp, Homo sapiens
tgacccggagggcaagcaggactgtgggtgacaccttgtgtcatcctctgagtgtgatcccgtgttacagtgtgactacacgtgcgtgacaccacgtgtggcaggcattgattctgttcttt

SEQ ID NO: 354707 - DNA, 122 bp, Homo sapiens
aatgggactagaaaaaatgggtgacccaaagaacccttttccctacctattcccccaagccggccatttacatctcttgcgaaagaaaaagcctctgggcattggcttctccgtcaggcggt

SEQ ID NO: 354708 - DNA, 122 bp, Homo sapiens
attcctttacttttctataactctgtcatgaccagtttaaaggccccaatgtcatgtcctcgcattaacaaccaaggctacaatgcaagccctgccatgtgcgcttctttacaaaaggtcaa

SEQ ID NO: 354709 - DNA, 122 bp, Homo sapiens
ctctcgtggccatgcgtgcgtcagtacgtatgtacgtacgctcgagggaaacttcagaggcgcatcctgacgtcaccccgtcgacgctggcgtagcgacgtccgttcgctgaatatgcaaat

SEQ ID NO: 354710 - DNA, 122 bp, Homo sapiens
ttatgagcgctgctttccggctgggcttgttccaggaagaacgtgattccacatgagtaccggaagcacttccccatcgagatgaaggaccacaactcccacgatgtgctgctgctctgcac

SEQ ID NO: 354711 - DNA, 122 bp, Homo sapiens
atgacacctgccagcctgatgccgcttgactccctgccaggtacttcctaagcaggagcacgctgactcctcatgtgctctattacccaccaccagatgaggcagcaagttaactttggcag

SEQ ID NO: 354712 - DNA, 122 bp, Homo sapiens
ttggggcacagagagtccccagcagtcccccacaccagggcgcgggctggggggcccacgcgtctggccgtgatggtgatggatgcaaaccctctgcgggggcccccacagggtctctcctc

SEQ ID NO: 354713 - DNA, 122 bp, Homo sapiens
ggccggcttctgcggcgctgctgatgggagtggtaattggggtcctgatctcatggttgacgtggccctcacgtgagctggagccgacgcgtgcagacgtccttctaatcctagtcttcgtt

SEQ ID NO: 354714 - DNA, 122 bp, Homo sapiens
ctagtgaggacagggcaaaggttttatagtctcctataaacaggaagtgtcttagtctgacgtaactgctacgttgtacccggatggcctcttcctcaatcttcaggggtacgcgtcttccg

SEQ ID NO: 354715 - DNA, 122 bp, Homo sapiens
cagtttcctcctttggacttgatgaggcacgaacgcatctctaataaagccaggtctccccgccgtggctccctgggcgggtgcctgtggctcgggccatgagtcacgctgggtaaccccac

SEQ ID NO: 354716 - DNA, 122 bp, Homo sapiens
atagcctgcagctattaagaagcacgtgtgtgcaggaagcggaggcgcaggacctcaccgcgccagcgtgaagttcccgggcatggtcatgaaagcgtggttctgtaagaaatcagagggag

SEQ ID NO: 354717 - DNA, 122 bp, Homo sapiens
gcggtcagggtcacccttgagctgcgcacactaaatgacgggagggcatcccgcgtcagtcgccagtgtcgaggcgtcagcagccctccctgcagggaggtggccggtctctttgactgccg

SEQ ID NO: 354718 - DNA, 122 bp, Homo sapiens
tgagcagatcctagcgctcggttccccggactgggaggtcccggaggccagggcctggcgcggcacctcctgtccctcacgtcgagggtattgtgtcccctctggacgcttctgtcgtccta

SEQ ID NO: 354719 - DNA, 122 bp, Homo sapiens
tgaacctcgcacttgcacagaaaccttgcaaacccctacacaccaacacacacaaaggggcgcgcggggatccccgcaaccacgaatcacgccggggactccttcccgtgccaataaggcgc

SEQ ID NO: 354720 - DNA, 122 bp, Homo sapiens
cgcccggcacagggctctgtcctctcttccttactctctatgaccctgtaaattctccaccgggtgcggtggctcacgcctggaatgccagcactttgagagaccagggtaggaggatcact

SEQ ID NO: 354721 - DNA, 122 bp, Homo sapiens
ggtacagagaggaaccacccttacaaatggagatttcctttgtaaatgtaattttccttacgcaacggtaacttctgttgtcagaggttctgcctgtgtctgtggtttctcaaaataatcag

SEQ ID NO: 354722 - DNA, 122 bp, Homo sapiens
taggctctgttattggccccgcgctcctgcaagcttctgcagacagagtgagcgagtgagcgagtgagtgagccagcgagcggcagcaggaatgacagcactgagagcagagacagccaggg

SEQ ID NO: 354723 - DNA, 122 bp, Homo sapiens
ccgacccagggcggggatgggggaatgtcgagaccaccgccttctccgcggctaggggtccgccgacgctgggtccccgtcgaccccgcgccggccgcgcgccctacctcgcgcctcggctc

SEQ ID NO: 354724 - DNA, 122 bp, Homo sapiens
atgaggtaaaatgatcttcctttactcaaaatgtgtgctatatttgaaattctggctgaccgtggccgcctcaaaaactcatgacctcagttatccgggtttccttcagctctagtgctgtt

SEQ ID NO: 354725 - DNA, 122 bp, Homo sapiens
acaggctctccaggtcattgtttttgagggacccggcctgatgtacgctctaccttaccccgtgattttatgacctcgcagtagtgggaagtcaaaatcacacggtgattttggcagtgctc

SEQ ID NO: 354726 - DNA, 122 bp, Homo sapiens
cagggccctttcatccgcgccgcgcctcgctcccgcccccgtgactcgaggcgcagcgtgcgtggtgatcccggcccatggggacttccccgcttgctcctcgccaagatggcggcctcatc

SEQ ID NO: 354727 - DNA, 122 bp, Homo sapiens
gcgggtctggggttctggggcgggcgggtgtgggggcggggcggggcggggcgggggctgcgctctgccctgtcgcgggtttatataccctttgggcacttaaccgactgtgccagcccagt

SEQ ID NO: 354728 - DNA, 122 bp, Homo sapiens
ctcgctgatgctcttgcgagaagcccatggaaacaggactaaagtgttatctgctcgtgtcgtggttataacctcacctctccatagctgcgtgtggtcagcacgccggctggcgtgggagg

SEQ ID NO: 354729 - DNA, 122 bp, Homo sapiens
tccagtttgcgggccggatttttggactcatccagtgacttctcgtctatcctgtaaatccggattccagccagccccgcagcccccataagcatcagcagggtgatggcatacaggtagaa

SEQ ID NO: 354730 - DNA, 122 bp, Homo sapiens
ctgccgccgatgcgaggccgaaaatctaggcctcgcgccgcgtggccgcctccggagccccgccccctatggtcagcactggcccagctccgccatggcgcttgcgtcccgccaccggccgc

SEQ ID NO: 354731 - DNA, 122 bp, Homo sapiens
acattttaagtctggcgcagtgactcacgcctgtaatcctggcactttgggatgccaagacggttggatcctttgagcccgggagttccaaaccagcctgagcaacatggtgaaaccccttc

SEQ ID NO: 354732 - DNA, 122 bp, Homo sapiens
tgaatccccgggaaggcaaaggtagattttttcggtgcttgagttgatgctctgagagcgcgctgagagtctcgggcatgtcttggcactcttggaaacaaattgcagccaagagcacggtt

SEQ ID NO: 354733 - DNA, 122 bp, Homo sapiens
ttcgctggtctcagggctggggctggaggtgacaggaaactgtgcccccaacctcacccccggaaggaagttagaaagagcaaggacactggagagcccagatctggttcaaatcctggctg

SEQ ID NO: 354734 - DNA, 122 bp, Homo sapiens
tgcagacgggatgcccactccagacccacccaccagcaaactgaaaaactcaggaagccacgtttgaaagctctttcggtttcaaggagaaataagactttcagcgaggattctgatagatt

SEQ ID NO: 354735 - DNA, 122 bp, Homo sapiens
tgtcttctttcttgaaaagctccagggtccaactgcaagaagagatcacgagagagaatgcggaactcctggctctgtctctggagaacattccagaggttgtgctggagccagaaggagcg

SEQ ID NO: 354736 - DNA, 122 bp, Homo sapiens
cccaagtagggcaggtcaggggcatgggactggcccattctgcccagaagacaacccacacgtgttggggagaagcttcctcccagttctcagggagatacaatccctttcttgtcatctgc

SEQ ID NO: 354737 - DNA, 122 bp, Homo sapiens
taataaaagtctgggaagaagaagaggcgagaacgaccccgggaccgaccaaagcccgcgcgccgccgcatcccgcgtacagcacctacatcccgccaccgtcaccgccaccaccatgccca

SEQ ID NO: 354738 - DNA, 122 bp, Homo sapiens
caagcgctgaatctgcagctcgcatgcgtcccggcagttcccggcgggaggctgacgagacgcaacgcgtctgcgcacatccccgcgttgttctcactgcgcatgtgcagttgcaaccggga

SEQ ID NO: 354739 - DNA, 122 bp, Homo sapiens
ctataactcaatactatataacttgtataactcagtactataactagaattgtttcctatcgcctagaagcaatcaaattccaagtggtgttgcaaaccaaaccacacatggacatgccatt

SEQ ID NO: 354740 - DNA, 122 bp, Homo sapiens
aagaagtgcctcctaaaagagcctagtaggtaatcctttgtcacagagcaaaggcatgggcgttaatcagtcacagtttcccctaagaggaaataggaacacagatttcctatataaactca

SEQ ID NO: 354741 - DNA, 122 bp, Homo sapiens
acagtttgatgtcactgttgattactcccttttgctttctcagtaaagttatctcaaaatcgaattgtctaattgaaagcaaacaaacatgccaacaaacaagaaactgaattttgaaattc

SEQ ID NO: 354742 - DNA, 122 bp, Homo sapiens
cgccaccatccaacctggtcagtggctgctcaggttctcctgcacccaggaggatgcacccgggaggaggctcccggcgcggctgtctcacctgcttccggtagacatagcacgcagcgatg

SEQ ID NO: 354743 - DNA, 122 bp, Homo sapiens
agaagcggcggcatggagacgaggacacgtactaccttcaggtgagtgtgtgctcctgcacggcagccgggagacctgcctcacctctgtcgtctgctgagcccaggctgggccatggggag

SEQ ID NO: 354744 - DNA, 122 bp, Homo sapiens
agcgcccatgattggatacagttccatgccccgccccctcaggtcatgagtgacaggaggcgtgatctgagaatgtgttgaataaggcaagagttacaggtttttcctgaacccttttctgg

SEQ ID NO: 354745 - DNA, 122 bp, Homo sapiens
cctggaaggctctgccttaacgcatgcgtagttaccttagttttcgtcgcctctgaggggcgccccgcggctttggatttgaccccgtcaggctaccgtcgcggtgaccggaacggcactaa

SEQ ID NO: 354746 - DNA, 122 bp, Homo sapiens
tacaaccccggggttgattccaggcctcactctcagcagttgagctgctctaagggtgaccgtgggaactgtccacaggtgcggctgcgggtgcagcgatctcagcggtcttagagctcttg

SEQ ID NO: 354747 - DNA, 122 bp, Homo sapiens
cttctctgggaaagaaaccccttccgaggatgacagaagccagtcccgggagcacatgggcgagtccctgagcctgaaggccggtggtggggacctgctgctgccccccagccccaaagtgg

SEQ ID NO: 354748 - DNA, 122 bp, Homo sapiens
ggccggagaggcggggcttgagggtttcccctggatgcttctgggtttgaagggaccactcgtaccacaaagtgggcagctgaggtgggacttgagggtggggctggagcggggctagggtg

SEQ ID NO: 354749 - DNA, 122 bp, Homo sapiens
tcagccaagtgctttgctataatcagaatatgctttatttatggcattttttggcttacccgcccagtaaatgcaaccacaagagatgataagaatgggatgttagtcagcactcttttagt

SEQ ID NO: 354750 - DNA, 122 bp, Homo sapiens
gattggggaactggccttccacagagagactctgtttttgagcacatctggagtgactcacggggcatgtgatctccttggcagtggggcggataaatataatttctgtacttgagttccat

SEQ ID NO: 354751 - DNA, 122 bp, Homo sapiens
cgcacaggggcacaggcgggtgggggaagggaacctggacgtccagctgccggcgcctgccgagccccgccctccattgcctccggggccgcgagtctgagctccaggcccggaacacccct

SEQ ID NO: 354752 - DNA, 122 bp, Homo sapiens
aactggagctaaaaatcagtgaaaccactacgccaggattccggattcctcttaagaatgcgcatgatgcagacgtaggtgagaacgcccttcagaagtacgcactcaacccaaatgaccac

SEQ ID NO: 354753 - DNA, 122 bp, Homo sapiens
caagccagtaaatatccctattgttggggatgctatacccggctgtttctcttggcttgacgcgccagatagagcgacctacggaacacagaacagggaaaacctctgcactgtaagtggca

SEQ ID NO: 354754 - DNA, 122 bp, Homo sapiens
tttttttttttttttttttttttttgagttggagtctttactctgtcgcccaggctggagcgcaatggcgcgatctcggctcactactacaacctctgcttcctggattcaagtgattctcc

SEQ ID NO: 354755 - DNA, 122 bp, Homo sapiens
ggccagttcttcactttgaattcagtctctcaaagctgaacatgctcactgtgtgggccacgaattgcgggaaaacgggactggctcaggcatgtggacatcttcccagcgtgctttatccc

SEQ ID NO: 354756 - DNA, 122 bp, Homo sapiens
tgccagctcccatgtaccagcagctggaatctgaaggcgtgagtcttcatcttagggcatcgctcctcctcacgccacaaatctggtgcctctctcttgcttacaaatgtctaggtccccac

SEQ ID NO: 354757 - DNA, 122 bp, Homo sapiens
ggaaaggtttctgtagctaatactctacggactgaaacacaataaaattcaactgactcacgttgtcactgttaagcataaagcttcaggaagttatgggttcctgtagattaaaccagacg

SEQ ID NO: 354758 - DNA, 122 bp, Homo sapiens
gtggatacaggaagtgctcagcaacgattacgccccgagggccaatcacagggctgcggccgagagagaagccttattagagctttctcaacctgcagccctcatctccgccggcgagtagg

SEQ ID NO: 354759 - DNA, 122 bp, Homo sapiens
gattacaggcgtgagccactgtgtccggcctattcttacattttttttttttttttgagacgtagtctcgcactgttgccagggctggagtccagtggcgcaatctcggctcactgcaacct

SEQ ID NO: 354760 - DNA, 122 bp, Homo sapiens
tatggcatggggctgtgtgtgcgcctttcccctcatcctaatggaagatgcaacgtcttccgagtttgagagttttccacagcagccttctcgggctaagccatggtataacaccaggcagt

SEQ ID NO: 354761 - DNA, 122 bp, Homo sapiens
ctcttgaggatgaatagcagttaaccaggtaaagaagagaagggtgttccacccagagtacggcatggcatctgtgggaaactacaagcagatctggtaatctagttagttatcattagtta

SEQ ID NO: 354762 - DNA, 122 bp, Homo sapiens
cacttcaacctctttaggttcaatcttctttcagatttccctctttcctcctttcctaatcgttcataatgctctaataaagagagggtacagacacatttgtaaaacgtattttaggataa

SEQ ID NO: 354763 - DNA, 122 bp, Homo sapiens
gatttccttgtctttttcagattcttgaggcggcccatattccttggcttatgaacccttcgtcttcaagcatctctctctgaccctgcccctacttctgtctattgtctatatctctttta

SEQ ID NO: 354764 - DNA, 122 bp, Homo sapiens
tcaccttctcctaccaagcacaactccctgcgccggctgaacgctagggtttcagctgatcggagggaaactgaatttccccaagagagggcttggtcctttctgaaaggaaaggctgacac

SEQ ID NO: 354765 - DNA, 122 bp, Homo sapiens
atgctctacccctgagctacaccctcttctgagctggtgctttcttactggcttctgggacgtggagatttcacaggtcttgcctagacacagctatgaaaatgacatgcagagacacatgc

SEQ ID NO: 354766 - DNA, 122 bp, Homo sapiens
gataatatatataatgtctaaaagccaaccgctgtttagatctgaagatctgtgggaacccgcctaccaatgagattgttcgttagggacactacgtgatttggaggacaaacaggattatt

SEQ ID NO: 354767 - DNA, 122 bp, Homo sapiens
agcctctaatcccagtgacttggaggctgaggctgaaaggatcccttgagggcaggagttcgagactagccgaggcaacatagcaagacctccatctctacaaaaatgggtgtggtgctgtg

SEQ ID NO: 354768 - DNA, 122 bp, Homo sapiens
tggccacttctaactattgaagagctaaggtaaaaagtatactccttgagctagaaatagcgaataagattggggaactctaggagaaggtaacattgacctatctatttgattgctggtga

SEQ ID NO: 354769 - DNA, 122 bp, Homo sapiens
atcacatttctgactgttcaaagggatttcagtttcttttagaaattgggtgttgtaaagcgatgtttctattcctagattgtcagttgaatataacttagacttgttgttcttgtctttct

SEQ ID NO: 354770 - DNA, 122 bp, Homo sapiens
tggaaaggaaaggtaactctcccaaggtcacctggatgggcactccatgctgcgatcctacgccagatctgtctaacttcagcgcctagggctgggaccaggtgagccagccaggtaagaca

SEQ ID NO: 354771 - DNA, 122 bp, Homo sapiens
gcctttccctggacgagagaggaatgggttgttggctacttcctggctgtctgtggcggtcgtattgatgttgggcccagctgtgctgaatggctctgttggtgctcgctgggcttgctttg

SEQ ID NO: 354772 - DNA, 122 bp, Homo sapiens
agggccacttcgggtcggggtcaacccagactggaccaatgcacagtctaggtggattaacgcgccaccgcgagaagtgggcacgggaccacatgcggctggcaagacgtcccagggctcaa

SEQ ID NO: 354773 - DNA, 122 bp, Homo sapiens
tgagcttggggctggtggtgctggagatactggggctgaagcatatggagtcacccagcccgatgtccatgtccttggataggccattgcttttagagctggagatgggtgcgcaggccgat

SEQ ID NO: 354774 - DNA, 122 bp, Homo sapiens
gccaggtgctgcgatttttaaggatattctgaaattctttccctctgtctctctgttcaccggcattgacctcactcagatgtggatgtttcaaactcattcaaacagagagtagaatggtg

SEQ ID NO: 354775 - DNA, 122 bp, Homo sapiens
tttattctggataagacaggcgttccacttaattttgttctagagagctaccaggcattccggcatttactgaatccatcttctcaccacagataagcactggcccttcaaaagctcatcta

SEQ ID NO: 354776 - DNA, 122 bp, Homo sapiens
gagccgcggcggggaggggcgtcttgggcctggaggtcagtgtggcctcgcgtttgtcttcggtgacgggaagtgagtttcttgtgtagacgtctgtaaacgatcctcctgccgtccctgtt

SEQ ID NO: 354777 - DNA, 122 bp, Homo sapiens
agacactaccgagaaccagatgttcgccgcccgcgtggtcatcctgctgctgccgtttgccgtcatcctggcctcctacggtgccgtggcccgagctgtctgttgcatgcggttcagcggag

SEQ ID NO: 354778 - DNA, 122 bp, Homo sapiens
caaacaactaaagaaatcaacttcatttaagatattgcaacagggagaataccccagaaccgaggccagagcactgctgtagcagtccgttttcacactgctataaagaattaccagggact

SEQ ID NO: 354779 - DNA, 122 bp, Homo sapiens
attgcagttcttataacctttttgtcttaagagaacatttgtacatcttactatgtatggcgtactcttttagggagagtaggaaaattggtcagagtaagacatttgttccaataatagtt

SEQ ID NO: 354780 - DNA, 122 bp, Homo sapiens
tccgcaggcagacgctgtcacacggaacggctccaggcccactggggccagagcaccccccggcaagcccagcagccctctgctgtggtccaggcccagggccaacagtcggctctggtttc

SEQ ID NO: 354781 - DNA, 122 bp, Homo sapiens
ccgagcagccgtggactacatgccagagtgaaggcgagttctaattctgggggtctcacccgcctctggctaaactcagggtagcagtgtgggctggggtgtgtgtgtgtgggtgtcttcca

SEQ ID NO: 354782 - DNA, 122 bp, Homo sapiens
cccctgctactaacattttagggctaatcgacctgagaagcacaccctgggggcccctggcggctcaccctccttgtcttccccaccggctgccaggatcactccgggaccaccacgccaac

SEQ ID NO: 354783 - DNA, 122 bp, Homo sapiens
gaaaggggaaaatagatgtggaaaaatctgaggaaaatcaaaaagaactcaagtactcagcgacgtttaagaccagaacccaggactacacctccacccaaattccaggacaaaactgggtt

SEQ ID NO: 354784 - DNA, 122 bp, Homo sapiens
tgcgtgtttcttagcattcccatgcctcagtttccccatccctcaaaggggaagcacattcgtgcctccctcactggttagagttgcacttagaacagtgcctgccacatagtgagtgctga

SEQ ID NO: 354785 - DNA, 122 bp, Homo sapiens
cggcgctgctgttagctcctgcggtgcctgcgctcccgcgcgtggagcagcagagcccggcggctccagcccagcccctcgcgcactgaaaccctagccgcgggggatcgataacccgggag

SEQ ID NO: 354786 - DNA, 122 bp, Homo sapiens
aattgcctttctgaaatgattacccttgtaacgggctgtcagagagcaatttataccccacgccggggaggggaatttgcatctcgttaaactccaagtcgtaattatttatatccaacaac

SEQ ID NO: 354787 - DNA, 122 bp, Homo sapiens
gcatggacacatcaaacaaatacttctgtctccggagaggagtgtgcgagagatcgtctgcgagataaaaaataattacagtcagtttcacttaagggggagatcagcccggtgctcttcgg

SEQ ID NO: 354788 - DNA, 122 bp, Homo sapiens
actgccagtggcaggcaacggccggcgatagcaacaggcagccatgacaacagcaggccacgatgacatcacacagccataacaacaaagcagatgcgcaggtgagtgtccagctctccagt

SEQ ID NO: 354789 - DNA, 122 bp, Homo sapiens
atttgtccagtattgtctccctaaactgccttacagggatgtcctggagtagacctccctcgtctgccatgcaactccgttagtatggagtaaaatatacttcagcctaaagctgaccacgc

SEQ ID NO: 354790 - DNA, 122 bp, Homo sapiens
tgagtgggcgcgtggagccgagagagaccctcagagtcccatccccatcagaagaaactccgtcggtgatgccctgagcagaagctgtggggctgatttaagtgtgtgctctgacagctccc

SEQ ID NO: 354791 - DNA, 122 bp, Homo sapiens
agagcctgagggggaacaggcgcagggacccatgtccctcagatagaggagcagaagtgccgtcaggggtgtaggagtaagggataaggaggggacggagtcccagaaaagctgaaggaaat

SEQ ID NO: 354792 - DNA, 122 bp, Homo sapiens
ggctgggctgtgactgaagctccccagcccagccaggacaggatgggccccagtgtaaaccggatttgccttgtaaacagctgagcagctgggctccatcttggcaggggagcccagcaaca

SEQ ID NO: 354793 - DNA, 122 bp, Homo sapiens
gcgggggacctttcccgcgggattcggcaagcgcggccgcggagacccgggggtggaggacgtctttcgccctcagggcagcccggatgacagctaatgcgcctgggcaaggcgttctcaac

SEQ ID NO: 354794 - DNA, 122 bp, Homo sapiens
tatccagggtcctcgtgggttcacagtcgagtaggggagacagaagccatgggggacatgcgagcctgcccttccggagaatggctagaaagatgctcaaaccgggtgacgaaagagaacac

SEQ ID NO: 354795 - DNA, 122 bp, Homo sapiens
gttttcattctgcttcctgcttggagctccagaatggcctcatctggtcaaggaaggtctcggttctgccagcccattcgagaaggcaaatagcaatggtatagatggcatagagcaggatg

SEQ ID NO: 354796 - DNA, 122 bp, Homo sapiens
aagggagggtgttgaccctcctggatgaagtgatgaagccctgaactgtggcaatgatgccggagaaggatgtaaaaatcgtaaagtcgactggtgaccaattagagctggaaggacttacc

SEQ ID NO: 354797 - DNA, 122 bp, Homo sapiens
attattttcaaatacacagaggtgctaggtttaagaaacaggaaacacaacgttaagtctcggaaataaaatgtttcagcctggttttaaaagaatgcctgtatgttgtcaaaaggcttttt

SEQ ID NO: 354798 - DNA, 122 bp, Homo sapiens
caaaataaaacagagccctgtgagtcttcaatttccgagttgagtgacctttcacagggtcgcagaatcagccccagctctcccccagtcctttcactgactcctctctgtggcagagctga

SEQ ID NO: 354799 - DNA, 122 bp, Homo sapiens
tggtgagctgctgagtcaactcagggagaagccactggagagctttaagcccggcatggccgtgagccaggcagtttctgaatgactccttcagtgctgggtggatgccccctggaggagga

SEQ ID NO: 354800 - DNA, 122 bp, Homo sapiens
cagtggaagggcaggagctgagggtttgcccaggtacccatggccaagtcaacaaagggtcgttgggcacctgtaccactgttgaggctaaagagaggtgcatctgtgtgagggaaggaggg

SEQ ID NO: 354801 - DNA, 122 bp, Homo sapiens
tgcatatcaaacgttgccagctcgggtctaaaagtcagggcttttatgctagacaggaaacgtctcaggagctgcttcaaaagagacaaaaacttttcaaggaccccttttcctctctatct

SEQ ID NO: 354802 - DNA, 122 bp, Homo sapiens
aaaaagcgctgacagggatgtaaagggttttttttgtttgttttttgtttttttccccctcgaagaaaacattggaattcaccccaatggacaaaaatttaagtctgaccatacaaaaaaat

SEQ ID NO: 354803 - DNA, 122 bp, Homo sapiens
tacggtggccgcggggcggcggtggcgattggacttggtgggtcccgggccaggggcgggcgccgccatgggtaacctgttcggccgcaagaagcagagccgcgtcacggagcaggacaagg

SEQ ID NO: 354804 - DNA, 122 bp, Homo sapiens
atctccttgaaaattgaggccttttcgatagtttcgggtcaggtaaaaatggcctcctggcgtaagcttttcaaggttttttggaggctttttgtaaattgtgataggaactttggaccttg

SEQ ID NO: 354805 - DNA, 122 bp, Homo sapiens
gcctgcctggggaacacctgctcagggctcccaagtgctcgctggcatcagcagcctggacgcagcctgcacatctcagccccatgctcagtccgacagtccccaccaggtgtgtggccaaa

SEQ ID NO: 354806 - DNA, 122 bp, Homo sapiens
gggatcctgtttttttcaccttcataggagcatcggaaaacttggcccccatgaggagcccgtagctgaggttgtccgcacatcctccccagcggttcccgggcccgggtggctcacctggg

SEQ ID NO: 354807 - DNA, 122 bp, Homo sapiens
tcagcagcagcagccgaggaatgatggcaaccacacagggcctttgtgaggactggactccgtaaggggcgtgaacgagtctgggcgtgccctccaccaaagtgagcatgagaggaatgggg

SEQ ID NO: 354808 - DNA, 122 bp, Homo sapiens
gccccaggccagtggagtggcagccccagaactgggaccaccgggggtggtgaggcggcccggcactgggagctgcatctgaggcttagtccctgagctctctgcctgcccagactagctgc

SEQ ID NO: 354809 - DNA, 122 bp, Homo sapiens
accacgtggtgctgggccggccacgtggtgcagccgcgtttggacacctggactccagagcgtcacagctgcgcaatgaatgggagtcagtgttacccgcttactatctttgttcatttatt

SEQ ID NO: 354810 - DNA, 122 bp, Homo sapiens
ctggcatcctgtggctgctcacttacaattgttgtcttgcagagatcatgaaggggtctccgatccagctcctggccaggaaaactgtcacacaattcagagcagtttatttcaggctccat

SEQ ID NO: 354811 - DNA, 122 bp, Homo sapiens
ggaaatagactggagtctgggtagtgtcgtttcctagagaatggtctcgaagtaacttctcggtaaagtcttcacagaacttccagaccacacttgcccactgggaggcttttaggacctga

SEQ ID NO: 354812 - DNA, 122 bp, Homo sapiens
ctgtggtgacacctcgcctggagactcagagctgcggaaactacaactcccacaaggctgcgcgtaccgcggctcccaagaagtggcttgtacccgcccccctcgcctgcgggcctcgcccc

SEQ ID NO: 354813 - DNA, 122 bp, Homo sapiens
tggcgccaacaccagacctaggatccgtcccctgctggaactattcagacgcgcaagatacgtaaccagcagtcctccgccccgttaaatagtcctgcctagcatgcctcggtgacgcactt

SEQ ID NO: 354814 - DNA, 122 bp, Homo sapiens
acgcggcccgcgggcgggacggaattggagagctttcacttgctgacctggcgtcaccaccgctccggttcttgtggccaggtcttttacccctgccctggggaggactcaggcgcagggga

SEQ ID NO: 354815 - DNA, 122 bp, Homo sapiens
aaacaggagcgggggaggaatgtgagagttcaatgcaagcacgcgaaatcgtgggaaaagcgaagtgacatttccaactgcactcttagggctgagtgtgtgagggaagcttcagcaaattt

SEQ ID NO: 354816 - DNA, 122 bp, Homo sapiens
caggaacgctgtctccatctacatcctcaacctggtcgcggccgacttcctcttccttagcggccacattatatgttcgccgttacgcctcatcaatatccgccatcccatctccaaaatcc

SEQ ID NO: 354817 - DNA, 122 bp, Homo sapiens
ccagatttcttgaaaaatgacggccaggactccgtgacagtttagaccatcaattctctgcgggggaggggaaactggggagcgagaggggtttgactgtcagatggagtgggagtagccac

SEQ ID NO: 354818 - DNA, 122 bp, Homo sapiens
gtctccttagggagatgctgtacaagcagaaactagggaacagtgttccagcccggggaacggccgtgcgaggcaggagcagccctgccgagtcccaaaaacatcaaaggggctgcagctgg

SEQ ID NO: 354819 - DNA, 122 bp, Homo sapiens
aggaggccagaagcagaggcgatgccggcggggagcgggcggtgggggggcttctgggagcgacggacccggcagctgcagagcccagtgcggctgagtggggggagggaggagggaccccc

SEQ ID NO: 354820 - DNA, 122 bp, Homo sapiens
actccaccctgctccctggaactatcctcaaacgggcagggggcaagcgaggccggtggacgcgggactcgctcctctgacctctccccggccccccgggaggtagcgggagattgcacacg

SEQ ID NO: 354821 - DNA, 122 bp, Homo sapiens
tcaatgacaccttcgacctcaagagacacgtccgaactcacactggtaagtggaagcccacggctgggaggagcacgccggatccgcctggccgcggccgtgcgggaaaagtccagcacccc

SEQ ID NO: 354822 - DNA, 122 bp, Homo sapiens
atatacatgtgtatagttttcaaccttttttaaggacatttaatcatcaaagacatagcacgaaagagggtgacgctgagtagaagtagcagacatatttgcaggagaactgataaccaagg

SEQ ID NO: 354823 - DNA, 122 bp, Homo sapiens
gcgccggcccccggggaggagttatgataatttccttctcattaaggcgctcgggtcccccggctatcgccaggacacactgttcgggcgcggctttccccgtccgcggagcggtcttgaca

SEQ ID NO: 354824 - DNA, 122 bp, Homo sapiens
tcctccatgcaacctccctagatcagtgccctctcttacagattcacttatccttttcaacgctccctcaggactggtaattgttatttgcatggtatcattttgtgcttatttgtatattg

SEQ ID NO: 354825 - DNA, 122 bp, Homo sapiens
tgcaggtggattgggttatcctcacatttgagtgaaactcctgcacaccagacactgaatcgagttgtctgggagcatctaactgcaagttatgtcgatccgaggaaggggggtactgatat

SEQ ID NO: 354826 - DNA, 122 bp, Homo sapiens
caagcctttgagcagttcgtgtgggtccgctcccaagctagggctgggctgttgcgcttgcgccaggggtcgcatgcagtcacgcgctgccgaccgcttccggtgcgccgcgagggccgccg

SEQ ID NO: 354827 - DNA, 122 bp, Homo sapiens
accccacaccagcagaaagaacaagtgtcagtcttttttgtccctcatccagtttctttccggcctgttagcacttccaagtccctttggtagtaaatgttctttctgagatgcagggtgtc

SEQ ID NO: 354828 - DNA, 122 bp, Homo sapiens
agggttatctctctaccccctcggactttttctccggggaaacttattcggagcatccaacgtgagtagatcctgacagaagcagaacgccatgtcatctgcctgggcgtgcttcctaccag

SEQ ID NO: 354829 - DNA, 122 bp, Homo sapiens
gaagaggagagggaaagaactcattccttttgtgtttattaactgttctgacagcatcatcgtaatgaaaattatttaccccaccagaagcagctggcctattctccaatgtattttctgct

SEQ ID NO: 354830 - DNA, 122 bp, Homo sapiens
tggtgtcccattgctgggaatgcagctcaacgaagtgaaacccaaaaaagaccgccaaaacgttcagcagaacgaagatgccagccaatacgaagagtccattctgaccaaactcatagtgg

SEQ ID NO: 354831 - DNA, 122 bp, Homo sapiens
atggcgtggaggcggtgcgctgtgccaactgtgacctggagtgcagcgagcaggcaggggcggcagggcgggtgggtgaggagcagagggtacccggttgcacagtccccaatgcttgcaca

SEQ ID NO: 354832 - DNA, 122 bp, Homo sapiens
ataacgaaggaagccacaaaaaacccaagagctgcaggcgagttcaatgagaccggtttccgcccgccaccctgcctcttataccctatcttagaaccttccagaaggggcccgcccctgct

SEQ ID NO: 354833 - DNA, 122 bp, Homo sapiens
gtcttaagttaactttttctgttgttgctttttaaaatagtgcacagttgtaagtagtatcgtgaggcaataactcactaatataagtgaagcttatagaatgaaagcagccctcactaagt

SEQ ID NO: 354834 - DNA, 122 bp, Homo sapiens
gccaggagaacgcacacagagaggagaacgccgggtgaacgcacacagtcgggagaatgccgggtgaatgcacaaagtaaggagaaagttgggtgaactcacagagctgggagaacgcgggg

SEQ ID NO: 354835 - DNA, 122 bp, Homo sapiens
ctgggagttgtcgctgtaagggatccggctcggctcccctctccagccacaggggctgggcgctgcggggatgaggtgagcttctgcccctgctctgggccacctgcctctggactttgggg

SEQ ID NO: 354836 - DNA, 122 bp, Homo sapiens
ctgcattccctggttccgtggggcgagagggggggtctgcactcaccatatgctgcttcccgacccatgtcactctgcatgaaggagatgaccccgatgcccgatgccaggaggccattgcg

SEQ ID NO: 354837 - DNA, 122 bp, Homo sapiens
ctgggcaacatagcgagaccccaccttacaaaaaaacgaaagaacaaacaaaacataaaccgcccagaccaaagtgaaggtcttatggactggcactccccattcccagagtacccccaaat

SEQ ID NO: 354838 - DNA, 122 bp, Homo sapiens
tcaaggagaagcagatcctgtccacggtcatctacgagagcgagctgcagctggagctgccggccgtgtcacccgaggatgatggagagtactggtgtgtggctgagaaccagtatggccag

SEQ ID NO: 354839 - DNA, 122 bp, Homo sapiens
gtgggacggcccctgaagaccagttatggcgccggccaggaggccctctgaaaggacgggcgcaaccccgcagaacagaccaggtgctcgccatccatgtccggtgccgcttctctgtggcg

SEQ ID NO: 354840 - DNA, 122 bp, Homo sapiens
aagagctcactcctccgcggttttatattccgacttgcgcacaggagcggggtgcgggggcgcagggagtgtgggtaacaggcatagattccgcttgcgcaatacgtggtaagaaaccagct

SEQ ID NO: 354841 - DNA, 122 bp, Homo sapiens
aatctcccagagaccccacctcttcctgccgtcacctccagggcggatttggtttggacgcgtgtcccccgcaggtctcgtgttgaaccggagcccccagtgttggaggtgggcctggtggg

SEQ ID NO: 354842 - DNA, 122 bp, Homo sapiens
ccccgggcagatcactttcagcctggggcctcggtttcctcgcgcgtgtctgggaggtctcgcggcctgcttctcggattgctaggagccagcgcaggcagatgccggttccggggcttgga

SEQ ID NO: 354843 - DNA, 122 bp, Homo sapiens
aggggcggcgccaggagccggagcgggcagccgggcgcttccaggaaaagtggcgggcggcggcgcgccagggaccgtgggcggtgccgtcggagcgggcgggtcacgtgacgcccacaaca

SEQ ID NO: 354844 - DNA, 122 bp, Homo sapiens
gagttatttgtagggaggtgaaactatgagagaggcactcaagtctcaaaacgcaattggcgttggccctcggggtccaggaattttgacgcagtgcttgctgcttgcaagaactccctctc

SEQ ID NO: 354845 - DNA, 122 bp, Homo sapiens
aagtacttaacatacatttgctaaatgacatacaaaaaaattcaagattctagttagggccgggcatggtatctcacacctgtaatcccagcactttgggagactgaggtgggtggatcact

SEQ ID NO: 354846 - DNA, 122 bp, Homo sapiens
aaggtcggccgcgctccgatccccaagagctcccgcgggctgggcgcgggacgccgggctcggccttagcccccgggatttagagcatcctcgcgaccacccggaggcttctgggggccact

SEQ ID NO: 354847 - DNA, 122 bp, Homo sapiens
aggcccagaggtgagtgggttccagcacccccacacgactggaagagggcagtacagggccgtctgcgtggaggaggaggtccattaggcttctgacggaggggccagggagaaggtgggtg

SEQ ID NO: 354848 - DNA, 122 bp, Homo sapiens
gccctcctctggaaggtggagcgggacaggggctgtgggtgagaggcccctgtgggtcctcgctcggcttcgctccctttctcctctccagcagtgaagtttgactattttcctggtgcttg

SEQ ID NO: 354849 - DNA, 122 bp, Homo sapiens
gcgggtggaattcccgcgatctgtctcattccctgcgccgccgagaaaagtgagatcccgcgagactcccagggtatggtctctcaagagccctggaaacgtgtgtcggcgccgccggatgc

SEQ ID NO: 354850 - DNA, 122 bp, Homo sapiens
cccgggtccaggctgagccagagtgcgcccaggagtgttccagtcagagcctccagttctcgagtcccagcgaccctcggtcagacctggaagccctctgggaggaggaggaggccgggact

SEQ ID NO: 354851 - DNA, 122 bp, Homo sapiens
ttaggaactgtaccactcacgggaaggtctgcagcttcactcctgaagtgagcaagactacgaacctaccgggaggaaggaacaaattacggacacaccattctttaagaactgtaacaaac

SEQ ID NO: 354852 - DNA, 122 bp, Homo sapiens
cctgatgcccccaacggtccgtgtaggtgactttggccaggcggatgttcatgaaagcatcgacattgtctatgcgtccgtgggccacgctctcatcccgcaggtccacagtggttacccgg

SEQ ID NO: 354853 - DNA, 122 bp, Homo sapiens
gcggtggtggcagcggcagccggggcacaggtgactgggctctgtccttcctgttcttctcggcctgtctcctattcagatttctaagccaggagtgaacaagcgccaatgctatctacgtg

SEQ ID NO: 354854 - DNA, 122 bp, Homo sapiens
cagcacacttagtcctcttgctgaggcgccccactgcactcttctgcagtgttctgttaccgcctaaggggttcaccttgcccatgcctagacagagtcaattcatcgagacaggggaattg

SEQ ID NO: 354855 - DNA, 122 bp, Homo sapiens
cattgtggggcggggcgaggcggggcgccggggggagcaacactgagacgccattttcggcggcgggagcggcgcaggcggccgagcgggactggctgggtcggctgggctgctggtgcgag

SEQ ID NO: 354856 - DNA, 122 bp, Homo sapiens
ctataaatgatggggctcaagagacaggaccgacagtcagggcaggaggaggagcaagaccggacctagaagcattctgaaaatgtgtaggttttcactggggcgcgccagaagggcactct

SEQ ID NO: 354857 - DNA, 122 bp, Homo sapiens
cagagttcacatcctactgattgaagaccttgttcttgagctgtccggttgccacagggtcggacctggaggctgcagaccatcgtggccctttgcagtgttcggaaacatatgcgcacccc

SEQ ID NO: 354858 - DNA, 122 bp, Homo sapiens
cactaggctgcagaggcggggaagacccgccacaggctggcgtgcggagccccaggccggcggccttccgtgattaacgagtgtttacaagactctattagtaatgacacagacaccaatgg

SEQ ID NO: 354859 - DNA, 122 bp, Homo sapiens
caaacggtaacgttgaacttccaaagtaggtccatcgggctctcaggacccgcggctgtccgaggcctcagttgcctcaattagtcttaggctaacttcctccttgcgctggggggtgggga

SEQ ID NO: 354860 - DNA, 122 bp, Homo sapiens
ccgccgccggccgccagaggaagctgctttgctgctgtcgttgcccagcaactcgtagcccggaagcagtaccccgtctcgctcggttccgcggcggccacgctccgggagacttccggcag

SEQ ID NO: 354861 - DNA, 122 bp, Homo sapiens
ttaatatgttcaggttttgtctactcctgttggttgtaagccccttattccacaaatatacgtgatgttcaaccgagcttaattaagcatccaggaagtataaccataaggaagaatacaat

SEQ ID NO: 354862 - DNA, 122 bp, Homo sapiens
tgctaagggaggagagaggcaagcgcccagggtctggagaagcggaggcgctactggaaccgagcctgcggaagctggaagtgaagccagcttctacccctttttctgggccctgataggga

SEQ ID NO: 354863 - DNA, 122 bp, Homo sapiens
tggcttaggcctttgatgtgactcatctgggcagaatccctgtaaacagtgggcctgacccgcgaggacttgggggctgctcgggtcagagcccctcggcccccgtcacagaccccgggggt

SEQ ID NO: 354864 - DNA, 122 bp, Homo sapiens
ttatatctgcctggggttcacatgccctacactggactggcataatttgagagtcagatccgaagatgtggtatatccgccatctttagcaactttcaaaaactaccctatgaggtcaagct

SEQ ID NO: 354865 - DNA, 122 bp, Homo sapiens
acagagttcataggagctaggaataagaggagatggcagcggggcataggggaaccccatcgtgtaccgcatgaatggaggaaactctgcagtctgtcactgggtttttttgtaattaagat

SEQ ID NO: 354866 - DNA, 122 bp, Homo sapiens
gctgaagcaatcctccctccttggcctctctcttttttttgagacggagtcttcctctgtcgtccaggctggagtacagtggcgcaatctcggttcactgcaacctccgcctcccaggttca

SEQ ID NO: 354867 - DNA, 122 bp, Homo sapiens
tgcatctctgtcttctgcaagtagtgctgtggcagagctgcgttttgtggagagcgtccccggggatggagcagatcagttggtgatgcgtatgtatcagaaagctcggcagagcaccctgg

SEQ ID NO: 354868 - DNA, 122 bp, Homo sapiens
tggtgtgtcgaactcactgcgcctgcgcagcgagctgacccgggcttccctagcgaagcgcgtaggacccgcctcttcttgtgcgtgttgtcttgaatatcgccattctgctggcaacagtt

SEQ ID NO: 354869 - DNA, 122 bp, Homo sapiens
aggttataagccacataaagctcaagataggtctgcaacacacagttcaaaatgggtctacgttaccatctacgtcaaaatggctgaatgttctaaatgagattgtagtaggattccattta

SEQ ID NO: 354870 - DNA, 122 bp, Homo sapiens
cctgtgcatggctgtgcgtcggactgaccttgcctctctgatacaaagcagggttttccgcggcttctgttgttgaggctgctggtggagttcttgctgtggttgcgggttgcccagaagtc

SEQ ID NO: 354871 - DNA, 122 bp, Homo sapiens
taccccgaaatgggccaacgtcaccaccgtgggcattctttgcaagttacagtctcccaccgccgagcctccctgggatgtggcccggagaggagaatggcctttttgttttatccctggga

SEQ ID NO: 354872 - DNA, 122 bp, Homo sapiens
gctacttacctcctgacaactgcatggagtaaaccacaccgccttgttaaatgccgtcgccgccgccgccgtcttcgtcaccgtcacagtcgccgccgccatctttgttgtgtctccgactc

SEQ ID NO: 354873 - DNA, 122 bp, Homo sapiens
ggtcagtgacctgctgaggtcacacagctagtccatgaacccagggcagatgggaactgccgaggcgcggtctccacagttgcccgggccaggtgggggtctctcggagggaggggtgccct

SEQ ID NO: 354874 - DNA, 122 bp, Homo sapiens
cctgtcgcctccaggccaggcaatccactccaggctcgcaatccaccgacctggagttcacggcctccgccctcctggcccagcggcccccacccgaccccacccgaccccacccgacccag

SEQ ID NO: 354875 - DNA, 122 bp, Homo sapiens
tgaggcgactgcatatcatttccggggatggcttgagtgagtgtcagagctgtaccttcccgagtcctctagtttatctgcctcggttcctcgcttccagacgaggaaacaggcccagagag

SEQ ID NO: 354876 - DNA, 122 bp, Homo sapiens
ataagaatttaatagcaatggattctgtcatcctgccaaatgcagacctcgctgccagggcggaactgggcgaatccgatttattctgtttggttcaacaagtgcttaaggggcgctcaccg

SEQ ID NO: 354877 - DNA, 122 bp, Homo sapiens
ccaagtgcgcagagctctcggccttcagctgcgaccctggaaccgctgccccccgccccacgtctgctacctaaatcttcaagaggggaaaacagggaggttccttaaggctgtccctctcg

SEQ ID NO: 354878 - DNA, 122 bp, Homo sapiens
gcatcacagcccatttatttgacaggattttgttcaccatcaccccaatcgtggggggtacggaggctcggactcaaaagaacaaagatttgttaagaaaccattgctctgcagccacacta

SEQ ID NO: 354879 - DNA, 122 bp, Homo sapiens
gattggatcgtgggggtggatttcccataagtggttttgcaccaggaatcctctgggtgccgtactcccaatagtgagggagttctcttgagatgtggtcatttaaaagtgtgtggcacctc

SEQ ID NO: 354880 - DNA, 122 bp, Homo sapiens
aaggagagaggagagtgctggtaacgtttcctgggcttctgtcttgtgggtgggatttcacgccctcctcccaaccatccgatggctgatttccctccattttatagctgagaaattgaaac

SEQ ID NO: 354881 - DNA, 122 bp, Homo sapiens
caaacataggcaccttagactccagcctgccgaaggcccaggcccctgtgaccttgcacccggcccactccctgacctgcctccttaatgcgttatcttgtctgttgaagctgctgtttctc

SEQ ID NO: 354882 - DNA, 122 bp, Homo sapiens
agcccaggcctggtttctctgggctccgtgataacttggggcaaggcagccagtgcgaagcgtggtggcaggagctggagagatggagagcggctcggagaagggcccctgcttttcagagt

SEQ ID NO: 354883 - DNA, 122 bp, Homo sapiens
ggaaaaccaaccaaaaaggggggaaggggaggctggtgctggctggcaaccttgactcagcgctcggcaggaggtccattcggaacagaaaccctcaccctgcactttcctcacccagccct

SEQ ID NO: 354884 - DNA, 122 bp, Homo sapiens
tacatgcgtgtcaggatctgtgtgcacgcacatgcgtgtcgggctctgctgctgcctgcgcgctccggccgctgggtgcgggaggcccctcccgagtccggggtgcgcatgcgcgctggcct

SEQ ID NO: 354885 - DNA, 122 bp, Homo sapiens
ggatgggaaggtggtaaagtttatgcaaacaatagtgtgagggatgcctctccttccggtcggccctcctccaggaggcgcatgggtggtggtagcaagtgggagtcttgggtgccctgtct

SEQ ID NO: 354886 - DNA, 122 bp, Homo sapiens
atggccagtggtttaatcaatcatgactaagtaatgagcctccgtaaaaaccagagcttccggtctggtgaacacacggaggtcctggaaatggtggcgcgcccagagggcatggaagctcc

SEQ ID NO: 354887 - DNA, 122 bp, Homo sapiens
gttgttggaaaagggagctttgtatcaaattatccttcacccagggaggcaaaacagccccgtttgtcctggcaaatttcctcctgtttgagtcactgaaattaaacattgaaaagacctat

SEQ ID NO: 354888 - DNA, 122 bp, Homo sapiens
ttcgctgcggagcagagtgcgatccgggcgcggctgtggtcgcctcgctcctgtccggggcgacatctgggcccgcagtcctgctctgctcagccgccggtaccggctgtgggcgggggcag

SEQ ID NO: 354889 - DNA, 122 bp, Homo sapiens
gaggccgaggcagtaggatcgcctgagctcaggagttcaagaccagccaggtcaacatggcgaaaccctgtttctacaaaaaatgaacaaatcagctgggcttgggggtgcgcgcctgtggt

SEQ ID NO: 354890 - DNA, 122 bp, Homo sapiens
caccatgggtgacccctgaaaacattatgctaagtgaaagaagccagacacaaaggaccacgtattgtttgattccatttgtaagaaatgtccataacaggcagagctatagagacagaaag

SEQ ID NO: 354891 - DNA, 122 bp, Homo sapiens
ccgctccgccgcgacgcggctcacaaactagggaggggagaagggaagaaagacccgattcgggaacacggctttgtccctggaactgtacctcatgtcccctcacttaatcctcccaagac

SEQ ID NO: 354892 - DNA, 122 bp, Homo sapiens
ggcgtggtcatgtgggaggtgctggcctatggggagcggccctactggaacatgaccaaccgggatgtgagtgccaagccctggcaggtccgcgggcggtggagcctcagggtgcagggagg

SEQ ID NO: 354893 - DNA, 122 bp, Homo sapiens
ccttctagtgtcaacaacaccgaggactccgaaggggcctcattcactccaggagaggcacgtggccgctccctctcccgtccgcctccggcacgtggttcataaggagagcagccacacgt

SEQ ID NO: 354894 - DNA, 122 bp, Homo sapiens
agtggctgcggtccgggctccggtgcggctggtgctgaagctgaggctgccggagctaggcgaggctcagctcggctcagccctcgcgccccagcgcctcccctcggctgccctctgttggc

SEQ ID NO: 354895 - DNA, 122 bp, Homo sapiens
gtcacctccaaggagagtcagctgcttcagtgggtcagaggtggggcatcaggaaagacccgcccatcacatactcttcgcattactccttagtgaagaccttgaccccaggaggctcccta

SEQ ID NO: 354896 - DNA, 122 bp, Homo sapiens
ggagaagagcaacagcagaagccggagccggagcccgggaggcgccgccgccgccgctgccgccgcacactgggatccgctcggcagcactacactcgccatgtcgggcacctgcctcagac

SEQ ID NO: 354897 - DNA, 122 bp, Homo sapiens
gcccagcggggagggggcaaagggcgcatcggccccgcctcgaggccggcggctccctgacgacccccgggacaaacggggaaactgaggcacagagtcagacgcaactctctgctcctttt

SEQ ID NO: 354898 - DNA, 122 bp, Homo sapiens
agcttgggagcaggaagatgtcgaatgaacttgagtgagtaaacatcggtggatacctgccgctctcagagcgtggaggctggatggggtttcctggagggggaagagcggggaggccggca

SEQ ID NO: 354899 - DNA, 122 bp, Homo sapiens
cagcgtgcagcatctcacccgggctctgtgactgtgcgacacgctaaccaccactagctgcgtggccttaagcaggcagctgacccccgggcgccccgacttcatctgcaaagcaagggtca

SEQ ID NO: 354900 - DNA, 122 bp, Homo sapiens
ctgcttccgccgcaggccccggttcagccgccgccgctggcgcgcactgtacagctgcatcggctgctccagctgctcgtaggacatgtccagcagctggtccaggtccacgccgcggtagg

SEQ ID NO: 354901 - DNA, 122 bp, Homo sapiens
accgtgtatgcctcccacaagcaggccaaggcctgcctcgtctctcgcgttagctgtgagcgcacaggcactcgcttccacacccgtggcgtgaacgacgacggccatgtgtccaacttcgt

SEQ ID NO: 354902 - DNA, 122 bp, Homo sapiens
agaagataagaatttagatttgcagtcaagggtgtcagggtcaaatgtcaagtggtcaaacgtcagctggaatttgggagtcaagagctggcaagcagggaagagatagaaatctaggagat

SEQ ID NO: 354903 - DNA, 122 bp, Homo sapiens
ggacacgggtggtgcagagctgccactggcctagcctcctggcgaaggggcaagctggttcgtggggaccacccgaaggcctggagggatttgggctgaagcccaggccgctcagcgggagt

SEQ ID NO: 354904 - DNA, 122 bp, Homo sapiens
tcgtgacccacctgcctcggcctcccaaagtgctgggattacaggcgtgagccactgcgccgaccctgtacaaacttttataggggggtaattgaactagtcctccccaccacacccccccc

SEQ ID NO: 354905 - DNA, 122 bp, Homo sapiens
tgcacccccctccactctgcctggcctctccagagcttaccttgtctctgctcagccagccgtgctgcctggatgggctctgctgccagctcaagagtcctctttatagaagggctgcagat

SEQ ID NO: 354906 - DNA, 122 bp, Homo sapiens
agatggaaggcatgcaaactactgagttgactggtttctgttcttacgtgtctctccaaacggaatgaatagcagtacttaatgaaaacactgtccggcaattcaggctttaatattataaa

SEQ ID NO: 354907 - DNA, 122 bp, Homo sapiens
agaaacttaaggatgcttaaatttccactgttggacgaattctgagcgcccagggagcagcgcagcgcgcgactgacacccacctgtcccgcccaggagccttgcaggctggagggcagctg

SEQ ID NO: 354908 - DNA, 122 bp, Homo sapiens
cccgcgtttcaagacccgcccccatattggagagcttcttccggtagccactggaaagcccgcagcgcgagccggctacgctccctggcggagctctggacgccccacctactcccagcgtt

SEQ ID NO: 354909 - DNA, 122 bp, Homo sapiens
aaatagatctaatatggtcaaaggaatttcacaaaacaaaaaccactgacatgacaaaagcgtgcatttaatttgatgctttgcagagatacatgaccaaagttgtatgcatggcttgtctt

SEQ ID NO: 354910 - DNA, 122 bp, Homo sapiens
gcagcccaggaactcaagctctggtcctggtctcaaatttctggccccagtcctgcgggacggggagcgcgtcctgaacaagaagagagaagaaaggagagtgtcttttctcaaaaactgtc

SEQ ID NO: 354911 - DNA, 122 bp, Homo sapiens
cacctccgagccaccagctccgcagaagtagctgggaatggaactgtactcctccagagacgtctcctccaggctcaccacggagcaaattctgtgcagcataagagaataaacgcatgcgg

SEQ ID NO: 354912 - DNA, 122 bp, Homo sapiens
tctgagaaccaaaatccgaccctttacatccagatcaggacaaactcacagagtagtttgcgaactactagtttagaactagttcggaatctgcttgttacggtttgtgacaagaggaacgc

SEQ ID NO: 354913 - DNA, 122 bp, Homo sapiens
ggtggacacgcttcagccctctgtctctattgccccaaatctggcctgtggctgctgggccgccaccagcttggagggcagggtgggccccgggagcccctgaccaccagtgacttcttgtc

SEQ ID NO: 354914 - DNA, 122 bp, Homo sapiens
gactaccactacatcatggagaacctcttcctgtgagtccccgcccgcggcgagcagcctcgggccagctctgatgcctccctggccacaggggcaccaggctgcaaggattgcattgtggc

SEQ ID NO: 354915 - DNA, 122 bp, Homo sapiens
ctacttctactctatcactgaatgaacaaggctgttggtttgcctccagcaaccagcaaccgtttacgcttcctacaccctaaccctaacactaaccctaaccctaaccctaaccttgagct

SEQ ID NO: 354916 - DNA, 122 bp, Homo sapiens
acccagggtgctcagggacgacctggaagtgtcacatgagttatgggtctcctggcggggcggagagtcaccgctgagctccacctttagtccctgcctcagggctgtgtgcagtatcctga

SEQ ID NO: 354917 - DNA, 122 bp, Homo sapiens
ggaaggcaaagcagtctctataggggtcagatagtggcagaccagcctgctgctggggtgcgacagagggctgaatcctgctgcctggagagtgcagaaaaggcctcagcaaggtaacaaca

SEQ ID NO: 354918 - DNA, 122 bp, Homo sapiens
tccagggcacctggccacggtggctcctaaccctggcagataacaggcctctgtgcgctccgcttgaccccagcgcggccccaagctccgaggcgggctgggggcgtcctcactgcgcgccc

SEQ ID NO: 354919 - DNA, 122 bp, Homo sapiens
cgggcggctgcgggaagctgggccaggcggccgcagatccccacaacatccgggagccggcgaccacttccagttgctatggttacgagttgcaacctccagaaagaattcgtggtttcacc

SEQ ID NO: 354920 - DNA, 122 bp, Homo sapiens
gaatgcacaggcgaggcggaccgggcgcgggaagcggtgcgcaggaaggggcagagggcgcggtggcgttctggggtgcttctttgtggacatacgcacgttcatccatttgtgtctgtatg

SEQ ID NO: 354921 - DNA, 122 bp, Homo sapiens
cccggacctgctggcacaaggcaatgcatccctgaggctgcagcgcgtgcgtgtggcggacgagggcagcttcacctgcttcgtgagcatccgggatttcggcagcgctgccgtcagcctgc

SEQ ID NO: 354922 - DNA, 122 bp, Homo sapiens
ggggattggtgtaggtgcagaaagaggccagctaacatgtagcactttgccaattcagaacggattttcacgtggtcttgtctgagcctcaccctagctctgtgagaacaccttactgctgc

SEQ ID NO: 354923 - DNA, 122 bp, Homo sapiens
ccaaaaggaggaccatcttccaggaatgtccaggcatgtgtgaatccaggaggaacatggcgtgaacctcagcagagactccacccatattagcatgtccttaatagctccccaatgtttgt

SEQ ID NO: 354924 - DNA, 122 bp, Homo sapiens
aagtgagactggtttgtgccgattcagcgccctgcctgggctggctagcaacggagcatgcgcagtgtttctaggcgtggtcagactccagaggtgttggccaatgggctcagggagctcga

SEQ ID NO: 354925 - DNA, 122 bp, Homo sapiens
cgctgttcgccggcttcccctccccccacacccggggctcagagcaggaggaggaggggccggtgcattctcgccgctgttctttgcaacctgcaggggccggtgtatgtccggcgaggagc

SEQ ID NO: 354926 - DNA, 122 bp, Homo sapiens
gaactgtgaaggtggtagtcccttgccctaattggtgctcaataaagttgttggcataaacgagtgcgtgcgcttgatctggtttctgctctctgggaggtgagtggccgtgcggggcggtg

SEQ ID NO: 354927 - DNA, 122 bp, Homo sapiens
cttcttcactgacttctgtatcctcctcacggctcattatcactgctagtttaacaactgcgagatcctgagttccaagacagaaatttggccatctagttcactattaaatccccagcaca

SEQ ID NO: 354928 - DNA, 122 bp, Homo sapiens
cggggtttggggtcaacgtggggggcagatgagagaccacaggaatggagtcctggacagcgtggggcgggaggggacggaggaagaggaaggcacccgccatgcggctggggtcgggcagc

SEQ ID NO: 354929 - DNA, 122 bp, Homo sapiens
gaagggacttatctctaggaggtcaacagtgggaacatgcggtgactgatttccaccctccgtcttgtcaacgcggggagcgtctgcacaaacggctgtttggggcacaaagtttaaaaggc

SEQ ID NO: 354930 - DNA, 122 bp, Homo sapiens
gtatttgacattcagagatgtcgcagcaccctgcccggtaccggtcagcccagcccgggtcgcgttacagtttcatcagctattagaaaagacccacaaactggctgaaaagttctcaaact

SEQ ID NO: 354931 - DNA, 122 bp, Homo sapiens
accgtcaagggtattaattaccagatctggcgatagacgcgggttaggtttactcaggcccggtaaggatgctggtggccagaatatcaatgagcacccgggctcctcggctctgggccctg

SEQ ID NO: 354932 - DNA, 122 bp, Homo sapiens
ccaaagaaaggaaaccggcgcttgagacttgtctgggctggctatggtgaagcagtgaaacggtgcagaattgtgtcaatgaggctagttcagttgtgcaagagcatttcctcaaagtaaga

SEQ ID NO: 354933 - DNA, 122 bp, Homo sapiens
ctgggcagagttgcgctctctgggccttgtttgtggcagcgggaccataaggggctcctccggattctgtttgaagtcaattcctggaacatcagatactgtcagtcaaagataaatacaag

SEQ ID NO: 354934 - DNA, 122 bp, Homo sapiens
gaatgcacacatctccgtcaccatatccccaaaggggaaagctgattctactgaatgattcgcagcactgaatgggaatctagtgttaagttggttctgacagtcgacacaccgcagtgaga

SEQ ID NO: 354935 - DNA, 122 bp, Homo sapiens
gcaaggttgctcttcagcctgttggcaaaattctcccacagcacttttatttctcaggcacgccttcatgggccccagaaattaattccttgacggctgttgtggagccttagttgccagcg

SEQ ID NO: 354936 - DNA, 122 bp, Homo sapiens
cctttttgttctattcaggccctcggccaattggatggtgcccaccacattgggtaacaacgggtcttccttactcagtccattgattcaaatgccaatctcttctggaaacaccccagagt

SEQ ID NO: 354937 - DNA, 122 bp, Homo sapiens
cggtccgaatctccctggagctgaagttttcttctctctaactttgcaggcagcatctggcggggccgaaccaccccctctgggctccaccgccctcgcgccgaatcgggagacgccgggtc

SEQ ID NO: 354938 - DNA, 122 bp, Homo sapiens
ggcagcggcgcagcctgcggggcgctgcttctcgggctctgcgccgccctctactggcgccggaaacagcgcaaagagctcagccactacacgggtgagctcccggcctcggagcggacgga

SEQ ID NO: 354939 - DNA, 122 bp, Homo sapiens
tgctcactgctaggcaggtcttctgacttggtctcattttctgcatggctttctccctctcggactttcttccgcccgaaagtgaggggagaaaccttgaagggggagctttttcctgagga

SEQ ID NO: 354940 - DNA, 122 bp, Homo sapiens
ttttttgtttgtttgttttcttggagttgctttacgttattttttccttttacttgttttcggcaggaggcccacattcccatagcgtgcctattcctatgccgggccctctcatttgggtc

SEQ ID NO: 354941 - DNA, 122 bp, Homo sapiens
tcacctgagcggccacctctcctctccaaggctacatgcggatccagcagtttcggaaggcggatggttcctatgcggcttggttgtcacgggacagcagcacctggtgagcttgggagagt

SEQ ID NO: 354942 - DNA, 122 bp, Homo sapiens
aatgttccccacagaggcaaatgttctgcaaatgtgccaacactggaggtgtttcccgcgcggagcgaccaaagagaggaatcatttcgacagaagaggcagcactggaagtatccatggtg

SEQ ID NO: 354943 - DNA, 122 bp, Homo sapiens
ggtggtgagtcaggacagtgaaacaggtcggctcttcactccaggagtgtgcgcgggcgccgggccgcgcaggcgcattactgctcccctcccccgaccttggctgatcgcgcctgcgcagt

SEQ ID NO: 354944 - DNA, 122 bp, Homo sapiens
tctggggctgggagggtggcagtcgtgtttcatgctgtgtcagcgcgtcatcccattggacgggtggttgtacctaaattgagtgttgtgacactctcctgagcctctgttgtttcctcccc

SEQ ID NO: 354945 - DNA, 122 bp, Homo sapiens
tccttctctttactccacccaggttcctccctagagacagtcttaccctgagctgtattacgctgcacttccatttgccatcttgggagacactgcttagcacatacttcttccttagtttt

SEQ ID NO: 354946 - DNA, 122 bp, Homo sapiens
cactccttccttctcctggtcatgggctatgatcgctatgtggccatctgccacccactgcgttacaatgtgctcatgagcccccgtgactgtgcccatcttgtggcctgtacctgggctgg

SEQ ID NO: 354947 - DNA, 122 bp, Homo sapiens
cactggtagttgcacactgtatctgcagagggcgtgtctcatctgtaccccgctgggttacgggatttcaggaggtatttttgtccacctgcgaattccatttattacctttcatttaacag

SEQ ID NO: 354948 - DNA, 122 bp, Homo sapiens
ggccgaagaggagttgtgggtgagcgatttgagaatctccgggacaaggagcctgacatccgggtttgcaaaccacctggattctggtaaacaccgcggatttgcagcgggcagcctagagt

SEQ ID NO: 354949 - DNA, 122 bp, Homo sapiens
ggccgagtaccgaaaccactggtcggacgtgctggctggcttcctgacaggggcggccatcgccacctttttggtgagttgcctcctcaaccttcccagcatggaagaccctcaccagctct

SEQ ID NO: 354950 - DNA, 122 bp, Homo sapiens
tcattatctgctgcagaatgtccccgatgtcttgcttccctcggcctcccgggacccccccgctacccccaccggggtctccgccaccgggaggctcgccagggcccccaggctccccactc

SEQ ID NO: 354951 - DNA, 122 bp, Homo sapiens
atgaacttggcaaacaagatgacataatacagaaagttctgtgaatgcagggtgggtagacgtcagagggacactcagaacctgtgttgttacagaacaggattttttgttgttgttgttgt

SEQ ID NO: 354952 - DNA, 122 bp, Homo sapiens
catgctactcaaatttctaagtcacgagaattcaagtgttggagacaccccaggactctccgtctggctcccctcctccccttccctccctcctgggctcaggctaggagttggctccaccc

SEQ ID NO: 354953 - DNA, 122 bp, Homo sapiens
ggctcaccttggccacctgaagctggccttcaaccacggcccgggcaatgccagcccaggcgtggtccagcttgaagcccggtgccagatgcataagccacttgcccgagagcacgtggtgg

SEQ ID NO: 354954 - DNA, 122 bp, Homo sapiens
gccctgccgataccgtgggtgcagctggcgactgcactgcgaggctttgtccattttatacgttttgtttaaagagtaggagccacttttactgagctttatgtaaccatggctaaaatgaa

SEQ ID NO: 354955 - DNA, 122 bp, Homo sapiens
gccggctggtgtggactgggcctggtgggccaggagctgccctcactatggtgacaggatcgggctgccaggctcctgtgggggctcagcaggaggggatgggagacggcaatgctcacgcc

SEQ ID NO: 354956 - DNA, 122 bp, Homo sapiens
gcagacctagggaaactggggcactgggctggggagccgcacagccccctttcaccttctcgactcctttccaacccctcgctctggtggatcccagccccggcccccactcccggccctgt

SEQ ID NO: 354957 - DNA, 122 bp, Homo sapiens
cgacagagcgagactctgtctaaaaaagaaaaacaaaaacaaaactctccaatcccaatccgtattcactcacatggtccacatttaaagcatcctaggaactaggaggaaacttagataaa

SEQ ID NO: 354958 - DNA, 122 bp, Homo sapiens
gaactgggtgaaggaaactttcctcttcctcacaaggaggcaatacaggaggagccgagccggctgagggtcgaggcgaaagtgaggtctggctcaaaaggaccttggaggtagaattatga

SEQ ID NO: 354959 - DNA, 122 bp, Homo sapiens
agaagaaactctggcggaaagtaatctcaattccagcctccttcactcgttcctccaggtcgtccagagtcttgggtgggaataaaaaacaagttggaaaaacacggggtgcatgagggaat

SEQ ID NO: 354960 - DNA, 122 bp, Homo sapiens
caagccccagccctgccacagtaccctcatcaaggccacagctcccttttcataaggtggcggctggactgaatctctatcaggtctgacaagctgcagctagtgagccctgactgctcggg

SEQ ID NO: 354961 - DNA, 122 bp, Homo sapiens
gaaagaaagacaggaattgccaccgaccccagggctgcatttattgctggacatttgtcacggtctgagccgtgtggaccggccccgctcagccagagccaggagggctacgaggggaggcg

SEQ ID NO: 354962 - DNA, 122 bp, Homo sapiens
ctctccctccgccgcctttttaaaaaatgttacttgtcccatttctacattgtgaaaacacgtagagttgcattccattcctcagccctgaaccacacctttgtttttgtcttggatctgca

SEQ ID NO: 354963 - DNA, 122 bp, Homo sapiens
gcaggccaggagactggcggacctaagaaactgagacgtgtttctcagctcccccaaccacgtccccagccccgccggtcccggagctgccctgccgcctggtggctgcggctgcgctgcgc

SEQ ID NO: 354964 - DNA, 122 bp, Homo sapiens
aggcagatacaaaagacatctgtgtagtagtaatccaggaatcagattactctactggctcgttttttcaaggatggtagaaggaatgggcgtaaccatggaaatgttccttcccaaaacac

SEQ ID NO: 354965 - DNA, 122 bp, Homo sapiens
attcttatttaggtttgtctttctgcctgggctcttttgcataggaaataagtactctgtcgtcagtgtcaaatgacacttctggatcctccccttgcttatttcctgagagcagaatgtgg

SEQ ID NO: 354966 - DNA, 122 bp, Homo sapiens
aagactaaaccagacctggaatgctcagttagtgattagcgacaccctgtcttgaaccaccgcgtgactaagggcagagccaagctgtctctatctttgtttctggcagtcggaggatcaag

SEQ ID NO: 354967 - DNA, 122 bp, Homo sapiens
cctcgtccagggagcagtcgtcgtggaatccctccagaggagccaggggccccaccccgccgggctgggcctataaagaaacctccaccacctacaaaagtagaagagctgcctcccaagcc

SEQ ID NO: 354968 - DNA, 122 bp, Homo sapiens
tggcttacaaaagggacaaggacgctgccctcaggaagcatatagtctcctgggaggagacgggcctcaatctagtaattgcttaaatgtatatttacgaactgccatacatggttaaggta

SEQ ID NO: 354969 - DNA, 122 bp, Homo sapiens
aaggtacctcgactccggcggcagctaaaacccatctcacggactccatccggcctcttccgttgggatagtggagcttgggccttgctgccatgatagcttttcaggctttctgaaataca

SEQ ID NO: 354970 - DNA, 122 bp, Homo sapiens
gggatggttgagaagcattgggaaggggctttgagagtctgtggaggtactggggctacacgtacaaagcagggaggtctctgatgagattaattaatatgtgaagtgccttgagagcatct

SEQ ID NO: 354971 - DNA, 122 bp, Homo sapiens
gaccatcgatgcctccaaccacagccaggaccgccatgaggccccccacttcagggttctcggaatcagggaagtagtcctctaactgggcctagtgcagaccaaacagcgagctcgaccgg

SEQ ID NO: 354972 - DNA, 122 bp, Homo sapiens
gaggttgcagtgagccgaggtcgcgccactgcactccagcctgggtgacaaagcaagactcgtctcaaaaaataattagtttggggactacattgaggggaggccaggacagagcatgggtc

SEQ ID NO: 354973 - DNA, 122 bp, Homo sapiens
gaaaatgccggtgtctaagactgaagccaataaaatgttaattgaatgagatttatcattcgcagaaactgttcaacataagagatgatttatacgtgttttcataaatgtgaatgcatagg

SEQ ID NO: 354974 - DNA, 122 bp, Homo sapiens
ccagggggccccttgccaaatacagaccctccagagtcatggcgtgtcccctggaggctgcggagaggaagcagagtcagccctagatgagccccccaccctagccatgggggacccaacac

SEQ ID NO: 354975 - DNA, 122 bp, Homo sapiens
gcgggagcctaccgcgagcggagtacggaaagcccgcagggccgcgccacatggcgcacgcgcactgagctgcatacctaggtgacaaacgtgcacgttttgcacgtgtatcccagaactta

SEQ ID NO: 354976 - DNA, 122 bp, Homo sapiens
ggggcggggcggggctgcaccgcccgcgggtaagaggggcctgctgataggctgcgaaggcgataggcgtctcagacttgaagacgcctctccagcagaactccctcattggtcggcaagag

SEQ ID NO: 354977 - DNA, 122 bp, Homo sapiens
agcgattctcctgcctcagcctcccgagtctctgggattacaagcatgcaccaccacgcccggctaatttttgccatgttggccagactggattagtgcaatattgtttcatagccatggag

SEQ ID NO: 354978 - DNA, 122 bp, Homo sapiens
ggccgctcctggatggcggcttggaaaagccacctgcggccaaactccggggcagtggtgcggccgccgggtgtgtgcgcgctcggggctgccccggcggcttccggctccactgaggtgca

SEQ ID NO: 354979 - DNA, 122 bp, Homo sapiens
cacagaaggaacacaagggagtttcagaaagtcaccttagtactgacactacgcgggatccgctaatactgctcagtactttaaacgctcagatactcagggacggaaggcccctcctgccg

SEQ ID NO: 354980 - DNA, 122 bp, Homo sapiens
gagccactgtgcccggctcacctctattaaaaggacccaaaggagttaacggacagaaaacgtggcagaggcagagatggggtggtatggaccagaatttgtagtttgcagtgatttcgcct

SEQ ID NO: 354981 - DNA, 122 bp, Homo sapiens
acatgaacaacgtagagctggagtctcacctggaagggccgactgtatgaagtggagatccgggagctgcagtcccagatctccaacatgtctgtggtgctgtccatggacagcagccactc

SEQ ID NO: 354982 - DNA, 122 bp, Homo sapiens
gaaaagaggaaattgaccagatacgggccgggggctcagcggtgtggtggggcaatccgccgctggacagagactgctttctagtagggtacttagcttcacactactgggacagctattcg

SEQ ID NO: 354983 - DNA, 122 bp, Homo sapiens
aaatcttagtatttgttcccagaactactgtgactccgtcctcttgctccataatactgacgtacatttctcagccggcagcagtggctcatgcctgtaattccaacactttgggaggccca

SEQ ID NO: 354984 - DNA, 122 bp, Homo sapiens
gactcacgagtctaggaaagtacttcagctcctaaaggtgagcagaaacttaaccaggaacgatatccacgaggttctgcttctctttggaatatctttgagttagcattccttaccacctc

SEQ ID NO: 354985 - DNA, 122 bp, Homo sapiens
gaggggtagataatagcatcttcaccccagtagttgccgtaagtagtaatgctaagaatccggcacgtcgtaggcatcaatctcagtccgccatctccccttgctaccacgccaggaggtac

SEQ ID NO: 354986 - DNA, 122 bp, Homo sapiens
attgagtccctccctattttgtgtcagtgttgggaatacagttagccctctgtattccatcgaaagtatttgagttaaaaaatgaaaaaaacacaaaataatacaaattaaaaaaatacaac

SEQ ID NO: 354987 - DNA, 122 bp, Homo sapiens
gccacataatgaaaacttgtcagtgaagaaaaatgactagtgtcagttctagccctgactcgtgaccagttactagtaggagtttaatgttcctagggtttcccttagtggaatatcatata

SEQ ID NO: 354988 - DNA, 122 bp, Homo sapiens
cactgcacacggaggtctagtgagcctcttgctaagtgtcacacacactcttcccaaagacgtgatgagttaaagttgtattctgaaatcatgaagccagagcctgtgccagaccttctgct

SEQ ID NO: 354989 - DNA, 122 bp, Homo sapiens
ttcaccgtgttctctgaatacactgaattactccgagcatctatagttggcaatgccctgcgcattttccgcactccgatacactttacactgaacaccaattcggaagttgtgtggaccgt

SEQ ID NO: 354990 - DNA, 122 bp, Homo sapiens
tcccaaggtgtttccagtagcgacttctgtccccctatccccaccctggtccccactttgcgcccccgggctccctgcctttggtgcacacaggatcctgcccgccccccttgccagagcca

SEQ ID NO: 354991 - DNA, 122 bp, Homo sapiens
gtactgttcctcagacaccgtggcaatcttctgcattggtcctaaaatagctggagatatcgcagctccttcttgggggccctgctgacaagtggaggccagttgctaagcccatcagctgc

SEQ ID NO: 354992 - DNA, 122 bp, Homo sapiens
ttacgccattggtttggaccctggagcagtgaagttccacagtgtcatgataattcttggcgttgagtgacctcacgatgtgctgtccgtcttctcgctgttcagccagcagttcactgtct

SEQ ID NO: 354993 - DNA, 122 bp, Homo sapiens
ttatagattctttgaattacattataaatgactaccatgtcaatagattagaacaacaatcgtgtcatggcttttttgtcgtcatgggtcattttcatcaaatgttcagtaatttcattgca

SEQ ID NO: 354994 - DNA, 122 bp, Homo sapiens
agggactatagaaatattgtttcaaagatccagtagatagattcttatctatcccttttacgcataaaagcaactacatttctcccacttggacttgtgttgtccatacaaatgtttatttt

SEQ ID NO: 354995 - DNA, 122 bp, Homo sapiens
tgccgcccccgcttgccctcccttgccagctcctcgtttcccagactcgcggggaccccacgccagagaggacacgttgacatgtgatgtcctggatgcgcttcagccttggggatgctccc

SEQ ID NO: 354996 - DNA, 122 bp, Homo sapiens
gggttaatctgaggggttctgcttggcagctgttagctctgagaaccacatggccgctctcgggtgcagggagtcaggctagctgttaactacccagcgccaggttgaggcatcgtctttgc

SEQ ID NO: 354997 - DNA, 122 bp, Homo sapiens
aagaaacgtaatcccattcactcgttcatcttgtagtcattcagcaaacatttggaagcacgtatggcgggcgttaggagtgaagtagggccgggcacggtggctcacacctgtaatcccag

SEQ ID NO: 354998 - DNA, 122 bp, Homo sapiens
cacaatgtatatcccattaggtaaaacttttttctcttagtacatcaaactttttgttgtcgttgttttgtttttattttttacagatagggtctcactctgtcacccaggctggaaagcag

SEQ ID NO: 354999 - DNA, 122 bp, Homo sapiens
gatctcacttagattggcctttctctaaccacagactgaacttcttaatctcagttttaccgtaaaaatgttatccattcttcagggccaacctccaaggccatctttttaacaaaacatct

SEQ ID NO: 355000 - DNA, 122 bp, Homo sapiens
ttctgatttatcctaaagaagcgttccaaattgtctttaagataacatgtttgagtttttcgtgttcattcataaattattttgatgtcagcatagatgaaatggcgattggttatctcttc

SEQ ID NO: 355001 - DNA, 122 bp, Homo sapiens
ctcgtcgagcacgtgcaggtggccagtgcggtagaagtgcagcaggctcaggaagaagcccgggtgccggtcgaagtagaattcgcgcgccgcctcgtcgtagtcgtcgcacaggcgccgcg

SEQ ID NO: 355002 - DNA, 122 bp, Homo sapiens
gcctcaggatgggacacaccaccacgccatccggtgtcttcagctggtgtgaggagtagacgtggcgggactccccgttgtgcttgcagaagttgcacagggtccccaggcccccgttggcc

SEQ ID NO: 355003 - DNA, 122 bp, Homo sapiens
tcccccaccccgcggctaccccgccgtgggctcctgcatggcctgagcctccccgaggagcgccgccccctgctccgcggcacccggtcccatccaccgcccaagggctgaggagtgcgggc

SEQ ID NO: 355004 - DNA, 122 bp, Homo sapiens
aaggcaagagctggaggcccagggctgaggctgtggggtgagcacagcatttgcggggcgcgggaagggagtggctggtggggcgggggagggaaaccagcacgttagaaggtcagccaagg

SEQ ID NO: 355005 - DNA, 122 bp, Homo sapiens
ccccgcctcgccgccagccgcgccaccctggccccgccgcctccgccgcccagccgcccgcgcaggtctcacctttgtgtaaagagtccaggagcaggaggaaagttaccagccacatgcca

SEQ ID NO: 355006 - DNA, 122 bp, Homo sapiens
gcctcccccacccccgacccccgtgggctccggcgtggcccgagcctccctgatgggtgccgccccctgctccttggcgcctggtcccatagactgcccgagggcaaggagagcaggtgcac

SEQ ID NO: 355007 - DNA, 122 bp, Homo sapiens
tgttgggcaatttcaactccctgtctcggtcgccacctaggattactgcatgttcagctacgacctcatcaacatggctgctggaagtcgtctacaggaaaaagaaagaaatgacactgaag

SEQ ID NO: 355008 - DNA, 122 bp, Homo sapiens
agtcctggccctcttcgaggaaagtcttcttcgaagtcaccagaggatgagaatggtgcgcgcacctttcaggggtcttgtgaggagcagaataaataaagtgcttaggatggactaaagaa

SEQ ID NO: 355009 - DNA, 122 bp, Homo sapiens
cctgatgatgaccacaagggcagtttgtttcagctgtccctgggaacacttccctgaaagcgctcagggacattttctcaggcacagtgctccaggctacggactctgattgttccctgtgg

SEQ ID NO: 355010 - DNA, 122 bp, Homo sapiens
cctgttttacctttaatcttggaacgaatcaattccacaattgattcgctttcttgtacccggaggcgaacggaggggaaccagtggagcgccaagaaaaagcacagctgcttgttcactac

SEQ ID NO: 355011 - DNA, 122 bp, Homo sapiens
tgtgagggcggctccccggggtcccgaccccgagtgccgtagggctggggcagcgctccgcgctccggcccgcgaggaaggtccccgccagccctgctacccacttacacggacgcctcccg

SEQ ID NO: 355012 - DNA, 122 bp, Homo sapiens
tgggagtggggttgctgcccggtgcggccgctccgagcccaccccagcgatggccgaaaccgggactgccccccccaccgtccccgggagcgcgccggtctacccagccctgctcgagcaag

SEQ ID NO: 355013 - DNA, 122 bp, Homo sapiens
cccgtcgctggtgtggctgtgtctggcctcctggggtccttttgtccaaggacaaggtgtcggctctcagtccccgccgtccacaggatgcctgaggtcttcctgcacccacgtttgactgg

SEQ ID NO: 355014 - DNA, 122 bp, Homo sapiens
agcatagtggaacatttatttttagaaatattattaattggctgggctcacgcttgtaatcggctgggctcatgcctgtaaattttgggaggccaaggtaaaagaattgcttgagcccagta

SEQ ID NO: 355015 - DNA, 122 bp, Homo sapiens
acacgtgtattttgtcagcaaatttgagttcagtagcaaactggcataacgttgaacaaccgtgcgttaagtactcttgacaaactgggggccggaattgttgatcattgagttgagaagag

SEQ ID NO: 355016 - DNA, 122 bp, Homo sapiens
tgaggaagatacaggacagccataggttgagatgatgtaatggcacgaaagttccaaaagcgctgggtgttttcccaaaggccgggtgccgaattttaagacccttaatagttcagttgcag

SEQ ID NO: 355017 - DNA, 122 bp, Homo sapiens
tctgcagggatgtgagggcagctcagagctgagatctaaggctggggcagaaccggacggcgcaacaagctagggagaaagcatccccggcgcggggtgcacggagccccagaccccacccg

SEQ ID NO: 355018 - DNA, 122 bp, Homo sapiens
acgccgacctcgagcgcagaatactcccgagtgctgggttcctgatacccagcccgggagcgaggggagtgaaggagggaccgggacaggaaggcggggacgcggtgggtgaacaatcaatg

SEQ ID NO: 355019 - DNA, 122 bp, Homo sapiens
agtctcagtgttggggagctgcatttgcaagctgatctggttgaaagtcaagggaaaagtcgcaccctccccacttgctgcagctccctgtagggctgctaggagccccaagggtaatggtt

SEQ ID NO: 355020 - DNA, 122 bp, Homo sapiens
ggcgctcccgcggcggccgctcctctgtgtttgtgtttgtagcaagatggctgcccgcctcgcaccacgtgacgcggacgcggggccgcggggccgccccttccaccgccgccgccgccgcc

SEQ ID NO: 355021 - DNA, 122 bp, Homo sapiens
ggcaggctgggctgtgagaaagcctccgtggtcagaagcaaaagaggggctgggacaagccgggaggccctcgggaatggattcttcagcatcctccccaaacacccggaggaagagggagc

SEQ ID NO: 355022 - DNA, 122 bp, Homo sapiens
gagcaggaggaagagggattcaaagccactcagagggccaagacgcgctgtccccagtgccgctccaggactcgtggctggggttgggttgcgtggaaccatgaagcaaagctccgtgctcg

SEQ ID NO: 355023 - DNA, 122 bp, Homo sapiens
cactgtgctcgtgagcacacaattctggtggactcatggtgggtgggagttgagtggactcgaatcaagtctagggtgaatgtgttatgtctgcgactgagtaagtggggtgctgacagccg

SEQ ID NO: 355024 - DNA, 122 bp, Homo sapiens
acttgagactgattatgctttatcattagtattcttcagaatacacttcctagaatagagcgctgtacagtttgtggacctgtgaatatagtgtaaattgaagccagttcaagttatgtaaa

SEQ ID NO: 355025 - DNA, 122 bp, Homo sapiens
aaaaaaagtacatgagttgctaacatggagcacaacaggcctagcacatgtggccatcagcgtgggatatagatgttttattttaataattaagtttataattttaaagcatacacattgta

SEQ ID NO: 355026 - DNA, 122 bp, Homo sapiens
gccgcgctggccgctgcctacggacccggcggcttcgggggccctctgtaccccttcccgcggacggtgaacgactacacgcacgccctgctccgccacgaccccctgggtaaggcggccgg

SEQ ID NO: 355027 - DNA, 122 bp, Homo sapiens
ctgggacccaggggccatgccggaagcccctctgctcccagagggcagcccccgcccctccgctactctgcccggctggtaccacatcctgccgcagccctgcgtctatttcatcaggccaa

SEQ ID NO: 355028 - DNA, 122 bp, Homo sapiens
tactgcagttcatggtgaactttgactattatccactcgagtcgtacttgagacgttccgcgccgcagccgctctccctccttccatcaacatcttccgcctgcatctatttcatgtctcat

SEQ ID NO: 355029 - DNA, 122 bp, Homo sapiens
agactgggccccacagaacgtggctatctcagtccggtcttcgcacggagggcgtggagccgaggatgagccatgcagactcttccggcgctggctctccctggcctctctctgtgccacgc

SEQ ID NO: 355030 - DNA, 122 bp, Homo sapiens
tgacggttcctgctggccaagaacagcactgggtatttgcatgggcaaagactttaacagcgtgaacaggattttctgaacaagtctggaaataaaatacctaccagctttcagagtaaatt

SEQ ID NO: 355031 - DNA, 122 bp, Homo sapiens
tctctagctgggaaccaccaaggttacaaagctaacgtgactggccctgctataccgaaacggcttaatttctttctggcaaatccacatttacggcagtaagatactaaacactttctttc

SEQ ID NO: 355032 - DNA, 122 bp, Homo sapiens
ggcctacggggcctggtccggctgctgcacgtgcgtgccggcttctgctgcggggtcatccgagcccacaagaaggccatcgccaccctgtgcttcagccccgcccacgagacccatctctt

SEQ ID NO: 355033 - DNA, 122 bp, Homo sapiens
gtgcttccccgtgcacggtgcccgggtggctgtggctgaggacgctgttgcctcctctgccgatgggatcctcctgggcctggtgtgtcctccctgcccgtgccctgctgagcagtgtcgtg

SEQ ID NO: 355034 - DNA, 122 bp, Homo sapiens
acaggctaagaatggctctgtccacaaagccctagttaagatggatgattgtgtaaggggcgtggaaggtagcatggaatgtctggaattgcaggcccaggcagagggaaaaggaaaaggga

SEQ ID NO: 355035 - DNA, 122 bp, Homo sapiens
tggcgcagcgcgctggggagtccgctcagctgcgcgtcgtcgcgggacacgccgtagcgccggttgttctggtagaagttggtcagctcgtagtagaggtacactgggccctggaagagctc

SEQ ID NO: 355036 - DNA, 122 bp, Homo sapiens
ctggtgagggcccacttcctggcttgcagacggccacctcattgctgtgtcctcacgtggcgggggcctgggggagagcaagctctctggtgtctcttcttagaagtccactcatctcatcg

SEQ ID NO: 355037 - DNA, 122 bp, Homo sapiens
gagggtgtgttccgggtagaggtggagagctacgctgaagaggacgcctcctgcctgctgcggctatgtcatcgcctgaggcctcgtcccatcttccgtgaggtcatacctgagaaagacag

SEQ ID NO: 355038 - DNA, 122 bp, Homo sapiens
cagaacttctgaaaccagatgtgtgggttttttccacaccaaattctctaactctccagacgccagctaggtgtcctacaattcaattcagttctgacactctctacctcaagttagtgtca

SEQ ID NO: 355039 - DNA, 122 bp, Homo sapiens
aaggccttcccacagtccctgcactcgtgaggcttctccccactgtgggtttttttatgtcggcaaagagctgatctactgttgaaagccttcccacactgggtgcaattaaaaggtttctc

SEQ ID NO: 355040 - DNA, 122 bp, Homo sapiens
taccgctattaccagaatgtgtgcacgcaaagctactctttcgtgtggtgggactgggcccgctgggagcgagagatagactggatggcgctgaatggcatcaacctggcactggcctggag

SEQ ID NO: 355041 - DNA, 122 bp, Homo sapiens
cagaggcaggagaatcgtatgaactcgggaggcagaagttgcagtgagccgagataaagccgttgcactcaaacctggggtacaagagcgagacttctctcaaaggaaaaagaaaaaaaaaa

SEQ ID NO: 355042 - DNA, 122 bp, Homo sapiens
ggggtgggggcggagccttatgagcggggcggggcaggggcgtggtcggggcggggcgcgcgggcgcccgcggcggccctcacttcctctggcgagcgcagccgggcggaagtgcgtcagtt

SEQ ID NO: 355043 - DNA, 122 bp, Homo sapiens
tgaacatccgggtcacaggcgcataaggaccaatgagcgaaggcatcgcgagccagggggcgcggagaaggcggggaatcatggccgcccccagtgttccgcgtccgggggtttgtgggagt

SEQ ID NO: 355044 - DNA, 122 bp, Homo sapiens
tggatgtctcagggccagaaccctccaggtgagatggcctggtcctcaccacctggcgtccgtgctcccttttcctctgttcaatcctggcgccaatgcctccctcaactctcaggtcacca

SEQ ID NO: 355045 - DNA, 122 bp, Homo sapiens
gtcgcctagagccccccggccggcccacaaactcccgtcccccttccggctctgcctggacgtccctgcgggccccgggggaaagcacccaacttctcccgcctcggcttctagcagaaacg

SEQ ID NO: 355046 - DNA, 122 bp, Homo sapiens
ccagcaaaccgagcaaccttcatggaggctggtcagcatcccccgagaacctcatcacaccgtggcctgctggggaggggccagaatggagacctcatttctaagaggaagggacacctctg

SEQ ID NO: 355047 - DNA, 122 bp, Homo sapiens
tcctgtgttatttttagttaatagcttactattttcttaaggaagaacacattctctctgcggcaattctaaggacggactaactcaacaactcaacaccgggttgcgtgtatactgtatca

SEQ ID NO: 355048 - DNA, 122 bp, Homo sapiens
agaagctcccgccgtttcccaggagccccaggtggggtcttccggttggacccctgcttccgctgattggttggaggtcgccaccacgtgatgcaaacccgggtcggcctccgcttcccccc

SEQ ID NO: 355049 - DNA, 122 bp, Homo sapiens
accaaagaaaaactggattttcatgaagcacaacagaagaaggggaagcctcatggtagccggtgggatgatgagcctcatatatctgcatcagtggcagtgaaacagagttctgtaacaca

SEQ ID NO: 355050 - DNA, 122 bp, Homo sapiens
agctgacccaggacagaggggcaggggctgcgacgggacccatgggtgggctcaggatgccgtgggccactggaaccgcatgcagacgagtgtgtgtgaacacttaacggcgggggagagca

SEQ ID NO: 355051 - DNA, 122 bp, Homo sapiens
gctgtggctgggccctctctgaacagagagcctgctgtgctgccccgaccccaggagctgcgaggcctcctcagggctcctccacatgagcccgtgccgcgggatccatcactcaagccgag

SEQ ID NO: 355052 - DNA, 122 bp, Homo sapiens
ttctccgcgtgtttccatcagtgcctgccttggctctgctttctccaaacctgtccccatcggtcagctggggtggacgagtgttttccatcttgcaaagtcattgtgtggggaagatgaga

SEQ ID NO: 355053 - DNA, 122 bp, Homo sapiens
gcagcagctggatcttgtcgcggtagcggtcgtagaaagggttggcctggagctcggcctcggccccgaccccgctgctgtcggcgcccccctcgggccggcccgagccggggcgcactggg

SEQ ID NO: 355054 - DNA, 122 bp, Homo sapiens
cggagcagcccagtgaggtgcaagcaggcctggaagacagactgaacccgaggctgggggcgaggaggtggcgaccacagagaatacaatgtttacaaaaataattacacagataaacaggg

SEQ ID NO: 355055 - DNA, 122 bp, Homo sapiens
gtgcccacaaagtccccgaggggcagcgttggccaggcctacccaagacctgccccgtcccgccaccactgcacccactttctgctgccctcatcggtctgcgcagctgtccccgctcctcc

SEQ ID NO: 355056 - DNA, 122 bp, Homo sapiens
gcgttgttagcgagggtggtgggcggtgcaggtggtcctgttcgtccctctcattggtgccggggataacggacaggtatccgcagccagtcccaaccggagcaaagggagcttcacgacag

SEQ ID NO: 355057 - DNA, 122 bp, Homo sapiens
gaaggaggacacagggtgtctgctgggaagactggctgtcccacagcagtgcccagccttcgcaggacctctcttggtctctgtccgtgggtgaccctgctccagcctctcagatgatgctg

SEQ ID NO: 355058 - DNA, 122 bp, Homo sapiens
ccgcgcgctctcttgcttttctcaggtcctcggctccgccccgctctagaccccgccccacgccgccatccccgtgcccctcggccccgcccccgcgccccggatatgctgggacagcccgc

SEQ ID NO: 355059 - DNA, 122 bp, Homo sapiens
ataacaataataataatggtagcaagcaacgctctgcagtaggggcttctctcgccatttcgtactgaggaggaaacatacttaagaggttacaaaacttgcaccaaacagataaccctcgg

SEQ ID NO: 355060 - DNA, 122 bp, Homo sapiens
ctgaaaccgattaaccattacttaagttgttacagcgaggcagagccaaaatctcccgggcgtgtgcaagagggaaagctttctaattgtgaacaccgcgcgccccgcagaaggctgcattg

SEQ ID NO: 355061 - DNA, 122 bp, Homo sapiens
agccagctctcccttcttcctggggaggcctgtgaaggtcgcgtgaatgcctgtgtcccccgggacagccagggaggcaggaggccaggcctgggtgtggaataggcctcgctgggaggccg

SEQ ID NO: 355062 - DNA, 122 bp, Homo sapiens
cattgtcttttagaatttgggagcctttgaaaagccgtgggccctcccaccgctattgtgcgggggaagatgtagcagcttcttctccgaaccaaccctttgccttcggacttctccggggc

SEQ ID NO: 355063 - DNA, 122 bp, Homo sapiens
gttcctcttctgctgaaaacactagaaatacaagcccaggatgtggggatcgggggcaagcggtgacaccaactaaaaggaagcaatggatttccttttaaatggagaggaggatgtcggag

SEQ ID NO: 355064 - DNA, 122 bp, Homo sapiens
ctggcccccaataattcttataaaagtcctggaattgaatctcattggcctgatttgggtcgcacatctatttctgaatcagtcattgcagacttggggatagaatatgttaatggctacag

SEQ ID NO: 355065 - DNA, 122 bp, Homo sapiens
gtcatcgaaaagctggtgggggtcggccatgcccggctgggacacagggatcctccgcttcgaggctgcaagggaagagagtgagaaggagctggggacccaggataggtaagggagacctg

SEQ ID NO: 355066 - DNA, 122 bp, Homo sapiens
ggagcggcttcgcttccagccccgagtgaggcggagacccaggcgggcgggcagagcaggcggcaccgcacctcggccagaggcggctgcagcagctgctgcccttgtccctgccgccgcct

SEQ ID NO: 355067 - DNA, 122 bp, Homo sapiens
tagctgagtgtcagccaccctggattcccacatgccgccgagcaaacctgggcagcccagcgctcctccagcgggcagcacagcagacgcccgtgccctcagagtctgtagcgtgagagctg

SEQ ID NO: 355068 - DNA, 122 bp, Homo sapiens
tgtgattttgaactttctaatgaaggcgcccgtcctggctcccgggcactctggaattaacgtcctctctcccccaccctctttgtcgagaacactttagttctgtgccgatgggatgggga

SEQ ID NO: 355069 - DNA, 122 bp, Homo sapiens
aatggttaagaacacaaaccagtacgctgctcacgccgatcccgctccgctggttccgcacgctccgcacaccagcctgcgcgcaccatggggccaccgttcagcagctggaaggaagatgg

SEQ ID NO: 355070 - DNA, 122 bp, Homo sapiens
gcttcagacatcaatgggctccagacaccccagagtctctttattgaggttcttagaaggcgagtgcaatctcagcctagggtagctgaaggaggtccagttcgtgtcaagtctgtgttcag

SEQ ID NO: 355071 - DNA, 122 bp, Homo sapiens
atattaattttgcaaaactagaactataaggcaatagttgagtcacagtgcggtaacatccgtgcctttgtagggcgcttctcataagctggaggctgtccgcctctgtacttcaataaatc

SEQ ID NO: 355072 - DNA, 122 bp, Homo sapiens
cactcagatttggagagtcctgctgcacctggctgctgacccctatccagaggtctcggacgtggccatgaaagtactcaacagcatcgcctacaaggtacgtgccgggcgctccccaccgc

SEQ ID NO: 355073 - DNA, 122 bp, Homo sapiens
gtcagataataattctctgtccacttcacctagtgaagtaccttagccaccagagactctcggctatttgctttcttcttcttctgcgtagcacttatgattctcagtttattttggtaata

SEQ ID NO: 355074 - DNA, 122 bp, Homo sapiens
tggaggtccagagagtgagatgttcctctgcctggctctggccgcccttccagcaggcagcgggcacaggccaagtgctggcgctggcaggccacatgaagggctgtgtcaccatgccggtc

SEQ ID NO: 355075 - DNA, 122 bp, Homo sapiens
aatagaacattgccgctgggcggagtggctcgtgcctgtaatgccagcactttgggaggccgaggcaggtggatcactgtggtcaggggttcgaaaccagcctggccaacagggtgaaaccc

SEQ ID NO: 355076 - DNA, 122 bp, Homo sapiens
cctgtggggatactgaggtttatgtatggtgccaaccatgatttaggtctcctgtggggacggtttggaggccaaatggggaggcggaggcggagcactaaggaatccagtctctgtaccag

SEQ ID NO: 355077 - DNA, 122 bp, Homo sapiens
cgggaggcggggccagtgccgccgggcaccgtcgcaaaagacccgcgcgcttgcgctcgccgccgaccctcgctcggcgcccacagcagcccgcatggagtaatcgccaaatggcgacagac

SEQ ID NO: 355078 - DNA, 122 bp, Homo sapiens
tcacttgggtcctctcctacctccaggaaaatggttttactttgaactgctttgtaataccgagataacttaagcatgcattgaggctcaagggcagggaggtggattccatcacagcatga

SEQ ID NO: 355079 - DNA, 122 bp, Homo sapiens
tcatgctgaaatgcaatccctagtgttggaggtggggcctgatgggaggtgtctggatcacggggggtggatccctcatgaatagcttagtgtcatcccgtttccctcatcaacatgcattc

SEQ ID NO: 355080 - DNA, 122 bp, Homo sapiens
ggttagtgaatattaactgtctcatatctcttcagtgttgtgtaagaaatgattgtgccacgtggctctaaaagatgttaatactggatccttctcctcaaggtttgtagtcttaagatgtt

SEQ ID NO: 355081 - DNA, 122 bp, Homo sapiens
atgcactgctctgaaccacctgtcatgtgcctaggttcctaatagggaacaggaggcagtcgccaaaaagaatagtgaaaatgaggaaaaaattgtgaacaaaaatgcaagattggctgaaa

SEQ ID NO: 355082 - DNA, 122 bp, Homo sapiens
cctcatcacccacaccggagaggctccgctcactccactctgcccagcacatacgagccacgcaggcccgcacgccccactacccaccccaggggagcagcgacctcgggctctgccccgcc

SEQ ID NO: 355083 - DNA, 122 bp, Homo sapiens
aacctcatacttgccatgtacactgtgaattgacttggtcggggcttgcagaggggcggccggcaggatgcatccacatggctgatgtgctttgtttcccccttaaaatgccttttgaaaaa

SEQ ID NO: 355084 - DNA, 122 bp, Homo sapiens
gggctgataggcaacgagtctctggcttatctcaaacctggtgtaggtcaaaggcttcctcgttaggggtgcaggtccccgaggcttttatgatcaactttgcaggtgtgcacgggtgttta

SEQ ID NO: 355085 - DNA, 122 bp, Homo sapiens
agaaacaagttgatcaacgtgagagaaatttcatgataattattcatagtaataaagtgtcgtgggcttaattgtatatctggagccagtgtcatccaccaacaatgtgatacaatatgaac

SEQ ID NO: 355086 - DNA, 122 bp, Homo sapiens
ttgcattgggcctgttgttcctgggccagtggccatcagcctgttgcccagcccctgatgcgctgaagctcgggcccttcctcgcgccctggtctcctgcactgagctgtggtgagcacatc

SEQ ID NO: 355087 - DNA, 122 bp, Homo sapiens
cactcccgccatccccttagcgctcgcagaacgttccgcggagtggagacgccggtcattcggccgttcgtcggttatggaacatttcgttcattttaatttttcagtattataatgctgca

SEQ ID NO: 355088 - DNA, 122 bp, Homo sapiens
tcccccagccccacactgcatctcgggagcagttccaggccgacctctgctctccacggccgggaggtgtccaggtgtggacagagccccggctctccatcagggcacccagccgccccacg

SEQ ID NO: 355089 - DNA, 122 bp, Homo sapiens
ttaaaccattttgcaggggactattctcagatttcattacaactaggaaggactgcaaagcgggtaaacagaaaacaacctttcatcgttaggaaaaaaatcgtctgaaagtctttcataaa

SEQ ID NO: 355090 - DNA, 122 bp, Homo sapiens
gcgacagctgcagaacatcattcaggccacgtccagggagatcatgtggatcaatgactgcgaggaggaggagctgctgtacgactggagcgacaagaacaccaacatcgctcagaaacagg

SEQ ID NO: 355091 - DNA, 122 bp, Homo sapiens
ccatcccctccactgcgcctcgggaccgcgaggtgagcagaggctggtcgggaagtttcccggaggctcgccccgggaaccccgccccgccgccctggaagcccctgtctgctcgctggctt

SEQ ID NO: 355092 - DNA, 122 bp, Homo sapiens
tcagttttgagtgtaggtaggccttaagaagctcctagtgtttatttcttgtgcctttgccgggtgagctggcttatctgagacctgtaaagaaaccaagccaccccagttaatccagacct

SEQ ID NO: 355093 - DNA, 122 bp, Homo sapiens
aaggcagagtctaaatgtttctttggagagctgttctgaaggctcccatggtggcaattgcgacgagagctatttttaacgctcctggtcttttaatagtctggcctgtgcagtgaggtgag

SEQ ID NO: 355094 - DNA, 122 bp, Homo sapiens
aagcacctgttggtgtggcgaccctgctttctaaagcaagctgcaggggagaccgtaccgcgagccactcagaaggaggcgctgcaggaccatgcaaggcccagcagtgtgggaggggccag

SEQ ID NO: 355095 - DNA, 122 bp, Homo sapiens
actaagtctctcatatgccagagttttggcagacattgggcattgtgtacagtatgaccacggtcatgtgtctgatactgcagtctaatgtgccaaacaggaagaatatttagcagatgctt

SEQ ID NO: 355096 - DNA, 122 bp, Homo sapiens
atcccatccctgaggattgggctggtacccgcgtctctcggacaggtcagagcgggtcgccgggtggggtcgctgcaaaaaccctgccccggccgcagccggagaggcggagcctcgcgggg

SEQ ID NO: 355097 - DNA, 122 bp, Homo sapiens
cacacgccccctctcccgccccagggactattttgggacgcagagctgtgatcaccaaaccggagtggtgggggccacggcaggccagtgaggatcccagtcctggggagagggcgccttcc

SEQ ID NO: 355098 - DNA, 122 bp, Homo sapiens
tatttaatgcttgcaacgactctctgaggtagaaaatattgttaattccgttcaggatcccggctacataatctgtggggctcaatacaaaataaaaatgtaggggctccttgttcaaaatc

SEQ ID NO: 355099 - DNA, 122 bp, Homo sapiens
tcgagaccagtgtggccaacatggtgaaaccccgtctctactaaaaatacaaaaattacccgggcctgatggcacgcacctgtaaacccacctgccgaggcagaagaatcgcttgaacccgg

SEQ ID NO: 355100 - DNA, 122 bp, Homo sapiens
taccttattcttcttgtagcaattgtgagtgggagctcactcatgatctggctctcagctcgattgttgttggtgtatagaaatgctataacaatttttgcacattaattttgtaacttgag

SEQ ID NO: 355101 - DNA, 122 bp, Homo sapiens
tggcccctctgagttaggggaaatacatcacagtgcttgggccatagaaccaggcagctccgagctgaccgatcttcccgaaagcccgtgcccaggggactccagtgggagggtctcattct

SEQ ID NO: 355102 - DNA, 122 bp, Homo sapiens
tgctgagggtggccgtgcgcttcgggtgtttaaagaggaactccctgaggcgggaagaaacgtgtcagctgatgtgtcctctgtcaaggggtgcccccgtgacactgagaacacactcactt

SEQ ID NO: 355103 - DNA, 122 bp, Homo sapiens
tcttctgtcttaggattttccctctctactgtttgtaatttcatgagcatgtcagcctaacggtgagccgaccttcaggctcctaagcgtgaaggccggagactctccctttgtaaggctta

SEQ ID NO: 355104 - DNA, 122 bp, Homo sapiens
cccacaccccgcaaaggacgcctgcagcaggacagagctcagccacagaagaagccagctcggcagtgggcggctccacctcttctgacttgtgctaggatggccttatcagcttcacagtg

SEQ ID NO: 355105 - DNA, 122 bp, Homo sapiens
attgtcttcatgttgagtaggttgaggaggagaaggaggaggaggggttggtcttgctgccggagtggcagaggtgaagaaaatctgcttaatataagcgtatctgtgcagttcaaactcat

SEQ ID NO: 355106 - DNA, 122 bp, Homo sapiens
ttacctaatcaagacagataatatactaagaattaaaaaaaaaaaaaattaagcagcctccgagtgattaactgacttgcccaagattttggaactagtgttgaaggactgactaaaaccca

SEQ ID NO: 355107 - DNA, 122 bp, Homo sapiens
agtacctgcaattcaagtacctttacttcgccagtcagataattctgtgaactgggtcagcgtccatcactacccccaccagaattcagaacacacatgagtctataaccctcgctgcccac

SEQ ID NO: 355108 - DNA, 122 bp, Homo sapiens
ggactgaccctccgtgccgagggctgcatgctaccgcactaagtcaatacatgggctccccgattcgcagctgtcgtcttggcagcacttgtcacgttggcagcactttgagagcaagtctg

SEQ ID NO: 355109 - DNA, 122 bp, Homo sapiens
ggggccctgtggctggacagcaactgctgacctggccctgctctgccttgtgcttgccggcgggacagtattcacgggcacactgactactgacctggtccagatcgaggctggcgccagcc

SEQ ID NO: 355110 - DNA, 122 bp, Homo sapiens
aacatcgaaatcatcaatgtacataaatatacaagacaatctggaagcatatgtgctgaacgttttttgtgtttttgagacagagttttgctctgtcgcccagactggatgaagtatagcag

SEQ ID NO: 355111 - DNA, 122 bp, Homo sapiens
atccccaccgacaattcgaccccacacaaggaggatctaagcagcaaggtgagtgtgagacgcgacgaaaaggctcctggactcgggaccgggcgccactggaccctgaaggtggtccgcag

SEQ ID NO: 355112 - DNA, 122 bp, Homo sapiens
ggaggaggggcagtggctgctggcagaatggggtggaggggggagcggaagcagagggggcgggggagtggccggctttgaatatcctgttgaccccagtttcctctgcccccagcttatgt

SEQ ID NO: 355113 - DNA, 122 bp, Homo sapiens
agccatgaccgcctgccctaccagaggaggtaccgggagcgccgtgacagcgatacataccggtgtgaagagcggagcccatcctttggagaggactactatggaccttcacgttctcgtca

SEQ ID NO: 355114 - DNA, 122 bp, Homo sapiens
catgccatcttaagcgggcaccgactccttacccagaaaagatcctggagctaaagcctgcgcctacaccagagaggggaatttaagtttcccactctcgacgtgtctggaaccttccctct

SEQ ID NO: 355115 - DNA, 122 bp, Homo sapiens
ctccaggtttttaaacaacagcctcacctctggagactccctggctgggtgtagccccaccgcagggcgggtctcaggaatctggcagccgtcacacccatctgtcgtcactgcacccccac

SEQ ID NO: 355116 - DNA, 122 bp, Homo sapiens
tgagatggaatttgttctctggagcaaagagccactggagactgaatttcaggaatactgcgtgcaacacattgctatttgtagctttgtttccctcactcagcctgaggaattgtctgaat

SEQ ID NO: 355117 - DNA, 122 bp, Homo sapiens
gatacgcggccggcagggcggaggcacttttaaaggcgattatggtgccgtctgactcgacgcttagtttcccctgaggagctgctctggcagccacaggccactgctgaatatcccgtttg

SEQ ID NO: 355118 - DNA, 122 bp, Homo sapiens
gtgtaaaagagagagagagagagagaccataagagaagggagacaaagagataaaaggtgcgagtcatcaggtgaggagaaagactgaaaacgatgagaaacagcaactaagacacaaagga

SEQ ID NO: 355119 - DNA, 122 bp, Homo sapiens
ccagcccgcccctaacaagctagcgcatgcgctgtaggactatttgcgcgccgttccccccggtgagcctgcacaccgtgcttccggcgcggagatgaacttccacatgccccggcgcttgt

SEQ ID NO: 355120 - DNA, 122 bp, Homo sapiens
cgaagcaccttaacactgaggaactctcagcctcaacgagtgaaaaccccagagaataaacgtacccccgccccggacagacctactccgcacccagcgctgccacctgtctgcctctttct

SEQ ID NO: 355121 - DNA, 122 bp, Homo sapiens
gctgctgtgggattccacaaaataggcgcgggttaggatggggaaggtaaagtgaagaaacgggccaaagcagaaaagtgggtcgacgtgagatttggaagtaaaaagagactttgaataaa

SEQ ID NO: 355122 - DNA, 122 bp, Homo sapiens
aaaatcggtgtataacttttgacttcccaaaaacttaattactgatagcctactcttgaccggaagcctcattgataacataaacagttgattaaccatgttttgtatacgtattatatact

SEQ ID NO: 355123 - DNA, 122 bp, Homo sapiens
cccacctccctgctggtggccacgagcctgccctccacccccatcactgtttcattccagcgacagccgtgggaaggtgcagtacgcatccttccgggattccctggagatgcctccagcgc

SEQ ID NO: 355124 - DNA, 122 bp, Homo sapiens
aatacacacattcaataaaaccgacaataacaacctctgactgggtgggccgagaagctccgggaaaacatccttttaaaactgctattacctggaagtcagcaaagtggaaaaaccggcag

SEQ ID NO: 355125 - DNA, 122 bp, Homo sapiens
gggggcgtgggctcggcgcggcgggcggtgggcttcggggcggtgtccccatgtgggaggcgcggaccctcccggaggaacctgcgcgcggcttgcgcgctttggatccccgcaggggaacc

SEQ ID NO: 355126 - DNA, 122 bp, Homo sapiens
cgacatccctttcaagcctccctgcagctttgggcggcaccctgcatggcccagcctctccgggggcatgaaccctggaccccagggtccccaggaaaccacgcatatgcggcagggagggc

SEQ ID NO: 355127 - DNA, 122 bp, Homo sapiens
ttcagcttgctccacaagatgcactcctgagataggcctgaatgtgaaaccgcccctacgcgatcctgtgtgacagaggctctctgggtggagacatccagtgtgttcctagaaggcaaagt

SEQ ID NO: 355128 - DNA, 122 bp, Homo sapiens
gcgggcgggccttaggctggccccgctggttgccatggataccgaccgctcccgcgcgtgcggagacgaccgctgccccgcccccggaagtgatgcacaaagtcccacccccccccaccccc

SEQ ID NO: 355129 - DNA, 122 bp, Homo sapiens
gctgtttaccgggacctttacggtttacgcatcaccgacagtttacaacagagctttccccgcttttgttgcagctgattctcttgcagccctgtgaagtaggacaggctgtgattaccatg

SEQ ID NO: 355130 - DNA, 122 bp, Homo sapiens
cccttcccttaaaatcctagatgaaaattcccgagaaagcagaagaggcccccagatgggcggattcccaatcccggacccctgcggcaggtcgaggcattgaagaaataaattaaaggaga

SEQ ID NO: 355131 - DNA, 122 bp, Homo sapiens
ctccgagatccgggggctgccggggaaagcccggggcgaccacctgggccccagcacgcccgggacccgctgcttcccccgcggtgctccaactccggaaggtttgcacaaactccccgcga

SEQ ID NO: 355132 - DNA, 122 bp, Homo sapiens
gcaccacccgagcggatcttggtgttgggcaacttgtggtcttttttccacttcatgcgccggttctggaaccagatcttgatctggcgctcggagaggcagagcgcgtgggcgatctccac

SEQ ID NO: 355133 - DNA, 122 bp, Homo sapiens
gagtcactaagggctgtaaacactccagagagacaggcatggttataaggggtgtgcgggcgtggagttattttaatggatttactctccgtgagtgcgtcttatgttgcgggtgccagatg

SEQ ID NO: 355134 - DNA, 122 bp, Homo sapiens
ctcaatctcctgacctcatgatccacctgcctcggcctcccaaagtgctgggattacaggcgtgagccaccacacccagcctggaatttttttaaagcagtaaatgtaaacgctaactttag

SEQ ID NO: 355135 - DNA, 122 bp, Homo sapiens
cttgtttctctgagggtctcctgggcacagctgataaaccacccaagtttgaaagacacacgttattttattaatatagccatctctccccactgccccagtggtgaaggtgtttgcattgc

SEQ ID NO: 355136 - DNA, 122 bp, Homo sapiens
cacctgtaatcccagcagtttaggaggccgaagcaggaggttcacttgggtgcaggagttcgagcccagcctgggaaacatggcaaagcacaatctctacaaaaaatacaaaaattagccag

SEQ ID NO: 355137 - DNA, 122 bp, Homo sapiens
ttactccaaactgttgaagacagtgctttctcgttcacagaagaggcttttctagcggcacgaaagaatttggaagcggcagtgttacggtaaaaaaccgacaaggtgcctgatgaagagga

SEQ ID NO: 355138 - DNA, 122 bp, Homo sapiens
aactggaggtcttcctcagacaaatcatcttcatcaccaccactgggaaggggcagggcccgacaatgagtccagctcaagaagaggaaggcagccaggacccctggatgcatcttgaatgg

SEQ ID NO: 355139 - DNA, 122 bp, Homo sapiens
tcacggtccttaagtctcggtcgccctcgcctcgcagcctgccacccgcgctcagctgcccgcctcctcagccagccatgctggagcatctgagctcgctgcccacgcagatggtgagggcg

SEQ ID NO: 355140 - DNA, 122 bp, Homo sapiens
ggataaaaaagacaaaagcaagagcctgctgtgtttgtcaaaagtcttttaagccggatgcggtggctcacacctgtaatcccagcactttgggaggctgaggtgggtgatcacctgaggtt

SEQ ID NO: 355141 - DNA, 122 bp, Homo sapiens
gtcgcctcctggccgaggctgctgcggatagtggcgggtcggccccggctccgggcgcggcggctagagtgcagccggggctgcctgcctccaactgcagaaggtggtgttttctgctcctc

SEQ ID NO: 355142 - DNA, 122 bp, Homo sapiens
ggacacaaggtgcggggtggggtgctgactgccagctccgtgtgtggggacacagggctgcgcagctccatgtggggtggggtgctgactgccagctccgtgtgtggggacacagggctgcg

SEQ ID NO: 355143 - DNA, 122 bp, Homo sapiens
gggcttcctcttcagcggggcgctgcgctgaggggatacgggaccccgagccacagcggccggagcttttaggatgttaagctcttggccttggaggcaagatttggccccagcaccagaaa

SEQ ID NO: 355144 - DNA, 122 bp, Homo sapiens
gccactacctccttctcttgcaagtgggcctcaccgaggcctgggagagagatatctcgtcgcttctcatacctgggcccaggacaggaggaagactcagggcgaggccctttccgcccccg

SEQ ID NO: 355145 - DNA, 122 bp, Homo sapiens
caatccgtcctcagggcgccgccgcgacatcaagaggcgcaaacgagaccaccggtgtcacgtgacccaagccaccagccccagaccgacgcgctcctcttaaagctgccacatcattttct

SEQ ID NO: 355146 - DNA, 122 bp, Homo sapiens
tggagatgcgagaggcttccggtgctcactagaggagccgtgtatttggatgttcagtgtcgtcagtggtattgtcccccagcaaatagacttggtgagctaattaaatatccttctgaaca

SEQ ID NO: 355147 - DNA, 122 bp, Homo sapiens
ccacgccggccgaggcgatggcgtgaacgaaggccgactcgcgggtggctgcggggaggtcgtggggaggcagcactcaggacccggcctgggagcgcctgccctgcctccacctcccaggc

SEQ ID NO: 355148 - DNA, 122 bp, Homo sapiens
gccgggtagcagcgcgggggcggccctggggcggggagacagggggcggctccactccggcgctctgcggaggacagcagcgatcgccaaggctcagtgagtccccgcactagcgcggcacc

SEQ ID NO: 355149 - DNA, 122 bp, Homo sapiens
ttgttttttttcttttgttacggacacccatcatgtatggctcctcatctgagccatcaccgctcccgaaacacatggggcggcagctgctgtgcctccttctcaattcttccaccccccca

SEQ ID NO: 355150 - DNA, 122 bp, Homo sapiens
tcttcccggtccagccaagagcctggaaccacgtgacctgcccatttgtatgccgcggagcgctccattccggcccctttgtggccagaagaaagtggcccatctgtcgccagttagagact

SEQ ID NO: 355151 - DNA, 122 bp, Homo sapiens
gcctttctgtgggtgtttaacataatttagaggatctgagggaatgggaggagcatgttccggtagcggccagggaattgaggcacagagaccattctatgcagcagaagacaagtgagagg

SEQ ID NO: 355152 - DNA, 122 bp, Homo sapiens
aggtatttgctgcagaccttgcagaagctcacaggaaagagggggaggccttagcaaaaccggtaccactcgtgatccacgcgcccgtcagcagcacctcctgagacaggtccggtcatgcc

SEQ ID NO: 355153 - DNA, 122 bp, Homo sapiens
aaaatgataaaatcgaacactgattgacttcttaatatgtgatagatataaaggttttaacgatgattaaaactacaccagagggggctgagtacggtgattcatgcctgtaatcccagcac

SEQ ID NO: 355154 - DNA, 122 bp, Homo sapiens
ggtggcgtttatctccgttttacatcggcagcaacagcctgaattttctgggacacgatgcgccacccaaacaacagggactccctcatctttttctccccagctccgcccaagactgagcc

SEQ ID NO: 355155 - DNA, 122 bp, Homo sapiens
gcgctggtagaagcgaagatatacccaactggagagcagcccgaagccataggaagccagcgccgggctctggagcagcgtggcgagccgcagcaggagcagcagcgccagcagcagcatgg

SEQ ID NO: 355156 - DNA, 122 bp, Homo sapiens
caacgagtgcgtgggtgagtggggtgcggcggcggagccggcggcgggtggggccgcgggcgggagctgctgggcctcgcagcggcgagttcataggagcgcgggtcgagggaacggcggga

SEQ ID NO: 355157 - DNA, 122 bp, Homo sapiens
tattacatgcaaacactgatcgccctgtgaaattacattgctgggcccgcgaaatggaatcgtgtataatcagcctcctccatgcactgtcagtcccatcacaaacacggcgcccggcggct

SEQ ID NO: 355158 - DNA, 122 bp, Homo sapiens
gaagaagcgctgagaagtcaggtgtcaggcctccacgaacttcagctagcttcttgggctcgagggagggagggcgcgcaaagccggaaggaggggtttgcggctggggagagccagagggc

SEQ ID NO: 355159 - DNA, 122 bp, Homo sapiens
cccggcgcctgagttaccatgcggccgttactagggcaatttgcaaaggcccgcctagaccggctttccattggtggaagcgggaacacctccgctctccataggctcacggctgcgcccat

SEQ ID NO: 355160 - DNA, 122 bp, Homo sapiens
atgagcatttccttggagcatcatcttaacactcaaaaggatttgaattttggaacctttcgggttaggcatactcaacctgtaatagtcatgaaatgaaacaataacaatagttagaaagg

SEQ ID NO: 355161 - DNA, 122 bp, Homo sapiens
gccagggcggccatccctgctgcagagacaaatgtcagtgtccatggaatcagttcggtgcggtgagcggcaggtctgatatgaaagctactcgcacttcccgtctgggcaagagcaggaac

SEQ ID NO: 355162 - DNA, 122 bp, Homo sapiens
ctttactgccaatccacagtcggtgttgttctaacttcaaggtgaatctcacttttcctccggacttattgtacatgctgggcaggggtaccttttgtaggtgctcctgggcccccttaaca

SEQ ID NO: 355163 - DNA, 122 bp, Homo sapiens
ttccagggctcaagcaatcctaccgcacgcttctcaagtagctgggaccacagatgtacccgctacacctagctaatttttaaattttgtgtagagacaaggtttagctatgttgcccaggt

SEQ ID NO: 355164 - DNA, 122 bp, Homo sapiens
acagagctgggctcaattccaattacagcatggacaagtggggatttaaagccaagggggcgtcaggtcaagtggatggaaacttactgatagggaacatcacgggtgggagggttctgatt

SEQ ID NO: 355165 - DNA, 122 bp, Homo sapiens
ggggtccgcgagggctcctggggacgaggagtgtggggcacctgccgcggggggcccaggcgctaaaggtggagggaaggaacgcactcgcggcgggggcctggccggggcggacgcagcca

SEQ ID NO: 355166 - DNA, 122 bp, Homo sapiens
gggttcgcttcccacccatcccctcctccaaggcatcttagcgctgtccgtggtgctgaccgccaatcccctggttgccgtttcgaccagctgggatctctggtgcgcccaacctcccctcc

SEQ ID NO: 355167 - DNA, 122 bp, Homo sapiens
agctgccgctccagctcccactcgagtcctggggagacagtgccccgcactggagactggcgggccctggggccccagcccggccccttgtcggtgaatctggcctccggagccaggaacta

SEQ ID NO: 355168 - DNA, 122 bp, Homo sapiens
aggctcaccattcatcttgtttacatggtacagagcaagacaaatatgtaaagaatgagacgaagaatgatgctgagagaacccatgaactgagctccttagggaaaggaaaggctcagagc

SEQ ID NO: 355169 - DNA, 122 bp, Homo sapiens
caccaaggagcgcaccaggcgcggccatgatgattcagcaatgccctcaagtgtcactcacggcctgagactactgcagcagcgccaagcacgccatcaacatgtcctcaacgtcttcaagg

SEQ ID NO: 355170 - DNA, 122 bp, Homo sapiens
ctccctctggtgagggccagttgtggctgctcagccgctgtggaaacctgggttcactgccgcagactcagtggtgtttccaattccagttctggcctgagaggtgattgatgggcttttga

SEQ ID NO: 355171 - DNA, 122 bp, Homo sapiens
ttggggtgcaaggcagcctattggcaaagtggggcaaatgtcaggcccagacagccccctcgcccagctgcttgggaaggggaagataaggagtgccagctgtttggagtcgaggtggagtc

SEQ ID NO: 355172 - DNA, 122 bp, Homo sapiens
tcggctgcgcgccctggcggcaggaggcggggccgggggcggggcgtgagctggccggggcggggcctatggaggggcgggaccgcggcgccctataagtactgcggagcgaggcgcgcgcc

SEQ ID NO: 355173 - DNA, 122 bp, Homo sapiens
ctattgttgtgcccttttgtggatgagggaacagaagtatggagagattcagacccttgtcgggagtgttatcctgtgcgttttaaatgggaaatccttcattatttgtgttaatccaattt

SEQ ID NO: 355174 - DNA, 122 bp, Homo sapiens
tgtaaggaagagcgagagtggtcgggctcatggggtttgatggactgtgacccaggctggcgttgctcctctccggatttcactcctggctgaactggtgccttcggtaaacagctgcttaa

SEQ ID NO: 355175 - DNA, 122 bp, Homo sapiens
tctgacattgattaaaagtaaaaaagggtaagtgaacaaatacatactcatacatgatcacgtttttaagaagctaccctttgcagaagtaaacaagagaggagactttcaggaagctactg

SEQ ID NO: 355176 - DNA, 122 bp, Homo sapiens
ggctctgaggacgcgcggacccgccctcactctgcgcctctccgtctcttacagaagctgcgccgcctcgcgccgcctttgcctttatagccgccgatatgctaatcacccgagccgggtag

SEQ ID NO: 355177 - DNA, 122 bp, Homo sapiens
atctgtttgtttcctaggaaagtctccttcaggaccggtggtcggggcacagtgctggcacgtttgtcactaacgcacgttttactgcctcatgtgcctctgtgtgtctgtcgacgtctcag

SEQ ID NO: 355178 - DNA, 122 bp, Homo sapiens
catgccatataccagattacaacatttaggccagcttcactattacttttcctccttttacgaccaccaagaccagtgttcagatccgatgggaaagggatcaggaggattaagctgatcaa

SEQ ID NO: 355179 - DNA, 122 bp, Homo sapiens
acataaaattataaggtactagatgcgttaaaagattaaagtgacttctgtcagcaccagcgctaatgaactgtatgttttgcaaatcatagatgttttttaattaaatgaaagtaaataaa

SEQ ID NO: 355180 - DNA, 122 bp, Homo sapiens
ctccaagtttgaagtgacctgcctagccccaagaaggcttttgtccatcgtgctccccaacgaagagccctagtgaaagtttggccatgccccttttcagagcagagcttccagccaagata

SEQ ID NO: 355181 - DNA, 122 bp, Homo sapiens
acctggctaccacattgctgctcaccagctgagttaatttcactctcacttatcagtctgcgaagtggatctcttaacctcccagaggggctgtggtgacgttaacccagggcagaggtcct

SEQ ID NO: 355182 - DNA, 122 bp, Homo sapiens
ccacaagcaaagggaatggttttcctgagtgcctcagagagatctgccccagccctgtcacgcacaaagcgccacacacagctttggggctgagggttttacagttttccaaccacagggtg

SEQ ID NO: 355183 - DNA, 122 bp, Homo sapiens
gcccgggcggggaggggcgaggggaaggagcgagagttgcgcagacagcaggcgccgggccggggcagcccagacacagacggtaccgctaggccgggaacacccctcccccggcccgctgc

SEQ ID NO: 355184 - DNA, 122 bp, Homo sapiens
tgcagcacaagccctggtgtccaatggttgtcgtggttccatcatcaacatcagtagcatcgtaggaaaggtcaggttgagttggacgaggtcagccagccaagtggtatagagaggagaac

SEQ ID NO: 355185 - DNA, 122 bp, Homo sapiens
taggccatgcttgtcccaggaatgaccggatctctcatggagaggctcatccactccaggcggggcgctgggctccagccggggacaagtccgcagctgctgtgttttgttgtttttttgtt

SEQ ID NO: 355186 - DNA, 122 bp, Homo sapiens
gactcaatgcgcaagcgcggtccggctcttattcgcgccgcagcacccggatgaagaaggcggggtttcgggtgcaccaaggaagacactcaaggtcactttgtaacaactttattggcaac

SEQ ID NO: 355187 - DNA, 122 bp, Homo sapiens
aatcaagccttttcaattggccctgctcaggacagcccctggcctggtccccaagagatgcgcaaacgtcaccacaggaactgtgccagaaagaacagctgtccctgcagccaaagaggtta

SEQ ID NO: 355188 - DNA, 122 bp, Homo sapiens
gccagcaagccgcgggagaggccaggcgcccgcagcggggcatctgcgcctggtgtgcagcgtacttgctatactcaggccagcccagccctgggccatctccctgagtttcagctccccgg

SEQ ID NO: 355189 - DNA, 122 bp, Homo sapiens
gcgctcgccactgattggccgccgtccgccggcccggcgcatcataaccgccgccgccctcgccacaccgcctccccattggctgcggcgccgcccccaacccagagcgctgcggcctccgt

SEQ ID NO: 355190 - DNA, 122 bp, Homo sapiens
ccgaggagaggagacccaaaggctccccgccgaccccccgcccctcccggctccctccggcgctcacctggacagcgcggaccagtccttcctgctgacagccatgctgcaggagccccgcg

SEQ ID NO: 355191 - DNA, 122 bp, Homo sapiens
ccacagctcagccaattggcttggagatgtggcgggttgccacttccctgtgggtctctgcggcactcttctgcctggtgactgacaccttggaaatgaagtttatgacgtcatcgttgcgg

SEQ ID NO: 355192 - DNA, 122 bp, Homo sapiens
ttgggtggtcgatgggacttggtgccttacagcagagggcagtgctcgtcagggaggctccggccgcacaggagcccatggaggcggtggctgggaggctcaggcatggcgggctgcaggtc

SEQ ID NO: 355193 - DNA, 122 bp, Homo sapiens
accaaaacaaacaccacgagcggagccagcactctccctaggcgttctgctcacctgatccgagggacttccataatcagcagttccaacccttgcaagctgacagttcagagggaagggga

SEQ ID NO: 355194 - DNA, 122 bp, Homo sapiens
ctggagggctgtaagagagggtcattcactcgtggttcattcattcgagaaatattcatgcggcgcctactgcgtaccaagcaccctctaagaaggacgaacacagctcctgccctctcatt

SEQ ID NO: 355195 - DNA, 122 bp, Homo sapiens
gaggtttcggtgccccgatggggacggtccctcgaaaaacgagacgagtgggggcgatttcgcattctgaacatctaaagagggcctcggaccctgagtgctgtgtggccttgggaaaacgc

SEQ ID NO: 355196 - DNA, 122 bp, Homo sapiens
aatgaatgcatctgccggcaaggtggaacgccccccaccccgccccccaactagccgcaccgccccccaggaatgccctcttttggtccgccggtcttggactctgctctcccctctcctga

SEQ ID NO: 355197 - DNA, 122 bp, Homo sapiens
gcgctggtcaccggggtctgcctgggtgagcggggccgggggcggcaggcggggggctggcgggaaggccgtgcggggccgggggatggtctccgtgagcggaggggccccgcggcgagtcg

SEQ ID NO: 355198 - DNA, 122 bp, Homo sapiens
gctgcccaatcaccttccaagccctgctctgttgggtttctttttacccagtcatgatcacgtaggaccaggctgtttttcgtagggggttatggagtcgcaatgcctggggtgttaggaat

SEQ ID NO: 355199 - DNA, 122 bp, Homo sapiens
ccatcccggagttctcctgctccccacctcctgtcgtcctgcctggcctccagcccgagtcgtcatccccggagtccctatacagaggtcctgccatggaaccttcccctccccgtgcgctc

SEQ ID NO: 355200 - DNA, 122 bp, Homo sapiens
gtccgtccaggtctggctgcctcttcggctgcctgtgtttagacctccaaaggctgctcccggcaacccctgcccagctgctcaacctgaaagaggggtcggtagcaagggccgggaggcgc

SEQ ID NO: 355201 - DNA, 122 bp, Homo sapiens
agggagaagaaagggtgcacttggagggcagtaatgagcttgacgctggaagcctggtgccgccgcccctgcctctgcctcttggatggagacccagctgcttccttaaatcccttgcagag

SEQ ID NO: 355202 - DNA, 122 bp, Homo sapiens
ccgccattgaaaagtcggaatggttaacataaagatcccggtttccagtcaggcatggctcgtctgaggtccagcagtacctgccctttagaggtgcatagcttgtgcttctccagctgcag

SEQ ID NO: 355203 - DNA, 122 bp, Homo sapiens
ctgctcaggggcgccagcaccgcgactcactgtcctgctcagctcctttcaggaacgctccgatggctcccaggtagccttcgtgcctcagaaacagcgcctgcacttccccctgccgtggc

SEQ ID NO: 355204 - DNA, 122 bp, Homo sapiens
ctaaggaggccgtaaaagtgagttgttgttgtgcggctgctgttgtgattgctcgggacacgctgaggcccagatggatgcgcgggcgggcggaaggcggccgcgagggctgacgtcaggct

SEQ ID NO: 355205 - DNA, 122 bp, Homo sapiens
gtgtctgaggagttttctgcgcctcgtcctgctacatttcttggttccctgatggggaagcgaggtgaatggcggatggtcgaggcagctccttaggcggcttaagcctgccgtgtggaaca

SEQ ID NO: 355206 - DNA, 122 bp, Homo sapiens
cggaggcagagaggtggcggggcctaggggtagggtcaggaggagcgtcctgggggcgggcgctagggcggggccaagatgagcttaggagggtggggcctggggtggggccaggatgagcg

SEQ ID NO: 355207 - DNA, 122 bp, Homo sapiens
ccagcggtaggaaaggttaaaccaaaaatttttttacagccctagtgtgcgcctgtagctcggaaaattaattgtggctatagccgcctcgatcgctgtctccccagcctcgccgcggccgc

SEQ ID NO: 355208 - DNA, 122 bp, Homo sapiens
ctagatccaggaggtgagtcaaccacccctgcccactctggcatcctcagatcgcctctacgcccgcaagagcaacaaggacccccgggaacccacctaagatcgtcatctctctggccatc

SEQ ID NO: 355209 - DNA, 122 bp, Homo sapiens
tgcgttttgtaaataggcgctaattaagcacgttgcgaacgcaaggagtgctcaccctggcgccgccgcccggtttccagcgcgaggactcgagggcgcgcggttcctctttgctaactgca

SEQ ID NO: 355210 - DNA, 122 bp, Homo sapiens
tcttttttaaatttaggcccagttagccacttgccatccatcttgaagaatcagctctttcgggttcacaattgttcaccaattgtggtttgtggtgtgtttaagaaaacccaaacatgtaa

SEQ ID NO: 355211 - DNA, 122 bp, Homo sapiens
attagagttgccctcgataaattagctgagaaggaggcttgaaggaggcctgactattaacgggtaaaaaacctacaggttttaaagccatctgggcttatatattagattgtgctgtttgc

SEQ ID NO: 355212 - DNA, 122 bp, Homo sapiens
tgttgaaagttattcaacagctagcagatgtttattaggtgccgactatgtgtcaggcaccgaggttacagcagagaacaaaagtggcaaactccctgtcctaccagaacttacatccagtg

SEQ ID NO: 355213 - DNA, 122 bp, Homo sapiens
gtgttgccttaagaactctaacactcaccacggaggtttgtagcttcactcgtgaaccagcgataccatgaaccccccagaaggcagaaattgctaacatatctgcatataggaaggaacaa

SEQ ID NO: 355214 - DNA, 122 bp, Homo sapiens
gcgtcaccagcacaggccagacaagtcaaagccccgcgcacagggctcccacggggaccgcgtgctattgtctacggaaggcagctttctaaagtggaaagcaaccccacagggtgggcccc

SEQ ID NO: 355215 - DNA, 122 bp, Homo sapiens
accgttgaatgggacattgggtgtcatctggtccaaatcttgaccccttttcattttccccgaaagaaagacttgcggctcggaaccgagggcggcatgcccaaggtcacagaaagggtggt

SEQ ID NO: 355216 - DNA, 122 bp, Homo sapiens
aaaggaaacacagcggccatcaacgcagtctagctgtgcggaaggagcgctcagccccggcgagaggtgtggctgctgccgccccttttcgggggactcctccatgacgttgcgttatttga

SEQ ID NO: 355217 - DNA, 122 bp, Homo sapiens
acggggtgggcagcaatgccagtgtggtagccccagaggatctgaaaacactggagtgaccgggacactggaattccaactgcagcccacatggggtggttttccttgggaagcctctctaa

SEQ ID NO: 355218 - DNA, 122 bp, Homo sapiens
gtgtcttagttatctttctatcccacttcctgacattaccatctaccacactttctggtgcggagcgaggcttaataaataatagttgtattaaacaagcattcaagaagaaatgtcctcac

SEQ ID NO: 355219 - DNA, 122 bp, Homo sapiens
ccgcgcgcccggcagcagtcgcacttacacaatggctggtaggagccacagactggagatcgcaggctgcgggagctacggcgatcgaccgctcggcgctcggctgaggagccttggcgcgc

SEQ ID NO: 355220 - DNA, 122 bp, Homo sapiens
cttgcaagctgttggccggctcgcatctcacaaggtacgtcctccccgcgctccttctcccgccctagctcgcagccccgcccatttccgtcttcagccgccccgcccagttccgacttgag

SEQ ID NO: 355221 - DNA, 122 bp, Homo sapiens
atgaggcaaaagaaaaactgtcaaccactgccaggcaagaaacccttccttgctcctttgcgcaaaatctgtttacttctttaagagaaagccagtctgagacagaggggaagtagcaaaat

SEQ ID NO: 355222 - DNA, 122 bp, Homo sapiens
aggccatgtaaggcacaggccaggcaaggtgcttccgccgctcttaacggggatttgacccggagaagagagttctgtcgcctgcggcccgcgcacccgggcccctccgggctgcccctccc

SEQ ID NO: 355223 - DNA, 122 bp, Homo sapiens
accatcgtcagaggtggtcctcctgtgtctgcctttgccttcttgccgctctttctcaaccgtgcagcctcagcaacctttggaaaggagagtcaggtcatgtcacttcttggctaaaaaga

SEQ ID NO: 355224 - DNA, 122 bp, Homo sapiens
gagcgcgcgtggctgaggaaagaaagggaaggcaaccgggcagcccaggccccgccccgccgctcccccacccgtgcgcttataaagcacaggaaccagagctggccactcagtggtttctt

SEQ ID NO: 355225 - DNA, 122 bp, Homo sapiens
ccttcaggagcaggtgaaacgcaatcttcccatgggccaggaatggcgacgtccgcactgcgcaggcccagcgtggcgccgctcacatcttttcagctgaggtcctgattggacagatccaa

SEQ ID NO: 355226 - DNA, 122 bp, Homo sapiens
tacagctcactgacgactcagggcagcttcagctgtaagcagcctgtgatttatggacaccgagtgaactcctgcggcagaaaccagccttgagatcagagcagcaatagggctcttttttg

SEQ ID NO: 355227 - DNA, 122 bp, Homo sapiens
ggtgggcggggcttgaggcctgagtggagcgtaaaccctgattggctgtacggaaggcggcgacgtggccgaaggatgcccgtttgtgtctaaacggaggctcggccacaacgccactggat

SEQ ID NO: 355228 - DNA, 122 bp, Homo sapiens
cttctctcagcagcctagggcctaggcccgggccaccatggcgctgcctccaggcccagccgccctccggcacacactgctgctcctgccagcccttctgagctcaggtacacccctgttca

SEQ ID NO: 355229 - DNA, 122 bp, Homo sapiens
cagcgtcctgggaacccagcccttctcagccggtaaccactgctgctgggacccggtgcgcgatagacaggcacataccccaggggcctgcaacaaatgaccgtcccgctccgggctctgtt

SEQ ID NO: 355230 - DNA, 122 bp, Homo sapiens
aggcagtagaaacggcagtactgccacagctggacactcccagcctcccaagcacctacacgtaagtgcctgaggaagtcagtcagtcaagcccaaagggccacaggctttgcagcaggact

SEQ ID NO: 355231 - DNA, 122 bp, Homo sapiens
taattcattcaggaaggcaaacccctcatggtctgatcacctcttgaaagtcccacctcccgacactactgcactggggattaagtttccagcacatgctttttgggggacacattgaaacc

SEQ ID NO: 355232 - DNA, 122 bp, Homo sapiens
ctaccctagcgcctgccccagcgctggcgccaatgcgtcggggccgccaggcgcgcggagcgcctcgtccctcgccctggcaatcgccatcaccgcgctctactcggccgtgtgcgccgtgg

SEQ ID NO: 355233 - DNA, 122 bp, Homo sapiens
tgaaggtggaagatggaggccttgtgtggaggggtccttggtagaaggtaagcgttaaggcggggctaggtgcagatttggagtcctggacgcagggaatgaacagaattagggtgcggagt

SEQ ID NO: 355234 - DNA, 122 bp, Homo sapiens
caggcagggaggagaacggcagctcccaggcttccactggggagtccctccggctttctccgggattccgcccgccccagggtctcagaccaacagaaggacccgggatccctcagcagctc

SEQ ID NO: 355235 - DNA, 122 bp, Homo sapiens
ctgcacttctgtcggcccacaggattaatggcagcaccagcccgagtacaagccccggcgcgaccatgcttgcaaggatctgaccgccgcctaggactgggaaagtgggttcccggcagggg

SEQ ID NO: 355236 - DNA, 122 bp, Homo sapiens
cgagcgagcacggcgaggatcaaccctttcttaatttggggcgccggggagtaaatgcagcgccaactctccccaaagctctctttttgttgtatctttaaaagtctcctccatttgtccag

SEQ ID NO: 355237 - DNA, 122 bp, Homo sapiens
accctctccgaaacagagaaccacagccaccggcgacgaacccagctgcagcagctgcagcgtgacaagcaaccgtgcgcacgaggatgagtcccccagaagaagccacccctccaccacca

SEQ ID NO: 355238 - DNA, 122 bp, Homo sapiens
aagatcgtgccctatgctgccgagggcaagcggcgggtcctgcaggagtacgaggtgctgcggaccctgcaccacgagcggatcatgtccctgcacgaggcctacatcacccctcggtacct

SEQ ID NO: 355239 - DNA, 122 bp, Homo sapiens
acaggagccattggaggaaagagggaaaagagaaagaatggcaagtgagccctccaatgacgcacacccaaatgctcccgcctggggtctcacaggagctgagaaccgaagaagtgattgtc

SEQ ID NO: 355240 - DNA, 122 bp, Homo sapiens
accgatcctcctaatcgacggagcaagagaagctggcagatggtcgtccacaggcagccccggcccccaggtctcctactcaaaagtatatttctttattcaataactatttatggagtaca

SEQ ID NO: 355241 - DNA, 122 bp, Homo sapiens
ggcggtctggtgctgccaaaggttagtcccttgtacccggcgaactcaggaaagttcactcgatttcgctacaaacctgcagcactcggcctggaggtaacctggttgggagcgaattcaga

SEQ ID NO: 355242 - DNA, 122 bp, Homo sapiens
agccggaatggttcttttcagcgaggccctgtccctgctccagtatctgtaatgaattctcgtgttcctcccacagtgggacctgaaccgccaaaccgcacctacgagcaaacggtaggcgc

SEQ ID NO: 355243 - DNA, 122 bp, Homo sapiens
agatcatacaaatatgtaaagtgggcaaggacataacaacagggatatggcacaaattgacgagtgactactcctaccttacagatcaatgaagtctgtttgaaggcctgtgggccacaaat

SEQ ID NO: 355244 - DNA, 122 bp, Homo sapiens
acctattcattcttttttactcacacacttatttttcaaattcaaacataactggaaagtcgttatcacctgctgttaatagaaggcaaaaccaaacagtgccctgaaaaacagaatgacca

SEQ ID NO: 355245 - DNA, 122 bp, Homo sapiens
taagagcatggcaccagcatttggtgagggcctctttgctgtgtcaaaacacggcagaggcgatcatagggagagagggtaagagtgtgcaggtcagctcaggtctgttactcttttttttt

SEQ ID NO: 355246 - DNA, 122 bp, Homo sapiens
ttctttgactcggaaagggaactccctgaccccttgcgcttcccaagtgaggcaatgcctcgccttgcttccacttgcgcacggtgcgcgcacccactggacctgcgcccactgtctggcac

SEQ ID NO: 355247 - DNA, 122 bp, Homo sapiens
ggaggctgaggtgagaggatctcctgacatcaggagttggaggctgcagagccatgatcgcgccactgcactccagcctgggtaacagaggaagaccttgtctcaacaaaacaaaagatgtt

SEQ ID NO: 355248 - DNA, 122 bp, Homo sapiens
tccgctgggagagagcagggtgtttgagttcagacaggttccgagcgctttctggctgttcggggtttggcgtgccaccacttgggacttgttgtaacccgtctccactcccgccccctcca

SEQ ID NO: 355249 - DNA, 122 bp, Homo sapiens
aaaacaaaactttttctctgattcttcttcattgtgaaggagcccgcgccaccggggacccgtttgtgcaccgtctagaagacccttatccaggatcccgacttctggggccctccccacct

SEQ ID NO: 355250 - DNA, 122 bp, Homo sapiens
ctgcttcccctgctgcagggggagtggcaagagcaacgtgggcgcttctggagaccacgacgactctgctatgaagacactcaggaacaagatggggaagtggtgctgccactgcttcccct

SEQ ID NO: 355251 - DNA, 122 bp, Homo sapiens
cggggcggggaaggaggggcgggcggggcggggctgactctgcgactatttcaggccttgcggaacccgggccaggacagtggcggccaggccgggacacggtaagtgacctccgcttccac

SEQ ID NO: 355252 - DNA, 122 bp, Homo sapiens
ctttggcggcggaaatgttgctgaagcggatctgggctggcttgtcgcggtcctgataggcgcctttcccgcggccgccggcagccccggcagtcgccccgctccggggtgccacattctcg

SEQ ID NO: 355253 - DNA, 122 bp, Homo sapiens
agatcgcggaaccagtgttctgatagttgtggttctctgagggaagccaattctggggaccggtagtggaaagctcttgcgctgtttccggccacctcagcgggaagcggagacgcaagcag

SEQ ID NO: 355254 - DNA, 122 bp, Homo sapiens
caggaggagcagcaaagtgaaactcaccagaactgtgtcagtttcaccctgctgctcctccgcttgccatcctgccaaatgctgaacaggtgcagacctaaggaaaaaaagcagaaacagac

SEQ ID NO: 355255 - DNA, 122 bp, Homo sapiens
ccctgcgcctgggcgcactggtggccccggtggtgagcgccttctccctggctttctgcgcgctacctttcatgggcttcgggaagttcgtgcagtactgccccggcacctggtgctttatc

SEQ ID NO: 355256 - DNA, 122 bp, Homo sapiens
gttagcagggcttctaattccatctgcaagtgatagtgtgtggagcttagttgcacagagcgcatgttactggaggagatatgggtctgtgtcatcctgcatgggaatgatcctaaaaacaa

SEQ ID NO: 355257 - DNA, 122 bp, Homo sapiens
caccgcgcgcgctccgcccgccccggagcctcgccctccgccacgatgagcaaatgagcgcgagcgagggcatgaaatttaaattccactcaggggagaaagtgctgtgcttcgagcctgac

SEQ ID NO: 355258 - DNA, 122 bp, Homo sapiens
ctgagcccacctggcgccgtggtgcacctggtgacccaggatcgggccatagtgacccggcgcgggcggcacagacagcccagggcctgcgggcgtgtgctcgaggtggtctcagcccacag

SEQ ID NO: 355259 - DNA, 122 bp, Homo sapiens
tttgctagggcctcctgaaggcacttttgagtccagacagtcatggtgccagaccctattcggacatcccactggcacttgagaggaaaggaaaggagtgccgggaacgttcccataactta

SEQ ID NO: 355260 - DNA, 122 bp, Homo sapiens
aataacaattgtcaccacggcgttccgtacagcagctgcgcgtggagccggcttctcctccggcccccacggcccgcagcttcccctgcagccccacagtgcgtcggaggaaggcgagggct

SEQ ID NO: 355261 - DNA, 122 bp, Homo sapiens
aaaggcggcagctcaggtcaaaggatcgcaggtaggcgccctgtgcgcgcctggtgactccgggcacccgtggcccgagttctgccatccccactctcccacccccagcttacatcggtcgc

SEQ ID NO: 355262 - DNA, 122 bp, Homo sapiens
tgctgtagctgccccgggccagcatacccttgggtgcctcctccacgggggtcaggaactcgtactcctcggcccggggcccatagctgcctaccatgtagtcagtcttgtcaactgcggca

SEQ ID NO: 355263 - DNA, 122 bp, Homo sapiens
tgctatttacgtttcagatattttttaaaaatactgtctggtgagtggaaaatggcagctcggaaaaaatgctagcttagaggactaaaaacctaagagggcaagagcaagcagctctgtgc

SEQ ID NO: 355264 - DNA, 122 bp, Homo sapiens
cgggggcttttctagcctgctccgggaggctcggccgaggagctatgaggccgcccatgccgcctccctcggctgcccacaagaggccctcccagactcatcatgccggagcccgaaccggc

SEQ ID NO: 355265 - DNA, 122 bp, Homo sapiens
gtcacattcatgtgtgcacctgatccggcgctggctccaaagcccatgttctttcccacacgccccactgtgcccctccgagactggaaccgtagagagcgaccacctctttctatcaggcc

SEQ ID NO: 355266 - DNA, 122 bp, Homo sapiens
gttgaaactcaggtcacacgcatcctactactctagtgctgccccatttactaatccaaacgaggataaaccctgagagatccgttatgtttctacataaggagtgtacaagcttctcttga

SEQ ID NO: 355267 - DNA, 122 bp, Homo sapiens
tcctgtttcgatgcggggcaaattgaggtccaccaggagaggcttgctgggcctaggtcacgttgctggtgcattatcaagctgggcgtgggaccgggcagctcggtcgctccgcacctccg

SEQ ID NO: 355268 - DNA, 122 bp, Homo sapiens
ggcgcggcgtgagctgggcggcgaggtggccagcgctctggttgggacgcaagagagcggcgaaggccacttggatgagccagcggctagggcggccaggcaaaagcagcgctttccgcgcg

SEQ ID NO: 355269 - DNA, 122 bp, Homo sapiens
gctgctgatgctgtgccaggctccgaggccccaggaccccgacccgaggctgacacaacccgagaagagtctccaggaagccccggggcagactggggcttccaggacaccgcgaacctgac

SEQ ID NO: 355270 - DNA, 122 bp, Homo sapiens
tgggggaaagacagaggttcggaataccggcgcgcaatcgccatctgggtggaggggacccgccttcttttcttccgcctgagcgcagctcggctcccgcctcggggcggggcctgttgcta

SEQ ID NO: 355271 - DNA, 122 bp, Homo sapiens
ctccctccatccaggagtcaggaatgtaggccaaaaatatcgctgccttccagacccaggcggctaggcttgcaacacctgctcggaaaacccgagtctgagctttaatggttctattatga

SEQ ID NO: 355272 - DNA, 122 bp, Homo sapiens
tcagtaaagtggatctaagactcctgtgaggttcagatttcgtcacatatgtaaagcatacgccactgtacaaaaaacccagttccaattcagtacattagaaactatcatttctaacgtca

SEQ ID NO: 355273 - DNA, 122 bp, Homo sapiens
agttcacccccgcccgcggcctccctctgcgtcattgccccagtagagtccggacggccgcgctttggtctcaaaccctgcgatggtctcacctggccggaggggccatgcgggaggtgcgg

SEQ ID NO: 355274 - DNA, 122 bp, Homo sapiens
aggcaaggcctttcatgttgacaaattgtgacattccctaactcaatggtgctcaaccagcggcagttttgctctccaagaaacatgtgttaatctttgaagacatgttcattgtcacaact

SEQ ID NO: 355275 - DNA, 122 bp, Homo sapiens
acacagaagactgcggggagccttagcccctacccggcctgcagtgctctctggggcacacggcagccccacgacgcctttgggtttcttcgagcgctactcgcacgcaccagcgcccacac

SEQ ID NO: 355276 - DNA, 122 bp, Homo sapiens
ggggaggaatattagactcggaggagtctgcgcgcttttctcctccccgcgcctcccggtcgccgcgggttcaccgctcagtccccgcgctcgctccgcaccccacccacttcctgtgctcg

SEQ ID NO: 355277 - DNA, 122 bp, Homo sapiens
ggggtgcctactccttctgacatctccgaacccccatctatcttagtgcctgcgcagttccggtgccatccagaatcactcatcacggagatcacaaaaacaatgggtgctaattcaagggg

SEQ ID NO: 355278 - DNA, 122 bp, Homo sapiens
gtgatgagtaacaaagtaattctgtgttcattcctatcatttgttctcttcccaacaccacgggtggtgtagtcatgctcctactgcatcaagacagctgcttctgcagcttgggtcaccag

SEQ ID NO: 355279 - DNA, 122 bp, Homo sapiens
gttgggattttaattcaggcctgtttactcccagagctagtgctcaaaaccaggaagctacgctagcctgcttttccaaacctaagttagtcactcactgcttaaccttcttcaaagacctc

SEQ ID NO: 355280 - DNA, 122 bp, Homo sapiens
ccaaccttaggcacacacacgaccgaagagcagccgctgagctcatgaaaaacctgttcgcgcagaaaccgctctgtgccccgtggaggagctacgatgaattattaggtgaaagtaccaca

SEQ ID NO: 355281 - DNA, 122 bp, Homo sapiens
aaactgtcttctttctcagttcatctgcatctcgttattgggccatgaagaaaagcagcccgattctcctacctcagcctcccaagtagctgggattacaggtgtgtgccaccacacccagc

SEQ ID NO: 355282 - DNA, 122 bp, Homo sapiens
agtgagtcttgtcctgtctgtatgtgtgcaggtacacacacacacacacacacgcgcgcgcgcacacctgggaggctggctaacacttactctctatgtggctggggaagtaagaactatgc

SEQ ID NO: 355283 - DNA, 122 bp, Homo sapiens
ccctgcccttcctgagaccccggaggaggtcgccagtggattcgggagcatgaaatgctccggtgatgccgcgtgggtctccctgagcacgagcttaccagggggccgcgctcaaagcagcc

SEQ ID NO: 355284 - DNA, 122 bp, Homo sapiens
tgacccctgtcctgggagggcagtgagggcacagcgagggcagctccccactggggctaacgcagtgttgccacacagcacccctgtggcctcagcaatgttcctggctgcagagaactctc

SEQ ID NO: 355285 - DNA, 122 bp, Homo sapiens
actgaatatagttgacccttgaacaatgcaggggtttggagtgctgtcccctcaaccagtcgaaaatccatgcataacttttgacacccctaaactcaactactaatagcctactgttgaca

SEQ ID NO: 355286 - DNA, 122 bp, Homo sapiens
ccatagcaaagtaccgcaaagtgggtggcttagaaatttattgtcttggccattttcctccggaagtgcggatcccagcggcggtcctgtagctgagcaggcctgtggcttggttctatgtc

SEQ ID NO: 355287 - DNA, 122 bp, Homo sapiens
agaggggggctttgcaagcttttcaatgttaaagacagtattttctgcttatcctcccctcgtcccaattaagaaaccctgaatcaccctggaggaacgggagaactcctgcctctgaaccc

SEQ ID NO: 355288 - DNA, 122 bp, Homo sapiens
gaccctcactcacccacgtcgcagaaggctccggtgtagcccaccgggcagtggcacaggcggtggccctccacctctaggcagcgacccccatggaggcacgggttggtgcggcaggcttg

SEQ ID NO: 355289 - DNA, 122 bp, Homo sapiens
aggacagggtcaaaagacaagaggcccgaggcgctcccgccgtgatttgcagccagataccgttgggagcgcagccagagagcgttgggagcgtgcgtacctccagcccaacatggcggcgg

SEQ ID NO: 355290 - DNA, 122 bp, Homo sapiens
ataaaatgagattcaagtcaaggtggcagattagaagcagctcttgagccaccctcaggacgaggaaatgaggtggatggtgaacactggccctgagtgatgactgtgagacaatcacctga

SEQ ID NO: 355291 - DNA, 122 bp, Homo sapiens
atccgtgtgtgcctgtgtgtgtgtgtgtgtgtgtgtgtgtgtgtgtgtgtttagacctcccgagctggcttgcagtaataaatggaacctgcttcaggtgcagaaagctgggaggggtcgag

SEQ ID NO: 355292 - DNA, 122 bp, Homo sapiens
agtgatgaaaaaaaaagtttccccagacgtttctgtatctatcctatccaggtcaattcacgccatctctgacagttatgaataacttctactttccacacagaacaaaacactaatacaaa

SEQ ID NO: 355293 - DNA, 122 bp, Homo sapiens
tgcggacccgaagtgtgtgcgggcccaggacttactcgaagggcgcacttcttgggaatgcgcatcccgtaggcgcaggagaccctgagggtaaagatgcggcacttgagccctccgcttgc

SEQ ID NO: 355294 - DNA, 122 bp, Homo sapiens
tcccctggggcttcagcggggcgcgagagctcgggtctgggccgggggccgagcaggctgcgctgcccctccaggatttcctgcactcgacgcggcgaggccggctcgaacttcggcctccg

SEQ ID NO: 355295 - DNA, 122 bp, Homo sapiens
aacctgaaagcgggcttcaatagttccaacccgatcaccgaaatgccaaaatgatgaacccggaagtgataaacaggaagtaggtcaggaagaacaataataaggttacacccaagcgtggg

SEQ ID NO: 355296 - DNA, 122 bp, Homo sapiens
gcggcgggtttcagaggctgagttcttaacaccagggcacttccttgtagccaccacgcccggctgcatcctccacccggccggtttctagaaataggagataccgagaagttagggtggcc

SEQ ID NO: 355297 - DNA, 122 bp, Homo sapiens
catatacggcaggcttcatgattacttttcctctgattatgtttccagattagttatcatcggccaccaggaaatgtaagcaaacattggctggcagatttttagccctaggatacaaatcc

SEQ ID NO: 355298 - DNA, 122 bp, Homo sapiens
aaactcacagcgctcagatgtaattatatgattatcaaaaggagtgcaggatggattagccgagcaacgacctagagtctgagaaacgggcaggcacaaacgcttactcagaccaagggacc

SEQ ID NO: 355299 - DNA, 122 bp, Homo sapiens
ggccagggagcaagggccagcgggccggtgagtgcctagctcttcgcggaggtgagctggcggcgggacgcagcggggaggctgagcaaacggcgcccgacctcgatgccagcactcccttc

SEQ ID NO: 355300 - DNA, 122 bp, Homo sapiens
ttgcctccagggcccttttgctgtggatttactcctcaaagagtcagtcatcaaggggttcgctttatctggaaactcttgtctggcattccctgcgcgcacacctatgtccccgttcagaa

SEQ ID NO: 355301 - DNA, 122 bp, Homo sapiens
gtgctgtgctctctacttcctgcggttactgcgtgattctaaagctgccactcggaacagcgagtcctctgccgtcgagagcagggaggggtagggtggacaggcgatgccgtggaaagacg

SEQ ID NO: 355302 - DNA, 122 bp, Homo sapiens
cgtcgcgggtcggccgcggcccaccgtgccctccgacgacgtgacgcactagcgccgcagcgcctccagccttcgcttccgctccgcgcccgcgcccaccgcgaatccccccgcccgccagc

SEQ ID NO: 355303 - DNA, 122 bp, Homo sapiens
aggaaccaagagggtgcctggaaggtttccttccataggaggcagcagagtcaaggggagcggttctgttttgcttttggaaagcaagagcattagagctgaaaagtgcctagaatccacct

SEQ ID NO: 355304 - DNA, 122 bp, Homo sapiens
catgcattaagaaggcgtaaaatttaaaagttgactttccacctgaggtatttgcttctgcgcaagccaattctccctcccccctttcccactcaacagccatctcagatggatattggggc

SEQ ID NO: 355305 - DNA, 122 bp, Homo sapiens
cctaattattttctctattgctgcttctgtttttaaatcattgctcacatgcagctgttgcggcttgcctctcgcatttcttgctgaagtttgtaagattcctcgttacttttattagtgac

SEQ ID NO: 355306 - DNA, 122 bp, Homo sapiens
ctccacagcctctgagtccctccaagcaggtcagagaacaactgatctgggtcagcccttcgtttcagaggtaagtaaatagtggagcatgaagtgtcttcatcaggaacacacagaaggta

SEQ ID NO: 355307 - DNA, 122 bp, Homo sapiens
gcctgcaggttggtgcagtgaggagccgccgccgcccctcccgccgcgcccaggcccgggcggccgcgctcccgctccgcacccgcctttcccgagcaggctacacctctccctggcgcatc

SEQ ID NO: 355308 - DNA, 122 bp, Homo sapiens
tggaggccactgaaggggaaaaggaggggaggcatgggctgggcccagactctaagtccccgaggaccccaggccagccggggtgacagctgccctttgccatccagccacctttctgcttt

SEQ ID NO: 355309 - DNA, 122 bp, Homo sapiens
cgctgcctctgtccctggggccgggaaagtctgcgtcataaaagacacaggtgcctcccccggctcccagggtactgaagagtccccgtgcaaagctaccaagttcacgtgaactagacgcg

SEQ ID NO: 355310 - DNA, 122 bp, Homo sapiens
cccctagcgcatagctggcttctgattggctttccggtgctcgcccgagcagggttggggcgagtggaccgcgcctctaaaggcgcttgccagtgcaatctgggcgatcgcttcctggtcct

SEQ ID NO: 355311 - DNA, 122 bp, Homo sapiens
ctcccacactccctactggaggagctgctgtccatgggccacccttgttcctgcacagcccgcaccctctgagggaagaatttgtcccacctgacctctgtttcctctctggtccaattttt

SEQ ID NO: 355312 - DNA, 122 bp, Homo sapiens
tgcactggcaccgcaaaatggaaagtgacccccatgcctgatttctaccctccaagaagtcgcaggcttatgggagaggcaggggaattactgtatttccctggtgcagtggcaaaactgtg

SEQ ID NO: 355313 - DNA, 122 bp, Homo sapiens
gaccctgccgcgagttaccagccacagccagctgggcacataggaggaggcagcaacagccgccacagagcgcagtccgcaaggcgcggggtcccggagcctccatgggctcgcggggtggg

SEQ ID NO: 355314 - DNA, 122 bp, Homo sapiens
ccacaatggtgttcagccaagatcagagctggcataactaaaacaatcacggagcgagtgcgtgcatgtgtgtgtgtgtgtgtgcgcgtgcgtgcgtacatgtgtgtgcgcgcacatgtgtg

SEQ ID NO: 355315 - DNA, 122 bp, Homo sapiens
ctcagctacggcggaggcagagggggcagcagcaccgcttccttctatgccgatcccgggcgcaggtcaggaagcccagaccttggactgggatgggagattacctactctctgagactttc

SEQ ID NO: 355316 - DNA, 122 bp, Homo sapiens
aagaagttttatcttttcttgttaagctattggtgaatttttaactttggggttttgtttcggataggtattgggagaaggagaggctgtcaacccatgccactatgctatctctaattctg

SEQ ID NO: 355317 - DNA, 122 bp, Homo sapiens
atgtctgcagatcggcccccctcgcccagcctgagaactttccagacggaaaggcgcacacgtgcacacagcaccagctgagccgatttgtgctgctctcagcagccaccggggatggagga

SEQ ID NO: 355318 - DNA, 122 bp, Homo sapiens
gggaggaagattgccttcggggtcccctggtttaagacgccagctcctgcacacccccctcgccctctggtcccatcactgagagctttgggaccctcatctttggagcccgagtcataggg

SEQ ID NO: 355319 - DNA, 122 bp, Homo sapiens
cgcggcgctgcctccggggaggaggtggcgagaaggccagcagtgccccgttgtggtccacgcgggtggggaaggcgatctcatagctctccagactggacaggaactcatctgtgggtgag

SEQ ID NO: 355320 - DNA, 122 bp, Homo sapiens
gccagggccagggccatggtccgccgcgggccgccgaataaccgctaccactaccgccgccgccgcctacatcccgtaaactttccccgcggccgctgggaattctgggaagctcgacgcag

SEQ ID NO: 355321 - DNA, 122 bp, Homo sapiens
aaacagtgtctgatgaggagtgtttccaacacaggctacatgaattcccctataccagtgcgaaagcagccaggagtccccgttggaaaagaacaatgccactctcttttatgtatcttggt

SEQ ID NO: 355322 - DNA, 122 bp, Homo sapiens
ccacctccaagatccctgctgcccgcttagtgtggggtgacataggttccttattgcatccgcagctcagggacgggcgcagtgtgctccaagacatagaggctcaataaatcctgcagtaa

SEQ ID NO: 355323 - DNA, 122 bp, Homo sapiens
gccaggagggggtccagcgccgattccctgcccagccatcgcccctctcccacggactctcgcctgcggtccagcaaaggcagctccctgagttctgagtcatcctggtacgactccccttg

SEQ ID NO: 355324 - DNA, 122 bp, Homo sapiens
aaatgcaaagactgctttaatcaaggagagtctctggacactataattcctgtgagaacacgagaagatggtggagaaaatactcatccataggtgtggtactttccaactcttactgccaa

SEQ ID NO: 355325 - DNA, 122 bp, Homo sapiens
tgcagggcgcccagagcgagacgtcttccgccggccccattcccgaagaggccgcgccgtcgggggctgagacccacttgtactgagtctccagccgcctccctaggctgctggcgcttcta

SEQ ID NO: 355326 - DNA, 122 bp, Homo sapiens
gtgtgtgtgtgtgtgtgtgtgtgtatatatatatatatatataaaacatatataaacatccgcctctttgctatttacagtttgttgagaaagtaccaagagcaaaccccagggggaaaggt

SEQ ID NO: 355327 - DNA, 122 bp, Homo sapiens
ctctctcccggtgctcgccctcatctacggttctatttgtttctaagttgggagcctctccgggcggtgcatttttatcctagagcgtcccttttggtttgcatttggggaaatgtcttctc

SEQ ID NO: 355328 - DNA, 122 bp, Homo sapiens
tcctgagcactgtagccgttgtgcctacccggggtgtttgaagccctgtgttttttcttccggagtgctcttgggagttgctgatgtatgaatatttatgttacaacagcggaatctgcaga

SEQ ID NO: 355329 - DNA, 122 bp, Homo sapiens
tggcttaaagttattgactcgctgccagttggagacccagctgtcctctggactcatcatcgcaatgattccatcaaaggaggagctggtgcagccatatagcatctctcagttacccttca

SEQ ID NO: 355330 - DNA, 122 bp, Homo sapiens
gaagaggcctcaattcctatgagctgttggcaaagagtcacggttcccggccacagcacacgggcctcttcatggagaggctcacaacgtggagagttgcttctcctgggacaggtggtggg

SEQ ID NO: 355331 - DNA, 122 bp, Homo sapiens
gtgacccaaatctccactcgtggcccgtgccctgctgctagacgccctgacctccgcgcccggaggccttgctccccgcctgtgcccaggccaggcctgggactccattgctgcatcccgct

SEQ ID NO: 355332 - DNA, 122 bp, Homo sapiens
aattctcagggactggaggggcccccactgagaggagtggggggaggggagggacactgccgctgtggggccaggccagagtgggctgccctccagagctccttttatgacgtcagctcccg

SEQ ID NO: 355333 - DNA, 122 bp, Homo sapiens
agataaatatctcgaaatagctgaagagtgctcatgtggaagacagaattggcctttccccgtgctctcctgagggacagaggtttggcttttgccccatgctcctgagtgggtagaagcta

SEQ ID NO: 355334 - DNA, 122 bp, Homo sapiens
gactggatcaagtagggcgagggagcgcggcccgttccggtttgaaactgctctggacgccgaattagtgtttggcagcgcctggtggtcttcaatcccagcccctccggcccgccgcgccc

SEQ ID NO: 355335 - DNA, 122 bp, Homo sapiens
atcccaagtctcctgcttcttaacccttgaagtcagctggctgtgcccaactttgctgtacgagttattgtaaaggtgaaggatgctgacacctttgtgggtcacttaaatgcattgtcttc

SEQ ID NO: 355336 - DNA, 122 bp, Homo sapiens
aaaaagtctccctgcctctgggaaatccagaaactgcaggagcagcgggaaaagcgcaggcggctgcagcaggagatccgagctagacgcgccctcgatgtcaataccagaaaccccaacta

SEQ ID NO: 355337 - DNA, 122 bp, Homo sapiens
aatgggaggcacctgtgggggtggcggggcggagccggggctggggcggtcccgaggacgcggccccgcccctcgcttccccagggctggccgggccaggccgggtcggcccccaccccacc

SEQ ID NO: 355338 - DNA, 122 bp, Homo sapiens
ctgtcccttttactaactagggagactgtgaatattcccaagcccagcaccacgtgcacacgccgccagctggctcgcgcgttttccacggagccctctggaggggagggagcgcggttcgg

SEQ ID NO: 355339 - DNA, 122 bp, Homo sapiens
ctccgggcttcagtcttcgccgcctgttctggtcctttcccgggccgctattggaagaaccgtgaactatggaaggcccctctggattggctgggctggcccaagagtaaggagagccctct

SEQ ID NO: 355340 - DNA, 122 bp, Homo sapiens
ttggatcatcagtctccagtggctgaggtgtggggggtgagggattggggggacgggctccgggtccctcacctggacgtgacccccaaggcctgcttcatgttctcgtagaccacatagga

SEQ ID NO: 355341 - DNA, 122 bp, Homo sapiens
tgggtggtcgatggcactgagcgcgccctggagcagggggcggcgctggtcggggaggctcgggccgcacaggagcccacggagcgggggtcggggaggctcaggcatggcgggctgcgggt

SEQ ID NO: 355342 - DNA, 122 bp, Homo sapiens
cctgcgacggcaccagtcggtctccaagggcagagggaccttcatacgccactcttcttccgcgattctcaaagattcccatcccgcagtaatgatctcaggctcccccggatcccgcagta

SEQ ID NO: 355343 - DNA, 122 bp, Homo sapiens
tgttctttgatctcagtgattttgactctttctactgcactctggggacagtgggttctgcggtaccaactccaattaaagtgggaatatgtaccagcccctccccttggtttttatttttc

SEQ ID NO: 355344 - DNA, 122 bp, Homo sapiens
cttcaacaaaaaagattcattgataactgaaatgctatcattttatatcgaaaaggtccacgattatacattttactttgtataaaattagtctgcttagccttaacatgctttgggaaagg

SEQ ID NO: 355345 - DNA, 122 bp, Homo sapiens
gccggtgcagctgcttgaaggcgaggcgcatggcgggcgggcagcgccccacggagcccacgatggcgtccacgatgggccccaggtagcccgtcagcagccccaggctggtctcccgcatc

SEQ ID NO: 355346 - DNA, 122 bp, Homo sapiens
aacaagatctgatggttttataaggcgctcttccttcctttgttgggcacttcttccagacgccatgtgaagaaggtaccttgcttcccctttgccttgattgtaagtttcctggggctccc

SEQ ID NO: 355347 - DNA, 122 bp, Homo sapiens
ttttgaaactgggggtcagttgaggaaggacagtaggagcttcatccgttgttacattttcgtttattcaactcttctagccattggtagtggacttttaaaatgtcagggtacaagtcaat

SEQ ID NO: 355348 - DNA, 122 bp, Homo sapiens
actagtaactggtctgtaatgtcattctgtcatcttcagtcctcatgtacaggaaagacacggatgaaggaagtctaggggtgggggctgtgttgtgacagacccctagacttccatcgcta

SEQ ID NO: 355349 - DNA, 122 bp, Homo sapiens
ggggacctcccagcgcacaccgctagcctggggctttcacctcgatccgcccggcctgggcggctcgtgtcctcccacaccgccacccgtgcccgcttcccggggtgcgcccggagcctggc

SEQ ID NO: 355350 - DNA, 122 bp, Homo sapiens
tccggctgcccgactttaactcacaccgaagcctggcgggagaacggatttctcaaggctcggaagtgtctgagcgtctgctcggttccccagtaactacccgagtgttgcatgcagccaga

SEQ ID NO: 355351 - DNA, 122 bp, Homo sapiens
tacatgtgcttcctgggacagactggcagaaaggtttgctaagatcgcccacttggagctcgtcttccccacaaccagcacccaattagagaactcgagtctggcctcctgggttcaggagg

SEQ ID NO: 355352 - DNA, 122 bp, Homo sapiens
atgcttccccccattcttttcccggtggatcatcttaagatgagtttcagtttcctcagacggtcttgcagggttgcagggttggttaccagttgatccttagccatagacagcttcataat

SEQ ID NO: 355353 - DNA, 122 bp, Homo sapiens
actcggagctgagccgggcccaggagaaggctctggacacgagctacgtgatcctgcccacggccacggccacgctgcggcccaagcccaaggaggagcccaagtacagcatccacattgac

SEQ ID NO: 355354 - DNA, 122 bp, Homo sapiens
gggaaggaagagaaatgttgaacatctagaaaccttaggaaggtcaagaattctggaacacgtatatcatttgacctagtagttctgcttctgggagtttatcctgtaggtgtacttgtagt

SEQ ID NO: 355355 - DNA, 122 bp, Homo sapiens
gatggggacatggtggctctccagggcttcagggctggacactgccctttctacagcatgcgttgtttaaatgactccagggcaccatcagtgtcctgcaccgcgactggctcacaaacggg

SEQ ID NO: 355356 - DNA, 122 bp, Homo sapiens
cccatcctctggcatgtgaggagcccctctacctggccgcccagtccgggaagtgaggagcgcctcttcccggccgccacgccgtctaggaagtgaggagcgtctctgcctggccgcccatc

SEQ ID NO: 355357 - DNA, 122 bp, Homo sapiens
gttaaagaaaatgtggtatgtagacacaatggaatattattgagccttaaaaggaaaggccgcgacaacatagatggaattggagaacactaagtgaaataagccagaaacagaaatacaaa

SEQ ID NO: 355358 - DNA, 122 bp, Homo sapiens
agcttacaattagatatctggaagaatactcacagtttattatactggcaatgcataaaacgccactgatgaagaccctgcacatgtgtgaagggtatcaagggccccgtgaatgacctgag

SEQ ID NO: 355359 - DNA, 122 bp, Homo sapiens
gaggtccctgccagattgaagcaggggagcccggaagtctgggttttgtagctgcctcagcgctctcctctacatcccacttctgaggcccagcgcaggtgaccgcagcccatgcctctctt

SEQ ID NO: 355360 - DNA, 122 bp, Homo sapiens
cggggaggaggatgggggctaaccagttagtggtgctcaacgtgtacgacatggtgagtgcggcccctggcggccccgagccctggcccaggccggcttcctctcgcccgtggggctcggac

SEQ ID NO: 355361 - DNA, 122 bp, Homo sapiens
aatatccctacagcagtagggcctaaacaggggtttgacgccacagcagggagggtcaggcgcgtggggcctcggacttcaagagcatcctttctgcaggcctctccgcgtgagcggaggtt

SEQ ID NO: 355362 - DNA, 122 bp, Homo sapiens
ccgcctggccctagccatggagctgagccggcgcgtggccgggctggggggcaccctggccggactcagcgtggagcacgtgcacagcttcacgccctggatccaggcccacgggggctggg

SEQ ID NO: 355363 - DNA, 122 bp, Homo sapiens
ctaagctgctactgcaagaagctcacagttttcctggctttgcttagtaaatcgtttgtgcgattacaaagagaagaatagaattgggacgtcagggcttcctgtgggctggggactggaga

SEQ ID NO: 355364 - DNA, 122 bp, Homo sapiens
aggcttccgcgacacctgcccctcaccttcaaacaccgctcatattctgactttacatcccgcttgtatctgtttatcgctcataatatcaagtaagctccatgcgggcacagctatgatct

SEQ ID NO: 355365 - DNA, 122 bp, Homo sapiens
tgagagagggcaggcggggactgcaacctcagtccacagacggcccgagaccctcgtccccggccctttgcacaggtgagggaactaaacctgtgcaagatgggagaccggggtgggaggaa

SEQ ID NO: 355366 - DNA, 122 bp, Homo sapiens
ctgccgctcatggaacagaagaactggaaccgaagtttctggaacagggctatctgagagcggttcttcctggccctcgggttcaagcaacggcataactggaaccgacggttacggaccaa

SEQ ID NO: 355367 - DNA, 122 bp, Homo sapiens
gaatcatcgcaccgccctaggggaagctccattgcgaccgggtgggcgctgccggcctcgcgtcttgtctcctaggcagcacgagggcacttccggcgctgtctgatgacgtttatgcgccc

SEQ ID NO: 355368 - DNA, 122 bp, Homo sapiens
gacagaaggccaaacagaataggtcctaggtggctatgtggacacctgcatagatcatggcgagtactactcccacagcagagggatagctgttaatgcccttgctggcaaactgtgcttcc

SEQ ID NO: 355369 - DNA, 122 bp, Homo sapiens
tttccagggagcgcgggctctcgtggggacgcgctcgaggcaggtgagccgaggctggggcgcccgggggtgtccccggatgccggtgcgcgcggctccctgacccgcccttccgcggcctg

SEQ ID NO: 355370 - DNA, 122 bp, Homo sapiens
cttaccggtttctgccgcgggcgaggtcgccgaagcccaaagacctgtttaacccttctgcggactcccctgcggatctggcttatataagaccgcggctttgatgtcaacctctcccggga

SEQ ID NO: 355371 - DNA, 122 bp, Homo sapiens
cgcccgggtaagcctgtctgctgcggctctgcttcccttagactggagagctgtggacttcgtctaggcgcccgctaagttcgcatgtcctagcacctctgggtctatgtggggccacaccg

SEQ ID NO: 355372 - DNA, 122 bp, Homo sapiens
taaaagccggaggacttgctttgggcgaatggagaaagaagagccttttgttaagaaaaacgtgagcaaggtggtttcgattttgcaccacggagctcaggttttcaagagaccctatacaa

SEQ ID NO: 355373 - DNA, 122 bp, Homo sapiens
gaagtgattgaaccaaaaatacagctcatggcttacaattgtgctttcttctctgtttttcggttagaatgattgcttattgtacatggatccaattccagcagttacaggtaccaaaatga

SEQ ID NO: 355374 - DNA, 122 bp, Homo sapiens
ggctgcttctggggcctgtgtggccctgtgtgtcggaaagatggagcaagaagccgagcccgaggggcggccgcgacccctctgaccgagatcctgctgctttcgcagccaggagcaccgtc

SEQ ID NO: 355375 - DNA, 122 bp, Homo sapiens
gaaagtcatttatttattcctgtcatttgtgaatcctcttccatcttccagtagtccttacggaaaaagcaaatacccataaaaagatctcttaaggcgactgggggcacacacggggtggg

SEQ ID NO: 355376 - DNA, 122 bp, Homo sapiens
tattattatgtattttgtcccactgcttaacattggatgatgcagaaactattactatgccgctgtgattacatagaaacagaaattaagatgtctcagaaattaaatgtccctgtagtcat

SEQ ID NO: 355377 - DNA, 122 bp, Homo sapiens
tcaggtgagtggcagggtgggcgtcagggccccaggagcaggcacagggaccacagggagcgctgccgacggggagggaaggcgtccggacccagcttggggcgtcgtgtggtcaggcagag

SEQ ID NO: 355378 - DNA, 122 bp, Homo sapiens
tcaatcaaatatacagagtgcttcctttaatatgtacacatttacaaaaatgcactttcacgaggaggggcggccggggccggcaggtgggcagcgcctggtgccacggcacgcgtggacag

SEQ ID NO: 355379 - DNA, 122 bp, Homo sapiens
aggaaccctagactcaagaacctactagaaactacagaccccatgtctaacaagactgggcgggttggctgggcgcagtgattcatgcctgtaattacagcacttcggaaggctggaggcca

SEQ ID NO: 355380 - DNA, 122 bp, Homo sapiens
accgtgaagacaggcatatttatagcttatttgctttatctctttgctttcctctggtcccgccagcctgactccttttccctaattaggactccacagtaacaaccattctactttctgtt

SEQ ID NO: 355381 - DNA, 122 bp, Homo sapiens
cgggtcggctttccccgggacccctggccggaaactgagccgttcacttccgccaccagccggaagttttctgtcactggacgccaaggagttttcggtggctcagctgggtaaccggggat

SEQ ID NO: 355382 - DNA, 122 bp, Homo sapiens
ccgtgtagcggccagagaatgaggtttgcgtattacctgcccatgtatttatacccacctcgtgtggcttgtggtcaccagagcaagagcatgcaaattaaaagcaacgagatttgacctta

SEQ ID NO: 355383 - DNA, 122 bp, Homo sapiens
acatcatcttgtcttaaaaagacctgatgccccatgatgcacaccagcccgatggccgctcgctgattggattctgaggaatctgttgttggccaactcctgggtccctcccagcagctttc

SEQ ID NO: 355384 - DNA, 122 bp, Homo sapiens
gtgtggccactatgcatggcaggcattgtcgtgtgtcccccgtgcgtggcagcattgtcgcgtggcccccgttcgtggcaggcatgtgcagcctgagtaccatgccggatggggtgttctgt

SEQ ID NO: 355385 - DNA, 122 bp, Homo sapiens
gtgacttcttcctttatttggttacagggagacatgtgacctttgtcatccaccctatcacgtttgtgttgagcagtatgggttgtgggaaagagctcaagaatgcttggaattaacctaaa

SEQ ID NO: 355386 - DNA, 122 bp, Homo sapiens
gtatgcccaaactaacctgctcttccaacttagcaagtactatcaggcatctttttgtcacgtattagctaacaacaacatctacgttacacagccagccaaaattaaatttagaaatcagt

SEQ ID NO: 355387 - DNA, 122 bp, Homo sapiens
agtggggctgctgagtgaagggcgctaggacccggtggcgcggtgtcggcagggactgggcgcttggggcgcaggagggagccgcggcgtcccgtcgcagcgtgcgggagcaggtgggggtg

SEQ ID NO: 355388 - DNA, 122 bp, Homo sapiens
cacacagtgggaaattgcttcaagatacagtggggctctattctttctctacccctgccccgcctttcccgagcagtgaacttcacagagagggtggtaagggagggttatcctgggtgtca

SEQ ID NO: 355389 - DNA, 122 bp, Homo sapiens
atccccattctccccagtggaagagtcaagcctgtgctcaattcatgggaaggttaaggccgataagttagatcaccaagggctgctttattgttctttaaaacatatatttttgtaaagat

SEQ ID NO: 355390 - DNA, 122 bp, Homo sapiens
gcgctctttcctggaggtggtccagagcaccgggtggacagccctgggggaaaacttccacgttttgatggaggttatctttgataactccacagtgacctggttcgccaaaggaaaagcag

SEQ ID NO: 355391 - DNA, 122 bp, Homo sapiens
tctgcttacagctgcttccaaattaagcatatctggatggtgtgacactttttgttagtccgagaactgtatgggcatcgcaactgggcctgttccaagatagacttgttgggaccttcaaa

SEQ ID NO: 355392 - DNA, 122 bp, Homo sapiens
tgtctccctatgttgcttagactggtctcaaaattctgggctcaagggatccgtttgtctcggcctcccaaagtgccggaattacaggcataagccactgtgaaggccttaatgaatgacgt

SEQ ID NO: 355393 - DNA, 122 bp, Homo sapiens
tggttatgatttggtgccacctggtgtccgagacagaatatagcgcccttgtgtagaagccgccttccccctccttcctaaatcaagagcattgaactgcttcccagcatctagggatgggg

SEQ ID NO: 355394 - DNA, 122 bp, Homo sapiens
gaaacaggacattatttacacattaaaggaacacttaccccaacaccaccgcaagggagccggacgaacacggaggcgagcgagcctgtgggggggagggagacggtcagagaggccaaggg

SEQ ID NO: 355395 - DNA, 122 bp, Homo sapiens
cagtggtttttgttgtatttatttaaatgctatgtataaaaacttatgttgaattttacacgatgataaatgatggtcactcaactggtgatatatacatggattgggaaggggtcatgggt

SEQ ID NO: 355396 - DNA, 122 bp, Homo sapiens
ggtcatggatgcggatgacgaggcagtcctgaacctcattgcagagtgcgagtgggacctcggcaggcctcccgggagcacgagcttcagccagaaggggcgtgaggccgactctcgtggtt

SEQ ID NO: 355397 - DNA, 122 bp, Homo sapiens
taatttagtcgataaaaaggtcaacaccaaaggaaaaaaatgaagctgaagagagccaatcggcaacaaggtagccttctggattacgcagggcaatatttttcaaaaactttttggctggg

SEQ ID NO: 355398 - DNA, 122 bp, Homo sapiens
ttcaaattctaacatagttgtgtcattatcaccaggtggatgcatcacagttatgccattcgaaagctgctcagaatcacctgagggaggcagaatttgtaaagatgaaatgtttttcacag

SEQ ID NO: 355399 - DNA, 122 bp, Homo sapiens
tccgatacgttctccccaaccctgatgctggtgtcagacacatgtccgtgggtgttccaccgtggccgggtgggagccatgtctgacacagactcccccaagctgatgctggcatcagacac

SEQ ID NO: 355400 - DNA, 122 bp, Homo sapiens
ctcagaaggcgagactcggtgtctgactgacctttcttttcaccattcaatttattgttccgctcagttgtccccacctcctgaagtctgaccaatcagaagcaccgccattttgacctttc

SEQ ID NO: 355401 - DNA, 122 bp, Homo sapiens
gttgcttccggaaagttgattccacacaccctgagaacaagtttcaagtgcgtgtgtcgtcgatcaggagggccaggtggcggcgagggcgggtcgttagtggcagccggagcggcagggag

SEQ ID NO: 355402 - DNA, 122 bp, Homo sapiens
cagtttacttgatgccaaatttctcctgtgagcaggttgtactcgtaaaacaaggatcatcgatgttgtctacaatgcatctaataacgagctggttcgtaccaagaccctggtgaagaatt

SEQ ID NO: 355403 - DNA, 122 bp, Homo sapiens
gagatgggaccaatgggaaatcccgttgtccagaaacacagagttttctgctacagagctcgatgggctacacatacttttctgctaggtactctctgttggtccagctacaaagttctggc

SEQ ID NO: 355404 - DNA, 122 bp, Homo sapiens
caagatgggcttgaactatattttcttttctcaattaaaatccaactatttggccaggcacggttgcttagcctgtaatcctagcactttgggagaccaagacaggtggatcacttgaggtc

SEQ ID NO: 355405 - DNA, 122 bp, Homo sapiens
accataagttgttagtctgctactctttctcccagttggcacatgaccctaacatccaatcgctagtggtgtggccattttttggtcttattttggcctttcctcagccaccactcatcagt

SEQ ID NO: 355406 - DNA, 122 bp, Homo sapiens
gctccccaggaaacccagggcacgtgagtggagagcttgggagctgagctcttcctcagccgctgggatgggcagagagaccagaagccatgggtttgcactagcagggtgcagctattttt

SEQ ID NO: 355407 - DNA, 122 bp, Homo sapiens
ttaggtctttttacacagattctagagatgatgaaaccgaagcttcaaaaagttacagaacggagattggaacttgggtctgtctggctttggaaggctgaagacaaaccgcagtaaagaac

SEQ ID NO: 355408 - DNA, 122 bp, Homo sapiens
ttgaacttcggagtcctagcggtttataattatttcatgcgcatgcgtcttccttgaaaccgttctctagccttacccgccagcgtgggggaggggaatggcggccgcctgttccctatggg

SEQ ID NO: 355409 - DNA, 122 bp, Homo sapiens
cttggagttgggcatggttttgtgattggctttttgccaaaggaatggacttagaggtaacgtgcaccctttccagacctgatgcataaagccctcccacataagagcctctgtgctgtttc

SEQ ID NO: 355410 - DNA, 122 bp, Homo sapiens
acagctggggctcacctgaggtggagtagtggtacagctccgtgtagggctcaatgtgcacggaggagccgaacggaatctgcggcacgcggccctccagctccgtgtcgatggtcaggtgc

SEQ ID NO: 355411 - DNA, 122 bp, Homo sapiens
caggccgaggcaccatggccacaggggtttccagccagaaaattgacaccccgaagatcccgtaacatgagaatggcacaaggaatgaacagtcatgtccacttggaggctctcaagacagg

SEQ ID NO: 355412 - DNA, 122 bp, Homo sapiens
gcagagcgggtggctgggtgctcatctttcaggtgtcactgccccaaggtgagcaggtcccgcaggaggcatggaagtcgcggtaaaaacacaactttgtctttgaaatgacttcaaaactt

SEQ ID NO: 355413 - DNA, 122 bp, Homo sapiens
cattgtttttaaggacagtgttttatatatttggaaggggagagatgagaatagtcaagccgttagcatatgagacagacaaaaagtttatgagttttaataaaggtggcaaacaggagagt

SEQ ID NO: 355414 - DNA, 122 bp, Homo sapiens
gcccctctgcccggccagccgccccgtccaggagggaggtgggggggtcagccccccgcccggccagccgccccatccaggaagtgaggggcgcctctgcccggccacccctactgggaagt

SEQ ID NO: 355415 - DNA, 122 bp, Homo sapiens
tgctgctcaaacagaagtgtcttggaggcagggccgggggcacaggctccgggcaagggccgggctcttgctctggaggtgaacctggaggcctgtgccacttggctcaccgggtcatgggt

SEQ ID NO: 355416 - DNA, 122 bp, Homo sapiens
cttcccaccacagcaatggtggcttactggctttggcctacctgggttttttctcaggctcggtttgttacccaggtttcctgagccccagggcattcattctcccaaccctgccctgcaca

SEQ ID NO: 355417 - DNA, 122 bp, Homo sapiens
ggccccccttcctgggggtgccctcggctctgtgccagaccccaggtgaggaggcgggtgcgcatcccctgggagcccgcgtggaggctcgcggacccggccctgcccctgtcggagccgag

SEQ ID NO: 355418 - DNA, 122 bp, Homo sapiens
cttcaagaagaggtaggaggccctctctgcgtccagcagaaccatctggggcacctggaccgggcggtggggtggacagagagacgagccccagctgggaccgaaaacatcgacccctccga

SEQ ID NO: 355419 - DNA, 122 bp, Homo sapiens
cattcttatgcgactgtgtgttcagaatatagctctgatgctaggctggaggtctggacacgggtccaagtccaccgccagctgcttgctagtaacatgacttgtgtaagttatcccagctg

SEQ ID NO: 355420 - DNA, 122 bp, Homo sapiens
ttttcccaaacatttttttcattgagtcttttacatctttgttcctcaaactgtagatgacgggattcagcaagggaatcacaatggtgtaaaatattgacactatcatgtcatggtccgaa

SEQ ID NO: 355421 - DNA, 122 bp, Homo sapiens
ataatttggacccagcctccagaactgtgagacaataaatttcctgttatgggctggacacgatggttcatgcttgtaatcccatcacttttcgaggccgaggcgggtggatcacgaggtca

SEQ ID NO: 355422 - DNA, 122 bp, Homo sapiens
gcgggcgcggggagcgggggcggggcaggcgcggaccctccctccccaggacccgccagacgcccggggcccccaacggccagcacggtccgaatcgaccccaagcttgacccgagggcagc

SEQ ID NO: 355423 - DNA, 122 bp, Homo sapiens
ggtcagctgtaaatgggtcaggagaccagagtggacagagtaggccctggaatgcttgctcggaggcctgccatgaaggatttctgcttgcttccccaccctaccccgggggcaggatgact

SEQ ID NO: 355424 - DNA, 122 bp, Homo sapiens
gcaacggcggcggcgcgcgcgctccccggacgttctcacgcgcgcgcgcgcgccctgccccggctccacctcctagccccgcccccgcaccgcgccgagtggagagctcacggctgccgggg

SEQ ID NO: 355425 - DNA, 122 bp, Homo sapiens
tgtagcatcatttatcactttaatgtaacattagtttagtggcaggcagaggacctgcaccgaatgttggaacgttaatgacttaagcagaaaggaaacacttgagagaccagccggtgctc

SEQ ID NO: 355426 - DNA, 122 bp, Homo sapiens
ccggtgtcatctagcggccggcagttccgagcgacttggggtccttgtgcctcggagtggcgtctgggagcaaaggcggcggaggcaaccccgcagttgaggacagtagggatcggtggctt

SEQ ID NO: 355427 - DNA, 122 bp, Homo sapiens
gctcatagtgtggcgtccggacacgcagcgagagaaaaacgcaataacctggtccgtcagcgttgcttgcttcagcaggccttaaatatgtgctgcatcttttgggggacgttacttaagag

SEQ ID NO: 355428 - DNA, 122 bp, Homo sapiens
ccaagacccagtctcacagcctcataggcggaccggctcacatggagtcagccctcacagcggctgcaccagggacccctggctcaggagatcccaagacctgagagatgagcccaccaagc

SEQ ID NO: 355429 - DNA, 122 bp, Homo sapiens
tgaactcaaatacacctgtaattgtaaaaggctttatcctctgcaatgggagtagtattccggaagtaaagaataagactgccttcggcacccaactaatgtggctactttcacataaggaa

SEQ ID NO: 355430 - DNA, 122 bp, Homo sapiens
ggcatggtgacggccacgacggtggcgggatgtaggtgctggatgcgggatgcagctgcgcgcgggctttggtcagtccgggggtcgttctcgcctcttcttcgtcacactgctcctgtatc

SEQ ID NO: 355431 - DNA, 122 bp, Homo sapiens
ccccagcccggagccaccccagggaggagccccaggccagcggtcagattcatgggcttccgtgcagaaggggagctgcaccggcgagcacccggcctctgagctgagccgcatcctcacgg

SEQ ID NO: 355432 - DNA, 122 bp, Homo sapiens
aatttagcttctggtactacatgtatctatccacacactgctgaagggaacttgaccctacgcattccaaaagccttcctcataagttatccccaaggggttcagggactacagaccattag

SEQ ID NO: 355433 - DNA, 122 bp, Homo sapiens
gtcaccggggaacggaggagcctgagagtcggggggctggcctggctgggcgctgcggcccggcccctgacccggatccctggcaggctgagcagcggcacggccgaaggcctgaaggtgca

SEQ ID NO: 355434 - DNA, 122 bp, Homo sapiens
ttacagctgtttccagcctacttcatcagcctactgccagtgggggtggttacagtgactcggcagtaaaaatacatgtttttcccttccattcagggaaaaatttgtcacataagagaacc

SEQ ID NO: 355435 - DNA, 122 bp, Homo sapiens
cgccggcccgccactgctcctccagcctgcacagacaagaacctccttcatgggggaagacgccggcttgggccccgcttacataagagcccccgagtggcgtccaccacaggggcctgcgg

SEQ ID NO: 355436 - DNA, 122 bp, Homo sapiens
ttgcttttggaatatcattatccagttctgaagctgcacaactcgctccttcccatccttcgggccttcactcgaaggtccgctccttggtgaggatttccctggacaacgcatttgaaacc

SEQ ID NO: 355437 - DNA, 122 bp, Homo sapiens
gtaatgggaagtacagttcagccatgtacaggaaaggaacgtgtttactcaggtatctttcgtgaatcccattttatgccctgacagttgcaagtactgcaggtccattttcgttgagattt

SEQ ID NO: 355438 - DNA, 122 bp, Homo sapiens
tcggcccggggccactaaataccaatgggatccagtgggttctacgtggtgagtggggggcggataagagagatgcgacaccccccgggcctgccccccccacgccggggccaggcacaccg

SEQ ID NO: 355439 - DNA, 122 bp, Homo sapiens
agggtgttttgaaactggattggatcttatttctttctacaaaatgctaaggaggcatcacggcatgtaaagccaactccatcaagaagtccacttgggctctgagatgtgtgagaaatgac

SEQ ID NO: 355440 - DNA, 122 bp, Homo sapiens
aatgtccttccgtccccggtttgcgggacttgttctcaggtggaattcccagccgcccagcgcgaggccagcgagctggggccttaggaagtctgccgccacgtggaggcggtttacattct

SEQ ID NO: 355441 - DNA, 122 bp, Homo sapiens
tgaggctgacggaagcgggtgggcgggcgggcggccgccggctggaagaggacgtggccccgccctatgcaaatgaggcctctccgtggggctcgctacttgggccagtcggagcgctgggg

SEQ ID NO: 355442 - DNA, 122 bp, Homo sapiens
cctgcaattacccaacgagcagcgggacagccccgggcaggacgcatcctgggtgggtgacgtgatcccgcagtctcctccccgaccccatatcccatacaatgatcctcgcttacagaagt

SEQ ID NO: 355443 - DNA, 122 bp, Homo sapiens
attgccctcttctctgagatgctctatcggttccccaacatggtggtggcgcaggtgacccgggagagtgtgcagcaggcaatcgccagtggcatcacagcccagcaggtattcccacttgg

SEQ ID NO: 355444 - DNA, 122 bp, Homo sapiens
gcccaaggcttgggcgaatcagttcacatcaacacccctactagcctctccctccggggtcgaccatttatctccagcagcggaccaggcgcccgggccagggtgacatgcgcgccctgcct

SEQ ID NO: 355445 - DNA, 122 bp, Homo sapiens
actgcacgatccgggcccctcaccacatcctctgcaccggtcagtcgagccgagtcactgcgtcctggcagcagaagctgcaccatgtccatgtcacccacggtcatcatcctggcatgtct

SEQ ID NO: 355446 - DNA, 122 bp, Homo sapiens
ccatcccacgaaatgctggtgggtctgttcttcacctgggtgggatcgggcacggtgctccgctcgtccaccgccaccccgtgcaggtgacatgcagcgggtgctgcggctgttcgtccact

SEQ ID NO: 355447 - DNA, 122 bp, Homo sapiens
tgtgggtgacgcagcagcattgttcgcaggcacaggaagccgcggctgagctgaagggctcgagaaggagcccagagcgctgcacgctgctccctctgggtagtctgaagggtcagagctgg

SEQ ID NO: 355448 - DNA, 122 bp, Homo sapiens
aaccacatggtgcctcttcactgctcctagaacatgccaggcatgcttctgctgcagagccgtagtacttacagatcctgcagcctagaatgttcctccctaggtctgagcatagttcattc

SEQ ID NO: 355449 - DNA, 122 bp, Homo sapiens
cagccgggcggaggttagggacccgagtccgggggcgggccgcgccggggaaggtcaggtcggggacgccgggtggcggggcgagggctgggggttgctgcgcggacacccgggcgccgcgg

SEQ ID NO: 355450 - DNA, 122 bp, Homo sapiens
gcctcaagtgatccacccaactcggcctcccaaagtgctgggattacaggcgtgagcgaccgcgccccaccctgttgggcactttgaagaatgatggtgtccttcactgagctacccagcac

SEQ ID NO: 355451 - DNA, 122 bp, Homo sapiens
atcacacaagtatatttaaatttgtaatctggaaattacatgcatgcattgtagaaatcccgcacacaggaatagttctataggatttaaaaagtccatcccacataaaagcaccaatagca

SEQ ID NO: 355452 - DNA, 122 bp, Homo sapiens
tggggagtaatatcacactcccaccccgccccccggatattacaaaccacttcgcggggtcggtgtataataccccccgccgcgatgtggggagtgatatcaccctctctcaccctggatat

SEQ ID NO: 355453 - DNA, 122 bp, Homo sapiens
cgacaaatatgtgttagatgactgaagcatcaggagtggcctagagggaaggatagcacacgacattgggaatgaaaaaggaagcagaatacaagatgatatacggataagggagatgtgta

SEQ ID NO: 355454 - DNA, 122 bp, Homo sapiens
cctcttaatgtcctggcagacagctcagccttgcattaacatagccacagaccggcccggcgtttccctccacctgcttcataagcaaaaccctgttgtccgttttaagcaagaatccctgc

SEQ ID NO: 355455 - DNA, 122 bp, Homo sapiens
gttatttttatgagtattaagtgaggggagcaccgaatgccctttggttataaagcctctcgtcattgaaagttgagtctctttgtccttcaactatgattatgcctctgtgaatcacatct

SEQ ID NO: 355456 - DNA, 122 bp, Homo sapiens
tgttgagtgctttataaatgcaaccattataaatgaaggaccactcttgtttagtgttgacggagggtgcagtggaaaaactaaaacacagtccgggagccaaaagttcacaatagtgtcaa

SEQ ID NO: 355457 - DNA, 122 bp, Homo sapiens
cgtgtgattacagaggcgctgggacacagccggctgggacagggataatgaggtgtccgccgaaatgcaggactccttcggagcacagagaatcccacacgatcctccctggaacggggccc

SEQ ID NO: 355458 - DNA, 122 bp, Homo sapiens
ctccttggggcctatgctgaaaaaggaaatatattccgacaaaaactagacagaggcattcgcagaatcacgtttgtgatgtgtgaactcaactgtcagaattgaaccttggtttggacaga

SEQ ID NO: 355459 - DNA, 122 bp, Homo sapiens
cccggcttcagtgcacaccacacccaccgaacttacgtcgaagggcagcacctccacagacgtgttgaagagcttgtcctccgggtgctcgatgttcccactgcggaagaagaacctgcagc

SEQ ID NO: 355460 - DNA, 122 bp, Homo sapiens
cttgagtctagcaggcagcgggagggctctgtagaaagtccacagagcctgcactggaaccgcttgggaaagattcttccagatttggatgtcaactgaagccgtaattctggctgaggctg

SEQ ID NO: 355461 - DNA, 122 bp, Homo sapiens
gagagaaaggggcacgggggagagtacacacgcagggctgtgcaagagacagcaagcatgcggaatgttggtctttggtggatatgggtgaagggcgcacaggcatccttcgtgctatcctt

SEQ ID NO: 355462 - DNA, 122 bp, Homo sapiens
atgctgtctctgtaaaggaccagatagtaagtactgtagtcgtcttgggccacacgcctacggcccagccactcaactctgcctgcagcattgagagaagccataggcaatttgtaaatgaa

SEQ ID NO: 355463 - DNA, 122 bp, Homo sapiens
gcgagatcagaatacatgaatctgacctgtttttactcacaacacctctgataccaagtgcgtgggtttttttcacaccgaaaaccagttctcccaactctccagacaccaactgggtggcc

SEQ ID NO: 355464 - DNA, 122 bp, Homo sapiens
cagacagtgtaggtgtgataaaaggagagtactcagcatgctttgtctactgtttgagcacgctctctgtggaaagtagttattggtgtgtttgtcttaacgtttggaaataaatggccttt

SEQ ID NO: 355465 - DNA, 122 bp, Homo sapiens
tggagaacctgagctgctgcccaccgcaggccgggggtgggaacccctggagcccggccgcgcagtagccgcgatcctgccaccagggggcagcaagtggaagggaccctagagccctcacc

SEQ ID NO: 355466 - DNA, 122 bp, Homo sapiens
acgaacccgaggctcagacaggggcggcgacttgtccaaagtcccactccgtggaggaagcggctctgcagacctcaggcggcggctgctctaatccctgcagcctgtgttttgccctccag

SEQ ID NO: 355467 - DNA, 122 bp, Homo sapiens
tggctcacgcctataatccaagcactttcagaggccaaggcaggtggatcccagcactttcggaggccgaggcgggtagatcacttgaggtcaggagtttgacactagcctggcctcaaact

SEQ ID NO: 355468 - DNA, 122 bp, Homo sapiens
agacttcgcggccgaggcctccgcccacttccggatctcactttcattgcttccaagtaccgggaggtgctttgcttcttcaaccgaacttgaccacaatgggaggaggcgtggcaaccaat

SEQ ID NO: 355469 - DNA, 122 bp, Homo sapiens
ggctgtgcctcgcgtgaggaacctggtggaggccgactattcctactggaccctggcctacgtgatctccctgcaaggcgcccgcaaactgctggctgctgagccgctctccaagatgctgc

SEQ ID NO: 355470 - DNA, 122 bp, Homo sapiens
ccccgacggctgcccgcccgcagtctatgaagtcatgaagaactgctggcacctggacgccgccatgcggccctccttcctacagctccgagagcagcttgagcacatcaaaacccacgagc

SEQ ID NO: 355471 - DNA, 122 bp, Homo sapiens
tcagcataacaccgttccctccactgggctgttctggtaacacgttgttaaggctgagagcggctggatttgaaccaagtgctcagagctacaagacttaacagctattattcctcccttaa

SEQ ID NO: 355472 - DNA, 122 bp, Homo sapiens
catacctcgaagctgcgagtaggcaatgcatgtccattccccacgaccattcccaacacacgtgcacctcatcatgtgacccatgtcatgctgcttatcccactgatctccaatgcggtaca

SEQ ID NO: 355473 - DNA, 122 bp, Homo sapiens
atcattggggtcctggagcatccagaccccccactggtggcggggccagtcctgcgggcgcgttggcttcttcccacggggttatgtgcagcccgtgcacctgtgagcagcccggcggccga

SEQ ID NO: 355474 - DNA, 122 bp, Homo sapiens
ctcagaagctccagcacccaggagagcctcaaataaaacatcaagggtgggcccagaagccgaagggtccagccctgcctgaaattggtcctttgccagggcagcctggggggaagtttggc

SEQ ID NO: 355475 - DNA, 122 bp, Homo sapiens
ggcgagcaggcggtgctgccacctcctctcgagtgtcctgctggcgccgcaagttggaatcgtgtggcttcctgtgtatttgagccggtagactctcaaccaggctgctttttctctggagc

SEQ ID NO: 355476 - DNA, 122 bp, Homo sapiens
gtagcaaattggaaatctaaccagaaaatggcgacgctgtgagcaggatttgaacctgcgcggggaacccccattggatttcgagtccaacaccttaaccactcggccatcacagctccgag

SEQ ID NO: 355477 - DNA, 122 bp, Homo sapiens
accctcccgcccccaagcacgtgtcctactgacctcacatgcatgtcttgtgacctctcgcggccctttccaatactgtcgccactgcacgtgatagagacgtggctgagaccatgaaaggg

SEQ ID NO: 355478 - DNA, 122 bp, Homo sapiens
agagcgggggcctaagcgtggaggtgtgtggcccggccctttcgcagcagtggaagttcacgctcaacctgcagcagtaggagggtccgggaggccctgccgtcctgtctcctgcaccattg

SEQ ID NO: 355479 - DNA, 122 bp, Homo sapiens
gctggcaccgcgagctgggagacggcggcagcccagcggccggaccagctggaggagacgcgcccgccgggagcagcgagaccgggagcccgccgtctgcggagcctggcctcgcggctccc

SEQ ID NO: 355480 - DNA, 122 bp, Homo sapiens
gcacttaattctgcttggctgctcaacattcaaaagcaggtcgccaacgatctcccctttcggatcatgaagggaacccaagcaggccgcgggacccgtgttctttcatgggaagttgagac

SEQ ID NO: 355481 - DNA, 122 bp, Homo sapiens
agtgtttttcacactttggtgagcatcagaatcccctagagtgtttgttaagacagactgcggccgggtgcggcggctcacgcctgtaatctcagcactctgggaggccgaggcgggtggat

SEQ ID NO: 355482 - DNA, 122 bp, Homo sapiens
ctggacccgtcggacctgatgtgtgtggagggagcggttcagggggcctggcttcatctccgccctgcccctggctctagggacccaagtccaggcttcccgccccagaaaccccgcccctt

SEQ ID NO: 355483 - DNA, 122 bp, Homo sapiens
tcaccggcgcaggctaggagggggcggcctgagtgccgtagccgagccggggctggagcgcgcggtgagtggtcgggcggccttggaggggagggggcccggccgcgccgcctctcgccccg

SEQ ID NO: 355484 - DNA, 122 bp, Homo sapiens
gttctggagcacacacgtgctgcactgacgtgccgactggcgccgagaccttcatagctgcggtcgtgtatatttgtatataccacatgagtatttctcatacattacgctaggggcgtgtg

SEQ ID NO: 355485 - DNA, 122 bp, Homo sapiens
tttcttaaccgaaaattgcgttgctgcaaggattgattcccagagcagattgcctaccaacgcaacataggcatccggaccctgaatgctgttggtgttggagaaatggaggctgaaaagga

SEQ ID NO: 355486 - DNA, 122 bp, Homo sapiens
gaacaatcctttaagggagaacctagaagccattcaacaaggttaaaatcttcaggcttccgaggatttggtagacagatcagaggcacgtttcccacaactgcgaagaggcgctgaggcaa

SEQ ID NO: 355487 - DNA, 122 bp, Homo sapiens
tgaacaagggagaatccctggcagcagtgctctggcctgcccagcactgagcaggagccacgaggagttgtccctgggatggagaccacgctctctagtctcggggatgcttggctgtgagg

SEQ ID NO: 355488 - DNA, 122 bp, Homo sapiens
cctgctcggagagcagtcagggctttgggggccaaagagaggcaggaggccgagccaccccgtggtgagctgcccagggcgaaaggctgccttgacccttccacgggcctccctaccctcgg

SEQ ID NO: 355489 - DNA, 122 bp, Homo sapiens
ctgattagacaggcaggacttccctgggggtcttatctcctcataggcaggtacttctgccggaaatgctcttccctttggtgactgtctagctcctgctcaacccttacatctcatcttaa

SEQ ID NO: 355490 - DNA, 122 bp, Homo sapiens
tggtaagacgagcgcggtaacggagctcttgaagggctgcagccctaacacggagaagcgcgctaagagcctggaggcgggaccaatttatgactgacgtctacccacacccattgcttttc

SEQ ID NO: 355491 - DNA, 122 bp, Homo sapiens
cgagcccgcaggtgggggcttccgcctcactttggacggtggcgtccacaaaatggctgacgcggcgcacggccgtccctgcacggagccggtgtttactttgccgcgcgaacagcctttcg

SEQ ID NO: 355492 - DNA, 122 bp, Homo sapiens
cgcttttaaggcctgggggttctcccccagggaggcgggctgaggaggcttccgggatgccggcgggtggaagagaaatctggaaccgttgtaaatattcatgtggggggatgccccttcac

SEQ ID NO: 355493 - DNA, 122 bp, Homo sapiens
ctgtgtgtgcaatgtgtcaactgaacgctcaatttacggcctctgctgggagccacgcatcgggaaaggactttgcatgaatttgtggtttcctccatttcaccttctgcacagctaaacca

SEQ ID NO: 355494 - DNA, 122 bp, Homo sapiens
accatgcccactattctaatagcaattactccgcgcagccttggatcttttgtgcaaggacgtgcgggtacaaatacattaaaacggccagttcacattgcccaccctgcttgtgtttgcat

SEQ ID NO: 355495 - DNA, 122 bp, Homo sapiens
ccgcgcccgtggcgctatggaggcggcgctgctggggctgtgtaactggagcacgctgggcgtgtgcgccgcgctgaagctgccgcagatctccgctgtgctagcggcgcgcagcgcgcggg

SEQ ID NO: 355496 - DNA, 122 bp, Homo sapiens
ggggaacccagggagcgcgatgggctgcagggctgcatcagggctcctgccaggagtggccgtggtcctcctgctgctgctgcagagcacacagtcagtctacatccaggtgagtcccttgg

SEQ ID NO: 355497 - DNA, 122 bp, Homo sapiens
gtccctggatcagggtctcctcctccttcccctttcctgataattcccagtgccagatcacgtgatacagagtgaaacccatatagagggcgctgggtacagccaccaagatgacctggaag

SEQ ID NO: 355498 - DNA, 122 bp, Homo sapiens
ggagagagacagaaagctctgcatcagccataggagaaacagaaataatttcctatggaacgcccaaaggatccacccagaatcccactggactctagtggacctggaggagttttggccag

SEQ ID NO: 355499 - DNA, 122 bp, Homo sapiens
ggggcgggggagagcgcggcggacctgcccagccagggtgagtcggcaaagcccgcggtgcgctgctgccccgctgctggggttcctagccagcgaggttatgatccccaccagcggttcca

SEQ ID NO: 355500 - DNA, 122 bp, Homo sapiens
ctggctctgcacaaggatgcaggatacaggaaaccagggtgggagcaggggcctcccttccggtccctcccagtgacctaggggggtccctgcagctgatcctcccagctctgagctcagca

SEQ ID NO: 355501 - DNA, 122 bp, Homo sapiens
gtgcaggctcccaggatcatgggcttccagctggggctactgggagacagtgatggcccccgaggcagctggtccagcgggagggaggttgaacgtgatcttgtttgcctcgtgtctcgggt

SEQ ID NO: 355502 - DNA, 122 bp, Homo sapiens
ggagctacgctggttccgaaagaaggtttcgccggccgtgctggtgcatagggacgggcgcgagcaggaagccgagcagatgcccgagtaccgcgggcgggcgacgctggtccaggacggca

SEQ ID NO: 355503 - DNA, 122 bp, Homo sapiens
atcatagcctaccactcgggtcgtccaaactctctggcttctcattgtcagcctcttctccgcctgctttgctccatatggcccttaaatgttggtgtttcccaacatattgtactatcttt

SEQ ID NO: 355504 - DNA, 122 bp, Homo sapiens
agattgcgcatgttggtcagtcgtgttttaaagagtacagtgcggggaggctgagaggggcgcatgcaacaacaacttttggaagggtgagcttggcgaccttctttattaatgactgcggc

SEQ ID NO: 355505 - DNA, 122 bp, Homo sapiens
ggccagctggagttccgggttggcgtgggattggcgggaccctcactcggagcagccggccgcccctgccggccccgggtgatgaggggcttagcacccgggccagtggctgcagagggtgt

SEQ ID NO: 355506 - DNA, 122 bp, Homo sapiens
gaaagttaagactgagtgagaagaagcaacaattaaaatttctcttgggaagatgagttgcgctgacagtacatttaacagattcatggaagtaaattatagtgctgcaaaaagcatgaaaa

SEQ ID NO: 355507 - DNA, 122 bp, Homo sapiens
gctgatctgtagcctagtccttcctggtccctcttgaggacagtggggatgggattggcacggccctcaccccggggtcccagccccattcctggctcccagccccccctcagcagcagttt

SEQ ID NO: 355508 - DNA, 122 bp, Homo sapiens
accaccctgtctttgactatgaggccaccctgaggtgctgggccctgggcttctaccctgcggagatcatactgacctggcagcgggatggggaggaccagacccaggacgtggagctcgtg

SEQ ID NO: 355509 - DNA, 122 bp, Homo sapiens
aggatcaaaatcaattttcaacttttattgaaagctttgttaataagtttctcccctgttcgtcacagttatgaaaaacctttaatatttttgttgcatgggaataaagctaggaaggatgt

SEQ ID NO: 355510 - DNA, 122 bp, Homo sapiens
ggccctgcgccgtcccgctggtgcgcccggctcggctgcgctccccctctggcgctggcgcggagccgccagggacttttatccagcagggccccccgggatcaaagcggcggcggacacag

SEQ ID NO: 355511 - DNA, 122 bp, Homo sapiens
gaaggccatggactacaattcccacaagtccgtgcgacctctccgttctgcgcagcttcgcggtatgaggaagagggtcctgtcaggcgcactcttgttgcatcatcagcgtgcacctccac

SEQ ID NO: 355512 - DNA, 122 bp, Homo sapiens
gccctcgccccgccccgcgccacccggagccccgccccctccgggaaccccgccctgcaccgccgcgtacccgggtctccaagccaacccagctccccaagccccgggaccccggccctccg

SEQ ID NO: 355513 - DNA, 122 bp, Homo sapiens
agctgggaagggatcctaaacatccgggtttcctaattggcaccccagaacccccagccacgccagagaatgaaactctgccggttttgtgtgacttcaggaacatccacctcctcctgcgc

SEQ ID NO: 355514 - DNA, 122 bp, Homo sapiens
tccggagaagcctggaatttccccgtaagcacaagctcggcagaaaaaggcagggtccctcggcagccagggcaggggctgagtcagtcccaagtctccctggcaaatggatcaccccttag

SEQ ID NO: 355515 - DNA, 122 bp, Homo sapiens
cacccacacaggcgaaaagcccttcgcctgcgacatctgtggaagaaagtttgccaggagcgatgaacgcaagaggcataccaagatccacttgcggcagaaggacaagaaagcagacaaaa

SEQ ID NO: 355516 - DNA, 122 bp, Homo sapiens
gacaaagcactgggcttccctcctgcctgggagccttcaggacggcatggagtttggccacgtggtgggtaaggaaaggatggggcctgcggcatggctggggaggccaggagcagctgtac

SEQ ID NO: 355517 - DNA, 122 bp, Homo sapiens
ccaccttctctgtgcttgggtgcaccctgtggatacagccggcctgagggaccgcagactcgtcgggctgctttctgatgagaggattaacaaacaattgccggctgcgaccattttgcagg

SEQ ID NO: 355518 - DNA, 122 bp, Homo sapiens
cccattagtgtgagtcacatgccctactagaatgtgactctgtgagggtgggaccttgtacggcttgatcttttactccacctttcatggtgcctggcatggagtcgacacctaaaaatatt

SEQ ID NO: 355519 - DNA, 122 bp, Homo sapiens
cgggtgggaggcagtatgcacactctgggctgatttgctgtcttttcttccactgtgccacggcactgtcccgtgatttctctccctttctggtactagaagtagacagagaccccaggaga

SEQ ID NO: 355520 - DNA, 122 bp, Homo sapiens
acggcccagagcgcggcacgctgggacttgtagtctttgagggcgacgcggggacgtggccgctgctggttgggagtagtggttgagctgagatgattatctgacccactaactgaccgaac

SEQ ID NO: 355521 - DNA, 122 bp, Homo sapiens
ccctgtcctgctctagctttgctgggatgccttagagtgaggctagatttcaactgtacccgtccttttgctacacacttttctcatgaaacatattgggttaaaacctcaaccagaataaa

SEQ ID NO: 355522 - DNA, 122 bp, Homo sapiens
ctttcctagcagtcaccaaccaagtctttccagaaggcagctgcctgaaacatgtgcagccggaaggctgcagcaggacgctctcctgctgttcgggagacgctcctggtccctgccagcgg

SEQ ID NO: 355523 - DNA, 122 bp, Homo sapiens
ttcttctctccgtattcccactgttcctctgaaactaatcattccctgcctgtatttattcgccagttccccacccccctccccctggccccacttgtacacaactgccagcttaatcttct

SEQ ID NO: 355524 - DNA, 122 bp, Homo sapiens
cccccaaccatctctgttgaaagaagctgcttttttttttttttttttttttttgaggaacgtggcttgtttttcattgcatctctgttatcagagcaaagagaaagtgtactggacagtaa

SEQ ID NO: 355525 - DNA, 122 bp, Homo sapiens
tccttgctaggtttcaaagtgtagtgaaaagaggagccatttattttagagtcagataatcgggttttagttccagtttctgttctgtgggatcttggacaagttattttatctctttaagt

SEQ ID NO: 355526 - DNA, 122 bp, Homo sapiens
cgggcagcggcgagggggcggggatgtggcggccggaggtcaccggggcgtcactgcgcccgccctggccctcccccggcccgccccctgccccgccccctgccccggcccggctccattta

SEQ ID NO: 355527 - DNA, 122 bp, Homo sapiens
tcaaccccagcagaccctccggcatctcactctacgcgttcgccgaacaccctgtccctgcggtctgagctccggcctgtgccctggctggcgcttgccccgcgcaaacacaaacacattct

SEQ ID NO: 355528 - DNA, 122 bp, Homo sapiens
aggaggggttggggtatggactctggattggctgctttgcacgtgaaaggtgtgtacggtcgagctgtttccaatctttaggaactggctaacgctgggaggggcagcccctttggggtcag

SEQ ID NO: 355529 - DNA, 122 bp, Homo sapiens
cgcccgagcgcggggagcgcgggagggaggtgccccggtccccgcccctgagacaggccccgcccccgccccccaccaaaggagctgtacctcctcggcgatccccggcctgaacgggtagg

SEQ ID NO: 355530 - DNA, 122 bp, Homo sapiens
cgggcggctcaggggctgcgtggccgagcgcgctgcccgggccggccgggggggcccgggcgttattggaaagttggtcctgagtcattccgcctcagaggcgcctccgaccgcttggcggg

SEQ ID NO: 355531 - DNA, 122 bp, Homo sapiens
catatttcattcctgacagtttggtgtgttgggtgtggatggagaactgtcggccctccccgccaccttccagcgcggcggcaccgggggcccagggggtgggcgccctcaaccccgtcccg

SEQ ID NO: 355532 - DNA, 122 bp, Homo sapiens
tgtgggggctgtctgttactgtagcagagcatggcctcacttgactgatactgccctcttcgaagcagaacaattctgctttgctctgacctacagtcagactttcacactaaaccaaggtg

SEQ ID NO: 355533 - DNA, 122 bp, Homo sapiens
ggcatcattcctaattgtgtgcacatgttgtggagttgagctgaattctgtgaatggaaacgtggctcatttgcatcatgcagtaagtgggagtgtggtagcacagtcggtggtgacccagt

SEQ ID NO: 355534 - DNA, 122 bp, Homo sapiens
tgattgtgacagaacactcacagccatatacccaagggccaaatggcaagattaaaagttcgtgtcactaatgccaacagacacacagtcatacaaagactaacatgttcacacatagacac

SEQ ID NO: 355535 - DNA, 122 bp, Homo sapiens
ggccttttatgcagtgactgtgcccaccgaccacacctgctggccacgcctactgctaaacgcagcccaaacagtgactcagcttccaccaatccaatcagcatccgttcctccatgggagg

SEQ ID NO: 355536 - DNA, 122 bp, Homo sapiens
cggagcacaggacgcttcctgccacccctgcagagcatgggacgcttcctgccatggtgccgtggcaatgggtggcacctgcctgtggccccttctcagaaggacgttttaaacgcgtgagg

SEQ ID NO: 355537 - DNA, 122 bp, Homo sapiens
tcaggaaacgctgccggggaggttgctttgtaatcactttgcttacctccccccgggcgccgccgacccttcctagacgcctccgctgcggccgcctaggcttttacccggaacccgccagc

SEQ ID NO: 355538 - DNA, 122 bp, Homo sapiens
aggtgcgaaggggcgtgcggcctttaaatttcaagctccactacccagggtgggcctcagcgcgcgcatccgtggaagagggctaagagatctggtacagggtttgggccgcacacgggcct

SEQ ID NO: 355539 - DNA, 122 bp, Homo sapiens
ttgtagtgcctacagttatttaattggcaactatttactgagcctcctttgtacccagcacgtaggtcacggcagtggccgaggatcacgtaatcccggtcttgatggggtggcatcaccat

SEQ ID NO: 355540 - DNA, 122 bp, Homo sapiens
agtttgagagaccagggctgctggggcctggtcatgcagggcccggacagggggctgtcccgctgtgaggaagctcttggcttaccctcctctgagcctcagagcttgtgaggttagttcct

SEQ ID NO: 355541 - DNA, 122 bp, Homo sapiens
cggtccccatttggttgtgtcccggtgactgctggccttgatcctttttccgggtgccgccggatctcccatccccagagcaccccactgttctccgcccctgactcagctactgcttcggg

SEQ ID NO: 355542 - DNA, 122 bp, Homo sapiens
gggagagatgctcatcaaacgagggacaaatcataaagttcgggagatggaaattaggcacggacaaacgatccaggtgcaggggagatttatgggggaggctgtattctagctaatgattt

SEQ ID NO: 355543 - DNA, 122 bp, Homo sapiens
ggctcctcacttcccagtaggggtggctgggcagaggcgccccttacctcccagatggggcggctggccgggcggggggctgaccaccccacctccctcccggacggggcggctggcctggc

SEQ ID NO: 355544 - DNA, 122 bp, Homo sapiens
ccagaccaagcggttatcaaggaataatctcttcagctagcaacaaatgcataactcgatcgcttatatgcgacatgatagggcgttccctaggcaaaatatcaaagatacagggagatgcc

SEQ ID NO: 355545 - DNA, 122 bp, Homo sapiens
gcaaccggatcacacctgccaggtacacacagctcatcgccactcataccccgcacacggcgcaggctgatctgcgcacacccacaccggccaggcacatgccacacaccgaaatgcacatt

SEQ ID NO: 355546 - DNA, 122 bp, Homo sapiens
gacgatgaagccataggacgcgatggtcatcaggaagttcactatgccgtagaaagcatccgccaggacaatcatgacaccgttgacgtaggtggagctgcaggagagaagcagcaggggag

SEQ ID NO: 355547 - DNA, 122 bp, Homo sapiens
gcgtgagggcagcgacctgtgaaggctgcgtgggctggactgtgagtgaagacacatgtgcggctgcaggatgtttggctggattcctgcctggccaccctgtgggggacttaaaggggggt

SEQ ID NO: 355548 - DNA, 122 bp, Homo sapiens
ctggacaaatgtacttttattagtcttactagaacccacattctcatttaatgttcacaacgtgggtattgggagggcaaggatgactacctccgtcagacagatgtgaaacgtgccaagcc

SEQ ID NO: 355549 - DNA, 122 bp, Homo sapiens
cgtgccgttcgcgattctatgaatgggtgggcacaacagaccctgagcgcgcatgcgctccgctcctttttttatgaatggggggcgggaaaagatcttaacccgtgattgctgggactggc

SEQ ID NO: 355550 - DNA, 122 bp, Homo sapiens
cgcgcttcgcttcagctgctagctggcccaagggaggcgaccgcggagggtggcgaggggcggccaggacccgcagccccggggccgggccggtccggaccgccagggagggcaggtcagtg

SEQ ID NO: 355551 - DNA, 122 bp, Homo sapiens
cgcttggtgggtttataaagaggcactgtgcctgccaagacgagcccagagtcctctcaacggctgctgcggtcacacgatctagaaacacgagtggatccaaagtgggctctcgggactct

SEQ ID NO: 355552 - DNA, 122 bp, Homo sapiens
ccaggagaaagcatcttctaaaggtttaggaagctgtcaagtttagataaggctgagctccgatcctctgggaccttggttgtattaataaggagaaattaatttttaaccactgggaacat

SEQ ID NO: 355553 - DNA, 122 bp, Homo sapiens
gactgtgttggaagagacgcttccaaatccacaggtgccagacagcaccttgctgaatcccgttcctgcccctccccgtttctgacttgtggcccccatgattttatttttcctggggtgcg

SEQ ID NO: 355554 - DNA, 122 bp, Homo sapiens
ggcccgctctgggcggcggtggcacgagagggccatctgcctgggtgccgagaactgcagcgtccgcggtgcgaggcgcggcccgtcccgtcccggcccccagcccggcgcgcacgcacata

SEQ ID NO: 355555 - DNA, 122 bp, Homo sapiens
acgatcctgggccagggaaagggcgtttatctcagctctgcgccgtgccccttccccccacgctcgaggacctttgccctgggccgccgggcccgcccccccacaggaacccgaagccctcg

SEQ ID NO: 355556 - DNA, 122 bp, Homo sapiens
gacggcggacaaatcctcaggttcaagactccatacgtcgactccttctgcagcccctgccgccatggcagcacccagtgcagtggtttcgggcatcaagggcttcactactggaatataca

SEQ ID NO: 355557 - DNA, 122 bp, Homo sapiens
gcggcagctgcggtcagcccagggcgaggcgccggggtgggcgcggggcagaggctaccccgacctgcgggaaacaaaggcaggttagggagagtggatcccaaaagtatgggggcggagag

SEQ ID NO: 355558 - DNA, 122 bp, Homo sapiens
aggagcatggctcaggcttctgcataggtgggttcaaatcccattcctgctacttattaacgacgtgagcccagccagctattaaccgtgctgtgcttcagtttcctcagactgtaaaattt

SEQ ID NO: 355559 - DNA, 122 bp, Homo sapiens
ttggctgttggacaacatgacaggggttagtcatgtggactgtagcaccagacagacctgcgtgggagtccttctctgccagttatccaggtatgtgaccttgggcaagctacttaatctta

SEQ ID NO: 355560 - DNA, 122 bp, Homo sapiens
tggagcggagggccagtgtggtgttgagggtgggagttggggggggaaactcacgcggcccgtacttccaccgcatctcagattgaccgccgtaacagcaggatgagagggaatgcccctct

SEQ ID NO: 355561 - DNA, 122 bp, Homo sapiens
aagttccgaagcccggaagaacgcaagccagacgtggaggcggtgctacgagcttgcctccgcccccttcaggctgcctcctcccttctctgtttctccaggacctgtctcttaagtcttat

SEQ ID NO: 355562 - DNA, 122 bp, Homo sapiens
tagcatctgcctccatcatgttgagcgagtgtcatgaagacagcctgtgtctggtaatcccggagccagcacaggaatagttgatggaagaagaaaggaaggaagggagtgagggaggaagg

SEQ ID NO: 355563 - DNA, 122 bp, Homo sapiens
acctcacaatgcgccggaagcggtgcctcgtggcttgggatctctccgggttcttccttgcgccgtccacgccgcactgcccacgagggcgtccccgcccgagggacaactcaccgcccggg

SEQ ID NO: 355564 - DNA, 122 bp, Homo sapiens
gagccttggctgagcccattccattccccagtcagagaacaagagttccagtgagagttgcgccccagcggggaacgggcggctttgctgggcttggggctcttggacaaactgcaacacat

SEQ ID NO: 355565 - DNA, 122 bp, Homo sapiens
tagaaatacagccattcttctcaaaacgtgggctgccctgttcctcagtccttcttgtggcgggctcgtgtctcttcacctcctgttattctcacctttttagtcctgtcacttttactcgg

SEQ ID NO: 355566 - DNA, 122 bp, Homo sapiens
aggtggaggttgcagtgagtcgagaacgtgcccctgcactctagcctggatgacagaatgcgaccctgtcttaaaaaataaataaaataaaaataatcttttaggctaggggtggtgggctc

SEQ ID NO: 355567 - DNA, 122 bp, Homo sapiens
tcatctgaggggcaacttcgctgcgcttggaaatcctcttgacgactttgtctgccaggacgccccagcggggccagctgagcgtcctggcctgcggctacagcctatggtgaggggtggaa

SEQ ID NO: 355568 - DNA, 122 bp, Homo sapiens
ctccatttcctgacctcgtgatccacccgcctcggcttcccaaagtgctgggattacaggcgtgagccaccacgcccggccggtgcgatttttaaaaccagcactctcctgctcttacttga

SEQ ID NO: 355569 - DNA, 122 bp, Homo sapiens
cctgcgaagaaggccgcatgcgcaggcccacccagctgagacccttccacaccagggccacggtggaccctgacttccccatcgctcacctgtccagcgaccccgactactcctccagcagc

SEQ ID NO: 355570 - DNA, 122 bp, Homo sapiens
gaccacggctagaatcagagcctaaggcgtgtgagctcagccatcccacgtctgtcttcacgctcatacgcaagcccgacacaccggggctcccacttaatgaatactgaagagtagggctg

SEQ ID NO: 355571 - DNA, 122 bp, Homo sapiens
actcccaccctgtgacactgagtcccgagcacagcaccttcccagtctcctgtgccccagcggacagcactgagcaggccccggagaggaggggctgcagccacacactcttccccacctgc

SEQ ID NO: 355572 - DNA, 122 bp, Homo sapiens
tgaacccaggaggcagacgttgaagtgagtcgagattgtgccactgcacttcagccagggcgacaaagtgagacttggtctaaaaataaaataaaataaaataaaaaatgaaaatgaggcca

SEQ ID NO: 355573 - DNA, 122 bp, Homo sapiens
tattgcattgagagcccaagaatccatggtcagtaacactagtagtgaaactactcttcacgttgtatgtgttttgaattttgataaatattgccacattgccttccctagaggttatatca

SEQ ID NO: 355574 - DNA, 122 bp, Homo sapiens
cctccctgatgtcccaagggccagagacacagagaggacctcccgaatttctagaggggccgctacggccccgcactacttttccgcgggggcggggctatgacgcacttccgggtgcgcgg

SEQ ID NO: 355575 - DNA, 122 bp, Homo sapiens
cccgccgctgatcgaggagccagccttcaatgtgtcctacaccaggcagcccccaaatcccggcccaggagcccagcagccggggccaccctattacaccgacccaggaggaccggggatga

SEQ ID NO: 355576 - DNA, 122 bp, Homo sapiens
catttggctgttaaatgcaggaaataatagtacagattaattctcccccttccacaaatacgtacatatatgcatgcaaagaagtgtatgcagaggccatggctgttgcttagtctggaaag

SEQ ID NO: 355577 - DNA, 122 bp, Homo sapiens
tatagagcacggggttggccgccgagcccaggtagaagaagatgccggagatgacgtgcacgtgctggaaggccaggtgcaggccatctgtccactgtgacacgacgctccacatgacgcgg

SEQ ID NO: 355578 - DNA, 122 bp, Homo sapiens
ctcccaggctcaagtgatcctcccacctcagcctcccaagtagtggggactacatgtccacgccactatgcccagcgagttttttaatcttctgtagagacggggtctcactgtattgcctg

SEQ ID NO: 355579 - DNA, 122 bp, Homo sapiens
cagcgccatccctgcgcggctcccagacacccagctgtgccggcctggggcatgcatgagcgctcacgtgcctttgcttctgaaaggaacttgcaggctgggcagccgctgctccagggcct

SEQ ID NO: 355580 - DNA, 122 bp, Homo sapiens
agaaacctggccctcgcagccctcatcttggctcccactctgtactgggaagagtctgcacgctgtgtggcattgtgtacgttgggtcaatttctggaaacggctcactctactggccaggc

SEQ ID NO: 355581 - DNA, 122 bp, Homo sapiens
atgtggctgcctcttctgctgggtgccttactctgggcagtgctgtggttgctcagggaccggcagagcctgcccgccagcaatgcctttgtcttcatcaccggctgtgactcaggctttgg

SEQ ID NO: 355582 - DNA, 122 bp, Homo sapiens
aaacttgaactcaaatgtctgggttaaaaattgtttcttggctggggacacagtggcacacgcctgcaatcccagccctttgggaggccaagacaggggcatcgcttgagcccaggagttca

SEQ ID NO: 355583 - DNA, 122 bp, Homo sapiens
tcgtggcggaagctccggacctccctggcccgaacggtgagcgccgccggccactgggagcggccagagcccagtaatcaggacaccaccacagggaccacgtgtgtagacccaggccccct

SEQ ID NO: 355584 - DNA, 122 bp, Homo sapiens
gcccgcaatgagggtaaccggaccggcacctgcaagtgacagctggggctggacaaatgccgggcacgggcctctggccggcctcagagctgttcagcgcgagcccgcggcttccagccaac

SEQ ID NO: 355585 - DNA, 122 bp, Homo sapiens
ggtcccgagccctgccccgcaggaaggcgtctgaggcccagcaagaatttgagcgtggcgcgggccggccagcagtgctgggggacctggcgcaccctccgcagctgctggcccgggtgcta

SEQ ID NO: 355586 - DNA, 122 bp, Homo sapiens
ggtcaaagaagtatgaatttggagagtctgacctgcggtcagcttgcgatacggtggacacgtggctggatgacacggccaaggcaagtgtgggccatgccaggacagacagtggacgtgta

SEQ ID NO: 355587 - DNA, 122 bp, Homo sapiens
agacagaggcaccagcagctttcccaccacagcaggcctgctgagaccttggcccctccccgagacctccacagaaccctgaacctacaactgaggaggaattgatcttcctctgaaactgt

SEQ ID NO: 355588 - DNA, 122 bp, Homo sapiens
caaatgcacgcaaatatttgtggccgaatctcggcaacccgctggaaaggattaaacgtgcggttgccgtgactaaacgcattcattcaccctacaagatttaggaaaatgtaacgttgcaa

SEQ ID NO: 355589 - DNA, 122 bp, Homo sapiens
cagcaaaattagctaataaggtgaagcgattgcaggcgctgtggctttcccgcccattcgcggcgttggttttcccgcttctgagacttgtttggggaggtaaagagtgttggacgtgcttc

SEQ ID NO: 355590 - DNA, 122 bp, Homo sapiens
actagacaagcccctaaactgcccagagcctcaactcccttgaaaagtgcagaaaatgaccgacctcaggctcactgtgagaatgaaagttctctttaaaccaaagaagttattgtcacttt

SEQ ID NO: 355591 - DNA, 122 bp, Homo sapiens
cccaggtgatcagcccgcctcggcctcccaaagtgctgggattacaggcgtgagccaccgcgcctggccagttgcggatttataaaagcagtcgcttagtaacttgcagcggctacatcaac

SEQ ID NO: 355592 - DNA, 122 bp, Homo sapiens
agggtacggcgcctgcggatcccctggacgtggactcaggcggggacagcgttgatggagcgtctgctccgcccaggcaccgttcagggcgaagcctggccttgaggggcttgtatagtggg

SEQ ID NO: 355593 - DNA, 122 bp, Homo sapiens
gtctgctcatccttcccacctgaactcatgtgccacctcacttatgccccttcccaatgccgcacccacacaacagggtgtccctctgtgcccacagcagcccttgggtataactgttcccc

SEQ ID NO: 355594 - DNA, 122 bp, Homo sapiens
gcacagacaaatgcacatgtgcacttgcatgtgcacacacagacacacacacactcgatgcgaacacttgctcctcttcccccaggtgtgagtttccaccctggcctgatgacgtcaggcct

SEQ ID NO: 355595 - DNA, 122 bp, Homo sapiens
ggagttaacccagtgtgcacgcgtaaagcactcagaggtgctgggcttgttagcgtcagccgccgccactgtttgttgctgttggtaatagtaagaagctctgactgaagcgatctgatgtt

SEQ ID NO: 355596 - DNA, 122 bp, Homo sapiens
caggagcggaggcgccgggaagggccgggggggccggctagggccggccagcttggaagccgcaccctcgcggccccagacgccggcagggcggagccacgcggccgcagccccagccgaga

SEQ ID NO: 355597 - DNA, 122 bp, Homo sapiens
atggttaaacagctgtagagctaggaccattatgaccatttcataggagtcctatgcttacggttctttgagatgacatcaaagagagaacagtctttctctaaatcatgtcaacagagaac

SEQ ID NO: 355598 - DNA, 122 bp, Homo sapiens
tgcctctcatcagggagccatgcacttcagctatgcctgggttaggaagcctctgtgagccgaagagggagaatgaagatgggatgtcccatgctgggatgggacaacctgcatgtccaggg

SEQ ID NO: 355599 - DNA, 122 bp, Homo sapiens
ttccgcggcgtccctggaggtgggaaagctgggtgggcatgtgtgcagagaaaggggaggcggggaggccagtcacttccggagccggttctgatcccaacagaccgcccagcgtttgggga

SEQ ID NO: 355600 - DNA, 122 bp, Homo sapiens
tttctcttcggctctctgatccatttctctgggcttcctcagaaatacaactggtaaagacgtgtttgccaacatctggatcagctccgcccaatttctggggcagcacatgtttattccac

SEQ ID NO: 355601 - DNA, 122 bp, Homo sapiens
cggcttcttaggatctcctttgcccatgtttagttatttttcttcagcgaggcacagagtcgcccagtgcccgtacggctctcacttgccccggcgctgtctctatggagctcaatgtactg

SEQ ID NO: 355602 - DNA, 122 bp, Homo sapiens
tctgcctccatggtgcccccgcgatgggggtgccgtggcatcgtggccaacctggcttctcgtcccgtggccaccagggctgaccaagccctgagccctgctctgctccaagggtgcccata

SEQ ID NO: 355603 - DNA, 122 bp, Homo sapiens
ctctgctttttgctgccttcagtgcatattttaaccctgctcctgttgctttccctatgacgctctttcctgttgagaagtgtcaagtaaaactctctaaaagtgcttttcacctcctttag

SEQ ID NO: 355604 - DNA, 122 bp, Homo sapiens
gacacacacatgtagacacgcacacacagatcctctcaccaacttctgccttgttcaagacgttgcagcacccacttcagctgtgaatggggcatgcctgagagagtccgggctcctacaga

SEQ ID NO: 355605 - DNA, 122 bp, Homo sapiens
gcttgagcgggaaccggggctgcctgcggcgcttgcgggccagctggagttctgggtgggcgtgggcttggcgggcccgcactcgcactcggagcagccggccagccctgctggccccgggc

SEQ ID NO: 355606 - DNA, 122 bp, Homo sapiens
ctcacggcatcccctttaggatgttggctccacagggattggctccttggcagatgcagtcgctcctgattggacagtggtgtctgcagctcgacaaggtggactctgggccagtcggctct

SEQ ID NO: 355607 - DNA, 122 bp, Homo sapiens
gcaactaaagtccgttcggagatccaaaaatctgcaatacagaggttatttgtaacccggcgtctccaggctggtgagcaagctgaggagagcaagagggatggggagcggcgccggggagc

SEQ ID NO: 355608 - DNA, 122 bp, Homo sapiens
gcccagtgttcaaactgtggaatcctctctctccaaacaccctgagatagttaataatgtcgacagtgagatattactgtatttctcttttccaaaaaagctgagccaacaacaaggttaaa

SEQ ID NO: 355609 - DNA, 122 bp, Homo sapiens
ggctgccccattgccctctcccaaaggccgctctgccttgctgcatctcacttaagggctcgaggccccactgatccagcgtcctgtattcgggatctctgttgctgggccccaatgaacag

SEQ ID NO: 355610 - DNA, 122 bp, Homo sapiens
gaagatctcattagcctgaggattgaaggccagcaatggctgggggtaggtaggaggatgcgtatggggtagaatggatctactacattcaccacattctccactgggaagcgctagaggga

SEQ ID NO: 355611 - DNA, 122 bp, Homo sapiens
tcagccccctcccatggaggagcacttctccaggctggggagagccccttcccctcctgccgtaccctggtggagccagcccactggccttgtaccaggtgcactcggtgagtggttggtgg

SEQ ID NO: 355612 - DNA, 122 bp, Homo sapiens
cgagcggcagcggatcctcgggctccgccacttcccttccccgcaaagcacagagtgtcccggccaggagctgcacgttccagcccggtcctgagaagcccggcccagaaaccccggcgcct

SEQ ID NO: 355613 - DNA, 122 bp, Homo sapiens
agctcggctgagcttacggtgggcgagccttgagcctgtacctggcggggcctcggccttcgctggagagcctaggtctggcgtcggggtgagattgagcctctgaccctcccgctttttgc

SEQ ID NO: 355614 - DNA, 122 bp, Homo sapiens
tgcagccgccgctgctgttggagtgggctttgcgagtctgaacgttggcggggctaggctcgttaactgccgagagcctccgggtttgcggtggaggacgctgaggcccgtggggggcaggc

SEQ ID NO: 355615 - DNA, 122 bp, Homo sapiens
aaaacctgtaacaggagtccccgcctagaatggctcttcagtgttactccttcctcccagcggaagcagcctttgttttttgttgggttttttttgttttttttgtctgtttgttttgtttt

SEQ ID NO: 355616 - DNA, 122 bp, Homo sapiens
gctgtgttgggggagctcctctaccctgagggaaagaaccctgcctgcattcgtctttgccgccctcctgagtcaggtgccttgtttatggcagatggataaatgtttgacagataaacaga

SEQ ID NO: 355617 - DNA, 122 bp, Homo sapiens
cgggccgcagcgcgcccccggcctcccagtcgcgcgccaacccgggagcgcgcgcgccggcgcaccagctccatcagctagaggagcccgtctcccgggaaacaccaatcagacgcccgctt

SEQ ID NO: 355618 - DNA, 122 bp, Homo sapiens
cattctaggaaagagcagaaagagcccaacattaagccacatgctagttaaagaaaacaacgaataacagatggttctctgggcagagtccacaacccgttcagtgccaggcacccctgatt

SEQ ID NO: 355619 - DNA, 122 bp, Homo sapiens
gcagatgctaaaggctgtcacactgaccctctgccctcctggtggagagcaactgcctgacgcaaaaacgcagagggcccactgagctgtttaacacttgagccgtcctcggacggcaaaac

SEQ ID NO: 355620 - DNA, 122 bp, Homo sapiens
gaagcccagaatgtgtgtgcaccggggcggggctgccccggagaaggttcaggcgaccttcgcgtgaggactccaggcccctccggagaacattcctgagcctgcaccaactgccctccgtt

SEQ ID NO: 355621 - DNA, 122 bp, Homo sapiens
gttcccttcggttcctgtcttggttagaacacagctggagattgtgttaatagcttaggacgtctgtttccgtgagcaggtaacaactttttgaaacaaattccctcatctgctgaagaagg

SEQ ID NO: 355622 - DNA, 122 bp, Homo sapiens
acctctctaaagagtctccgctgtgttctagacaaatacaacgacttcatcgaggccaaccgcattgaggacgcacgggagcgaatgaggacgctgcggaagctggtaaggagagagaggtg

SEQ ID NO: 355623 - DNA, 122 bp, Homo sapiens
tcaaccttccatggcgtgccttcactcccatcttcttagcttctcagtgtctcagtggctcgctttactggcctgtgaaaaatcaacttgggtttccatttaggatagattagaaggtgtgc

SEQ ID NO: 355624 - DNA, 122 bp, Homo sapiens
ctggaaaaacagctaagccaggcgcgcaaggagttggagaccctgcgggtgaggctggggcgggtggtaggccaggcgcccaagaacaggccagctgaggcttctaggcttgacatctccct

SEQ ID NO: 355625 - DNA, 122 bp, Homo sapiens
gccacggctcgcctacagcaccgccgcgggcgggggcccccggagaccggccgcgcgggccgctatgaggtccgaggggttgcccctgccgcctctctccgcgaacccatcaccatccggga

SEQ ID NO: 355626 - DNA, 122 bp, Homo sapiens
cgtccccagttactctggttgggttgtttacccctccactggcttgcttcctgcccttcccggggggtcctcaccaacccccaagagctcagcacacacaatcacccactccgggtatttca

SEQ ID NO: 355627 - DNA, 122 bp, Homo sapiens
accacagaactccgaatatgcccgcacatcagtgcgctgggttaagaggagaaggggctgcggctgagctttcctagaaacagctatttggggacccatttcctgttggagtctgaaaggcg

SEQ ID NO: 355628 - DNA, 122 bp, Homo sapiens
gcggcgtggtatcgcgagacgggagtgggcggtgctagaacgtcctataaaggctctccccgaagcacgtgactcctctccgccagaccgccgccgcgccgccatcatggacaccagccgtg

SEQ ID NO: 355629 - DNA, 122 bp, Homo sapiens
gaagatgtgtcacgccgtcctgtgcattcaggacagtgcctaacacatcccgggtacttacggcaatgtttcacgaagaaatgaatgtctaaaaattttccattgcctgcaagtcacgccct

SEQ ID NO: 355630 - DNA, 122 bp, Homo sapiens
cattattgaaagaagttcaagtctgaggatttggtactattcagatatgggagtcatttccgtatggagatctcttaggtagattagtcatcattgtactcatactgatatctgtatacact

SEQ ID NO: 355631 - DNA, 122 bp, Homo sapiens
aaagaccactcggcccgcattggacggagcggtgtggccccctaagatgctgaccagccccggccaatcatctccagccacagccacccagggcaagtatttgtaggcccagctacttcctg

SEQ ID NO: 355632 - DNA, 122 bp, Homo sapiens
cgcagggtggagcggggcggcctgggacctggagtccgggaagagtcgaaggcctgtgggcggccgaggtcacgcgtgggcgcctgcggggggagggcggaaccaagaggttggcaccgcag

SEQ ID NO: 355633 - DNA, 122 bp, Homo sapiens
gtgatcagccacgtgaccctagccacccgcctcctttacactacgccccaggatccccggcggcagagataaagagctggactttagactcagacgaccgcgctcttaaaccttagatgacc

SEQ ID NO: 355634 - DNA, 122 bp, Homo sapiens
ccgcgggagcagggttcggtcactcgcagtgtcagagaggcccacatcctcctaaatttccggccctcccaaaacttccgtcttccctaggtccaacggggtggacccaaggcccaggggcg

SEQ ID NO: 355635 - DNA, 122 bp, Homo sapiens
atctgcaggccccaaatggcctccggtcggtgggctcctctaggcccagcttgggcctcccggcggcctctgcaggcccaaaacgtcccgaagttggcctctccaggcccagctccggcctc

SEQ ID NO: 355636 - DNA, 122 bp, Homo sapiens
ttcctctttgtggctgctgaaatcacactaggacatttaaaggggctgcagccacagccacggggagcagcagggaactcattacatcagagcattacatcatgggaccatgtggctcagca

SEQ ID NO: 355637 - DNA, 122 bp, Homo sapiens
ccttagctgccttcccgcggggcagagcttgggacctgcagcccaccatgcctgagcctccgccccctccgtgggctcctgtgcctcccgagcctccccgactagtgtcgccccctgctcca

SEQ ID NO: 355638 - DNA, 122 bp, Homo sapiens
ccatgaaggggtctgggggcaaggaactcatctctgaggtttgagagtaggcctgaaaaccgggaagggggccccttcttgtctggagatgataatgatttggcaaaaacaatgacgggctc

SEQ ID NO: 355639 - DNA, 122 bp, Homo sapiens
tcaaaatgagaaaaagctttgtagaatcagttctttctcaaaaatattaaattctaccaccgtcaacaaatgtgtgtttaaaaagcaattgcacccgggaagcggagcttgcagtgagccga

SEQ ID NO: 355640 - DNA, 122 bp, Homo sapiens
ctcaagagatccccccaaccttggcctccaaagtgctgggattacaggcatgagccaccgcgcctggcctcaagtaagtttttataccatgataggggaaaacctggaaggctaagagatgt

SEQ ID NO: 355641 - DNA, 122 bp, Homo sapiens
ttcagcgtgtggatggccacgccgtggccacgtcatatttcagtgtgtggatggccacgccgtggctgtgctgtatttcagcatgtggatggccacgctgtggccacatcatatttcagcgt

SEQ ID NO: 355642 - DNA, 122 bp, Homo sapiens
gtgtgatgacatcttttaaaaaagaataattttggttcagatctataagatgtgacaaaccgcaattgtgatgtttggaatgattccaacacagtattacagttttttttaaaggccatgcc

SEQ ID NO: 355643 - DNA, 122 bp, Homo sapiens
ctccagaagcacaggatgtgcgaccttcagcctttgtgcccacctccgagccaccagctccgcagaagtagctgggaatggaactgtactcctccagagacgtctcctccaggctcaccacg

SEQ ID NO: 355644 - DNA, 122 bp, Homo sapiens
cctccttttgtgccagcgctttttctggccagagagcgctggagacaagccccagcagagcgaaatatcctgaagtagctttctttgccccaatttgcgcgccccctcacccggaatacaca

SEQ ID NO: 355645 - DNA, 122 bp, Homo sapiens
gcctctggtgggagccgtgtttaaatctgtcccctacaggcctgagtaggacagaaaggccgaggcagggagtgttcacacactctgctcgattcgggctgggacgtgggtcctcccctgcc

SEQ ID NO: 355646 - DNA, 122 bp, Homo sapiens
atttctcttttatttctagaaggattttctgtcagggtcaggaataggttatgacccatgcggtgagacttgagacccacacacagattttccttcctaaagcaccgactccactccttcaa

SEQ ID NO: 355647 - DNA, 122 bp, Homo sapiens
ggtgctgcgcactttttcacagaactgcacttcctttgtgggtctaatcacactgcagcccggaagacacgttcctgggcatttcctgttcttcaaacctggcaaaaatccgggaaccctaa

SEQ ID NO: 355648 - DNA, 122 bp, Homo sapiens
ggccgctcaggagagcctcgagggctgggagaagccgccggggcggttgggctggacgagcgagtttaggggccaaccgtctccacccgccggccgcgctgcagagcggtgctcccagggct

SEQ ID NO: 355649 - DNA, 122 bp, Homo sapiens
aattctttatagacttttggatttcaaagtttcttttagaggtcaaattgtttgtcctatcgaaatggcaaaactgtattcatttagaaagtaaaatagtatcatagaggataaggttggaa

SEQ ID NO: 355650 - DNA, 122 bp, Homo sapiens
gtgaccgtctggcattctggttcgcctcccccccggcccccgcacctcccacctggcccccgcacctcccccgggcacatgcagacttacttccgggcctcttgctgcaactcttcgatttg

SEQ ID NO: 355651 - DNA, 122 bp, Homo sapiens
ggggagctcagcagttccccgcgcggggcccaggcgtcggcggcagggcgggcccctcaccgccagcgtgccagccccgcccctacccaccagtgtgccagccccgcccttccccacgtcgc

SEQ ID NO: 355652 - DNA, 122 bp, Homo sapiens
gggctctggatccttaagtccttggcctctcgaacagggacatgggggacaccaagtcaacgtggcacatggaggggagaggtcagcagatcagatgccaagcagggagactcctctccaga

SEQ ID NO: 355653 - DNA, 122 bp, Homo sapiens
agaggtgccccagctgcgccttcccgccggggttggggttgaatggggggtggtgtgggccgagtctggggggcttgcacgctggagaggacggccgcggggggagggggctgcgccactgg

SEQ ID NO: 355654 - DNA, 122 bp, Homo sapiens
ggacgctgttggagtccggggtctggaagaggcgatccccgggaaagccagcttcagagccgggaagggtcggcaggggacctactgcaagagcccccaggttggggtagggagggggccca

SEQ ID NO: 355655 - DNA, 122 bp, Homo sapiens
cacactcgcctctgccttcgccccccacggcccactccccgacggcgcgtggccaggaggcgcctgtgagcacctgatccagctgccacctaattcatgatcaccgtttgacaggccgggaa

SEQ ID NO: 355656 - DNA, 122 bp, Homo sapiens
catgcgtgtgtgtgcatgtgtgtgtgtgcgcgtgcgtgcgcgtatgctgcactaacctgccgcttgctgactgaggtttttgtctgtacacaggcgagtgagctcagggggccacctgtgct

SEQ ID NO: 355657 - DNA, 122 bp, Homo sapiens
accagggctctcgggacgcagggcctgagagagacatgcgagacaccgggtcctgcctctcgcttaacatcccgcctgccggtggccataaaggtgccgacgcggcggatgtgtcctctgga

SEQ ID NO: 355658 - DNA, 122 bp, Homo sapiens
tgccaacaaacccatacaggacaaatttgtacttgcggccaggatccagggaggtgatgacggccgagcgctggggtccttccacgggcaccacctggggctgcccgtccctgtctttgtac

SEQ ID NO: 355659 - DNA, 122 bp, Homo sapiens
tctgtccacttttatcttggtcgcttttctctcctctacgtgtcccccggggaggcactacggatgattttctccaagctcaagagagacaaactgaactttaagcgccaggggccccatat

SEQ ID NO: 355660 - DNA, 122 bp, Homo sapiens
tcacacgcacattacgcagactcctcctcccagctccgggtgggcattggacagagaagccggcctgctagagccggggaaggggaacggcgaccggaggcctactgcgcaggcgtagcact

SEQ ID NO: 355661 - DNA, 122 bp, Homo sapiens
tcaaaccgaggctagcatccttccgcagccttcgaggcagccgtggggtaagtgaggcctcggggcaggaggaggtggtggccctagcctgcccagcggcgggtggcgggaccctgggctcg

SEQ ID NO: 355662 - DNA, 122 bp, Homo sapiens
gtctggacacagaacaacccggggcgagacacgtactggagaagactgtgctcctcaccccggcgctctgggaccttgcttcccagaagctggaaggaaccagccaggcatcccggcgagga

SEQ ID NO: 355663 - DNA, 122 bp, Homo sapiens
tccttccccttctctctttccaatgcagatccttcaaatcctaaaatgtcgaggcagccgcgtgctgtgggaccacgtcctcgccctctacacccgcattttgcagatgcgaacccaggcta

SEQ ID NO: 355664 - DNA, 122 bp, Homo sapiens
cccgctccgccccggcccgagcggaagcgcggatggggcgtggcccggtagctgtggccgcgcccccaccgattgcgcatttcgattggcgttagtggccgtccgtcagcacgccccctccg

SEQ ID NO: 355665 - DNA, 122 bp, Homo sapiens
tcctcaaacctcttccatcactaagcaagtccccactttagaaaagcatctggatgcccacgccaccaccctcccagccacctctgaagttgccaggcttcccaacattcttgtctgtggta

SEQ ID NO: 355666 - DNA, 122 bp, Homo sapiens
cctggagcgagttgcagcgtccaggctgcacctgaccactgacctagaaatgtgcctttgcgaagcggcagcgcatggagaaacagtcgctggtggccagggccagagtcgcgcaccgggta

SEQ ID NO: 355667 - DNA, 122 bp, Homo sapiens
atcagccagaggagcacggaacgcggaacccaggaacgcagacaaagccactgtggggcacggggcaacagacaaggagaggctccatcagctgaaaagcctcaggtgacgatgtcaggtcg

SEQ ID NO: 355668 - DNA, 122 bp, Homo sapiens
ctccctccaaaaacatggaggaaatcaagagggcagagccgggaaggaggctgcatccctcgcctgatggggagcactcctagcaggcacagggtaatcagaaaagtgctttggaatcacaa

SEQ ID NO: 355669 - DNA, 122 bp, Homo sapiens
ttccaggccagcgcgagttctgggtgggtgtgggctcagtgggcccgcactcgcagcggccggccggtgccgccagccctgggcagtgaggggctgagcacccggaccagcagctgcggagg

SEQ ID NO: 355670 - DNA, 122 bp, Homo sapiens
cacgcagtggcggaccagcaggtcgaagcactcggccgggacgcagggcgtgggggctggcgcgtccctgccccgcaggctccggggccctcgcctcatggtgccgacgccgccgcacaagc

SEQ ID NO: 355671 - DNA, 122 bp, Homo sapiens
ttccattcaaaatatttccattcaaaatgtggttcacagacccgccacatcagcaccatccgagagcttattagtaatgtgtagattctcatgtcccagccagacttacagaattggggtct

SEQ ID NO: 355672 - DNA, 122 bp, Homo sapiens
cccgaagtgctgggattacaggtgtgagccaccgtgcccggcctaagcctctcataaggccgtgctccctgccagaggccacccttgaagaagattccctgagacttaatgacctggggcac

SEQ ID NO: 355673 - DNA, 122 bp, Homo sapiens
caggttaataaataacccttaagagctgcactggatggtttaaggcccaacttttcaccacggattatttgcatgaccttgggtaagttacaagttacataacctctcatttcttcagtttt

SEQ ID NO: 355674 - DNA, 122 bp, Homo sapiens
acctgttatgtgatgggtcaggggatcaccgcatttctggcagcagcccatttcccaggacggggggctctctgcaccggacctcagttcccgccgcgcgttgggacatgccccgcatgggg

SEQ ID NO: 355675 - DNA, 122 bp, Homo sapiens
tttccagtttggggctgcacacggataaattgctgctcctaccgctccggtcgccgctgccgccctccagcactcttgcctgcaagggccacttctacttccgggtcactgtctggctccac

SEQ ID NO: 355676 - DNA, 122 bp, Homo sapiens
ttgttggccagtctcttcttgctagactgagtgcccttggattgggaagatcgcattgcccggcactaggtctgccccagaaggatgctcaatatcattgtacagaattaaactgaaagttt

SEQ ID NO: 355677 - DNA, 122 bp, Homo sapiens
agcgccttccaccctgcaggactagtgcccggcttccgctgcttctccgcctttcttctgcgtagatttaaggcctgatccggtcccaaaccccaaataaaagttgtgggtttgtttccaag

SEQ ID NO: 355678 - DNA, 122 bp, Homo sapiens
cccgccctagcgaccgttgctaaggggcgtggctcagccgcacggaacccgagcccccggcgacttataaatatttgcgtattcaaatgaggcctggctcccgttgctatggcgcccaggcc

SEQ ID NO: 355679 - DNA, 122 bp, Homo sapiens
ctgctccaatcgccggccgcgcccggaggccgcgccgccaggaggccgcggacgcgtgctcgcatgcctgtggtatttgctcagaggggcatgaccacttcgggcaagcctttaaatgtgag

SEQ ID NO: 355680 - DNA, 122 bp, Homo sapiens
tgtatgcccagtactgctgatgattaccccaagggcagccagggaggagagacaggcccccggtattttttaattgaaatgacagtggaaaaactgctggcaagattatctgagtcagctga

SEQ ID NO: 355681 - DNA, 122 bp, Homo sapiens
gtcctgagcggagcttgccgtccgctcataaccgcgtcgccaagtcaaccctcggcgactcggcagattatctccaagggtcaacacgccgcggccaggcaaccccctccagcctgccctcc

SEQ ID NO: 355682 - DNA, 122 bp, Homo sapiens
atgataaagggaaacatcttgctagctgggtagacaaggcacatccggttcaggatggcacgaacatctttacgaatgacatcctttggttctccaacctagtcgataaggaaaataatgat

SEQ ID NO: 355683 - DNA, 122 bp, Homo sapiens
ctgcacggcaatccgcaagcactaaccgtggttggtggctagaatatgagtaaggatcaccgggaggaagggattcctccctccaaatggacgactgaatcttctctcccccacgccccacc

SEQ ID NO: 355684 - DNA, 122 bp, Homo sapiens
acccgagtgcctgcggggaggcgggtgtggctcccccgggaggtgacagctggcggggcccgtaaggagctggtctgctccggctcccctctcgtagccggcgccctgggaccagcgcgtga

SEQ ID NO: 355685 - DNA, 122 bp, Homo sapiens
ggctttgaggggctactgcacttggccgtgaatatttgcagggcacaggagcaggcagatcggtggtttgggatcaagtttgacaaacggaggaaacaccagctaggtaggcaaagtaaaag

SEQ ID NO: 355686 - DNA, 122 bp, Homo sapiens
cccgcggcaccaggagcagcggcgagcagggtgggaggcggcccgctggggtccgggaagcggctgacgtggggcctcggccctgagcccacgcgagccgggagctgcagcgcgaacggcgt

SEQ ID NO: 355687 - DNA, 122 bp, Homo sapiens
atattcattttttcaatctgtattgtgatgcttcttaagccaatgtctgtaattctataccgacgtccggttaactcagtttataaagagtaaagaaccattatttatatagaatttgttgt

SEQ ID NO: 355688 - DNA, 122 bp, Homo sapiens
ctttttacagagcctcttagaacagatctctagaagaaggcttacaatgagtggcagagacgtcctttgttatctgatgtaattctttgcaaagaaggattgggaacggagtggctgtttaa

SEQ ID NO: 355689 - DNA, 122 bp, Homo sapiens
gcgcggctaccagtggcgaccgagtggcgccggcaggactgtgagttggtgtgcccaggccgggctgggctgatgcggacacgggaggcagcaggcactcgggggaaacgtttatacttcaa

SEQ ID NO: 355690 - DNA, 122 bp, Homo sapiens
ctcttttctacatcaccaatatatagggtggcttagatctgtatttccaagtcttactgtcgttccaagaattagtatcaactattagaatctcaaaaactcaactgcatactgattgcgct

SEQ ID NO: 355691 - DNA, 122 bp, Homo sapiens
caccttcccaatcggaaagattagcgtgtgggaagctgtaacaaaaaagcagggggagtgcgggggtcggcacacaaagaaaatctggactccagagtttaagcgacccttcactggctttt

SEQ ID NO: 355692 - DNA, 122 bp, Homo sapiens
tcttctcgatggtgcagctcatagcagcagcaccaccccagcccctgccgggctcagctacgcgactcgctcagatcttctgggagtctgtctcagcattacaggcgtcatttccgggcacg

SEQ ID NO: 355693 - DNA, 122 bp, Homo sapiens
ggattttcttctgtgggccaggcccaagtgcactgggtcgaccacagctcattgcagcctcgactctcaggctcataccttagcctcctgagtagcttggaccacaggtgggtgccaccacg

SEQ ID NO: 355694 - DNA, 122 bp, Homo sapiens
ggtggagagaagacagtttttttcaagcttgattgggcaaaactcatgtcactccggggacgtacaacctatgaatagtcggctgccgctcaaagagaacgaagaggcggggctagtgcgtg

SEQ ID NO: 355695 - DNA, 122 bp, Homo sapiens
ctttctatgtacccagtagtctcgagacccgtgggaggagccccctcaggccagaacccccggactggagcactcacagacatgcgctctccaggtctactcccacgtgtgccccggctcct

SEQ ID NO: 355696 - DNA, 122 bp, Homo sapiens
gctcagcaacatgaacatctctgaatatgaaagccattttttgtttgcgtccccctcccgcgcctcctctccctgccgatggggtccgcagccggctgcggggctcactcggtgatggtggg

SEQ ID NO: 355697 - DNA, 122 bp, Homo sapiens
ccaggtcttccactgagccgcaacagagaccggttagagcggaccctggggccaggaaatcggggactgggaggcaagctgcctgcgggatttggaatccaagctgcaccaccacccttacc

SEQ ID NO: 355698 - DNA, 122 bp, Homo sapiens
tcaaaggtcccggggtgcaccgtgtcctcaggggcagtcagagcccagtgctggacatcacggggtccccaagtgcagccctttcaagaaccctggacactggacatctcactgcaacccag

SEQ ID NO: 355699 - DNA, 122 bp, Homo sapiens
aagccccaggaagcagaggctgcatctggttttgtgtactagagggtccccccaaatacccggctcttctattaggcaccctcagaatttttgttgagcgaatgaatggggtgcaagaaagg

SEQ ID NO: 355700 - DNA, 122 bp, Homo sapiens
gggtccagcggggcgccagaagcaggtggcggcgctgcatgctgggaactgtagtctcgacggccccctgagaggaagtaggaggaatgttgcattctgggactcggagttccaaagtacag

SEQ ID NO: 355701 - DNA, 122 bp, Homo sapiens
gtggcctggctcccctcggccccgcgctgccagaccgcgccgctctgcgccttcaaagggcgtttgtgagcacctgtgcctggcctacggctgactcagcctggggtcttcggggtgtccca

SEQ ID NO: 355702 - DNA, 122 bp, Homo sapiens
gtcggagggcgttggccagggcagcaccgccctcccgactgtacctcctctcgctgccaacgctgtgttttgagggcctgaaaaagcaaaagaaaccagacatcaaccgcatgtttgctggt

SEQ ID NO: 355703 - DNA, 122 bp, Homo sapiens
gtggtgagagtagcgaggatgcgggtgaagaaaacctaagggccccaaattcaacataagcgaggtttgcgggctgtcagcaaggtacagacctacttcaaatcggggcgcagagcgttggg

SEQ ID NO: 355704 - DNA, 122 bp, Homo sapiens
caggacagtcgcagacctccaatgtgcctgtttgtcattgcaataggtgggagtcttgaccgggcactagctcaactgtgtcatttcttggtcccccactctcttttttccctgccaggctg

SEQ ID NO: 355705 - DNA, 122 bp, Homo sapiens
aaaaatggaagtgcatgcgaatagttctcggcggttcacaaagtccttttgcacccattacggcatgtgtccctcacacctttactttgaggtcaatactatcccctcctttctatagatga

SEQ ID NO: 355706 - DNA, 122 bp, Homo sapiens
agtgctgggcaccacaggcccatactccaatttgtagcctgactggaattgcagataccacgttcccactttagtttatggaaattgcaccccacactgccagtttacattcaactacatgt

SEQ ID NO: 355707 - DNA, 122 bp, Homo sapiens
gtgaataacccgaatgcatgtgcagcctctcgacaaactcgtgtccgcggctgtgggctacgttctcgccaatggctgtgtcttcggccaacacacctgagcttactgcattaatgttactg

SEQ ID NO: 355708 - DNA, 122 bp, Homo sapiens
aaaccccctcggtcgtgcccctcaagttactctgagaaaccacacgcagaagaggctgatcggagcccagcgttacctaaaccacgaaaggaggggaaagtgcacttcaaaatgcgaacttt

SEQ ID NO: 355709 - DNA, 122 bp, Homo sapiens
cctcccacctccccacccccgaagtagcgctcccgcctcgctccacccgcacacccccggcgcgcctcggaggcttatcaggctccccgcacgccccgcaagcttccttgggcgcccggcgc

SEQ ID NO: 355710 - DNA, 122 bp, Homo sapiens
cgccatgggcagcagggttcccgctgagctgggcccacctgaccagggcttccctcctgccgagccctcacctcgatgtgagccctgaagccccttgggctgggaggtgaggtgttcagagc

SEQ ID NO: 355711 - DNA, 122 bp, Homo sapiens
caatgagtgcatgaatacaagagtccccagaggaagtgcttgcctaccaagcattctactcgaatagctctctgctcccttccccagggacagcccaagggcctggctgagagtggaaaaga

SEQ ID NO: 355712 - DNA, 122 bp, Homo sapiens
cgcggacgctcacctgcagcttgggccgccgcgccaggtagggctggatgcagttggcgtcgccggagcacgggcgggtgtagacgatgccgtacatgacccagcaggtgtgcaccacgtag

SEQ ID NO: 355713 - DNA, 122 bp, Homo sapiens
ctgtgtaggagaggggaggggttgaggagcccaaacagcccatcttgagcacagaaggagcgatgctttttcttaccacgaagcgttgatataaaggaagatgctcatgttaagaaacacag

SEQ ID NO: 355714 - DNA, 122 bp, Homo sapiens
aaagaggcccctcctctgcctgcctcgatgggcccttgagctggcacacctgttgctgggcgtggacttcagcgctgggctcctggctcttctgctctgtgttcgccttaacacgtgtccac

SEQ ID NO: 355715 - DNA, 122 bp, Homo sapiens
gttaggctcgctcaaagcactttattggcagtgaaaccgcaagtaacccggagccctcggcgcgaccacggctagaatcagagcctaaggcgtgtgagctcagccatcccacgtctgtcttc

SEQ ID NO: 355716 - DNA, 122 bp, Homo sapiens
agctcatggagcgccaccattttgagatcctaccctgtccctatgaaggttaaggttacccgccccgcgccccccgcctcagaatgtgaagtaagcatgaagaattgttcatggactcttaa

SEQ ID NO: 355717 - DNA, 122 bp, Homo sapiens
ggaggcttccgttatcgggaaaagatgctgtagtgatcttttctgagtgtctcctacttgcgacaaggtggacttgggaggaaagccgtctgccaaagcctgaagcctccaaggtatagatt

SEQ ID NO: 355718 - DNA, 122 bp, Homo sapiens
ctccaacagtgcaggatgcaaacaatgacttctaattgagttgctgtatctatacctacccgccccttacacacacacacacacacacacacacacacacacacacacacactagaagtatg

SEQ ID NO: 355719 - DNA, 122 bp, Homo sapiens
ggctgagttttaattagctgttgttccttaaaggccttctcagttttgtttttaactgttcgaggttgaaaagtagttgccttttccaattgtgtaagtcgtttaatttgaaatctattgtc

SEQ ID NO: 355720 - DNA, 122 bp, Homo sapiens
tctcgctcagcctcgcaggctgggcacagggataagggcgaattactgatagcagctccccgtcgtcccctcctcgctgccctgccctgcctttctcctgcagtgctttggttccacgtttg

SEQ ID NO: 355721 - DNA, 122 bp, Homo sapiens
tgatttcagcgctcctcttgtggctttttcttgaggagcccaagggtcagggtcccaccccgcgatatgaggccagtggcactgccccctagcaggcgcgagatgccagagccctaggatgt

SEQ ID NO: 355722 - DNA, 122 bp, Homo sapiens
tgtgggcacaggtgcatcttccccactggagtgtgtgtggtgtagaccagggatactttacgctcctctccatattttgaggacctaggacagggcctagcatattctaggaacccaacgag

SEQ ID NO: 355723 - DNA, 122 bp, Homo sapiens
tttaaaaagatcgcccgaatttaagcctggattaggaacacgtgtttacagctctaatatcgataatttaagtggctcttaaaagagcctttggggttgggctttaagacgcttacttggca

SEQ ID NO: 355724 - DNA, 122 bp, Homo sapiens
gccgcctctgaggcccggggaccgagcgcccgtgtgcaggtgggctgggttgagggtaagcgggttgatgcaagtagtatctaaggtcccatcgtgtctcccatccagaatcacgcccagaa

SEQ ID NO: 355725 - DNA, 122 bp, Homo sapiens
ttcagtacaataggttctgagttctaaagacaaatgaattccttggctttttcctaagaacgtattcccctgctagagttctagtcaccacgtggttgacaagaaacagtatcctgatcccc

SEQ ID NO: 355726 - DNA, 122 bp, Homo sapiens
aagacccctggagacatggtagctaccgcgggtgaagcgggggcgggctcgagagggacccgggagtcgggagggatcggtgcagggcccggctcgaggtggcgttcaatagattgcaccta

SEQ ID NO: 355727 - DNA, 122 bp, Homo sapiens
atctcaccgcaaagagatctccaccccttcgagaagcacagagatcagacagaggagatgcggcccctttagggcgtcaaagggcaccgagatctctacatggtctaaacgcgcagagatct

SEQ ID NO: 355728 - DNA, 122 bp, Homo sapiens
tacctggagcaaatgagaaagacctcaatgcagccctagcaccctctgagttggaccatccgtgttggggctcaagtgccgaaccacagtgaactcagcgcccgggggacggggaagcactt

SEQ ID NO: 355729 - DNA, 122 bp, Homo sapiens
ccgcttcacaataacccgcggactatagtccttccagtacccactcccgtgagcaatcttcggggttccctctgggtgaagagccatattcatggtggtatttatgttatttcttaaccact

SEQ ID NO: 355730 - DNA, 122 bp, Homo sapiens
acggggtccttggcccggtagtgaaggtgacctgaggactgctgggcacgcactaggaaccggcaggccctagctgaggggagggaggagggaagtctcagggaactggattgctcgggggt

SEQ ID NO: 355731 - DNA, 122 bp, Homo sapiens
tggtgaggggcactggctctggcacaggtaccaggccccaaagcaggtgctgagtgccatcggagctgccgccactccatcccgcacgccctggggcctgtcccgggggcagaggggcaacg

SEQ ID NO: 355732 - DNA, 122 bp, Homo sapiens
agtgggtacatgggagcagcgcgatgccagggggacatccagtagagccgttgggggcagcgggcccctgaggtgtgttcccagggagaggcagccacctgtcaatgatggttcaagcacag

SEQ ID NO: 355733 - DNA, 122 bp, Homo sapiens
cgcgtgttcgtgcaggtggggaccccggggacaccaggggcggatgggggccggtggggacgggcgatccctgatggcgcctccgtcccccaggcggccttggcccgtccctccccgcgctg

SEQ ID NO: 355734 - DNA, 122 bp, Homo sapiens
ttggccgagagggggaagggctctgcggggctgggaggggctgcgtgagaggctcgagaacgtcgcacctcgtctgggccccccgccagagtaagaatcttcagaagcctggttagccaggg

SEQ ID NO: 355735 - DNA, 122 bp, Homo sapiens
cacggggagaagcagggttctcaggacggcacggggagaagcagcgttctcaggaccgcacggggagaagctcgttctcaggaccgcacggggagaaggagcgttctcaggacgcacgggga

SEQ ID NO: 355736 - DNA, 122 bp, Homo sapiens
caaacccgttaacacaggcagggaccccagcgtccagccccgagtctcgacagtctgccccggtgctgcatccagaaggttaccccaaagctgagcacacgccctccaaggtgaggccgacg

SEQ ID NO: 355737 - DNA, 122 bp, Homo sapiens
ttaggaaggggaattaggacacagacaggtacgcagggcccacgatgtgaggaagcaccccggagaggcctcgggagaagcagccttgagcctccagcctccagagctggaagaaagtagat

SEQ ID NO: 355738 - DNA, 122 bp, Homo sapiens
tttcctaaacatcatctcccagcgggatccgggcctgtcgtgtgggtagttgtggaggagcggggggcgcttcagccgggccgcctcctgcagcgccaagagggcttcaggtctcctttggc

SEQ ID NO: 355739 - DNA, 122 bp, Homo sapiens
ttgcatccttggagagagctgagagctggaggtgagctgggctcgcggtcgcccctctcgcgcgccctctttgagaaccacggcttccaacctccctggaaatggggggaacatggccgagg

SEQ ID NO: 355740 - DNA, 122 bp, Homo sapiens
ccgcacggggccgtgcggaggtcacgggagctgcagtgtgggccgtggatggctccctcccgtaccaaaggccggcgtgaagacaagaacacaggcaggcagacggcagtgaaaagcagcca

SEQ ID NO: 355741 - DNA, 122 bp, Homo sapiens
agcctcccgtcccacgtaaataattacaaacagagcacatgacccctggcggtttctgaacgcgcctggcaacagctccaccacctgctgtttggaaagtcagattcacagaagctacaatt

SEQ ID NO: 355742 - DNA, 122 bp, Homo sapiens
tttgttctctattttcaaagcctaacttccttgttctttgtacctccttacccctagttacggtaaacaaccttcccgcgggtcctaatctataactcacatctgttcccttggataccctc

SEQ ID NO: 355743 - DNA, 122 bp, Homo sapiens
acatgtgtggagtcccagcaagtggtccattctatattaggcaaatattagagacggcaacgcagccaggccctccctgccaggaagtgtggaaaccctgaggaatcagcacccgctgtcac

SEQ ID NO: 355744 - DNA, 122 bp, Homo sapiens
ctgcgttacaatcaggccctgcacgtcagaaggtggagccgggacgggaagcactcggtgcgcagcctctgtaaaccagaaccagtccggggctgggggtccctgctcaggggacagttact

SEQ ID NO: 355745 - DNA, 122 bp, Homo sapiens
atgagccactgcacctggccaaaaaaaatattaaagaaagaacgaaattggtaatcacagcgcatctcaaggcagggaaactaaagggctgaggccagatggaaaatgtacttatcactgtg

SEQ ID NO: 355746 - DNA, 122 bp, Homo sapiens
tttgggcaggaagaaggcattccaaccggcttctttcgctcttgccaggttcaaacatggcgggccgcagccggcccttcccgtacactcggcttgctttcccacaacccccgccaatcttt

SEQ ID NO: 355747 - DNA, 122 bp, Homo sapiens
gtggcggcgcccagggaaccggcggaggcgatgaccgtgacggctgggttgggaccggaacgccgaagcggggttgggggtggcagaaaagcatctgctttgtaagacctacacgaggtgca

SEQ ID NO: 355748 - DNA, 122 bp, Homo sapiens
actgggtgtcaggtcctgcctctagggaggggaccgcgggtcaagggtggagccctgggccgcataaggaaggaactagtgcggaggtccggggagcggccgcgcgttcgggagcttcggcc

SEQ ID NO: 355749 - DNA, 122 bp, Homo sapiens
gctccgacggcgcggccaggagccccggggaccccgcgcctggggctcgtctggctggagcgcgtcctcgtttaccaacgggcgaagatcctccccaagggttaagaatggtccctgtgttc

SEQ ID NO: 355750 - DNA, 122 bp, Homo sapiens
gtctccttaaacctgcttctcgtaattctagcactaattgttccagtggacgggggacctcgatggcaggttttaaaccccagggctgcagggcaggggggtgttccgtagccacccacggg

SEQ ID NO: 355751 - DNA, 122 bp, Homo sapiens
ctgcatttcaagcagtgggcgcagctagcagggtggagtgaggcgccactgcgctgctctcggtaactggttccaccgggcggccgcggacgggcggtgcccccgcctgcgccgcctggtgc

SEQ ID NO: 355752 - DNA, 122 bp, Homo sapiens
gaaactctgtctcaaaaaaacacacatacacacacacgtttgggaccatccctatttcctcgctctgcctaagctgcgtcacaccattcatcactaggtgacatcctactacagataccttg

SEQ ID NO: 355753 - DNA, 122 bp, Homo sapiens
tgcctcctgcgtcggagagaagctcgctctccgctcatgcagggcttccctgtggtctcacgctggcgcccggtccagcgcgctggagttgttggcaggcggcgggggttgggacgggggcg

SEQ ID NO: 355754 - DNA, 122 bp, Homo sapiens
gggagcgagctcggcgggcgcggcacttgccgcagcttcttgggggcctcaccctgcgggcggccctcggacctcggtgagccccgcggtccagccctcccagcagacacccctgcagccga

SEQ ID NO: 355755 - DNA, 122 bp, Homo sapiens
gtgcggtcctggagggggcgtggactacaactcccagcagcctcttgggcctggggcctgcgaatgggtcactgggcagctggggatgtaaacccaacagaaaggtatgtgaccagctcttc

SEQ ID NO: 355756 - DNA, 122 bp, Homo sapiens
gttactgtcagtgcatactgtcacgtccagagagcatcatcaccctaaacccaggttctccgaaaggtgatgtgttgaaggggagggaactatggaataaaaagttgtgtttcactgtgacg

SEQ ID NO: 355757 - DNA, 122 bp, Homo sapiens
tagatgtcctcccggctggcctcatacttctgttgcatgcgctcctccaggaagtagatgcgcagcttgaggctgaagttctccttcttcaggtcattgaggtgctgggacagagtgcgata

SEQ ID NO: 355758 - DNA, 122 bp, Homo sapiens
attatttacacaccactttaaattaatttgtagatatcctgacattcatccatgactaaacgagaatgttttaaataacagtatacttgcttatattgcaacaataatattattcataacaa

SEQ ID NO: 355759 - DNA, 122 bp, Homo sapiens
ctcctcttcctctctggtctcctccctcctccgggctgggttgcaaatggcttcgttccccgagaccgatttccagatctgcttgctgtgcaaggagatgtgcggctcgccggcgccgctct

SEQ ID NO: 355760 - DNA, 122 bp, Homo sapiens
cggaaacccgcagagacttctcaagtcagcaggaacttggaaaccgctgttccctccaaacggcttcaaacactcgcgctccttcctttacccaacctaattttaatttgccctctctatag

SEQ ID NO: 355761 - DNA, 122 bp, Homo sapiens
ttcaagtgattctcgtgcctcaggctcctgagtagctgggattacaggcatgcatcaccacgcccagctaattatatttttagtagagaccgggttttgccatattggccaggctggtctta

SEQ ID NO: 355762 - DNA, 122 bp, Homo sapiens
cagcaaggaagagggggacaggttgcagtggccctattaagctaacacaaacaacttggacgagggagagcctcagcattttgagaaagccagcttctttgagactttatttatagttcaag

SEQ ID NO: 355763 - DNA, 122 bp, Homo sapiens
acctcgcgctcctggatccactgttccaggtcatccagctcgcggcggagctggcacagccggaggtgctcctgcaggcgctcccgccgctctccagccagctccttcaggccggcatacag

SEQ ID NO: 355764 - DNA, 122 bp, Homo sapiens
gaagggctgcagaggcaggcccatgcacacagagggagaggccggatggcagagcgtgcacggccgaccccaggatgcaacagcaccgaatgccagtgccacagagagcaggctgtgccaca

SEQ ID NO: 355765 - DNA, 122 bp, Homo sapiens
actttaaaggtcattgagtccaatcccctcatttttctgatggaagtgtggaggcctagacgtagccagtaattttctggaggccacagagcttgttaattatgaagatggaactcgaacta

SEQ ID NO: 355766 - DNA, 122 bp, Homo sapiens
acacccacccccaaaattatgactggttgctttgaagcaggtgatatttaacagcatccccggcctctacctggccagtagcacctccctccccaagttgtgaaagcaaaccagaaatgtcc

SEQ ID NO: 355767 - DNA, 122 bp, Homo sapiens
ggctctgggcggcggggcgtggaggagccctggggcgggattgtgactgggcgcttcctgcggggttggcggcccggacgccggtgccacccgagccacccagcgatgctctgggcccccta

SEQ ID NO: 355768 - DNA, 122 bp, Homo sapiens
attcttcattcttctatacccctcaggatagatgtagtcccttttcttcttgcacttacccggtcgtcataaattcttgtcatctgccgtgctccataacccctctaaaatgtgagcactca

SEQ ID NO: 355769 - DNA, 122 bp, Homo sapiens
gcgggacttcatgggcgccatgtacggggatcccaccctctgtcccacctgggccactgacgctctggcctctgtgggaatcacactgggctgacctggcattgggagagggagggaggaag

SEQ ID NO: 355770 - DNA, 122 bp, Homo sapiens
ccctactgcagttcaaggagggtaaaaacatcattatagtgaattttaatgcagaaaatacgtgggttttgcacaaaactctgaaactcagaatgttaaggtgaaatttccaagcatgcagc

SEQ ID NO: 355771 - DNA, 122 bp, Homo sapiens
atatggataggtaagcaaggatgactacatatgaagaaagctggggaaaaaagataaatacggaaaaaatgaaaccgatcccagagaagacagagatcataactcatggagctaaagcagaa

SEQ ID NO: 355772 - DNA, 122 bp, Homo sapiens
ttgtatttcgagataaactttatagatttagagcaggacacacatttctggacttgagaacgctgtatctggcttggaataaaagcccacatttcatctagaggtagaatgtatgtcattct

SEQ ID NO: 355773 - DNA, 122 bp, Homo sapiens
gcagaatttttatcttcccttttgcaaaagttgcagagaaagttgtcaactccgctagctcgctcgaggctggggctctggcggcggccacaggctcgccgtccccaactcctcccccgccg

SEQ ID NO: 355774 - DNA, 122 bp, Homo sapiens
tacagtggtgagtgtgtgtgtggcgtggcgtgcccgtccccagggctggctggtgccccacgcggggcctgtcatgtgaagctcgtgtcctgactttgtcttaagtgcattcacgcacttac

SEQ ID NO: 355775 - DNA, 122 bp, Homo sapiens
gggcccggcggagcccgctattccgtcagtggcagtggatctgtgggaggggcctctactcgtcttctgtgatttcagccttacaatgctaggggtctgcctcacacagtcaggggcctacc

SEQ ID NO: 355776 - DNA, 122 bp, Homo sapiens
tcggcctgtgacgcctcgctggagcggcggctggagaagcagggcgagatccctgaggagcggcggctgctcaggtaggccgagctgatggtgctggcgctgctgtcccttctgttgagcat

SEQ ID NO: 355777 - DNA, 122 bp, Homo sapiens
ggtgacccgcccgcctcggcctcccaaagtgctgggattacaggcgtgagggaccacgcccggccaggaattgctttttaatgaccctaaggagagcctccctcatggtctgtcctaatgac

SEQ ID NO: 355778 - DNA, 122 bp, Homo sapiens
tctcggttttttggaagaggcagcgttgcctcccatttattcagtcccctcacagcagcgcggctgtagcgcgccgcagaagagcgccccaacgctgccggcccctgttttgtttcttcttt

SEQ ID NO: 355779 - DNA, 122 bp, Homo sapiens
aaggtttctagagtccagagggcctcattgacatgtaaacgagggtccctataaaggcggcgctgcctcgcactggtgcatggactgcaacatgggcacggagcctgctgcccggggcagcc

SEQ ID NO: 355780 - DNA, 122 bp, Homo sapiens
ggcttgtgtccaggtttctcgcagctcatgaggaactggccttgccttctgtgtccttaccggttttttggttggttggttggttggttggttggttggtttggagacggagtcttgctctg

SEQ ID NO: 355781 - DNA, 122 bp, Homo sapiens
catgacatccgttggaactttgaaaagttcctggtggggcctgatggaatccctgtcatgcgctggtcccaccgggctacggtcagctcagtcaagacagacatcctggcgtacttgaagca

SEQ ID NO: 355782 - DNA, 122 bp, Homo sapiens
gagtactttatccagttgagcagtaaatgtttctaccacttcctgagagaggcaattccacgatctaataatggctattgccaggaatctgtttattcctggtggtcagctgacactttgtc

SEQ ID NO: 355783 - DNA, 122 bp, Homo sapiens
tggctcgttcatgccttcaactcatgcattcatgtgtgaatgcattcattccctccttggcgcaaacattgattcaatggttcattcatttcctggcctgctcattcatgagtagttgtttg

SEQ ID NO: 355784 - DNA, 122 bp, Homo sapiens
taacggagagatcccgggtactcgggagatagagcaggtgggcatggcaaacggtgccaccgcaccagacgcgtacagcaaaccttcttcctctttgcttttttaggactctctagataccc

SEQ ID NO: 355785 - DNA, 122 bp, Homo sapiens
agcaattctcctgtctcagcctcctgagtagctgggaatacaggcacccgccactacgcccggcgtaagtgcatttcctgcatttaatagatggcgaaactgaggctccggaaggaaggtta

SEQ ID NO: 355786 - DNA, 122 bp, Homo sapiens
cgtgggggcagcatgctggctgcccggcccctgcctgggttctgagttgctgcggtgtcgcgggagctgaggccgcccagggcgtggagcgacttctgcgtctcgtcccagggtcctgtgct

SEQ ID NO: 355787 - DNA, 122 bp, Homo sapiens
cactgaagccgggcgcagggtctgggacgcagttgggagtgcaaagggctggctgagagccgcaggagcagcaggctgtggcccaggcctcctgggtgacaggccctgtctggcggggaaga

SEQ ID NO: 355788 - DNA, 122 bp, Homo sapiens
ataattaatatagcacgagttgatatgggcactgggcactgaactcgatcgtgtagcacacgtgggccgggcgcctggcccagagaggatgctcaggagggcagctgcaggagcgagcacgc

SEQ ID NO: 355789 - DNA, 122 bp, Homo sapiens
tgagcatcttcccatccaacatctggaaaacctggacccttggaggcccagccaagagcgcggtggctgaggggaaggaccatggcccgaagcacacagccctgaagggcctgttcagggca

SEQ ID NO: 355790 - DNA, 122 bp, Homo sapiens
aaagaatttagaatagtttctctagaagcttataacttaatcaaaagtcgtggacaaagtcgagcaataattttagcaagttatgagacgttagtaaaatatatgtagcttggaaaataatg

SEQ ID NO: 355791 - DNA, 122 bp, Homo sapiens
cctgggagttttacagactggtgatgactttttgtggcatctcaggaaagaacataacttcgtggacgtccttagtcagaatctactcagtgtatctactcagtataggctcacatgagccc

SEQ ID NO: 355792 - DNA, 122 bp, Homo sapiens
gtgcggtgggtttgggttcaggacgtgccccctccgctggcggccccaaagcagggcggccgtgggtacactcactgcccggacagctcattgaaagctgccttgactcagagaagacagca

SEQ ID NO: 355793 - DNA, 122 bp, Homo sapiens
agctggagtctagggggaggtgcaggcagagcctctgccccaggctgaccggggaaggcccgcagccctcttgagctaacacgaatttgattggtttcctttctcactttcctcccctgtaa

SEQ ID NO: 355794 - DNA, 122 bp, Homo sapiens
gctacgcttcctcgacggattggaattctcagccaatcaacgaaaggaatagggcgagatcgattagtgaaaggagaccctttaatcccttagaggcggactctcccacttggctccagttc

SEQ ID NO: 355795 - DNA, 122 bp, Homo sapiens
aagacggggcacgcgtgggtgtgaattgccccctcccagcaattcacaggcaattccaggcgcgtcctggagcgggctggggctgtgggcctgatgtgtgggcctgctgtgcctcggtctcc

SEQ ID NO: 355796 - DNA, 122 bp, Homo sapiens
ctcctgtggcgagagctgctctgcttccttgggttctacatggcgctgagtgctgcctaccggtgaggctgccctgaggtgctcatgttctagcggagggggggcagctattatatatatat

SEQ ID NO: 355797 - DNA, 122 bp, Homo sapiens
tcaaggctccgccccatttcccatctttcttttcagtccttgcgcaccggggaacaaggtcgtgaaaaaaaaggtcttggtgaggtgccgccatttcatctgtcctcattctctgcgccttt

SEQ ID NO: 355798 - DNA, 122 bp, Homo sapiens
ggtgacagagtccagcggagttgtgggggccgggggcgccatgggagccactggcgacgccgagcagccgcggggacctagcggggccgagaggggcggcttggagctgggggatgcgggcg

SEQ ID NO: 355799 - DNA, 122 bp, Homo sapiens
tggacgcccagagaatcccttcggagaccaggtcagggtcactgagcttgcccagcagggcgccgcctcggacgccgccccgcctctcaccttgccagcgccgcgctcgggccgcgaaggtg

SEQ ID NO: 355800 - DNA, 122 bp, Homo sapiens
agcgcttcctcttcctcctactcaccatcagcctcctggttatggtacaggtaagagcaacgcctggcaccactgccaggactccccaaagttgcttggcatggagggagggcatacaggat

SEQ ID NO: 355801 - DNA, 122 bp, Homo sapiens
aggacgaggggcagatgccccttggggagaggcgggcgctctgtgggcgacgaggcggggcggatccctggggggagctttaagccgactctactggagaagcagtctaccctagagggagg

SEQ ID NO: 355802 - DNA, 122 bp, Homo sapiens
accaagttggccaggctgatctcaactcctaaaagtgatgggattacaggggtgagccaccgccccccaagaacccttttatcaaccattttaactgcactattctcttcagttcccttgac

SEQ ID NO: 355803 - DNA, 122 bp, Homo sapiens
cgcacctggccgagtcgactgatccgctggcgaaccaagtagatgttgggcgccatactgcgtgcgccgcgcccccttccctgcggttcagcccctggcactcggtcttcccctgcgcacgc

SEQ ID NO: 355804 - DNA, 122 bp, Homo sapiens
gatccctcagaaaacaatccttccctcggttgctagggacattgcggagttgcgggactacgtttcccacgtcgccccacgccacgcccccttggcctcgccggaaagacgtcccaggagcc

SEQ ID NO: 355805 - DNA, 122 bp, Homo sapiens
gctcgcgctcattggccgggagcagcgcggtgggcgggacggagctcggcggtctgcgctcggttgctagccgtttgctcccgctttcagttgctttgctgttagcctgttggaccttcgag

SEQ ID NO: 355806 - DNA, 122 bp, Homo sapiens
ctcctcaccttccctcggcaagtcagcctggagccttcctgtctccctccccgcctgggacggagatgcagccttggtttgcttggtcttgaagatgtttaaggtttttccgtggtaactgg

SEQ ID NO: 355807 - DNA, 122 bp, Homo sapiens
gtccctctgagcagaggccacaggcctcaccatgatttcagggtctccatggggctgcctcgggagctccacttccccaaaaggacccctggccaagtcgacagatgggctgtgtctctgtc

SEQ ID NO: 355808 - DNA, 122 bp, Homo sapiens
cagaggagaggagaggcctggggaccctgaccctcatctcccatcacctccgctgggctgcgtgaccctgagttacacactaatgattatgcccgtcttgcagggatgttggcacctactca

SEQ ID NO: 355809 - DNA, 122 bp, Homo sapiens
attgtccctactgggattctctcccacctttgtcgtgggatgtttacgaagcttgtttaccgtggcatgtgactgctggaaccccgaatggtcctcgccaggggatggctacccagatcgtg

SEQ ID NO: 355810 - DNA, 122 bp, Homo sapiens
gcactacagaaaagaaactgaacctccctctataaacaaagctaaggctgaacacaaaaccgctaagcactccctaaccttgtcactttggggaggccctgagctcattatgctcccctcct

SEQ ID NO: 355811 - DNA, 122 bp, Homo sapiens
catgcccctcagccctcttctggccagatccagcctcaccccatcaccattgctattcagcggtcacagtctccactgacacctgctggggtacttgccttttaacaaggcatccaaaataa

SEQ ID NO: 355812 - DNA, 122 bp, Homo sapiens
ccgagggcgggtgcagctgatgcacctggctcactgcatgcacgtgtgcgcgggggtaggcgcgcgccgcggcggcccgtgctccgccagcgctcggacacggcccatccctccgagcccca

SEQ ID NO: 355813 - DNA, 122 bp, Homo sapiens
tatctccctcttcccattcgacagctgcaaggtcgtgcagcaatctacctctttcaagaacgtttttacattattcccacgtgtgggccttgaggagatgaggaaccagcagcctggagcca

SEQ ID NO: 355814 - DNA, 122 bp, Homo sapiens
caatcagacacagtcctatactcagatgcgcacagccagacctcgcaatgacacaaagcacgcactcagaccacactgtcatatcatcagccattcactagacacccacaggacagacccac

SEQ ID NO: 355815 - DNA, 122 bp, Homo sapiens
gtccctgccgtgtgcgcgcggctttccgcacccttctgagcgggatatgtgggcctggtgcgtctgggtccccgaatccctagacccccgcactctggttctggccgcccgctggcactaag

SEQ ID NO: 355816 - DNA, 122 bp, Homo sapiens
ccctcctgacgtcatgggaccttccggccttttcccgtgctagggtgggactacgtgtcccggcatgccctgcgtcctgccactgactgtgaggcatgctgggatttgtagtcttcgaggtg

SEQ ID NO: 355817 - DNA, 122 bp, Homo sapiens
aaagaattcagggtgagtccgcatagcaaagcaaaagcaagtttattaagtactttactccgtagacagagtagggcgttcccgaaggtaagaggacgaacgcgtccatcctaggtacaatg

SEQ ID NO: 355818 - DNA, 122 bp, Homo sapiens
gcgcggcccccacgccagacggccctccctcggggcgcgctcgcagacggaggtaagagccgcaggagcgaacaatgtgcctctgtgcccagcttcggagacctgtttgctttgcgcctcca

SEQ ID NO: 355819 - DNA, 122 bp, Homo sapiens
ggcttagggccggggcggggcccaggaagactcagcagcgggtgggtgagggtctaaaggcggcaattccgggccgggtgcggtggctcacgcctgtaatcccagcactttggtaggccgag

SEQ ID NO: 355820 - DNA, 122 bp, Homo sapiens
tagttgtgggtgaatgtgtggaggagccagctggctttggacaggtcctgcggcacagtccgtggcttccgagggaaaagggcctcgcggtcgtcgtccggcccctcccaggtcgggatgcc

SEQ ID NO: 355821 - DNA, 122 bp, Homo sapiens
gtggcctcggcatgttcggtcagtagcgcctgggccctgggactgcaggggtcaaggtgtcggggtgctaagtgcggagtaacggtggtgggggtatagtaggggagagaacagtagaggca

SEQ ID NO: 355822 - DNA, 122 bp, Homo sapiens
ctttccctggtgtgattccgtcctgcgcggttgttctctggagcagcgttcttttatctccgtccgccttctctcctacctaagtgcgtgccgccacccgatggaagattcgatggacatgg

SEQ ID NO: 355823 - DNA, 122 bp, Homo sapiens
agcgttcatcggcgctatggttactgttgtgactctgggagtaaaggccaggccagagaccggaatctctgcctctgcccccagacactagggagcaacaggaaactgaggcccaggggcca

SEQ ID NO: 355824 - DNA, 122 bp, Homo sapiens
cttggtgagtggggagccttccctaagggctaggacacctggaccaagtttcatcctgggcgtatggtgtgctgctcctcttccccattcccaggtgcctccacccctgaaccatgccagag

SEQ ID NO: 355825 - DNA, 122 bp, Homo sapiens
attttttagacagcaaatacaaatggaagttccagtatgttctgcccgcactccagtgggcggtcttgtgcacagcccacttgggaggcctcggcgctcaggtgtggtaagagctgggcggt

SEQ ID NO: 355826 - DNA, 122 bp, Homo sapiens
actttggggacctctgagactggcctgcacacgtttcggggcgcgctcttccacaatgcacgggaaagaagaggaatgtcaaaaatgcttggcaatcccatggttgtaatagagggtgtaag

SEQ ID NO: 355827 - DNA, 122 bp, Homo sapiens
gaagtggttgtgtgaaggctggaattaaggacgtgagagacagtgactgtgtgaaggagacgcagcaagctccggagcctgcctgagtgttggcagataacggggacatgagatgtgtccat

SEQ ID NO: 355828 - DNA, 122 bp, Homo sapiens
ccctgtcgccacctctgatatttccaccgcctgcacctcagaagcggttgctgctgctgccgcggttgaaaccgccacctccaccacctcgatcaaagcctccacgacctccgcccggaaga

SEQ ID NO: 355829 - DNA, 122 bp, Homo sapiens
caggatgaggcagataaggatctgtgctggagaacaggccatctgtgatctggaacgaagcgtcccctagattctatgaggcaattgtgcaaactcccgctcctcgctcttcattcagattc

SEQ ID NO: 355830 - DNA, 122 bp, Homo sapiens
cgacttctccatcctggacgaggcgcaagtgctggcgagccagatgcggaggctggcggccgaggagctgggggtcgtcaccatgcaggtaagtggcccccgagctggccagacatcccgcc

SEQ ID NO: 355831 - DNA, 122 bp, Homo sapiens
aatgaaactcgacaccggatgactagcgagctaggggagaggaagaaacgcggacggccgcgtgtgccctacaggagatcaaagtctgggggaagaggtgcaacctcaccgggccttggtaa

SEQ ID NO: 355832 - DNA, 122 bp, Homo sapiens
agtaggaaaggggagtctgctccatgcactggagctactgtggcttccaaggtctctaggcgtgacgtcacaatcctactaagctggaatggacagagagcagacacaagcacatgggaggt

SEQ ID NO: 355833 - DNA, 122 bp, Homo sapiens
tgctgctgcaaaatatccatcttacatccacaagatggtgatctggggcgccaacgcctacgtcactgacgaagacagcatgatatatgagggtaggttctgcgaaggggagatgccgggac

SEQ ID NO: 355834 - DNA, 122 bp, Homo sapiens
cctctccaagacgctattacggcagtaaatcgtatatgttcttatattttcttgctaagtcgaaatagttccaagatgaattgaaggctatttaagtaaattaaacacttaaaatgagctga

SEQ ID NO: 355835 - DNA, 122 bp, Homo sapiens
gtccgatcatactcaccatgtgacgatctagatgcctttcctggagactcctggctggctcgccaaaatgtaacacgtaaggttcttgcctagccacaccaaagaattggtgtggcagctga

SEQ ID NO: 355836 - DNA, 122 bp, Homo sapiens
ctatcaccatagcaacaggaagtctaattgatggcagatgttgagccactttaaaagccacgccaactgaatgccaagctgatgctgtaaacctctctcctctcccgcggctagactaatca

SEQ ID NO: 355837 - DNA, 122 bp, Homo sapiens
gcgcgcggccggggaggaggagctgtgaaaatggaacggggccggcgacgctggagggagcgctccgaaggagcgcggaagaaagccctgcttagctacagccaatcaggagcgcccgtgcg

SEQ ID NO: 355838 - DNA, 122 bp, Homo sapiens
ttcctccatttgtctaaaatgatagctcttgtttctgcaacaggacttcagggtttccaacggaagatagggttaatccattctttataactctgcatttgtaccaaagcccccagctgtca

SEQ ID NO: 355839 - DNA, 122 bp, Homo sapiens
ctgctgcacatagtacaggaacggaatccaggcgcgcacacctggctttaccagaacgcacgttctgttcatcaagtgagaggctggcacatcagcgaggctttggtttgatgtttttgaat

SEQ ID NO: 355840 - DNA, 122 bp, Homo sapiens
cactccccactggctccggggcctccttccccatcctgcggctccagctggcccgggagtcgaggagaactgcccaggttccctaagaaccaaagtgctgggagctagagtggtgccaccag

SEQ ID NO: 355841 - DNA, 122 bp, Homo sapiens
atggggaattgaggtgtctgatttgttagttgaaggttatggtaattttttttgtttgctcgtactcattttacaagtggttaaaactttggtgatcgacatgaagacccattttcttctct

SEQ ID NO: 355842 - DNA, 122 bp, Homo sapiens
tcttcgtgacgtcagcacgccgggcgcggtaggctataaaagcctagtggccattgtgttcgttgctcttatcggttcccatcccagttgttgatcttatgcaagacgctgcacgaccccgc

SEQ ID NO: 355843 - DNA, 122 bp, Homo sapiens
ccctcccctctctccatttgcacctgggagctcaggccaagaatgaatgcatctgttttccgcagtgttattgatccccgtggtgggaagtgaactctccctttcctaagcctgctggagtt

SEQ ID NO: 355844 - DNA, 122 bp, Homo sapiens
gtcgggggccgtggtgcaatggctcaaggagggcgtggagctgcatgcgggccccaagtacgagatgcggagccagggggccacgcgggagctgctgatccaccaactggaggccaaggaca

SEQ ID NO: 355845 - DNA, 122 bp, Homo sapiens
gatacacccataggcacacatatgacatgcacacacacataggcacacacatgaagtgcgcgcgcgcgcacacacacacacacacacacacacacacaggaactacgggaggaccgaggaag

SEQ ID NO: 355846 - DNA, 122 bp, Homo sapiens
acaagaggcactgcgggtctcttacctatagttacgaagcaatggactcccttattacttcgtttcccaaatagggggtgggacacacaaccgagggagtatgaggaaaacaacttgcgggt

SEQ ID NO: 355847 - DNA, 122 bp, Homo sapiens
ctctaggtccaatatccgcagcacgccacacaaacatctctcagctcagccacgcagggccgatgcctgcgcgacccacactcagggaggcgcccgcctcagggcctcacaggtgggaccgc

SEQ ID NO: 355848 - DNA, 122 bp, Homo sapiens
gagctctgctgatcccagaaggacgtcttcagtcctgacccctcgtgctggctccgaactcgcgtttctgactcccagcagcactggcagccccttgaccttgtgccttgagatcacgtccc

SEQ ID NO: 355849 - DNA, 122 bp, Homo sapiens
gggggtttctcgacagctctctggtgtctcttaccccctaggttttcccagccttctcgccggattgccttggaaagctcttggtgtggtggccactggggtttgctccagcagagataatg

SEQ ID NO: 355850 - DNA, 122 bp, Homo sapiens
cctccgcccgccagccgctcccgcattaaaatttcatgggcgctgcagcagctacaaagacgacgccggctgcgctcgcgggaccagagggagggaggctgcggacgagtgcggggaggagt

SEQ ID NO: 355851 - DNA, 122 bp, Homo sapiens
actggttctattatcacgcctctccagccctttggagtcccggcctccagcttttgaaaccgtccccggggcaacagagtcccttgctcagatgtcgttcggtatctgggactgggaggggt

SEQ ID NO: 355852 - DNA, 122 bp, Homo sapiens
atgtatgtgggactggcagctcattctccatggcctgcagtgtggcgcagtcagggcgctcggatggcagaagggcaggcagatgctaggagggaagaggcagaagtgaatgttttgacaga

SEQ ID NO: 355853 - DNA, 122 bp, Homo sapiens
gacaagttggccagcagttggccccagattgctgggatgagtgtcggggctgttaacatgcggcccacggccagcgcggccaaagtcagctgtaagtcagagccggccgggaagcagtccga

SEQ ID NO: 355854 - DNA, 122 bp, Homo sapiens
tccccgggctccagcaggtccccttcttctttgctgggcttgtggtccctccgcagtgagcggatcttctccccggtcatcgccgccgccaggggcaagggggggaatcgggaggctcaccg

SEQ ID NO: 355855 - DNA, 122 bp, Homo sapiens
tagtaaaaacagctgaaactcttaggctgcagctttgtccccaccccagcaccctggggtcgaagttggtgactgctgccattcagaggagcaaagttccagcaggaaaaccttgcagattc

SEQ ID NO: 355856 - DNA, 122 bp, Homo sapiens
agacgacactataaacgcgggcgagacatcagggaccgggaaacagaaggacgcgcgtttcgagcagctgcccagtgggccacaagccccgccacgccacagcctcttcccctcagcacgca

SEQ ID NO: 355857 - DNA, 122 bp, Homo sapiens
actgtagagattcggacacatttcagcacctagaggccgggcaagcatagcatcatacagcgaaggcctgggggaattagtctaagggtttgtatatgcgtttatataaatatatatggaag

SEQ ID NO: 355858 - DNA, 122 bp, Homo sapiens
catcagtcacacctgaacttgtgctacgttaatgcatgacgtaaggtgtggctcctattccggatgaaactgctcacgtaaagaccaagggataagaggactggaactatcagccccaccca

SEQ ID NO: 355859 - DNA, 122 bp, Homo sapiens
ggatgctagaaggttgcaggctgccctcactggggctttccttgaggtccatcgggaccccgtgcagttccgcaactggcttcaggttgatcgaatttcagagaagagctcccagtcctcgg

SEQ ID NO: 355860 - DNA, 122 bp, Homo sapiens
tactgactcatttctggcatactgacctcattttaaaagattttgcattccagaaacatgcgtttttaacagatcagactgtatacataaagggttcacattctgaaagagttcagataaat

SEQ ID NO: 355861 - DNA, 122 bp, Homo sapiens
agctgcccgggagtacagactgtaactgctcctcactgcgttacccagtaatgcgctgatcgggggagggggcgggggggccggggagcgagcgggagagcgagcaagcgagcgagcaagga

SEQ ID NO: 355862 - DNA, 122 bp, Homo sapiens
cagtgtttcaaaagaaaacttgatcacattgctagataatacaggtatcctaaccaagtgcgtgagcgcccagaggctttctgctgctgccagaagtacatatttttttgattggtaagaac

SEQ ID NO: 355863 - DNA, 122 bp, Homo sapiens
cagcagtggaacaggaagcccacctcgttgtcaggggcgtccagggccaggtagtactggcggcccgagaccaggcgcagcttcaggcgccaggcagagaggtcatggacgcagaggtggac

SEQ ID NO: 355864 - DNA, 122 bp, Homo sapiens
aggccccaggttgtcctcaaacatgggcactggcaggttgacgcggcggcgggcaggcggcgcgctgggctgcttctcctgtcgccggaggaaggcctcgaccagttcctcatcatcctcac

SEQ ID NO: 355865 - DNA, 122 bp, Homo sapiens
tttgttgatctaaatatacaaaaataaaactagttgctgggttctcagacggagtctctgcggcattaggaggcccacccttattttctcttttcttcacgcaggaatcaggtccctggcct

SEQ ID NO: 355866 - DNA, 122 bp, Homo sapiens
gcgcggcgggtcggggtgtctaaagtcagatccctaacttcagacacccgaatttagcatcgtggcttagaaacgctgccctgtgtccccttcctcccggttacaagctgtttctccagcag

SEQ ID NO: 355867 - DNA, 122 bp, Homo sapiens
ggatctctcattcttgcagtggggacctgagggaggaccatagcatccaatacacagtggcggctgttatttcccatatgttttttatcacctctttcatctcccttcaggatgtgtttcat

SEQ ID NO: 355868 - DNA, 122 bp, Homo sapiens
cctggttgttattcaccccgaggcgagcccccgaccggacgatggcgcggcacaagttggcgttccctttcatgtatgccaggagcagcactggaaaacaaaagcacgcgcagggctacttc

SEQ ID NO: 355869 - DNA, 122 bp, Homo sapiens
tccactggatgcgcaggactccactcagccaggtaggagaatctgcactcacctggtttccggagcaaggaggctgatggcatcagggactacctcccctcagcttcctcgggccacgcagg

SEQ ID NO: 355870 - DNA, 122 bp, Homo sapiens
ctcagagcacgacgtaaagggggcgggcgtctctgtgacgtcacgaggctccacctcccgcgaggctttgtgtcggctgggcctggagcgagggtggaggttggcgggcggcctgcgctctc

SEQ ID NO: 355871 - DNA, 122 bp, Homo sapiens
gattgcctggtgaacaaccaggtcaaaaaatataaactgtgcctttcccaatgccagcctcgggtccgagggctctacgtgcattatctcttttagttcactcgacagccctaagagatggg

SEQ ID NO: 355872 - DNA, 122 bp, Homo sapiens
aacagacagtgggatatggtgaaaccgtgacggttggtgaatgaggtgagtatgagcaaacgatcattcgccacaatgtaaccctacagtaaagggtaacaggcaaggccaagtatggatga

SEQ ID NO: 355873 - DNA, 122 bp, Homo sapiens
tcagcgaggggctctcccagcggtccagagccgggtcccagtctatcagagaggtcccagcgaggttctaggacctgcaccctagccaagtgcggctgtgaagtgttcgatgactctctggc

SEQ ID NO: 355874 - DNA, 122 bp, Homo sapiens
cagcaaacatggcaagtgacagcaattgcaaatgccaagaacacaagcaactatcacgggcgtttttcaaactgtttctcagaatgcacctctaaagagatctccgtgtctccggcaggggg

SEQ ID NO: 355875 - DNA, 122 bp, Homo sapiens
gttagttaacacatcacacagccaaaacacgtcaaactgaccaccacaggttagttaacacgtcacacagccaagttaacacgtcaaactgaccatcacaggttagttaacacgtcacacag

SEQ ID NO: 355876 - DNA, 122 bp, Homo sapiens
gatattaaaaggcactcagaatttcagaacccatctcatgctgaataagacatagtgtcccggagccaggaaagcattcactttttataaatgcacttttgtttagttctctcagctgtgca

SEQ ID NO: 355877 - DNA, 122 bp, Homo sapiens
ctggaggcgggggaatggggggtgagggggggcctgagctttcatcagtctgtttgccaccgcctaacccaagcaatgcccatccccagctggacctgatgaggaaagagtgagggctgtct

SEQ ID NO: 355878 - DNA, 122 bp, Homo sapiens
catccacctcccatcccctgccgtggcagagtcgaaaggactcagagtgggcatctgattcgagttagaccagtcagagttcctctcctggtaagctgacatcaagatttagctagagtcag

SEQ ID NO: 355879 - DNA, 122 bp, Homo sapiens
gtggcacggagaggcggggcgggtctggtctgcgctctcggcaccatgcggcccccaagacgtagagcttccctgcctcggtttgaagggaccgctgggctgcctgattacgcgcccccggc

SEQ ID NO: 355880 - DNA, 122 bp, Homo sapiens
cagttttaaaaaaatgtaagcatatataaagtgaatgtctagtcttttaggttgactttacggaaagtgttaaattcttcccagtgccaataggagacagaatacatggatagaccctcagt

SEQ ID NO: 355881 - DNA, 122 bp, Homo sapiens
acaaatttttgcgcttctaacatccaggcccctgaggatggtcgcgaggaagatctgtttcggactgcagctggggccttcggatccagaggaaaccagggctattcttcgagggtgggagg

SEQ ID NO: 355882 - DNA, 122 bp, Homo sapiens
ccgggacactggggctttgaagggcgccagttcccagccgcacctgcacgcctaggagggcgcaggccgcgtgtccctgtgggaggaaggccccggcaacctgcaaagacctcacgtcacag

SEQ ID NO: 355883 - DNA, 122 bp, Homo sapiens
gaaggcagagaaatatagtttcctttcctaggattgagacaattctatttttcatatactcgttgctcattaaatagtaaagggttgatttgctgcaagagtagctgagaattcaaaaacat

SEQ ID NO: 355884 - DNA, 122 bp, Homo sapiens
aagcggaagtgctccgctgacccgggagggcggtccctagttcacactggctgttgtcagcggcctctgaggtttcaggctcttggcggtgaagtaagagggacgcggaggtggtgatggtt

SEQ ID NO: 355885 - DNA, 122 bp, Homo sapiens
aactaagagaaaattgggcagagagaaggcaatggcgagtccacctaggggctggggctgcggagagctgctgctgcccttcatgctcctggggacgctgtgcgagccaggatccgggcaga

SEQ ID NO: 355886 - DNA, 122 bp, Homo sapiens
agaaacaggagagaaaaacaacagaccctttctcttccctctgcctgcctctagaagggacggagcgcttgtgcctctctggtgagaatagggaagagcaagtgcccttgctaagtagggag

SEQ ID NO: 355887 - DNA, 122 bp, Homo sapiens
ggagacacggaatgtgaaggcccagtcacagactgaccgagtggacctggggaccctgcgcggctactacaaccagagcgaggccggtgagtgaccccggccgggggcgcaggtcaggaccc

SEQ ID NO: 355888 - DNA, 122 bp, Homo sapiens
tcaggtatcccacctgaccagcagcgtctgatatttgccggcaaacagctggaggatggccgcactctctcagactacaacatccagaaaggtaccggggttggggttgctgggcagggacc

SEQ ID NO: 355889 - DNA, 122 bp, Homo sapiens
cgcacccgcccaaggatacctgcttttcatctttaaagaaacgttaagagtttcaaaacacggtgtatatattaagaacccttaatgtatttaaacaaacaaaaatgatcatgttcagtgtt

SEQ ID NO: 355890 - DNA, 122 bp, Homo sapiens
atggttattttaagtatccttttctcctctgcactttatgagaaaagaaacggaacttcacgttcagaaacggcctcccaaagccgcaatggcttctcgcagctcgctggccttccccaatc

SEQ ID NO: 355891 - DNA, 122 bp, Homo sapiens
gaggtggactggggaaacctctgcgtttctcctcctcggctgcacagggtgagtaggaaacgcctcgctgccacttaacaatccctctattagtaaatctacgcggagactctatgggaagc

SEQ ID NO: 355892 - DNA, 122 bp, Homo sapiens
gacaggaagatggggccaagagatggtgctactgtctactttagggatcgtctttcaaggcgaggggcctcctatctcaagctgtgatacagggtaggtcatgagcgcagtcttctgtaaaa

SEQ ID NO: 355893 - DNA, 122 bp, Homo sapiens
ccggcgtgaggttcaagaacagacggaatcacaacccaccccatggccatcggggcaggacggggaccccggggtggggcagtgtcgactggaaaggagccggtggaacttctgggctgaca

SEQ ID NO: 355894 - DNA, 122 bp, Homo sapiens
catccagagaggactgggagtgatttaggtcagggagtctggtttctcctttaaaccgtgcgctaactgaggagtggggatctgcgccagccccgtgaccagccttaaatgtgagctgggga

SEQ ID NO: 355895 - DNA, 122 bp, Homo sapiens
gcagctcaggttcccttccctgtctcccacttatctgggatctctttccatttctgggcacgccttatcccctttgggtgaatctgtcattttgtccctttcgtgaaccaccgtcggggcca

SEQ ID NO: 355896 - DNA, 122 bp, Homo sapiens
gtgttttggatgtgattcagaatggaggcagtgaggcagaaagggaagggaaagggaggccgggcaggaagccagggttggggttttgctcttatagacttgactccagaccatggcccttc

SEQ ID NO: 355897 - DNA, 122 bp, Homo sapiens
tcccagttggccttgtctctttttttgtccaggccacgcaggggatgccggcaagttccacgtggccctactagggggcacagccgagctgctctgccctctctccctctggcccgggacgg

SEQ ID NO: 355898 - DNA, 122 bp, Homo sapiens
ctttcctccttagcctcccagccctagaaccatactgcagaaacgaggtctttagcgatgcggagtcaccactttggtgtgacctcgtggcgcaatggtagcgcgtctgactccagatcaga

SEQ ID NO: 355899 - DNA, 122 bp, Homo sapiens
acctcaggtgatccgcctgccttggcctccaaaaatgctgggattacaggcgtgagccaccgtgcccagtcaggactgtggcttttgaatgagatggggttactgtttggtttgggaccgag

SEQ ID NO: 355900 - DNA, 122 bp, Homo sapiens
tttttttttggtttgagaaattggcccctgggacaaggaatcccagttcctcctaggcaccgtgacgatggacaagaaggcattgcctggcagtgcagcaccttgtgtacttacttccaatg

SEQ ID NO: 355901 - DNA, 122 bp, Homo sapiens
caccttcaagtagagaggcccgcccgcccaccgtgggcagtgccaccagcagatgacacgcgctctccaccacgcaacccaaaccatgagaatttgcaacaggggaggaaaaagaaccaaaa

SEQ ID NO: 355902 - DNA, 122 bp, Homo sapiens
aaggcgaggaagcctggcggggctgtgggttgttccgctggtggatggtttggggttggtcgggcggggtttcttccaaagctttgtaggcctgcgaggtactaagaagttctctggtggct

SEQ ID NO: 355903 - DNA, 122 bp, Homo sapiens
actcggccgcgcgcgacccggtgctcagcggagctctccagccgccgccccgcgcccgcccgtcccgcccagcaccgcccagccccgcccagcccggtcccgggcccgcccccggcccccag

SEQ ID NO: 355904 - DNA, 122 bp, Homo sapiens
atattgttacattccctttcgatggaactaaatgcggttatctgcggtcctaacctctctcgcatcggagtgcaatgtttctgaacaagctctgttagaactggaaaatgggagggggtgag

SEQ ID NO: 355905 - DNA, 122 bp, Homo sapiens
tgctttgatccgggaagtacacaagccaatcaaaatacgccgccttcgggcaagaggagccggagagcgccatctagtgaccccacaagttcccttcctgaaggaagtattcagtccggaga

SEQ ID NO: 355906 - DNA, 122 bp, Homo sapiens
gttccacgtgccctgtccagcacgtcccccaagcgcaggcatgggcccccggaccagccgcggacccctcctcgcgctttgcaacgcctcacagctggccccgcacccctggggcaggacca

SEQ ID NO: 355907 - DNA, 122 bp, Homo sapiens
ccagcagggaaggtgccacttggaagattgctgggtttcctgcttcgaagtcttcaggagcgggctgagctgcgctggtgtgccgcttaggactgcaatgaggagggtgacgttagaaggtc

SEQ ID NO: 355908 - DNA, 122 bp, Homo sapiens
ctcttatactctgctgggagaaagtaccacattccactggaacaagggccagagccgcctcgtcctgggaacaccttatcaacatgttcccaggaagcaggccatggccccccagaccactc

SEQ ID NO: 355909 - DNA, 122 bp, Homo sapiens
gacccgtcctgactcactgttgctcactcagagcatgcactccagactccttaatgaggccggcaggcccaccctcctctcccctccatcactagagcttccacactgttgtcccctccatg

SEQ ID NO: 355910 - DNA, 122 bp, Homo sapiens
tcatcaaaacgatgggctattttcactctcaagattcttctatgaatgaacacaatcaagcgacattcctaaattcagtaaaagtataccaaagcagacagaacagtgtggtaaacaacagt

SEQ ID NO: 355911 - DNA, 122 bp, Homo sapiens
gatccagagatcttggctttggggaagcgagacccaaagcggggaatgacctgcggggcccgacctgctgtttcccagttgctttgtcccctcctcaggttgcctggccacggcggccgccc

SEQ ID NO: 355912 - DNA, 122 bp, Homo sapiens
ttgtgtgtgtgtgtgtgtgtgtgtgtgtttgtgtgtgtgtcccctgtgtgacatagggcccggatggacctatctggaccagccagaccctagaatgaaaacaagttgctgacagccctcag

SEQ ID NO: 355913 - DNA, 122 bp, Homo sapiens
acatgagacaataaacagaaagccatctgctgcctccaagatcaaatgtttcagttcctgcgcaagaaaaagaaatagaagttaatattttactctgaaaaaacaagtatttctattcacag

SEQ ID NO: 355914 - DNA, 122 bp, Homo sapiens
tacaccaggatctttgtatttgctgtttcctcttcctggcatagtcttcctcaaagaacccggtcttgcacttcttcagataactcaaatgtcgtctcagcaaagtctttcctagccactca

SEQ ID NO: 355915 - DNA, 122 bp, Homo sapiens
ttaggaacagaacatctgtttaaactgaacttgaaccaagaggcaggcaggcatgtcccacgggagaaggagggggcagagcccaggggtgtggtatctgctttctgtccctgggggaagct

SEQ ID NO: 355916 - DNA, 122 bp, Homo sapiens
aaagcaacagaggaaacagtgaaggggaacagaagggggtagcaaagtgttacagaaaagcggactggatagacaaaactgcagaaggtgtatgttggggagaactgaaagggaaaacaaaa

SEQ ID NO: 355917 - DNA, 122 bp, Homo sapiens
aaacaatctgggacagcggctggctcaccatatatcttctttcacaggctctgtgatggtcgattctggatttcttgggtctaaaataatatcctaagcccattccagagtccacatgtcta

SEQ ID NO: 355918 - DNA, 122 bp, Homo sapiens
cgtttttatttattactttattgcaaggagaagcagacaataagtaggagtcttatgaggcgttctgatgcataggagcaatggtgaatgagggtggtgactcaccaccccatgggactcca

SEQ ID NO: 355919 - DNA, 122 bp, Homo sapiens
gaagactgaactactgctatactccaaactgttgggagtagaagtggaactgccaaggaacggggccagttcttctgttgttggtgtttttataattgtgtagggtcagttttagtttttac

SEQ ID NO: 355920 - DNA, 122 bp, Homo sapiens
ggagcatgtgtgtctgtatgtgtgtgtgtgtgtgtgtgtgtgtgtgtgtctgtctgtctgcgtgtgctagaattttgctatcatttgttttgtaagatactcttagttgcttaagtaggact

SEQ ID NO: 355921 - DNA, 122 bp, Homo sapiens
ctgtctgcagggggccagaagaactcgcatctgctctcggggagcccacagtcatctgggcgggggtcccagatgagaaagtaatcacaattgtaaagtgggatcatctccgttagtgatag

SEQ ID NO: 355922 - DNA, 122 bp, Homo sapiens
caatagggaaaaggaaagtgaagcgtttcctgagttcgggggtcggcggaagatggcggccggcgaaaggagctggtgcctgtgcaagttgttgaggtgagcagccggtcgtgtgggctcac

SEQ ID NO: 355923 - DNA, 122 bp, Homo sapiens
tgaattgggggcaatggacaggagaggcgttgtgacccctccctttgggaagttttatatcgtattaaactgttagctcaacgccaataccttaattttatctcttctccgacaccgaatct

SEQ ID NO: 355924 - DNA, 122 bp, Homo sapiens
acctcttaatgtagttcctgccatacaggatctgttgcagcaaggtcaccaaggcaaaggcgcagatgaagatgaagagcaaagttcggctccccaacaaatcccggttggccgaggggtcc

SEQ ID NO: 355925 - DNA, 122 bp, Homo sapiens
cccgacccagcgcctcccccgtcacgtgaccctgtgacccggagcagccatcttaggcatcgcctcatagaggaactacatcttccagaatcctcgcgccctgcgtcgtgctggcactttta

SEQ ID NO: 355926 - DNA, 122 bp, Homo sapiens
ggtaggcgtggggcggccgagaccggggaagatggtccacggggaagcgcgcgggctgggcggcggggaggaaggagttaaagatcctggattggctcttctgtcactgagtctgggagggg

SEQ ID NO: 355927 - DNA, 122 bp, Homo sapiens
tgggtgctgtttggtaactgtctcagcaaactggccgagggcaggaattttgtctttgtacgcctagcatggtacagttaatatattagtaggtgctcagtaaatatatgttgaatgaatga

SEQ ID NO: 355928 - DNA, 122 bp, Homo sapiens
gtggtagtgtttttaaatttgcataattctcatttttatttatctctagttgaaaattaccgacatatttagccagggtgtgctggagctgactcgtagcagctcatgaaagctgagtgtta

SEQ ID NO: 355929 - DNA, 122 bp, Homo sapiens
atttgaagacagggtctttaaatggcaattaagttaagatgagatcttatgggtgggccccgatccaatatgactggtgtccctataggaagaggagattaggacacagacacacacagagg

SEQ ID NO: 355930 - DNA, 122 bp, Homo sapiens
gtttccaattttgagggggcgtcagctcttcaccggagacccaaatacaacaaatcaagtcgcctgccctggcgacactttcgaaggactggagtgggaatcagagcttcacgggttaaaaa

SEQ ID NO: 355931 - DNA, 122 bp, Homo sapiens
ggaagaactttcttcaggccagaaaatcctgcagtagaagttagcccaaaattaagagaacgaagatacattttttcctccagacaaaaattaggggagaaaaaggaagaaatgtatcaata

SEQ ID NO: 355932 - DNA, 122 bp, Homo sapiens
ccgcctcccgggttcaggccattctcctgcctcagcctgccaagtagctgggactacgggcgcccgccaccacgcctggctattttgtatttttagtaaagatggggtttcaccgtgttagc

SEQ ID NO: 355933 - DNA, 122 bp, Homo sapiens
atggcagtaggtgcgcggggccacggggctgagcggacgcagggccggagtcccagcagacggtccacacagttcgccgagcgccgctcagcacaacacctctacttcccagattttttttt

SEQ ID NO: 355934 - DNA, 122 bp, Homo sapiens
gctgccacgtgaatgcccatggtcccctggaaaatgttcgtcctcagtgaacatcgccctcggtgtctgtgcatgtgtacgtgtgtatgtgcatatgtgtctgtgtgtttctttctgtctca

SEQ ID NO: 355935 - DNA, 122 bp, Homo sapiens
tctgcgctgtgggcgctggctcatcgcccctctgattcacaccgttattaaaccagcactcgggcaagaagcaaaatcgtccagggcccagcactctgggcaaaaactgaagagcacgcaac

SEQ ID NO: 355936 - DNA, 122 bp, Homo sapiens
gcggggccgtgtgggggtggggagccggttcccctgggggttccaggcgggagtccggggcgcagcggcatcgtggggagctgccccggcctctggcggcccggaaccccaggaagcagggg

SEQ ID NO: 355937 - DNA, 122 bp, Homo sapiens
gtctttttactgtgcatcccggcttcacagaggacatatcctatgacagcatgtgaagcacggtccaaaatttcttcagtaaattaatgttgtgtgccaatacacaataggaagattatggt

SEQ ID NO: 355938 - DNA, 122 bp, Homo sapiens
acgcaggcagcagattttaagatgaaaagaaaggggatctagacagtggagagacgtgagcgaagcagggctagaggagaccaaagtggagagaaggcagtgagacacctgggagggggaag

SEQ ID NO: 355939 - DNA, 122 bp, Homo sapiens
atctgagcatgagttacacgggcggcgactcctatgtgatctgagcatgagttacacgggcggcaactcctatgtgatctgagcatgagttacacgggcggtgtctcctatgtgatctgagc

SEQ ID NO: 355940 - DNA, 122 bp, Homo sapiens
aactttgatccccgatggatgatgattcctccttatgtggacccccggctcctccagggtcgtccccctctagacttctaccctcctggtgtgcatccctctggtaagggggcatgggagga

SEQ ID NO: 355941 - DNA, 122 bp, Homo sapiens
cagaccccggggtcacggcccgaggaggagcaggccgctcagctgccccaccggagcccccgcgctccggctgcaatttaaatacctctcccgccggcccgccccgccacgcccccctctgg

SEQ ID NO: 355942 - DNA, 122 bp, Homo sapiens
tccgggaaagttggaaaacttttgaaggtggacaggggccagacccggcaggccagctctcgggtctaggtaccccgggaacctttcccccctccccctttcaccccaagcccccacatccg

SEQ ID NO: 355943 - DNA, 122 bp, Homo sapiens
agctatatccagctctagaagttgcactggcagtgtgaggtgatttgtgcttggcagtggcggcagtaatagtttcattgggccaattctatgcctttggctctgaagcctctaacactggt

SEQ ID NO: 355944 - DNA, 122 bp, Homo sapiens
cagatcaaggaaaaacccagcccaggcgggcatgcccggctcccttccgcggcgccacagcggcttcgagccaggcagagcaaaatccccgaggaaaggcgtccctccccagctctcacctc

SEQ ID NO: 355945 - DNA, 122 bp, Homo sapiens
cctccccggccggagtgggttccagcttttctcggctggggagggcatttatcccacctccgctatttcagctgccagaggggaggcaaggtgtggggaagttttccttcccgggcgaagaa

SEQ ID NO: 355946 - DNA, 122 bp, Homo sapiens
aggtcttggaatcctgtaatgtcagccacgtctcaaaaggttctatagggtcatcgccaccgtagccgccaagaggagctgggaggacgacggtagcctgtgaggctcgttgtagacaacat

SEQ ID NO: 355947 - DNA, 122 bp, Homo sapiens
cctcttctgctcttttcctggtgctcttttttctcggtggggtgtgggtaatagaacagccgtgggcttttggggacctttaacttttttttctctcttttgtttataaaaaacactaaaca

SEQ ID NO: 355948 - DNA, 122 bp, Homo sapiens
cttcaaactgcaaatggccacagtgcatgataagtcttagtcatggaaaaggcatcttaacgtgaacagaaacgttctgatttacggtaatcaggttaggtactaccctgcggtttcaggca

SEQ ID NO: 355949 - DNA, 122 bp, Homo sapiens
gacctgtggacctctgtagtgtttctgtagagccagtttggaaaatgtggcaccaacaagcgaatgcttcagtgccactgcaattgccaatatgagtacctaaaccatggagtaaatggtca

SEQ ID NO: 355950 - DNA, 122 bp, Homo sapiens
gggcccactcgcccgctgagacggttccaggccccgggcgggctgcggctgcagggaggccggattgcccagcgccttacctgcggccacccctgccggggcccagggcaggaggcaggcaa

SEQ ID NO: 355951 - DNA, 122 bp, Homo sapiens
cgaggtggaggagttgagggactcggtcggcccacaccaggtgcccagaggccggaggtccgtgcgccccggccgcggccccggcccgggcccagccccgtgcccctcgccatgggcctggc

SEQ ID NO: 355952 - DNA, 122 bp, Homo sapiens
gatcttttttgaggtagggctgtttactgtcaccacccctgtcggattttacttcctaaacgtacctgtaactatccacttctctccatctcttctggcaccaccctggttaaagacaccat

SEQ ID NO: 355953 - DNA, 122 bp, Homo sapiens
atgaagttccgcaggctttaatgctattgctatggccataagaggccaagctggcgggtgcggttccctaatacggttccctcagaggcagccgactctgcccagggcgagcagcgccgcgc

SEQ ID NO: 355954 - DNA, 122 bp, Homo sapiens
ttgacaacattttgtaaatcattacttctgaggttgttatgacgacggggtgtggcagtccggcttcacctgtggcagcagcttaggtccctgccctcctgcagagcacacttcaccgacag

SEQ ID NO: 355955 - DNA, 122 bp, Homo sapiens
gccccaggcgctggatgtgagggctctgggcgaggccagcgcggaactacatttcccaggcggccgcggcgggtgcgcctgcgcaatgcgcgcggtgatggagcgctaaccgggggcgcggc

SEQ ID NO: 355956 - DNA, 122 bp, Homo sapiens
ggggcggagctttgaggctggtgggaggagcttgtggccgagccgggacggaacgccctccgagtgggcggggctagagccgggcttggtgtggccggcggagaagcacttggcccactgcg

SEQ ID NO: 355957 - DNA, 122 bp, Homo sapiens
aaaaagcttctgtgcatgtatgtgtgggggtgggaggaagaacagaaaagggaacagtgccgccctagcaaatcaaaagtttaagatgcatggactgagatgacatcattggcggattatca

SEQ ID NO: 355958 - DNA, 122 bp, Homo sapiens
tgccttcaattcaccccctacgctggacagtccaaattgtccaccctcctactccccccgcggaaccaatgtggcagtggctccaaggtcaagctgccggtactgtgcgaggcgggaggatg

SEQ ID NO: 355959 - DNA, 122 bp, Homo sapiens
agaatcatgccaacctttctgtcagaaatattcatgacttcttcatgaacagatttgtcacgttcctacagtttctctggtctcattttatagacactgctcttttcattctctgcttttca

SEQ ID NO: 355960 - DNA, 122 bp, Homo sapiens
gttctgctccctgttcttccctttgaccaatgtcactcctggacagataacgggaccaaacgcccttcacttcctcgagtcctcatgtatgtcatggttcctcttttaggaaaacatgagta

SEQ ID NO: 355961 - DNA, 122 bp, Homo sapiens
caatgctgtcgcgggcggcgcggaggggcccggagccggtaccgggggctgggcctgcggcgcccacacgcagccccaggccctctgcctcccacaccggcagaagcacgcgcgacggtccc

SEQ ID NO: 355962 - DNA, 122 bp, Homo sapiens
cgcctgtaatcccagcactttgggtggcggaggcgggtggatcacatgaggtcggaagttcgaaccagcctgagaaaccccgtctctactataagtacaaaattagcggggcctggtggtgc

SEQ ID NO: 355963 - DNA, 122 bp, Homo sapiens
agagtagcaggaactcgctgaggctaagctccacggcacccagtgcctcacccaggcccccgcgggatggtggcagctcctcaggcaccaaaccggcccccagcgccaacggcgcagcctcg

SEQ ID NO: 355964 - DNA, 122 bp, Homo sapiens
gtactggggggcttaggatacgcggcgatcgggtagcgggaacaaggacctctgcctccccgctaacccctgtgcccccaatgcagatctcagccctgtggctgcagcaggaggcgcggcga

SEQ ID NO: 355965 - DNA, 122 bp, Homo sapiens
tgcggctccgctgccggccgagtggagcgctgcgcagctcccgccctcgagaaaccccgccgtgtcatttgaccatataaggagatgcacgcctcggctcgctggcaccgggcgtggggcgc

SEQ ID NO: 355966 - DNA, 122 bp, Homo sapiens
gcaaggaatacaattgaacatgaacaatagaggccctatgaccagcgccagcagaaccgacgccaggcatttaaagcaccctggctactgcagtgtctgcacaataaaggaattccatctta

SEQ ID NO: 355967 - DNA, 122 bp, Homo sapiens
ataatttgggctcagattttcccaacagagggtatcatttatcatttttatcgctgctaccgagattaataacaaaatggcaaagaaaactagagatcagtagttctgaaagattttgtttt

SEQ ID NO: 355968 - DNA, 122 bp, Homo sapiens
gcctggagctgtgccacacagctcatcatcactcccctcacctctcccaggcttggccttcgtgcctctgcagatctggtccaaagtcctggccatctcaggaatcttcaccatgggcatcg

SEQ ID NO: 355969 - DNA, 122 bp, Homo sapiens
tgaatactaagaaacgctccattccttccttgatttacgtggctacagccggggcccttccggcttgccactgacatgccgggggaagctgttattcattttacctaggcaggtttgccatg

SEQ ID NO: 355970 - DNA, 122 bp, Homo sapiens
gagcccctccgcccggcagccaccccgtctgggaagtgaggagcccctccgcccggcagccgccccatctgcgaagtgaggagcccctccgcccagcagctgcccggtccaggaggtggggg

SEQ ID NO: 355971 - DNA, 122 bp, Homo sapiens
ctcgggctccgtcaggccggccagccgcgtccccggcagggtgcgcagcgtcgagcggtacgtctcatggcgcacgccgcccacgttgatcacgatcttgccgctgtcgccaccgccgccgc

SEQ ID NO: 355972 - DNA, 122 bp, Homo sapiens
tgtgactgagccctgagcccccaggttaccagccacaccccagtggaatcccgggagctacggggtaaaatggaatcctcttccacagcaagtgcacagaaggcactcagggctggtgggaa

SEQ ID NO: 355973 - DNA, 122 bp, Homo sapiens
atcccaaaggctatcatggaaaacagcctgaactctggtcccctcaagagacaagcttaccgagctgtactgacaccttctggaagcactgggtactttcatccataaaggcctgcagctgt

SEQ ID NO: 355974 - DNA, 122 bp, Homo sapiens
aagctcccttttttttctgttggcaaggacaggttacagaataggaagagtagcactttccgcctaagcactttaggaaatcacctttctaagccctggggcgcccaagtcccatgggacag

SEQ ID NO: 355975 - DNA, 122 bp, Homo sapiens
taaaagttaccaatggggaatacctcaatcttcaaggttacacggggcattaattaatttcggaaagggtcacactcatgcaaaagtttgttttgatattgtagtatttcaactttgaaata

SEQ ID NO: 355976 - DNA, 122 bp, Homo sapiens
gccaccggccctgctcggccgccatcgctgtgaggcggctgcccgcgacagctcctcctccgcctgccaaatctcgcgatggcagccgcacagttgcggaccagtggcctgctgctaccaaa

SEQ ID NO: 355977 - DNA, 122 bp, Homo sapiens
accttagcttgctaattggttccactttcttccttgttccttttcctttaccaagatggccgctgtgtcgttcgctcctcattggtcggattttccgcaggtgccgattctagccccaccta

SEQ ID NO: 355978 - DNA, 122 bp, Homo sapiens
gccgggcagtgttggagctgaattaaattgcaggacactcgggtggtgtctgcagagacccggagaattggctggtgtgcaaaacccacacgcttgttgtcagccgtgtcgtgaatcgagga

SEQ ID NO: 355979 - DNA, 122 bp, Homo sapiens
tggggtagtgtggggagggagcggttctgggtagcgggggaccggcacgtgggttctgcccgtgggggaggatggaaatcgggaacatgtgctatattcgttaaagaaaaaaaatcttagct

SEQ ID NO: 355980 - DNA, 122 bp, Homo sapiens
agaagaggggacgttcaaagtaattctgacttgcaaactagaaagtttgagagggtaaatcgcacaaagccggaagattcaacttgaagggacgcgagctttgaatgtgggtcctggtgcgg

SEQ ID NO: 355981 - DNA, 122 bp, Homo sapiens
tcacctgaaactagaagaggattcaagggagcagggggcaggggctctagcagccatggccggagattctagaagatcttcactcatgtgctcactattaagatggaacacctacactcagc

SEQ ID NO: 355982 - DNA, 122 bp, Homo sapiens
acttcacatgttttactttgtataaggccatttatgccttttttattcaaacagaatccacgtctcacttttgtacccacccccctaccaacagaacacagcatatttgtaggattgttagt

SEQ ID NO: 355983 - DNA, 122 bp, Homo sapiens
gtggagaacaaaaaggaagggttggctttgaaatgtgatattaagagggttatgttgattcggaggtagtgataaagttctgttaaggtataacatatagtcccattaaatagaggataaaa

SEQ ID NO: 355984 - DNA, 122 bp, Homo sapiens
gccaggctgcaggtttgagagccgctctggatgggctcgctagagtcgttgttgtggaagcggtgcatttacagtgcaacagtcagcacattgaaaataccaataggaatacaaaacaaagt

SEQ ID NO: 355985 - DNA, 122 bp, Homo sapiens
atgcccgtgcgcttccagtaggaccggaaagctcccagcagccagcgatgaatgaaaacccgagtctgggatagcggcgtgaggggctgggcagctgccaggcgggggcggggcagcaggtc

SEQ ID NO: 355986 - DNA, 122 bp, Homo sapiens
gcactgaagtcctaaatcctgttccttgttcatggatacatagtagtccccctctatccacggtttcactttccatggtttcagtcaatcacaatgtgaaaatattaaatgcaaaattccag

SEQ ID NO: 355987 - DNA, 122 bp, Homo sapiens
ggagattggctgaaagaacaaagttgaaggagtgcatccaccggatcaccgcccgggtctcgggttccacctgggaggaggcgagaggttggcggtgaagggccaactggggctaccaaaca

SEQ ID NO: 355988 - DNA, 122 bp, Homo sapiens
agctcagggtgccgctgctctgctcatcgctgtgcgccgagccggcctcctccaggctctcgctgttggtggtgctcatctccagctcccgccggaagttctcgtacaccccctgacgagcc

SEQ ID NO: 355989 - DNA, 122 bp, Homo sapiens
ctggcgcgggttccccaggctagcccgctggcccgtccgcgcgcgcgcccccggcccgcgcgccccttcccggggctcctggcctcgcctcagcggctgcaggctcttcgtcgcgggccggg

SEQ ID NO: 355990 - DNA, 122 bp, Homo sapiens
ttctccacgcctcctgtgtctctgcatccctgataacaccctgcagactctgagcacctgcggccacgcctgcaggcagcagcctcacctgcgctcacgctgcgccctcaccggagcacctg

SEQ ID NO: 355991 - DNA, 122 bp, Homo sapiens
tgcatttagcaattcactaaaataaatgacaggctcaggagatctggagtgcagttttcccgatctctgctctctcaggaaagtcgagtcacgccgagagacaccctgccgtgacaggtttc

SEQ ID NO: 355992 - DNA, 122 bp, Homo sapiens
cgcgcccagccgtaaacagaattttattttgtgtgttatggacccacttgtaaccaaaagcgcttctttgaaggacaagacaaataattagaatttccaaaataataaactgtcatccttat

SEQ ID NO: 355993 - DNA, 122 bp, Homo sapiens
gctaggtgagttgtctcaactaactctagtggagccgccgcagccctggaggagccgggccgcgactcgagagcgcccggcagctctccaatgctttggaaccggcgggacccctgcgggct

SEQ ID NO: 355994 - DNA, 122 bp, Homo sapiens
tcttgcagtagtgggcggcgacctcggaggaggtgcagtacctccgcgtctcgtagttctcgtagaaactgctgactgccatccccagacagtggttgggcagcaccaggaacacgtgatcc

SEQ ID NO: 355995 - DNA, 122 bp, Homo sapiens
aatgagtgcgcagcatggagcattgccccgccctgcgtgttggctaggacagtgcctgaacgctggctgttagcgtaattgaatgggcgatgtgctcccgtgatgaggatctggcttggagt

SEQ ID NO: 355996 - DNA, 122 bp, Homo sapiens
tgcaccgcctccttcgagaaacaaggtaactttcgggttctggttgtctccaaagtcatccgaccaatctcgcaccgcccagagcgggcccttcctgtcaattacctactgaagggcaggcg

SEQ ID NO: 355997 - DNA, 122 bp, Homo sapiens
ccccggggcgctctcgtccgaggtctggggctggcaggttgtggcgagagctagagtgcgcgcgaggggggagggggaactcaaaagtgggtgggaggaaaaacatcaccgccctcacacca

SEQ ID NO: 355998 - DNA, 122 bp, Homo sapiens
ataaatcaaatatcgtgataaattcaggagggccatcgatcaggtccacttggctggaaacgacgtgaatctgcctcttttccgctttcttcttctcctctctcggagctggagggagccaa

SEQ ID NO: 355999 - DNA, 122 bp, Homo sapiens
gtaaatgctattgacttactctccaagctgaagtttaaacactggaatgtcctcttgtagcgtggacagtaagattgtatcatgagttgccaagaattaccatttttatgactttgaggacc

SEQ ID NO: 356000 - DNA, 122 bp, Homo sapiens
ggaggatgtttctcctacatgtgaccttggagagggaccagttcactgctgaagataagacgagtctgaatccctggctagtcctggtcccgggcctaggccctgcagcttggccaacatcg

SEQ ID NO: 356001 - DNA, 122 bp, Homo sapiens
agtccagctcccaggccccacctgctggccgcccctggctcccgcccccagggacgcgcccgggcctccacccgcgcctgcacaggctgccccagacctgaagctcccggagagggcgcgct

SEQ ID NO: 356002 - DNA, 122 bp, Homo sapiens
ccgggccactgcctctggcatcttcaggccagtcctacctgatccaatcagaattctggacggccagctgacacatgatgagacggtgccggcttgacacgaggccctgggaagcaacagag

SEQ ID NO: 356003 - DNA, 122 bp, Homo sapiens
ccttctctcccacagctggacgcacagaacagtctctccgtgggaggagacattatggggcgtccaccaccacccctccctggccatcctcctggaatgtggtctgccctccaccagagctc

SEQ ID NO: 356004 - DNA, 122 bp, Homo sapiens
cacgggaggattgtcagcccagatgggggaaaggctgtaagtagttactgtcatcggcctcgctttctgaagacaatttatggatgatagagcccttccacacccatgagctccttagactc

SEQ ID NO: 356005 - DNA, 122 bp, Homo sapiens
ttttatgacccagcaatttcacgtctagaaaaatacggaaatgccgggtgcgatggctcacgcctgtaatcccagcgctttgggaggcagaggcgggcggattacctgaggtcgggagttcg

SEQ ID NO: 356006 - DNA, 122 bp, Homo sapiens
tgttctccatccctagaggcagccttttccagaatgtcacacaaaagggatgtcgcgcagcgcgcctgtgggtctggcttctaccacttcgcattttgagattcatgctggttcctctttat

SEQ ID NO: 356007 - DNA, 122 bp, Homo sapiens
gtggtttggagaccaagcctgaagtctcaccccttaacatggagtctgagcccaactcaccgcaaactcaggacaagggctgtcaaacccagcagcagccccatagcccacaaaatgagtcc

SEQ ID NO: 356008 - DNA, 122 bp, Homo sapiens
gacggacgagaacgggtggcccttcacagaacaggctaattctcagcatgtgggagcactcgtgcgtggaaggccaggcgtgtgacacgtgtgagcatagcgtgggcaggacgcacgtgagg

SEQ ID NO: 356009 - DNA, 122 bp, Homo sapiens
tgggaatccgggtatatttatctcggctgctccggacaagggcttgagggcagatcgggccgggccgcctgaggggccgcggggtacatgctggtcccagagccggtgccatttgcagagga

SEQ ID NO: 356010 - DNA, 122 bp, Homo sapiens
cgtctgcagttgtttgttcctccgggtgggttcgtggtcttgctgacttggggagtgaagcggcagaccttcgcagtgagtgttatagctgttcaaggtggtgcgtccagagttgtttgttc

SEQ ID NO: 356011 - DNA, 122 bp, Homo sapiens
tttttcatttaatctgtcataccatttttaaagaaaatgatgactatctattgagtaacacggacaaaggaggaagaggcacatgctgcccattacccgactttctcggtcctggtcttaag

SEQ ID NO: 356012 - DNA, 122 bp, Homo sapiens
agttctgccttctttttggtgacacttcctagatggattcatttgtgtagctgaaaaatacggtcttaaatagacacaatatacccaagaagaggcaggcgttgcctgttatacccagcttt

SEQ ID NO: 356013 - DNA, 122 bp, Homo sapiens
tgggctccctccccccaccacttcccggaatagccccacccttctaaccgctccctgtcccgttccacacgcagttctaccctgaaacccacagtccccgccccagccggactttccagcag

SEQ ID NO: 356014 - DNA, 122 bp, Homo sapiens
actacaattcctccactttccctggagcctgccctctcccactgcagcacctgggttgcccgctcaccttaagctgccagcactacagagcaccaaatgggctggcactgccttgtttcctg

SEQ ID NO: 356015 - DNA, 122 bp, Homo sapiens
ggagtttctccatgtgggtcaggctggtctcaaacttctgacctcacgatccacgtgcctcggcctcccaaagtgctgagattacaggcatgagccaccgcgcccggcctgaaagattcttt

SEQ ID NO: 356016 - DNA, 122 bp, Homo sapiens
ccccttccccaccaggtatcagcttttttcacattttggtaggaggattattccatgggacgagtcggttaaaactcacctttgaactgcgtgtgctgtgcacggtgccccttccccaccag

SEQ ID NO: 356017 - DNA, 122 bp, Homo sapiens
gctcagagaccacctgcctgtcctccttggacaggctggtgcggttcaggtagagcgtcgcgttctggctgaaggaagtcagactgtcgcacagccggtagctgtcgtaacttgtcccctgg

SEQ ID NO: 356018 - DNA, 122 bp, Homo sapiens
gtcttaaaaccacaggtgtttttttatcctgctcacatgtggatcaccgagggcaggggccgggaggaagggggtcatctggctcacagccttgcaccagaggcgtcacgagaatcaggaaa

SEQ ID NO: 356019 - DNA, 122 bp, Homo sapiens
tctttttattattctaagcaccaaatgtctgtggtggtttgatgcctctgtgcattgttacggggcccatctggtaggtcattctattgaagcattttctgactaaatacagattccctcaa

SEQ ID NO: 356020 - DNA, 122 bp, Homo sapiens
tgtggtgtgtgtggttttggaggtacccattttggagtgcgatgagtactgtggggtccacggtgagcacgtactgcgcagtgggtgtaatgtggagttcatagtagcctgcagcttgggag

SEQ ID NO: 356021 - DNA, 122 bp, Homo sapiens
cctcgtgactgggcctcatgccaaacaacttgttacaaaaagagctagggtcccagactgcgccgaagcttcatgagaccgatcctcgtctgtggacagaggagtagctgactctgaagccc

SEQ ID NO: 356022 - DNA, 122 bp, Homo sapiens
cctctatttgtttatcatagattgcagttgaatgtgctcattcttatttgttcctggattcgatcataatgataatagcttacagttactaagcactcgctgtttgccaggccttgagctaa

SEQ ID NO: 356023 - DNA, 122 bp, Homo sapiens
cctggcagtattgggaatgtaactgaagtttagtgagtcttcagcctgcttgcaagcacccgcaatggctgtgcatagggacactgtgaaagcagctgtaggactgatctccttttgtgtgg

SEQ ID NO: 356024 - DNA, 122 bp, Homo sapiens
tactattagttctacaagaagtagtgtggtgtaattttagaggataatggttcacctctgcgtaaactgcaagtcttaagcagacatctggaatagagcttgacaaataattagtgtaactt

SEQ ID NO: 356025 - DNA, 122 bp, Homo sapiens
aggcccagttggaggctgcagcagggtgcagggcagtcagaccaggaccatggaactcagcgtcctcctcttccttgcactcctcacaggactcttgctactcctggttcagcgccacccta

SEQ ID NO: 356026 - DNA, 122 bp, Homo sapiens
tgcccgctttagcacagtggctgcagctgtgctctgcgggtcctgcctcagcccggacttcgccataattctggaagttctcctccgcctcaacccaggatgaagttgagcgggtctgctgc

SEQ ID NO: 356027 - DNA, 122 bp, Homo sapiens
cttctatccccaagattctgattgaattgctgtgagatggaatttggacatcagcattttcgaatgtgtttctttggtgattctggtatttaaccaatgtttaaaactactgaatggaatgc

SEQ ID NO: 356028 - DNA, 122 bp, Homo sapiens
aatgggggtgcggggcgctggttgcctacgcttccgcccaatcaaaggggtgcatgagcccgtcgagtgcgcgcttgagagcctcggaaagagcgaggctcctgcgaagggcccgctccgcc

SEQ ID NO: 356029 - DNA, 122 bp, Homo sapiens
tctgcttttggagctaggagatttaggatgcagttccttaggtagatgttgtaagagctgcggtgcttggtgtgagtacagacactttctaggctggcagcagtttattaattgactttccc

SEQ ID NO: 356030 - DNA, 122 bp, Homo sapiens
tgcctccgcggctgatggatgagccccgaatgctgctcgagcctgtgcttcccttcgggacgaggaggccgagagagaaggggctaggggcgcggccgggctcagcgtgcccgggttggggc

SEQ ID NO: 356031 - DNA, 122 bp, Homo sapiens
aacgctcccacggagggggtgccgtgcccacccagcccgagccccagtgtgacgtacagccgtgggtggaaatgctgcttttccgattcaacacctgcttatgtccttggttcgtctagcaa

SEQ ID NO: 356032 - DNA, 122 bp, Homo sapiens
gccctgcagcccccccacccccacccccggccccaggcagcagtacctccaaggcctgggcggcaggaaagggagagatgacgtcattgccgcctggaatctgctgtttggaggcgtcgcca

SEQ ID NO: 356033 - DNA, 122 bp, Homo sapiens
ggggcggcggccagtccggggtcccagatggccggggccccagctctttgggtttgcccacgcccggggcgcgaaactccggagtcccagagccgcggcgccctccccggaggcgcagggac

SEQ ID NO: 356034 - DNA, 122 bp, Homo sapiens
cgcgtgccggcgcgggaggcccgggccccgcccccgcccggccaggccccgccccctccccgtccccgcccctgtccgcctcgggccccgccccgtctgccgctccgcccctggccccgccc

SEQ ID NO: 356035 - DNA, 122 bp, Homo sapiens
tccaacaaaaaacccacaatgctggagcaagatctcaggctgtgaccctctagagggaagcgctttctgttggctaaaagaaaagaaagcgcttcccttcagagtgttaacgctttgagaaa

SEQ ID NO: 356036 - DNA, 122 bp, Homo sapiens
tgcccgacggaatgcacccagcggcagtggagagcagtgctggatcctgcggggttgaggcggtggagcttggtcagcatggggtgcaggggcaggaggggggacgtggccaggggccaggg

SEQ ID NO: 356037 - DNA, 122 bp, Homo sapiens
aagcattgcctcctttgtgaggcctttcttcttcctgctaagaactggccactccctcctcgatcctccccatggaagcagaggtagactctcatcgcagtgcccaccatacttctttgctc

SEQ ID NO: 356038 - DNA, 122 bp, Homo sapiens
gtcctgcaaagggaggggcggagcctcacatgtagataagtccgtgacgccatccggaggcggagccgcgcgtagagatgtggcccattgacgcacgcagagccagatggggcagggctcct

SEQ ID NO: 356039 - DNA, 122 bp, Homo sapiens
cggcaagattgtggcactcaacacgggcgtgtccatcctctacacgctgaccgtcagcaccgccctgctgggcatcatggcgcccagctctttcactcggacccggacttccttcctcaagg

SEQ ID NO: 356040 - DNA, 122 bp, Homo sapiens
tcactgggcccactgcagcacacacttggctccagctggaaaatcctgaacagagcttcccggcaggtgaactgccataagtgggttataagcttgctgagatagtgttcagagtgcccatg

SEQ ID NO: 356041 - DNA, 122 bp, Homo sapiens
tatcccgctctgcatgctcatgagatggctgagccaactcaggggttatgaggtggtttgcgagtgaggagaagaatgatcttcagtttctgacctcctggcacggtggcgggcggtattta

SEQ ID NO: 356042 - DNA, 122 bp, Homo sapiens
cgtcttggagcagtctcttctccctctcttcttcctctgcctccgtggccctgtcagtcccgcctaagcctttgtgtggccgtcacctggagcaccggctgtgcctcagggactttcccggg

SEQ ID NO: 356043 - DNA, 122 bp, Homo sapiens
aggctgggggaggggccggaaggggcccgcggggtcggggcgcgcccccggctcctccgccgcctcccagcatagtgactccggctgctccctccgagatccgggcccgccgcagagcaaag

SEQ ID NO: 356044 - DNA, 122 bp, Homo sapiens
tgccaccagaggcccctctgagaggcgtttcaacagcttcacctgtgctgacaaagcagccgtggtcagcaccgccgttaaggcggccatcagtggcggctggcatgcagcgtgtacacgaa

SEQ ID NO: 356045 - DNA, 122 bp, Homo sapiens
ggcgccgggtgagtgtccctgcgagcgggctggggccggggcggggggctgggtggggggcgggcgggcgggggagctccaggcgcggggcgcagcccggggcgacctctaatcgtcccccg

SEQ ID NO: 356046 - DNA, 122 bp, Homo sapiens
ttaggcagcgcgcggcccggctcgtaactcctcctgctgcagcaggcgtatcgttggcctcgcctcgaccccggaagtgacttctggaagtgacccaggaagtgacagtgagctgcctctct

SEQ ID NO: 356047 - DNA, 122 bp, Homo sapiens
aattgtttgctttctctggacttgttttgggaccctcagctccataagggatgttagtctcgagcccagtaattatttccgcagcacagaggttggtaacaaaaacggagggcggagttgcg

SEQ ID NO: 356048 - DNA, 122 bp, Homo sapiens
ccagtcctgcgtgtgtgacgagggttcagtgtcggtgcagtgcaagcccctgccctgtgacgcccagggtcagcccccgccgtgcaaccgtcccggcttcgtaaccgtgaccaggccccggg

SEQ ID NO: 356049 - DNA, 122 bp, Homo sapiens
gtcccgccccgggacgcctgggcggagccatgttgggaatcgcaggctgaagtgcgcctgcgcggagcccaagaacggaccgacggccattttgagcgtggctgggaagagaagtgtattcg

SEQ ID NO: 356050 - DNA, 122 bp, Homo sapiens
actagaagtcagattcacgtccggcctccaggccagaatgcaggaaatgccagacactggcgtctcaaaagcagctttcaaagttatccactcacacagccggcctctaagcaaatactctt

SEQ ID NO: 356051 - DNA, 122 bp, Homo sapiens
ctcacttccacgttcacagttcttggaagcggtcccactgggggcggggctgagcgcgaccgcgccctcaactccccctattgcccgccccggggtggggcataaccacccaacaggctcct

SEQ ID NO: 356052 - DNA, 122 bp, Homo sapiens
aggagagcctaaggcagagctgtcaactacttggctgagtgtagaaggcatttcccaaaacgtactcacaatcccttggcaacgactgggagacttactggcttcagacagttaagaaaatc

SEQ ID NO: 356053 - DNA, 122 bp, Homo sapiens
cgacacaaacaggctcccagtggccggaaaaacaaatctctcacagcttgaattttcctccggcagaatgccctggagttctgagcttgggtgatgattctatttctgtgccttaactctct

SEQ ID NO: 356054 - DNA, 122 bp, Homo sapiens
gatcttcagagagaggacgcccgagaggacaggcggtggtggagatcttcatagagaggacgcccgagaggacaggcggtggcggagatcttcagagagaggacgcccgagaagacaggcgg

SEQ ID NO: 356055 - DNA, 122 bp, Homo sapiens
ggggggggcaggtcccagaaaatcaaacacggacacccacgtggcccagcactccccttccgggcacaagcccagaggaccaaaagccgaggctccaaggggcgtctttaccccacgttcac

SEQ ID NO: 356056 - DNA, 122 bp, Homo sapiens
gaagagggctgagaaacctgctcctccagctgggggcccgccctgagccctgggaagctgcggttaatctttaagccagccttgcaaacaagtgcggccatttcaccagcccaggctggctt

SEQ ID NO: 356057 - DNA, 122 bp, Homo sapiens
cagcgcctggggcggaggccggattatctgaactgagctatctgctgggagcactttgcacgtgggtgctgggttggtgtggaaagggtgatcgctttctttggatggctgtttttgaagct

SEQ ID NO: 356058 - DNA, 122 bp, Homo sapiens
aaaataaggcaaatctgagaaactaccagattactagtgtcccagaagaggctaagaggacgtgaggaccaagcaccacgtggtgcctgagccgcgtcctggaacagaaaaaggacatcatt

SEQ ID NO: 356059 - DNA, 122 bp, Homo sapiens
tgcctcagcctcctgtgtagctgggactacaggtgcaaggcaccatacctggctcattttcgtatttttagtagagacgggctttcaccatgttggccaggctggtctcaaactcctgacct

SEQ ID NO: 356060 - DNA, 122 bp, Homo sapiens
ggacatgactgagacattccaacaggaacagggtctgcgggtgggaggcgactcacacagcggtgctagtttcctgattctgatggccgtgccagggtctcaatggagactatcttcgttac

SEQ ID NO: 356061 - DNA, 122 bp, Homo sapiens
acccgccgcctcgcccgtgatgccaccgcagacccagtcccccgggcagccggcccagcccgcgcccatggtgccactgcaccagaagcagagccgcatcacccccatccagaagccgcggg

SEQ ID NO: 356062 - DNA, 122 bp, Homo sapiens
gcgggaagacttgaaaagcgaggtcaaggaacttgtgatgtttaaggaaaacataaacggcgcggcagaggtcccccccacgggcgaaagtgtcttaccaccgcacattctaagggctttgg

SEQ ID NO: 356063 - DNA, 122 bp, Homo sapiens
aagtcggtggacctcagaacatgtgctgaattcgtgccatatgtctgcggaccacccacccgccttgaggagacccctctcgcaagctgcccgctcggccaagcggctgggctccgtcgtca

SEQ ID NO: 356064 - DNA, 122 bp, Homo sapiens
tcaaacctggctctacgccggcactcacctcgtcgatctcacactggaccacggactccacggaggggtgcttcaccacctcccgcaggacacctccatctccgcccccgatgatcagcacc

SEQ ID NO: 356065 - DNA, 122 bp, Homo sapiens
tgcgattcccccctctctccttcctcctctcctcaactctggaaagcggggagctggctccgaacctgttcctggacttcagtttcctcacctgtgaaatgagggagtgataggaaaggttg

SEQ ID NO: 356066 - DNA, 122 bp, Homo sapiens
ccacgtggccgctctggagcaggttggagttggcagcgggctgcgctgcagggacaggcgcggcggacagccccgggggcagcggcggggtcctgtctgggagaggacagggttgcggcggg

SEQ ID NO: 356067 - DNA, 122 bp, Homo sapiens
gtaccaaccccaggcccccacacgctaccccctcggaccccgctctcacccttcaggctccggaagaaaagcgaatgagtctcccgcacgttgaggttgtccagcagcactaaggtgcgggg

SEQ ID NO: 356068 - DNA, 122 bp, Homo sapiens
ggttacctaacggtccggcccagccagtcaggttcccaaagcccacaccgcgcgggccgccgaggtggcagcacagccacaatcgccccaagggctaaggagcacgtcaggagcacccgagg

SEQ ID NO: 356069 - DNA, 122 bp, Homo sapiens
gaatttgattgaggcaagatttattcacatgctctaaaggaacatttcttaaactttctgcgaccatgactcaccaagcaacactgttacatgtggagtagctatgcagattttcttccacc

SEQ ID NO: 356070 - DNA, 122 bp, Homo sapiens
cccaggtagtggatcaggttactctgcagggcgagggaggaaataaagagggagggcgcacgtcaacttggcatcaccagagctgccctcaccaactgagtgtctgaattcctacaagcagc

SEQ ID NO: 356071 - DNA, 122 bp, Homo sapiens
acgagccgagctaacaatagccctgcttagcagccccgcggcggctgacttggtgaggcccgcaggcccgcctcagcccgccctccctccgccgtccgggcaggaggtgcaggggcagcagg

SEQ ID NO: 356072 - DNA, 122 bp, Homo sapiens
gtcaagttccaccctagagctgaagcgtggccgattacggaggagcccttggcaggggaccgggtagtttctagtgcaggagatgtgcctttccttgctgagcccccggatcacgggggagc

SEQ ID NO: 356073 - DNA, 122 bp, Homo sapiens
tggaggccttttatcctctccgagttggagttcagggcctctcccttggttggctctgcccgtactcaatcctcctgtctgtgctcacatctccaccagggtcggcaaagactgtgaaaaca

SEQ ID NO: 356074 - DNA, 122 bp, Homo sapiens
gtcagaaaacccaagtgcagtagaagccattgttcataatggtagggatacagggtccttcgtaacagattatcagtgtggcctatgctggaaagtctggtgacctctgattttttttgctt

SEQ ID NO: 356075 - DNA, 122 bp, Homo sapiens
tagaaggttagaaaaccttcacgcacaggtgcgatggctcacatctgtaatcccagaggccgaggcaggtggatcgcttgaggtcaggagttcgagaccagcctggccaacatggcaaaacc

SEQ ID NO: 356076 - DNA, 122 bp, Homo sapiens
ccctgcacacacacactttgaagccacacctcttccccgacaacacccgtctccacactgcgcacctaggcctgagctcacacacacccaggcccatgctcacggccctgtcacctatgcac

SEQ ID NO: 356077 - DNA, 122 bp, Homo sapiens
tatatatggcgttagtgacaacgggaggaagtacacgcgagtgggcaagtgctcggtaagcgctgacagtggacctgtcgcttctcatgcactgcgtatagtttaactaccgtggaacagtg

SEQ ID NO: 356078 - DNA, 122 bp, Homo sapiens
acagtgcaggcctcagccctcaccggaggctctcgggagtgggcatatggcacaggcgcccggggctgtttactctgaccaggtgggaacccagatgccccctgcccctaaggcgccctcag

SEQ ID NO: 356079 - DNA, 122 bp, Homo sapiens
tcggatcgtagagggtcctcatttaccctctgcacttcttaggacattaactccagggaccgcagcggcccacgggccacccgcatagacgggagcggagaggagataagatggcggcccag

SEQ ID NO: 356080 - DNA, 122 bp, Homo sapiens
ggggggcaagaaccacatctgattagtgcaggaaccacatctgattagtgcacacgggggcggcatacaatgggcgatcacagagtttggcagtggggatgagggagggaggagggagggag

SEQ ID NO: 356081 - DNA, 122 bp, Homo sapiens
cagttatcttatgcaattatttaagactgatcttgtcctcgtctgattaagagcagccaccgattcctttgcagtgtgacttgccggcatgtaagtggtggtagatacaggcttagtcaagg

SEQ ID NO: 356082 - DNA, 122 bp, Homo sapiens
agattccaagtggtggactcacggaaatctgccgaaagcccgtctctcctgggtgcatttcgtctgtgtcagattggctcatttccatcggtctgcccatgtacgccggcaccctctccacc

SEQ ID NO: 356083 - DNA, 122 bp, Homo sapiens
ttgaccacagccgcttcgagggtaggtgcctggctggtccccagggccaggccgtagagacggttcactcaggctctctgcggaaaggcctggcaggcaggcagcgggcaggcggggccagc

SEQ ID NO: 356084 - DNA, 122 bp, Homo sapiens
aagaggtgacctttgagtcgagacctgaggcactggagttacaggaaatgtgatgttgcacgtggagaatttcttggaaatggagcagcaatgtagtctgaccctattgttgggcccattaa

SEQ ID NO: 356085 - DNA, 122 bp, Homo sapiens
gaaagaagaccgcaagccaagagaaaaggacaaggacaaggagaaggccaaggagaatggcggaaacagacacagagaaggggagagagagagagccaaagcccgggccaggccagacaacg

SEQ ID NO: 356086 - DNA, 122 bp, Homo sapiens
acattgtttttggggaaacttaaaaataagtaagtcccatgatttgtctgctttcacctccgttcaaccctagaacatttggctctggtgttagtctgttttgcattgttatacaggaatat

SEQ ID NO: 356087 - DNA, 122 bp, Homo sapiens
gcaccacgccctggggtctccagcactgaagcgttcagtaccatgcagagcagctgggagcgggtcccgctgggcggggccgagctgcgcgcgaccctcggcgcgctcggggaggcccagac

SEQ ID NO: 356088 - DNA, 122 bp, Homo sapiens
cctttaagcatctcttgtcattgcatggcagatggatcgcagagaactgcctgcatttctcgcagttgtaacatctctgatatatctcagcagaaagtcccacaataagcaaatctgaccaa

SEQ ID NO: 356089 - DNA, 122 bp, Homo sapiens
cctgtcattcattcattcattcatcccatgccaggctgggcggctgccagaggcacaatccggaaccgccccttgctaatgggcggaccagtgaaagcaaagcgggctcactgtgcagacca

SEQ ID NO: 356090 - DNA, 122 bp, Homo sapiens
cacttggaagatatcatctgctgttgttttgggttttgctatttgatgaccggaggctaacgtgccaaaaataaatcacaactgcaaacccgggaggcaggccaaggctccgcagggacagg

SEQ ID NO: 356091 - DNA, 122 bp, Homo sapiens
tccttgtgcagcgttcagggactaggtagaagatgctctctgaacttgtgacatgtgcctcgctagagcacgccgtctgatgacgctctgtggatgttcctgtcttggttcagggactaggt

SEQ ID NO: 356092 - DNA, 122 bp, Homo sapiens
ggccgtcctctgagcagcagacggggctaagcgttccccagctcgccttcacacacagcccgtgccaccacaccgacggtaccatgaaggacgaggtagctctactggctgctgtcaccctc

SEQ ID NO: 356093 - DNA, 122 bp, Homo sapiens
cactccatggcttccatagtgtcaacaggggagctgttagcacttggtctctgaggagcacgggttcaaggcaatgggaggctggcagcccagaagcttcagagctgccatttaggtgggag

SEQ ID NO: 356094 - DNA, 122 bp, Homo sapiens
gtgagaacggagaagaggctgtcccttttgcctggttcccagttgaccccaaccctaccccgtcggtgcagttttatttccatctgtcctgaggacactgattgattttgcaaaaacagagc

SEQ ID NO: 356095 - DNA, 122 bp, Homo sapiens
taaagacagaagacaggttccgcgacggattcgcgacgatacagaggcgcttagctgtgacgtcactgggccacgcccccgatgcgtaggccgggcaacatggcggcctccatgcgggcgtc

SEQ ID NO: 356096 - DNA, 122 bp, Homo sapiens
ggcccctctcacctgcttcgtctgcaaccttggagtggcgaggagaagggagctggtgctcgcagggtgccaagcagggagaagaccaccgtcatctcccgcccccagccctcttcgccgag

SEQ ID NO: 356097 - DNA, 122 bp, Homo sapiens
agatgattctctttaaaaatgatgagtcagtggagatgaactactgagctgtctgctcgtcggacgtgtctgtgcgcacacatagatcgcgcatgttttctaaatgtgtattggcaggaatt

SEQ ID NO: 356098 - DNA, 122 bp, Homo sapiens
tcgccaacggaagcccggagccgcccctccccgctcccccgccccgccgccccggacggacgggcgcgcggagccaaccccgctgccgctggctgtccaaatcccaccagagccaatgggag

SEQ ID NO: 356099 - DNA, 122 bp, Homo sapiens
ctatgtactccagaccacgagcatttatttccaggttctcggcctggattctggggtctccggagctgggagacaaccacaacaacaggaaggcgaggccccatccatctgagcttctgtgg

SEQ ID NO: 356100 - DNA, 122 bp, Homo sapiens
tcctacgtaggcacccaaatatggggtacgacttcgaatcacgtgcttttgttgtccagtcgtaaatcctgcctgatgacctctagaggtaaactcgtgcactaataggggagttgggtgga

SEQ ID NO: 356101 - DNA, 122 bp, Homo sapiens
gaacgtgataattgaacttttaatgccaagtgtcacttttctttcaggtaaatgttccgccgctgtgatatttaaggttggtttgtgggcgctgctctttgctctgcttcattttgccctga

SEQ ID NO: 356102 - DNA, 122 bp, Homo sapiens
ctcgtggttggagcaacgcggagttcaagcctggccgccacagaataattttaaatgccccgttttcagacagatccagaacgccgtctacgcctaccggcggcagatcttcaagcccgcgg

SEQ ID NO: 356103 - DNA, 122 bp, Homo sapiens
actctagattcttcccgcaaagatatgcgtgctgctttccgtcactagcgccccgagagccgggtcgggttcgcttactaccaagacttctctacttaacgcgctgcgctcgggcacttagc

SEQ ID NO: 356104 - DNA, 122 bp, Homo sapiens
cacagggccagccgggccctgccttccagagctcctggagcggcctgtcccccgggacaccgggacccacctgcagagggcttaccgctcaggagagcagaacaaggtgacctgctccactg

SEQ ID NO: 356105 - DNA, 122 bp, Homo sapiens
tgacactgcacccctccccatccccacttcctgttttcaggcacaggctgttaccctcaccgtagcccaggccttcaaagtcgcctttgagttttggcaggtgtccaaggaaggtgagactt

SEQ ID NO: 356106 - DNA, 122 bp, Homo sapiens
ccgggaatttcccagcttttctggttctcagcagaccaacgtggtctctaatcagaaagacgaagaggcaggagagcactggcctcagatatcccccatcttgtcctcttgcactgtgggcc

SEQ ID NO: 356107 - DNA, 122 bp, Homo sapiens
gcccgctgggttgctcggaggccccggagcatcggaaagggcggctggaggctcccggagcgggctcagcctgggagcccagcgactacgctctgaaatcccgggctccattccatattttt

SEQ ID NO: 356108 - DNA, 122 bp, Homo sapiens
cgccatcttgaaacctcgcgcccctccgcactcctcacgtcatttcccattcctctgtcccgccttctcttagcgccgcttgaccctggaaccatagagaatacccaagaattccaggacca

SEQ ID NO: 356109 - DNA, 122 bp, Homo sapiens
gtttgttctctgtgctgaaggtccgtcaagtcaatgcatatgaagtccaaaagaggaactcgagggtagaaagataaggttttatctgcttatggctacccagaaagccttttgagttgaag

SEQ ID NO: 356110 - DNA, 122 bp, Homo sapiens
tcttccagcctgacctctgcgacgtggacttggtgctggtgccccagcgcagcgtctttccggcacacaagggtgtgctagccgcctacagccagttcttccactcactcttcacccagaac

SEQ ID NO: 356111 - DNA, 122 bp, Homo sapiens
ccgccgccgccattaccatcagcaataacaacaacacaatgtcaacatccgcccagaggccgacacctccacaagcacagacgccgctgccgccgccgcagcagcagcaactcaggaaacca

SEQ ID NO: 356112 - DNA, 122 bp, Homo sapiens
tgcgggcgcctgctccctccgccgagcggcgtctttgtgtgcgggggtgtgggaggcgagcgcgagtccgcgcagcgccgccgagtgcccgctccctcccagggcgggtgggggcctctccg

SEQ ID NO: 356113 - DNA, 122 bp, Homo sapiens
gccttcctcagcccgccgaggtcgcgtcttccctccctttcggtcccgccggcccccggccgggccctgacgtcctgcgccctccccgccgctccgcagattaccagagcgagtactacggg

SEQ ID NO: 356114 - DNA, 122 bp, Homo sapiens
tggcgatgcctacatggtggtgtcagggctccctgtgcggaacgggcggctacacgcctgcgaggtagcccgcatggccctggcactgctggatgctgtgcgctccttccgaatccgccacc

SEQ ID NO: 356115 - DNA, 122 bp, Homo sapiens
tgcagagggagaggggagagagcacggggcaggtcaggacgcaggcgggactcagcatcccggcccacgcgccgctaggaaggagtggcaggagagtgcagctcttcccacccacatcccag

SEQ ID NO: 356116 - DNA, 122 bp, Homo sapiens
cagcggtgctcacagccaccccgtccaagataaagcctttctccagtcgcaggcgacactcgctcaggtacgccatcccaaccaccgtagcctcggagggcctttctggtgggggatgagga

SEQ ID NO: 356117 - DNA, 122 bp, Homo sapiens
actgaaaagagacgtggaagcagggttgaggtgtggcgggaacgggccgcgtccactccccgcacccccgacagcgcacctgagccccgcctcggccgcacagcgctcgccgctacccaccc

SEQ ID NO: 356118 - DNA, 122 bp, Homo sapiens
aggtgataatggaagccctagtaatggggggtggggatggcagggaacttataagcctttcgagaagggtggagcctgcccaccctgtttcctgatgccctgccaggtgtttcctggctcat

SEQ ID NO: 356119 - DNA, 122 bp, Homo sapiens
gctgcacgagcgcatctactgtgcactctctggttcagctgctgatgcccaagccgtggccgacatggccgcctaccagctggagctccatgggtatgaagctctggagttctgactcccca

SEQ ID NO: 356120 - DNA, 122 bp, Homo sapiens
gaacgtatgttgtgtgttgcagaggcctttaaaaaatagcttttagaaaaacagcagacacgtcccactctaccaagaatgtgcgcggccctagagctgagctatcaaggaccacagaggac

SEQ ID NO: 356121 - DNA, 122 bp, Homo sapiens
tctataagcacagcccatgggtgtgacctgaggttttcgtgttgttttcatggttcttttcgacgctgggctttctacgcatcctcatcttgcttccttccaaaggtgacctaagatccctt

SEQ ID NO: 356122 - DNA, 122 bp, Homo sapiens
cggcctttgtccagcggttccctctgccggatactcctctgcctgcccctgcctgatgcccgcctgcccaatatctcagctgaagcatcagaaacgtaggggtaatatcaggtctgccggct

SEQ ID NO: 356123 - DNA, 122 bp, Homo sapiens
cagctctcggccttacatcatttccaaagcattaagcagcctgcaacgcgagaatcctgccgctggtgacatctgtaacatctgacatcatttagaagacactgcaagggtaaaagagtact

SEQ ID NO: 356124 - DNA, 122 bp, Homo sapiens
tcggcaaagatgatgtagcacaaagagcgccattaacaccataaggtgtgacgtgcacagcggggcctccgccagcctaatactgggcacggctttaaggcaccgtcaaccaattagtttaa

SEQ ID NO: 356125 - DNA, 122 bp, Homo sapiens
tggagaatggaggcacacaccgggagaaaaaagagagcaccccatctacagcctccctcccgtcctatgacagtgtaactaaacctgaaaaggagaaacagcagcgggcagaggaaggaaga

SEQ ID NO: 356126 - DNA, 122 bp, Homo sapiens
aacaacttgtgggagagccgtagagccgtactgtgaagatgattcggcaataacaaggaacgaagtcctgattcacgctccaccgtggatgaacctcaaaaacgtgatgctcgtgaaggaag

SEQ ID NO: 356127 - DNA, 122 bp, Homo sapiens
tacctccccacacaactggaggtccgtggaatgcacggccactgtggaaaactccagacacgcctccatcaccacccagaaaccccactctcaacagaaacacacagacactaagcaaaaga

SEQ ID NO: 356128 - DNA, 122 bp, Homo sapiens
ccctctccgcctgcctcgacctctcccgccttctcaggccgcccccacgcgcccgcccgccgcaccgagtcccacagggtctgctcgggaaggcccggccctgcttcttcctcccggtgcgc

SEQ ID NO: 356129 - DNA, 122 bp, Homo sapiens
ggcccatggatcgctgttggcccctaactcggcaccaaagtggctgaagcagacgtttgacgaggccgacaagaacggggatggcagcctgagcattggcgaggtcctgcagctgctgcaca

SEQ ID NO: 356130 - DNA, 122 bp, Homo sapiens
cgcgccaactggtggtctggagactggcccacccagcctgttgtagccactgccaacacccgtgtggaccactctggagacaaagggttgtctcgtcactgctactgccattgcccacaaca

SEQ ID NO: 356131 - DNA, 122 bp, Homo sapiens
cttgggacgtcatcccggagctcctagcctgcccgggaggcagagccatcaggtaagagacggtcacaatgacagcaacacaatcccgcttgggttctctgtacagagttttccttttaaaa

SEQ ID NO: 356132 - DNA, 122 bp, Homo sapiens
ggaggtgtcaactacaagaccaggagcagagcagtcctggggctttgctggaaccattggcgtgggaatgctgtctcttccctcgcccgagagacgccagattcccagcgggcagcggactc

SEQ ID NO: 356133 - DNA, 122 bp, Homo sapiens
cggaaagggaactccctgaccccttgcgcttcccaggtgaggcaatgcctcgccctgcttcggctcgcgcatggtgcacccacacactggcctgcgcccactgtctggcactccctagtgag

SEQ ID NO: 356134 - DNA, 122 bp, Homo sapiens
gggttccgcaaatagggcacccacagtaacacgtgtggcgccgaccccgccgtgcgcaatcggggctttatacgattgctggagatgctgacagctcaattaaagtgtaaccctttgtgccc

SEQ ID NO: 356135 - DNA, 122 bp, Homo sapiens
cgcactgtcgcctttgagagctctcgttggcggaggcggttcctctcccggagttcgcagcgcgcaccgcggcgtcccctgggaagtgtagtcggcgtggggccggaggcatgccgggagtg

SEQ ID NO: 356136 - DNA, 122 bp, Homo sapiens
gtttttgtgtctgataagagcttacaaaggactgccttctgggagctgtcccaccgtgcccgcctcagctctctgccctcttgtatgctgggccagcttccccaccctccatcccagccctc

SEQ ID NO: 356137 - DNA, 122 bp, Homo sapiens
attgagcggccgctggcccgcccccgaaggccattgattggaggagactggacacagcgccggaagttttccttgagtcacatgattggctgggagaaacagaagctccgcccgaccgcagc

SEQ ID NO: 356138 - DNA, 122 bp, Homo sapiens
tatttattgagttacaagagtttattagtaggttagatgactctgattttcctgattccccgcttctcttggcctcaccacccacaacaatatttatctgttctaatctgtggttcttcttt

SEQ ID NO: 356139 - DNA, 122 bp, Homo sapiens
aaggatcaaggaaatgcggggcctgttgaggtgaggagcacgaggtccctccttcatcctcgcggggactttgtcaccggctcagtgtgtagacctcaccgtcccactcgaatctgtggggc

SEQ ID NO: 356140 - DNA, 122 bp, Homo sapiens
ggcaccgcccctgcccggcgacggtgagcccagcgccctctgccggccgcgcgcgggactcggggtcctactgggtgcctcttcctagatccgaccccacccagttgaaagctgtccccact

SEQ ID NO: 356141 - DNA, 122 bp, Homo sapiens
taggaccctccaagtcaggtgcgggatataatcttgtggtgcaccgttttttaagcccgtcggaaaagcgcagtatttgggtgggagtgacccgattttccaggtgccgtccgtcacccctt

SEQ ID NO: 356142 - DNA, 122 bp, Homo sapiens
attgctaattagcgcctgtgaaaaggcctagctctgatatgcgcgccgctgaaaggccgacgttaatgaagccgcggcgcgcccgcttccctttgactggccttcatccctcctccgcgccc

SEQ ID NO: 356143 - DNA, 122 bp, Homo sapiens
ggacaaagccaccacctttcacaaaatgaggccagaccacctgcctccctccagtccctgcggcctggagacggagtcaacattcttatctgtgttggatctgaatgttcctccttgcaaag

SEQ ID NO: 356144 - DNA, 122 bp, Homo sapiens
ccctccggggctgccgccgccgccgccgcgaaacgcagctccaggcgggcccggctcgggcgctcagcgggttccacagccgacaggtcgaagacgactgtccactcagggcaatgccccgc

SEQ ID NO: 356145 - DNA, 122 bp, Homo sapiens
ccgaagtcatccaaggtagcaggcaaatccggcagcagcaaactagctcggattcggcttcggtttttctcctggccggcgccacaggcccctcctccggggcgggctcctcggtgcgaggg

SEQ ID NO: 356146 - DNA, 122 bp, Homo sapiens
ctgcagcgtgccccgggtgggaccggcttttgcccaggtgctgctccaggtggatgttgccgtccgtctggctggattccttctgccagcagcaaccatgaaagagctgcaaacttcttggg

SEQ ID NO: 356147 - DNA, 122 bp, Homo sapiens
ttctcctgggggacctctcgatggaaaccagctggccgggcttggagttgatgttgcatccgaactctgttgtgctcccgttattcccagtcctcccactctggtaaagcttaaggaaattt

SEQ ID NO: 356148 - DNA, 122 bp, Homo sapiens
gggtagtggccagggcagaggcaccacaaagagagctggatttgaaccccctactccctgcgcaaaggctgccagaagctgcgctgcagtgaacacgctgcgcatgagcccctagacccctc

SEQ ID NO: 356149 - DNA, 122 bp, Homo sapiens
acacatggctccaagcctctcccagccctccttttcagcccaggagtccagccaggtctgcgtttctcccatgcatttgacgaattccaacctgatggtccactcgaatgtgacctttaaac

SEQ ID NO: 356150 - DNA, 122 bp, Homo sapiens
aggtgagggccaaggtcaaagggtctaataggccaaattgattggtcttaatcctgtgggcgatgggggccaccatgggaggtttttttttttgtttttttttcccgagatggtctcgctgt

SEQ ID NO: 356151 - DNA, 122 bp, Homo sapiens
acggacaggtaaggccacggggacatccgtggtgcactgcttgctttgaaatggtcaacccgaggacattattttgaatccccgcccctgacaagcctccaggacgtcgtatgagaaactgc

SEQ ID NO: 356152 - DNA, 122 bp, Homo sapiens
tcatctggtgccgaaacccgggaggggctccggtcttcgtcccccgtggacctacccctccgccccagaaagcaggccacagcagccggacaaaggaagctcctcagcctccagttgcttct

SEQ ID NO: 356153 - DNA, 122 bp, Homo sapiens
tggtggtgtgcagagcgtatgacccctcttcccgctgctaccgaggctgtgtgttgaggtcgaagagggatgtgggctcctaccaggaaaaggtggacgtcgtcctgggtcccatccagctg

SEQ ID NO: 356154 - DNA, 122 bp, Homo sapiens
tttcttttttggtgaatttctccaggattcacttccaatgttcccttctcctggaagcctcgtcaacttccccaagcagaacaagtgactttttaactcccttagaccttgttaatacattg

SEQ ID NO: 356155 - DNA, 122 bp, Homo sapiens
ctcagtcctgggcccgctgcatgccgggcgggtgcagggggtgtgcggggtgaggccgtgcgccccggagtggagagggcgcccgggccccgagggctcgccggagcccccgtccgccgctt

SEQ ID NO: 356156 - DNA, 122 bp, Homo sapiens
ctttagcaaggaggggaaagcagtttagctctcctgtctcaaaagattacattgccagtacgtgtctgttgatgaccagcagctataaatcaggtatgtaatttcttttgttctttcctcag

SEQ ID NO: 356157 - DNA, 122 bp, Homo sapiens
ctttactacatggcccattcctaccacactactctgtgccatgtggaccacatttgttgacgtggctggccagatgcctgctgttgaaagcatgtccagccatgtgtctcatcctcacccac

SEQ ID NO: 356158 - DNA, 122 bp, Homo sapiens
ggcagttccagcgtctaagagcggtgcctccatgggatgagaaatacaaatataacgcctcggtgtccatcatgagacgccgcaaacatggactgtctctggaggctgctaggacgcagctc

SEQ ID NO: 356159 - DNA, 122 bp, Homo sapiens
tctgccaggagggataatttgctgtaatatgaggatgagacatccaggagccgttcaaatcgtcattcaacttattttattctttatttttaaactataaaaaaaaaatcctggaaatggaa

SEQ ID NO: 356160 - DNA, 122 bp, Homo sapiens
gaggtgggagcagaaagggaaagagcttcccagggccctcaagctggctgagacacagagcggtaggaatactccagagcctaagtctgcaggtccccatcacacgttcctctcttttctct

SEQ ID NO: 356161 - DNA, 122 bp, Homo sapiens
atttatgttgtttttcctgtacctaagttcccgctgtaggtggtacctttgcagacggtgcgatgggggaagcagagaagtttcactacatctatagttgtgacctggatatcaacgtccag

SEQ ID NO: 356162 - DNA, 122 bp, Homo sapiens
gccgctggccttcacctgggaggggtgtgccctgtatgtcctgtgggtgcggtccgtcaccgcctgagggacaccttttccggcaccccaccctcagaagtgtcagcgtggagagttgggcg

SEQ ID NO: 356163 - DNA, 122 bp, Homo sapiens
gggattaagcagacgggtgcccctccccctcccagccaatgtcacctcctggtgcccagtcgagtcccccaccttggccgggattaccctccgagttccaggccatgacaaatgacatcact

SEQ ID NO: 356164 - DNA, 122 bp, Homo sapiens
ggttttgcctgaggtaagggagaggggcttttcctgagagaaggtggaggtgcccagtgacgggataagtgggggttgaaggtcgcactcctgggcttcaccccacggcttctgtgcaaggc

SEQ ID NO: 356165 - DNA, 122 bp, Homo sapiens
gagttctagtttcttcacatcctcaccaatactcagtagaggattgcatggggagggtcacgggctcccccagacccagctcagtctcagctggtatcactcccttattcttatggaaggtg

SEQ ID NO: 356166 - DNA, 122 bp, Homo sapiens
gcaatgataagtaaagatatggaacatatttcctacctggcaaaaaacatgcttattgaacgggcacgcaccttccgcccttaaatagtacataaaccaccttgtcacctgcgtgggaaaat

SEQ ID NO: 356167 - DNA, 122 bp, Homo sapiens
gatgctcaaggtcctccagctagattgtgtggatctttacatcactgaaatacccatggccgctaagccagaagacaaaatctaccctataggtgagaatggcaaatggttatatcacaagt

SEQ ID NO: 356168 - DNA, 122 bp, Homo sapiens
cacctcctgtcttctcccatacaatcctttcagcctatgaatcctcattgcattctgttgcgatttttcttgtggcacttagctcactttatcctgacttagacttatttatttactacgtt

SEQ ID NO: 356169 - DNA, 122 bp, Homo sapiens
gggctaatctcgccaccatatgctgtagcactttgaaaactgggtaggacgacttcagctcggaatgtctttattgctaaaaatataacaaacaaccaactgcaggatgactcatgcaatag

SEQ ID NO: 356170 - DNA, 122 bp, Homo sapiens
ccaaccccgccccgcctgcccggctctctcctacttccttgctcgctttcccctcggtggcggtcacgttcacttacgaaatcacccacacccacttgaagggtgcggagatggccgggatc

SEQ ID NO: 356171 - DNA, 122 bp, Homo sapiens
cgttggtttccctcccaaccctcacccccaaccccaggaagctcagtttacaagtgcggtcggtaccctcatttggtgtttttattggcttttctgatagcccctggactagacaattacat

SEQ ID NO: 356172 - DNA, 122 bp, Homo sapiens
ctccccgaccagggcgccccagcctctgggttctgccggccaggctcgtggccccgtcctcggcaccccaggttcctgggactccagctgctccctgaggatccagggcttctgaattttcc

SEQ ID NO: 356173 - DNA, 122 bp, Homo sapiens
ccgccccgcctgcccggctctctcctacttccttgctcgctttcccctcggtggcggtcacgttcacttacgaaatcacccacacccacttgaagggtgcggagatggccgggatccaagcg

SEQ ID NO: 356174 - DNA, 122 bp, Homo sapiens
ccacggggaggagagcgaaggcaccccggctaatagcccatcagccatcaaccatgtgagcgaggccatgctagatcaccccgggtcactagctgaccacagacacatagcccagaccagaa

SEQ ID NO: 356175 - DNA, 122 bp, Homo sapiens
gtgagtgttacagttcttaaaggtggcgcgtctggagttgtttgctcctcctggtgggttcgtggtctcactgatttcaggagtgaagccaaaaaccttcacagtgagtgttacagctctta

SEQ ID NO: 356176 - DNA, 122 bp, Homo sapiens
ggtcttggagcatggcggtaatcagagtaactcggcctgtggtccggagccgccagagggcgagatggggagctgattggaagaggattaacttcccgccttcttcacccaactcaaacaga

SEQ ID NO: 356177 - DNA, 122 bp, Homo sapiens
agcagttgtggaacttctagggttgtatttaaaggcccatgcaggaacagggtgagcagtcgtgactgcggctgtgtggtaaaataaggatgggagcgggaaatggggcaggagaagtaaat

SEQ ID NO: 356178 - DNA, 122 bp, Homo sapiens
cagacaagtcagggtacagaggtgggggttgggcaggggcgcagggctgaccccctcacccggtctaagcacagggtcgcagttccagtttacaaacctaaaacaagaaaaccaaaaccagg

SEQ ID NO: 356179 - DNA, 122 bp, Homo sapiens
agtgtgggaggggctggggaggctcctggggtatctttagaatgcgtttctgtgtctcctcgctttgtcagtgtttgctctggctcttcagtgcctgccgcagcctctctgatcagagcagg

SEQ ID NO: 356180 - DNA, 122 bp, Homo sapiens
caggggctgctggtggagaaggatgctggcggaaccaggggtctgaacaccaggcctagccgcagcagctcccagactcatggcagttttgtggggacacgtctgccagcccctgtgtggat

SEQ ID NO: 356181 - DNA, 122 bp, Homo sapiens
gcagccaacagccacctcagccacagcaaccatattctcagaaggctctgctataggacccggtgttcctcttggtggcagatacctgctaaatgccactgacaatgttatgagattcatta

SEQ ID NO: 356182 - DNA, 122 bp, Homo sapiens
ctcacctgtactttccttcgcccgtccacagcgccgtccaaaccgtaccagcatctctgacgaggtgtccatgatgctcctagatctggaaaagtgactgtggcgccaagcgccgcggacgc

SEQ ID NO: 356183 - DNA, 122 bp, Homo sapiens
gatagcaggggataataggagggcccacctcacggggcgtggggctgtggaaagcacacacgtaccatccatagcccacggtgtccagcgcccaggcgagacccagaccacccacgtccagc

SEQ ID NO: 356184 - DNA, 122 bp, Homo sapiens
aaaatgggaataattacactatttcgtgagattgttgtgattcatgatcaggtgggataacgcatatgaaagcacttcgtaaactgaagcattgttatttttgttcccaatcaaattcaaag

SEQ ID NO: 356185 - DNA, 122 bp, Homo sapiens
gtggaggtcgtcccggcccgggtggttccggacgccggctttccgcacctggctcggtgacggcctcggcgccccgccctcttggccacggtccgcagccatcgccccagtgagggcgcggt

SEQ ID NO: 356186 - DNA, 122 bp, Homo sapiens
gtgtgaagaaatacgctgaacggtctcgggccagcgtctttctggaagaccgactcatgacgagtctttgtgttcgttatttctttacccgtcacccagggatggtactgttagttcttttg

SEQ ID NO: 356187 - DNA, 122 bp, Homo sapiens
ggaagatgggaggaggcatggggcagttacataaggcggtcacttcaaaggtggcctctccggggtggatagccttggctttgggcagttagctggagcaccagccggcaagctgagggctg

SEQ ID NO: 356188 - DNA, 122 bp, Homo sapiens
gaaataagtaagatgttattccttttcagtatgctattaattcctctgaagctgttggttcgaaggcttacagaaagaatggtgtagcagcatcagacgataattatatcactcttaatttt

SEQ ID NO: 356189 - DNA, 122 bp, Homo sapiens
gagcagccgcgcgcaatccgctcttgggagccctgggagctggctgtgcccctgtagcatcggattccacaagactaattaagaacctgggcgggagggagagagaagctgtgcgcttcctg

SEQ ID NO: 356190 - DNA, 122 bp, Homo sapiens
tcatcagtgatccatagtccagtggtagccatgagatttcgcttgagtgatgtcctttaacgccttcacccaaagtactcaaggtatggagggtttatatcagacagagcttccccttggag

SEQ ID NO: 356191 - DNA, 122 bp, Homo sapiens
gggaggagggccgagcagggattcagattcttccgggccgatccctttctcagctccttccgccctgccgccgcccactgcgtgctgccttcgtccgtcccctcctcccccgctccttcccc

SEQ ID NO: 356192 - DNA, 122 bp, Homo sapiens
caggccatgtagacagagtggtgttgcccaaaccgcgttctgcatctttgaaaatgcacacgtgggaggcgccactctcatatctctccttgggggaatcacggtgcacatgagtgtattgt

SEQ ID NO: 356193 - DNA, 122 bp, Homo sapiens
tgatgaacatcaaagttgcagattgtgtttccaaagatgactacaacaatcccccccaaacgacaggattttttgcaatgtccccttgccagtcaaaagagggggagtctacttctccttcc

SEQ ID NO: 356194 - DNA, 122 bp, Homo sapiens
gatttaccagatctgtacaagccgcatacaaattgtacttgatactaaagaaaagacagtcgggtccagtccagttcggctgtgaacgttctcacctgatttctgtctagggatggacctcc

SEQ ID NO: 356195 - DNA, 122 bp, Homo sapiens
catgagccaagccaaggccaatcacatgacaataaaaaagactgatggcacatgcacacacgtacacacacacacacacacgctcttgaagcaggccaaagtccacagtctcactggaaaac

SEQ ID NO: 356196 - DNA, 122 bp, Homo sapiens
cggactgaccggcgggagggctagcgagccagcggtgtgaggcgcgaggcgaggccgagccgcgagcgacatgggggaccgggagcagctgctgcagcgggcgcggctggccgagcaggcgg

SEQ ID NO: 356197 - DNA, 122 bp, Homo sapiens
ggaggctgatgtgggtggaactcttgagcctgggagttcaaggctgcagtgagccaagaacgagattgtgcccctgtactccaacctgggtaacagagcaagaacctatcttaaattaaaaa

SEQ ID NO: 356198 - DNA, 122 bp, Homo sapiens
agcgcgcgaggggagccagccccggggcctagggctttgttcccaaatagccccaggtctcgaaggcgctcgccggggcggaagggcggcgtggcgcaacgggaaaggcctcccgagcccct

SEQ ID NO: 356199 - DNA, 122 bp, Homo sapiens
cgggccttagcagggttgtggactgaaagtccgggagaatacccccttccctctccaaagcgcaacccggtccgggtggctcgggggatcccagcccgggacacgcagccctgggacgaagg

SEQ ID NO: 356200 - DNA, 122 bp, Homo sapiens
cttcattatgctggtcagaagaaaaagtcatgagtgactttctcaggcctgaaaaatgtgcgtgcagtaggttaaacatatcttatagatcatggtcaaaattgcaatcttatagtgggcct

SEQ ID NO: 356201 - DNA, 122 bp, Homo sapiens
gaactgggaggagaccagaggcgagaaactctctgacctcgaccatttagctataacccccgaccctaacttcagcgctaagctttatctcatgatctactcggggatttcttacagggtat

SEQ ID NO: 356202 - DNA, 122 bp, Homo sapiens
agctccagcccggctctcaggctcgccgcattacctagacaggacctccaagtcctcaagcgcagacagcagccgctctcgtgtgctgttaccacccgccactcccaaaccgcctcccagcc

SEQ ID NO: 356203 - DNA, 122 bp, Homo sapiens
ttgaagaattcccatttgatcatgaatagaggtaatccacgtttaaaataccaggtgttgcgtaatctctacttggagattagccaccccgtgcgcccaggtgaaagatatcattcttccgt

SEQ ID NO: 356204 - DNA, 122 bp, Homo sapiens
cctggtggttggcgaagcaatgtccttcctcccgggtaaagcagtccatgcgttctggagcggagatcttggctggcgtctgtggtacccgctgcccctgcccgccccttcccccggtttat

SEQ ID NO: 356205 - DNA, 122 bp, Homo sapiens
cttgcctgaaaccgaggagagggccccagaggcctgggcccgaggacctgggcccgcagacggacagctagcagttctcggtcactgctcttgcagcgagcaggttcctcacaggcatttag

SEQ ID NO: 356206 - DNA, 122 bp, Homo sapiens
agcgggcagaggctcagacgccaggacctgcgggggcttcctggaattgggagccactctcggtgtctgctctggtgctacggtcctgcagggctgttttttttttattttgtattttttgg

SEQ ID NO: 356207 - DNA, 122 bp, Homo sapiens
agcgaggctgtgtcgcgtggcccagcgtcggcgtgacggttggacgcgggcgcggcactgcgggtcccgattgctgcagccgcttgtcagtgtgatgaagattggcacccaggtaagctgtc

SEQ ID NO: 356208 - DNA, 122 bp, Homo sapiens
taaggaccaaaagagaactgccccctcctgtcttccagcagcatacaccaaggaaagggacgctgggggccagaatccctgatgctggaatctgtgcagggtcatctgcagccttgttcttg

SEQ ID NO: 356209 - DNA, 122 bp, Homo sapiens
tgaggtgtgaggtcctggacggggtcccgggccgaggaggacacgggaccatggaggacacggagatgctgatgccggctctagggcaacacccacacccgtgttacacgaggtgtccacaa

SEQ ID NO: 356210 - DNA, 122 bp, Homo sapiens
gtctcctaatttacagcgatttcccacagccacttctaactacatcgagattttattaaacgtttaatgatggggtgcgggggccttctggctacacactcccctccacactccctttctct

SEQ ID NO: 356211 - DNA, 122 bp, Homo sapiens
ctggccaagggccagacctgtgctcacgctggggggctgaggtgagaggatagcttgagccggagaggtgagctaactaagaacacaccactgcacccagcctgggtgacaaagtgagatcc

SEQ ID NO: 356212 - DNA, 122 bp, Homo sapiens
agccctctctccggccggcccctggtctggggactcagcgaggcaaacaaagcctccatccgctggcaaggattctcaggccccgaagtccacctccgttccccggccaggggaggagctgc

SEQ ID NO: 356213 - DNA, 122 bp, Homo sapiens
ttgcctggtgcttccagagggagggagaaggggaggcgaacagtcagaaatgcagaagtgcgagccgctcgagttcggggtacccacccgcccccgagctagagtttttggaaacgaaagcg

SEQ ID NO: 356214 - DNA, 122 bp, Homo sapiens
accctgagaacccaagagactgcagaccatgggcagacaaatctctgcaaaaagcagccccgcctagataaaggaagagctgtgcggccttcgcgctagctagcttgtgtaaaggtcgacga

SEQ ID NO: 356215 - DNA, 122 bp, Homo sapiens
atgccttgtgattcttgcctttcatagaatgactgccaaatagcccggtgcctctttactcgcctgcctcgttcctgtgcatccctcctgaggtcaccacttctatgtagcctttctccttt

SEQ ID NO: 356216 - DNA, 122 bp, Homo sapiens
cccttctcaccgacgatgaggagcaccgagactgtctgcaccgtggccgccccttctcaccgatgacgaggagcactgcgactgtctgcaccctggctgccccttctcaccgatgctgagga

SEQ ID NO: 356217 - DNA, 122 bp, Homo sapiens
aggtctaacccgcaggccctctttctaattaagtgacctttccaaggagcgtcctccagccgcgtcctgggggacgagtcaggggctgagcaaggaggctcgacatctctgcgctaaacact

SEQ ID NO: 356218 - DNA, 122 bp, Homo sapiens
ctcagtccacaaacgtgggcgtaaaaggcctcatgattcaggtggagtgatggtgcgatgcgtggtgcagtgataagtcctcctgcccgacgccttatggatcatctgacatttccagaacg

SEQ ID NO: 356219 - DNA, 122 bp, Homo sapiens
gccagactcccagggatcaccctcactgaaacaagatatgcgtcttctccctctgatttccgttatcaattagaagcgtttgttaacctgcatgaaacaaattgcacattgagcagcctatg

SEQ ID NO: 356220 - DNA, 122 bp, Homo sapiens
cgcctgtaattccatcactttgggaggccaacgcaggcagattacttgagcgcaggagttcgagaccagcctaggtaatatgacgaaaacctatctctacaaaaaataaaattagcagggca

SEQ ID NO: 356221 - DNA, 122 bp, Homo sapiens
tggggaaactacaaaagaaaccacctgctactgcaaacggcctcgctgtactcagggagtcggttccaggaccccatggacaccaaatccaggcacactcacgccccacaagtggacctgcc

SEQ ID NO: 356222 - DNA, 122 bp, Homo sapiens
aggggcggggcagcttttgttggttcagcttcatcattcctcactcttattattggatatcgcatatgaatgcttgtataagttgtgaatgggaaatctgcttctcagtttctcctttaaaa

SEQ ID NO: 356223 - DNA, 122 bp, Homo sapiens
gacgctaggacctgttccccattcaaagccgggtgactgagagcctgggaacagcagttccggctgctgacaggccccacaaaggaccgctgctcccaaagcacggtcgcagtcctccccat

SEQ ID NO: 356224 - DNA, 122 bp, Homo sapiens
agttcttgtgtattatagagacacacacgccttgaaggatgtgctgggaaaacttaataacgctggtctctcttcttggagcttgtgactcttttcttctgtcatcgttactgctgcaagca

SEQ ID NO: 356225 - DNA, 122 bp, Homo sapiens
ccctgcgtctcatctggattggtctcttcccattctatcttctcagggagagcaggagcacgcacctgtattctgagccagctgtgatgttacacaacagattcattttagaggaaaagctt

SEQ ID NO: 356226 - DNA, 122 bp, Homo sapiens
ccatgtgtctccgccagctaaaaggattttgtacctcccattttaaggacaagtggctctcggctaggagggcagttgagttccactctctgccgcctgagtgtctgagatcacccgggttg

SEQ ID NO: 356227 - DNA, 122 bp, Homo sapiens
tctacaatgctgatgcaggccttcctcagggggttctccagggtcaggcagaacaaggcccggggtggccttggcagaatctcaggaactggcttcttgggctgtttcttcctcaggccttc

SEQ ID NO: 356228 - DNA, 122 bp, Homo sapiens
gtacgcgctgtgtgctaactttaattacgatcgtcaccgtctgctcccggccaccgctggcgtcctccccagctcgtccgcgcctccctcgccgggcgcgcccctagccccggccggaccct

SEQ ID NO: 356229 - DNA, 122 bp, Homo sapiens
acttttctctgaaggctctagggctccccaagcccccgcattaaactggtttgggcaaaacgacaggcattgctgagagccgccaggccgcccgccagctgcgggtcccctgtaggcagagc

SEQ ID NO: 356230 - DNA, 122 bp, Homo sapiens
tttttccagacctgaaattaacggtgactcacagagcactctgcatggccacggtcgcctcgggaaggaggaaaaatgtgcagacttttttcccctcacgcgagggcaggacaagccagact

SEQ ID NO: 356231 - DNA, 122 bp, Homo sapiens
agatatgagccactatgcctggcctcttttccttttcatatcaatttgatgtctgaaccacgtaagtaaaatcttttaaaatctaaggcagtcatatccacctaatttgatgttctggtggc

SEQ ID NO: 356232 - DNA, 122 bp, Homo sapiens
gctttagaaatgtccccaaaagtatgttcccagagagcttcaaaatccagctctccgctccgcttggatagtaaatagccccttcaaacttaacgtccaaacggaactcctggaactcccaa

SEQ ID NO: 356233 - DNA, 122 bp, Homo sapiens
agcttagggccaatcacgagctgggagggcggggccacactcagaaggggaaggttccagcggtcaggagacctggagaactttggctggcgggacctggagcccagaaaagggggagcgcg

SEQ ID NO: 356234 - DNA, 122 bp, Homo sapiens
tagctctaggaaggctggaggactcactcgatgctccctgctcctctcctccctcatccccgagagtcctcctgggaagggttgttctcccatcactctgacccactccaccctccccaccc

SEQ ID NO: 356235 - DNA, 122 bp, Homo sapiens
tttgttatccaatgatggagatcatggctgtcacttatgtggataagaagcagagaggcacgttaagtaacagagttcttgttcttgctttgaagggggctattcatgttgtccatggaatt

SEQ ID NO: 356236 - DNA, 122 bp, Homo sapiens
tccgcgcagcgggcgaagtcgcgatgggttcattaaggcggcaggtaggcagtgccccggcggcggctgcggcaggcggtcctggaatgtgcgaggggcgtgatgacagcggccagcctctt

SEQ ID NO: 356237 - DNA, 122 bp, Homo sapiens
ctctgaactggagggccggcaagcctcaaggcttaatgcaagactaaatacagctgtcagcgccttcctctgagctcgcttgggagctgtctggggggacggaggagtgaagattaggtgaa

SEQ ID NO: 356238 - DNA, 122 bp, Homo sapiens
gaggccccagcccacccctgtggccccaagaaggctctgcgacaaaatatccatgagtgccgcccacgaaggcattaaaaccaacgaccttctcaaaacttaagctgtcacaggacatttca

SEQ ID NO: 356239 - DNA, 122 bp, Homo sapiens
gcagagcgtaagacgcagaaaatgcagacgaaggttgacttctacttaaatccctatccccgaaagtccagacgtacggacccgaaggcctgtggccaaatcatgcgtgggtgcctactaca

SEQ ID NO: 356240 - DNA, 122 bp, Homo sapiens
tttcctagggtgtcttttatgaataatcaaaagcagcaaaagccaacgctatcaggccagcgttttaaaactagaaaaagaggtaaatatttacgttttaatgtctctcttcaaacctccag

SEQ ID NO: 356241 - DNA, 122 bp, Homo sapiens
ccctcccgggggagctcagagctgcatcccatgagtccttcccactcccctctgtctccccgtcagcatctctgccaatctccctgaaagagcctgttgcaccgagaccagcagggccacaa

SEQ ID NO: 356242 - DNA, 122 bp, Homo sapiens
tattctccggataactgccgcaactaagtgcagaccctcctcccctctgttacaggtggccggccaagtagttacagtacactgcgtctagactaattctgaatgctcttttagtctctctt

SEQ ID NO: 356243 - DNA, 122 bp, Homo sapiens
gagaaattgcatgtattgacaatctgcaagactgctcctggcaaaatctgccattttgtacggatttgctaccagccttgctgtcaccctgcggggattggtttttccagtaatgcactcct

SEQ ID NO: 356244 - DNA, 122 bp, Homo sapiens
gctcctacaccccacgcgccctggcccagaaccggcgctaggctcgggcagggatcacctcgaggccggggctaccccaattttagggcctgaagttacctgttgctttcagggactccgag

SEQ ID NO: 356245 - DNA, 122 bp, Homo sapiens
gcttcctccacgcacacgcggtccaatccccatgacttcatgttttgtgaagatgcaaagcgagttcatgccggcgcctttctgaatcagagatccctttagaaaccatgaaagctgcagac

SEQ ID NO: 356246 - DNA, 122 bp, Homo sapiens
attttgtgcatttacttgtttattgctcagctccttgctctaagcacaaccgtcctcagtcgaagtgattcatgatgactccccaggggaaaaaactggtcctcagggaggaaaaaaatctt

SEQ ID NO: 356247 - DNA, 122 bp, Homo sapiens
cccttgctgactcagcctttgtactgtgttctctgccttgaattcattctctcttctccacgctacctggcaaactgtttttcctccttcaggaatcagctgaagtatcaggattgccgtaa

SEQ ID NO: 356248 - DNA, 122 bp, Homo sapiens
atcctgagccattgcagggggcagggaagttcacccccccccaccacccccccgcccccccgaagccatgtcactgaaaaggcctgggggggatggtatatggccctttccccaccaggcgc

SEQ ID NO: 356249 - DNA, 122 bp, Homo sapiens
tctgtcaggaatgtggaggaggcgccctggctctggtctgaggttgcccttgaacgatttcgaggctccctcgggcaaggctgtggctccgagtgggacgaactccccgccagctctgggcc

SEQ ID NO: 356250 - DNA, 122 bp, Homo sapiens
tgaagtcccttttggaattgggaattggaggtgggtaggagaaggggtaaaaactaaatgcggccagaactgaatccagacttgcctccctatcacactgcctctggctacctctgggggcc

SEQ ID NO: 356251 - DNA, 122 bp, Homo sapiens
gccccgcctcttccccggcaccaggggcgggcccaggtgcgcccagggccggggagcggccgcgcaggtgcctgccctttgcgcctgcgcccagctcgccctgcctagccaggtgcgccccg

SEQ ID NO: 356252 - DNA, 122 bp, Homo sapiens
gtcaacgtcggtgtaactatgattaaaatgtcagtattcaaacaagggctccaacactaccgtggcccaagggcgtcttcggctcccaccccggggcgtgggcctgggggtccctcttcact

SEQ ID NO: 356253 - DNA, 122 bp, Homo sapiens
ctcagaaacagcagtcacacatgtggaacactggatgaaactacatatgacgacaacatacggttaggacatcctcccccgaccctacacatttctaaaggaaaacccaattttagaatttt

SEQ ID NO: 356254 - DNA, 122 bp, Homo sapiens
tgcctctaacaaccttccccatccagttaggtatctcgtgtgcactttctttcccacccacgctcaacagtcaccatccctctgaatgacagtagtgtttgtgggccctttagaggagaatg

SEQ ID NO: 356255 - DNA, 122 bp, Homo sapiens
cgcgtccggccatgagttataaatattaacaatttcttgctgtaaattgaaagcatccttcgcgtctttgcgtttcattaccaccctctgttctctcaagagaaattctaactttatttcag

SEQ ID NO: 356256 - DNA, 122 bp, Homo sapiens
gggcctcacccgcattatgcgcacgttgtacatgcgtgtcagtcgctcgtctctctcctccgagctgtagatctcctgccgcagcttttccgccgcccggatgtagtccccccgcgccgagt

SEQ ID NO: 356257 - DNA, 122 bp, Homo sapiens
gtaagacggcctaagccacgacatctgtggtgcatttttgtagcagcaatagagaactgacgccagcgcctgccacggtccaggctcggcgttgggtcctgccacagcggactccgggtctc

SEQ ID NO: 356258 - DNA, 122 bp, Homo sapiens
gagggccaaaagctggaccgcgggcagaggtaagaagcgattggtcgtccgattgcgtcacgtgattctcggtgggggggttcccatagaaacgcttttctgcggtccagtctagggggtct

SEQ ID NO: 356259 - DNA, 122 bp, Homo sapiens
ggattagatccgtggggcaggattagccctgttggtcccacgaagcctgggccactggtgcggtgacggtggtggggcgggcttcggaatccgtcaggagggaagcgcgcccgtggggccgg

SEQ ID NO: 356260 - DNA, 122 bp, Homo sapiens
tgctagcagcccgcaaggggtactataggcttacagcctaattcctttccccaagcggagcggtaccttctcatcgcctttttggggaactacactaaagatctagtgtgcactgaacaggt

SEQ ID NO: 356261 - DNA, 122 bp, Homo sapiens
aagtgccccctggtactttaagtgttcatgaaggcataccaagttcttaaaggtgtaccacggttcatgaaggtgcactgggttcacctttaagggcacatggtacaccttccaacatgccg

SEQ ID NO: 356262 - DNA, 122 bp, Homo sapiens
ctgattagatcaggaaaggatccggcggggttttccccgcccaaagtgggtggccatgaccgctaaggcgccaggagcgcatgaacttgaaaggtgacagcggggaactcacaacccagaca

SEQ ID NO: 356263 - DNA, 122 bp, Homo sapiens
agcccggggtgagaccagaagctgctgcctgcagagcccgaccttgcgtagatgactccgcgagtgcaaggggctgcaggcattttcttacaggaggtagcaagcttgtctaagcagaggcc

SEQ ID NO: 356264 - DNA, 122 bp, Homo sapiens
ccggcttgcctctcggccccagggaggtcggttgatgagcagtcgggaagtgggtctgcgcgcaccccgctgcagctgtggcaaacgcaaacgatgacacacaggcttgacgagggcctttg

SEQ ID NO: 356265 - DNA, 122 bp, Homo sapiens
caccacacaccggctgcctcgggaacactccagatgagcagaggctgctccacttcttggcgtcccccgggccccggtttctgagtccttctgtgcacctgacccaaatccctgctgtcgcc

SEQ ID NO: 356266 - DNA, 122 bp, Homo sapiens
tggtgagggggcttggtcgtaattagcccactgctgcaaaactgagatacagaaatccatcggcaccagctttgggggcatggagaggcagcggagagatgggggacgggttgtcagtcttg

SEQ ID NO: 356267 - DNA, 122 bp, Homo sapiens
cctcagccttcccactgcacaatgcagaaagtggctcagatatcccaggtgaccacctttcggctcaccccccttagcattaggccctgccctctgtccagaatctggcccagatggggtaa

SEQ ID NO: 356268 - DNA, 122 bp, Homo sapiens
tttaatcattgaaccaagcctggatatttagggataaattggaattcatctgggaaactgcgccaccctgctgtttttatttatttgggcagttggttagagcaaagtaaaggtcagtggat

SEQ ID NO: 356269 - DNA, 122 bp, Homo sapiens
tgttctctgattttcaactttgcttttgatacaaggtctgtgaatgtttagttgacaatacgtgtgcgcctctctcatttcctgtttttaagggctgcacttaatttatttgaaagggtgga

SEQ ID NO: 356270 - DNA, 122 bp, Homo sapiens
acgcaatcggagctcggtcggtcctttgattggctagtcctggccactttggattggccgcgcgggctggtggggaccccccccctccagctatctctgtaataagagcggggtctccgcgg

SEQ ID NO: 356271 - DNA, 122 bp, Homo sapiens
ttatacagataaaataaaaagacaaatacacaaataaggccatctgcagaattttaaactcgcctcttgcaatatttcacaagaatttctacaccatattttacatcgttcaaacttaaata

SEQ ID NO: 356272 - DNA, 122 bp, Homo sapiens
gggccggggcgccagggctggagcgcgcggctcgggggtggaggctgcagagccagcgagcgagcgaggggcgggggcgcccgggccggcgcgcaggaggggcgggggcggcggggaggggg

SEQ ID NO: 356273 - DNA, 122 bp, Homo sapiens
tccttgccttccaagctcctccctgggcttggtttctccgagggtctctgatgcccccttcggtggtcggcgggacggtcctattccctcttgcatcgctgtctcctccctcaagtctcagc

SEQ ID NO: 356274 - DNA, 122 bp, Homo sapiens
tagcctggatcctttgccagacctctctgtaggtctgagaaccaaataaggtaacacacacgaggcaggcattgaagtccaggcaccactgagtgggaagggagggtggggctgaaatcaaa

SEQ ID NO: 356275 - DNA, 122 bp, Homo sapiens
gggcctgcgctccgctcagcctcgcgggccgccatgaggtgacgaagaggaggtgcagggcgccgctcccggctccttaccgcttcaccacgccggtcttgatcttgatctgtctcacgcga

SEQ ID NO: 356276 - DNA, 122 bp, Homo sapiens
tgcggatcatccgcagaatctgcaggaagcgcaggctccggagcgcagatgtggcaaagacgttgccctgggagccggcggccagcaccgcaatggaggcgatgagcaccatgatgtctaca

SEQ ID NO: 356277 - DNA, 122 bp, Homo sapiens
acgccagcaccgggagtctcgggcccaggtggcgaggaggcgctgcagaggctttccctccgcaagggtcgggccttcgcgcctacctggacaagaacattcacctgggtaggggcagggct

SEQ ID NO: 356278 - DNA, 122 bp, Homo sapiens
tgccagaaaggcattccgttttccttttgtgaagacaggagacagagacgggagaggcgtcggcgttcaggccgtttgctgagtgtccgctgagcaccttgttcccagtccccgctttgatt

SEQ ID NO: 356279 - DNA, 122 bp, Homo sapiens
cgtgaggaggaggaatgtcccctgtccccgggggagagtgctcctacaccagcgccgaggcggcagaatggtgtcttcaggggaagagagtgcccagtttgagcttctccccccatttcgtt

SEQ ID NO: 356280 - DNA, 122 bp, Homo sapiens
taggacatcctcagaaagcaagcagactgtctttaagtttttcttacataggggtcttatcgatgtaaagactaagctgtgcctatgtgagggtgagcagacagcatgacaaaatttattat

SEQ ID NO: 356281 - DNA, 122 bp, Homo sapiens
aactgaactggggctgggcaacaggaaaaaagaagaaaccacagattagagaaatctcggcggtcaggaggcccggggtctaagatgtaaagaggtaaacagatttagggattgattgtctg

SEQ ID NO: 356282 - DNA, 122 bp, Homo sapiens
cccaggagggaggcggggccgcgcctgacccagtccagcaccctggcctgccagcctcgccgcttcgccactcaccacaaaaagacccagctgcaagaggaagaataagtggctccctccgc

SEQ ID NO: 356283 - DNA, 122 bp, Homo sapiens
ggttgccggaggctaggagctgggtgtcccggggtagctggttgcttgagctctccttgccggcgagggaggccagcccacggggccctggctcacggcccagctgggcaccaggtgccctt

SEQ ID NO: 356284 - DNA, 122 bp, Homo sapiens
tagttaaaatgagtcatcatctggtcctttgtgaaatggaattcatggtattttctgtaacgttttcctgaagctgtttctggagagccacacatttaaatacagacagctttcctgatcat

SEQ ID NO: 356285 - DNA, 122 bp, Homo sapiens
tcatcgacggcgtggagtgcagcgacgtcaagttcttccagctggccgcgcagtggtcctcgcacgtgaagcacttccccatctgcatcttcggacactccaaggccaccttctagccccac

SEQ ID NO: 356286 - DNA, 122 bp, Homo sapiens
aggaggatagtggcggcggcgaactttgcccggtagattttactgactggggtgctggcgcgcgcctttttctcggccagaatccagttattgggatagtcttgacttctacctcagcccaa

SEQ ID NO: 356287 - DNA, 122 bp, Homo sapiens
gggagaggggctgacaggggatcgaaggagataaccaggtcccccagaaaggggcgggagcgtcctcgccctaaacgcgcagcaagaaaacccgcaccgcctgggagcccagggaggagggg

SEQ ID NO: 356288 - DNA, 122 bp, Homo sapiens
ctggggccaccttcaccgcgcagaaccacccgccgcagactccgcttctgggacctggggcggccctttctaagcctgtctgtctcgggccagggccaaggggcccgtcgcccatctgtctc

SEQ ID NO: 356289 - DNA, 122 bp, Homo sapiens
acgcacaaacgccaggacttggcttggcctctctcttagttatttgcagctctgcccaatcggcgcctccgggacggcggagacggtgggcttcttgggtgcagctccacgaaggctggcat

SEQ ID NO: 356290 - DNA, 122 bp, Homo sapiens
tttttctttagaatagatcacagaaaggcaatacaaataagaatattttctaaggccgggcgcggtggctcacacctataatcccagcactttgggaggccgaggcgggtggatcacgaggt

SEQ ID NO: 356291 - DNA, 122 bp, Homo sapiens
ctgacacatgccacctacacagcacattaaacacagacacacgccacacataggacatgacgcacacaccacacacacacagattatatatgcagatacacacaaaaatcacacatccatca

SEQ ID NO: 356292 - DNA, 122 bp, Homo sapiens
gctaggaccttggttttcagcttcctatgtcactgctcccagaaagacacccatgaccagcgcctagtccaagtcagaaactccttttacatggcatcaggttactctgcacctgcttgctt

SEQ ID NO: 356293 - DNA, 122 bp, Homo sapiens
acctgcctcggcctcccgaagtgctgggattacaggcatgagccactgtgccctgccagtcgcatttgttttatagaaaatagtattaaagttacctgggtttaaatgtttaatcttccccc

SEQ ID NO: 356294 - DNA, 122 bp, Homo sapiens
caaccctacctaaggcgggggacagcacagtgttctcttctcctccagagttcaggaagacgtccagggcctcctggtccgatatgtccatcaggtccatctgctccagcatgtccacgttc

SEQ ID NO: 356295 - DNA, 122 bp, Homo sapiens
attgccaggcagcacctgacactcacctggcatccgcctcactgtaatactcccgggccacgatatcttcaaacagttccccaccagtgaccctggggagacaggcatggaatcaccctcta

SEQ ID NO: 356296 - DNA, 122 bp, Homo sapiens
gcccggcccgcggggtcactgcactgagccgggcagtgtgtggtggtggtggtggtgcagcgccgccggcgggggcggtgggggcgcggagggtggcgatgcgccgcccccgccaggcccta

SEQ ID NO: 356297 - DNA, 122 bp, Homo sapiens
gtcacttgtttttctgctgggctttcccgcctcccgccggccgctgacgtggactgggggcgtcacagcctctacctcagctgccgggaagtgcttcccttatatgggcacagactccggag

SEQ ID NO: 356298 - DNA, 122 bp, Homo sapiens
tgagcgtatggtgggcaagagagacctctgctggatgaatgatggcaaacaagcgctgctcggccttagcagaaaaacaagaaacagtttttacagtggtgcttttggaggaggagaaaaat

SEQ ID NO: 356299 - DNA, 122 bp, Homo sapiens
tccgctcctcaacgcccgccgggtgcaatctgctctctccgggagacgaacgcgaagcgacgtggaaacccttccaccaaaatgagctgtgatatccttttgatggctataatttattccaa

SEQ ID NO: 356300 - DNA, 122 bp, Homo sapiens
cgctgcgctcggtgaagcaggtcccgctggctgcctctgactgaatgggtccaggctgggcgagtcggcccagcgctaccagcgggtttgtgtagggccccgcccatctcatctacatgttt

SEQ ID NO: 356301 - DNA, 122 bp, Homo sapiens
gcgagggatcggcttcaaggctattcctcgccgcctgagttgcctgcagacgcccgtctgcggcttacagccttctttgcatccagcccccagctgctgcacgttttcttcctcctacactc

SEQ ID NO: 356302 - DNA, 122 bp, Homo sapiens
ccttttctttaagaacaaaggttggagcccaagccttgcggcgcggtgcaggaaagtacacggcgtgtgttgagagaaaaaaaatacacacacgcaatgacccacgagaaagggaaagggga

SEQ ID NO: 356303 - DNA, 122 bp, Homo sapiens
gttgagggggccgaccaccagaggcaggaccagcagcgcgggctcctggccagcagcctccggattctgcatcatgaactccgagaagatgtggacggccacagcgcagcccagcgcagtcc

SEQ ID NO: 356304 - DNA, 122 bp, Homo sapiens
tcagtcctcgtgtgctggccccgcccccacagcctggccctccagttgtggccctgcccccgtagaccacgcccctctggtcacgccccccaagcccccactgagactctggcagccgcagt

SEQ ID NO: 356305 - DNA, 122 bp, Homo sapiens
gtctgtgagcaggaaaagaggaacctcatgccctcagtctctacttcagggaaaagtttacgaagatgtggcttgagtcaatgaaagaatgagtcatttgtcttcaaaaggaaaggtcatat

SEQ ID NO: 356306 - DNA, 122 bp, Homo sapiens
ccatcacggggcacagagtgggacgcctgccatgccgtcctccctgcaaaccacagccaacgtccaggccccgcctttcactcgaagctcagcccttgttctggccggggaatctggtgcat

SEQ ID NO: 356307 - DNA, 122 bp, Homo sapiens
gaatgccatatacacacctaaatatactccaatgtataaattgcagcctgggcaacatagcgagaaactgtctccaaaaaaaaaagaaagaaaaaagaaaaaaacaggcgcagtggctcacg

SEQ ID NO: 356308 - DNA, 122 bp, Homo sapiens
catccagtcatccagtcatccatccaacagacacatgcagaattacatgcagacaaagtacggcagtaggagaaggtaggtacttattcatggagccccttctaggcctcattcctgggtag

SEQ ID NO: 356309 - DNA, 122 bp, Homo sapiens
cttcccggtgagggagcgggggtgggggggatgcgcaggcacctggaacaatcagggcaccgggagaagccggctcagctgatgccggtgatgagtttctctcattgaaatcctcctcacct

SEQ ID NO: 356310 - DNA, 122 bp, Homo sapiens
gtcaccgacaggaagcgatgtgtgcatcaatataaataagccggtggggcaactagattgcgtgcatccttccagttccgagtgaggctcctcaagtctaagcaagagaccaagttctttct

SEQ ID NO: 356311 - DNA, 122 bp, Homo sapiens
ggggcggggcgccggggtcacgtgcctgccggcttctgcctaggcagttccagggaggggcggggcctgaaatggggcggtggcaccgagagggaaggcggctgctgggcacgcagccggag

SEQ ID NO: 356312 - DNA, 122 bp, Homo sapiens
tataaagttaaaaattgagtccaggtagcctcctcaatagcagccctacttgaaatcttgcgtaataacacgatcccttctggaagtactgtgacgagcaaaatggggaagatttttaagga

SEQ ID NO: 356313 - DNA, 122 bp, Homo sapiens
tgcacttctcagagccacattggcaggtgaaatatttgcttttgatgtcccagaagcggtcgccatagtcaaacctgtcagaggaaaacaggagcttgtgggacctggacccagccaccaag

SEQ ID NO: 356314 - DNA, 122 bp, Homo sapiens
tgggtgcaggctggccgttgtgctctgttgcaggagctcctgtcaggctgctggtctgcgcgtgtgctctccgagtgcctgtcactctggctgactcactgtgtcagtgtcaccgtgcagct

SEQ ID NO: 356315 - DNA, 122 bp, Homo sapiens
gacacacggagggaggggaggtgcagccaggtaggccccgaacaccacgttgccaggactcggctcctcggctcaaggaaaagggacagcggttccgtggctgtgctctgacacacctagaa

SEQ ID NO: 356316 - DNA, 122 bp, Homo sapiens
atcttaccacttattttactgaggaggaaatggaatctcagggaagtcatgtagccagcacgtggcggggcctgactccagcctgtaaactgtaaggcattttgggcttatctactgtgacc

SEQ ID NO: 356317 - DNA, 122 bp, Homo sapiens
tacctcctggtaaagacacttcaggtccttacccaaagaccttggtctaaaagatactttcggtgtccctcatcatgcgatctttccgctctacctaagcggtgtaccaaatgatctgcacc

SEQ ID NO: 356318 - DNA, 122 bp, Homo sapiens
gtttgcaatacagaagagattaaaacaagtatacaaatgattttagtacaaggtagaatgcgatggccactagagaaaaaattaagaacaggtgagaagggctttatttttatgcttataaa

SEQ ID NO: 356319 - DNA, 122 bp, Homo sapiens
tactcgggaggctgaagcaggagaatcgcttgaaccccagaggcggaggtttcagtgagccgagatcgcaccgctgcactccagcctggtgacagagcaagaatctgtctcaaaaaaaaaaa

SEQ ID NO: 356320 - DNA, 122 bp, Homo sapiens
cacagagggtgtcttgtgtctctagtgccccacatgtggagaggtacaggaagtagacagcgataaggaactagcacagggcaagtgagccttgatgccgacgggccccttctgggagcccc

SEQ ID NO: 356321 - DNA, 122 bp, Homo sapiens
atcccacacaaaaggtctccttagctggagagccttaccaggtgcatggaggggaagacgcggtaccataaagatgaggattcctctcaaagtaatatatgcattgaatgaaatgcctactt

SEQ ID NO: 356322 - DNA, 122 bp, Homo sapiens
ctgggattacaggcgtgagccgctgcacctggcctaatttagtcttcaaactaaatttgtcgtaatttcatcttttgacaactgcttctgtcctgcctttttttcacttgccattctaatgt

SEQ ID NO: 356323 - DNA, 122 bp, Homo sapiens
ttgcccggccccaggtaacgctggcggtgggtgggcctccagcttggagcagagaccccccgaggcatctgcagacagaactggatggacccatgaatacggatttagctgctggaaaggtg

SEQ ID NO: 356324 - DNA, 122 bp, Homo sapiens
agggagggcacgaacagaaaggtgctgcgcatgcgtattgaaaaacctcacctactctcgcgggtcctcagcgttctcctgcggaacctttgaacggggtactcgagcccacaggggaagag

SEQ ID NO: 356325 - DNA, 122 bp, Homo sapiens
tggagcattttgactaacagaaaagtcaggatgacacaatgcaagccgagaaaccccacacgagtcctgtgcaaagacaggtggccccgctgcctttccgagacccggagcacacgctggga

SEQ ID NO: 356326 - DNA, 122 bp, Homo sapiens
tgtggagctgctgcatggagaaggagataccggtgtgtggggtggggcatgataaggggccgtggagcccgaaggtcactggtcaagacaaaagtctgtgtcctcgcagacgctcaccccac

SEQ ID NO: 356327 - DNA, 122 bp, Homo sapiens
ttccccgcggttacgaggcataccagaagtccaagtttctttgttctgtaccaggacggacgctggtcataaatactgaaccatcgtagcccagccacttcacccacaccagggtaaaaggg

SEQ ID NO: 356328 - DNA, 122 bp, Homo sapiens
ccctggactgaggggcgaaaactcttaagtttagctcgggaggcccagctgcggtagcatcgcggccgccgtgctgtcccctgcggggcgcgcgggctggcggatcccggctgctgcgcggc

SEQ ID NO: 356329 - DNA, 122 bp, Homo sapiens
cttagccgtgcgggaatgatgccgagcctttagcccgatcgggggcggcaatgggcgcctcgccggatcaggagcacagccgacaccctgccggatccagaggggtggaagtcagcggcggg

SEQ ID NO: 356330 - DNA, 122 bp, Homo sapiens
gtagaggcggtgaggggcagtggaggtgagggtgctctcagccctatcagtcccgaggaacggtcccgggccccagcccttagccccgccagcagggcgcctgcacaacccgcctcgcagct

SEQ ID NO: 356331 - DNA, 122 bp, Homo sapiens
acttctgcatacccagctctgcccacttggagctagtgtccaggactccacagcactacccgcactaaatacctcggtctcagtcttgtgacagaaagtggccagtgtggtggacatagtgc

SEQ ID NO: 356332 - DNA, 122 bp, Homo sapiens
gcgcccacctggaactcatgctggcctgtgagtgtggcgcgcagtcccggttcccacctgcgcctctccctctacacctctcctctccctccacacttcccggtaagagggagccggctctg

SEQ ID NO: 356333 - DNA, 122 bp, Homo sapiens
cgccggcgcacaaagcgggggcacggtgctggcagagtgggtgggacctgcctgtggccccgtttgcttctgttggggggcagctcccggaggctgctcggggagagcagcagggtgggcca

SEQ ID NO: 356334 - DNA, 122 bp, Homo sapiens
tccccggcccggccgcctcctgcaggcagctgctctgtttgcgcggggagctcagcccggcgccccgcctcggcgcccatgaccagcgacttccagaagtcctgacgccccaggtgagtggc

SEQ ID NO: 356335 - DNA, 122 bp, Homo sapiens
aatgttaactttatttcagtaatgaggtgccaaggcatagaacaatcactgtggctaacacggtgtaatcacagtgatgagatccgcatgctgcgaggggagggcgaggggaggatcgtcag

SEQ ID NO: 356336 - DNA, 122 bp, Homo sapiens
gcgcgcaggagggggattcaaaggttggcgttgccacagtaaccctggagtggaaggagacggggattagagacctcgcgggagaaattagactaacagcctgggaactggagggatggagg

SEQ ID NO: 356337 - DNA, 122 bp, Homo sapiens
ggcacccccttgggcgtcccttaggcacctctgacactgaccctgaccgccctggcagcacgggccctcccagcagccttgccaaggggccagctccagcaagtgggcaggccttgggctag

SEQ ID NO: 356338 - DNA, 122 bp, Homo sapiens
gcttatctgcgccgcgctcgccagctccgtttcaattaacattccagtgccgccgcccgccgcgggagcggagtccccaccagcccctggaaaaataaactctaggcctagcggctgtgcgt

SEQ ID NO: 356339 - DNA, 122 bp, Homo sapiens
agtgatcttcccacgtcggcctcccaaagtgctgggattacaggcatgagccaccatggccggccatcagacctccgtcttgacgctgtcaaaataagaataatgaggatgatgatattttt

SEQ ID NO: 356340 - DNA, 122 bp, Homo sapiens
tcctaagtgatacctagaaggtccctgctagactgacctcttgggaggggagggaataaacgagtctcaggtggtggaaccagagcttgctggagaggagagtctctcctggtgaatggaag

SEQ ID NO: 356341 - DNA, 122 bp, Homo sapiens
tgttgtgtttcaaaaatttcatcctagaagttctagaactctctcttataaacagattatcgaattgttttgataaattctaaaaaattgccaattgactccaaagcatccaagcccttcag

SEQ ID NO: 356342 - DNA, 122 bp, Homo sapiens
ttcatctgcctttcctgcaggcacactctccaggatgcatgcactccaaatctgtacagtcgcacgcacaaaatgcccaggctcacaatcgcaccctcctacagagctacccagattcacac

SEQ ID NO: 356343 - DNA, 122 bp, Homo sapiens
cacgtggttcaaccagaagatccgcagaatcaaggcccggcaagccaaagggcgctgcatcgccccgcgcccggagagtcgggacccatctggcccattgtgctgtgccctgctgtgcgtta

SEQ ID NO: 356344 - DNA, 122 bp, Homo sapiens
catttatggaaaaggaagaggatcccaggtacagcaggatgggggaagcagagtgggcggcggggtttgggcttggcaaagaaaagcaaaacagaaggaagaaagaggaagaggaggccgcg

SEQ ID NO: 356345 - DNA, 122 bp, Homo sapiens
ccttagtcccgccttctcgttccagagttttgtgcgaaggaaaccgatggggatcggaaccgtagcggttgagctgctgctgctacggatatctgacagaagccttcggtggttgtcggcct

SEQ ID NO: 356346 - DNA, 122 bp, Homo sapiens
tttcctccggtgtccgggccccgcgcccctgtcatcctcactctgtcgtcctcaccctgtcgccctcacccggggcgattctgcgccccaggggacttttggctatagttggagacggtttg

SEQ ID NO: 356347 - DNA, 122 bp, Homo sapiens
gttctgttttcagacaccaccacccccctcagaagcagaggcgacatattcattccattccggaaagtttcctgaagcacgcccccctgcacagacgagtgacgaggggaccccgtgagagg

SEQ ID NO: 356348 - DNA, 122 bp, Homo sapiens
ttcccagtcaaaagagtttgagaaacagatgcctatcccggctcttggagatacacaaatcgcattaacatattaaagatgctaacagatcctgcaggcaagattcccttttaacttctttg

SEQ ID NO: 356349 - DNA, 122 bp, Homo sapiens
ctcaagtgatcctcctgcttcagcctgccaaagtgcttgggctacaggcatgagccagcacgcccagcagcactactgactttttatatgcattctgaaataaacattttatttgaaatggc

SEQ ID NO: 356350 - DNA, 122 bp, Homo sapiens
gagtcacagcccgtgatgaacacatacttatctctcaggtggctcagcacctgcctctcccggtaccagtgcagaaggtagtacaggcccacgaaaaccgccaggtagagccacatggcttt

SEQ ID NO: 356351 - DNA, 122 bp, Homo sapiens
gtgacacagcgttcaaccccggataatcctgtcaaaaaaggggtgtggagagagcactggcgtcagctggaagctaccagaggcctgagcttttcatccctattagggaaatgaggtagcgt

SEQ ID NO: 356352 - DNA, 122 bp, Homo sapiens
ttttaggctttggccctaccatcctcgtgagcttcctgtccaggaggatcatgaatgccccggttctactaagtgcggaccccaaggtccttcccacccccgagccaactgctaaattccct

SEQ ID NO: 356353 - DNA, 122 bp, Homo sapiens
cggcctctacacccagggataaggagcacgagcaatcactaggtgccaaggagtttgaaacggagcccggcggagtgggacaggggaatccactacggctaccggggccaggcgagtgtcct

SEQ ID NO: 356354 - DNA, 122 bp, Homo sapiens
ctcacgtccacatcgatctccgacttgctctgccttcctcttctgctttcaatgctcctgcgctgagagggggcctgcctgggtcatcaggagattctcactaccccggggtctgctggtta

SEQ ID NO: 356355 - DNA, 122 bp, Homo sapiens
tgcgtgggggctgagtcccgtgtggctctgtgtgcgtgggggctgagtcccttgtggctccgtgcgtggaaactgagtcccgtgtggctctgtgcgtgggggctgagtcccgtgcggctctg

SEQ ID NO: 356356 - DNA, 122 bp, Homo sapiens
ctggccgcctaataaaagctcatccccgattggctgccccggcaaatcggagtgtaaagccgccccggattggctgaaacacttcctgagcgattatctttgtgaggctcgggtgagcaaga

SEQ ID NO: 356357 - DNA, 122 bp, Homo sapiens
acaagaaatgtttacaatgaagggcatcacagactgcaaaccaaacagggtaggaggacacgggaccatttccttttcctgtctccatctgactctggaaggcggggacaagacatttaaaa

SEQ ID NO: 356358 - DNA, 122 bp, Homo sapiens
tgcgatccaaacgccctggctctcaggcctggactctagggcttagccagatgcctaaaccgcccaagccgagaaacaacttagaagacagacataaccctgggattcagggaaggcgcgag

SEQ ID NO: 356359 - DNA, 122 bp, Homo sapiens
gcgcgtccagccgaagcctgggggtcggagagcttgtgtgactgagaacgtttcggaaggcgtttctgacctttgcacctgccctcccagctcgttggcttgctcgtgtttgttgctggata

SEQ ID NO: 356360 - DNA, 122 bp, Homo sapiens
ctggcgcgggccgcccgctgaattccaggggccgcagtgcggtgggcttcggctcagatgcgtcttctggtgcatatgaagtacagtatgtgtaaggtaatttagaccagcggtttattggc

SEQ ID NO: 356361 - DNA, 122 bp, Homo sapiens
atacaataaaaaaccacttatcatagcaagaaccagaaaaatcacaaatgaatgaagagtcgattgagactccaacataaagatgactcaggtgctgggattacctgcaaagaattttagaa

SEQ ID NO: 356362 - DNA, 122 bp, Homo sapiens
atgttccctcccaaaggagtcccagataaccacacaaaagaggagtttgctgagtcagtccgtcgcgattctccaataggatgcagacagactgggaaagaagaaagtttatttctgcaacc

SEQ ID NO: 356363 - DNA, 122 bp, Homo sapiens
acgtagccatccagtctcttagggaccagctctgggggatcccaatgcaggagtaccccccggggtgtcctcactgccaccagaccccgcggaggggacaggggaggcggtatctctgttgg

SEQ ID NO: 356364 - DNA, 122 bp, Homo sapiens
caataaatcacagaaaaacctaagtaacgaccacattaagattgagaattcggccaggtgcggtggctcatgcctgtaatcccagcactttgggaggccgaggtgggcagatcacaaggtca

SEQ ID NO: 356365 - DNA, 122 bp, Homo sapiens
tgtacaaataatgggacaataatgcttgcttcatttgatggctgcctgtgttcttcagcacgtttccatcctgttctaagggagttggaagttaaaacccagtttctggccataaactttgt

SEQ ID NO: 356366 - DNA, 122 bp, Homo sapiens
ccggccagctgacctaaagcaccatgctttaccgcatgcctgctaaggagagcctcttgccgggagacagcctgggagtatgtcaggcgcaggaggaagcacaggccccggcctggatgccc

SEQ ID NO: 356367 - DNA, 122 bp, Homo sapiens
ctggtatttactgttcggatcattcaattagctccaccatgccctctatcaaggttgtatcgtcagtgggagagagaggctgccatgtgtttacttcatcttacctggaacagaacacagta

SEQ ID NO: 356368 - DNA, 122 bp, Homo sapiens
ggaggtgagcagagggcagggccaggagaggatcgtgtccaggcgaagactcctgctcatcggacacgccacgctgggaatctgagaatctgtggtgggaatgggccgggctggcaggaaca

SEQ ID NO: 356369 - DNA, 122 bp, Homo sapiens
gttagtgactgaaagtctaggtgattgttgagtaaggtatcttttagtttttgagaccagcgataaaatcatactgtgatgacaaaggtacacacaccatgacaacaaaaaatggagatgta

SEQ ID NO: 356370 - DNA, 122 bp, Homo sapiens
aggatctggatctgcactttatggagtctttttgaatgacacaggagctggaccacaacacgcttctgagcaggctgtaatcttttccccattgtggaaagcaagcctgtctgtgacctcac

SEQ ID NO: 356371 - DNA, 122 bp, Homo sapiens
gctttgcagcttgccggtgagccaagagccggtagagcagaggaggcgcacggttcgggtcgtgtcaccatttcttggcttgctgacctggccaggagctggggatggcggcagcaccgcgg

SEQ ID NO: 356372 - DNA, 122 bp, Homo sapiens
agcatctgtaaaaaaaaaaaaggtacagtgtcctgtattgatgcatctcactgatacacacgtgctcgtctcactccaggtaatcacacctgctaataagcagcagaagtaggatttgaact

SEQ ID NO: 356373 - DNA, 122 bp, Homo sapiens
gctggtggagataatgggtgcgaagatcccccgaggccctacctaggtgcagcccagggccggccctgctagccccgccgacccccagcatctccacaggtccatgcgtggcaggcgtggtg

SEQ ID NO: 356374 - DNA, 122 bp, Homo sapiens
aagagggttttggaaagaggcatcagaaaaaaatggcggaaggtcaggattgtgttgtcccggaagccagtgaaaagctaacttccagacatctagcattaggagactagaggagaatataa

SEQ ID NO: 356375 - DNA, 122 bp, Homo sapiens
catgttttcttatttcctacgagtttatgtgcttggaagcgagcgtggtcgtggaaaacccgtaaccgctaaattcatctgggtccccaaagactgagccggctggcctcgttatttatgtg

SEQ ID NO: 356376 - DNA, 122 bp, Homo sapiens
agtcctgccccaggtcccggccctggcaggtttcctacccccaggtaccctcccctgctccggccaacagaccacatcttatgagaatgctgtcagccttgggaataagtgactggagagcc

SEQ ID NO: 356377 - DNA, 122 bp, Homo sapiens
tcgttgcctggcgactagtccctgcggcttagcggagagggggcgtcggcgttgggctctcgcctgtcttctctggggggatcctcgggatactcccacgatctaggacagggcaggggcga

SEQ ID NO: 356378 - DNA, 122 bp, Homo sapiens
cacccccagacctggtgccctcaaacaccagcagttagggctctgattccctgcaccactcggagccaagatactagcatctcagctgccagttccccctgaaatataagccttggccttca

SEQ ID NO: 356379 - DNA, 122 bp, Homo sapiens
aggctgaatacatcctcctcctgtgtggaggacacgaagcaatactaaaatcaatacactcgatcaggtcttcatcagataccacgtcactgtgggtagagtgctagttttcaacaaatgtg

SEQ ID NO: 356380 - DNA, 122 bp, Homo sapiens
gggtgctgacatgaaacctgtaaacagttgcatcaggagattgttcaggaaactatcttgcgttttcttcctttgctgcttaccaaagcagtctaggcttggactccaagaatcaagacgtc

SEQ ID NO: 356381 - DNA, 122 bp, Homo sapiens
agttccggaaaccacggctccctcttccggtcccggggcactgtgggatatggggcggggcggctccgcccatccccgaccagccctgggatggctccacccgcgctggctccaaaatagcg

SEQ ID NO: 356382 - DNA, 122 bp, Homo sapiens
ctttcctaagaaggcctagtcctacccaggattctgagcaagggaggctcctattggagccgctacagcctcgttcttagcttaccgagaaacagcgcccgacacctggcccttcgcagctc

SEQ ID NO: 356383 - DNA, 122 bp, Homo sapiens
atctttgcggcggctcctccggctccgctcgccgccgccaccaacaacaacattcggagacgtcactcccgtcacgtgacccgacccggagctaaaaatagacccagaccccccccccagcc

SEQ ID NO: 356384 - DNA, 122 bp, Homo sapiens
ggtctctgcctacttctgactttacccttgacaatctttcacaggccccctgaactccaacgcagagcctcactacccaatcctttctacctttggacctgcttctgcactgccctgctccg

SEQ ID NO: 356385 - DNA, 122 bp, Homo sapiens
tgctgatggagatgagaacatggagcaaatgaaaataggattgggagagtagaaacctgacgctcagggattagcacagtccccttcttggtggttgagaaatttatgaagtcagaaagctg

SEQ ID NO: 356386 - DNA, 122 bp, Homo sapiens
atccagagagatcacaagccgtacgcaagcagcagcagaaagagcgagagcgcgagcgcgcgtcctctccgcggtctggggccagacagcccccagactagcccgaatcaccccccaagcac

SEQ ID NO: 356387 - DNA, 122 bp, Homo sapiens
aaaggaactcagccaagagatatgcaggttgtgcttagcagccgatcagtttgagacctgcgaggccgcatccccagggtttttcatctcttctgtttccatttgtgtgagtacagaaaaaa

SEQ ID NO: 356388 - DNA, 122 bp, Homo sapiens
ctccggggattagactctgcgctgaccaaactgggctctcgtggcatcattccttggttacgcaggtcaagtttccattgttctcttgcctctgaggcccactgggtccggggcagactgag

SEQ ID NO: 356389 - DNA, 122 bp, Homo sapiens
tagggtgtcctacccaggggctggagactctgtgactcactcagaaaacatccctggctacggcccgctgcatccccatggctctcccctagaaggatgttctgcaggatggaggcctgaag

SEQ ID NO: 356390 - DNA, 122 bp, Homo sapiens
ttgggactaagtacaacgggaaacacatgaagtggcattgccagcactcacgcctggcctcggcctgcccaccgagaagggccttcctgtggaaacctggtggcctgcccgcactggggggc

SEQ ID NO: 356391 - DNA, 122 bp, Homo sapiens
gtgcgtgcgttttaaagcgtgctggaaacgtctacaatggcagcgcagccagcagccacgcggccttggccacccccgagctcacggccgcagctcggcccgggccccctggacgtccgccc

SEQ ID NO: 356392 - DNA, 122 bp, Homo sapiens
aaaaagacgtcccacggtcgaggtatccttgaccaactccccatccattcatttgttcaccgtccacaacccatctgatcaggaagcatttccaggcacctgcggagcactaggcagtgtgc

SEQ ID NO: 356393 - DNA, 122 bp, Homo sapiens
atcttgagaggcgattctactgatgctcccagctgattaaaacctcttattccctaaaaccggtgtccgagaggttttgtctgcaacgtgtcctgctacagtagtcctagctactcaggggg

SEQ ID NO: 356394 - DNA, 122 bp, Homo sapiens
gctactaagtcaatagcatcacagtaacagtacccagtgtctttcttattcaagtatacacgctatttttaagacttaaaattaagtcttaaggctataataaagatatcagtagctaggat

SEQ ID NO: 356395 - DNA, 122 bp, Homo sapiens
gagttgtcctccattcagcccactcaagggttgcacaactgcttccagccggacggagctcggccggctgcgccggggcctgtcccaggtctgcagtggggaacctgccgggccacgttggt

SEQ ID NO: 356396 - DNA, 122 bp, Homo sapiens
tatcagaatggggaagaaaggggggaaaaacggagagacaccaagaaagaacgaaatctacgcggacccttgggtctccaaaagggaagcagtcctgcattaagtttaaagaaggagcgcgg

SEQ ID NO: 356397 - DNA, 122 bp, Homo sapiens
ttgggttacagggaactgcaaacatgcaattagatcagagatacctacaggtgcacaagccggtcaaagtcacacgcagacacaggtgccggcacactgtcagactatagataggccagtca

SEQ ID NO: 356398 - DNA, 122 bp, Homo sapiens
gaagggagtcaagaaaccagttaagaagctggggtgggaatccagtctcctgctcttgggcgccagaccatgagaagcaggtgactgagaggagtgggaagccgtgctcctcaggagacagg

SEQ ID NO: 356399 - DNA, 122 bp, Homo sapiens
gcgctctggcttctgggtcctgtcctgcgcgatcgcggggtcttagacagctcaactcgccgagatgacctgggcacctctgcgttgaatcggcaaatactgatcaagccgcatttattctg

SEQ ID NO: 356400 - DNA, 122 bp, Homo sapiens
ctgagcctcacctgcaaaaatggggaccatgactgtagcctccacctcatagggtgattacgatgatgaagtcatgaattgcacataaagccttctttctataccgtgcccagcacataaca

SEQ ID NO: 356401 - DNA, 122 bp, Homo sapiens
ggcaagaggaaaggtgtccccttcagcaggacggtgtccagagtggagtcctttgaagaccgctcccggccgcccttcctgcccttgccactgaccaagccacggtccatctccttccccag

SEQ ID NO: 356402 - DNA, 122 bp, Homo sapiens
ggacaagaaggaaaggaaggaaaagcgtgcggaacctgcagtgcaattgttgggggaagccggtgagaagtcaggcttggtgagggcagatacctgtttctgcctccacaggacgctgctct

SEQ ID NO: 356403 - DNA, 122 bp, Homo sapiens
gcgtattttaattctcccccttgccaacaaccctttgatataataatcctcattttaaaacgggcagaaattgaagcttaggaagatttggtaacttagtcaaggttacaaagccatcaagt

SEQ ID NO: 356404 - DNA, 122 bp, Homo sapiens
gtcagtgggctggggtgtgatctgtgggcgggctggggtgcctgtgcagtgatctgtcggcgggccggggtgtgatctgtgggcgggctggggtgcctgtgcagtgatctgtccgcaggctg

SEQ ID NO: 356405 - DNA, 122 bp, Homo sapiens
ccgcgcgcccagctcactccgcaaccagtggcctgccccgccccgttccgtctagcagcacgtgataggctatccccgcccgggtcatgctattattcgcgtagataaaccaattcctggtc

SEQ ID NO: 356406 - DNA, 122 bp, Homo sapiens
ctcagacagtcggtccatcctcacttggaaccactcctcaaactgcagcgtgctctgcaccgcatggccttcaagctgccgcagatctcatgcagtgcagacgccgtgacatcacgtcacac

SEQ ID NO: 356407 - DNA, 122 bp, Homo sapiens
ggtgctatccgcggacccgggggctccccatgagatcagctctcggaacaaggcaagtcccggcagggccaagcccagtgccgcagctaatggcttcaaagcagccagccagccctgggcac

SEQ ID NO: 356408 - DNA, 122 bp, Homo sapiens
agttaggatattttattaagtgggtccttttgtaatgcataagcacgatgattgggttttcgtgttcatgtgagtcatgcctccctcaaaccttgttaggacattggcacattaccaatgtg

SEQ ID NO: 356409 - DNA, 122 bp, Homo sapiens
agcagagacgtgcagccgaactgaggcaggaccggggagagcgcagccaccgcacagtcacgcacagtcatcaggaggaatttcttagaggcttaaataatcatttcaacagctgcttattt

SEQ ID NO: 356410 - DNA, 122 bp, Homo sapiens
cttggctcataaaagcagagtaattagccgggcactatggtgcgtgtgaaggcgcggtgacggtccctgcacccactcccgtgccctggtgtggctccagaggcctgctgtagcccaaccca

SEQ ID NO: 356411 - DNA, 122 bp, Homo sapiens
ggccgggtggccaggacccaatgagcaccttcaaaaccccagggaactgaaagtttggggcgtcctcctcggatttgctatgggacataaaaacagtaggaaacttccaaagacttctgatt

SEQ ID NO: 356412 - DNA, 122 bp, Homo sapiens
caggtcaagtttgaggtgctcataagatgagtaagcatatgaggtcatgaagggagcaggcgtgaactttagaaagtggtccaaggaataagccccgaggggctctggcctttgagaggtgg

SEQ ID NO: 356413 - DNA, 122 bp, Homo sapiens
ggtctagaggccgctaagacacctcaggatccagtccaggaaactggctgctgaaaggggcgtggcttaatgcaggggcgggacctcccaccgtcctgcccacactccagctgaccaaaggc

SEQ ID NO: 356414 - DNA, 122 bp, Homo sapiens
ccctcggatggggaagagtcactgtgactggccctgttcccttctttctacttttcttctcggggactgaaagcccccttgactgacagaggccctggctgagtcggcaggcggtgggctgg

SEQ ID NO: 356415 - DNA, 122 bp, Homo sapiens
tcactgcgggtccccaggctgcccagctccatgcggtgcaggatgagcccagggagaggacgtgagttgtccagaggacttctgtcaagattggagagaactgtccaccagggggatgggct

SEQ ID NO: 356416 - DNA, 122 bp, Homo sapiens
tgctccgggtggggagggaggctggcagctcacccccgggggcgaggggtctgcgttagccgtagccacgggagcccgggcttctgggacgctcagccgtgcgctacccggtgcagctgctt

SEQ ID NO: 356417 - DNA, 122 bp, Homo sapiens
cactgaacaggcgcttggtacatgtcagctaaaagaatcaatgactgagtctacagagaacgtcctcagtttcagaggttccgatgcgccctcccccgagtccctcgcagcccgctggacgc

SEQ ID NO: 356418 - DNA, 122 bp, Homo sapiens
cctcaccatcatcctcataggattctctataattagaataacctgataggtaaaatttgacggtattcacagacagctcagacattaataaagaagctacaaccacctaaggtttaaccact

SEQ ID NO: 356419 - DNA, 122 bp, Homo sapiens
ataatacagagctgtaccaatgctgagtgaccagagcttgcttccgtgggatttaacacacgcccactacgtgtccccgaggggagtggggagtcgggctcccgtgcccctgtggagatgga

SEQ ID NO: 356420 - DNA, 122 bp, Homo sapiens
ggctgcctgacctttctgagcctcagtttcttcgtctgtaaattgggagcttacccaggtcggaggactgttggaattggaaatattcgaataaggaagtgtttttgcaagtgctttgtaag

SEQ ID NO: 356421 - DNA, 122 bp, Homo sapiens
ccatcgattctgctgcccctgcccagcctccccagcccaagaggggagtgtcttccgacacgagcccaggctgacacccaccgtggtcgctgtcctctgcgggctgccctgtgtccccggcg

SEQ ID NO: 356422 - DNA, 122 bp, Homo sapiens
acgccgatgagcttcacaccactctggatgatacgggacttgtttttgtttttctgttatcggaggatgccaagcaatgcagggctggacgatttcattagagttagcaggagcacctgctg

SEQ ID NO: 356423 - DNA, 122 bp, Homo sapiens
gctggaagactcccccagcttcccacacactgtgctgggatgccccaggccccagaagcccgcccccagcttctctggaggcaggaaggggtaggaccccaggtcacttcgtggcggggagg

SEQ ID NO: 356424 - DNA, 122 bp, Homo sapiens
gagctggagcccggggccggcctagccctggccccgctgctgcggcacctgggcctcacgcgcatgaacatcagcgcccggcgcttcaccctctgctgaggaacacctgtgccccccgactc

SEQ ID NO: 356425 - DNA, 122 bp, Homo sapiens
gtgaggctctcagcaaggggaatggagtgggaagatggtctcccctggagttgggcggcccggaagcaggactcttctccgactgccccagctgaactcccctccgcgtccacgttcttctg

SEQ ID NO: 356426 - DNA, 122 bp, Homo sapiens
ctcttgccaccagcccttcccacagctggaagctggcagtgctgggcctcaagttcatcccggggcacccggcctgctccccatacaccagtccctagctctgcgggggctggggctgcacc

SEQ ID NO: 356427 - DNA, 122 bp, Homo sapiens
cgcagaactggggctagatgtcgccgtggctgcgaccaaaccaggcggtctgcccaggggcggctgcaccgggacaggaaccgaccctcagccccatccccggtggctgcagacggcccctg

SEQ ID NO: 356428 - DNA, 122 bp, Homo sapiens
caggagtgtttggcccggcggtccaccccggcttcccgagatacgctagagttgcccccacgtcctgtccgccgcgcccctacccaccgggttgccttcggggcccttcggtgctgtgtagt

SEQ ID NO: 356429 - DNA, 122 bp, Homo sapiens
cgtgttttcccccatcccggcttcacgttcaaggtttagctgcgaggtcacgtccattgacgtcagctccctgtctccctctacgtccggctacatttacatacatcaaggaaattagggca

SEQ ID NO: 356430 - DNA, 122 bp, Homo sapiens
taacacgtagcccactccggttgtgcggctgaaaccctgaactgtgtggtccatgggtcccgttgtggggacaccagcctagtgcacgggggaggtggggggcaaaccctctgtggcccacg

SEQ ID NO: 356431 - DNA, 122 bp, Homo sapiens
gagagaccctggcctcgagaacacctgtcaggttatgaaggttagaagttctttgctgggcgcggtggctcacgcctataattccagcactttgggaggccgaggtgggcagatcacgaggt

SEQ ID NO: 356432 - DNA, 122 bp, Homo sapiens
atccgcccctgccgaggctctgggccaagtccacagggaaaggcctggttttccggagcccgccctcccgggaagctttccgagcagctgttgggctctgggctctgggggcgcccggtgct

SEQ ID NO: 356433 - DNA, 122 bp, Homo sapiens
catgctgaggaaagtggccgtagcggctgcgtccaagccgcacgtggagatccgccaggacggggatcagttctacatcaagacatccaccacggtgcgcaccactgagatcaacttcaagg

SEQ ID NO: 356434 - DNA, 122 bp, Homo sapiens
taacagcgtgcattacgtattcagatactgctttgcttcatcctctctaaaatttaacaccgaggagtttaagaaatgaagataaggaactcgaattatttttaaactttggatcaatgtaa

SEQ ID NO: 356435 - DNA, 122 bp, Homo sapiens
gggcacgcgcgaggggcgctggcgaggcagcgggatgggctcgcggccgcgtggttgctgcgacctcggggtcctacgctgccaggggcccctgctctgctccctgcacgtccacgggccgc

SEQ ID NO: 356436 - DNA, 122 bp, Homo sapiens
acatagtactctagggatgccccacccctttctgggcaagcttgggagagatggaagatccgcagggtttacctagacttctccatcagcaaaggcaaggaaagagttcctccaaagggagg

SEQ ID NO: 356437 - DNA, 122 bp, Homo sapiens
gtgctgggattacaggtgtgagccaccgtgcctggctaaaaacacattcttgttacctgtcgagacatacagtgtcagtgataaaattaaatctcaaaaatctagaatcagcaatgtatgat

SEQ ID NO: 356438 - DNA, 122 bp, Homo sapiens
agaaagagctgtcagtgaaacctgagaacaaaacataaggttcattttcatatacatgtacgttttaaatgaccaggcaacacagcatagtgtttaatgatgcaggtgctggagctagactg

SEQ ID NO: 356439 - DNA, 122 bp, Homo sapiens
cagaaagaagctgcaatcaagccacagcctgacaagcagccaccaacaatcatgactatacgacttccatatttattcaccaggatactgctgataggacctaaaagacaaccaaaaatgta

SEQ ID NO: 356440 - DNA, 122 bp, Homo sapiens
agcatttaataggcacataatcaacatttactgttcaattgaaacaaaattaaaattgggcgctgtctctatctttatttgtgatcggccctaactgcactggcaatcttttccgttttttt

SEQ ID NO: 356441 - DNA, 122 bp, Homo sapiens
ctcaggttaacaaccgaaaatgtcttctagactttgccgaaggactcctgggggcaaatacgcccccattgagactcactggcttagaacaaggcaagctccagcctgtttcaggctttccc

SEQ ID NO: 356442 - DNA, 122 bp, Homo sapiens
tcgcttccgagcgacctgggttctcgcccggcctgctgctgccgctgcctccaggaagttcgccctgaccacctctgcaggctcagcgcgcttcctccggctcccgcgcagcgggtgcttaa

SEQ ID NO: 356443 - DNA, 122 bp, Homo sapiens
atggctgtggcttcagacagacctggattcaaggtcaaatgagactggctccaccatttacgaccttagcaagtcacttaacatctaagcctcagttttttcaccagtcaaatggggataaa

SEQ ID NO: 356444 - DNA, 122 bp, Homo sapiens
ccggggcgctctcgtccgaggtctggggctggcaggttgtggcgagagctagagtgcgcgcgaggggggagggggaactcaaaagtgggtgggaggaaaaacatcaccgccctcacaccacg

SEQ ID NO: 356445 - DNA, 122 bp, Homo sapiens
agccccgggggcgtcggcagtgcccgcgggtggcgtccggaaaatgggctggcagcggggcgcgcgctgccgccggggctgagcctctgccgctagctttccccagccgagcgcctccgccg

SEQ ID NO: 356446 - DNA, 122 bp, Homo sapiens
cttcagaaggccctgctcgttgcctctgtcagtggcccctaagtagcaacggcttacctccgcgcccctgctcacctccacgcatctcccgctcagcccctcccgaccccgtaccctctgtg

SEQ ID NO: 356447 - DNA, 122 bp, Homo sapiens
agaagtcgggcggactagggactgtctgctatcaatgggcgttggccaggcgagtgagggcgtgagtgcgaggccggggaggaggacctgtggttttctggaagctttcgtattcggcttgt

SEQ ID NO: 356448 - DNA, 122 bp, Homo sapiens
ggaaagagtccccttcagccgctcacacaccagtgtttgctgtgtttggcaaactcctggcgtccacaacccggactgctctgaaatgtgcccggggaggggcagggaggaggaggtaaaac

SEQ ID NO: 356449 - DNA, 122 bp, Homo sapiens
gatagggagggggattccagcccccctggaccggccggaggtttattctagagttactggcgggtagctgtgcttttctttcccgtttgtaggtgaaaccccattggcttcattggctcctt

SEQ ID NO: 356450 - DNA, 122 bp, Homo sapiens
gcacgaaaccggcctggctatgatttatggcaagttcctcaacccttgtcagccccttggcgctgcccctttctctgcccgccggctgcttcgcctcctctgctggccctgctcggcctacg

SEQ ID NO: 356451 - DNA, 122 bp, Homo sapiens
aaagaggacaaaaaaagaagacaacccgggaaggagtgggctgcaatcccactctcgtcacgatgacgatgctcccattccaggcctgcctctgggagacagtggccatagccccctcagct

SEQ ID NO: 356452 - DNA, 122 bp, Homo sapiens
taccacgcaactcatcagctttgcttttcctccctacccatccctgcccggaggcactcgcgttgccccagaatcgctagttgcctacacacacaaccttagactctccactgtcactgtct

SEQ ID NO: 356453 - DNA, 122 bp, Homo sapiens
aggaatactgtgctcaattagtgaggtcctctgtgggcttgagaagggaacatgatggctcgcatgtcacatgaagcaagaatcaaggccaatctgaaagtagaacagaagagtttgacact

SEQ ID NO: 356454 - DNA, 122 bp, Homo sapiens
tattgctaatccagcctcgcttgatgaaatggctaaacaggcaacagttgtcctcaattgcgtaggaccagtaagtaatcaacccttctttgtatcagaacaaacaatccattcatttctag

SEQ ID NO: 356455 - DNA, 122 bp, Homo sapiens
gaagacgccagctaccgcttcagtggcttttgggagagagaaagtgaagacgaaggtttccgctgcagcttctgggagagagcaagagaggaccttgggccccgtcctagtgacgacggaga

SEQ ID NO: 356456 - DNA, 122 bp, Homo sapiens
gcacgctgtcacctctcaaaagcaaacccaaatcacgaccccacagctgctccttacgcacgcacgtcgtatgcacacccacacacacacaggcgcgtgaactcatgtgcacacacaggcac

SEQ ID NO: 356457 - DNA, 122 bp, Homo sapiens
aaccttgtgacgcttctatgaaccagtttagtgggtcttccagtagcctgcagacaggtgcgaagaggctaatacttccatatagtattgcagaaaaaattgaaagtacttagtccatactt

SEQ ID NO: 356458 - DNA, 122 bp, Homo sapiens
tgtaggagggacccagtgggagataattgaatcatgggggcggtttccccatactgttctcgtggtagtgagtaattctcatgagatctgatgattttgtactgggaaaccccttttgcttg

SEQ ID NO: 356459 - DNA, 122 bp, Homo sapiens
ctggacggagggacagatggggctgaggaagtgggatgattcgaggaaagtggctggaaacgtctgttgctggacactggaagccagatgctgaagcagttggagagaggctaagcgttggg

SEQ ID NO: 356460 - DNA, 122 bp, Homo sapiens
attggatcatttaacaatataacaaaacttcctgatttgattttacgtatcttctatctacgcccttcctgtgcctgtgactctccccaaattgccctgttgccttgagctcttctgagcta

SEQ ID NO: 356461 - DNA, 122 bp, Homo sapiens
caaacagccccagagcagagagaagtgcatgactaattataatgtaatttaaaggccttacgggatcatccccagcactgtgaaactggaggaagaagcagcattcaagtgagtgaatgtgt

SEQ ID NO: 356462 - DNA, 122 bp, Homo sapiens
ggctcaagcgatcctcctgctttggcctcccaaagtgctgggattacaggcatgagccaccgttcccagctggccttaatgttttttatgtttatagagacagagaatgggggaagggaggt

SEQ ID NO: 356463 - DNA, 122 bp, Homo sapiens
gctcaacaaacatgtactcaatacatgtctgttggatttttgcagtaaattaaatcttaccgttccattaattttcatcatgattttggtgaagatttatctttttttttggcaggggtgta

SEQ ID NO: 356464 - DNA, 122 bp, Homo sapiens
cggggattatttaatagaattttgcaatcttagagctggaagggacttcaacagtaacctcgtccaatctttgcgttgccatggaactctttcttcaaacaaaagcttcgtaagagcccaaa

SEQ ID NO: 356465 - DNA, 122 bp, Homo sapiens
gatcatgtttggggagaagccaattctagatgcagttttctgcctatgagttggaaaatccgagttaactaaagttcaggaagtttagaaagactgattacagagactagccttgcctgttt

SEQ ID NO: 356466 - DNA, 122 bp, Homo sapiens
ggtcgcatccgctccggggcgagcaccgcccgacgcccaggcttcccccggacggaggagcgcgactcacccacggtggccgggcagagcctgcctcgaacccggcttctccccgacgccct

SEQ ID NO: 356467 - DNA, 122 bp, Homo sapiens
gtgcacatactcccatctctgaagacattattagttctcagagaaagcagattcttaagccgtaagaggaaaaatgtagatactctagtgcctgtgagctgcagagcccttccttttccaca

SEQ ID NO: 356468 - DNA, 122 bp, Homo sapiens
gcacctgtaatctcaactacttgggaagctgaggcatgagaatcgcttaaacccgggaggcggaggctgcagtaaggtgaggtattaccactgcactctagctctggccaacagagcaagac

SEQ ID NO: 356469 - DNA, 122 bp, Homo sapiens
ctctgtctgatgttggccactctaccaggtgaatgccaccctgaccagcctggaaacagccgagggagtgttggctgtggcccccctgagctgggctagaccagaccggccgtgccctggat

SEQ ID NO: 356470 - DNA, 122 bp, Homo sapiens
atccaacagcgctagcggttgaaacggtttttaaaatagagaaagcgagaggaccgacggcggctccagtgactgctgagtttccagacaagggagctttgtgcaatgaggggcgcacagga

SEQ ID NO: 356471 - DNA, 122 bp, Homo sapiens
cggcctcgagagggcttttccgcctgggaccgactccgggactggccagatggggaggatcggctgagcctcccagccacgccgcgcgcccgggcccctccaggatccccctgccccgccaa

SEQ ID NO: 356472 - DNA, 122 bp, Homo sapiens
cagggcaacctttgaccaaaattggtcaacctgcttgattgtccaaagtattccccaatacgggtagccaaagaactttcagctatttccaaaatccaaatccaggttcaaaagaccaagac

SEQ ID NO: 356473 - DNA, 122 bp, Homo sapiens
cctcatggcagctggagcaaaggagggaaattaagtagacaagacacttcctaggacaggcggctctagtccaggggcctcccaaggggagcgtgatttcaagtttgctgctctcccacaaa

SEQ ID NO: 356474 - DNA, 122 bp, Homo sapiens
ggtgggaagcgacccgagcgtattcgccgcccgcagctcgcgcgcctgggcacccgggggcgctcacagtgatcgcggggccagcacaccctcacccaggacatccctttcctccccccaac

SEQ ID NO: 356475 - DNA, 122 bp, Homo sapiens
cgcagcagagcattcctggttggggcttgggccgggctacacacccagccccacgagggccgcccctcccaccatcccgggacccgaaggctgagggggcgggtgccggcgcgaaagggctg

SEQ ID NO: 356476 - DNA, 122 bp, Homo sapiens
ccacggatgatctggaattcttcctgtgagatgtggccatccccatcgacgtcaaagttccggaacacagactggggcacgcagagggacacgcagagccagaagaggggagagtaaagggg

SEQ ID NO: 356477 - DNA, 122 bp, Homo sapiens
ataattcctaggcagcatacatcaattatcaaaagcatattgctgcctgtcctgagaccacgatcaagggaagggctaattgtttcctaagaaatacactaggagtacaaaggactctttct

SEQ ID NO: 356478 - DNA, 122 bp, Homo sapiens
cggaccacagccacgatgccaatctgggctgttactgtattgttgagcactgcagcatggcgcagtgggtggcagatggccacataacggtcaaaggccatggccagcaggatggtggattc

SEQ ID NO: 356479 - DNA, 122 bp, Homo sapiens
atctttgagttgacactgaaacaagaattttctggctactgcaatggaatgaatgtatttcgcattgtgaggacatgaattttggggaccagaatagaatgccatggtttgaatgtgtcccc

SEQ ID NO: 356480 - DNA, 122 bp, Homo sapiens
aatccactttatagtttcaaaagaggtcttcgggggagcatatttgcgaagtgcacccaccgtcgttgccttattctggtagtcacagggtgacagccgagggagcggtaacctgtaatcag

SEQ ID NO: 356481 - DNA, 122 bp, Homo sapiens
aaatagctgacaaggtcctttcacagtcagctttggagccccactgagcttcacagagcacggtcacaggctgcttgttctctagactgcctctgaggcctgagctagcagccaacagcacc

SEQ ID NO: 356482 - DNA, 122 bp, Homo sapiens
cccctcttcaaacgtctgtgcgcttcccttgtgccccgccctggcacacagccgcccccgcggagcccagggatcccagcccggcagtcctccgtcagctgcttctgtttggatggcgggga

SEQ ID NO: 356483 - DNA, 122 bp, Homo sapiens
ccagttctgggaggcggggggaaggaggttggtggcgactccctcgctcgccctcactgccggcggtcccaactccaggcaccatgttccccgcgggcccccccagccacagcctcctccgg

SEQ ID NO: 356484 - DNA, 122 bp, Homo sapiens
ttagtccatggggtaatgaaaacatccaaattggaccccatgagcacatgtgtctgatagcgaaagcttgggacccctcactcctgccagttcctgcccaacagcccacttcctatccacag

SEQ ID NO: 356485 - DNA, 122 bp, Homo sapiens
actggtccttggccactcagcagatcacagctgctccctctacctcccaggcttcccccacgctggatcacttgtggtctagatggcccttggtcatgaagtaagaggcgtgcggtaaccca

SEQ ID NO: 356486 - DNA, 122 bp, Homo sapiens
atcctaactaagaccagagcattatgcatttagggatcagcaaagaggccaagttttcctcgaagctcattgtattagtttcctgtggctgctgcaaaaaattaacaaaaacttggtggttt

SEQ ID NO: 356487 - DNA, 122 bp, Homo sapiens
tggccgccaggtcagagactcaccggggacgcatgtgattcacactggtgctctggtcgccgggtcagagactcactggggacgcatgtgattcacactggtgcgctggccgccgggtcaga

SEQ ID NO: 356488 - DNA, 122 bp, Homo sapiens
ctcagcgtaccatacatttcagcgtaccgttcatctcagcataccatacagagctctcatcgtccttgcagctcatcataccgtgcatctcagcataccatgtagggctctcatcgtaccat

SEQ ID NO: 356489 - DNA, 122 bp, Homo sapiens
gggctggggaagacagagaaagacagggggagggggccgcgtggaagcgcctagagcagtcggcaggtcacacacacgcggtgctcggcggcaaactcagtttacaaagagacatctgttcc

SEQ ID NO: 356490 - DNA, 122 bp, Homo sapiens
cagggaccctctgaagctccagcaactccagaaccaaatccgactggagcaggaggccggcgctcggcagcctccgccagccccgcgcagcgcgccgccctcgccccccttcccgccgccgc

SEQ ID NO: 356491 - DNA, 122 bp, Homo sapiens
acccacatctatccaaatccaagttcccctcatatgctccctgtattcctctgcctcttacggtaggaactgagcatttcaagaatctggctggactataagaaaactgtagaacctgtcta

SEQ ID NO: 356492 - DNA, 122 bp, Homo sapiens
tacaacagtttttcactcaatatctgacatctgcagctggaaaattaggggcctgtcgagcgatgttggaagaagaaacagatcaaacctatgagaatgtcctggctgagattcagtctttc

SEQ ID NO: 356493 - DNA, 122 bp, Homo sapiens
gtctcactgtgttgcccaggctcgtctcaaaactcctgaactcaagcaattctcccacctcgacctcctaataagcaaacgcttgttattctgaccactagtttgtagaatagagccatgtg

SEQ ID NO: 356494 - DNA, 122 bp, Homo sapiens
caccacacccagcctgagcctctttctatagctaattgttggtaagcacacagcttatcacgagtaagacagacgtctctatagaatgcttctgtccacagtctagtgtagtagaaagaatg

SEQ ID NO: 356495 - DNA, 122 bp, Homo sapiens
tgttgttttaataaagaaaattttcctaagaagatacagcatttcctaagagaatgaaagcgcagtgggagaaaatagatttgctattcataagattagaagtgctgttgatctgtgggaga

SEQ ID NO: 356496 - DNA, 122 bp, Homo sapiens
ttcatgtgtattttctgacttttctctttcatatatgtgttaccgaagtgaactggggtccgcttgcctgatgcagtcaggtgaaacatccacaccgtggtttgtaatatcaggagaaagga

SEQ ID NO: 356497 - DNA, 122 bp, Homo sapiens
agatcagactggctcctcctttggcaagaactccgagaggagggagaagatgggccaccacgaccactactacagcaggcagcggggaaggagaaaccctagtccagaccacacctacaaaa

SEQ ID NO: 356498 - DNA, 122 bp, Homo sapiens
cagcagacacttgagcttctggctggggacccaggtgtggcaaaaggcagaagcagcagtcgctatctaaggacataactttattggaaacaaagagtggggtgcagaagatggctaggagt

SEQ ID NO: 356499 - DNA, 122 bp, Homo sapiens
aaactccatgctccccctgctcctgaaaaattccagttctgtggctggctgagctgcacacgttctggtcaaatggtctgcagcaaagcacagagcaggcagggtaatctgagtgctacctg

SEQ ID NO: 356500 - DNA, 122 bp, Homo sapiens
ggggcagggcttacgtttccgcttgctgcccgctcctctgtcccgctttctcttggtggacggaaagtgcttctgaattagcgacaggaacacgcctctgaaagtgagacgcggagtttatt

SEQ ID NO: 356501 - DNA, 122 bp, Homo sapiens
aaagaaaaacggttatgagcgtaaagtgacagcctcggccgatgggaatagggggaagtccgacactgagcaacgaacgcattcccgcgcctccaaaacctaggccgggggcgctggaaacc

SEQ ID NO: 356502 - DNA, 122 bp, Homo sapiens
aggcgggggtagtggggcggggtaaaggagccggcggctgggcggagccgtccgtttgcccgcccgcgcaggcgtcggaagggccggcgcgcccgctgcgcgcacactgcgtgccctttctc

SEQ ID NO: 356503 - DNA, 122 bp, Homo sapiens
ggctatggctgtcagctccatcatgtggtctactgcttcatgattgcatatggcacccagcgaacactcatcttggaatctcagaattggcgctatgctactggtggatgggagactgtatt

SEQ ID NO: 356504 - DNA, 122 bp, Homo sapiens
ccaaggccgccctaacgcgactctggccgctcctgcctagcagataccggctggtgccctcgcttcggatgcaagatcccagctctgctgcagctttcgagccggagggacaatcgaaatga

SEQ ID NO: 356505 - DNA, 122 bp, Homo sapiens
tcccgcctggtctcttccaggccctcagttagtttccacaacatgggagggttcctcctccgtggtctcgcccattcgcgttcccacccaccctccccggatgtgacgaccctgggctccca

SEQ ID NO: 356506 - DNA, 122 bp, Homo sapiens
gacagtttccgctgccgtgcgagtcttcctgtttgtttttatccaaggtctggcagaattcgcccccaaggagaaagcgcctgtgcaccaaagctttccttaagagacttgtccacttgctc

SEQ ID NO: 356507 - DNA, 122 bp, Homo sapiens
tttcgggcagcctcagggggcccccgtagccccctgcctttcctagggacttactggggtcgattcgaacctttttttgggagaaaagcagcttttaggagctttcttttcgtgccttgttg

SEQ ID NO: 356508 - DNA, 122 bp, Homo sapiens
tgcctcacggagtcagcaataccagttgttggatgggctggtgctgttcccaagacaatgcgtacatgaaacttctataaaaattcatgtgatcttgatgctaacatttatttgaaaagaaa

SEQ ID NO: 356509 - DNA, 122 bp, Homo sapiens
actcactctggccctcaaacttgcggatgatggtgtccaggaaggtgttctgcggcgcgacgtggcccctccgcaccggcatcctgagcccatgggcgggccgggcgggcccccacccaccc

SEQ ID NO: 356510 - DNA, 122 bp, Homo sapiens
agcgcaacgcagcaggctccattcccggccgccgccgctcagcccattacgcaaacctggcgggtccaaccaaccccgctctgccgccgctgctggaacccatgaggcgtgcttgcaggctt

SEQ ID NO: 356511 - DNA, 122 bp, Homo sapiens
acacatgatcccaatatcacatggagcactcgatctatcgtctttgattctgaatactgccgctaccactgccggatgtattctccaataccaccatcgctcccaccaccagcaccacaacc

SEQ ID NO: 356512 - DNA, 122 bp, Homo sapiens
gagattctctgatctaaagagaagacaaaatcatattcagccttttgtccagtttggtatcgttaactcctgctcaaatcctgcttgtggtcgttggtgcagttcccatctatttctggttg

SEQ ID NO: 356513 - DNA, 122 bp, Homo sapiens
cccgtggaaataggaggcggggtccggaggaggtccggagaacttgagcccggactcactcgcgcacatctggcccagcattgaggggcggcccagggacccggccccgcgcgcccggccgg

SEQ ID NO: 356514 - DNA, 122 bp, Homo sapiens
agactgtccccgttccccggatgggggctgcgctcagttccagctggggcctgagtggggcgctgtcacgaggcacccggtccctctgccccacgtgtattccccatcgtcatttaacactg

SEQ ID NO: 356515 - DNA, 122 bp, Homo sapiens
aggaacttctattcagaaaccattccaggcacttggaattcggaatctaaatatccctgacgcagccccaggccctaactgccccccgcccctccccggccgcctgccacggccgtcatatc

SEQ ID NO: 356516 - DNA, 122 bp, Homo sapiens
aattaagaattctcgcataaggtaacccagctagtaagtaccagaaccagaaattagacccgttttttttttttaactacaagtctctccttcatgcagcccttctcaaaaattaagcattg

SEQ ID NO: 356517 - DNA, 122 bp, Homo sapiens
taagccggcacactatgctacgaattacagcatgaatccatgcagagtcagtaattaagtcggtaattatgagttttcactgcagaagaaccctgaaaggcccactgtaagaaggagcaaat

SEQ ID NO: 356518 - DNA, 122 bp, Homo sapiens
aaaggaacggcaggaaacgcagaagggatccggaacgagcagagctttgtgagtccagggcgacacccccagggccttccgtgggagctcctgcaaggatgcttcccagcactgggtcctgg

SEQ ID NO: 356519 - DNA, 122 bp, Homo sapiens
atggagcggtatgatccaaacattgaccagaggagcatgctgggagatatgcagacagcccgggaaggtgccggactcgtagtggccagtggagtgatccactgtctaggaggatatgacgg

SEQ ID NO: 356520 - DNA, 122 bp, Homo sapiens
atgtaatttaatttgtgggtagatgagtagcagatcctcaatacgctgcctttttaggcacggtagactgtgcctatgatactgtaccagtgattcatttttctgaatcactgctctcttct

SEQ ID NO: 356521 - DNA, 122 bp, Homo sapiens
tgtgagatatttctgtcacttctggtgaaatttctggatgcagataaaccacagtggctacgagctgttgcggtggaatcaatacacagattctgtgtgcagcctcaactattaaggtaaaa

SEQ ID NO: 356522 - DNA, 122 bp, Homo sapiens
gaaggaccctgtcctccccaggtcacagaattaataaaagcttctaccggcatgcagagccgcgatgaaaggttgcagaacaaagtcattaaagtgatgatatttacactgagccatgcaaa

SEQ ID NO: 356523 - DNA, 122 bp, Homo sapiens
gctgcactccagcctgggcaagagtgagactccatctaaaaaaaaaaaaaaaaaaaatcacgaaagccattgcacataaattcaaaaaagtggaaaagcacacaaaaggtatacagttaaaa

SEQ ID NO: 356524 - DNA, 122 bp, Homo sapiens
gaagaaggacccgggagctcttcgtttcagagcccagggcagccaggctgctggccaccgcgcactgcgaagagacgcaattacccttctgggaatcaagaaatccagaaacgtctcttggt

SEQ ID NO: 356525 - DNA, 122 bp, Homo sapiens
ctgcggtgaatcagaaaagctgtcctgatttcctctcgctgtatacctggagccggcgagcgcctggggcttgccttgtattattgaaccctcatcacaacactgggaggggattagcaata

SEQ ID NO: 356526 - DNA, 122 bp, Homo sapiens
ccggcatctcgtaaccatgaatctactctctatctttatgagatccactgttttagcttccgcatacaagtacaaacgcaaaatgctcttttgataaacttatgcatagtgaagcagtgact

SEQ ID NO: 356527 - DNA, 122 bp, Homo sapiens
atggtagatccccctccaggcgcctcgctgacattttgtcccggacggaaaacctccgcgcgtgccccttaaagacacagcgctgcattcacacgtctgcggggaaaggggggccgtcacgt

SEQ ID NO: 356528 - DNA, 122 bp, Homo sapiens
gagcagcaccccagggaccaaggagtgcagccacagtggacggggcacatgctgaacccccgtgagagagagagcacagggcgtgtgccaggagtcagcgccttggcccgcacgtggcaggg

SEQ ID NO: 356529 - DNA, 122 bp, Homo sapiens
cctcagtttccccagaaatgcaatggggaggacattgccctacccttcaaggacatgcctcggttcataaaggagacctcctctctctagagccaagctcccccaccccacccccatcctgc

SEQ ID NO: 356530 - DNA, 122 bp, Homo sapiens
gacggttataacatgcttttacctgaatctaaggagagtgctgggggtggggggggggggcgggcagtctgcaagggttattatttggaccgtgtcataaacaagttgagtcttcgcaaatg

SEQ ID NO: 356531 - DNA, 122 bp, Homo sapiens
gttggtgttgacctgataggctgtgatgctaactgcctagccagagttctgctgggatggcgtctgtactcagcttgaattcatctctaattcttgtcagtgctcatccagaaatttgctgg

SEQ ID NO: 356532 - DNA, 122 bp, Homo sapiens
ctcacagccataggtgctcaggcactaagtgcagagttaaagctgttagcggggcactgccggccaccagaccacaggcaaaggatcctgaggcagctacagcctcgaaatattttaagatg

SEQ ID NO: 356533 - DNA, 122 bp, Homo sapiens
tgccacttctgcccttggcacccaggccacaggtaggcactcatggcagagatgaccccccgcctccagggtgggctgcaagagccagagctgggcccgggtcccatggcttgctgcaggct

SEQ ID NO: 356534 - DNA, 122 bp, Homo sapiens
ccctcatccctggtcctcctggtccctgtctgtctgtctgtcgggtctgtccacctgccgcgccccccgggctgaggtaggaggttgtatagttgaggaggacacccaaggagatcactata

SEQ ID NO: 356535 - DNA, 122 bp, Homo sapiens
agctggaaggggaatacagccgttagggagcagcctctgaggggagactgaagcaggttgcgtcttttagccatctctgccacctgccactcattgtccctgtggctatggccctcattgtc

SEQ ID NO: 356536 - DNA, 122 bp, Homo sapiens
ccgggaaggaaggctatctgccctcataagcccatttctgcagtccctcagcctctgtggcgcagtgagctggcatggagactaggatgcaagaacctacccttaggatgcctcaaggactc

SEQ ID NO: 356537 - DNA, 122 bp, Homo sapiens
catgaaatccctcagctatgggacttctgggatcctttctccagacaggcaaagggctgtcggcggtgggcgactcaagaagagagtctgagtctgtctgtgcagcctgcagcttctattta

SEQ ID NO: 356538 - DNA, 122 bp, Homo sapiens
tagccccagtgggacccctccgggcccagtcgccccactcctcaactcacgcccccagtccgggcccccgcgtgtctcgctccactctcggtggctcccgctcccatccccatcccgcttcg

SEQ ID NO: 356539 - DNA, 122 bp, Homo sapiens
cagaagttgaacagggtgggactgactgggggagcgggtggaatcatgtgcctcccatcacgtgcctctttccaagcccctatgggcctcacttccttctgccaccccaactgccttttcca

SEQ ID NO: 356540 - DNA, 122 bp, Homo sapiens
gacagaggaatccttggatactgggctcagctcagtttcaggggatacctgtcagtggctcggtcctccaagccccatgggggccaggcccaattccaagcctctctggttagggtggtagc

SEQ ID NO: 356541 - DNA, 122 bp, Homo sapiens
ggaggctgcgcgccggccccagggtgggggagaggcccagggagccaggacggcccagcgcgctggccctgaaaacatcagagacaggacagagctctcagccgctgtgctcacagcttctt

SEQ ID NO: 356542 - DNA, 122 bp, Homo sapiens
cgggctaaaaaggcgctaacgcccgcggccgcctactccccgcggcgcctcccctccccgcgcccatataacccgcctaggggccgggcagcccgccctgcctccccgcccgcgcacccgcc

SEQ ID NO: 356543 - DNA, 122 bp, Homo sapiens
ccctgtctaacaccctctagtgagacccattagtgtataagctctgcctacaccgagtttcgtggcctctttttcaggcctccttcttaaatatgaggggagagtcaaggatccctagacat

SEQ ID NO: 356544 - DNA, 122 bp, Homo sapiens
ccggtttttgtggagaaccagcagaggtggtccgtgtggccgtctgcttggtagcaggtgcgggtgtgctgcagggtaaacgtgcttcggggcacgtgtgagaccagagcagttggtgccac

SEQ ID NO: 356545 - DNA, 122 bp, Homo sapiens
tcccagcactttgggaggccgacagatcacctgaggtcaggaaaccagcttggccaaaaccgtctctactaaaaataaattatccaggtgtggtggctcacactagggggacagaggccgaa

SEQ ID NO: 356546 - DNA, 122 bp, Homo sapiens
tgttactttcaatatcgcacagggtggacacgcccccagtgatattgttcctaatttcaacgtgggagaggatgatactacacggaatgcccctggggtaaaaacactcctgtgatattgtt

SEQ ID NO: 356547 - DNA, 122 bp, Homo sapiens
cgggactcggggggcgctggccagcagcgggggaggcggtggctggaccaggctcggctccggcgcctcggccgctcgggctcaggctcggcggactcgctccccgcgggggcggatctggc

SEQ ID NO: 356548 - DNA, 122 bp, Homo sapiens
cccctcacctgcttttgcacgtcagcatcgctgagagccatggcgagagcaatgctaggccggtgaacagtaggctcgagtttaggtttgaaaggtgaggtgagagaaatcggcaaagggaa

SEQ ID NO: 356549 - DNA, 122 bp, Homo sapiens
ggcaatcgtcagtgatatttttgtggctgaggctggtttctggccgagtctgcctaattacgtgttggagtgcatgtcacacctgcttcctgagctcgcagaacacaggaatgcgctatgta

SEQ ID NO: 356550 - DNA, 122 bp, Homo sapiens
ggatccttacttacgcttgtctccgggctattagccgatgcatgggagtcgccatcttagcgcggtcaaagccggccgcgcagggttttgggaaactcctcggaagggcggggcttccaacc

SEQ ID NO: 356551 - DNA, 122 bp, Homo sapiens
agaaggaggaagaagggccctgctggtcacacaggacccagtctgcggtgggggttttcccgccaccgccccgccctccctggggcccccacctcaccctctcctggcacccttcaccgtca

SEQ ID NO: 356552 - DNA, 122 bp, Homo sapiens
gtcaaagattgctatagtatccatgacatcaagtatcatgcaggaattacatattatctacgtactacaaaaactattattcaatgcatatgcttataattgaagtaacagcactatattta

SEQ ID NO: 356553 - DNA, 122 bp, Homo sapiens
cacaaaacactgagggagtataaaaggcaaggcttaatttccccagttttttactctcaacgaagaggcttagagacagtaaggaccttgcttgtgttcatacagtggagttgaggagaggc

SEQ ID NO: 356554 - DNA, 122 bp, Homo sapiens
attaacatgttggcagctctgttcccaggtgggggcaattttctgactctagagccatttcgtgtttgggatgggggataaccccctcctggaaaccacagggcatggaattctggaagttt

SEQ ID NO: 356555 - DNA, 122 bp, Homo sapiens
tcgctggggtagacagggagaggctgcagagcagcccaccccgatcagggcctgtgttgacgacagtgagccccgttggaggccgagtgggaacacggcgtgtgcgcagagtcctggcggta

SEQ ID NO: 356556 - DNA, 122 bp, Homo sapiens
ctacaccaggccctgtggggaaggagggggaccctcacttcattttaggcaggggctctccggagccctgagaagacgagagacagcacccgcttagagaccaggcctctgctaccccagga

SEQ ID NO: 356557 - DNA, 122 bp, Homo sapiens
cttctaccccccgcccctcaccccagcacctgctggagaccctggccctcccttccactccgcgaggctcttaatctatccagttccatgggctgcctttccgcagctataaacaggctctg

SEQ ID NO: 356558 - DNA, 122 bp, Homo sapiens
tcccaaagtgctgggagccacttcacccagccctcttggccttgttttagttgcttctttcggcctcttggcctttgcacttgttgttccttctgcctggaatgctttttccacccccctgt

SEQ ID NO: 356559 - DNA, 122 bp, Homo sapiens
ttgattaggctattgtgccaactcgggggctgacacctacagcaccattacacataaaaccgaagagggaccacaaggatggttctgtttgctaactaataaaataatgatatccaaatact

SEQ ID NO: 356560 - DNA, 122 bp, Homo sapiens
acccataaaatacctaagacgaaagttactaggatagccaggggcttgtcttccgggtggcgccgaggccaggaaactgtcctctctaacctatttccccagaggagtctaaattggtcgtt

SEQ ID NO: 356561 - DNA, 122 bp, Homo sapiens
ccggcacccagtcccccgagaccctgcacggctcgggaagagcggcccggccggggcccgcgcctcccagcggggtctacccaaggggacttgttgctcacctggcctcccgcagtcgccgt

SEQ ID NO: 356562 - DNA, 122 bp, Homo sapiens
ccatctcaaacaaaaactaaaccagaatgctggctccatacccagagtatcagattcagtcggtcaggtgggcatgataaggcacatgtctaatgagttcccaggtgatgctgatggggctg

SEQ ID NO: 356563 - DNA, 122 bp, Homo sapiens
cccaggctaaaacttcctgtagaaagcgagacgtgggaaactggcgaagctgctaccagccgccggcgcaaggagcgcgagagtcctgggtgcgcgcagggcacttactttctatcctccag

SEQ ID NO: 356564 - DNA, 122 bp, Homo sapiens
acacccacctacaccaacacattacaaatgctaactgtgagtctatttgcttccccacttcgctcatttcttctaagggtgaaaaataggcaatgagagcagaaagccttctagggaagtct

SEQ ID NO: 356565 - DNA, 122 bp, Homo sapiens
agggaccctggggtggccgggaggcccgagggccagaggtcacgggactgaaggaatgtgcgcatttgttgatggctgttgccgggctctctttgtggcagcacatcctctgaccagcgttg

SEQ ID NO: 356566 - DNA, 122 bp, Homo sapiens
catctccctcttttcccttatctcaaaaagcccagagctcagctttctcttcaaaagctccgctaatgagaagcacatttgatttcctcgggggaggcagctgtgggatgagagccggaagt

SEQ ID NO: 356567 - DNA, 122 bp, Homo sapiens
agccagggaagtggccttcgacctggaaatccccaagacagcattcatcagtgactttgccgtgtgcgtgcctgcccaactcccatgccttctcccaggggtgccgcttactagtcccagct

SEQ ID NO: 356568 - DNA, 122 bp, Homo sapiens
gcgtccggtgggaagcgtggcgcgcccgagcttaggcttgcagttcgcctttccagaaagcgcaaatctgtccatgtccacttcgagaccttgtaagttaagggcttctactttgggtcgtg

SEQ ID NO: 356569 - DNA, 122 bp, Homo sapiens
aatttttagaacatgtttaaaggcagatgttcaagaccccttgaacatcttctttctcttcgcagtcacatccatctcatagctcaccctgtcacagaagaaaagagagcatgtttcctttc

SEQ ID NO: 356570 - DNA, 122 bp, Homo sapiens
tggatgcgtgggagccacatcaaagtccccccacaagtgcctggggctccccgctgatttcgaggtctacagaatgggtttcttgcaactcacatccttcagctggaggaccccagaaaggc

SEQ ID NO: 356571 - DNA, 122 bp, Homo sapiens
ggctgtgcccaccagcccgcccagcccggaggtgggcaccatccgctgcgcctccttctgcgcgggcttccccatccccgagtcgcccgccgccaccgcctacgcccacgccgagcacgcgc

SEQ ID NO: 356572 - DNA, 122 bp, Homo sapiens
tccctagggatgcttgggttgccacccgccgctcgaagctggaggggccgccggagcctgcgattggctgcttcgggcacatcgtcccgccccgacctgtagctcctcccaggtttccgttg

SEQ ID NO: 356573 - DNA, 122 bp, Homo sapiens
aggggaaaaccgtgagggtccctgtggcaggccccagcacccatgggatctctctccggtcgcaggaagcaggctagctcctagcccgcctcggcttggcctttgtgggacctgggggcaaa

SEQ ID NO: 356574 - DNA, 122 bp, Homo sapiens
ccgccatgcctgagccttcccccgcctccatgggttcctgtgcagcctgagcctccccgacgaatgccgccccctgctccacggcccccagtcccatccactgcccaagagctgaggagtac

SEQ ID NO: 356575 - DNA, 122 bp, Homo sapiens
cacctggaaaatccggtcactcccacccgaatactgcgcttttccgacgggcttaaaaaacggcgcaccacgagattataacccgcacctggctcagagggtcctacgcccatggagtctcg

SEQ ID NO: 356576 - DNA, 122 bp, Homo sapiens
agtccagctcttcagggcggagctggcagctctggggccatctgggttcggggactcttccggactcctcttgaggggttcatgttttgcccgcctctccttgtctctcagtgggggctgag

SEQ ID NO: 356577 - DNA, 122 bp, Homo sapiens
gcccagcggagctcggcgttgaaggaggcacgtgggggaggcgggagtggggagcgggcacgtggtccagccttctcagccccgtgctgccccccgcccccagtgaggaggggtttggggag

SEQ ID NO: 356578 - DNA, 122 bp, Homo sapiens
cccgagtcctggcctccctcaagccctgcttcctcttcgcatcaggggcgtggctgcttacgctggttccctcgatagcagagcctgagatagggacattggtgcaggtggtttatttgtga

SEQ ID NO: 356579 - DNA, 122 bp, Homo sapiens
gtcagcgcagcagcaagagagtgaggcgggaggtgctacccacttgtaaatggccgagctcgtgaggactcaccaaggcggacggtgctcaaccagtcatgggaaaaccgcccccgtgatct

SEQ ID NO: 356580 - DNA, 122 bp, Homo sapiens
tgggagcttcccagacaagtgtcatattctcccatgtccccctctttctccgccaccccacggtctcctgagacttgccaagtggacttgactgcaagagcttagacaggcgggataacgtc

SEQ ID NO: 356581 - DNA, 122 bp, Homo sapiens
ggtctattcacacaatggaacgtcgctcagcccttctccatccatggacgaatgggtacgcgcactgtggtctattcacacaatggaacgtcgctcagcccttaacaggaaggagattctga

SEQ ID NO: 356582 - DNA, 122 bp, Homo sapiens
ggaggggttgcttggcaaccggtgtctgtgctattgctatgggaactggccatcctggggcggggccggccgggggcggggcgcgtcggtgccgctgggcgctttctacaggctcgggctga

SEQ ID NO: 356583 - DNA, 122 bp, Homo sapiens
agaagaatcacttgaacccgggaggcagaaattgcattgagctgagattgcgccactgggcgtgccactggagccgagatctccagctgagataatttttgtatttctactgaaaatacaaa

SEQ ID NO: 356584 - DNA, 122 bp, Homo sapiens
gtaacaacaggtgaattgggctttttattctcccctttcgtgccctcttgaggagcctgccgcggccgggggtggtcgtcgtgaggagggggcccggtccgaccgccagcctggcggagagt

SEQ ID NO: 356585 - DNA, 122 bp, Homo sapiens
gcgctcggctcggcccggcgcctgcgccgctgcagcccggagcgggggaggcgcagggagcgtctgcaaagagcgaggagcttaataatgagttagggaccggagcaggaagcgtcgcccca

SEQ ID NO: 356586 - DNA, 122 bp, Homo sapiens
tgagaggctgtgactagtttcaggtcagggagcttgcaagaggtagagctgggatttgagcgcagacagtctgactccagccagtagggggcatccaagtggggaaacatttcaagtttttc

SEQ ID NO: 356587 - DNA, 122 bp, Homo sapiens
gccaaatttttttaaaaaaattagccaggtgtggtgggtgccggtagtcccagctattcgcgaggctgaggcagagagaatcgcttgagctcaggagtctgcagtgagctatgatcacacca

SEQ ID NO: 356588 - DNA, 122 bp, Homo sapiens
cggcagcagagtacccgcggtcgcgccctcgctgcttaacaaaggccgccccgctcggcccgccccctcatgaatagttaacaaacctccagccaatcactggccggagcgccactccgctt

SEQ ID NO: 356589 - DNA, 122 bp, Homo sapiens
ggggacagataaagaagctgactcaattggcagaggacaccctaaaggagaaacaactagcgattacaccgggtaatatgatcttggctgccttgatggtaatcaccacggcggtaagtctc

SEQ ID NO: 356590 - DNA, 122 bp, Homo sapiens
ggcgggggtgggtgggcccggcccctccgattggtcgacggcgagagagacgctcccgcacgccgccagctctgattggcccagcggtaggaaaggttaaaccaaaaatttttttacagccc

SEQ ID NO: 356591 - DNA, 122 bp, Homo sapiens
cccagttcctggtaacctccattctttctgtctctatgaatttgcctattgtagaaacctcgtgtaagtgacatcattccatatggggcctttgtgtctggcttatttcacctaacatcatg

SEQ ID NO: 356592 - DNA, 122 bp, Homo sapiens
gaagtaccttcaggaggtgctgaaaggtaagggcggggccccttcagacacagggcagagcgagattcctgttacctgacaagaacaaagaatgggagcagcaggctggtgcctgacagcat

SEQ ID NO: 356593 - DNA, 122 bp, Homo sapiens
acactacccagggagtcattctggcgcgtccctgggtagtgtcccggcgcgtccctgctccggcatcactagttctgggtggctctgggtgtcaatcccggtgggctctgtactatttcttc

SEQ ID NO: 356594 - DNA, 122 bp, Homo sapiens
caggccggcccggcacacggagaaggggcggggcttcaggggcctgacccgcccccgccccgcccctgtctcccacctcagccggcgagctccatgaggtgactacgtccggggttactcca

SEQ ID NO: 356595 - DNA, 122 bp, Homo sapiens
aacgtaccggcaggtaagcgggtcccaggttggtgctgtttttctcagacatatgctgcccgggtctaagctctgtgcggccttagagaggcctgaggctgcaggcaccccatgtcctactg

SEQ ID NO: 356596 - DNA, 122 bp, Homo sapiens
cctcctgcctcctctccgcctaggaggggtgcttgggaggaggccgggcccggaaatctgcgagggggtccctggtgaatcttggtgtctagaaccttctcagaggtgccactttgggtcta

SEQ ID NO: 356597 - DNA, 122 bp, Homo sapiens
ggaactacgtcagactacctcaaaaatatccccaaatgtttataaacaaagccaagggcacgcactcaggcccggtgaggtccaggaactgtgcaagaggcctctggctcggaggggctgaa

SEQ ID NO: 356598 - DNA, 122 bp, Homo sapiens
agactgcacaactgaatcagcctgacaacttttaaaatcacagattcttgggtccctcctcggtctactaataagaaatcactgggaattaatgtatatgtagtttgtttcctatgagcctc

SEQ ID NO: 356599 - DNA, 122 bp, Homo sapiens
agactcccagtgcacctgttggcaggtcgcagtggagcagcacgtggcaacactcactctcgtgcagctcagtgtgcgttccttggcggccacatctcagcctgaagcctgggacgtgtcct

SEQ ID NO: 356600 - DNA, 122 bp, Homo sapiens
ctcagcagaatgtgttaaagtcaggcggttgggcaggcaggttctcatggcccgaaccctcgtggaatgtttcactttgaccaaggtctgcatattggcagggagcttacaaaatggtgcat

SEQ ID NO: 356601 - DNA, 122 bp, Homo sapiens
gtggggaggagcctgtcagagctgatcactgcgggagggtggatggtcccaggccccgcccgcctcctcccaacctgtgaaaggcctggaaggttctgcgcagacgggccagggcctggcgc

SEQ ID NO: 356602 - DNA, 122 bp, Homo sapiens
cgtttgcgctgggtcatcactgtgtagtattggggatacttaggtgagaaaaaaacttaacgctagagacgttcacgcactagtggagaagccaggattgttgccctagagttacagtagat

SEQ ID NO: 356603 - DNA, 122 bp, Homo sapiens
tcaagcatgcagccagactgtgagctatctcaggctgtacatgacaccagggctccagatcgacctatctataactacttgacactttccccgtgcatatccaccatatcacacattcttca

SEQ ID NO: 356604 - DNA, 122 bp, Homo sapiens
atccagtacttcattcattgcagccggcggacctaagaattaagggcaccacataaaagccggtgattagcagagacacaattgttaaaggctccaccaaagatgctacgtagcctttagaa

SEQ ID NO: 356605 - DNA, 122 bp, Homo sapiens
ccactctgacacttttccttttctgatttcacacatcttagaaactcttagctggttccacgtgctttgcctacactagcaagcaaatcccaatttccccgccctgcagttcatggacgaga

SEQ ID NO: 356606 - DNA, 122 bp, Homo sapiens
agttcaacaaaatcagtcaattcaaattaacttcaacatattacaaagaactatgaagcccggagaaggccactgttggaacaaaaaaccaagtccctgcccagaaagcatggacactgacc

SEQ ID NO: 356607 - DNA, 122 bp, Homo sapiens
gcgcccggcctcctgacgccagggccggcttctgagcacagccaccgcggcggccgggggcggccactgctccccgcgagcccgcttccgcgccccagaagcccccagagcccgcgtccgag

SEQ ID NO: 356608 - DNA, 122 bp, Homo sapiens
gctaacacccctctctccccaaccctcaggttgcgcaagacctctccagcccggcgaacccgtggggctcagcagtcctcctccacgctcaagatgcagtttgatgcaatcctagaggacgc

SEQ ID NO: 356609 - DNA, 122 bp, Homo sapiens
ccctttatcatatcagggaacctgtccccaagcctttgtgtgcttttgcttctaagagctcgcacctgggactctatttgaagggcacttttcctactggagcctctttgtcctgtatgcca

SEQ ID NO: 356610 - DNA, 122 bp, Homo sapiens
ctcccctccctcctccgtgttgtccgcctgcagtccttcgggtcactgttctcgggaggccgccccgccccacagtcaggctgtgcccatcccccgccgccccccacggtccccgagcccca

SEQ ID NO: 356611 - DNA, 122 bp, Homo sapiens
atcctatccccgtaatgttagttttggaaagctgcttcagtgttacagactggaatagttcggaaagacacagttgtatgtgacaaaggacaggcattcagataggcatggaagatggatgg

SEQ ID NO: 356612 - DNA, 122 bp, Homo sapiens
gaaaggatttggaggcggtgggctgtcggcccgggctagtcccaaggagggcgtggcgttcgtgtgactttcctttacccacccccgggaatgtgtccctcttctgatccattgtgcccgtg

SEQ ID NO: 356613 - DNA, 122 bp, Homo sapiens
agtgacaggagggagcagtttggcccccagtttccagctaccagcacctccgttcccagccgaaggtgactgcagaaggccctagaattattactgttactagtattcctagtagtattact

SEQ ID NO: 356614 - DNA, 122 bp, Homo sapiens
tccaaggaagttcagtatatttttccacacgtctttcagttagtatgaatcatttattcacgcttcatccaagtgggcttattacagagctaatgagcttaagttatattaagggattgttc

SEQ ID NO: 356615 - DNA, 122 bp, Homo sapiens
cgacttggtctggcctgcgtggacagtaggcgctccgtgggcatgagtcagggacgcccacggtcccctggaccccactcatgcgcggtggagaagcacttccttccgtgtggggggacctc

SEQ ID NO: 356616 - DNA, 122 bp, Homo sapiens
ggtttgagatggaaaataggtgtgttacaggctgaattgtcaccgtctccccaattcatacgttgaagtcctatcccccagtagcttcggatgtaactatatttagaggtagggtctttaaa

SEQ ID NO: 356617 - DNA, 122 bp, Homo sapiens
aaatgaggaacagtctaccccagccctaccctgaacactttcaaaccagccacttcccaccggcatggctgcccagctgttaaaatactgagtccttccacacaggctgggaagtagctgct

SEQ ID NO: 356618 - DNA, 122 bp, Homo sapiens
ggtgggtgtggtgggtgtggtgggagggcggcccgggcggccaccgtgacctggaagcagcgtctcaccgccgcctgccttctgccccagctgagcagcccagccaacctcagtgcctccgt

SEQ ID NO: 356619 - DNA, 122 bp, Homo sapiens
caggcggaagtcatggctgactctgatcctgcatcttctcattctggttgttttccaccgcgtctgctcccatttgcgtgggatgcgctggtctcctgcccgactcttttgtgttcctcttt

SEQ ID NO: 356620 - DNA, 122 bp, Homo sapiens
cctgtcccaggcctcctctaggctccgcccccgcgcccgaggacggcgggaggcggggtccgccattttttttaactgcccaatggaaggggctcccttagccaggaggacgagctttcggc

SEQ ID NO: 356621 - DNA, 122 bp, Homo sapiens
tttccacccatccctttttcctcctctccacttcttgatgcatggcgactgctccctctccgcactaacatctgaactttccagccagtccactaggggccactggtttcctttctgccccc

SEQ ID NO: 356622 - DNA, 122 bp, Homo sapiens
tgacagcagtattgctctgggctggaagttttaattgctaaaatgagaactccttgagaacgaactcaacttcacttcaccttgactacagtgttccaaatagtgatgactctgcccacttg

SEQ ID NO: 356623 - DNA, 122 bp, Homo sapiens
tgagagtaccttcctctcgcttgggatgagagtacattccttaggggattgtcaggcttccgttgggtgatgaagtgcttggtgcagggtaggcaagatttactgcatgaggagagaggaga

SEQ ID NO: 356624 - DNA, 122 bp, Homo sapiens
agagcatgcgtgccggagggactgcactgctggcggcggcggccgggggaaggagagcggcgcaggaggcaaaggttgaggaggcagcaccctcggatgaataataacaccgcgccgcgcaa

SEQ ID NO: 356625 - DNA, 122 bp, Homo sapiens
tcacttctagccatcaggttgcagacaaatggccttggtcaggaggtccctgggtgggttcgcccgagcccccagtccctggaccgtgggtgggtttttctcagtttcgcttgcccgcctcc

SEQ ID NO: 356626 - DNA, 122 bp, Homo sapiens
gggcgaaatcgagttcctggctcctcggccgtcggctccttcttgctggtggaagcgggtcgcacgggggaaccgagaagtagtcgtggaagactcgcaggcggggacggggcggtttccca

SEQ ID NO: 356627 - DNA, 122 bp, Homo sapiens
atttgggcatgccagaatggcgtttcatttccaaacctttattgtggtcactttcctcttcgttacactgagaagtgttgctgagggtatagtaaggccctagttcatcaattatatcctgt

SEQ ID NO: 356628 - DNA, 122 bp, Homo sapiens
agatactgagtacctcagaggggattttaggatggaaggaggtgctgcctgcccggggcacggaacacagccagtaccaagagcttaactgtgagcactgcaactaccccagtggagtggct

SEQ ID NO: 356629 - DNA, 122 bp, Homo sapiens
gctgaccgtgccctggaaggagcacggcgttgtggagacatggactatcagcagcgcagccgggatgaggactggggttaacccgcacttcccttcgcgtgctactgctgtatttattgaga

SEQ ID NO: 356630 - DNA, 122 bp, Homo sapiens
acaagagaaaagcttctgcagtctgccagttatcatggtttctcatcgattagcaagaaccgtgactccttacagatcaccatcaaacctgagctttactattctgtgtgtcggcttctacc

SEQ ID NO: 356631 - DNA, 122 bp, Homo sapiens
gcactcctggaagaagtggcctaacctctgaggggcactggaagccgccagactgggctgcgggccagaccccactcattcctgaaatgagtctactctagggccagcggccatgaggagag

SEQ ID NO: 356632 - DNA, 122 bp, Homo sapiens
acccggcgctcctgggcggaaatcgcgagcagagcccttctcagcctcctgcagaaaacgcgcctcacctgacttgtgtttaaatcagcaagggcagtgacgcggctcttccttttcctggg

SEQ ID NO: 356633 - DNA, 122 bp, Homo sapiens
gaaaagcccgagaaaagccctgtcggctccctcttcctggctgctaaagttgacacaagacggcttcttggaactccccctcctcccgcctaaatgtacagagcaagacttgaagtcaaaag

SEQ ID NO: 356634 - DNA, 122 bp, Homo sapiens
cggcggctccgggcacctgctccaggcccagtgttttcatggtgttgtgtctgatcctggcgactcctgtcagtgaagtcctagagcccagtgtttcaagcaaggatggcggaacacagagc

SEQ ID NO: 356635 - DNA, 122 bp, Homo sapiens
agggaactaaaggaaagagatgccttttcttttcttttctgagacagagtcttgctctgtcgcccagtcgggagtgcagtggcgcgatctcggctcaccacagcctccccaggttcaagcga

SEQ ID NO: 356636 - DNA, 122 bp, Homo sapiens
gcatgtggggcacaatgaaacaagagcagccccggccagaggtccagtaaagcggaaagacggtcccgcccgcacacccctccggaaaactgaagcgtctcctctgacccccaaggtcagaa

SEQ ID NO: 356637 - DNA, 122 bp, Homo sapiens
tcctgtcttccctccgcagtgactgtgcctgacgtgtagccctgtctggggagctctgcacgcgcaattccgcagtctctcccagattgtgcaagaaccatgggaggggcgtcaggtgagaa

SEQ ID NO: 356638 - DNA, 122 bp, Homo sapiens
ctcactttttaaatagggtttcatttcctgaaagagaaatctgacaaaaccgggtgaatacggctgggtcagaaatgaagctaaaaaaggatacgttctgcttctgaattggacgactttgc

SEQ ID NO: 356639 - DNA, 122 bp, Homo sapiens
tgggcgtgccacccggcggcggccgagtagagggggcgagagttctcaccccacagccttcgaccggagtccgcctccgcccaagcccctgcggttctgacctgagccttcagcccgcagcg

SEQ ID NO: 356640 - DNA, 122 bp, Homo sapiens
caaaaacttcctgcgggtttataggtaggaatcttgagagctataaccctggtgtcttctcgcactgtgagatgtggtgtggctacatcaatgccagggtcatgagttcactataggacgca

SEQ ID NO: 356641 - DNA, 122 bp, Homo sapiens
gggcgcccccgacccgcagcaaattctcgatcaggaaactcttgcccaggttgccaaagccgggcgcagcggggaggttgaggagcgcggaggaagccacaacgtcccagtacgcaccggcg

SEQ ID NO: 356642 - DNA, 122 bp, Homo sapiens
ctgattaacaaggtctttctgtcttttatgcctcttttttcggtgtctctatgtctcctccgtgccgctggctctctgcatgtctctctttctggacctccctctgccccgccccttcccct

SEQ ID NO: 356643 - DNA, 122 bp, Homo sapiens
aaaagaggttgtggcaacgagaaaagacaaagtccacataagcttctttaaaacaagtaccgttgatcacaggagcctgttgcaggagttggctttagcttattgtggagacacccactgtt

SEQ ID NO: 356644 - DNA, 122 bp, Homo sapiens
agacttgtagcaatgcctgggccacactgcatgtctgatccttgtgcagtgagcctaaaccggcgctgtggagcatagaccaggtgtgtcctaaacacggtctctctcaacccttgctccct

SEQ ID NO: 356645 - DNA, 122 bp, Homo sapiens
ctgtggaggccaaatctctgctgagttctttccaccacattcacccatgactggccagagcggggctctccaccaaaaaatggggcgttgagaggtgtgtagtaccaggagaccagttcccc

SEQ ID NO: 356646 - DNA, 122 bp, Homo sapiens
ttatcctaaagaaaggcacagctctgacaagaaaaggcaatccgggagcctttccctagccgtttaaaatgaaactcaccgttcttgctcccgtgagctgttgcaaataatcttgaatctcg

SEQ ID NO: 356647 - DNA, 122 bp, Homo sapiens
ccatttcatagcagaggaaattgagacccagagagatgaagtcacttgcctagggtcacacggctagtcactagtcagccacaaagcaaaggccagcgttgccaaacacaccgcctgctgag

SEQ ID NO: 356648 - DNA, 122 bp, Homo sapiens
tccgtctctcagctgtgaaataggatcctaccagtaccctccaatcccaaactgagaggccgggaaaaggcaaggacgcccgtcggccggcagagggcgctgcgcacccgcgttggacgggg

SEQ ID NO: 356649 - DNA, 122 bp, Homo sapiens
gcagtttgatctcagactgctgtgctagcaaccagcgagactccatgggcgtaggaccctcggagccaggtgccggatataatctcgtggtgcaccgttttttaagcccgtcggaaaagcgc

SEQ ID NO: 356650 - DNA, 122 bp, Homo sapiens
tgggttaagatgactcttcccgggttctgaacatcggtgtccttaacaatccaagcgcatcgtcaacaaggcaaacccagcactgggccaggcaaaccaaaccctcttctccagcagggccc

SEQ ID NO: 356651 - DNA, 122 bp, Homo sapiens
agtcagagttgcttgaacatttaagatgataaagattgagcaaacccagtgactcaccttcgccgcgctaactcttcgctagctctccccctcaatacacgctcacaccctcctcaagatgg

SEQ ID NO: 356652 - DNA, 122 bp, Homo sapiens
accccagccaaatctctggacaagttcattgaagactatctcttgccagacacgtgtttccgcatgcaaatcaaccatgccattgacatcatctgtgggttcctgaaggaaaggtgcttccg

SEQ ID NO: 356653 - DNA, 122 bp, Homo sapiens
gcggctgcctcagggtacgcctctggagtaccgtgcctaggttactaaacccttggatcgcgcttccccaaggagccacagacttactggctcttccagaattctgcatcctacttgcactt

SEQ ID NO: 356654 - DNA, 122 bp, Homo sapiens
ccggccggccccttctttggctccctggtgctggtagctggggccctgttggcagcacaccgcaggataaatgcccccaggtgcggggtgcagggtcccgcctcacatgccgtcctggctcc

SEQ ID NO: 356655 - DNA, 122 bp, Homo sapiens
atcagctcagcgaagccgccgcagaggctgatggggggctggaggctgtgaggcttccagcgtcggtaccatggcgacgcgcggtggggctggggtggcaatggcggtttggtccctcttat

SEQ ID NO: 356656 - DNA, 122 bp, Homo sapiens
ggggatgtgggcggagtctgcggctgcgctgaccaatcgagtgtggcgtccatcgactggcgtctgccacggcaattagcgacgcgctcccccgcggcggtcgccccggcaacccagtgctg

SEQ ID NO: 356657 - DNA, 122 bp, Homo sapiens
tccggggaagcactggaaacagcaggaccatcccgaaactgcttctgcagtgggaggcgccgggcgcccggctggccgggtggaaaccacgctgcagccgccgggccaagggcaccgcggtg

SEQ ID NO: 356658 - DNA, 122 bp, Homo sapiens
gctgaaagcgcgcgtctgtggcgtcgcggaaggccagcgtgtatgacgttgtcgaaggcgcgcctctgagacgtcaccgaagtcgcgccctaaggcgtcaccgaagtcgcgccctaacacgt

SEQ ID NO: 356659 - DNA, 122 bp, Homo sapiens
aaatcaagaaagctggtgtaataggtcccgcccacaacgcgaggtgggccaataggaaggcggaaggatctgggacccgcctcataacgagccaggcccagcctctaatgaggcaagacgca

SEQ ID NO: 356660 - DNA, 122 bp, Homo sapiens
aaggagagattcagagatatgagcagaaaaactggaagatggacttcttcaataaggcagcgggacggtttggctgatggaagatgtttcccggaagcctgttcacgctccaccctgaaagt

SEQ ID NO: 356661 - DNA, 122 bp, Homo sapiens
ggctagtccttgagcttattggctgatagcacagtgggcggggtacatagcacgaccccccggagccccgcccatattaatttgcataacggccccggcgcgtgcaagggagaagcgggttt

SEQ ID NO: 356662 - DNA, 122 bp, Homo sapiens
acgccaagcttgcgggccagatggagttccgggtgggcctgggcttggcggcccggcactcggagcagcctgctggcactgcctccctgggcaatgaggagcttagcaccccggccagcggc

SEQ ID NO: 356663 - DNA, 122 bp, Homo sapiens
cactgacaagtgcccctgcccaatgctccggacccaaccgagggtcccgtgtcaaccaggcgtctattaatagcaggacaaggtgtgaaggtcggcttcctgagcaaatcggcctctccaga

SEQ ID NO: 356664 - DNA, 122 bp, Homo sapiens
gagcatgcgcagcggattttccgttagggaagccgatggggcgcggctccttggagcatgcgcacacaaactttccgctaggaatcaagcgagcatgcgcacacagatgttagggttcgggc

SEQ ID NO: 356665 - DNA, 122 bp, Homo sapiens
cccacacgatgaagtcagcagagtgtttgatgctccttccttgagtcccacccttcacctcggacaccgttttctttctgagtctgcaggttaagccgcaccccagggtgaaaatgaacatc

SEQ ID NO: 356666 - DNA, 122 bp, Homo sapiens
gccctgtctgtcaccttggagtcctcttgcacaaacagtgttccctcttcaggtggatcacgtgttcatctgaggccaccgcacctccgggcctagagagcgcggtcactgcaggctggacg

SEQ ID NO: 356667 - DNA, 122 bp, Homo sapiens
tgtttctgcctctgccaccacccctgccaacacctgcccacctgacacctggatcggcaccgagcagaggcaggtcccgaagactctgctccatgggtccaagctgagcgcaaatcctagca

SEQ ID NO: 356668 - DNA, 122 bp, Homo sapiens
acaggtcttccgaatatcccaagcttaaatgacccataagatgttaggagcgtgtagattcgggcactaaataataaataatatgggtgccagtagtggcctatgtgatctcatattcattc

SEQ ID NO: 356669 - DNA, 122 bp, Homo sapiens
cacacccactccggcgtctcccctttaagcaagcctgagggcagctggctttctaggacccgcggaacggttaaacagctccgcgggccggctggcctctccgaggccctggagcggcagcc

SEQ ID NO: 356670 - DNA, 122 bp, Homo sapiens
gttgggggtctgtccggggttgggggtctgtccagggttggggggctgtccagggttgggcggctggggcgctccagcctgagccctgccactgcctggggtctctgccctgaaaagcacag

SEQ ID NO: 356671 - DNA, 122 bp, Homo sapiens
cctgggtggagtctttcttgtcgcttccccttttctccctctaggaaatgagcccactcgcgggcttcaaagaccagaatcccagtttaggtcaaaataaatgcaccccgccccatcgctag

SEQ ID NO: 356672 - DNA, 122 bp, Homo sapiens
tgaatcttctgatgccacctaagtgagcaccaacacaaaccaatgtcaaaaagtttctgccgagatgagtaaggaacaaaaattgcactgccaggaagggtaactatttttgaatagcaatt

SEQ ID NO: 356673 - DNA, 122 bp, Homo sapiens
ccaaggaagaagccctctgctccgtcacctcctcgccatgccgtccccactgccagtgggcgcaacgttacttgcaaggccacaaacacccggaacaatccgccaggccgcgtcactcctca

SEQ ID NO: 356674 - DNA, 122 bp, Homo sapiens
tgtatttcaggacacacagtgtgcaggtgttttggggcacacgcgtgtttcagggcacgccgggtgcaggtgtttcagggcacacatgtgtttcaggacacacggagtgcaggtatttcagg

SEQ ID NO: 356675 - DNA, 122 bp, Homo sapiens
ggcgggcggcggggcttgtccaacatccctcacctccctcagttggacatttcccttccacgctcggatgcccagccgcgcctgttttcttgcatccctcctgtcgtgtctgcggggctgcc

SEQ ID NO: 356676 - DNA, 122 bp, Homo sapiens
ggattctgccggggggcggggcttcggtggaaagggagcatggctgcgcagtaataatagcggcaggctgggaaaagctaatgtcagctccaatttccaagtcatttttcaaattattttaa

SEQ ID NO: 356677 - DNA, 122 bp, Homo sapiens
gcagccacctcgacccgaccatgcgccccggatcatcagcatctggagcaagaagagccgcgcttctccctggagacgttcaccaaagagacgcctctccagagagaaagttggtgccatgg

SEQ ID NO: 356678 - DNA, 122 bp, Homo sapiens
cgcacaacaccgacctagctcctcgcgcctcgccgccccggcagccgccggcgtcgccgccgcttccatctctcgcgggtctccaggacgccgccgcccgagtgctcactctcccgccgctg

SEQ ID NO: 356679 - DNA, 122 bp, Homo sapiens
cgtggggtctggattggcgtctgcctggcttgggggtcctcagccgcatgcagtttgggtcgaggtcgggggtccgcggccgcgtggggtctgggtcggggtctgcctggcttgggggtcct

SEQ ID NO: 356680 - DNA, 122 bp, Homo sapiens
gtaaccacatagcaaactgcaggacaagtagcagagaaggtggaggagaaaagtggaaagcgtataatcaggaggaaaataattggccaaaatcaggtctaatcatgtgtccaatacttcct

SEQ ID NO: 356681 - DNA, 122 bp, Homo sapiens
ccattattcctcttgcttcatttgccctgagacaaaaaggtgaatccactggaaaatgaacgaaaggtcaccctgttttacagcaatgtctggacatgctctgccagtaggttccaactact

SEQ ID NO: 356682 - DNA, 122 bp, Homo sapiens
gggaagaaagccgacaggggagaggattgcttccctttcttttcccattcccccttaagacgaaccaggaagtaaccgcaagaatcgggccaccttaacagtagagtaatggtttggcctcg

SEQ ID NO: 356683 - DNA, 122 bp, Homo sapiens
cagcggttctcttcagacaccagatggccactgaccaacaaagggaaggacaagtcctcacgaggttccctcatagccccttagtgccaatctccaactgtagagatggagctaaggaatga

SEQ ID NO: 356684 - DNA, 122 bp, Homo sapiens
ttctaatgactcaaaacataaaatcccctcttttgtctcatgttgaagagctgatgacatcggacctatcaggtcagacttattttcctagtcagagactgaatggcatattttcaaagcac

SEQ ID NO: 356685 - DNA, 122 bp, Homo sapiens
ggcgtgcaggtcgcagctgtggctcgggtgctggcaggtgctggcgggactggcggggatcgccgtggactgcctcaggggcgccgcagcccgctcggcccgagggcccgcctaaccgcgcc

SEQ ID NO: 356686 - DNA, 122 bp, Homo sapiens
atacaaaactatacatgcaaaatgttcccaatatatttatagtgcatattaggaacacatcgcaaaaacagtttagtatcgtttttgattgcctatagtgacacaagtcagcgataaccacc

SEQ ID NO: 356687 - DNA, 122 bp, Homo sapiens
aggctggaagtcccagatcagggccccagcatggttggtttctggttccttgtgtcctgtcgcatgctgctgacctcatgacctaatcacctcccaaaggcccacctcctaataccatcacg

SEQ ID NO: 356688 - DNA, 122 bp, Homo sapiens
gccacccacccggagccccggaggacagggggcgttgccttcccaggaaggaggcggggccggctcgagggggtggatactgtgagtttaattataaagaatgacctggtacaaaagccatt

SEQ ID NO: 356689 - DNA, 122 bp, Homo sapiens
ctccctcctccgctatttccttaactacggggcaggcaggaggcggggccagcgtggtcgcgaagaagggacgggcgggcgtgagctgtcagtcagaagctccgcccccccccccccccccc

SEQ ID NO: 356690 - DNA, 122 bp, Homo sapiens
ccgtatgtcagtgcttccttagagaactggagtgttctggtcatcctgagaagtaacaggcggagggatgctccatgattataatgtttaggttaaaaggtatgcttgactcccaaggtgtt

SEQ ID NO: 356691 - DNA, 122 bp, Homo sapiens
cctgggacagtcactgggtaaggaagggtttggggttgctcccccaggcccccctcaatgcgtgaaggcctgagccaggtcagctggcagaggtgtgtgtatgtttaacttagaactgaatg

SEQ ID NO: 356692 - DNA, 122 bp, Homo sapiens
ccttgctcccgacgattagctggcaccacctggtctgtcttatctggggatcccaccagccgcattgttctcagggcacccagtcctgtgacagcagctccaaccatcatcccgctgagctt

SEQ ID NO: 356693 - DNA, 122 bp, Homo sapiens
caggcgtgcgggcgggtgggtggtggaggctgcgagggtgcacggccggccctgggcaggcggtagccatggagctgtggcgccaatgcacccactggctcatccagtgccgggtgctgccg

SEQ ID NO: 356694 - DNA, 122 bp, Homo sapiens
aaaaatgttgataaagtgcctagccccatatgccaccaaatcagagtcttttgcaagtcacgaccagatgatctcatctgaaagcttctgtgtgtgttgggtgcttgcagttgaataggatg

SEQ ID NO: 356695 - DNA, 122 bp, Homo sapiens
acaggccaagtcagcacccgcccgcccctagtccccagcacaatgctaagttgcagtgcccgactgttctgctcagaactggaacagatgggtccttgtaccaagcaggtccattccccaaa

SEQ ID NO: 356696 - DNA, 122 bp, Homo sapiens
ttccaaacacgccttcccattaattaaaacctggaaagcctggccactttcttctcaggccgaggcagcatctccagaggtccccgcggcactctcggccggcaacggctcccgcgcggggc

SEQ ID NO: 356697 - DNA, 122 bp, Homo sapiens
ccttcagttctgacccagcaaaccatcactattaacagttacacatagtattctgcacttcgcttttttcacctgtaacattggcactttgtatatcaaaatacatggaatgctattataat

SEQ ID NO: 356698 - DNA, 122 bp, Homo sapiens
cttcttagcaaaccaatcccactagctttgccatacaagtcgaatcaagttctggctgggcgcggtggctcatgcctgtaatcccagcatgttgggaggcagaggcgcgtgaatcacgaggt

SEQ ID NO: 356699 - DNA, 122 bp, Homo sapiens
gcttctgatcagccagagcccacacggggggcctgggcctcactcaaacgtcttgtaacacgcaggaaaaggtcagagtcttcaaagcagcaaaagccattggagggtgaaatgcaacctgc

SEQ ID NO: 356700 - DNA, 122 bp, Homo sapiens
cacactttccaatgaccttgagactatttacatccttaaagtgataagcaggggctctctcgggatcatttagagtgcccgcttttctcatctgagcctttgctgataagctttgaatttta

SEQ ID NO: 356701 - DNA, 122 bp, Homo sapiens
tagcctggcgggaaccctctcgcggagccttcgccacctgtggggctgcgctgctgagtgcgccctgcctggcacaacaggcttgagtcacggcgttgaggaactagccatgttggagcgga

SEQ ID NO: 356702 - DNA, 122 bp, Homo sapiens
cgaaggggtgcggaggcggtttcaccagcccgctcccagccctgcctcgagagagaagcccgctgagagggcagacagttgagaaactcgatcccaactccccagccggcgcctcccgaacc

SEQ ID NO: 356703 - DNA, 122 bp, Homo sapiens
gaaggtggagacgagacgttgtcccgactgcacagaggctgctctgcagctccttaaaggcgctaggcgtgacccgcaccaaggccgggatcgggaccaccgtgcccgggtacctgcactgc

SEQ ID NO: 356704 - DNA, 122 bp, Homo sapiens
acctagattctcacaaggaagcaggtgatagacggtgcatcccaaccaatcaccagccagcggagcgcaataagaaggcagttaaccaatcggagaagagatgggtggctcgaaggatggcc

SEQ ID NO: 356705 - DNA, 122 bp, Homo sapiens
tgtccatgttagtcttgtacatgcttgactccagtcagccaccgtaggccccgccaccggcggtgcactttctgtcgatacggtagcttcgcgcttgctcacgaacttgcctgcctggctgg

SEQ ID NO: 356706 - DNA, 122 bp, Homo sapiens
cccgccaagtggttacccaagtcaccactcctgacccaaaaatcaggcatggcattaaaacgttgcaaattcctttactgttatcccccccaccaccaggaccatgtagggtgcagtcttta

SEQ ID NO: 356707 - DNA, 122 bp, Homo sapiens
tcctgcgccgttctctcccatgtctaccatcagggaccgcgcaaagaggctggtggctctcgctgcacatccagacacgttttggtcctggcgagccacaggcatcagggagagtggcgctg

SEQ ID NO: 356708 - DNA, 122 bp, Homo sapiens
tggggccagcaccgcctcgcgccggtggtggaagcacgtgctgggggcgggagcagcaatcgcagccatggcgtcgttactgtggggaggcgacgcaggggcggcggagagcgagcggctga

SEQ ID NO: 356709 - DNA, 122 bp, Homo sapiens
gcggcatgcgccacccccccccgcctcgcagcacacacctcctgcagcacacaccccccccgaagcacacacacccctgcgccagggtccaggcgtcccccaagacccccgggcggaagcta

SEQ ID NO: 356710 - DNA, 122 bp, Homo sapiens
caccctccacccaccaagcctgtcttccccttcgtggtttctccagccccaccctcacaccgtcctcctcgatctgcgcggcttcctgcctccatgccactccagactgcaccggcatggca

SEQ ID NO: 356711 - DNA, 122 bp, Homo sapiens
ctcaagagaaaggtaaggacgacactcagtgcaggagtccatattaccacataggcgtttcggatgggggattcccttctccggggacttggaagaagtgtggtcaagaagctatgtgtagt

SEQ ID NO: 356712 - DNA, 122 bp, Homo sapiens
cagccagtgcccggccgccctcccgggagcccagggctgggaggtgccggctgcgccggtcgctagttaggaactgtagggagaaacctcacggcctgatggcacccagcgacctttttgat

SEQ ID NO: 356713 - DNA, 122 bp, Homo sapiens
cagaacaggcagcacatgactgtataccattgtagcattagacagaataggttcactgctcgaaaaattctttaatgcctgttcttccttcccttctagaaactcctggcaaccaataattt

SEQ ID NO: 356714 - DNA, 122 bp, Homo sapiens
ctgcggccggaggagctgggggagctggcgggcggcctggtgtgtcccggcttgcgcgaacggccactgttggcgaggaagccgggcggcgagctcaaggctagggagggccggccctggcg

SEQ ID NO: 356715 - DNA, 122 bp, Homo sapiens
cttcgggttctttctccccggagctgcccggggggtctcggcctcgggcgctcccgccgccgtcctgttcccctcagggttcatgtcctgttcccggggccccagaggtcccgtctgagagc

SEQ ID NO: 356716 - DNA, 122 bp, Homo sapiens
accatcatccttcatgtgcaatctcaaaagccagtaagctctgaaaatttaaagtgttttcgtaagtttgcagcaagctcttttggtggcaaaagatgagccgaactaatatgaaactcttt

SEQ ID NO: 356717 - DNA, 122 bp, Homo sapiens
caggggctggcgactggcggcggggaagcatgtgcacatgcgtgtctgcactgctgtgtgcgtgtcgggcatgctgctctgtgcgggaagaggctcgtttcagaggaagcgtccaatgggcc

SEQ ID NO: 356718 - DNA, 122 bp, Homo sapiens
ttgtgagtgagtgagagcaaagagcagacgccaagtgctagaaacactcccaagacagcccgagcctaaggcatgctggttaattgaggttttacaaagctgtcccttactgttctgccaca

SEQ ID NO: 356719 - DNA, 122 bp, Homo sapiens
tgcagcctcaaactcctggctaaagggctcaagggatccttccacctcagccttccaagtcgctggaaatacagatacaggcgcctgccaacatgcctggctgtttttttttgtgttattgt

SEQ ID NO: 356720 - DNA, 122 bp, Homo sapiens
tactgcagcagccaggttgggtccgcgccgtcgggtttctgagaaaagggaggaaagaggcggggcctgcacggtgtgtccccgccctccaggccggcgtcaactctcattggctcagcgcc

SEQ ID NO: 356721 - DNA, 122 bp, Homo sapiens
tgttgtagcgccggcgcagcttccccatggcgactaggccagggtgggcgctccagcggccggaccagcagagcaatccgaaacccagcccacgtgggttcccagaccaccaactccggccg

SEQ ID NO: 356722 - DNA, 122 bp, Homo sapiens
gaggggagactttattgatttttgcagcatccgctgtgggctggcttgggctgtgggcagcggacacggagttggccttgcagagccggctgatggggggagtgggccaaatgtgttcagga

SEQ ID NO: 356723 - DNA, 122 bp, Homo sapiens
ccacggccttaacaccaacaggccactttgtgctgcagccccggggtgtgtctccagcctcgagctcctgacattccttggccgatttccctaggtaaccggctttttacatttcgacagca

SEQ ID NO: 356724 - DNA, 122 bp, Homo sapiens
ttagtcaggtaggcagaactctaatcaggaattgaaataaagcattagtattgtgataagcgaagaacagaggcctatgagaacatagagcagggagttcttaaactgatctacgatctaga

SEQ ID NO: 356725 - DNA, 122 bp, Homo sapiens
gccgggtccctcggggcctgacacctccctcggtggggaggtccagggcgggcccttaggcgcctgacggctacccgctttcccccccaagcccggccaagaaaacagagctgccagggcct

SEQ ID NO: 356726 - DNA, 122 bp, Homo sapiens
tatgattctcttaatagctatacattaatcctgtttttagtgctgactgggtcagccttccgggaactggagtctgtctctttcagtgcttttttgtttgtttggttggtttttttttgaga

SEQ ID NO: 356727 - DNA, 122 bp, Homo sapiens
ggggcagggagattgattggttgcttttgccagtttccatggtgtacatattcccaccatcgccagtttcaagctaccaacatgaggtaaactgaatgtggagtctggaagggatactcaca

SEQ ID NO: 356728 - DNA, 122 bp, Homo sapiens
gcaaaaagggaaaacacatagtaggtggtggccgcttcctgtgttgatactggggggctacgcttttcctaacatcaatcatctcgtagttgcagagagccctagatgtcatgatagttttg

SEQ ID NO: 356729 - DNA, 122 bp, Homo sapiens
atccctgctacaggttctctggaaaacctctgaacaggctgtgcaggagggcagggaccacgtctgtggttttgaccatgtgttgtcaatgctcagcatagagcttggcgcgtgattcactc

SEQ ID NO: 356730 - DNA, 122 bp, Homo sapiens
gaggttggtttaaatatatctttgaggaaaggtaaagtcaaatttgacttcataggtcatcggcgtcctcactcctgtgcattttctgttggaagcacacagttaattaactcagtgtggcg

SEQ ID NO: 356731 - DNA, 122 bp, Homo sapiens
gagaacaagcagccactggccgagatctacaccggcaaagcagaggtggagttcttgacacggaacagcagtgagcagagcccgggcctgatgatgacgcaaaccaaaaacaactacccacc

SEQ ID NO: 356732 - DNA, 122 bp, Homo sapiens
cccgcagagcatccacctgagcttcctgcgcaccgtgccgccctactcccaccagtccagcgtgtggtttgagatgatgcgtgtctacagctggaaccacatcatcctgctggtcagcgacg

SEQ ID NO: 356733 - DNA, 122 bp, Homo sapiens
aggcaggcgcatgcatttcaaggtcagggaatagcaggtcgttctgttctgaaagcgaagcgtcttcctggctggggctgctggattgaagccctgagccgggcaggctgcagagcgtgagg

SEQ ID NO: 356734 - DNA, 122 bp, Homo sapiens
cgcggggcctcccccgcccgcgcggtacagctgggtcagtgacgcgggcgctgcagccgtcgctaccgccgcgttctattctccgaagccggcgaccgccccacctcctccctccctcccgc

SEQ ID NO: 356735 - DNA, 122 bp, Homo sapiens
gagccagggctcagggcagctgtgatctctgagtggagtgctgtctggacttcggggtgccgggagagctcatacagagcccaagagagcgtgttggacacctgaaaaacatgtgaaagcaa

SEQ ID NO: 356736 - DNA, 122 bp, Homo sapiens
gccccctctcaagagacctcacctggcctgtggccagggtcccctgtagcaactggtgagcgcgcaccgtagttctctgtcggccggccctgggtccatcttccagtacagtgttggatggt

SEQ ID NO: 356737 - DNA, 122 bp, Homo sapiens
ttctccgcgaccctgaccacgaccccacgaccggctcccgcctgttccccaggcctggagcgccaccccgtgcagaccccggccagccctgcactccctcagtgcaccggcccccgcgccca

SEQ ID NO: 356738 - DNA, 122 bp, Homo sapiens
ctgggaggggcaggagaggagccctcttccgcctttgtgtccagacagaagtggccgccgcgcccggagccggtcccgcggcaaaggcccggcaagccagcgggctgcacaatgccacggct

SEQ ID NO: 356739 - DNA, 122 bp, Homo sapiens
ggtcaagttcgggacctgcagaggctgcggaaagtcaaaagcggggcctgggaaggcagccgggaggcatgagctggcctgggctgaaagaggccactgggagacaggaggagctgggcctg

SEQ ID NO: 356740 - DNA, 122 bp, Homo sapiens
gggcagatggaaggagatggcaaggaccaatctggggccgagcaggaacaaaagcagcaacgctaacggaaaagggccgcgccgggctggtgggccagacaaaccagacatggtgctggaga

SEQ ID NO: 356741 - DNA, 122 bp, Homo sapiens
aaacccccggccgctggcttatgcaaatcacttaggtacatgcaaaagtatcccttctcccggagcgccattggcccggggaggtctcgagctcattactatgcagagaggagagccgccat

SEQ ID NO: 356742 - DNA, 122 bp, Homo sapiens
gctcccgtgctgagattgacgggaagtctaggattactcctgtcctctgggttccctggccgggctgtcacgctctgggctgggtcccctggccgcgccatcacactctagccgggtccccc

SEQ ID NO: 356743 - DNA, 122 bp, Homo sapiens
cccccacgcggtgtgtggccgcgattgtcttttacaccactttctcccggtgtcgtgagccggccttggagggttagttgctcacttgttttcctaaattggataagttccaaggataaccg

SEQ ID NO: 356744 - DNA, 122 bp, Homo sapiens
catgaggggagcccttcagaacctcagagcccagggctggtcgtgcagccccctctgactcgtgcatgtgcagatctccgacccccaggaggaagcaggtgcttagcacaaccatttgttgg

SEQ ID NO: 356745 - DNA, 122 bp, Homo sapiens
gtgagagctgagctcattgatgggaggcaccttcctttgctaaacaggcattttccaccacgtacatcctgcccttctcgccctcctctcccaagaccctgagtgtgagacgggtcccgcca

SEQ ID NO: 356746 - DNA, 122 bp, Homo sapiens
atttccccctctcgcttactcttttcaagccacagtggtctccttgctgttccttgaacacgatgtgtacactctagtcttgcagcctttacattgcttgatctatcatcctggaattactg

SEQ ID NO: 356747 - DNA, 122 bp, Homo sapiens
gtaaaagaattccgagtttgtgttattttattgaacaaacctattcagcacttggggaatcgcaggcagcattgcagactcgctggctcctggctgtgatctcacacccaaactgcaataat

SEQ ID NO: 356748 - DNA, 122 bp, Homo sapiens
caataaacagtgcctgagcacagggactacctaaaaaagttaagtcatatttgctaccctcgtgttgatgtaaggattcaaacatccaaacaaatatgatagaaagtggattgttattataa

SEQ ID NO: 356749 - DNA, 122 bp, Homo sapiens
ccacgcccacttccggcgcgggcccctgaactctgcgctgtgcggagcgggattcttgggcggaggggaccatctttgagtcagcgacgcgtgtattcaagtcctcctcctcgttttttatt

SEQ ID NO: 356750 - DNA, 122 bp, Homo sapiens
tcgcatgttttaatgcccaccgtgaacaaagaagaccggaaccctcgcaactcgttttgacgttttctggtcggcggtaaaagctcggttcccggccctcccggaagttgttgcacagttgt

SEQ ID NO: 356751 - DNA, 122 bp, Homo sapiens
cgtttcagacctatggatgtgccaagcacactcctccccaggtggggcctccggaggcaccggggatcatatgtccatcatggatccgactgagaccaccgctgtaccaagccgggtgcggg

SEQ ID NO: 356752 - DNA, 122 bp, Homo sapiens
tttggctataaattcctgaaatgctgacatggttgaatttatttttgctttaaacaaaatcgttaacatttccaagtgtccatatgagctcgataaatactttgcctctgcttactgcgtat

SEQ ID NO: 356753 - DNA, 122 bp, Homo sapiens
tgggggcttttgcctctcaaaatacgagcccctcacaactacccatgcacctgccaaacccggcaattaagcttcttacacatccagccccgacaggggtctacactacagataatgcccgg

SEQ ID NO: 356754 - DNA, 122 bp, Homo sapiens
ataaataaataactgacctcgaaagagagggtcgtcttctgggcccgtgctgtcatgtcacggcctggccggcgggagcccacctggcgtctcctgagctcattaatctcggctatctcctc

SEQ ID NO: 356755 - DNA, 122 bp, Homo sapiens
ctgctttctacatgtaaaacaaagcgtatttaataaattcatccaaaggagtcagggaaacgtggtttccagcattcaaaaaaagagctggaaatggctgagtgccaatcagctatatccag

SEQ ID NO: 356756 - DNA, 122 bp, Homo sapiens
gagaattaggctcagatgtgcagcaacaatgaggttctacgactggaccccggaaagaaacgcacacacatgcaatggctggatgttccacaggccctatccagtccttgtgggtgctgctt

SEQ ID NO: 356757 - DNA, 122 bp, Homo sapiens
tgtagagaacacagcagtgaaccagggaggatgttgtggtgctttgcccagattccccttcggaactgagacactcattcccagagctgagacctcaaagctgagtacctctcccagcgaca

SEQ ID NO: 356758 - DNA, 122 bp, Homo sapiens
cataaccatctacccctcccctcctcgtctggagagctttgatctatgcttgggttttaacgccattgccatggacacgcgcagattctcggtcaattcacccttccgtctggactggatga

SEQ ID NO: 356759 - DNA, 122 bp, Homo sapiens
gagcttcccagagcaagcgtgcagccatgccaggcctgggctgggagacatgtgtgaggacgcacgatggggttaggcagcctgagaaaccatccctggcacgggctgcctcaaggaatgag

SEQ ID NO: 356760 - DNA, 122 bp, Homo sapiens
ctcgtctcctgtgctgtcacaggcggaggccagcttctgggttgagacctctgtgaactccgggtcttcagcaaattgccccagtcctgaaatcaaaacctagggggcggggttggaggcca

SEQ ID NO: 356761 - DNA, 122 bp, Homo sapiens
gacgttgagtgaatggatggatccgcagccagggctgttttctccagtgcccttaggggccgcattgatgttagaatacaagtcagggaccatgtaggcgtccagttagtatttgtcgaatg

SEQ ID NO: 356762 - DNA, 122 bp, Homo sapiens
tgcttctgtgggccaggcaccctgaccctgatcctctccagtgaagaggccgggggcaggcggaactgggtcaggctccaggacacagcctcaccctatcagggcagcgagggctggggcgg

SEQ ID NO: 356763 - DNA, 122 bp, Homo sapiens
agaagggatcaaagggacctgcatggagggactaaatcagagagaggggcttcaaggagacgtgagcataagagcaacacgggccccaaagccagaatggacaggaaaacacccacctgctt

SEQ ID NO: 356764 - DNA, 122 bp, Homo sapiens
cgggatcccgaagagatcgagttaggatgaaatctgtttgtcggaggggtccgtgccgcgcgcctctttggtttagctggtcatccagagttgttctgtggtctacgggaagaaagaaggaa

SEQ ID NO: 356765 - DNA, 122 bp, Homo sapiens
gaagttttgaacctgggcgtgctcacaaagaggacactttgctacatcagaaaggaagcacggatggactaccgaaagaaagtgtcagaatctgcccttgagtggtgtgtaccaggaacatg

SEQ ID NO: 356766 - DNA, 122 bp, Homo sapiens
cgggaaggaagcgcggtcagcggagctgccggggctgcggggccagatcaaagcggaagacggaggctaatcagaatttctggaagctgcattcccgtgttgactttctgtcctgcagtcgg

SEQ ID NO: 356767 - DNA, 122 bp, Homo sapiens
aggtgcaaggatgaccctggcccatgaccagcatcctggggacggcctgcaccctctgcccgccttggggtctgctgggctgtgaaggagaataaagagttaaactgtcagaatgtgtttct

SEQ ID NO: 356768 - DNA, 122 bp, Homo sapiens
ttggctaggtccctggctgccaaccgtctggccacagcccgatgcgtgtcttcattctctcgccttcgctgggttccgcctcccatggccttctcacttgccctctggaggtctggctccct

SEQ ID NO: 356769 - DNA, 122 bp, Homo sapiens
cgggcaggtgcccacctgtagaaggcctcccgggcagggctgacgggcccagggtgaacacggcagtccccggccggggctggcagggttccatgctggcgccagtagctgtgggcgcccag

SEQ ID NO: 356770 - DNA, 122 bp, Homo sapiens
ccaaaataggcatccttacaaatcaggaagactgacttgacacgtttgtaaatggtagaacggtggctactgtgagtggggagcagaaccgcaccactgttatactgggataacaatttttt

SEQ ID NO: 356771 - DNA, 122 bp, Homo sapiens
gccgacaccaggcaattctgctttctgtccatagatttgtctattctagaccttttatagcgatagaatcaagccatacgtggtctcttgtgactggcttcatttccttagctaacgtcctc

SEQ ID NO: 356772 - DNA, 122 bp, Homo sapiens
ccgacgcggggctctgtctgtcccgagagccccgacgtggtggctcctgctgggttcagacgtttgggagtcgcccgcccgagggcccctcaggatttcccaaatggggcagaagaccccgg

SEQ ID NO: 356773 - DNA, 122 bp, Homo sapiens
gacaggttagagtgggggcaggggcgggcgcgggagcagcccagggccagagagggagcccgagccaggccatctccaaccatgtccgacgaggcctcggccatcacttcctacgagaagtt

SEQ ID NO: 356774 - DNA, 122 bp, Homo sapiens
atgcgtggggcttgggttcttcaggtctcttgatgtttttcctcttagaaccgcaaactacggttgcctgaaaaggtttctaaaaaccccaggcgcccaggcccacctcagagaacggctct

SEQ ID NO: 356775 - DNA, 122 bp, Homo sapiens
tctttaagttcttactgctttatgtattaatctgaacctaatcagtgattttcccaggagcgctatacttttaagtaaaaaatgaaaatacctgtatgaaccagtatcgacgactagtatat

SEQ ID NO: 356776 - DNA, 122 bp, Homo sapiens
caaactcttctcgaccacatcacccatggtccaggcgcccctttgtcctgccatcaacatcgagactgaaggagcgcccaagtgtcaggcaggccccattgcaggagctgagcggatttcct

SEQ ID NO: 356777 - DNA, 122 bp, Homo sapiens
gcctagctggggctgacaggtacacagctggcccacaccccaccttgctggatccaggcacggcctctgatagtgtgggccgcctggactcggcaccacagtacccgtgggagcccctcacc

SEQ ID NO: 356778 - DNA, 122 bp, Homo sapiens
tcccctcaggacgcccgggccgcggcccagggaacggcagagccgggagcgcagccgtcccggtccccacctcagggagtagctggaagaggatcacgaacagtttaatccggatgatctgg

SEQ ID NO: 356779 - DNA, 122 bp, Homo sapiens
cgctacaccgcgaagggatagtcccgggcctggatgggcggaggtccgtgttgggaaaggcgaatagtcttcagactctggtcggtgggacagaaccttgaagtcccccccacctcattctc

SEQ ID NO: 356780 - DNA, 122 bp, Homo sapiens
cggcgccgctggcactagggcctcgtggaacgaatgcacattccagggatccggggtctacggccagcgcggccgcgtcacagcgcaggctccacccccttcggcgagtctgggcgtcgagg

SEQ ID NO: 356781 - DNA, 122 bp, Homo sapiens
aagaagagaggcaacgtgtcctagggacgggcatgatgagtgttccagagggagaagcatcgctgaccccgagcgcaggttttgctagcagattgccctgacatcttgttcatttcagataa

SEQ ID NO: 356782 - DNA, 122 bp, Homo sapiens
caaacaagcacacacacacacatacacacacacatcagggtgaaaaattgtcagcctctacgggtcagaatctgattttacaagagctcattagtaaataaaaactggtttttaaaactaaa

SEQ ID NO: 356783 - DNA, 122 bp, Homo sapiens
ttagaaaaacaaatttaaggttgaagccagaaaagccagattttcagcctgccagctacgcgtttgcaattttggtctatacaatttgagtagagactggagcagcaatcctgtctgaactc

SEQ ID NO: 356784 - DNA, 122 bp, Homo sapiens
cagggcggccggagccctgggagctgtccctggaggaggtgctgaaggcctacgagcagccgctcaacgaggagcaggcgtgggccgtgtgcttccagggctgccgcgggctgcggggctcg

SEQ ID NO: 356785 - DNA, 122 bp, Homo sapiens
gaccggactagggtggctgaagtggtgaacggacctggctgggggcggatggccccgctgcggggggcgggggccggctaggggtacgtgagaggccctctggagcagatgagggaggatgg

SEQ ID NO: 356786 - DNA, 122 bp, Homo sapiens
agtatcactttccaaattacaagttccctgaaatattttctttgttccacacattaccaacgatagcatctaataatggttcttagactattaggtaactcctcagtgaataaatgattggg

SEQ ID NO: 356787 - DNA, 122 bp, Homo sapiens
ctagacctagcattttggtgtataagtgcatatatttcagtttttttgttattgttgttacggcagtctgaatttagaactttgtgctaacaacaggttacagcaaccctagagtccatcaa

SEQ ID NO: 356788 - DNA, 122 bp, Homo sapiens
agttgtccagcggctgaaagcctgcagagaaaaccattgtttctcctgctagacagtaaccggagaaaactgctcagttcatgctaccaaaacctttatttaaaaaattagaaattgtcacc

SEQ ID NO: 356789 - DNA, 122 bp, Homo sapiens
ccccagcctgctactgctaaacaggttagcggtgtcaggagggtcttccctcttgctgctcggtgcctagaacattcttgcccagatatttgcatagcagcacagctggctccctcatcttt

SEQ ID NO: 356790 - DNA, 122 bp, Homo sapiens
ggtgtggcagcctgggcctcccggcctcgccagactatgggagacggctgctgggacggacgggagtcaagctcttcagtgccaggactggacactgtgtctgccactctggggcactcagc

SEQ ID NO: 356791 - DNA, 122 bp, Homo sapiens
tagggctgcaccggatgctgacgggacagaaaccagggcccagacacagggctcaggccccgaggccctggcttcagaacagcaagcaccagggcagccaggggctcatggccacccaggtc

SEQ ID NO: 356792 - DNA, 122 bp, Homo sapiens
ccaggttgctgtgaatgtcagtccgaggcccattaggagcacagtgaacagcagcccaggcgagcccagggaggcaagaaaatgaggctccccgtgaggtctaataaacacctctcgccaca

SEQ ID NO: 356793 - DNA, 122 bp, Homo sapiens
cccaggaggtgtttggatgtgatggggcagtgcccctgctctctggtgcctgtcacctcccgtgctctctcctgtgttttcctgacacctgggtcccgagggcactgggacaagggtcccgg

SEQ ID NO: 356794 - DNA, 122 bp, Homo sapiens
ctgtccatacagcacagtacttggtgggctccgaagaccccaccagccctgtcggaccatcgccttcccagactgaactaaggaagagaaaaaagcagggagcctctttgtaaagtgtggct

SEQ ID NO: 356795 - DNA, 122 bp, Homo sapiens
aagaaaaccattacctatcgtggaggggtctcagtccttagtgccatgctacagaggattcgagtaaatattatccacttctttcttcctaaatggcctctggagtggctcctatttctcgg

SEQ ID NO: 356796 - DNA, 122 bp, Homo sapiens
cccatcctgccttttcttaatgggctggctctgcctgttaattattaaacagatgttcagcgagaacagagaacagagaggcctgtgaatggcctgttgggaggatgggagcgacagtgggc

SEQ ID NO: 356797 - DNA, 122 bp, Homo sapiens
actcaaaacagttgcaagcttctcttcttaaataatgcagtcattgctgaacttcagagacggagttggaggtttgagtctctaccaggtgtttttaatatttaggaaatccttatcagtag

SEQ ID NO: 356798 - DNA, 122 bp, Homo sapiens
ccttgcctgctctctttccctcatctagcggaggtgacagacatagaggagactctgatacggagtggaaagtgcaacgtcagctgttgtcagaatctgtcagcgcagagcggaagggcacc

SEQ ID NO: 356799 - DNA, 122 bp, Homo sapiens
atcagtcatagaaggcggcttgccaagcctgacaccgaagaaaaacgcagcccttgggtccggctgtgcctcgcaattctggcatccagtcttttctctgacccaaccacaaaccccttcac

SEQ ID NO: 356800 - DNA, 122 bp, Homo sapiens
ctgaaaccaagattaatcaaatctttctaacaagagtacttcggggttaagtcagaaacacgcacagagttttcagggcaacatttctggacattgcttttccagaaggtgttctaaacacc

SEQ ID NO: 356801 - DNA, 122 bp, Homo sapiens
atcacaacactggcctctccgtcctacctgagctccagcgcacaggcctgctgggcaggtcgggaagagagaatccgtaaaagtgcctgagaatgccgcctgtggacagacctcggaacagg

SEQ ID NO: 356802 - DNA, 122 bp, Homo sapiens
ggaggactccaaagtgcggggaacagttggaaacagtcggagtgcaaactgcagcctttccggccagctcctgatttggggtttcattcccagagccccttgaatccacctccaattcagtt

SEQ ID NO: 356803 - DNA, 122 bp, Homo sapiens
ttccggcttgactgtaaagagccctggcctgcgaacgctgttaaaaacagatgcagatcgcgggtggagacggccggccgagccttcccttttctgacatcctacagcagcaccttgatgaa

SEQ ID NO: 356804 - DNA, 122 bp, Homo sapiens
ctggtagggcgaaggcgtgggatggccaattgcttggtcacacacaaaaccttccggcaacgtgccttttccaggggaccagctgtgctggagtcagtgatgctgagagattattgcgtgtt

SEQ ID NO: 356805 - DNA, 122 bp, Homo sapiens
cccctcctgcggcccgccgacccgctgtcgccgtcccccggctccgccgccgaccagtcccggactctatatacccgtccggcggaagcttccagagcccgccagccccctccagaaccttc

SEQ ID NO: 356806 - DNA, 122 bp, Homo sapiens
cacttcatttccaactaccaagtacaatgttcacctttattctgtttgttttcgctttgtcgtgctactgaaatatgtgtgcatgtgtatttaaccaaagagaaactcactcctaaccccat

SEQ ID NO: 356807 - DNA, 122 bp, Homo sapiens
cagtgcagtcatcgtggagaacccggacgggactctcaagtgagtgcttgacagtaacggcgtcctggcaggcagcagagggagggggcacagcacccgtgaggcacacgacctcagacggg

SEQ ID NO: 356808 - DNA, 122 bp, Homo sapiens
actcagaggtttaaggaaaaagaatgcatcaggattttccacaaccaggtgcaggtcacacgaaggagcaagtatggggttacataagttcctttccatgaaaaccacaggaggaggtgtga

SEQ ID NO: 356809 - DNA, 122 bp, Homo sapiens
gaggacaaggcaagagaacgatggcctcatgtaactcgatgcagagggaggtacaaatcacgttagctttggcgtgcaggcctgaaagctgggacctaaccaccatcttaaacatggtttcc

SEQ ID NO: 356810 - DNA, 122 bp, Homo sapiens
gacaagttccctctaataaagccccttagccgagatgccaggattggggttagggaacctcgccgctcccacaagggctgggcacaaaaaacaaacaaaaaaacacaagttattttgatctt

SEQ ID NO: 356811 - DNA, 122 bp, Homo sapiens
gccgcgggagatccacgctgcggccggctccgccccgcccaaccctcaccctcacgctcacgctcacgctcacgctcacgctcacgctcacaggctcccggctccacattcctcgcagggct

SEQ ID NO: 356812 - DNA, 122 bp, Homo sapiens
aggcacacacccaggacaatgttgggcaataaagattattccatcatttgggagcaggagcgccttttgttctgcatttctcagggaatcaacacattccaagcaggaaagggatgagaaca

SEQ ID NO: 356813 - DNA, 122 bp, Homo sapiens
ggtgggaggatcacttgagtccaggagttcaagaccagtctgggcaacatagtgagaccccgtctctacaaaaaataccaaaacaagtagtggggcttagtggctcacgcctgtggtcctag

SEQ ID NO: 356814 - DNA, 122 bp, Homo sapiens
tgcacccctcaacggccacccgtccccgccgtgagtggggtgcacccctcgacggccatccgtccactcgctcattcagttgttggggggctacaggggctgcacagctctaggcgttggga

SEQ ID NO: 356815 - DNA, 122 bp, Homo sapiens
gtgtatgagttccacacaacccaacaagcaccacatttgatctgaattcaggagacttgacggttcatggcatatattgagagttcaactgacatttttacacacacaaagcagaggtggta

SEQ ID NO: 356816 - DNA, 122 bp, Homo sapiens
ccgccatccttttcatctgccccctgccaaacgtctgttaaatctgtatcccctgggagacggactcttcgtagtaacacctctctcaggagcaccactcagacattcaagaagcccttacg

SEQ ID NO: 356817 - DNA, 122 bp, Homo sapiens
gctgtccccatccccactcaccttctcgcccctgccctcctgcctgcttacctgccgtcccgatcccagtcgtacacctccaccttgatggtcctgcaaaacaaaggcctttgctgggatgg

SEQ ID NO: 356818 - DNA, 122 bp, Homo sapiens
agctgcagggccaggtccagcgcaccgaagtggcccgcgggcggctggaaaagcgcaattcggacctcttgctgttggtggacacgcacaagaaacagatcgaccagaaggaggccgactac

SEQ ID NO: 356819 - DNA, 122 bp, Homo sapiens
gacgtctgcgacttatttttaaacggttagaatggagagagggaaagccgccgtgggacacgctcaagtctggggaaccccatgagcaggaagtggacaatggacgccccttgtgctgcctt

SEQ ID NO: 356820 - DNA, 122 bp, Homo sapiens
gcaaacacatccccttaaaattcctctttgtggaatcctcacaagcatcccagatcgttccggtgcagggaggccgcagactacctggacagcaggtgcagcagggacctggggccagagca

SEQ ID NO: 356821 - DNA, 122 bp, Homo sapiens
taatagtttagaacatcaaaaactgggttgcaccatttgcgattaagcagggcccctattcggtgaccgctgcgccgccagcctggcgcgggcctcctgcaagacaatggccacgacctgac

SEQ ID NO: 356822 - DNA, 122 bp, Homo sapiens
tacttgggaggctgaggcacaagaatcactctaacccaggaggtggaggttgcagccagacgagatcacatcacagcactcgagcttgggcaacagagcaagagcgagactcggtctcaaaa

SEQ ID NO: 356823 - DNA, 122 bp, Homo sapiens
cgggggccacatcagggctgcttgggggtctctggggagagggtcccatgcctgagcccccgcccgccctgcctcccagggtctggcgtgcgtcagtacaaggctgcggctggcggagcgca

SEQ ID NO: 356824 - DNA, 122 bp, Homo sapiens
tgggttgcgtgggggtcagcgctaaggcgtcgccggaagcgcatgtcgagggtgggggcccgggccgggacgggctgtgggcggagccatgggggagagcccaggcgcttgcgcgagctccg

SEQ ID NO: 356825 - DNA, 122 bp, Homo sapiens
gcggtccccggcccgggaaacttggaccgagaccaggttgtggtgcgggctggacggcggcgcctcggcgcggctgcggcgcggggcggccaagggggggtctggatggtgtcagcccgtga

SEQ ID NO: 356826 - DNA, 122 bp, Homo sapiens
ccgcaaagaaaacacacgagccttaacactccagagagttccgaaacacaaagtaaatttcgagctaagggttacagtcctttaaatctggaaatttcaaggtagagtgtttttgtttttgt

SEQ ID NO: 356827 - DNA, 122 bp, Homo sapiens
cctactctgtgcggtggagcgaccctggataacagctccagggacactccttgctcaagacgctggggttagacgtgctccggctacacagcggagtgtcagggggccaagaatatccctct

SEQ ID NO: 356828 - DNA, 122 bp, Homo sapiens
gagccaccagcagccacctgacaagacccggctgcagcaatttttagagtgaccctttgccgtcccactggataaggcaggccgagcctgcgctttggcccgggagcagagcagcgagcgcc

SEQ ID NO: 356829 - DNA, 122 bp, Homo sapiens
ggagcgtcacgcggggctccgggctcctcggcttcttcgcggttcccccgactgcccctccgacccgcgtcgcacacacagcccaaatgtccttcgcagcgagcctggcccggggagcgcgt

SEQ ID NO: 356830 - DNA, 122 bp, Homo sapiens
tcctgtctgaattgtcagagcatgacagcagctgttatgtctagctgctgacagggaagtcggagcagaggtcactgcactggagtcagcctgcatccccagagattgttagaatgcatgtg

SEQ ID NO: 356831 - DNA, 122 bp, Homo sapiens
agtccatacatgttcatcttatattttctctcaggctccaggttgtagactgtgacctctcgctggtctgccgccaccggcaccacctggggctgcccgtccttgtccttgtactggactat

SEQ ID NO: 356832 - DNA, 122 bp, Homo sapiens
cgcccaggatccggctggacagcaggacggagagcggcgaggcgagcggtgcccggggttcgggaccgagagggcaagcgagcgggggcaaccccgacccggccccccgagtccggccccgc

SEQ ID NO: 356833 - DNA, 122 bp, Homo sapiens
agacccacagctaagacaccgggaccccctgaaagcctagaaatggtgagagtgccgggtcggacatcccgagagaggggaagggctggttgtaaccggtgggaagtggctgtggcgggact

SEQ ID NO: 356834 - DNA, 122 bp, Homo sapiens
tgctcacctctcgtccagggacatgacgggcacgccaggcgccgttgccacccgggatggcgaggcccccgagcgctccccgccctgcagtccgagctacgacctcacgggcaaggtgggtg

SEQ ID NO: 356835 - DNA, 122 bp, Homo sapiens
cccgaacagacatgataaacaagtcagaactatctctaaacaaaacgattactcgctttccgcagccttttatataacggtagagtagacctttttgaaaactgaaagaccaggaaaggcgg

SEQ ID NO: 356836 - DNA, 122 bp, Homo sapiens
caaaatactgctttgtcccagaccacctcctttacccacttgtcctaaaaatataagtctcgtctttactattttccactgagtatatcctaaccaaatccttgtggctccccatctgcaag

SEQ ID NO: 356837 - DNA, 122 bp, Homo sapiens
tctttggctgttcaaatgcagccagactttgctgctgcgtggatgagtctaggcatagcgcggagcagcctgaaacgctttgaaaccgccaagcaaagttacccgacggcgagtaaacagaa

SEQ ID NO: 356838 - DNA, 122 bp, Homo sapiens
gaaactaatgtgctagcacaggcaagatgctggtggtatggaccttgatgacacttagttcggagaagacaagttgttaatttttgaaaaaatattaccaatcaaataaaaccaaaaccaat

SEQ ID NO: 356839 - DNA, 122 bp, Homo sapiens
gacataaaagtaaaaataagatggaattccctcaggtctcgtccttcgggaaggatggctcggaacagcccgaaagagaaaagggagttggtttcttcccggaccagttttcccctgtcccg

SEQ ID NO: 356840 - DNA, 122 bp, Homo sapiens
gaacctagatccccactccccgcacccctcattcccaccgcgtccaggtggctttcccagcggggtaccatgtactctgcccgctccagaggaaccgaaggggtttcattccattctccttt

SEQ ID NO: 356841 - DNA, 122 bp, Homo sapiens
ggctctgcactctggtctaagttcatcattcagggttctgcaggacagacactcctggagcgggtagaggtctggcgtgatacgtgtttctacttgaacacatcttcttgtgttagtgggaa

SEQ ID NO: 356842 - DNA, 122 bp, Homo sapiens
tcaaataactagtaaggcagtactggcgagcaccctacatcctgacagctttataaagggcgcttccagccaggtgcggtggcacatgcctgtaatcccaggactttgggaggctgaggcgg

SEQ ID NO: 356843 - DNA, 122 bp, Homo sapiens
gcacccgcacccgcaccacccgcacgcgcacccgcacaacccgcagcccatgcaccgctacgacatgggcgcgctgcagtacagccccatctccaactcgcagggctacatgagcgcgtcgc

SEQ ID NO: 356844 - DNA, 122 bp, Homo sapiens
gtggggtgggcctgggtgggagggggctggggagggagcgagcgagcgagggagcgcgggcggaatccagccccaagccgcccgcgccgccgcgccctcactgccgccctccctccctccct

SEQ ID NO: 356845 - DNA, 122 bp, Homo sapiens
gacgcgctcggatgcgtggctccggaagggcactgagctagaacatgctggggcaccgcgcgggcacccaggtgccgctggcgccgctgacgaggggtgctagcaggctgtgctcgaggagc

SEQ ID NO: 356846 - DNA, 122 bp, Homo sapiens
ttgagttgacccagagagaagttaccctactgattcaccctgcagtgcaagtgcctacctcgtctgcatggctttctgagatctcaactgtgtggtcttctctctgctgttggggaaggctc

SEQ ID NO: 356847 - DNA, 122 bp, Homo sapiens
aagctgaggtaaaatgagcttctgaatccgtcagtgaaaccgtagacgcttcaacaaactcgagagaatcagaagggaagcttgaccatggtgacacctcagaacggctaggtagcaacatg

SEQ ID NO: 356848 - DNA, 122 bp, Homo sapiens
ccacctggcaacagtaacggatccaatcagggtccttccctgggattaatatgcagatttcgggtgcaaccagctctctctgtctgctggggcagtcttgttccctgctacatggagacagc

SEQ ID NO: 356849 - DNA, 122 bp, Homo sapiens
cccttccccaggaagcccaggggcctggggtgcctcctagtggggttcgctgcctggccgcggctctgagttctcctccccgggtgtgcacaggggccccagagccagggaatcttcgaggg

SEQ ID NO: 356850 - DNA, 122 bp, Homo sapiens
gaggccacgtgactattcatcgcctgcaacaaaatcttaactagaaccgggagcccggcgcgtagctcacgtccgaagcccaacaacttgggaggccgcggcgggaagatcgctggaggcca

SEQ ID NO: 356851 - DNA, 122 bp, Homo sapiens
ctcaagtgatccacccacctcagcctcccaaagtgctgggattacaggtgtgagccactgcgcctagccagtgctgggctttctgaaaggtaaccacacaaaaaaagagtccctaactatag

SEQ ID NO: 356852 - DNA, 122 bp, Homo sapiens
cctggctgtgcaggcaggtgtggccacggtgcccgtagacacagacagacacatggtgtgcgggcacacggaggctgggtcctccccatcacgaggttgtcccatcagcacaccgacagaaa

SEQ ID NO: 356853 - DNA, 122 bp, Homo sapiens
agggcccctccacacacgtgctcattttccatccggaggctcacctcccagggccaatggcgggtcatttccaaatcctccgaccaccagggctcaccacaaacttcaggaagaagtgtgcc

SEQ ID NO: 356854 - DNA, 122 bp, Homo sapiens
gctctgatggggtggggggcaccaaccacagagctggactgatgtggatgcctgtctcctcgctatgtcatcaaatatttattgagtgggccttctggctggcatggggcgacacaaatgcc

SEQ ID NO: 356855 - DNA, 122 bp, Homo sapiens
ctggcgctcggcttgacagagaaatgcacatcactgatgcggagggcctcggcctgggcccgcgcctgcgggcagagggaggggtgggtgggacctcaggactgcccgctgacctcccctgg

SEQ ID NO: 356856 - DNA, 122 bp, Homo sapiens
cggcccacacgtccgcatcgtcgtgggagaagcgccgcgtgggcgggacctgtcaggacgcggctggcttttaccccgagctgccctcctgggaaacggggacaaacccttctccaccctgg

SEQ ID NO: 356857 - DNA, 122 bp, Homo sapiens
aagcgcttcaaggacccgggactagtggaccagctggtgaaggcagacagcgagtggcgacgatgtaagtaccgggacgggcgggttacctccttgatgctaaacccaattttctctctcaa

SEQ ID NO: 356858 - DNA, 122 bp, Homo sapiens
tgcttccaactcgcaccggcgctcgcccgcccgctgcaccccgggcccggctcctgctcccgctcgctgctgggaagaggcaagcgcttcctagagccgctgttttcaaagcccggagtttc

SEQ ID NO: 356859 - DNA, 122 bp, Homo sapiens
catgtcacttctctgctgaaaaccctgcaatgcttccccatctcactcagtgtaaagccacggtctttacagtggcctggaagacttgtataatcaacccctccttcactgcttgcaccgac

SEQ ID NO: 356860 - DNA, 122 bp, Homo sapiens
acagcctttggagtcccacactcacctccccggtacgttttccacttgtagaatttcccacggaaagggatgctgtcaaattcagaacactgcacttctctgaagtcctgggagccaggggg

SEQ ID NO: 356861 - DNA, 122 bp, Homo sapiens
gagaaaggcagaggagacgctggctggtggggcccgcaggcggacagccacgcaggcaggcggaaggctcggctcggcctgggaccgctgcagacccggcctccgcgcggggccgaggcgcc

SEQ ID NO: 356862 - DNA, 122 bp, Homo sapiens
ccctacctccgcttctccccgtggctcctttctgggcttctatccagcggagaggggaggcgatgcctacgtcaacgcgggctcattctgagaaaaactttctttagcttgtacgcggggta

SEQ ID NO: 356863 - DNA, 122 bp, Homo sapiens
acacacaaacacacacgaaagtgtagccagttctcattagcaagacttccctgatgcccacggctcacaggcacagatttacaggaaaagaccaaccatgcagccttcacgcttcccgggcc

SEQ ID NO: 356864 - DNA, 122 bp, Homo sapiens
cggagccggcaggcatcaagaatggcgagtgcacggtgtgcttcgatggcgaggtggacacggtcatctacacgtgtggacacatgtgcctgtgccacagctgcggcctgcggctcaagcga

SEQ ID NO: 356865 - DNA, 122 bp, Homo sapiens
catgttgtaggtggccctggtccccatgatccatggaacagaggcggccccagctgtctccgcaggattatgcaccgcgcgtcatgagccgagggggacaggacccgtggagcaccactctc

SEQ ID NO: 356866 - DNA, 122 bp, Homo sapiens
cgagccgacgcagcatcagctcgtcaacgggaaggaagatgcctccctgcacgcccgccgcgcacagagcataaagaatctgcgctgaggaggcaggagaagaaagccggtgagtcgggggc

SEQ ID NO: 356867 - DNA, 122 bp, Homo sapiens
tgtgttggccgggctggtctccagctcctaaccgtgagttatctgccagcctcggcctcccgaggtaccgggaatgcagacggagtctcattcactcagtgctcaatgttgcccaggctgga

SEQ ID NO: 356868 - DNA, 122 bp, Homo sapiens
gcaaggatcgtaccgtgcgcctctggccgctgtacaactacggcgacgggaccagcgagacggccccacgcctcgtctacacccagcaccgcaagagcgtcttcttcgtgggccagcttgag

SEQ ID NO: 356869 - DNA, 122 bp, Homo sapiens
gggactaggaagctttcctgtttctagagcacggcttggtggggtgggcggctcctaacccggggtccagcccctcctcccccaccccggcgcgcggtccaggtatgtgcgacccctcccag

SEQ ID NO: 356870 - DNA, 122 bp, Homo sapiens
cctaattgcataattgctgcacatggtgtgtctcctggcgagtgccgggtttggctccttcgccgccgcaccccggtggcccgcccggagaagaccttgtggggtatatttgtgtgtgtcct

SEQ ID NO: 356871 - DNA, 122 bp, Homo sapiens
ggcacggggaatcgagaaatggctcggtggcccacggctgccatcagcattgtcgtatggcgaggattttatggtttcaccacgatgggtgtacattcttcagacaagggcggacacccggg

SEQ ID NO: 356872 - DNA, 122 bp, Homo sapiens
tgtgtgtgtgtgtgtgtatgcacacagcgcgcacatacagcagcacgtttgcctaaaagccgtgtgagtgtgtgtgtgtgtagcgcacgcacacacgcccgtgctgcggcccgggcgggggg

SEQ ID NO: 356873 - DNA, 122 bp, Homo sapiens
gacgtcggtcctcccaggtttgagggcggtcaggcggggtcaaggccaggcagcggggcgcgtctgcgttgcgcccgactctccgcggttacctgtgcctagaggtgatttgaagggcaggg

SEQ ID NO: 356874 - DNA, 122 bp, Homo sapiens
acgtctgatcctcaagctagaaactcccttgcctctggtgatgggctcagagcagaacgccgggaaggagatgagcgaatgggaatgaatgcaccgacctgggctggcccatagcctcagtg

SEQ ID NO: 356875 - DNA, 122 bp, Homo sapiens
aaaggatattacagaactctagcacaaattgtagtcaaagatggagacgcgtcaatgacccgtttgtttttaatgtgttttaatgtttttgtttttaatgtatccatggtttccagttcccc

SEQ ID NO: 356876 - DNA, 122 bp, Homo sapiens
tgcgcaagcgcagttgtcctcctgcgccgacctcgaatgcggtcctcctgctgcagaccacgcccaccaagggctggccgcagccactgtagctgagctcagagccttctgtgtggtttgcg

SEQ ID NO: 356877 - DNA, 122 bp, Homo sapiens
ataaaaataaaactcagatcttaaaaattccattgtcagcataggtcctaatctgtggtccggaaaacatctgggcatcaggcccacaagggggttaatgggctgtggacactggggtgcaa

SEQ ID NO: 356878 - DNA, 122 bp, Homo sapiens
agagaggacccggagcagggcaaacacagatggagaagctgagggcaaggaagggaatgacgtgggaccccacccgttgtcgggggcaggctctgctctccaggaacaggtaacacagtcac

SEQ ID NO: 356879 - DNA, 122 bp, Homo sapiens
cgtgcggccctgtgtgtggaaactgagtcccgtgcggctccgtgcgttggggctgagtcccgtgcggccctgtgcgtgggggctgagtcccgtgcggctctgtgcgtggaaactgagtcccg

SEQ ID NO: 356880 - DNA, 122 bp, Homo sapiens
aaaccgtcatggtgctgggagcctggggcaggaggtcacaagagttgcccccagggctgtcgtttagttctccagacaacctcccttccactctggtctcacacaccccagccttcaccctg

SEQ ID NO: 356881 - DNA, 122 bp, Homo sapiens
agatcctgagggccagctgaccttgggggcttgagccctgcccccttaggtcttcaggggcggggcggctgcagctggagcacagacctggactctgccctgagctgtggggcaagggggag

SEQ ID NO: 356882 - DNA, 122 bp, Homo sapiens
ccacataacaggacttggctgacaagcacctgggccagcaactgaaccgggagcagcatgcgtgtgcacaggacacaggtaggagcagctgcggtgagcagacagacgagcacaaggctgtc

SEQ ID NO: 356883 - DNA, 122 bp, Homo sapiens
acggcactgaattcctaaaatataaatgtaatgatttagcttccctgttaaaagatctcccggccgagtgcagtggatcacgcctgtaatcccagcactttgggaggctgaggcaagcagat

SEQ ID NO: 356884 - DNA, 122 bp, Homo sapiens
gtgcatcagcctctctggcgggggattctccccggactccggccagcgccaatcaggtcgcgcggtacctgcccccagccctggccacctggaggggcgatgaggctccacgcccggagcag

SEQ ID NO: 356885 - DNA, 122 bp, Homo sapiens
gaatggggaggcggggggctgactgggagtgtgggacggggtgttctgggatcacggagacgtccaagtctggactctgtcctgggtctgtgcttctggcgacctcccttttcttcagtggg

SEQ ID NO: 356886 - DNA, 122 bp, Homo sapiens
caccacctttctgtttcccaggtcattgctgtcgttggacagcagaacgtcgagggcaagcggattccatttggcttcaagcaccggactctgcctcacttcatcaaggatgactacgggcc

SEQ ID NO: 356887 - DNA, 122 bp, Homo sapiens
agtctgggaactttgaaagccaggggatgggggtggttgttgccaaggctcggatttcggcgccagagttctcagccaggaaagcagttgaaaatcaacacccatctgcctcttctttctca

SEQ ID NO: 356888 - DNA, 122 bp, Homo sapiens
tttatttgcatgttataaataccaagtgttgtgtttgacccctactgtccacacaatcaacgtggctatttatatggcctttctcagtgctggtccacgtgccttttcaggggcagggagaa

SEQ ID NO: 356889 - DNA, 122 bp, Homo sapiens
atggacatcctgatcatcttctatgttgttattggaatttgtatttggcccgagggtctccggggtcttgatttgtgctttcctatgcctgtgcttgggtttggaggttgccttaggagaag

SEQ ID NO: 356890 - DNA, 122 bp, Homo sapiens
ctcccaacttgcagggctggcactgagctcactttggtaggctgcatgctccaagcctcacgaagctgtcccaccagaccaaggacatttgtcttcctccagtgctgattagctgattagct

SEQ ID NO: 356891 - DNA, 122 bp, Homo sapiens
aagggtaaaaaaccttatgtgtttggttagttacctaaaccttcctggccagtaagctttcgaatctttccagctggggaggtatgttctgatgagcattaggacaacttcaaaccccagga

SEQ ID NO: 356892 - DNA, 122 bp, Homo sapiens
gtttcttccttctggtgggattcgtggtctcgctggctcaggagagaagctgcagaccttcgccgtgttacagctcataaaggcagtgtgaacccaaaaagcgagcagcagcaggatttatt

SEQ ID NO: 356893 - DNA, 122 bp, Homo sapiens
ctattggacagagctgacacaggctaatcaggaccttctggaggaggggacaaaagactgcgaagaaagggttctgggaaaatccctgggaagcactgtgctctattcttagaaaaagaaaa

SEQ ID NO: 356894 - DNA, 122 bp, Homo sapiens
gggggaggaggaggaagaggaggaggaggaggagggaagaagaaggaagaaggaagaaaccgcctcaggcctcagagggaggcatcctggagcccaccttgccggggaagcttgagcaattc

SEQ ID NO: 356895 - DNA, 122 bp, Homo sapiens
gccgggcctttccccccgcggattttggttcttcgctgtttccctttggggtgcccttcgcggtttctgcgtttcccccgcgttgccagcagccactcgcgccgcgcccctagcccagaacc

SEQ ID NO: 356896 - DNA, 122 bp, Homo sapiens
ccaccactcaagtctttccacccaacaagactccggtgactgacccaggaagtgcaggcgcgttcatgtcactcccagccccgcccaggctgtacctcattctgcaggttccagaccccgtc

SEQ ID NO: 356897 - DNA, 122 bp, Homo sapiens
cagtgaccgctcccagatgtgggctgtgtccctcaggaaagagctctgctcagctgtccccgagagcacttccgctggccccagacctgctccgggagggggtggaggtgagagcaacggga

SEQ ID NO: 356898 - DNA, 122 bp, Homo sapiens
tggtaagtcaccacctgcttagggtcatgcccatctgatcagcagccagccagtcagggacggtgacacacatcccaaagtggcacacaatatttttctgtctgtttcgtgagatgaacaga

SEQ ID NO: 356899 - DNA, 122 bp, Homo sapiens
gttaggggagagattaagggggcctcagcatctccatgtcccaggcactgttctaagcctcgaggattcaatgatgaataaagctccaggctgaacactcactctttcctgtagcaaatcag

SEQ ID NO: 356900 - DNA, 122 bp, Homo sapiens
tgacactctagagtggaccattctttgttgagggggctggccctgtaggatggttggcagcgtccttggcctctacccactagattcccagagcacccctctccccacaaagctgtcacaac

SEQ ID NO: 356901 - DNA, 122 bp, Homo sapiens
gctcagccattgcttttttttccacgaccctccgctgtttcttccgcgagcttcctcccccgatttccatctcaggcagcggcagcggcagcgacagcctgcctaccccaggactccagcct

SEQ ID NO: 356902 - DNA, 122 bp, Homo sapiens
gtcaccgaaatggtgagcagaggaacggactccaactctgccctttcatttcaaggctctcggcctaaatgttagaaccatatcaaatcagtaacaggcatccgtcagccagttagaaacgc

SEQ ID NO: 356903 - DNA, 122 bp, Homo sapiens
ctgcttagaagttaccaactggctgttggttaggcctagcaaattatgtagacttcttttcggctaagaatcatagcaagtttattccctcagggtaggaaggtcatattttttctttaggc

SEQ ID NO: 356904 - DNA, 122 bp, Homo sapiens
ggccccagggcaagacctcaaaactcaagggtcctgagaatcgggccctcccacccctgacgcttgccccccccaagaaccccattccaagagtttctcatctcaaccctgggagggagccc

SEQ ID NO: 356905 - DNA, 122 bp, Homo sapiens
taacaacccggtgatagatgagtcaggggcagctcaggagctggggacatttctgagtgtcgtaggtaagagggaattgggggttcgccaacacagcgccctgcatgtgtgtgttcacctgc

SEQ ID NO: 356906 - DNA, 122 bp, Homo sapiens
ctgaccatccgtagcacagacggggcgcaagcgtattggaaagggagcgggtgccagacgcgagaactacgcatgcgtctcagcgctttcccgccagcacacccttagtgggtggggggggg

SEQ ID NO: 356907 - DNA, 122 bp, Homo sapiens
cgagcagggcgaggtactcagccacgagggcggccgcgtgcaccatgcactgggcggcctcggcgtggttgcccagctccgcgtgcttcccggccatgttctgcaaccaggtcagccgaagg

SEQ ID NO: 356908 - DNA, 122 bp, Homo sapiens
ttacccgcggcacacccatttcctgacccctgaacgcctctgccagcggctggggaagcccggccagtctcacctcccacgtggaaccccacgcctgcaggggccagattccggatgctgac

SEQ ID NO: 356909 - DNA, 122 bp, Homo sapiens
agaggggacacttcggccaaagccagatttctaacaaagtagcttgaagcgccttttgaacgcagaagagggctgttagctacgctgacggaacaggggtagcagtcacagactaggtaatg

SEQ ID NO: 356910 - DNA, 122 bp, Homo sapiens
aatttaccatatttcaagtctctctctctctctatttttcccaggctggctttgaactcccgggctcaagccaccctcctgtcccagcctcctgagtagttggaattgcaggcgtgaaccac

SEQ ID NO: 356911 - DNA, 122 bp, Homo sapiens
gccaccgtgcccagccgtgtgcctttaaacaagtgtttcatccagacatgtacattttaacgtgatttttggcgaagtattaacagagatactgcctactcttggtggtgtcacagtcatca

SEQ ID NO: 356912 - DNA, 122 bp, Homo sapiens
ccagcctggtgccccttacattctgtgtgcctgtgttgtgaatgaggaagaggcacagcacgctatagttggtatcagaaaacctgggttcaagttccagctctgcccccaaggggctggtg

SEQ ID NO: 356913 - DNA, 122 bp, Homo sapiens
gtatgattgcagcactgtactccagcctggacaacaaaattaaaaaaaatatgaaaaatacggccgtacactttaatgagcattcgtgtgaagagaccaccaaacagcctttgtttgagcaa

SEQ ID NO: 356914 - DNA, 122 bp, Homo sapiens
ggctatgttccacagctgctagcagcacagggcttcatgcttggcaagcatgagaaccagcgtccagtgtcagttgccttgcccccaagccccacagagtgatgccatggcttggatagata

SEQ ID NO: 356915 - DNA, 122 bp, Homo sapiens
tgatgtccgtgaggactgggcacagctgccagagtcaagggcacggaagtgcaagcagtccgtccttttctgaagcctgctctttttgtttttccccacgtgtgtcaccttttaacgttttt

SEQ ID NO: 356916 - DNA, 122 bp, Homo sapiens
cttcggctctggggagttagctcagccggcctgcccgggcctccgtctcgctcttacaagcgccgaaccctgtcgcccggggtcccgcccgaccactgcctccacccctccagccctgccgc

SEQ ID NO: 356917 - DNA, 122 bp, Homo sapiens
cagctaccatttagggacataaatggaggaatatatggagttccatttatttattaacagcgctgagaaaatgccagcatagggatgcaccgtggtagcattctccagatgttgagaagtct

SEQ ID NO: 356918 - DNA, 122 bp, Homo sapiens
gggtgaggctgggccggagctgcgcacccaagacgcagcctcagcaacactcggcgcaggcgacccagcccccaaccccaacccccagcaggggcccagggctttccaccaaaacgcgcagc

SEQ ID NO: 356919 - DNA, 122 bp, Homo sapiens
gcctcccaggcaaccggtgggtgccagtgacttccaggacagagaagagcaaggctggcccggagaaggagcgaacccctcccaatcgccgccttcaggggcttgggcactgcacttgggga

SEQ ID NO: 356920 - DNA, 122 bp, Homo sapiens
tgttgcctatccatttctaaacgactggctttttaggatcccgttttcacccttctatggcggtgggttgggggtggggtgtggaactggagtggcccagggagacgatggcaggggcgggg

SEQ ID NO: 356921 - DNA, 122 bp, Homo sapiens
tgggggttcctgaactcccagccttgagacctaccatcagcccgaccccagggtcctgtgcgtcttcctacggacccgaaagaagaaagctttgagagtgtaccttttcgctatttttcctc

SEQ ID NO: 356922 - DNA, 122 bp, Homo sapiens
ggcatgtctggagggcgcgaacgacggggacagtgcccgggcgacagtcggggctgtcggcgttaggtctttccccacagccccaggatctcgggtctggtcctgtcaggccctccctctcc

SEQ ID NO: 356923 - DNA, 122 bp, Homo sapiens
agcttaatgccttagaaagaaataccctgcctcaaaaagacacctgcctctaaactggctcgagccccatcgccttctgccagccattcctctgtagctcgaaccccagcctgtctcagcca

SEQ ID NO: 356924 - DNA, 122 bp, Homo sapiens
gggcaggaggtggagctcaggcagtaatgttcactccccagctgctcacctcttgctgtgcggcctgttcctaacaggtcatggaccggaaccagtctgcggcccaggggtcggggacgcct

SEQ ID NO: 356925 - DNA, 122 bp, Homo sapiens
tgccacaatgcccttgcacccggaggcagggccaggcctggggcagccacagaagtaaagcgtcggcctctcccggctctgtgcttttccccacgatggcgctcatggaagaccctcgctct

SEQ ID NO: 356926 - DNA, 122 bp, Homo sapiens
ttgaatcctggtagccttacttcattgtcccttactaactgtcctcaatcacgtttttaccgggagttctgtttgacttagggcaaattttaaaggtgtgaaggaagttaaaggttaaccaa

SEQ ID NO: 356927 - DNA, 122 bp, Homo sapiens
taataacctgtccaggagatggctcgtggcaaattgctttgttagtcttgtcagcgcggccggggccgccgtcagcgcgcgccatggatcaagatgatgaatcgctgcggacggcgcagatg

SEQ ID NO: 356928 - DNA, 122 bp, Homo sapiens
ggctcaggtgcatccgcccaatctgggatcattagtcagatctggtgacaatggtgaaggcgggaagcctccccaaggacaaatactatggttattttaagcctctctgtgtcatcactgtg

SEQ ID NO: 356929 - DNA, 122 bp, Homo sapiens
taaaggacacagcatttggggtcagcacagcatttgcagtggctgctccagcttcgggtccgcaggtcaccgcgggggcccggtgcctactggcccggccgccctgcgggttagctcatggg

SEQ ID NO: 356930 - DNA, 122 bp, Homo sapiens
tcagagaatcagagaacctgggggctccctccagggctgggtgagcatccccagtggggccgtggagagctggcagcgaggctgggtgtgctcctcaccaggtccggtccgtgcagcgcact

SEQ ID NO: 356931 - DNA, 122 bp, Homo sapiens
tccacaatttttatcgagcccctccatctgccttggccggagaacacgatgggcaaagcccggatcttggaactacttctagagaggaagacagacattacacacgcaaaacagagaaagcc

SEQ ID NO: 356932 - DNA, 122 bp, Homo sapiens
gtggggcgggggtggcggggcgggggtgcgggggagccggctggggcggcggccaacagacgccgctgcaagtattcatggatgtggcgcgccaccgacgtgtaagtctggttggcccgcag

SEQ ID NO: 356933 - DNA, 122 bp, Homo sapiens
acatggggagaatgatcatcccgccggacaaaaccttcactaaaatatcctcaaatgggccgggtgtggcagctcacacctgtaatcccagcactttgggaggccagtgtgggcggatcagc

SEQ ID NO: 356934 - DNA, 122 bp, Homo sapiens
aagccagcttctaaaaatcccaaacatatcccttggcctcatctacaaatataacctgtacgacatggtataagtgactaataatacatgctgcttttctctgttggaataactcctcccct

SEQ ID NO: 356935 - DNA, 122 bp, Homo sapiens
gccgccaccgctcactccttcaggatgatgggcggggcctcctgggccggtgtggactgacgagtggctggccgccctgtccatcacgacatcccgcccccgcgctacgtcacatgacgcag

SEQ ID NO: 356936 - DNA, 122 bp, Homo sapiens
ctctccttgaaaacctccaataattaagtcaattaagtgcatcctatctagtgtctctcacggcaacgagcagatgcaccgaaatcgtgcaacaaaatctccataaaccacgataggcaacc

SEQ ID NO: 356937 - DNA, 122 bp, Homo sapiens
tagaaagcccaagaccctgaaaagacctgcacccacccccaaaggggcggggctggtgggcggagaggaggcggggcgcgctccttcagccccgcccaccagccctggactccggctcccga

SEQ ID NO: 356938 - DNA, 122 bp, Homo sapiens
tcccctcccttcttgactctctgttcacagaactcaggctgcctccagccagcctttgcccgctagactcactggccctgagcacttgaaggtgcagcaagtcactgagaatgagcactttc

SEQ ID NO: 356939 - DNA, 122 bp, Homo sapiens
cttgtgtttctttttcccagatgtgtcctcaaccttagcaaaataaaacctcgaattgatcgacacctgctgcagtcatatttttggtttacaggaaggacccctttggcaaatgcttcaga

SEQ ID NO: 356940 - DNA, 122 bp, Homo sapiens
ggtgaggaattcctcttataactgaaatccagctaaactatcagagccaagatgcgtccccgttcctctttactttgtagggtttacgtaagtttaagatttgccttgtctttgatatgtag

SEQ ID NO: 356941 - DNA, 122 bp, Homo sapiens
aggtgtttcagtaaagaaagcagtagcatgtgaggtaatggtgaaatatccaaatgcaaacgtctagctttggttaaatcaggagggagagctacattcaggaatcatctgagcagtggtga

SEQ ID NO: 356942 - DNA, 122 bp, Homo sapiens
ctttgcatacctccgatgtctgggaacttactgaattgcagttctaacagaatctccatccgtcaatcatggtctctaaacttttccttggtagcaggttgttttttattctgaggttaact

SEQ ID NO: 356943 - DNA, 122 bp, Homo sapiens
ataaatacttggcggatggattctggggtgacactctctcagaagagtggtccgccgctccgctcagctggaattgtctgagaactcattctgggcgttcactgcaagctataaactctaca

SEQ ID NO: 356944 - DNA, 122 bp, Homo sapiens
gtttcaagtcattttggcaggacacggcggcacgcacagcccgcccagacctagacccctcgctctcctccacagagccccagggagcagctgtgggcttccctgtggccgagaccagcctt

SEQ ID NO: 356945 - DNA, 122 bp, Homo sapiens
taacccttgaggtttccttggtatcaactctctcttattccaacacattgcaggcctccacgcagggccttccccagcattctccccgaccccatcggtggccagcccggggcagggaggtg

SEQ ID NO: 356946 - DNA, 122 bp, Homo sapiens
atgtctttagtcccaaatgtcttcctcgctacacaatgaaccagttcccctccagctcgccgccaacccaggacgcagcccggctcagagtgacccccagtgggcagtgaagatgagatcct

SEQ ID NO: 356947 - DNA, 122 bp, Homo sapiens
gaaaaggggctgctgggtaggacctgcaggtatttgtcttttttactcttgagattggaacgggaaatcgactctctacccctccaccccgcctccgggcaagtgaggaaccccttgtcaaa

SEQ ID NO: 356948 - DNA, 122 bp, Homo sapiens
gcggtgtcgacggggaaccgaaggccccgccccgcgggaggtgccggccggccccttgggcgctacgcacgcgcacacaggccgaactctcctggcgggacactagcccgtccgcgccaaaa

SEQ ID NO: 356949 - DNA, 122 bp, Homo sapiens
ccatatgctaaaggagttacaagtattaactcatttgattttcacagcaacccataagggcgctgtgcttagtcccattttacaggccatggtcgttaaagtttgagttcactcagccttca

SEQ ID NO: 356950 - DNA, 122 bp, Homo sapiens
ccactgcagcactgaccactgaggcctcccgaagacctacctctgagtttaccagaaggccgaccacggaggccccccagagatggacctctcacaccactgccacgctgacccctcaggcc

SEQ ID NO: 356951 - DNA, 122 bp, Homo sapiens
cctgtcctcaggagtccccagcctgggggagatggggacacagccctgtcctcgggagcccgggcttcaattcaatgggtacagccccaaatccagtgagccccaagttgatgaaaaagacc

SEQ ID NO: 356952 - DNA, 122 bp, Homo sapiens
atatggtcaaggtcatgagctaatatgggcccagaggtttttaaagggcttttaaatgaacgatttcttctaggcctcactgctcttcacaggaaaggctcgtcggagactcttggcatgga

SEQ ID NO: 356953 - DNA, 122 bp, Homo sapiens
tcatgtcagaaaattctattggacagttctagagagatctaagagacagtacgtgtctctcgctcaccaatactccatctcgcctcagcctgcgtgcaatccaagcccagagactggtgccc

SEQ ID NO: 356954 - DNA, 122 bp, Homo sapiens
cagaggccccgggcgctgcggcctctcggtctcagggcgcctcccgcaggtgggtgggcccgaggagtgccctgtaggtgtttccgctttcgctgctcagcggcttctagacgctgacattg

SEQ ID NO: 356955 - DNA, 122 bp, Homo sapiens
ggccaatgaaagaaagacttaaagtcacgccctcacttcccattggccagggtgggaccacgcctctgcactgggatctcgcgtttcttcttttcttcgcgtttgcgagggagggggtagaa

SEQ ID NO: 356956 - DNA, 122 bp, Homo sapiens
ggagcgagcgacgtgggaaaccctgagataggacattggcccggcgctgggctcgggtaacgatgcggggcggggagcgcgggcggccggggagggcggcggcccctttaagagcaggccac

SEQ ID NO: 356957 - DNA, 122 bp, Homo sapiens
gctctgctcagacacagcggagggcatgtggcgccagcaccatgtggtaaaaacgcaagccgggaagtcaaggccacacccaaaggccagctgctgggactctgctaagacaagacagaggt

SEQ ID NO: 356958 - DNA, 122 bp, Homo sapiens
ctgcgctgccagaggcggggcctgactggagagcggccgaattgggcacatttgcgggaacgcagagcggagcgtggagagcggagcgaagctggataacagggtaaagggagtgggtgggg

SEQ ID NO: 356959 - DNA, 122 bp, Homo sapiens
cagatgatttctttttcctcctctgccccaggtccatgctgggcagaatcaaggcgcaggcgttcggctttgaccagacctttcagtcctatcggaaggatgatttcgttatggttagtatg

SEQ ID NO: 356960 - DNA, 122 bp, Homo sapiens
gaatgtatctgagaattggaccaaagctgagaacctagtccccataaacaaagtgtacaccggctcactattctcacgtttgtaaggtctcaaagagcccacagaccccaggccaagaggcc

SEQ ID NO: 356961 - DNA, 122 bp, Homo sapiens
tcctctcctttcggcttccccacggtgcctttcgggatttgtagtcagacgcgcttcagccggctctaaggagagcaaaggcaagactccaattcccagcatcccccgcgcccggagagtgc

SEQ ID NO: 356962 - DNA, 122 bp, Homo sapiens
gtctgatcacctaggtggatctcaggcgtccttccccagttgacaaggacaaaggctccacgttgtgtttggctgtgctctttcgtaagaactgcgtagtgtagaggaaaacacacacacat

SEQ ID NO: 356963 - DNA, 122 bp, Homo sapiens
cctggttttcccagcagtagtattgtaatcctcagaatctcagtaactttccagtgaccccgcatccccacccactaatcccagcgtctctggttacgcctcccagcaatggcgccaccatc

SEQ ID NO: 356964 - DNA, 122 bp, Homo sapiens
aaagtagttggcgccccctgtggcatccgcgacggctgggggggttcagcctgggattggcgggccccgggtgatgtcaggccgtcggagcccataggctggctgtgcgcgggtggctgtaa

SEQ ID NO: 356965 - DNA, 122 bp, Homo sapiens
cctactcgtacatcgcgctcatcgccatggctctggcgcacgccccgggccgccgcctcacgctggccgccatctaccgcttcatcaccgaacgctttgccttctaccgcgacagcccgcgc

SEQ ID NO: 356966 - DNA, 122 bp, Homo sapiens
aacgtgtagccacgctatgctgtgccgattcacacacctcgcagtgcacggaatgccattcgtgcacatggaaaggagagcatttatttacagaattcatcttatgtaagtgtttttaacat

SEQ ID NO: 356967 - DNA, 122 bp, Homo sapiens
aaaaccaaccagggctgcaccacgtgcagccactgcagagtccccaggaccgagaccactcggtgtgttttcaaccaccaggacattaaacaggaagtcagtcatgaaaatagacccgtgag

SEQ ID NO: 356968 - DNA, 122 bp, Homo sapiens
gagttgcggtgcacgtgaagacctgtggcaaggaggatgccatctcgaacatcaatggatcggtgtgagaaggaggcaatgaggagttcattccagcctgggtggggcagcaagggtcagga

SEQ ID NO: 356969 - DNA, 122 bp, Homo sapiens
aaggatggagggggcggaggctgtcctccgggccctgccttatccagttctggacatctgcgttgggattctgagtttagggcgaggcaagagaactttgtgctctctgagtgggcgaggcc

SEQ ID NO: 356970 - DNA, 122 bp, Homo sapiens
atttcatgtggagaaatgcagcttttctagcggcgagcctttcttccatttcccagagtccggttaccctcaccgcaccccaggtttgccgtagaaggatgagattccctacatgtaggcgt

SEQ ID NO: 356971 - DNA, 122 bp, Homo sapiens
ttagactcagagcggccttttcgtggctgggtcccaccttgggatgattctaaaaggaggcggctctgaggacggccacttaggtcttggaggccctgccactcagggagcctgcaagcttc

SEQ ID NO: 356972 - DNA, 122 bp, Homo sapiens
ccagggccgacctcttcaagatggcgggcgccggagactagcttccgcttccggtgtgagcggcccggccgggggggcaagatggcggcggcagtaggggttcgtggccggtacgagctgcc

SEQ ID NO: 356973 - DNA, 122 bp, Homo sapiens
cccggaggctccgacgccacgaccctgctcccacctgcggtcaggcacccgcgcgggaggcgccgcggcgacacaaagagccctttgtagagcttcccggcccgggccctggcgtctgcggc

SEQ ID NO: 356974 - DNA, 122 bp, Homo sapiens
ctgggatttgcctaccattggtttgctgggtcatcttctctttcgaatttcttgcctacacgctgagataggctgattagagtcatcactttcttccatttctaagagtagtgatttcaaac

SEQ ID NO: 356975 - DNA, 122 bp, Homo sapiens
cgggcggatgctgttttagtttccaataaaatggatttgggcgaggctgagagaaaggaacgttatgtgaaacccgcttggggtgcctcctccttgagggaaaccagaacttgctagtgggt

SEQ ID NO: 356976 - DNA, 122 bp, Homo sapiens
tttcggattggggcgccatcttgacgatgggcggaagacttcaggcaagaggccagagtccgattgaggattggttcagggtggggtctgggcgaaacctgttacacgattggaggccgagg

SEQ ID NO: 356977 - DNA, 122 bp, Homo sapiens
cgcccacctccaacttacatgaatgttggaaggatggatagggaggtttcaactagagaacggagaagggcggatgtaactggttcttgatttcagaaaacagccaggagcacacatggctg

SEQ ID NO: 356978 - DNA, 122 bp, Homo sapiens
cgcagcctgggaggtggggagcggccagctccactactcagtctacgaggaggccagacacggcaccttcgtgggccgcatcgcgcaggacctggggctggagctggcggagctggtgcagc

SEQ ID NO: 356979 - DNA, 122 bp, Homo sapiens
gacccctcccagtggccacgcgccttctcacgcccctctcccgtgacgtcatgctcctctcgcgcggcatgatgggagaatcctaatgttttccaacagatgctccaagaacagctttcaga

SEQ ID NO: 356980 - DNA, 122 bp, Homo sapiens
ttgatgttatttcaagttgattttcatgtgtttgggagcttgtcttgttctcaactactacgcaggtagacagtcttcccccagagactcattagattgcaatatagaggcactttctcatt

SEQ ID NO: 356981 - DNA, 122 bp, Homo sapiens
ggcatggatcaattgcctaaacatgtgaggtgatcctccagaggagaggagactgctccccgtgctggtgtagaattcctgctgattggaggtgaatatgcccacccctttgtctttcctca

SEQ ID NO: 356982 - DNA, 122 bp, Homo sapiens
acaaatacagtaaagccccccttagaacacagtctggagtggattttacgactttgtcctcgtgagcgctcgtgtaagcaggtggtcatgctgcctgaggcattaagaaagcatggcggggc

SEQ ID NO: 356983 - DNA, 122 bp, Homo sapiens
gagctggccactggggctattcaggagaaaaacaatctggacagagcaaacaagaccctccgagggcaaaggaccccagtcagagtgcaaagaatactagagcagcaaaggccattgtggcc

SEQ ID NO: 356984 - DNA, 122 bp, Homo sapiens
tgggggacccgggaggcattgacttttgcgctgtttgcccgcggcctcggagcaagcagacgccatctgtttgccggctgcgacgcgtcccgtttaattaccctcccggcagcctaatagag

SEQ ID NO: 356985 - DNA, 122 bp, Homo sapiens
acactttgttttaatatcctggctttccctaatacatcccaccctggagttctgttgtgccgttcctttgtgtgacttcctaaagcctgaaaaaaggtgataccatatccaattatattaac

SEQ ID NO: 356986 - DNA, 122 bp, Homo sapiens
gatcaaaaagaggcctttaaacttaatgaattctccgcttcgtcccggatggagccgttccgcacctttcagctgttcccgggaatgatagggcagctcagtgccgagctcgctaggtaatt

SEQ ID NO: 356987 - DNA, 122 bp, Homo sapiens
aaaggagatgtctctccttccctccctcaattctttccatcctccctgccttcctccacccgtaaacatttatgagaccaattaggtgtcagcagtggtgttcaacagttttcttatgttcc

SEQ ID NO: 356988 - DNA, 122 bp, Homo sapiens
tgcttatttctccaaggacgagccctgtgttctctttacgacccaatgtttacaaatcgacgggcaccacattgagtaaaaactgccagccaatttggagaggcgatcgcagggcttcgcct

SEQ ID NO: 356989 - DNA, 122 bp, Homo sapiens
ctagacctttgtaaactctgcctctcattggctgtttacagagaagaaaagaacagtccacgtgtctattattgcagtgctgcctgggatctgtagtttgagtttatataagagatgcatgt

SEQ ID NO: 356990 - DNA, 122 bp, Homo sapiens
gggcttaaaaataatcgatccagctctgagaaattgatgacacatgtgtctctggtgtgacgtgctcatgcagttgttactgggaggccaagggggaaggattagctatgaagtgataacat

SEQ ID NO: 356991 - DNA, 122 bp, Homo sapiens
agcagaacagttaagtgacttgcccaaggtttaacagatagtaggaggtattaatagaagcggaccttagcaatctgaaccttgtgtctaatgtctttgttgtgtatatccttcccaccttt

SEQ ID NO: 356992 - DNA, 122 bp, Homo sapiens
tccacctctgtcccccggcccctttcggcgagcgctcatttggaaaggaaacagtcactgcggatccacttgggacccggagcatgactgtaacgcctcgttggagtgtatcaacttgcatt

SEQ ID NO: 356993 - DNA, 122 bp, Homo sapiens
gttcaaaccacatacggttgtttcaagtagggaaggaggcttcttactggaatttgaccccggctcgtgggccataaatccagccctcctgctgcagttttctcaaaacaccatggctagct

SEQ ID NO: 356994 - DNA, 122 bp, Homo sapiens
aaaaacaaaataacaaaaacccagtctaccaagccaccacctgaggccctgtctcctcctcgcacggtccccatttgaggttacagagagataaactgaggcacaagcagcacccgcggccc

SEQ ID NO: 356995 - DNA, 122 bp, Homo sapiens
gccaggccgcacgggctgggcgggcacgggggcgggcagggtgcagacggactgggcttgcgaggtacgagttgggactggggcaggcaggggcgggactggggcgggaagggcaggtaagg

SEQ ID NO: 356996 - DNA, 122 bp, Homo sapiens
tcttgtgggtattcctattctatatgcagaccactgttcctgccctggggcccagatggtcggaagagaggggtacatgggggaatggaacagagaaggtagatctatagcacctatagatc

SEQ ID NO: 356997 - DNA, 122 bp, Homo sapiens
catgctcactcatctgccagccacacagaggtcctggatgtctggtgggcgatgagcaagcgacagagagtccgtgtgatgaggttgctcaggctgatgtgacaacagtgagaagaggcgtc

SEQ ID NO: 356998 - DNA, 122 bp, Homo sapiens
gtcttgttctgtcagcatccaggcctgcttcataaaacctgtcactctgctaatggttagcggctgaacaaagagtcctctggccaaataagtttagaaaaactctgataaaaatattattt

SEQ ID NO: 356999 - DNA, 122 bp, Homo sapiens
aacactgccactgttacaaaataacaccctagccataggccactcctgggaagggtcaggcggtgtggcacagcgagggttaatgtcgtctgctgtccctgccagccgcttgcctggttggg

SEQ ID NO: 357000 - DNA, 122 bp, Homo sapiens
ctcttcttctggcgtcacttccggattcgtgtgcattactatggtaaaacagtcaacatccggttttacacctcctcctggcttcggatggggaggagctccaaggagatccgttgctaggg

SEQ ID NO: 357001 - DNA, 122 bp, Homo sapiens
gaggctggaagaagcaacggttcatgaatatctgagcagcggatggagagaaggcacagccggctcagggcacactgaagagcagttgactccccttgggagggttactttaaatagcttct

SEQ ID NO: 357002 - DNA, 122 bp, Homo sapiens
ctccacccctcccagccttcatctcacgggcccacccacaacaccctaaaccaatcccagcgcggtgagcacacaggcctggctccacccccacccccgcagccaatggcgggggacgcccc

SEQ ID NO: 357003 - DNA, 122 bp, Homo sapiens
gtccacggagggggcgtttctgctgccacacggtggggactgcctgaccatgagagacagcggtccacctctgccatgcactccctgagtcggggctgcaggctgaccgcagcggcccctgg

SEQ ID NO: 357004 - DNA, 122 bp, Homo sapiens
gcctcatcagggttgatgctcttgttgagatcacgtccattgaagtagtcctgaagcagccgctgcaccttggggatgcgggtggagccccctactaaaacaatgtcatggattttagcctt

SEQ ID NO: 357005 - DNA, 122 bp, Homo sapiens
gctggctgcaggctggaggggcgcgagggtccgcactggcacatgagggccgtcttccaccgcgttgcgctggaacgtgggcccagcagatcttttggggtgggaggcattgaggggggtga

SEQ ID NO: 357006 - DNA, 122 bp, Homo sapiens
ggcgggaccccagatttctgcctgtgggcgatggaagtgaggttcactggccagcggagccggacacagaacgcgcaaaacgccgtgtaggcctggaggagccgaagagcaggcggaccccc

SEQ ID NO: 357007 - DNA, 122 bp, Homo sapiens
gatgaaagcgcagagccatatgcaagcacatgaagccgagcgtgaagccgagcgtgaagccgagcgtgaagccggcgcctccagttagcagagacacgttttcctacatgggagacttcgtc

SEQ ID NO: 357008 - DNA, 122 bp, Homo sapiens
aactagggacgcttctggtctctaggcgaggagagggggagagcgcaatctttgcgcctgcgcacactcctgctcttacccgccggaaccctgggccacgcccggctcgcgtaatcacgcac

SEQ ID NO: 357009 - DNA, 122 bp, Homo sapiens
ataaaaacaaacaggccgggcgtggtggctcacgcctataatcccagcactttgggaggccggggtgggtagatcacgaggtctggaaatcgagaccatcctggctaacatgatgaaacccc

SEQ ID NO: 357010 - DNA, 122 bp, Homo sapiens
acccagcgatcccccgaagctgccagcaaggcagtgacccagcggtttcgcgaggatgcccgggacccagttactagattatgaaggcatctcaggccctggagccagagccagtcaggggt

SEQ ID NO: 357011 - DNA, 122 bp, Homo sapiens
gtgtattgatcaaatcagggtaattagtatgtgatatatatacatgatggaatactattccgccataaaaaagcatgaaatcctgtcattttcaacaacatgggtgaacctggagggctcta

SEQ ID NO: 357012 - DNA, 122 bp, Homo sapiens
cgcgcgctgcggtgcacagagggttaactggagttggcgctgggtggagaggaggagacgcgctcccattggcggaaagttattcaggggcggggtcagtgaatctccgtaccccactcccc

SEQ ID NO: 357013 - DNA, 122 bp, Homo sapiens
agaccggggcagaggagaggcgcgcaggtctgctgggacgcagcgcggggcgagcagtggcgcactcgtggcctgacgcatccgcgagactgcacgcggccaggcgggggcacgaacgggtt

SEQ ID NO: 357014 - DNA, 122 bp, Homo sapiens
cttatattagtcagctcaggccgtcctaacagaatgtcaccgacgaagcagcttaaacaacggaaatgtattttctcacatttctagaggctgcaagtctgagatcagggtgccagcatggt

SEQ ID NO: 357015 - DNA, 122 bp, Homo sapiens
aagcccaggggtctacactcaactcaacccttgcacccaagctctgggctaagattttggcgtgctgagcaccacccattttgtaaggaattttgtaaaattttatctgaagcatcactcac

SEQ ID NO: 357016 - DNA, 122 bp, Homo sapiens
atcccctggcgggggaggctgggagctgggcctcctgcgtggggtgggactcgcaggggccgggtctccgtgactggggcaacgcctcgtcctgcagagggagccgacgacctcttttctgc

SEQ ID NO: 357017 - DNA, 122 bp, Homo sapiens
tgcgccggctctgcttcagccgctgccgctagggcgcggggggcggggggctcggcgccgcgagctcggccattgtgggagccgctcccctcggctccgccacgctcccctcgactgcgctc

SEQ ID NO: 357018 - DNA, 122 bp, Homo sapiens
gtgctgccttgggtctctgctggctcctgtggcaaggtctgcaggtccttcccctgttctcgtggtggaacagctccccgggccaccccacaccccaaccatgtgctgaacttcctcctggg

SEQ ID NO: 357019 - DNA, 122 bp, Homo sapiens
aaactacttgaagccgcccatcccgctggacctcatgatgtgcttccgcctcctgcagtccgtggtcatctaggccctactccgccaccggatctgctctgaccgcacttgaaggctggggc

SEQ ID NO: 357020 - DNA, 122 bp, Homo sapiens
ctgtcttggcatcaagcaatcctcctgtcttggcatcctaaagtgttgggattagagatgcgaaccatcacactggcccaggctccttttaacaaccagctctcttgtgaactaatgggagg

SEQ ID NO: 357021 - DNA, 122 bp, Homo sapiens
aattggacgaatcccttttgtcgctctcgacgacaggaccgacgctccgcctcctcgccccggttccagtagttggtatggtccgagacagtatggctgctgcatttcggccctcgaatcga

SEQ ID NO: 357022 - DNA, 122 bp, Homo sapiens
acggtgaccgagaaacatttgatggggtctgcggggcccctgaggacatcgagtgcaggtcggtcaaggatccccacctcagcttggagcagctaggccagaaggtgcagtgtgatgtctct

SEQ ID NO: 357023 - DNA, 122 bp, Homo sapiens
gaagaacaattggctagaaggtccagaggcctagatttgtaactggtgggaagggagttgcggtcttgtggcactgagccctcatcaaccataggatctgttgctatctggtagatagtgtg

SEQ ID NO: 357024 - DNA, 122 bp, Homo sapiens
gcacttggtaactaacatgcttacagtcatgcagagacatagttttttgtgaagggaacacgcaatattttagagagggtgatccttgttatattgttagccataaattttgcctacattat

SEQ ID NO: 357025 - DNA, 122 bp, Homo sapiens
acctcgtgatccgcccgcctcggcctctcaaagtgctgggattacaggcgtgagctgctgcgcccggactaacttttttttaaagctgaggaaatgagagaaggggaataaactttgtgtag

SEQ ID NO: 357026 - DNA, 122 bp, Homo sapiens
acctcaagtgatccacacgccttggccccacaaagtgctgggattacaggcgtgagccaccgcgcctggcccaattgtttcttaaagtattccatgggagtaacaattccattgttaatgat

SEQ ID NO: 357027 - DNA, 122 bp, Homo sapiens
ctagaacacagggaggaggactcagggcagagcccagagcccactgcagcaccgagtccacggagcagccagaggctactaccagagcctcaattgccaccccaaagtaccagctgggggca

SEQ ID NO: 357028 - DNA, 122 bp, Homo sapiens
ccgcgctgtggtatctttcccagtatccaggtggggagaggatcatattacttccaatgtcgcagggtgtgtacaccccctctgtgatctcgttgctagcatccaggtttggggaggacgac

SEQ ID NO: 357029 - DNA, 122 bp, Homo sapiens
accacgttcccacagattcccggggtctcgcagggtctgtctggggtctgaagggagaagcgagacacacgctgtaccagttggtggctcagcgaggaagatgtgcctgcagcatatggttc

SEQ ID NO: 357030 - DNA, 122 bp, Homo sapiens
cccctggctgggatgtggaatgatagcaggcgcctgcttcctgctggcgggaaggctttccgaaggagggaacactgatgctataaatccgtgggcggtagggagcaggaaagcagtgaggg

SEQ ID NO: 357031 - DNA, 122 bp, Homo sapiens
ctcccgagcccctggagctgctacagcccccgtgggtgctccctggccgcatccttgccccgctccagcctctgtaacttagcacgcgtgctcgtccagcggcctttgctctgtgtgtgact

SEQ ID NO: 357032 - DNA, 122 bp, Homo sapiens
gccaccctgtccacacagtagcccgatcgacccccgtggcggccgagacccaggcccatccgcagccctgagacctccctagggattgcacccagcagccagtcaccggcctccgcggcctg

SEQ ID NO: 357033 - DNA, 122 bp, Homo sapiens
cagcccgggagctgttggacgagtgggagcgcctggctacctgcaagtcttcgggtttcgcgagcgccgcagagcttttctgcagccgctaaataaataaataactacggacgcccgccccg

SEQ ID NO: 357034 - DNA, 122 bp, Homo sapiens
aagtgcaggagccccggctgccccttcacactgaatgtgcagcacaacggattttgtgaacgttgccacaacgcccggcaacttcacgccagccacgccccagaccacacaaggcacttgga

SEQ ID NO: 357035 - DNA, 122 bp, Homo sapiens
tcatccttgctctgactccggtgtgcgccttcccaccctggagctctaggcaccccattccggctctggtgacttgaaccctctgggacattgacctctaatggctgatttcagtttctcct

SEQ ID NO: 357036 - DNA, 122 bp, Homo sapiens
tttattccctgtctccagctgatctgtgagttccacaaaggggagaagccacctgctgggcggtcttgcatctgtggcaatgccttgtgcataaacaaaccttcgctaaatgtttgttgagc

SEQ ID NO: 357037 - DNA, 122 bp, Homo sapiens
ggagaaaagggcaagcatggaggcggcagccctctctgcctgagcgcacgtgaggggcgccggcaacatgtggaagggacagtaaatggccccagcactggccaaggaaagcccccgggggg

SEQ ID NO: 357038 - DNA, 122 bp, Homo sapiens
gaggggcctggggagggggggcctttgcccgggcggggagcgggggctgggcctgggatccgcttgttcccctccccagaggcctttcccggggcgagaggggttggtcaggagagaaaaag

SEQ ID NO: 357039 - DNA, 122 bp, Homo sapiens
gtgtctctgccccgccgccaccccgtctgggaggtgaggagcgtctctgaccggccgccccgtccgagaagtgaggaccccctccgcccagcagccgcctggtctgggaagtggggagcccc

SEQ ID NO: 357040 - DNA, 122 bp, Homo sapiens
ggcgctcagagcgggcgggccctgtgaggcggaagtggcgggctctgtgggcggaaggggcggggcctgggagtgtcgtgtgcggactgaagggaaggctgcgggagtgtgcttcgcgtcct

SEQ ID NO: 357041 - DNA, 122 bp, Homo sapiens
ctccggcattcacaccttcccaattcagatgaagggaaccaaccagtgccactttcatcacggacaacatcacctcgcgacgacacggctgacacacacctggatacagctttcaggggaca

SEQ ID NO: 357042 - DNA, 122 bp, Homo sapiens
cagccctcccttaatttctctcactccctctcttctttgtccagttctcacagtagcacacgtttatatagtttacagttcacaaacattatctcatcctaacaccagtcctgacaggtagg

SEQ ID NO: 357043 - DNA, 122 bp, Homo sapiens
gatgcgcagaagtaggttatttgttgagtcagtctgccccctggtggaacagggtgaaaacgtaaattagttatacagaatcggccccaccaccccaacacacacagcctacctagacacat

SEQ ID NO: 357044 - DNA, 122 bp, Homo sapiens
ttccctcctttctctctcctcaggggccacttctataacacactggagcaatatgactggcggcgcttccgggccctggctgaggagtcccagctctatgagcaaagcctcagcctctttct

SEQ ID NO: 357045 - DNA, 122 bp, Homo sapiens
aacttcctgttgggtgctgtggtcccaaggcgcgtgctttgcagcagatgtgtgacctggcgttcccctgagtgctcggaaaatggccttgtctccggtcgttcccgttcaggagcaggtac

SEQ ID NO: 357046 - DNA, 122 bp, Homo sapiens
taacacgctcgaggcaaaagtttgaatggggactaccaagacttgccacagacaagtccccgaagccgccttggtgcaggccacctggtttcccagcccctggtgtgtggtcagtgcctggt

SEQ ID NO: 357047 - DNA, 122 bp, Homo sapiens
taaggtcggagcgttcccactcaggaaacaacatttctctactctaggtttatctggcctcgcatctctccccagctgggcccagcctcagcctatgctgcagaaatgtttaaagtcaagca

SEQ ID NO: 357048 - DNA, 122 bp, Homo sapiens
taatctcttgtccttgctagaaaacagcagttctccaggacagctggacgagcaaggaagcggaagcctcctgatgacttagacatatcaaagtttaaaacattttgggctatcagtggaaa

SEQ ID NO: 357049 - DNA, 122 bp, Homo sapiens
gcacctgagccggagccggagccgggcacggcgggtagcggtggggcggggtggaccaggcgccaggaccaggcccgccggggcgggaggcctccgcgcgcaccttcggggctgaggataga

SEQ ID NO: 357050 - DNA, 122 bp, Homo sapiens
tgtattttagtagacacagggtttcaccatgttggccaggatggtctgatctcctgacctcgtgaagtttacctcatttggtgattgagaattgcatggttatctcgaagtaatgcctccag

SEQ ID NO: 357051 - DNA, 122 bp, Homo sapiens
ttgacgagtgcaccgtgctccgggggcctgacggcagcagcaaaggtgactggcgggggccggggcgggactgcgagaggggccgggctagctctgggggcggggcctgtggggagggtggg

SEQ ID NO: 357052 - DNA, 122 bp, Homo sapiens
gccgagctgcgcctccgcgcaaggccagggagtgtggctcgagccccgctgcagaccgggcgtcgccggttaatcaatgacactgtcgggtcagcagcgcagcctcccagctgcggaggggc

SEQ ID NO: 357053 - DNA, 122 bp, Homo sapiens
ccagatgttcgacgccgaggtagggtccccggactggggcgggtggggtctcggcctccccgagtaggctttgtggtccatcactactgtgctgtagacgtggctgggtcaccttctttctt

SEQ ID NO: 357054 - DNA, 122 bp, Homo sapiens
gctgggtgtggtggcacatgccggtaatcccagccatttgggagactgaggcacgagaaccgcttggaaccgggaggcggaagttgcagtgatccaagatcgcaccactgcactccaggctg

SEQ ID NO: 357055 - DNA, 122 bp, Homo sapiens
ttctctcagacctgtggtgtcactcccagaagccatctggacacccaaggcactgcctgacggagatggccatgctcttccctgtagggatggacaagggacacctgcagtgcacaggtcac

SEQ ID NO: 357056 - DNA, 122 bp, Homo sapiens
ctggtttgctgtttggtcccttgcagctgtaagtgtcctaactgctccccaggtcagccacggctaggactcttatttgggcgagggacttagggaagctacacagaacagccgccagcagc

SEQ ID NO: 357057 - DNA, 122 bp, Homo sapiens
catagcctgctatcttgttgtggagcttctcgctggggataatggcgatctcctcgcacacgcgcttatccgtgtggaagtcattgcccaggcgcgtgtagtacttttctgtgacgacctgg

SEQ ID NO: 357058 - DNA, 122 bp, Homo sapiens
ggtacagctctcctgggcggctggagaaggagcttcttctctggagtgcgccggtggcagcgcctgcagacctaactagctccaggactttaaaatactggaaatctgtcccgatccaaatt

SEQ ID NO: 357059 - DNA, 122 bp, Homo sapiens
cccgtgttcactcagcccgagtaccacgtaagtgttcgtgagaacgttcctgtaggcactcggctactcaccgtaaaagccactgatccagatgaaggagccaatggagacgtgacgtattc

SEQ ID NO: 357060 - DNA, 122 bp, Homo sapiens
gagtcgccagacagaacccgggacctggcagcagcaagtctgagaccgagatcggctccccgcgtcctgagcatgcaagtcaaggagcacgaagctgagacatttaaaatcagtagaaaaaa

SEQ ID NO: 357061 - DNA, 122 bp, Homo sapiens
tgccggactccccaagccccatctccagctttttcagtgggtctgggagcaagcagctgccgcaggccatcatcatcggcgtgaagaagggcggcacgcgggcgctgctggagtttctgcgc

SEQ ID NO: 357062 - DNA, 122 bp, Homo sapiens
ccacagcctgccccctgcgctccccgagacacgcgcgctctctgcccatgccgctgcagccggaggcctgcatctgtcccagccctggacgcgctgaaggtcctagcttcccagcaggggtg

SEQ ID NO: 357063 - DNA, 122 bp, Homo sapiens
tcgggaggctaaggcaggagaatcgcttgacgggaagcggaggttgcagtgagccgagatcgtgcctttgcactccagcgtggaagacagtgagactccgtctcaaaaaaatgaaaaattag

SEQ ID NO: 357064 - DNA, 122 bp, Homo sapiens
agaagtaccccaaaaattgagggaagaacatgcatgtttgaaggattccagggacaaagccggggaggggaatcttaccttaacactgcataccctggccaggcagcatatccagcctcaag

SEQ ID NO: 357065 - DNA, 122 bp, Homo sapiens
aagtctccacggaatactaccctcctacctattcccaaaccatgtaccaaggacaggattcgcacttgcttagtcaagctactctgactttccatccaacagtacctagcccgtccacattg

SEQ ID NO: 357066 - DNA, 122 bp, Homo sapiens
gcctgtgtcgcagggcaaacgtcgctctgaagcatcgacaatactggcaacatccacagccgccctgaggggacgggcgtagaggagagctgccgcctcccggctgctgggcccgggtgccg

SEQ ID NO: 357067 - DNA, 122 bp, Homo sapiens
accgtgctaggtcatttcctctcctttccgcgagaccttccgcggttatccagcgagtcacgtagcaagactacaattcccatgaggctcagcaagggcgatttagggtccagggaagcaat

SEQ ID NO: 357068 - DNA, 122 bp, Homo sapiens
ttgtcttttcttcttcagactgaaaatccctggtagtacctgtagtttccttccaggacacgatttttagtctgttccttcaattgccctgttgtaaagatcagaagtgcagagtgaaacca

SEQ ID NO: 357069 - DNA, 122 bp, Homo sapiens
ttccccagtgctgggattttagcccatacctctccttcccactcctctgggttagcaaatcggtatggagcctctgcccaaactatctggagactgatcctaagattgcctgcccctggctg

SEQ ID NO: 357070 - DNA, 122 bp, Homo sapiens
acacagtaacctggaaattatcaccggcggagcaaagtcacagctcagggaggccctccgcgttgtctggcggaggaggggagtggcaggtgatcctcacaggtaagctcgccgggcatttt

SEQ ID NO: 357071 - DNA, 122 bp, Homo sapiens
atgtccagaaaaagaggccatctggatccactcgctgtgggtccctgcgggcctcagtggcggcatctgcaaattaaggggacagagcaagtgcagagcaagatctaccgcagagagcggct

SEQ ID NO: 357072 - DNA, 122 bp, Homo sapiens
ccttttactgacttcctggaccaaagcagtgtgcctgtgagtgcaacagctgatccctttcggagtggagtttcctagctggtgcctgtcctctcttgagcctttgtttcttgagtgagcac

SEQ ID NO: 357073 - DNA, 122 bp, Homo sapiens
ggtcacaaaaacaacaaaaaatgagcggatgcagtctgcaggtcctgtccctgtccttaccggggaactggagctaggatttgggggcctctcgggagtctagagcgtgaccgcgggcccgt

SEQ ID NO: 357074 - DNA, 122 bp, Homo sapiens
ggaggcgcggcccagcaggctggtctcagactgggagcgcgaggccttgcgggccctgggcgagccgcggcggcccgaagcctcggccatgcgtccacggcggccggcggcccggggacgct

SEQ ID NO: 357075 - DNA, 122 bp, Homo sapiens
gtggggctgattttgctgaagtgcccgtcttggggctcttggtctcagcaggagacaagccgccttacctcagtgattcagggactcagggacatgggctaaaaggtgtgagctggtgggca

SEQ ID NO: 357076 - DNA, 122 bp, Homo sapiens
gcaatcgcggcccctttaacagggccactgcaggaggagctgtcctatcagcaccacggccgccgcccagtgtgcccccaaccccggcagctgctgcgggcgcctcaagggcaggaagggcg

SEQ ID NO: 357077 - DNA, 122 bp, Homo sapiens
aaaattatttagcaagcacatgctagctattccagtttgaaatctaccaaactgtaaaatcggggagaaataaaaagttgaagttgttgttcctcaagatgagggaacaaaatcttacaaaa

SEQ ID NO: 357078 - DNA, 122 bp, Homo sapiens
atgcccggaaaagccacgcacggcccagcaaaacagacggcgtgcctgtccgcttcccctcgccgccccagacagctgctcacccaaccctgctgaggcatcgcaacctttgccaggaatgc

SEQ ID NO: 357079 - DNA, 122 bp, Homo sapiens
gttattttgttttggatctcagcacacagctgccaaatagaatgcttttcccctagtgtccgcccaatttcctgcctgcctggagcccggaaggtgcatctgggcagagccaatgcaggaca

SEQ ID NO: 357080 - DNA, 122 bp, Homo sapiens
ccgcctcccaggttcaagcgattttcgtgcctgggtccccagagtagttgggattacaggcgtgagccattgtaccggctattatctttcccttttgaatattaaaagcaattccagcatct

SEQ ID NO: 357081 - DNA, 122 bp, Homo sapiens
tgtgaaagtgactcaaacaaaaatggaaatgaacattaaaggggtgggggccgctctccccggcccctcgctccgctgccctgtgtgcccccgccatgaggtgacagcctgtggggcgactc

SEQ ID NO: 357082 - DNA, 122 bp, Homo sapiens
aggcggtttcccccggcccggagtcgggccacccagtgcccgggcctcctccaaccacctcggccatactccgcaaatcgttctgctggtcagtgacctgccggcatccacctgtcagtgta

SEQ ID NO: 357083 - DNA, 122 bp, Homo sapiens
gccggaaaaggggtgctctccaggtggccctggcggcatcggtgtgctgggaagggagtgcgcaggcccaccccggcgtgctgcctgggagtccacgttctcgaaaatgcagggtgaccctg

SEQ ID NO: 357084 - DNA, 122 bp, Homo sapiens
gtcgcaaaggtgaaattctttcttcccggtcctctgagtttctttgtaaaggaatctcagcgctgcagtgccgcggcacccggagctcttctccgcgtcgctcaatcaagcacctcggagtg

SEQ ID NO: 357085 - DNA, 122 bp, Homo sapiens
tgaaactgaaggtacaagtttaaaccttagaccggattgagagcttaccttcctgtttgtcgcgctttcctctgattgatccccacccttcgcctattttacatatacccaccctttcctaa

SEQ ID NO: 357086 - DNA, 122 bp, Homo sapiens
aggtgggggacttttccgcttagcttccctaagggttgctacgcgacagctctcgggctacgtcagggtaaagaggtttgtatggccacacctcgcaccgaccaactacccccgaaacaccc

SEQ ID NO: 357087 - DNA, 122 bp, Homo sapiens
ttactgtcatttatggagagactgatggttctcttgagatattaatttgggtttggggggcggttagggaaagaacatgttgctaatgtgtgctagtcaattcatttatattttctatgctt

SEQ ID NO: 357088 - DNA, 122 bp, Homo sapiens
atcaacagggtcttgcaagacacctacctcaggagcagccattactggttctttaggcaacgcagagttaacctcagacaggggtgaaaagatttttctattggcaaataaactcatcagaa

SEQ ID NO: 357089 - DNA, 122 bp, Homo sapiens
cgggggggctcgcggggggctcgcgggggggctcgcggggggctcgcggggggctcgaggcgtcccatgtgggcagccgttgggacctgccaagcactgcgcctagtgatctccttcgggtt

SEQ ID NO: 357090 - DNA, 122 bp, Homo sapiens
tcctccctttcgcgagccgggaagctacagagtaacaacccgagagagtgacaacccggacgcgacgagacggacccagagccgcgccagggccacaggctccgccccgcgcagcctcacct

SEQ ID NO: 357091 - DNA, 122 bp, Homo sapiens
cttcttcttctggtttttagtgtttcttgtgggagggttaatctggtcccttttagtctacgttagccagtagtgggagtctcattagcattaattattaataattactctcctcacacata

SEQ ID NO: 357092 - DNA, 122 bp, Homo sapiens
gcagtagaggaaagtggtggtacaagtgccatgattgattagcaatgtctgcactggatacggaaaaaagaaggtgcttgcaggtttacagtgtatatgtgggctattgaagagccctctga

SEQ ID NO: 357093 - DNA, 122 bp, Homo sapiens
tggccccttgagctgggcaggcagccgctggccaaagcagccgcctccattggtccctcacgtagcccacgtcctgcctgctgggtggcccttatcaccgggtacgtgccagagttccacat

SEQ ID NO: 357094 - DNA, 122 bp, Homo sapiens
ctgtgtccgattcatctattttctgccttgttccttcaaacggaaacctaacaaagaccacgggcagccaagggccgcagccggggacccaaccctggtcaccaagcccgcggagtggccgc

SEQ ID NO: 357095 - DNA, 122 bp, Homo sapiens
agctggaaaccgcaataagctgcgaagcgcgtcggttccgagcctctgatccctgcaccccggggtcacactgacttaccaaatttggctgatcacagaggaaaagtgaaaaagatccaggt

SEQ ID NO: 357096 - DNA, 122 bp, Homo sapiens
acaaaggccggtggagatctgaacagaaataacaccttatttctgtattgtcactgttcacgagactatctggcttggaactgttggtcatcagttggcaaaggactccctctcctggatta

SEQ ID NO: 357097 - DNA, 122 bp, Homo sapiens
cccaggaagagagaggccggaccactgcccaaaagcctgtggcctacagcctgccaggtgcgtctgctcgcagagcaggtctgcgcagcaccgagcggtcagcaggggcaatgctgggcact

SEQ ID NO: 357098 - DNA, 122 bp, Homo sapiens
gaagccaccgaggaggggcggggaggtgggacgcctgcaggtctcggcgctcggaaaccgcggagaggaagcatcgctaggcgccccaccctcacagcgctcaaacctgacgccggatttcc

SEQ ID NO: 357099 - DNA, 122 bp, Homo sapiens
ctgaggctgggtaatttataaagaaaagaggcttgttgagcttccacaggctgagaagttcgagggtatggtcctggcttttggcaggagcttttgtgtcttgtcataacatggcagggaag

SEQ ID NO: 357100 - DNA, 122 bp, Homo sapiens
cctgaccttaagggcccggccttggcctctccagtgaggacaacagagcatgaggctagccgggagctcgggtagcagcgaagcctccctgcctcccccagcgaggcgcagccactctgatg

SEQ ID NO: 357101 - DNA, 122 bp, Homo sapiens
ccatcaggtgtggatcttatctgtccttcttaacttacaacagttgttgcaaggatttaacgaggtaacatttactactattttgtgagatagtgaagtaacagaagaatttgctcttgagc

SEQ ID NO: 357102 - DNA, 122 bp, Homo sapiens
caatcatagccgctgtacggaacgtttctccccacatgcttgttgttaaggaagtagtctcgttttctcggcagaacttgagggggaccactccctgccagctgaaccaggaggtccaaaac

SEQ ID NO: 357103 - DNA, 122 bp, Homo sapiens
accctgtgcaacctcacagggccgggccttcaacgtcagcactatggctctctcttctgtcgctttctctccttcaccacgcagtctgtgaacagcactttctacactcctcgccggcaagc

SEQ ID NO: 357104 - DNA, 122 bp, Homo sapiens
ttaacacaaggcagcctgaacaataccactcttggatgggcagcctaagaaacagattttcgcaggtgtttcctctgtgctgcaaacctaaatagccccctacattcaatcacatcgatgcc

SEQ ID NO: 357105 - DNA, 122 bp, Homo sapiens
ggccaccgcgcccctcgcggctcgcaggcctggctggacgccgcaggcctggctggatgccgcagcccttcacagagagcaggctcctccgcgcacgactgcagccccagtcgtttgcagtt

SEQ ID NO: 357106 - DNA, 122 bp, Homo sapiens
gagtttccccgcgagggcgggcgggaggagtcccaggcgggaatgtgatccccagggggccggggagggccctggggaggagcctggcctggggaagccggacttccgtgacacaacagaca

SEQ ID NO: 357107 - DNA, 122 bp, Homo sapiens
ttttacctgtgatttaaacaagaagataaacatttccgtgtatcagaaacagaaccaatacgcaaaatggtgatcaggaacaaagccacctaggtcctggattctgtatgtggcagcaggaa

SEQ ID NO: 357108 - DNA, 122 bp, Homo sapiens
agacaaggatgggaccgtgtaagaactactactgggtttcagccatgtctctggcagcctcgtagcctggagactaaagtcgctgagtttggaatcgcacagtcctggtctggaatcctaac

SEQ ID NO: 357109 - DNA, 122 bp, Homo sapiens
cgaactcctgggctcaagcagtctgcctgctttggcctcccgaagtgctgggattgcaggcgtcagccactacacctggcccctgcagagtctttatcaaacagaagtgaatattaggagga

SEQ ID NO: 357110 - DNA, 122 bp, Homo sapiens
agagcagtggccgtgagactgggctcctaagacagccgagggacctgctcccctgcctagcgcctggggactcagcatccactgcgagaaccgctcagagctgaggcagataaaaatccaga

SEQ ID NO: 357111 - DNA, 122 bp, Homo sapiens
gcccaggctccctcccggccactaccttttccgaccccgagcggtcttggcggtaagctccgagccttttgcgtagagtgtctgggccaactgccctgtcagcggcaggaaagaactcggcc

SEQ ID NO: 357112 - DNA, 122 bp, Homo sapiens
cgtcgcgccgctgacctagctgtcagacatcgccacgaggagttggcaggctcgggaggccgaaacgctgtgctcacctcgagcactgccaggctgctggagaggctttccggggcacagaa

SEQ ID NO: 357113 - DNA, 122 bp, Homo sapiens
cccctgggccctgaaccacacatgacccggtgcccctggggtggcaaactcgggtgccaacgactgctcccaaaacggcctttcggcttcagcctggacagagaagctgccggtccaggggc

SEQ ID NO: 357114 - DNA, 122 bp, Homo sapiens
tccccacagcccttctccgagttggcagggctctcagggacccctgagggcctggtggtccgctgcattcagcgcctggctgagatgtgtcgctcactgcggggggcagcccgcctggtagg

SEQ ID NO: 357115 - DNA, 122 bp, Homo sapiens
ttaaaagcaacgtctacactgacgacgagaagcagcgccggccacagctctctcccctggcgcagccccactcccgcctctgcagcccgccattcattcagggcccggtcacccagagtcac

SEQ ID NO: 357116 - DNA, 122 bp, Homo sapiens
gtaccgcgtcctggttaccttggggaccccagtcctcattctcccggctttggccagatgcgcaaaaagggccgctggggcgatgccgcgcgccccctcgcctttgttccagcccgagggcg

SEQ ID NO: 357117 - DNA, 122 bp, Homo sapiens
aaataccgggggcgaggttctggctggttgtgccgttgcgagctgcagcggtgatcgccgcggcaggcccagaagtgtatcctgactcgtaaattgacgaagccactggtgctgcaagtgtt

SEQ ID NO: 357118 - DNA, 122 bp, Homo sapiens
ctgggagtgtgggaaaggacgcagaccaggcaatgttttctgattagatgggcagggccccgcccgcatggagcagcagaggcagccagctgtaggtccagggggcaggaatgttcacaaac

SEQ ID NO: 357119 - DNA, 122 bp, Homo sapiens
gactggagtctgcactagttcgggcctgcacagtaggtccagccaggagccagagatactcgggcggggcagagcataatggacccctggccccaagagaacttcagaaactaggcacctct

SEQ ID NO: 357120 - DNA, 122 bp, Homo sapiens
gaagtatccagtttattgtataaacagcactcagacttgaatgaaggcaacaagcatgatcgttttctcccttcagaaatccttttgggagataacagttttagggctaattgagtataaca

SEQ ID NO: 357121 - DNA, 122 bp, Homo sapiens
aatgtccgtcaaaaggtgagggcaaaccgaatgtccgtcagcagacaaatggatcgatagcgcctggtgcagtcacccccttatctgtggcttcgcgccacagtttcagtcacgcccgctca

SEQ ID NO: 357122 - DNA, 122 bp, Homo sapiens
aggggtcctacttctcctgccccatggcaggtactcctaaggccgagtctgagcagttggcgtcctggaccccatacccacccttgtactctaccggtatggcaggacccccacttcaggca

SEQ ID NO: 357123 - DNA, 122 bp, Homo sapiens
ttgagggtccctcttggctcccggggtggctagtgctttgattggcagagcacagaaatccggcggcggggggccacggaaagactcgggcccagggaccacggagggggcacctggcgcgg

SEQ ID NO: 357124 - DNA, 122 bp, Homo sapiens
tttcttcagccaagctgaactaacctaactgcagttcaaaactgaagtttggtgcctcatcggcaccatgttctaacaaactaagctaaaaacaatggcttatggacatactgagaatgcgg

SEQ ID NO: 357125 - DNA, 122 bp, Homo sapiens
gctggttggctggttctattaaaatacatcaaaacatattctaacgattccatgtcatcccggcgactctgctcaatactaagatgtgcatggctagcatacagggcagtgccagtgaggtt

SEQ ID NO: 357126 - DNA, 122 bp, Homo sapiens
ggagccttctttgtggtgagaacgctggagtgaagatttagggaggtgtgtggggtcttccgggaagctcctatacctgatcagttttccgcaaaaggggcggaaccacgtgactctggaag

SEQ ID NO: 357127 - DNA, 122 bp, Homo sapiens
gttcctccccgtgctaaatcaggtcaatgagctgatttgtgtcaaataaattagcccagccggctgctaagctgctccaagcctatctgtcttgggcttccaggttggcatttagcaggctg

SEQ ID NO: 357128 - DNA, 122 bp, Homo sapiens
acctgaaagaatccccagagtcagagctgatcataactgctggacctaccccccgccggccgtcccagtcctcccaaagtaggctgcattctgttaccacttcgccggggctctgcctgaag

SEQ ID NO: 357129 - DNA, 122 bp, Homo sapiens
tgccccttagtgactgagaggggtgagctcctgccgcctccagcgagagctccgcatagacgtgtgggcctgtgggccccgccctgtggagactgtggcctcctcccagtgggcggaggtgg

SEQ ID NO: 357130 - DNA, 122 bp, Homo sapiens
ccacagcactctgaaaagttgtccatttcaaaataaatgtaattgcctgtctctttattccggcttaccagtttgaccctcagcacctacccatagtccccaaggtccagggtgtgcagctc

SEQ ID NO: 357131 - DNA, 122 bp, Homo sapiens
ggagcattcaatcacggactctcctgaaacctcactaatatgtgttcatttctgtaggcgcgaaatcagacccgggttcattccactggccagaggcagtcttgggaggatttgtgttctgg

SEQ ID NO: 357132 - DNA, 122 bp, Homo sapiens
cgcgcccgctctggcctccggggaaagcgggcggccgggagaagtcgcgagggactacttcgcctccttctctcgcgggcgcccccggttcgggcagcggctgcggcggcggaaggagcggg

SEQ ID NO: 357133 - DNA, 122 bp, Homo sapiens
aggcgaagctgcagtccttgctgttagcgcagtcctggcctgtaaagggcttagttggggcgaatacgctttgtccggccccatagccgccgtactggggcaggtaggtgttggcaggcggg

SEQ ID NO: 357134 - DNA, 122 bp, Homo sapiens
tggcatggcactgctgagcacagggagcctcaaggtcagtgcctggctcctggtatcctccgtggtccccaggacacccccacacagaggtcccagaacccccaaagctggcacaagagccc

SEQ ID NO: 357135 - DNA, 122 bp, Homo sapiens
taggtgcaaactaggagtaacctatgtggatgtcaagatccaagcttcactaacctagtgcgggcatctccagggcatggagaatgccttggtaagagagtaaagagcaagattggtgcttt

SEQ ID NO: 357136 - DNA, 122 bp, Homo sapiens
ctcccaagagtggtatataaaacctccggtactttgtttactgaggcaaactagtggtagcgtttctacagttgcagatctgtatgtgctaggattggctcagcagggtgctttacccccag

SEQ ID NO: 357137 - DNA, 122 bp, Homo sapiens
gttgggaataggtaagggacacaagtcaagggggatgctagattcgtcccctctggtctccgtagagggagctataaaaggttcgtccacaagcagaaacccctctgtggcgcctcaacgtt

SEQ ID NO: 357138 - DNA, 122 bp, Homo sapiens
ctcgttagtatagtggtgagtatccccgcctgtcacgcgggagaccggggttcgattccccgacggggaggcacagtaattgttttttgtttttagctgtaagtaattcaaggtttaaacag

SEQ ID NO: 357139 - DNA, 122 bp, Homo sapiens
gcgaaaagacgcaaaacagcgcaaagggtgggactataaggagctcccttccccctcccccgcaggttaggttgagagcgcacggagaggcctatccggtttctagggccgaggcgaagcct

SEQ ID NO: 357140 - DNA, 122 bp, Homo sapiens
gcccccaaatccttcccttctagccctattcactgcagtatttatagcccaaatgtgaaacgtataattattctccttctctgcctttcttttcttgaaataaagacttagtccacccttct

SEQ ID NO: 357141 - DNA, 122 bp, Homo sapiens
aaatatggactcattttccactccaccttcattggccgagcagctgccaagaacaaaggccgcatctcccgatacctggcaaacaaatgcagtattgcctcacgaatcgattgcttctctgg

SEQ ID NO: 357142 - DNA, 122 bp, Homo sapiens
actcttcttcactcagcccagcatgtgatcacatcttctgtcactcaggtcctgagggggcgggaccttaagaattatccaatcagggacgctgggctggaaacgtccaatcaggcaagcag

SEQ ID NO: 357143 - DNA, 122 bp, Homo sapiens
caccgactctaaaacaccaaaaacaaagacccaactagctccggaagcccgagatgtaaccgtagtcatctgaccctcccgtccggactctgattgggctttggagatacgcgtccctcccg

SEQ ID NO: 357144 - DNA, 122 bp, Homo sapiens
gggcacgagcgacaaaaggtcgtgaagcgggtgggaaaccgagcactggaatcatggagccgaaggactctgggcgagcagaactggaaccttcggattatttacactcttattcaggtctt

SEQ ID NO: 357145 - DNA, 122 bp, Homo sapiens
tttgtttgtttgtttgttttttactcgtcacagaaaaggttcaaagagtaagataagcaacgtctcataatgctgtagtctaatggacaagggccctagccatctgtgcctggatgactctt

SEQ ID NO: 357146 - DNA, 122 bp, Homo sapiens
aagaagcggggagctgaggggagaggtggaaccagcagagaaacgggccgggcaggagcccgcaccagcccggcttgggacaccgcagccgctcctgccctctgctggctggaaggcgcact

SEQ ID NO: 357147 - DNA, 122 bp, Homo sapiens
ttggttcaaatcgccctcacttctgagccatagaatactttggaagaagaaatacgtggccgagttaaacaaaatttgggtcacttgaaagagacctgacttgttattataaaggaaaagat

SEQ ID NO: 357148 - DNA, 122 bp, Homo sapiens
aggtgtggcgctcgcctgtgctggcggggtggcagccggggcgtggcaccctcggagtctcgactctgcccacttctcaggcagaaaactgaggtggtcccatggccagagctaagaaaggc

SEQ ID NO: 357149 - DNA, 122 bp, Homo sapiens
ggtgggatggcagaactggttgagccagattacaggtctgggtggtgtcagctgctccatcgagttcagggtctgaaaagtatctcaggcactgatcttaggtttcacaatagtgatgttat

SEQ ID NO: 357150 - DNA, 122 bp, Homo sapiens
tggtgagttctggggactccggagccccagcatctagctccccgctgtctcagatcccaccgagaagtctgggttcccagcaacctccaacccaggaggtcaggctttcagttcctcctctc

SEQ ID NO: 357151 - DNA, 122 bp, Homo sapiens
tgttcttcccttaaaatgctcgtgtcatattctaaagttctaagccttcctgtagcgatacggggatgactgcttaagtatatatgttggtgtcttacacagtgggtcctcagcaaatatta

SEQ ID NO: 357152 - DNA, 122 bp, Homo sapiens
tcgccaaatgaggtttaatatttaatctcaaatactaaaatgactatatccacagccaggcgtggtggctcacacctgtaatcccagcactttgggaggccaaggtgggcagatcaccagag

SEQ ID NO: 357153 - DNA, 122 bp, Homo sapiens
attaggcggtcaagaagcagatcgagacggcggtcacattctaagtctaggagtcggcgacgatccaaaagcccaaggcggagaagatctcattccagagaaagaggtagaaggtcaaggag

SEQ ID NO: 357154 - DNA, 122 bp, Homo sapiens
gccggctccccagaaggccgcaatttgaatgggcgccccgccttctgattggctgctgggcgtcgcgtcgggtgccgcgcctttgcttccacccgccccccggaagtgccggtggttgggct

SEQ ID NO: 357155 - DNA, 122 bp, Homo sapiens
gactggcagagctacggacaggtgggagcagtcagacagcctgagagagggagaccagaacgcaaagagagcgagagcattaagtaggcagggagaggcacacagaaagatagacagcaaca

SEQ ID NO: 357156 - DNA, 122 bp, Homo sapiens
ccggcccggcagggagtcgctagggggcgggcgcgggcttggagccctcttaggcgctcccgtgggggcccaacgtcaggcggccggttagctcagttggttagagcgtggtgctaataacg

SEQ ID NO: 357157 - DNA, 122 bp, Homo sapiens
tggaggcctactccccaaaacatcaccgtggtgcatgatgaacatttctgtaggtgatgacgtggagtttttgttttacttcattctaatacatgtccctgcttcaagtgggtaaaattata

SEQ ID NO: 357158 - DNA, 122 bp, Homo sapiens
cccacgtctgccctgggtcctttcactgtgactgcccacgtctgccctgggtcctttgtccggctccgtggattggtttgtaatatcccagcagagtgcagggggctccagggcccgcaagg

SEQ ID NO: 357159 - DNA, 122 bp, Homo sapiens
cgttgccaaggcgactggaaccgcggcccgaggtaactggagggcacggcgggggcggggcgctcatcccaggcggcttctgattggcctcggccgcctcgtgcgtcacagccccgcccctg

SEQ ID NO: 357160 - DNA, 122 bp, Homo sapiens
taccaggtgttccaggtagaaaatctggaacctatacaaagaggactgtgttttcagtcccgggagcccttcctctcataggagagaaatagaggtaaccaactgaactagaaaattcctct

SEQ ID NO: 357161 - DNA, 122 bp, Homo sapiens
ctccacccagggggaaagtccagcgaaaggcggcagcagatcttagggagcaactcccggcgtcagagaggcggtactggcagccggttatggaagaatccggaaccaaggcactgggcgcg

SEQ ID NO: 357162 - DNA, 122 bp, Homo sapiens
caggcatgagcctctgtgcccagccacatttttaatttttattttggcttgtcactgactcgaagctcaaatcactcttgattacgataaatgaatgcccagctaagcagatgggtgggcag

SEQ ID NO: 357163 - DNA, 122 bp, Homo sapiens
tgtgaagcacctcttctgagccaggccgagcccctggccgacttgggagcctcaggcccacgcccacccttcgaggaaggtgtcacctggaccccttcattccacggaggaagctgaggcca

SEQ ID NO: 357164 - DNA, 122 bp, Homo sapiens
gaggagacaaccgtgagcgtcccgcgccgaagcgaagcgctccagaaggacgcgcttttgcgggctgcaaggtttcctgcaggtaagaagagccttcgcatgttcgggctctggagagaacc

SEQ ID NO: 357165 - DNA, 122 bp, Homo sapiens
cgggcgctgagaaaccagccgggttgtgggaggctgttgaccttgaattatgccgagcgacgcctacaaacccaccgctcaggccttcaccaggattgttcccattccacttccttgcccag

SEQ ID NO: 357166 - DNA, 122 bp, Homo sapiens
cacacccccaccctgtgtggccagtggccaccgtatccagggtcctcgtgggttcacagtcgagtaggggagacagaagccatgggggacatgcgagcctgcccttccggagaatggctaga

SEQ ID NO: 357167 - DNA, 122 bp, Homo sapiens
aaattattctggtactcatgtctcttttctgagggctgtggggatacagtgactcttcaccgtgttgcccaggctagggtgcagtggcgtgatcacagctcactgcagcctcgatctcccag

SEQ ID NO: 357168 - DNA, 122 bp, Homo sapiens
cctggtgctgctcctgagggaatgcttccgagacctgagctggctggcactcatccatagcgtccgtggggaggcggggctgctggtgacgagtatcgtcccgaagaccccgtttttctggg

SEQ ID NO: 357169 - DNA, 122 bp, Homo sapiens
ggtatgaagagcatgtgtgtgcactgttttgaaatgcagaaatatagattagtgattaagcgcttgagcctcactgtcagatctgtattcaaatcccagcaaacccttcctcttactagctg

SEQ ID NO: 357170 - DNA, 122 bp, Homo sapiens
gcataggaaacaggtgcccccatcaggcagtggagttctgggaagacctcttggaggaggcgaccacagggtgaggtggagaagattgtggaaggacattccgagttctatagaaagttaca

SEQ ID NO: 357171 - DNA, 122 bp, Homo sapiens
tacactctctgccccagcccccaccaacacggcttcaacctgagccacactgccctctagcgatgtcatccacaacacccctggcaggtgccctgcatcctcaggttctctctgcccagtgt

SEQ ID NO: 357172 - DNA, 122 bp, Homo sapiens
agggggcgttgattcttgaccaatcctttcagtccgttgggtggtgaccagccaatgggccggatggataggacgctcctcccggagagtagtgagacccctggtgcggggcgattggcggc

SEQ ID NO: 357173 - DNA, 122 bp, Homo sapiens
gctccacctcttgcagggtccagggttgctcctgcttttgcttttgctgtactatcatttcgaatatcctctctttcttttcatgtaactaacaaaacactctggcctctaaacccagacac

SEQ ID NO: 357174 - DNA, 122 bp, Homo sapiens
agagaaggcagctgaggcccagagggatttaaacagggcctgaccaaggaaggcctgcagcgggaggtaaggaggcaggacccactggcgagaaggtgtttttcccccttgacgtttctgtc

SEQ ID NO: 357175 - DNA, 122 bp, Homo sapiens
agttttaggcacactgtgctcgttatcagattgcctaggggcccgactgaagtattcctccgcccagcgcctcgggcaaacgcgggatctcccagggaagctcggagggggacagggagctg

SEQ ID NO: 357176 - DNA, 122 bp, Homo sapiens
aacaatgagtcagctggcccagcctttgaagaatttcttcaactattgggagagcgagttcggctcaaaggatttgagaagtatcgagcacagcttgataccaaaagtaagaaatacttaca

SEQ ID NO: 357177 - DNA, 122 bp, Homo sapiens
tttaaaaaaagaactggggacttgcatctccgtccttcctgcctgtcgcctggcagaccccgtcgctgaaggcagcagttggatttgtctcgtttagtcgctgcctttctcctctttctgaa

SEQ ID NO: 357178 - DNA, 122 bp, Homo sapiens
aatatcaatgtttatacagtctattattttttaaaaactacatgtgcatcttcagttattcgcatgtaaaaagtttaattttaaatacagcaggaagtacaaacccgatctgtcagctgaag

SEQ ID NO: 357179 - DNA, 122 bp, Homo sapiens
cctgtcccttcctccagatccgtctggttttttacaccgtttgttaataaagcctgaaaccgctgtgtgcctgtctcttctctgatggctttcccagtctgtctccggacacccccgcccat

SEQ ID NO: 357180 - DNA, 122 bp, Homo sapiens
cttctgggaggccaggctctcagttcaagccctatactcctctggctctgcttacatacccgggcagccctccctcctcgtcccacccctgcctatctagtcctcccacagctgagcatctt

SEQ ID NO: 357181 - DNA, 122 bp, Homo sapiens
cctggtgacttagggtcgtgactgcaccccgggctcgcctctctcggctctggctggccacgaccttccttttgaaggtgcctggagggtgactccgtgtttcttgtttcctcgtgggggat

SEQ ID NO: 357182 - DNA, 122 bp, Homo sapiens
tttttgtttatgttcaaatagaaggtttggattatttcaaagggatttttgcaaacatggcgtctggaagttgtgatgctcataggacagttcttcattggcaaggctctgcaatccattac

SEQ ID NO: 357183 - DNA, 122 bp, Homo sapiens
agggtatcttcaggccgctgtgttctgaaggaacattctggccaaatgttccatattccccgagacttcccagtcttacagttatcatactgctgacattattggagaattagcagtccagg

SEQ ID NO: 357184 - DNA, 122 bp, Homo sapiens
gggctcctcaagtgccgccaaagtgggagcccaggcagaggaggcgccgagagcgagcgacggctatgaggactgccaacccgctgtcacctctcagcaggaaaacaagcttggggctccca

SEQ ID NO: 357185 - DNA, 122 bp, Homo sapiens
cgcatgacgcggtcagggtcgatgactgtgtcccccttctcccagcggatgatgatgggccgctcaccccgtgccgtgcagtttagctccttcgcatggcccttgatggcgatggtggtgtt

SEQ ID NO: 357186 - DNA, 122 bp, Homo sapiens
ggtgacaaacgggaaggtgctcaaccttctcgttagacccagcaattacaccatctgcggcgggcagagctgtcaggaatgtcaaaacctaaccaattaacaagggtggtgcggatttatgc

SEQ ID NO: 357187 - DNA, 122 bp, Homo sapiens
tttttcttttgtgaggcagatctaattatagtcagatatacaattctgtattcattaaaccgtcaccaaagtgataaaaatgacaatgggaaaaaatttagcatggcatagcagaaaataca

SEQ ID NO: 357188 - DNA, 122 bp, Homo sapiens
caccccctctactggtttccaggaacagctgggcccagcctaggttgtactgctgggaagcggctgactcaacccctccctgtggccacagctggaccccggcctgccccctccagcgttca

SEQ ID NO: 357189 - DNA, 122 bp, Homo sapiens
cacagcttccccttccgtgttgccgagagctggagtctgccgggattaggggtgtttgttcgcctgtgatgtgggccagctcataaatctcccatcacatctgggctgtgtcccatcccatg

SEQ ID NO: 357190 - DNA, 122 bp, Homo sapiens
tataaaagctactaaatgaccatgattatttatcttttcaagaaaagaccactgtgcaggcggtagaacaatcaatacaatatcaccactttttgcttctaataaactactctggcacaaaa

SEQ ID NO: 357191 - DNA, 122 bp, Homo sapiens
gtgcttacagcagttcttagcgaaggggaagctatggctaccgatagaggtcgatttccccggaaggaatattcaagttttcgtgtgtgtgctttccaggaaaatagttcacgtgctaaaag

SEQ ID NO: 357192 - DNA, 122 bp, Homo sapiens
acgcagcccagtcaccagggccatgcggctccacggcttctacgcttgggcactgaggaccgaggggttcaatcaggtcccagctccagtccaaccttggaagccaagtgttgggaagggag

SEQ ID NO: 357193 - DNA, 122 bp, Homo sapiens
tcactaaaggcaatgcattttttcacataagaataaattttggccgggtgcagtggctcacgcctgtaatctcagcactttgggaggctgaggcgggtgaggtcaggagttcaagaccaacc

SEQ ID NO: 357194 - DNA, 122 bp, Homo sapiens
tctaagttgagatggaaagtctgagacccaaaaagaaaggttcatggacttacccagggccggggcagcaccaggacacagactggaatcttctaacaccaaggccgctgcccttccaatgc

SEQ ID NO: 357195 - DNA, 122 bp, Homo sapiens
ggccggagatagtcacgcagatgccagtggagtccaccgcaacttagaatgtagtgccgacggctccagaactgagtggccgaatcgttgcaaggactctcccggagggttgaactttgggt

SEQ ID NO: 357196 - DNA, 122 bp, Homo sapiens
aaaggttgaattggggccgagccgagacagctgaggtccggcctcgagtggggtgaccctcggacacttgccttgcctagtgtgggatctcatctccgaacgccaggccagggtagattgcg

SEQ ID NO: 357197 - DNA, 122 bp, Homo sapiens
gccaccgcagtggggatgggggtgggcgggcgcttgtgtgcccgggggcccgggggcccccgtggcgggggggctaggggagaggagcaggtgacgtcacccggggacctggggcccccagg

SEQ ID NO: 357198 - DNA, 122 bp, Homo sapiens
gcctgttttggagctaaaagcataaaatgaatcctccctgtagctccattgccttttcctcgtgaaggattccctgctaaatgttctaagagttactgtacatagaatcaagagagcagttt

SEQ ID NO: 357199 - DNA, 122 bp, Homo sapiens
aaagcaaacaaagccgaaaacaaccctaaccattttggctgcgcaagggctagagctctccggtgcgcctggggcagggcggtcgccgcacagtctgctccggggccgtcaggagctgtatc

SEQ ID NO: 357200 - DNA, 122 bp, Homo sapiens
ctctttggaagctggggacctaatctcgggatatctgcgaaatagggaggagaagaaagacggctcagagggagggaggattccctctgggacctgaactggtccactcccttctgaccctc

SEQ ID NO: 357201 - DNA, 122 bp, Homo sapiens
ttcatgagtttcggcaaatgtattcacccgtggaaccgccaccccagtgagggtacagcacgtttccaacaccccaggaagtcccaggacacttcccaattatctgctcttccctaggcaat

SEQ ID NO: 357202 - DNA, 122 bp, Homo sapiens
gttaggatattgttgttttgcagtccccgaggaagccatgaaccgaggcagctaatcagccgctgcacacatcccagagaaagcaggaccccgcgtgcctccagatgaaagccagcagcagg

SEQ ID NO: 357203 - DNA, 122 bp, Homo sapiens
ctgcgggccgggcccgtggtcacccggcctggacggagagaggaggtgagaggggcgctgcgttggcctccatcgactgtcggcctttttcagaacgcctacttcgggtcaagcttgtgtta

SEQ ID NO: 357204 - DNA, 122 bp, Homo sapiens
aagctgagttaagagaaaaattctgtccatcagaggccatcttcctctcatctgatatgacgtgttcctccagcagggagggagggagagcgggtgcccttggggaatcagccatccttagt

SEQ ID NO: 357205 - DNA, 122 bp, Homo sapiens
ggcatggacagctgggccatgggaccctggaggcagagctggagccacggctgttggaggcgttgcagggcctagtcatggctgaggtggccgcggggggctggcattctgtgtgtgtgagt

SEQ ID NO: 357206 - DNA, 122 bp, Homo sapiens
aagctgacctattccgccgggatatggaggcccatgtgcttccctgacagccaaccattccgtggaggagggagagaggccctagcgtccgcagccggctccgaagaggaggtagagccatg

SEQ ID NO: 357207 - DNA, 122 bp, Homo sapiens
ctcgccctgtcagggctgaatggggctgagatagagggctctgccctgtctggggccccccgggaaaccccctcagagatggccacaaactcactgcccaatggcccggcccttgcagacgg

SEQ ID NO: 357208 - DNA, 122 bp, Homo sapiens
cttcccgcccctggactgtcgtagctcctcccccagaccaattgttttaagagaggggggcggatacatccaatcagcacgacacaggtctcttgattgacgttcgggtcctcgcgctggcg

SEQ ID NO: 357209 - DNA, 122 bp, Homo sapiens
cacccatcaccaaggggaagtctatagtccctgaccacagctctttggtttcagctcccgcggtctctcagctggtcaactctgaggaagctgggctggggggtccctgagcactctctgtt

SEQ ID NO: 357210 - DNA, 122 bp, Homo sapiens
tgcggccgcggggaaagggtgcggggagaccaacctgggcacggccggaggcagcggatccgggactggcacggcctaggcgccgcggctcggcgctcccagcagcggctgcctcggcccag

SEQ ID NO: 357211 - DNA, 122 bp, Homo sapiens
gccagggcctcgcgtcctccctgtcctcctgggcaggctccagtcccagccctggccacgcgggcacacccggcatcgctcaggcccccggagcaggccaagaccccacccggcttggagag

SEQ ID NO: 357212 - DNA, 122 bp, Homo sapiens
tgctcaggcagggtgcaggggctccatccttccacccagggcctcctccccagaggggcacgaaagctacagtcgttctctggtgcagccactgaatggggtgggaagatgggatttagttc

SEQ ID NO: 357213 - DNA, 122 bp, Homo sapiens
tgctgtgtagggacagaagatgacgaagtgaattcctgcagcccgccgagctgttgctgtcgccctgggagcagggcacgctcttgaccatccactcgcagatctgcgacagcgcgagccgc

SEQ ID NO: 357214 - DNA, 122 bp, Homo sapiens
ctaaataggtgcacagcgtttagaactttacttgatccaacatagcagcctgcctagagccggagccccgcccactccggagtcccgcctggacgccgacgcagcgagggcgctatggctgg

SEQ ID NO: 357215 - DNA, 122 bp, Homo sapiens
cctgtcttttaactatcccataaactatcccaaaaatcagatcactaaaagttcttgacccgaaaattctgcaccaccatgtgctcttgaggaatgtttagtaacggattgaaagcataact

SEQ ID NO: 357216 - DNA, 122 bp, Homo sapiens
gagatccaaggtgagagcaggccataccttggctgttcatctcactccttccccaggagacgctggagcccaggaatgagtccctttgctcagcagccctgtgcagggttcctagcatcctt

SEQ ID NO: 357217 - DNA, 122 bp, Homo sapiens
tcagcaggtctatactgggcgcccgctgcgtgccaggtactgccaccggctctctcctcacggtggaataacttaacagagaagacagacatcaatcaaataccctggaaacgtggaaggca

SEQ ID NO: 357218 - DNA, 122 bp, Homo sapiens
cctcatcctttttcttcatacgatagatgagcagtgtgaccaagaaggcagcaaagagggcgcccaccaccccgcccacaatcacagctgtggaagaagagggcacaggtcaaggcccagag

SEQ ID NO: 357219 - DNA, 122 bp, Homo sapiens
agtagtattatcttgagccaaatataaacctacgtaggttgtcctaatgagaggtgacaccgtgctggcagccctcatagccctccctggctgtcggcgcctcctcggccttggcgcccact

SEQ ID NO: 357220 - DNA, 122 bp, Homo sapiens
cgccggcgggggttcatgctgcgggtaatccctgtccatggcgggccccactgcaagcatcgggcggcaggcggggtggggtcctcggccgggcagcaggcggcgggactccaggacccggg

SEQ ID NO: 357221 - DNA, 122 bp, Homo sapiens
acaaaaacggacactagggcctggagcagcaggcccagcgaggccagcactagcagcgggcggcggcccacactgtcgctccaagctcccagcagggtggacgagaagagccccaccaggaa

SEQ ID NO: 357222 - DNA, 122 bp, Homo sapiens
tgggaatccccgaacttcactgcctcccggaggccaaaggcagagttgtggaaaaggccacgatgttgggagtatctgaagtcctcatcaaccctttttgttcttgttgggacagaggagcc

SEQ ID NO: 357223 - DNA, 122 bp, Homo sapiens
ttcaggcgatccacccacctcggcctcccaaagtgctgggattacaggcaggagctactgcgcctggccctaatcttgaagcatcagcctcaagcaaccacctttccaggaaagtgtccctg

SEQ ID NO: 357224 - DNA, 122 bp, Homo sapiens
ggatgacaggcatgagccaccgcgcccggcctgaactcagatttttcaatgctttatcatcgacaaagcacctttgcacgcctgctcgcatcagagggccagcttccctgacatcgagccct

SEQ ID NO: 357225 - DNA, 122 bp, Homo sapiens
caaccacgcgccggctgcaggcgcagggccccacctaccacctgcggagacccacgggcacggactaccactccagccctcctgcaggagcagggatgggggtgcccacagtcaggcgcagg

SEQ ID NO: 357226 - DNA, 122 bp, Homo sapiens
agaaagtgcctctttacctcctgccccttcccttctccttgtggggacatgtggcggggccgggtgtgagaatgagacccgtttcccgagggaaggagggcgcggtgaccggctgttccggc

SEQ ID NO: 357227 - DNA, 122 bp, Homo sapiens
tgcagagggtgtactaggtcccccagcagtgccggcccaccggcggtgcgctccatttctcgcccggccttaactgcctgcccacggggcagggctcaggacctgcagcccgccatgcctga

SEQ ID NO: 357228 - DNA, 122 bp, Homo sapiens
atgatgtctaaatccagggagacccaagcactggaactaaaaccatgcctgttccataatcggagataaagaggcagcgctagaaaccctgacctccctttgctggcaatatggccacatca

SEQ ID NO: 357229 - DNA, 122 bp, Homo sapiens
ttacagctcttaaggcggtgcgtctggagttgttcgttcttcccagtgggttcgtggtctcgctggccgcaagagagaagctgcaaactctcgtggtgttacagctcataaaggcagcacgg

SEQ ID NO: 357230 - DNA, 122 bp, Homo sapiens
tgcaggcagcctcagggctttcacatcagcacgtggctgtgctactggacatcccagtaccgctatcccagctgggacccttccctgagctggggaccatggacaggttttgtttttcttct

SEQ ID NO: 357231 - DNA, 122 bp, Homo sapiens
cagctccgcctggtcccttacggaggcaaaaaactacatttcccacaatcccagggggtgcgggccctggatatacccgcaggtccagaatcgtttccggaccacccaggggccggattccc

SEQ ID NO: 357232 - DNA, 122 bp, Homo sapiens
ccccggtccccagcaggtggtcggggctgtgggagcggcctggctcccctcttggtgagccgaggaccccggggcgctgtcgcggcccgcagccccctcccccgcctcctccgaagtaacca

SEQ ID NO: 357233 - DNA, 122 bp, Homo sapiens
aaggccttcaaaattgaagacccaagaaacaggaaaactgtgtgtttttataaagagttgcgcagaagtgtgatgggaggacaaaagggcatgatctaatggtcatcaactgggtcagggga

SEQ ID NO: 357234 - DNA, 122 bp, Homo sapiens
gctgattcgcaggggccgggaccgagccagggccaactcacctcctgtttgcccttcatccgacacacgtttatgtcgctggggttagatctccaggtcagcttctgcagacagagagagct

SEQ ID NO: 357235 - DNA, 122 bp, Homo sapiens
ttgcgttagtccctaaggcgactcagacagaaacaaagggaaggagagaagccaggcagacggaggagagcagagaagttcttggtgcaccctgaggaggaaagaaagcccttttcctgggg

SEQ ID NO: 357236 - DNA, 122 bp, Homo sapiens
ttgagtgccatctgtattccagttgcgttcagggttttttttttgtctgtttttttgaaacggggtctctctgtcgcccaacctggagtgcagtggcgccatctcgtcacactgcaagcttc

SEQ ID NO: 357237 - DNA, 122 bp, Homo sapiens
ctcggaacccacagcgcaatccctggtccactggaggatggactgttccccccttcaggccggggccaagagtgagctgctaacacggcatccaagaatggcccagctggtaggatccttgc

SEQ ID NO: 357238 - DNA, 122 bp, Homo sapiens
tagaattctcttctgaatctccactgccccagccagatgtcatcctgataatcagacctacgggagatcggaccgtttactttttctttttcttttcttttcttttttttttgagaccgagt

SEQ ID NO: 357239 - DNA, 122 bp, Homo sapiens
gggaactgggttaaagctagttataaaagacaggaactgtgtagaagctggattaattaacgcttagatctctgtgtcctgacagtggggaggttaaaaatagcaaaattctcattctccat

SEQ ID NO: 357240 - DNA, 122 bp, Homo sapiens
tctccaagttgaatcagtaggtccagtcttcctccattgacttccggttcctgcgtgctgcgcccaaaagcgctcggcctgcactcggcggaaaggttgttgtccaagcggcgttccggggc

SEQ ID NO: 357241 - DNA, 122 bp, Homo sapiens
tcttcgaagctctccagccacggctagccccgcgcactgggccctccaggaccgtaccaccgtccgccgtcgcctggaactaccgccgccacattcgaaattttccgcctcgctcctccatt

SEQ ID NO: 357242 - DNA, 122 bp, Homo sapiens
ttccacaatctaaggaaaacacccactctttagctgagccaatgtttctgttccatcctacgaggtagagttttatgatttgattattccagaagagctctgtaattattgtttcagatgta

SEQ ID NO: 357243 - DNA, 122 bp, Homo sapiens
taattttctaaataggaaaggattcaaactcaatgattcaagtgttgaaacaaacaaaaacggaaaacaacactactcagttaacagattattgtgcttttggcttcttgagtaggaggaaa

SEQ ID NO: 357244 - DNA, 122 bp, Homo sapiens
gccaactgtctgactctctcagtctctgactctccacctgtgccatctgtggcatccaatcgtaggaaagggggaacgtggcattaaatcagattttttctccaatccacggggactataga

SEQ ID NO: 357245 - DNA, 122 bp, Homo sapiens
gtaacactcccattggcttcctgttagacaaagaggacacttttctttaccctttgttttcgtttttgcaagcagggagaacttagttcttgtaggagactttcctgacccaactgagctga

SEQ ID NO: 357246 - DNA, 122 bp, Homo sapiens
tggatcccacccatcgcagcgggaggggcgtccatgctgtgtgactgggaccactggacccgacccatcgcagcgggaggggggtccatgctgtgtgactgggaccactggacccgacccat

SEQ ID NO: 357247 - DNA, 122 bp, Homo sapiens
atcaactgcacccattccctagcctctctctgccaaattatccttacaaatcctaggctccgagcttttgggaggcagatttgagaaatgtctcctgtcctgcatggctggcttagcaataa

SEQ ID NO: 357248 - DNA, 122 bp, Homo sapiens
agcaggcgttccacttggggaagcgcgtccattggccctcggcgcccggaaactccagcccgctgcccagctccgcccagcagcccaggagcagcagcgagaggcacagaagaaaacagccc

SEQ ID NO: 357249 - DNA, 122 bp, Homo sapiens
aatcagctgttgcattccccgggaagaacgcgggctcggccggcctgtgctggactctggcgcccccaaatggtcacgtgggtttattacacatcggaagtaaacagcttttactgatgatg

SEQ ID NO: 357250 - DNA, 122 bp, Homo sapiens
tctccgccgtcactggctcggtgtccactttatggagcgcggagtctattaagaccttggcgagtggtggtggtgctccctccgcagtgcctgcgcacagacaaccagaaaccgatcaaccg

SEQ ID NO: 357251 - DNA, 122 bp, Homo sapiens
atttatttacccaataggtagatattgagtccctactatgtcagctaataaaacccaccacgtgctatgcagcagattaaaaacgaggatgtactggcaaataagggcagagaggatctatt

SEQ ID NO: 357252 - DNA, 122 bp, Homo sapiens
tcactccgccgccctccgagtgattcttgttgagcgccatagtctctccaacaggggtcccgagactcaaaacgcaatgagcttgcgcccctcttcgccccgcccctagtggcgtcttctta

SEQ ID NO: 357253 - DNA, 122 bp, Homo sapiens
gcggctctgtgagtccactgcccccttttggcttggaggcagagtgccccgccagagctacgcgttcccagccaggtaatttttgaagccacgtgcaaaggtttaagcatcgtttgccaaag

SEQ ID NO: 357254 - DNA, 122 bp, Homo sapiens
cacgtagtaaactgcaccacttgatgattctgacccatacaaacactcatgaaaccatcccgaccgtcacggcagcgagcactcaccccacgcacacactcatgaaaccatcccaaccgtca

SEQ ID NO: 357255 - DNA, 122 bp, Homo sapiens
tgcaactggagccctcaccggcgagtgcctgacacctcggccttttctcttccggaggggcgctcctcagtgtgtttggggtctccctcgctccacgccctccagggggccgcatgtgcact

SEQ ID NO: 357256 - DNA, 122 bp, Homo sapiens
tgtctgaagagattgagaagctgcgccaagaggtggaccagctgaagggccgaggggggccgtttgtggatggcgtccactccaggtactgcagcgccagaggctgggcatgccaggacggg

SEQ ID NO: 357257 - DNA, 122 bp, Homo sapiens
gctggtatttgtaactatcttcacatcttgtacccacagccagttcctttgggcctgggccggtggacgtgagcgtgggaaggacaagaacccgcggtgccccccaccgcactatcctcggg

SEQ ID NO: 357258 - DNA, 122 bp, Homo sapiens
ccccatccctccctacagagcctcagcagtgacagctacttcccggatgagaagggcggccgtgaagccagcagggaagccagccccacagccaagggccccccagcctcctcacagctccc

SEQ ID NO: 357259 - DNA, 122 bp, Homo sapiens
cttctctcagcgaacatcacttattgtacatgtgaggattcattcaggtgataaaccttacgaatgcaatgtttgtggaaaagccttctctcagagctcatctctcactgtgcatgtgagaa

SEQ ID NO: 357260 - DNA, 122 bp, Homo sapiens
tcctgaatctcctagttttctgttttcagaggactgtctgccaggccttcaacgactgaccgctaagtctttttcaggcaaaccacccacatatctcctaagtaattaaattttcattagtc

SEQ ID NO: 357261 - DNA, 122 bp, Homo sapiens
gtagataggaaagagctggtgtggctttggctgactcttaagtggttttaacacggattgcgtgggggcggggtctggaggcaggggcgcttggattgaagctcatcaaatccctctgatca

SEQ ID NO: 357262 - DNA, 122 bp, Homo sapiens
ccctcagcccagtccccgcccccactccttggctttatgagttcattggctgaagtcacccggagacaatgctgagtgttccacccctgagtcgaagcccagcccagggcagcccagccaga

SEQ ID NO: 357263 - DNA, 122 bp, Homo sapiens
tgaagtactggaagcacccggtcagtcccactgggccactgaaattccagagcggatactcgaaggtgaggcctgtgaggattaaatctgccggcaccttgtctgtaaaaactgtacaaaaa

SEQ ID NO: 357264 - DNA, 122 bp, Homo sapiens
acacacaaactaactcaatctctgctttaagtttctattgtccaatttttctgatttatacgagaattattttcagctttagaaaatcctggtctttggtcattagaagtttattattatgg

SEQ ID NO: 357265 - DNA, 122 bp, Homo sapiens
gctgagccaggacttgagtgcctcgaagttttcaatgatcattttagaaaccatccacagcggccctaaggcccgtcacactcctccgcccgcccaggtcgcggccgctacagccgccgctg

SEQ ID NO: 357266 - DNA, 122 bp, Homo sapiens
acacgcgcgcatacacactcgctctcgcttgtccatctccctcccgggggagccggcgcgcgctcccacctttgccgcacactccggcgagccgagcccgcagcgctccaggattctgcggc

SEQ ID NO: 357267 - DNA, 122 bp, Homo sapiens
actatcattctgaaattaaaacatggtaaggccgtgctcaagggacttgggagcaactggcgattttgactgctagttacacagagcaacgctgcccacgtccctgcttcgtctgatggcca

SEQ ID NO: 357268 - DNA, 122 bp, Homo sapiens
gcgcgaaactcgcgcacacagaaaagaccaatcaaggacgggtcattcccgccccccgcgcgccttttgcgaccgcccactcgacaggttgacaacctagacagctcccccggacttgcctt

SEQ ID NO: 357269 - DNA, 122 bp, Homo sapiens
cctggccgtgctgtgatgtgcatagaggtcacagtcatttccctgaggagttgcagagggcggagtaaaattgtttgccatttgtatatccattggtggtggtccaggtgtctagaaaaaaa

SEQ ID NO: 357270 - DNA, 122 bp, Homo sapiens
agactgtatccttaacccccaaaaagctggtctaaaaggatgggaggccagaccgctgaccgttccccactctcgacagagtccagccgtgtggagcacacgatgctgcaaacttgcatgtc

SEQ ID NO: 357271 - DNA, 122 bp, Homo sapiens
aaatgagaaaataaaggaaatttctcccattcatttatataataagtattgataaagtatcgactccatgcacagcattgggtttcactttcctggctttgctgctctgatattactgaggg

SEQ ID NO: 357272 - DNA, 122 bp, Homo sapiens
taaatagcaggctgagtaaatatttgtgacatgaatcaataagccagtgaacctttgtcccgttatggcaccaagaaacctttccctctctcctggtttggggcctaaatgcttctggaata

SEQ ID NO: 357273 - DNA, 122 bp, Homo sapiens
taaaaagagtcggaagcatcagcgcctagggcccaatcgccactctggaacaggtgtgcgcggcgggtccgcgggctggcgggagctcacacgaactcacgcgcgagctcgcaggccgcggc

SEQ ID NO: 357274 - DNA, 122 bp, Homo sapiens
atttggcaacaggcttgtctgctttctaagcactgttgttttgtttagagacagggtctccgctctgtggcccaggctagagcgcagcggtgcaatcacggctcactgtagcctccacctcc

SEQ ID NO: 357275 - DNA, 122 bp, Homo sapiens
cctgtgctggcctctcaccaactctcttgtccaccttggtgttgctgggcttgtgatctacgttgcaggtgtaggtcttcgtgcccaagctgctggagggcacggtcaccacgctgctgagg

SEQ ID NO: 357276 - DNA, 122 bp, Homo sapiens
ccaccagcttccctcagtttagatggagaggtgcctaccctctgaccagcaaatgtcctccgaggaaacggagaaatgggtcttgagaggctttggaaggggggacaaaatctctagggaga

SEQ ID NO: 357277 - DNA, 122 bp, Homo sapiens
gagtgtatggatgaagtcgtcttcagcacaacagcttattataactttttaaaatcagaacggtttaattgtgcctgtaacagattgaagttggaaatgctgtaatttcctagtggctagta

SEQ ID NO: 357278 - DNA, 122 bp, Homo sapiens
tgtcggtagaggtctaggaagccgcaagagtagtggacgccttgacagctgcccttctcgcgggccccgcggcggcgtgcccgtgtggttgcgtgcgcgcggacggggcggggctgaggagg

SEQ ID NO: 357279 - DNA, 122 bp, Homo sapiens
ttgccactcccctgcacgggtctacacctctgctacaaacgtgtgtccctaagcagcggacgccttttgaaaacaagtcaactgtatcatgctacgatattttttctgatgtttgtgctgtt

SEQ ID NO: 357280 - DNA, 122 bp, Homo sapiens
gggtcagggtgccttcttccatggctttatcggtgccacagcctaggcttagcgaaaccacgaggataaaaataggcccttctgttctccgcaccgtgagctttgtgactgatccgaggcgg

SEQ ID NO: 357281 - DNA, 122 bp, Homo sapiens
ggggctgggtcacctccgcggacaggacgggactagccactgcctgcatctcttcccccacgccctgagccccgcagtgtcccagcagcctagttctggcctgcgggagaccctgtcggaca

SEQ ID NO: 357282 - DNA, 122 bp, Homo sapiens
gaggggcggggactcggcgcagccgccggggcccgggcctctgggaccgtttaccgcacgcgcgtggtcccggcagcgccggcctcctccgctcataccctgggtctcctcctttctttttc

SEQ ID NO: 357283 - DNA, 122 bp, Homo sapiens
aaagagtcaacttttttgtttaatgccatcaatttgcgatggaggagacaggtattagctcggggacctccgcggtccctgctagctattagttccctgcacagctgcaccaaaccctggat

SEQ ID NO: 357284 - DNA, 122 bp, Homo sapiens
tatggtcagaacggcagtggtgcaaaagacaatgatttcaaccaaatatggtttgcctctcgccaaatttttcgcatgtccaataaaaataagttcacaaaaatccagccaagcattacttt

SEQ ID NO: 357285 - DNA, 122 bp, Homo sapiens
ctcagcaagaaagcctgggccacgcgggaggcatttccgggccgggagtggcgggagctgcgagcttcccatggttttgtcgcgtgtgtaaggcgtggggagtgggtgagtttgcgcgtcac

SEQ ID NO: 357286 - DNA, 122 bp, Homo sapiens
tttgccaaggccatgctggtgggagaatcagatccctaaccccagggctcagactggacccgttcagttacatttctaggcactctcggggagccgggggggttggggctgagagactgaga

SEQ ID NO: 357287 - DNA, 122 bp, Homo sapiens
gtgagggtgggctgcccaggctagaaggacattccaggctgcagaagcagcatgtgcaaacgccctgggctgggaaggccccaggcacactcaaggaacagaagggtggctagtgtgggtta

SEQ ID NO: 357288 - DNA, 122 bp, Homo sapiens
atcataaagtttgttttaaagaagaactgcccctctaaaaaaataataaactgtcgagggcggtagccccgtctagaggtttccgactttgctctgtgcccacctgaagcctccccagcccg

SEQ ID NO: 357289 - DNA, 122 bp, Homo sapiens
atcagagagatcccaggccccagggtcttattgccacagtttctgcagtccattggggggcggaagtggccaggggcatgtgggccggggtccaggagcagactccagcctgagtcccctgt

SEQ ID NO: 357290 - DNA, 122 bp, Homo sapiens
tgttgacttaaggactaactggagcaagccctgcttgttaaaagctgaaaatcttgagctcgtaaacaagtttgaagtcaagtgaacttttaagcagagtgctatgggttgaattatgttcc

SEQ ID NO: 357291 - DNA, 122 bp, Homo sapiens
tcctctgcgctgagggcggtatccaggccacgagcttcctaggcttttggggtccgcctgcgtgggtcgcgcagaaggcacaagtgagctgaccaccattccctcttttcttgtcacttggg

SEQ ID NO: 357292 - DNA, 122 bp, Homo sapiens
tttactcctacagctcaaaagaaataactgtacaatgaaatttaattttcttaaaacacacgcctggctgggtgcggtggctcatatctgtaaccccagcactttgagaggcagaggcaggt

SEQ ID NO: 357293 - DNA, 122 bp, Homo sapiens
cttcagctgctaagatccaagaaaatgcctcactgccttaaccttaactgttcttcctggcgctaaaaagagctgtattttttaaagtgctggggcaaacaaagcaaccccaaaagagttga

SEQ ID NO: 357294 - DNA, 122 bp, Homo sapiens
gctgcgaggagaggcgcgttggcctcctgggccacagctgcctccctgcccagggaatcccgggagatgcgaatatcgaagaactctgaaaatcaaatcgcatttctaaacgccaggtggag

SEQ ID NO: 357295 - DNA, 122 bp, Homo sapiens
cggcgcttgctgctgcagccaccttttcctgcagtgctcggggtgacagccggtccggagcgcgggagggtaggggagcgggagaggagggaaggtgcgtccacccacctgtccccagctgg

SEQ ID NO: 357296 - DNA, 122 bp, Homo sapiens
ctgcctatctgcctccccgcctcccacaacatacaaaccagctcccaaccagctccatctcgttaagggaaaatccaaaattgtcatctgcttggcaaaggggggtatgttggatttggtta

SEQ ID NO: 357297 - DNA, 122 bp, Homo sapiens
taggatgaaggggagaccacgggctggattgggaagcagatgggaactttctcttcctggcgctgctccaccccttacccgccccccacctcctggcttctcctcgagtatcgtcagtgttt

SEQ ID NO: 357298 - DNA, 122 bp, Homo sapiens
gcgggccgaccagctgcgcgcgcaggagcaacgctgagcgaggacgcgctggtgcgcacacgagccccgccttccgcagcccgccagccaaccaacggcctcccaccccagtcccgccctgt

SEQ ID NO: 357299 - DNA, 122 bp, Homo sapiens
tctcagagggaacatagtcctgctgacaccctgacttcagacctccgtcatccagaacctcgagagaatacgcttccattgtgtgaagtcaccttgggggtggcacttagttatggtagccc

SEQ ID NO: 357300 - DNA, 122 bp, Homo sapiens
accccgcgcaggcgcagacggcctctgcgcccgcatgcctgtgggcttcgccgaccggggcgcctgcggcggcgactgctctaccaaagcctcactcaaagcctgaagtcggggttagagga

SEQ ID NO: 357301 - DNA, 122 bp, Homo sapiens
gactctacttattttacaaggaccagttcaaatatctcaataaaatctttctggacttttcgatttgctctaccattgtctctctgcattctcctcattccaccaaagaaatggcactttat

SEQ ID NO: 357302 - DNA, 122 bp, Homo sapiens
gttctatcagaagcactactctgaccttatgcaaatagaggcggccaactctttgtggaacggctgaaaattccaccccctgtgtcaccaatacctggcatcgagccttttattcaaatgct

SEQ ID NO: 357303 - DNA, 122 bp, Homo sapiens
tcctacaatatctaatatgtgcctgatatttaaaactaccatttcttttttcctttttttcgagacagactctcactcagtcacccaggctggagtgcagtggccctatgtcagctctctga

SEQ ID NO: 357304 - DNA, 122 bp, Homo sapiens
gaaccggtgcccatccagtccggtgccatctgaagcccccttcccaggtgagactcgtagcgctcgctcgacagggtctggtcccacccacaaggcctggggcgccgtggggccccgtctcc

SEQ ID NO: 357305 - DNA, 122 bp, Homo sapiens
cccgctgccgtccccaccgctcgcagccaccaggaaaccccgcggccgcgctcgagcgcgcgccctccgaccacatgcacccgcatacgcatgctcccagcgctcccacgcgtgctgacacc

SEQ ID NO: 357306 - DNA, 122 bp, Homo sapiens
gcagaatggcgtgggagttctgggaagggggcgctggctaggcccttcctgggacactcacgcagccacattcccaaaccccctcccgggcccccaaattcctggctcggtagtgatacagc

SEQ ID NO: 357307 - DNA, 122 bp, Homo sapiens
ttctcccagagctcttcctagtggatcgccctgggattttaaaccggatgaaacacattccgacaaggaacagcctctttattaatgcaaattacatgaggaggagagaaaaaaagagagaa

SEQ ID NO: 357308 - DNA, 122 bp, Homo sapiens
ctgcgtttggaatacactgtcttcccactgcttccagtcggcacgcagggcctgcatctccgtgtgcatgagctcacacccactggcagttgtgttctgtttcacttcgggagccagcgact

SEQ ID NO: 357309 - DNA, 122 bp, Homo sapiens
cccaagactcagtagttctgtaatttattaagaacgtgatctgttaaacaccggagactccgccaaggagcaccagcatggtgggagcaggggcacacagcccagatggcagaaggccactc

SEQ ID NO: 357310 - DNA, 122 bp, Homo sapiens
gataagaattagttagttggaggtggatgggtaaagtgttctaaatgttgggcttaatttcgatttaataaggaggccaattcagagacttaaagaaatttagagcaggataatcccttagt

SEQ ID NO: 357311 - DNA, 122 bp, Homo sapiens
cgagggcacctttctaatcacagaggcacgtccacggcaccactcactacattaaaaatccgacacggagtaaagaacgcagcccatgctacgtcaccatcccgtaaccacacgtgacctga

SEQ ID NO: 357312 - DNA, 122 bp, Homo sapiens
tgggcaatgcagagggagggtgcttttacgtgccaggaggtttgctggactgtcacttcccgtttacttctcatctgtaggcctatgacgctccccaggagtagctagctaataatcctttt

SEQ ID NO: 357313 - DNA, 122 bp, Homo sapiens
tgtgatccacccgcctcggcctcccaaagtgctgggattacaggtatgagtcaccacgcccggccaacttgtgatcttaagagaaagttcattggtattagtaaagccctggggagctggca

SEQ ID NO: 357314 - DNA, 122 bp, Homo sapiens
ggaggagggggaggaggaggtggccttcctggagcggagctgagcagagtggagcagagccgagtgctgcagagctgctggccacagggagccgcagggaggatccttgaaggggggcgggt

SEQ ID NO: 357315 - DNA, 122 bp, Homo sapiens
tattgttacaaatgttaactttaatgctgtggatttaggagagatgcaggaagtatagatcgggaatcagaacactcaaattctagtcaaaacttacactggggcagcctcctaatttatct

SEQ ID NO: 357316 - DNA, 122 bp, Homo sapiens
gttgcgggtcagagcgagtagggtgggtcctttcctgggacaggactgggaattggggctcgaagtaggggaggaaagagcacagaggaagccaggctgcatagggtgacttgctttttgat

SEQ ID NO: 357317 - DNA, 122 bp, Homo sapiens
agcgcggccgccgggagacggccaacttggagctgctgctgcagcgctgcagcgaggtcacgcactgggtggccaccgaagtgctgctctgcgaggccccgggcaagcgcgcgcagctgctc

SEQ ID NO: 357318 - DNA, 122 bp, Homo sapiens
agctggagcctggaggtgcagcccctcccctccacttaagcctccctcctgccccggccccggggaccgacctgcagccccgcagtcgcagcactggctattcccaggcctgctcttcacct

SEQ ID NO: 357319 - DNA, 122 bp, Homo sapiens
agcactcgctcttccaggccaagggcagcccggcgggcggcgccaagacccccctggctccgctcgcgcccaacctgggaaagccgagccggatccctcgaggaccctatgcggaggtcaag

SEQ ID NO: 357320 - DNA, 122 bp, Homo sapiens
gggctgaaactaccccggcagatgcagctctcatgccctggaggtgctgggaggccctgtcggaggaccaaacacaagcaatttttaaaagctatgcgtgctgggactttcaggtgtctaca

SEQ ID NO: 357321 - DNA, 122 bp, Homo sapiens
gccttcgacccagagggcgccggcagaggcacgcatgcgcgctgttccggcaggggttgtcgtggcgcagggggcgggaccagaggcggtcacgtgaggggctctgggctaccgggtcacgt

SEQ ID NO: 357322 - DNA, 122 bp, Homo sapiens
cccggacggtaagtcacaggaggttggggcaccgcagaggtgggcagcagactgcgctgacgcctggggctctgttcctgcaagcagcttggctcttctctcctttttaaaaaggccttctt

SEQ ID NO: 357323 - DNA, 122 bp, Homo sapiens
cctctcctgctcttctcagggactctaaggacttgctataactctacaatttttaacttacggttttgtcatggaaagaaaaatacatgcaccttcccaagttctttacatgcagcaggcac

SEQ ID NO: 357324 - DNA, 122 bp, Homo sapiens
ggagtgggtcgcagatcttcgggcggctaggggaaatcggcgagaggcgggatccgagcgcgccggcggggcgcagagcccgcgagcctggccagcgagggtagccgcggggggcgcgcccc

SEQ ID NO: 357325 - DNA, 122 bp, Homo sapiens
cgagtcaggggaggatcctgtcactgttagctcccccaggagcggctcctcagggggctccggggcctccatgctgggttctgtggggctgggggtctcttcctctgcagctgagaaaaagg

SEQ ID NO: 357326 - DNA, 122 bp, Homo sapiens
tataaccaccagggaaatgataaaaagttcatgttcacgatcgcccggccacatgaccggcgccggccaatcgctggattcaaccactcataaacttctatcacaaagttgtaaattttcat

SEQ ID NO: 357327 - DNA, 122 bp, Homo sapiens
ctacagctttttgcaccactgttctagcctttaatgccttctacttaatattaagctgaccgcaatactaacgtgcccctatatttggcagccaaataaagaagaatcgtgggtaaatagaa

SEQ ID NO: 357328 - DNA, 122 bp, Homo sapiens
cctcagctgctggcaggcacccacccaccagggtgcttccggggcagcgcgcgccacttccgacctgtgccggaaaagcccatagagaagccacctggctgctagagtgccgccgcgcgtgc

SEQ ID NO: 357329 - DNA, 122 bp, Homo sapiens
gcttcagagacgacgactgtggagcatttgagacgtctgacaaacttgaggccattgctgcgccatgttttcccaaatgataaaggcagcacaagtgtccaagccgtgatgcgtgaatgaga

SEQ ID NO: 357330 - DNA, 122 bp, Homo sapiens
cagattcaagatggcgacttcctgcttccccgatagcgtcgcgcgtggccaccgaggccacgcctacttccggctaccccggctactcctgctcagcatggctgctttagggactgttctct

SEQ ID NO: 357331 - DNA, 122 bp, Homo sapiens
ggttgaggacagcatggccgaagggaaaaaagacccagattcttgtaatatactgtagggcgtggtcagggaagtaagtctctggaacccttgaaaacatatggaacttcctccccgtggag

SEQ ID NO: 357332 - DNA, 122 bp, Homo sapiens
cactcctgccttgggtgttctcaagcatctactatgtcccagacaaagttccaagcttatcgattagctgggcaaaaagatgccaattcatcctgcccaggtgtctctgttctcttgaagag

SEQ ID NO: 357333 - DNA, 122 bp, Homo sapiens
gtcaggagatagagaccagcctgaccaacatggcagaaaccaccgtctctatgaaaaatacgaaaattagcgggcatgatggtgcgtgcctgtaatgctagctgctactcgagaggctaagg

SEQ ID NO: 357334 - DNA, 122 bp, Homo sapiens
attatgttctgtctagaactcccctaaccacaaacagggctgagctaggggttagccaaccgggctggggtatcttactggtgatgacagcatggcctcgtcaccttcctgagggagggagt

SEQ ID NO: 357335 - DNA, 122 bp, Homo sapiens
caggtcctctgctcctacaccagtcaattctaaacccctgtgcccccttttacagtgaatcgattgataggatttctccagcacttgtgcactgatgaggaaagggagggacggcccttgtc

SEQ ID NO: 357336 - DNA, 122 bp, Homo sapiens
catcagaaaccccctcaacacgggtgcgctgaacgctgcagtgaaaagacaaccattgtgcggctggaaaacagtaagcactggtgtgatcttcagaaaagccacacagaaaacacaaggag

SEQ ID NO: 357337 - DNA, 122 bp, Homo sapiens
tcttttttcatctggccgggaattgagtttctggtcatggcgcgctacattttcagtcatcgattctcctcagagggtcgcacgactgatgttgtctctggacatatgctaataagaaacca

SEQ ID NO: 357338 - DNA, 122 bp, Homo sapiens
tggagccagggccgagatgccgcaaagccaagcggggcgggcggcgggcgcagacacccccggtgccaagagagaggtccctttggagcccccaagagtcaaaggaggatgacgcgcgggga

SEQ ID NO: 357339 - DNA, 122 bp, Homo sapiens
tttgctggtcttgcccacccgtgtatcaaaagcatctggaatggtatctgacacataagacgtgtacagtacattccaaaaacattcattaaggaactgctgctctgacactgatgctacac

SEQ ID NO: 357340 - DNA, 122 bp, Homo sapiens
cgtcataaaggtggcttctgctctcttctgcaagtctctgaagaattagttctcagaaaacgaagtctctcaaaataactgaacatccaattaaggtttccatgggtgtgtgtgagtacatt

SEQ ID NO: 357341 - DNA, 122 bp, Homo sapiens
tggatttagaaggttctcttcccttaaattaagccatctgtcttgcttcagttcccttttcgtagtttccttactaggtctattttacatggttcggtagacaagacccagcggtaactgtg

SEQ ID NO: 357342 - DNA, 122 bp, Homo sapiens
tgagaaatataaccacattatatgcagtctcatcttggtcaggttacttaacccatctgccgccatataaatggaaaaaagcagttatcttccttttgggattatcatgaagacaccttgag

SEQ ID NO: 357343 - DNA, 122 bp, Homo sapiens
tttgtgtggaactaataagtagataatctctatgattgtatccttgcttgaaaaattttacgatgttctgttcagatctatttgttatccattgtggatcacagatacaaaaagaatctggt

SEQ ID NO: 357344 - DNA, 122 bp, Homo sapiens
acgccctcggcgcgcgggttccagccctcccacctcatcctgcctcttttcgattctccgcgagtagcctcggccccaggctttgctggaagaaaggagaaaaagcaggaaggcacggagtc

SEQ ID NO: 357345 - DNA, 122 bp, Homo sapiens
aagaacttttgagcctgttaactcagaagattagcactggaaaggacctgggatctagaccgacctccttatttcctcatacaatggaggcctacaaacttgggatgttttacccaggtcta

SEQ ID NO: 357346 - DNA, 122 bp, Homo sapiens
gccgtccccgtgaggttcttgttctcacgataggggatgtgctggtgggtgcgtgcatcccggtacttcttggccagcccgaagtcgatgatgtacaccaggttgcccttcttccccaggcc

SEQ ID NO: 357347 - DNA, 122 bp, Homo sapiens
agtgatcctcttgctttgacctcccaaagtgttgggatactaggcatgagcctcagtgcccggcctcatctggcttttggctgctgcgattaatgctgttgtgaatgctgatgtacaggaat

SEQ ID NO: 357348 - DNA, 122 bp, Homo sapiens
tgggcggtgcccgcgccgggccgctaggggtgcggggttggggaggaggccgctagtctacgcctgtggagccgatactcagccctctgcgaccatggctgtgctggcggcacttctgcgca

SEQ ID NO: 357349 - DNA, 122 bp, Homo sapiens
aaggctgagaatgactgatgtgtgcaccatcctcaagatcccaaagaagttctcattccccgcttgttgcgtttcccgtaggctgagcttggtcgttccgtgcccgaatgcagatatctgca

SEQ ID NO: 357350 - DNA, 122 bp, Homo sapiens
acacatgtagtagaacaagttgggtttattattttttgcagtgagggagaacacacaacacgggaacctgtggggtgtctcagagagaaggtattagaaagacggtttcacaggatttgagc

SEQ ID NO: 357351 - DNA, 122 bp, Homo sapiens
tgaagaggtgaggaaggccattggagtcaccttcccccaagacaaacgctgatgtatccccgaataaataaagacatcttacatcttcgtggtagtggtttggcagaagctggagaacccag

SEQ ID NO: 357352 - DNA, 122 bp, Homo sapiens
tggacctactttcaagaatctcggtgccggggttaagaactcatctgaacgcaatggcagcgggagtgggtgggtggagaggacttttctctttgggaagctgtatgcaaagaccacccttc

SEQ ID NO: 357353 - DNA, 122 bp, Homo sapiens
ccattattcatgacctctgatcgtcttacggagcaggcggggttctcgctggatccttctcgttctctctctctgcttccatctcatcaagactgcgggcttccggaagtggcctctgggca

SEQ ID NO: 357354 - DNA, 122 bp, Homo sapiens
gtctagggagcccaggagccgttgcagcctcagctcttctccctccctctctcgatgacccgggcaatgccaacctcctttcgggattgaaagctctaaatccaaggtgctaagttgatggg

SEQ ID NO: 357355 - DNA, 122 bp, Homo sapiens
gtgtctctgccatcactatgagaagaacatgccccagtggtccaaggaggatgagagatacgtggggcacagctactccaggcgactcacagatctacagtgagaaacagagctgccccagg

SEQ ID NO: 357356 - DNA, 122 bp, Homo sapiens
acagcgagtgcgaaggtcgggtggcagggaattgctctcgcgctgcaggatttgcccggacgccggggccgggggtgggggcgggaggccgccctgaggtgaggtgggcgcgggccgtcggc

SEQ ID NO: 357357 - DNA, 122 bp, Homo sapiens
ggcgcagctgcctggacggactccgggccgtccctggggagtgattgtgtgtgtaacctacgtgacggggcgcccagtcgcggagccacagacaaccgcccgctggcctaggaaaagcgggc

SEQ ID NO: 357358 - DNA, 122 bp, Homo sapiens
agacggccgtcacgtgacgcggagaaggcgcggcgcccgtgggaggttggttgcagaactcggaaccgctgtgcgcgcgcatgtgtgggattcggtcttcctccctcagtgggtctttttta

SEQ ID NO: 357359 - DNA, 122 bp, Homo sapiens
ctgtctctgagactctatgaccagcacatccgaggcagcccgtttaagctgaaagtgatccgatccgctgatgtgtctcccaccacagaaggcgtgaagaggcgcgttaagtccccggggag

SEQ ID NO: 357360 - DNA, 122 bp, Homo sapiens
ctcacgaccctctcatggtccctgcacatctgggagagactccgcgctgcgggtgcagagcggccccaagagggctccaggccagggcacaatcacagcgcagggaagagacaggacgcccg

SEQ ID NO: 357361 - DNA, 122 bp, Homo sapiens
actggcataactagtgactggcacaaaagttgcccccaaaatattcgagactaaagaaaacgatcgcaatacaacagtgaatgggagaataaggttccccctcacgctttcaaaattaccgc

SEQ ID NO: 357362 - DNA, 122 bp, Homo sapiens
cgggggatgagggcagggggttcccggagctgggggcccacgtccagggcttcccaacaccgccgctcccgggcttcccgggaatccttgccccgggtggcgggggcgctggggactgggaa

SEQ ID NO: 357363 - DNA, 122 bp, Homo sapiens
aattttagaacacgggagaagaaatgtgtttagagaaaaagtgggtcacacacgaagcaccggagtcaaaacccactttgcctttcggcagccgcgttcaggtgtggaggctccacgcccag

SEQ ID NO: 357364 - DNA, 122 bp, Homo sapiens
ttccttcgtgctgtgtcccctgggcctggaactgagctgccttggcacagctgtagattccgtgagtgtttcttcagtcgtacccagtgctagtgcgggtgttaattgctctgaccctggtc

SEQ ID NO: 357365 - DNA, 122 bp, Homo sapiens
aagtaaattccagcgatcttgccttgagacagctgcacagtcaggagcttatgtcgttctcgtctcatcacttaattcctgcccgaaacagaatttagagatgatgtctctcatctctaaga

SEQ ID NO: 357366 - DNA, 122 bp, Homo sapiens
aaatgaaagagtaagaccttattttctaggcaagatggccagccattgacagtttttaaacgaaggactggtagataaaaattgcactgtagtattttggtggctagaagcctgactaaaag

SEQ ID NO: 357367 - DNA, 122 bp, Homo sapiens
agacaggggcagaggtgggggctgtgggtcaaggtcccgggtgcggcggggcggaggcagcgtgctcaaccactctcgaggtgcccctaagtcgagcgcatcccgtgacccgaagcggccag

SEQ ID NO: 357368 - DNA, 122 bp, Homo sapiens
cgctgtctctatggccccggatccgagcgcaaaggtgagcaaggcgaggagtgcgggcggcgccctggcgtgagcctggggctgcgggccgggggtcgggcaaggcctcccccacgtccatt

SEQ ID NO: 357369 - DNA, 122 bp, Homo sapiens
actgtttattcttcacccagtcgcgccttgtgatgtggcctctggtctataccctgttagcgcgacattccttcctgggggttaattaaaagcagcaagtcgagcctccctccagctgttta

SEQ ID NO: 357370 - DNA, 122 bp, Homo sapiens
gaccaatcagagagtagctttgcctctataacggcgcgagagtgagacgtcatcggtgagcgactaacgctagaaacagtggtgcgcggagaggagaggtgagtgtgatggagaccacgggg

SEQ ID NO: 357371 - DNA, 122 bp, Homo sapiens
agaacgctccagggctctctcaggagcctagggagaagggcaaggaaggggcgtctttggcgagctagcccgcaatgggacgaccagtactgcacgctctgctctatccagactccaaaaga

SEQ ID NO: 357372 - DNA, 122 bp, Homo sapiens
cgaggcccaaccggacctgacctgggtttgcttctctgtcttcacctgccagcactaacccgcagctatactccagccacacaggacttctttgagttctttcagtgaccaatctctttctc

SEQ ID NO: 357373 - DNA, 122 bp, Homo sapiens
ggatggctcccacggggtgtttccagttcccgggagagtcgagtaaggtcccggagcgcacggccctgaggcctggcctgggggctcgggagacagggcggccccagccggccgcccaccgg

SEQ ID NO: 357374 - DNA, 122 bp, Homo sapiens
tttcctttttatttagaaaggaatgaaagaccgacagtgcacctgcttggatagtaagcacgtgacccaaaactttgttggggctctatgggcaggaataaagctgggtatttgacctcgcg

SEQ ID NO: 357375 - DNA, 122 bp, Homo sapiens
ttttatggggacatagttcacatctcataaaattcccccactaatgtatacagttcagggcggtgcggtggctcatgcctgtaatcccagcatttcgggaggccaaggtgggtggatcacct

SEQ ID NO: 357376 - DNA, 122 bp, Homo sapiens
agtttacctctgaagagaaagttgctgaccatttggctcagcctgaataaaaagcacctgcgattatttttaagctctcagaggatgccagtgagagtgaatgtgcctaggggtttggaaaa

SEQ ID NO: 357377 - DNA, 122 bp, Homo sapiens
agggatggccacccccacagggagtcagggagggcctggggcgacagcggaaaggttaagcgtcgaaaaggtcaagtgctaccgtggagagatcatctgagggggaggctcccggtgggaca

SEQ ID NO: 357378 - DNA, 122 bp, Homo sapiens
aatgcagatgttcccaaacatttgataaaaaagtctttaaatcacacaccccagagcaagcggcttcaaaatccccccgggttccttccagcaacaggccagcagggggccttttttctccc

SEQ ID NO: 357379 - DNA, 122 bp, Homo sapiens
catggagcggcgagccgggcggaaagcgcgcggctggagctgggactctgaggagcagtgcgcgcctccctgagcgccaggcccgcccgaggccgagccgctatatatatagcccggcgccc

SEQ ID NO: 357380 - DNA, 122 bp, Homo sapiens
ttagaaagtatatctttgccaatgcagctatggcatctcttcagtgctacagattgactccgtgttttactgtttggtgatttccataaccgtttgcacatctggcattttacagcaagctt

SEQ ID NO: 357381 - DNA, 122 bp, Homo sapiens
ctctcacgccggatcaaggccacgtgttgtggcccacttctatgccaaatctctgacgctcgagcagctgttggctgtggaggccagcgcaacaggggccaaggaccacgggctggaggtgg

SEQ ID NO: 357382 - DNA, 122 bp, Homo sapiens
tcaagttggaaagaggaactccgctaaaataagaaaatacaaatgctcccagcagaggggcgtccagagagtcgcgggcctgggaacgggcctgggtcctcgcgagcatgcctggcccgcat

SEQ ID NO: 357383 - DNA, 122 bp, Homo sapiens
cccacacctgcccgcctggcttctccagttctcccgggcccaggagcagcactggtggatcggcctgcacacctctgagagcgatgggcgcttcaggtaggaacccaggcaggcagcagatg

SEQ ID NO: 357384 - DNA, 122 bp, Homo sapiens
agctgtctgacagtgctgggtggtggttggacaatcattccctatctctctgtccatccgcgggcctctgagccccgcattcccccttcccggaatctccaccttagcttggccggggaggc

SEQ ID NO: 357385 - DNA, 122 bp, Homo sapiens
gtgggagggcagccgtgtccagcacaccctgtgtgtgcagtcctctccctgccccactgccgaacgagccctccagggtgaagccattggggaaggtgaccttgccctgggagccaggagaa

SEQ ID NO: 357386 - DNA, 122 bp, Homo sapiens
tcagcatagacttggcacacagaatggatgctcagtgaatgttaatgtacatgatggtaacgatgaaataacacccatgaagactgggctatttctgtgtgtgttctgccccaaacaagatt

SEQ ID NO: 357387 - DNA, 122 bp, Homo sapiens
cgaaggaaagaacggactctgatcatagaagcctagtaaagtagtacacctctctcctttcgtgaggccataagaacaaactccttttctcgtcacagctacgccctgggcataaacggttg

SEQ ID NO: 357388 - DNA, 122 bp, Homo sapiens
gagtgaccaggccccttgtctctattagctgagccccccaagtctggggtgaaagagaagcgtaagaaggcagcatcgttccagacggtgtcccagctgcacaaggtaaggccccatctggg

SEQ ID NO: 357389 - DNA, 122 bp, Homo sapiens
gaacgctgctgccacgtctttgcccctccccccttcacgtagtggctatttcatcccctccgagtgcattccaagcgaaagtccgagaaccactgctctcggagaaaccagaaacagttaag

SEQ ID NO: 357390 - DNA, 122 bp, Homo sapiens
ccctctctcgcgggtcggggttacatggcggcgactgcggcaaagcgagagcctcggagacgccgctgccgccagcacagccggagacctgagccgacactgggggcagtccgcgagccccg

SEQ ID NO: 357391 - DNA, 122 bp, Homo sapiens
cgcagcggtgcctgtgcatgaaactgactggtgacagttctgctcggtcgtttaactatacgagagttggtgctgtcctagcataacaagggaaagagcaagtgggaagagcttctgagtcc

SEQ ID NO: 357392 - DNA, 122 bp, Homo sapiens
attttgaaaagttaaaatgaaaattatagaaccctcaacaaagtttggttgatggaatttcgatttgactgcttccggccacttctgagtttagcaaaggaggctcgtgtatattcttcatg

SEQ ID NO: 357393 - DNA, 122 bp, Homo sapiens
ccctcgtatgcacccccctgaagacaaatcaatgaaatatttgcaccgacaatctaagtgcggtaagggcatgcactcatcaagattttgcatactacttgtggcccaaagcaagaggatgg

SEQ ID NO: 357394 - DNA, 122 bp, Homo sapiens
tctatagtccatatcataagatgagtggttcacagagccaacatgggcaaaatctgtctacgtgagacagcagtggtgtggacagctgatgccctgtggcatgaatcttctcatagggtgaa

SEQ ID NO: 357395 - DNA, 122 bp, Homo sapiens
agccacatctgagaggcaggcagggacttggagtgctctgatggcagcggcagccctcaccgccagcacctccaagacagcagcagaatagacaacagaaacatcagtggcagcatctctct

SEQ ID NO: 357396 - DNA, 122 bp, Homo sapiens
aggtctatgcctctgcagagtctggggcatcttgttccatttccttgctgcctctcctctcgtccgtgatcatccccccctccccctctgcttccggcctccccggccttcccagtctcttg

SEQ ID NO: 357397 - DNA, 122 bp, Homo sapiens
caacagaagtctaagatccctatctgatttgatgttttgcgacccttttaaggcgcagggcgcgaaagaacagaaacagaagtgtccgttcaagtaggtcggccggggtgtcactcgtataa

SEQ ID NO: 357398 - DNA, 122 bp, Homo sapiens
gctcccggagtcccaagggtgaccctgcgcgcagggccgcgcagatccgggacctgatggcggaaggggcgctcctgcctggagggtaactggaccctagagttcgtcttcgccccgcgaca

SEQ ID NO: 357399 - DNA, 122 bp, Homo sapiens
aagaattgcacccttcttgtcatttgttaccacagattgaaaggtgccaaaacacaagttcgattcagagaaaatcacagattgttaaaattaaatcatctccattaaaaaaaaatctcttt

SEQ ID NO: 357400 - DNA, 122 bp, Homo sapiens
atctggtgccagtaggaacgttccctgggggcagctgaaaggcatctggaaagaagtgaccgtgggtagggagaccagctaggtggatgctatggtcaaccagcaaaggcaggggctgctgg

SEQ ID NO: 357401 - DNA, 122 bp, Homo sapiens
gagagagggagaaagaggtaatgtccagtgaaggccagttataacaattgggcagtaatacgatctgtgtctttctggacagccatgtaaacagggaattacaatgggtttttatcgtctga

SEQ ID NO: 357402 - DNA, 122 bp, Homo sapiens
gaggtcccaactggtgcagatccaaggtttcccatgggtggggaggcaggatggggggggcgcctgcaaagaggtgagggctgtacgatctccaaggaatttgggagcaggggtcccgcttt

SEQ ID NO: 357403 - DNA, 122 bp, Homo sapiens
ccaatcaaaaggaaactagaggcgatgactcgctaggattttccctcgtggctggaagggcggggagaagaggcggggacaaagtctcagggccgaggaagtggtgtgagagactgacgtga

SEQ ID NO: 357404 - DNA, 122 bp, Homo sapiens
ccccataaacactgccctcattttgagtttttctttcctatgtctgtagctttcttctgccgctcagcaaacactctgtcccactcgtattcgtcccttggcgctggcgtctggcccagggg

SEQ ID NO: 357405 - DNA, 122 bp, Homo sapiens
tgtgagctgtaacactcactgtgaaggtctgcagtttcagtcctgaggtcagcgagaccacgaacccaccggcaggagtgaacacactccggaaaggaggaatgaacaactccagacgtgcc

SEQ ID NO: 357406 - DNA, 122 bp, Homo sapiens
tccatgccgcctggaactgctggtccagcctggaggcgcagcgcagggacaggctgtccccgcctggcaggagcccccctccacggcccgcaggcctggcagctgggacagggctgaatggg

SEQ ID NO: 357407 - DNA, 122 bp, Homo sapiens
tccagggatcatactttgagaatgataagattacataattcagggtctgacccttagcctcgtggcccagaaactgattttgttatcataagaaagataattttatttatcagggatgtacc

SEQ ID NO: 357408 - DNA, 122 bp, Homo sapiens
cccgcgtaaacctgggtgacctcggagacatccgttggagcatgagttcccgacatcaggcggcggcggtggtccgggagaaacccggcggcggggagataagcctgcccaggaggcagggg

SEQ ID NO: 357409 - DNA, 122 bp, Homo sapiens
gaagctgtacatatatgcccggacatatacatcatgctgtgcatgcctgtgcatggaaggcgactccgcagcggccggggggacgcttcccttgggcagcccctgcgcccttgacatgacag

SEQ ID NO: 357410 - DNA, 122 bp, Homo sapiens
taaggcgccgggtatcagctactgccgtgtccgacatctttccgaaggagagcctgggaccggggaaagggggtgggggacagaggcctgaggcaggagcgcgcacggcccctcccgcttgc

SEQ ID NO: 357411 - DNA, 122 bp, Homo sapiens
attctgaatgtgaagtgtgtgcctccgtgtcacagagtcacagcctccccagggacgctgcgcgcggagccctgtcagagcagcgcgtcagtgacagcggcagccgagccaggaagttatca

SEQ ID NO: 357412 - DNA, 122 bp, Homo sapiens
cgaaggagcagccgatcatggctggggtcctgggaggcagagacagcggcgtgaggacctcgccatgcaggcctgagccctgcctgctgggccatgagccaggaaagcctggaagaccccac

SEQ ID NO: 357413 - DNA, 122 bp, Homo sapiens
atgtgaaaaacgcactggggaaaacagctccacacgggagtctccactgccgggggctgacgcggtaactagctcccaggttggtgctgtgccccaccaagcaggggcctctcccggtcctc

SEQ ID NO: 357414 - DNA, 122 bp, Homo sapiens
cacacacacacacatcctgccacacatcagacttcctagcttcctgcagttagttttcctcgaatgagccaaagctgggctgactcaggtggcaaactgccaggatgctgatatttccctcg

SEQ ID NO: 357415 - DNA, 122 bp, Homo sapiens
gaggtggccagggacataggtcagtgcctggccccgaggaagacacatgcagtttgtggacgggtcttgggatgcggacacccagagtcttgtgcaccttcctggagtgttgcccactccag

SEQ ID NO: 357416 - DNA, 122 bp, Homo sapiens
ctctcttctcagcatttcaacgctaaaccagcacttagtggactctggcctaggaaatctcggccccagcctggccacgtggctgacactcagtctatcattccatgaagtaggagaaggga

SEQ ID NO: 357417 - DNA, 122 bp, Homo sapiens
gcgggcctgggaagtagaacagcggaggaggggcgggggtaaaggctgatacatgggcagcggtgggccaaggtggcccctacaaagacccaggtgggaatcctgactgggcccgcccctcc

SEQ ID NO: 357418 - DNA, 122 bp, Homo sapiens
cagtgcctggcatacggtttgccctcagtaaatgtttattgcatgaacacctcccagcttcgggcaggactgaaatctatccggttaactagtgaattcccagactctccgtctgcgtggca

SEQ ID NO: 357419 - DNA, 122 bp, Homo sapiens
gaaagatgggcgcccagctgtccatgctgctggaagggtctggtgggggtgaataggctacggagcctgtgtggccaccatgcctgtggcctcagccactttgtgcaaaggactgcagaggc

SEQ ID NO: 357420 - DNA, 122 bp, Homo sapiens
aactatattgtgagcaactttgtcttcccacggtacaaactgaaatatctttggcaaatacgtatccgactatactgtgaagaaatattgacgtgaaaaaagaacgcggagatctgataaag

SEQ ID NO: 357421 - DNA, 122 bp, Homo sapiens
ttgacttccccaaactacacacctactacagttcatttcatgttgctttcacagagatgccgagtggagcaagatgctgtgaggtgactttgtagtggaatgaagacaatgattgggaaata

SEQ ID NO: 357422 - DNA, 122 bp, Homo sapiens
agcccgcacacactcagacacactgcaagagtgaaaacttcacagttactttaatctgcacgggttccggggaactcctctgcccctccccgctccccttcaccagcctcccaccgacctgg

SEQ ID NO: 357423 - DNA, 122 bp, Homo sapiens
gttccctagctctgctgcagaactgacctcatatcttgttccatttcttttttactcatccgttttccattccaggtctcttttcactccaatgccgatatctgaatggaaagggttgggca

SEQ ID NO: 357424 - DNA, 122 bp, Homo sapiens
ccacccacggccgcaatagctccatagagcacagctcccgggggccgccatcttggtagtcgagtgacaacggccagagagtacgccttgttgcgtcactccacgaacgacggcggctggcc

SEQ ID NO: 357425 - DNA, 122 bp, Homo sapiens
tcttgaaatctcaccaaggcagagcagggctgtgagggcgggcgtcatggcgtctccttccggtgaccccgcgctctgcagagggatgagccctcagtgctggcaggacagagagacacaca

SEQ ID NO: 357426 - DNA, 122 bp, Homo sapiens
tttggagatttctttttatctctcattgacaatgttttgcagatgctgttcaataaacctcgggccccttcccctgtttttattgtgctgaaatagttgcgtgctgaaatagttgcatcctt

SEQ ID NO: 357427 - DNA, 122 bp, Homo sapiens
ccactgactgggttctggggcgccccacacatcccttccactgttgttttaggacccctgcgaggacaaacgtcacaaagacatctggtccaaggagaagacgtgtgaccgcttcccaaagc

SEQ ID NO: 357428 - DNA, 122 bp, Homo sapiens
tttggaactactgattattttgataaagatttcattgctgcttattcaatagtaattcaacgctggcatcaagccgctgctccgacaggatgtggatcccatcatttaaaatgctaggcatc

SEQ ID NO: 357429 - DNA, 122 bp, Homo sapiens
ctgggcaggcggcgcgctgcctcgacgcgcctgtgcagcgctccttctccgccaaccccacgtcagcctctggagaaaactccagagaaccgctcctgggaaccccctcaccagtgtagcac

SEQ ID NO: 357430 - DNA, 122 bp, Homo sapiens
caccaggcttgctcacctcgaagggagcgacgctggggaaggtgacatcgatgaccagcacgccaggccggccttgggaggtccgcacgtcgcccacctggagggctacggagcctttcaca

SEQ ID NO: 357431 - DNA, 122 bp, Homo sapiens
tacatggcaacatatccaagcttatgtacgtggcatttgaggtcagggcatggaaaaatacggaggcactgtgtgtatgttatttgtgcataagaatgtaactccttggccctaaaaacagg

SEQ ID NO: 357432 - DNA, 122 bp, Homo sapiens
agggggcgatctttttgagatcgtgggtgcgcacacgagtggccagcagtgactggtgggcgtccctgaaggtcgtgtccatcagcagcagccccgggtggttccgcacagctcgagcaaag

SEQ ID NO: 357433 - DNA, 122 bp, Homo sapiens
agtaattatcgttcagacaggcaagagttctctgcaggtagcagcctgggaaagcgaactcgcgcaccctcttgggggacgggctcttttgctttctatttcttctcctgcagccagggtgc

SEQ ID NO: 357434 - DNA, 122 bp, Homo sapiens
tgtgcatttcctcatttataaaataggaagaatagtaggtgatgagaacagaatgagcaacgagagggaaagcccttagaacagagccaggcgcacagcaagcgatccacaaacaccagctc

SEQ ID NO: 357435 - DNA, 122 bp, Homo sapiens
aaactctccccaggaggtctcttggggctcaagcagcttcctgagtatccccagtaaagtcgtatgaagtgatgtggggcaggttgagggctggaaggagggcagacaggacttttttggtg

SEQ ID NO: 357436 - DNA, 122 bp, Homo sapiens
ggccgacctcgccttgttcggaggcagcgttagagcagcttctcggaggttggccttggacgtgaattggaagcaatcagaatcttttagatgtttatacatgataaatgcaataattaatt

SEQ ID NO: 357437 - DNA, 122 bp, Homo sapiens
cataggtgagcaaccgcgagggtcagatgcaatgggtggatggggaagggagttgctattcggaagaccaggccacctgggtcattgagggagaggaaaaagtctagaagatgttttccaga

SEQ ID NO: 357438 - DNA, 122 bp, Homo sapiens
gcagtgctgtggaattctgggaagcgtagtccaggtcctcctgatactcgcaggcacttccgcccaggaagacgacgtagcagccatcttttccctggctttggtgattcaggtcagcttct

SEQ ID NO: 357439 - DNA, 122 bp, Homo sapiens
tatctcagggtccctgtttgtgagtaaatcgaatcctttcatcttcagagttttccaggtcgaaagataggttcttcacgcttagtttccatcagataaactcaatgccgtccaaattttgc

SEQ ID NO: 357440 - DNA, 122 bp, Homo sapiens
tgagcatgtaaaaagcagctcagcttcaccaagcctcaggaaagtaagaacaacagctttcgagtacaggcccccaccagggagaaaaccaaaggcaggaggtgaggacccggagggaccag

SEQ ID NO: 357441 - DNA, 122 bp, Homo sapiens
ccagcggggcctccgaggggctcctcgcaactgtgtccttggggatgtttgtgccggagacgctgcgctggggcccagggagcccccgtgaggccggatctcagggcctcagcgcagaggca

SEQ ID NO: 357442 - DNA, 122 bp, Homo sapiens
ttcctgtgaaatggcacaggcatcatttcagcgttgactcattctgctcaaacctgtcaccgctcacacgggagtggtcgttggaataagggacttctcctcaggtgaatgacaaagaaaca

SEQ ID NO: 357443 - DNA, 122 bp, Homo sapiens
cgagggcggatcctctctggcgtggtgaccaagatgaagacgcagaggaccactgtcatccgccgagactacctgcactacatccgcaagtacaaccacttcgagaagcaccacaagaacat

SEQ ID NO: 357444 - DNA, 122 bp, Homo sapiens
aggggcttgagtggagtgggtggaggtgagaggggaagatgaggtgttggagaagcccggcgcacggggcctctattaatattaacttttattaagagttggcctttccccggggcttcaca

SEQ ID NO: 357445 - DNA, 122 bp, Homo sapiens
gccggccgaggacccatcctgggatcgggctgtctaccgcaaacgcctgatcacaaggtccgaagtgggggctcatcctcgccccatttcccgtaaatatcagccacagaccacctttgagg

SEQ ID NO: 357446 - DNA, 122 bp, Homo sapiens
atctccttgccgcgcacgatggccttgtagaagagcttgcgggccttgcccttcatgccacgccgctgcaaggacacgtgtgtcacggcacaggccctggcccagccccaaggagcccgccg

SEQ ID NO: 357447 - DNA, 122 bp, Homo sapiens
ggggtagcagactcctttctcccagctggtcttacaaatatgaagcatttggcttccagacgtacaggcagtcattagagagccgcaggagagaacccacctgaagaggcagtcctatgagt

SEQ ID NO: 357448 - DNA, 122 bp, Homo sapiens
atccagcttgtttttttgccttgagatggagagctcactaccttcacagatgggacttggcggtactcgtcagctctgatgggaagaaaattgctcctcagactgagccaaagcctgcctga

SEQ ID NO: 357449 - DNA, 122 bp, Homo sapiens
gagacttcagggcctctggggttagccctccggcggggctcaggggctgctgtgtcggttcgtcctttcgtctgcctggaagcttcactttcctgctgggactgacagcagggaagccgagt

SEQ ID NO: 357450 - DNA, 122 bp, Homo sapiens
gggtcaccctccttctcagaacacattataaaaaccttccgtttccacaggattgtctcccgggctggcagcagggccccagcggcaccatgtctgccctcggagtcaccgtggccctgctg

SEQ ID NO: 357451 - DNA, 122 bp, Homo sapiens
gccttggtattgtggttccacaaacttgttaggtacccaggctcctattttgctccctcacggccttcactgcacagctgccacttcatggtctaagatagctgctcaggctccagccctta

SEQ ID NO: 357452 - DNA, 122 bp, Homo sapiens
cggcagtgaccgcgcctggggtgtgtcttacagactcgagttgccgcgtcgggctgggcgcgccgccgggtcccatggagctggaggggcagtggtggcgaggacagctggccgccgatatt

SEQ ID NO: 357453 - DNA, 122 bp, Homo sapiens
ctaggggtagtgcctcagacaaagcatgtaggctcctgagtgatttcccccagctgccctcgtttgcatttggatagagcttggttggagttccaagggctgatgctgggaaccttgctctg

SEQ ID NO: 357454 - DNA, 122 bp, Homo sapiens
cctttcctgttttccctcagaggcaccctcccccgagctgggggagcaggcttctggctgcgtgtgtccttggcacccagcctctccgaggacagcaagttcactgcaggagggcggggatg

SEQ ID NO: 357455 - DNA, 122 bp, Homo sapiens
acagataatgaaggaatacgtataagatattttctttaatttacaagggagtcagcaacacggtgaagctagttcaaggagcattttgagagacagtgtctgtagtgctccaggaagggcat

SEQ ID NO: 357456 - DNA, 122 bp, Homo sapiens
cccgactcagtcgcaaacaccggagttggggaaaaccaagtaataaaaccctcgaaactgcgcctgcgcgccggagggttacacgcaatcccctctgggaggggagggaccttcctcagggg

SEQ ID NO: 357457 - DNA, 122 bp, Homo sapiens
cactaaactctgctgacggggagctcgcatcccgttatctgcaaactgtgctgacagatgcgtgtgccgtaacccatgttgctttccttccgttctctcaccggctcttggttgctccttct

SEQ ID NO: 357458 - DNA, 122 bp, Homo sapiens
ctgggtgagcctctgctgcctgcctcggggggccctgagcggcccctcatccggctctgacggcctgtctcccgttaggcctctcgcatcgccagcctcacggggtctgtagtgaacctcgt

SEQ ID NO: 357459 - DNA, 122 bp, Homo sapiens
tgtgtttaccaggtaaaagataggggcttgtaggcgcccctctggcaagagagaacaactcgtctcttggtggtgggtaacattttaacccctgggttaccagcaaagccttgtggtccagc

SEQ ID NO: 357460 - DNA, 122 bp, Homo sapiens
ccatccttggcgtcatcacctcactgatgaaggtggcgtgctccttcttagcaagaaagtcgacgtctcgggaggtgatgatgcccaccagcttgctgcccatggtgcccgtctcagtgagg

SEQ ID NO: 357461 - DNA, 122 bp, Homo sapiens
gaaatccaagtctgccaacttaaacgcctccaggggttctctcatcctggtttaagtccacggcctggtaagcacggcccgccccttctcacttcctactgtgctctcaccacttccacttc

SEQ ID NO: 357462 - DNA, 122 bp, Homo sapiens
gcgtgaaactgtccaatcaagtgcgcagctacagaggaagaggcggcctcttcaatatggcggggcctttgtctcctagcttccgggctctgatcctagttcgcgtctccactgttccatct

SEQ ID NO: 357463 - DNA, 122 bp, Homo sapiens
gcaacgtgaccgcagctttgcacgtcatgagaacttaaggcagcaacacctgtctgcctccggcttctttcgggttgcgttgcaaaggtgccacggggaacgctgtatgtctaagaccctct

SEQ ID NO: 357464 - DNA, 122 bp, Homo sapiens
accttcctttcaccgcgggactgggccaactgcggaaagcaagaaagaactgttagcagacgggcacaggcccggagatgaacagcaaaagtcggagaataatggccccagactcaggcaca

SEQ ID NO: 357465 - DNA, 122 bp, Homo sapiens
gttgccagctctgataacaaagctgtttgtgggtagattaaatcattgagaaatagcatgcggggattacctgggaatattaggagtatctgttttaattagtaagatctggtaagtgttta

SEQ ID NO: 357466 - DNA, 122 bp, Homo sapiens
tcccagctgcgccgggtacaacccaggactgcttctttttcgcgcccaaaaagcccagggcgcctgcgtcacaagcactgaaggggcgtggccacgccgcgcatccgcgctttacggcggcc

SEQ ID NO: 357467 - DNA, 122 bp, Homo sapiens
aagctctggtctgattgggagggaaacacctccaaggactgggagagacttgtctgagggcggaggcagagttctagggggcgacaagtctcaccaggacccatgtgccagagagaaaaggc

SEQ ID NO: 357468 - DNA, 122 bp, Homo sapiens
cctcaagactttgcttccctcttttgcccttggtccataatccccccatttcacctctctcgccctcaatgggcccttgtgtactgatggtgaacatagtttggatggactgctaaggaaat

SEQ ID NO: 357469 - DNA, 122 bp, Homo sapiens
caaggcaagatttttgtcccttttgtttagggctgagtgtccagggcagagaatagtgtccggcatacaggacaagaggcccccgtcacctcttgattaaatgctgagagtcaaagttccaa

SEQ ID NO: 357470 - DNA, 122 bp, Homo sapiens
gggcgccgctgtgggctggcgggctccgacagatgtggagacgttttacataattgagcgcggggccccggccccccaccctccccagcgcgggaccggtgcggcacccaccgacagcggag

SEQ ID NO: 357471 - DNA, 122 bp, Homo sapiens
ggaggggcgggccgagggtcctgccggcgcgcgggcgtgttcatcagtcgctgtttgggacgctgggtgtgcggtgttctgtctccgctcccgtttcgctgtcacagcccgttccttcccgg

SEQ ID NO: 357472 - DNA, 122 bp, Homo sapiens
agggagagcctggttggccctgcatgggtcacgtgctcctcttgagctgaccactgcagtcgggaggagggaacactccactgggccaggctgggccatgtgccacctgtgtggcaggtggg

SEQ ID NO: 357473 - DNA, 122 bp, Homo sapiens
aaggaggcagagcagagaggcatgtgatcacccagatcgtctgagagcgggacattttcccggagcggggtggaaggagtgtcaaggtgactgtgagatgacagacacgtaggggagcccca

SEQ ID NO: 357474 - DNA, 122 bp, Homo sapiens
actgaaaatcagttgtgggttcggtagaaacagcatcagcggtgttgcagcgaaagcaaccggcagcgaggatgcggcgaagttacgcccatttattctgccataaaacattttctttcttg

SEQ ID NO: 357475 - DNA, 122 bp, Homo sapiens
tccttctggatttgcgtctcggcagattgtgggatgtcacttctgtcctcttccgccctgcgggattttcccagagccttcgggtttgagcccagctggaagtggccctcgttcacgctgcc

SEQ ID NO: 357476 - DNA, 122 bp, Homo sapiens
aagattcatgaacttcaaattcattgatggatttgaccccagcttgattccaaagacatgcggtgccaatgaatctgattttaggatgggcctgttattcttttaattttgtgcttctacta

SEQ ID NO: 357477 - DNA, 122 bp, Homo sapiens
acttactagtgagcaagcgtgcaggctctcctgatgctggaaacttactcccagatatagcgcccgccagccccctttcccagccctgctccccttcctgccctccgccgcaagcaactcca

SEQ ID NO: 357478 - DNA, 122 bp, Homo sapiens
gatattaactaactgcacattcaagtgcatattattgcttcaaagagggataatttcatccggaaaggacagcctatctttttaaaaggcaatcatcaagaaacatgtctgagtaatgtcat

SEQ ID NO: 357479 - DNA, 122 bp, Homo sapiens
ctactccccttgggcgagtgccagaagattctccactcatcttttcccggctaagtgtaacgatttagaaggcgtcgcggtagactggtagagatgaaggttccccttcacacgttctgcaa

SEQ ID NO: 357480 - DNA, 122 bp, Homo sapiens
ttgggaaactcttccttgaaacgcctccccataccccagctgtggccttcccgttttctgcgtggtggtgtggggggaacttcctcaggcctctccgcagtggagcctctttcggttctgcc

SEQ ID NO: 357481 - DNA, 122 bp, Homo sapiens
gccgttccccctgaaccaattgccaatgcccagtggtgacagcggcgaggcttcttgcagcgcgaatccgtccatcaacacgcaaaggcctaggattcgtaggcgccccaggtgggcggtac

SEQ ID NO: 357482 - DNA, 122 bp, Homo sapiens
ggtgtgaaaggaaaaagaaacgcgcagcaggggagaaagggcctcccaaccgctgattcgcggggcccagggtatcctgcatctccctgcttcatgttcaaggagagtctcaggctcacacg

SEQ ID NO: 357483 - DNA, 122 bp, Homo sapiens
tcccagtgagcccccagaaacttccccggcacggcagaactggagagtgactgggagagacggaatcaggccagtggagtaaactggagcgagtggacaggggcgcggggaggacgccctta

SEQ ID NO: 357484 - DNA, 122 bp, Homo sapiens
gagagagagagacggaggaggctggtgctggtggccggcggcgaggctgggtgcagggggcgatggtggaggtgacagggtggctggcgcggctccggtcacccaggcattgtcagcgcgcg

SEQ ID NO: 357485 - DNA, 122 bp, Homo sapiens
ctgctctgcgccctccacttcgcccgcctcctgcgcctgcctccccaccccacgccgcgtcgctagaatttcctgagcccccaggatttcctgcaccgccagccgcctcttccccaggcaca

SEQ ID NO: 357486 - DNA, 122 bp, Homo sapiens
tcccgagggcaccttgggtcacatcaaacgccggtacccgcaggtgcggcctgttgtgggcggggcagagaggcggaggcgggactccgggggggtgggggccgggcctagtgtgtgggcgg

SEQ ID NO: 357487 - DNA, 122 bp, Homo sapiens
ctgcgatgacgtgcgattcactaatcacccggactcagcgcatctctatgttaaatagcgcgtgtccatctgcaaagcacacgacagcccctgcggccactgggtgccggcgcccagcctgt

SEQ ID NO: 357488 - DNA, 122 bp, Homo sapiens
ccacatcggctccctgatcccgggccagccgcggccggccaggcggcagcgcccgccccgcgctccagaccccaccctccggcctagccaccgcccctccgcgcagcccccgcccccatttg

SEQ ID NO: 357489 - DNA, 122 bp, Homo sapiens
acttgggaagcgcaaggggtcagggagttccctttcctagtcaaagaaagcggtgacagacggcagctggaaaatcggatcactcccacctgaatactgcacttttcccacggccttaaaaa

SEQ ID NO: 357490 - DNA, 122 bp, Homo sapiens
acctccatctctcctctttgcttctttgtgtcctatgctatttccactttctattaacatcgcttagatgtaggtttttgctaagaagtccttagccttttggctgatgattccacatgttc

SEQ ID NO: 357491 - DNA, 122 bp, Homo sapiens
ccgtccaaccatgccccgccccttttcaatccggcacaactgggaaaaaccaagagcgaccgcgggaagcatccaccgtccccgccggccctcaacaggttcatccgtgccccgccccccac

SEQ ID NO: 357492 - DNA, 122 bp, Homo sapiens
gcaagccagtggcggaggcaggggacgccggcggaagcgcgcgggcggctttggggcgagcggtcccaccttgagcaccgtgacggctcccgcgctgtgcacctggaagtgcgcgggcggct

SEQ ID NO: 357493 - DNA, 122 bp, Homo sapiens
ggggtccaatgggctcatacttccggtctcccaacagccaatcctagcactgggcatttgcgggtggcccagcaagtggcctagcacttgcgggggcgtggccatggagacacagtgaccaa

SEQ ID NO: 357494 - DNA, 122 bp, Homo sapiens
tcaccctccatttgcttttcccggcgattcctctccccggtctcccgtacgcgcagcgcacgacctctgcccacgctgggctgttcggattcagagctcccagccccgaacttgagcgccgc

SEQ ID NO: 357495 - DNA, 122 bp, Homo sapiens
gaataaagaaggaactggggaccccggaccgtagctccttccacgcatgaaccccgcacacgagtcgggattccccccatgaccctcccgtggcccccgcacaatctggagagacgcggggc

SEQ ID NO: 357496 - DNA, 122 bp, Homo sapiens
tgagcactcacaagctgcaacgggaacacacacactcagtggctcccaggtgagcgctcgcgagctgcaacgggaacacacgcactcaatggctcccgggtgaacgctcacgaccagcttgg

SEQ ID NO: 357497 - DNA, 122 bp, Homo sapiens
tcatctgtccaatgggaatagtcatcctcccatcacaggtcatgaatgagacaacactggcgtagcacttcatacaggctgcgctttgtggtaaatgctcaacaagtgggcgttgttctcat

SEQ ID NO: 357498 - DNA, 122 bp, Homo sapiens
cttgcctaggaacaactttctcccgtctttggtgagttgggtcctctaaagaatgatccacgcaaggctgtgtccgttgtagtctctacggcagtaccggccaaaagggaagagactcgaag

SEQ ID NO: 357499 - DNA, 122 bp, Homo sapiens
ttcaccgctccccggctgggacttggagtcccttatctttccctggtttggtacatgacccggaagcctcggctggccgttgcgtcatccatggcgccggcgcagagcgagaaggaggtggg

SEQ ID NO: 357500 - DNA, 122 bp, Homo sapiens
attgccttcccttactccctgaccttgccttttcgcacttcactcgctgccacgtggcctcggagcccagtccgcacccgcagcccccagctgagccaggctgcagactacaactcccagcg

SEQ ID NO: 357501 - DNA, 122 bp, Homo sapiens
gcctcggatgctgcccgggaggaggaggcaaaggaagactccgttccagccacctcccgccgcccggatcccagaggaaaggggagaggaatctccccaccggatctggtgggcggaagatg

SEQ ID NO: 357502 - DNA, 122 bp, Homo sapiens
gggacgcgggtgccagtgcctcccgggcaagccaggcatggtgcacgggagctgtgctgccgtctgtgcccgctcgtccgtctccgcgctgcgccagccgccgccgctactgctgctgctgc

SEQ ID NO: 357503 - DNA, 122 bp, Homo sapiens
ccggcatagccaacaagctgccagacaccgttccaatgccaggcccgaagccagccacaccgacaggggctgccccaacaccaatcaacgtggctgctgtgtcaacatcccgggagacagct

SEQ ID NO: 357504 - DNA, 122 bp, Homo sapiens
tccccgcagggcatagagtgatcgctttccccgcagcaggtgggcgggcaggagccaggccggtaaacaggaagctctgcgcaggcgggcggagcatccagaactccgcaggccctgaggtg

SEQ ID NO: 357505 - DNA, 122 bp, Homo sapiens
cctttgtcacaatgtttttcaatccggtgaagcaaactgtccaattagagccagggtctccggcttccatctttgccgacgtttaattaacatgctcctcttggcagctgctgacaagttcc

SEQ ID NO: 357506 - DNA, 122 bp, Homo sapiens
gtagactctctgcatcaagcacagagaacgtgtggatcaacaaagctctgaggatttgaacgcatgctgttctgtagattgatcaaagcatagttattttggttcccatgtggaggcttcca

SEQ ID NO: 357507 - DNA, 122 bp, Homo sapiens
gggcgcgcgaggggcgcgggggacaaatgcccgccagagactctcctcccgcctccgctgcgtgacctgggggagcctcagtttccccacctagagagttgggtgatcatagcacagatctc

SEQ ID NO: 357508 - DNA, 122 bp, Homo sapiens
agctgctgtcccttgtgtcttgctctctggctgtgtcgctttggttacaatagaaatcaccgatgagatggtggctgcggagtgtttgtgctcagccatcgggggatgggttctttcccagc

SEQ ID NO: 357509 - DNA, 122 bp, Homo sapiens
ttccgccaacatttagtgggcgccgactgggtgtccgggcccgggtggacagcaacctcccgccgcggcccaccgtgcgcccccgccagccagcccgggcagcgcctcccagaacccgcaga

SEQ ID NO: 357510 - DNA, 122 bp, Homo sapiens
gaatgtgtttgacttcctcaatgaaaagctgcaaggtcaggctcctggggccctagaagccggggcggccccagcggggaggaggagcaaggacatgtaccatgccagcaagagtgccaagc

SEQ ID NO: 357511 - DNA, 122 bp, Homo sapiens
cctggaggtggggcccggggtcggggctggggaaggggagccccagggtcgccagagccgcgagccactccagcgagaccccaccttgcatggtgccccttcctgcataggactggaagacc

SEQ ID NO: 357512 - DNA, 122 bp, Homo sapiens
ggctggaccagagagggtcctggaggcacctgcaaggaggggccgcccaggcgctgccctcgcagaggcaggtaaaattacctcgtgtagtatagacaccgatggtaagctctcaggtgttt

SEQ ID NO: 357513 - DNA, 122 bp, Homo sapiens
tctgcctgggtctcatgcccttatgagggtggtttctgcctggggtaaaccctatgtgttcgaacacctgctgctccactgggccctcagagtggagcacagaccctgcctcgcccccacct

SEQ ID NO: 357514 - DNA, 122 bp, Homo sapiens
ctcttaaataagagaacgaatttcatgtaccagggttccgccctcatgaccttccacgtacgagggtcccgccctcatgaccttccacgtacgagggtcccgcccgcatgaacttccgcgta

SEQ ID NO: 357515 - DNA, 122 bp, Homo sapiens
ggccgccctcatcacggccgtgggcgtgcggttacgcacagaggcaagcagctaagagtccgggatccccagcctactgcctctccagcacttctctcttcaagcggcgaccccctaccctc

SEQ ID NO: 357516 - DNA, 122 bp, Homo sapiens
cttataattagaaaaacatcaggaaaatcacaacagaggccattctacaaaatacctgatcgatattcctcaaaactgtcatggtcatcaaaaacagagtcagagaaattgtcacaagtcag

SEQ ID NO: 357517 - DNA, 122 bp, Homo sapiens
tgttgagggctcggcagcaaggatggagaggagaacacggtacaagagaccccacgcaggcgccgctggcagaacttagggaccgactggcaaggagtcctgagaaagcaaagtagggggtg

SEQ ID NO: 357518 - DNA, 122 bp, Homo sapiens
ggaatagcagggctagatggaaggctgtaatataactaataaaattgacggaaggcactccgcagccgtaagggtgatcgagatgcttgttaacagcagtaataatctaatagcctgttctt

SEQ ID NO: 357519 - DNA, 122 bp, Homo sapiens
tagagaacctaaggctctaacagcgacgttcagaggatctacagatatctgcggtagacacgcccacgaagtcgcctctgtgcctacctatcgggtcctgtgaccacaggcgacctcagtcc

SEQ ID NO: 357520 - DNA, 122 bp, Homo sapiens
gaagctgcacatgctcagtgggagggggacagctgcgggatgggccggctgcagggtgcacgctgctctgcctcctgcccagggcccggcagctcagcctgattccacaagatagaaaacct

SEQ ID NO: 357521 - DNA, 122 bp, Homo sapiens
ccgctgtaaggttgcgaggtcactccaggcttgcccgagcctctgctcaggtttcaactacgcgagttgggataagcagcgccctcccctcccgcccccatgctctcctgaacgtgggtttt

SEQ ID NO: 357522 - DNA, 122 bp, Homo sapiens
ccgcgcggcgcttgcggctggaacttggcctggaacgcggtcttctcggctccagtttcccgcccaggccccgcccacccggccgccccgctggttcgcaccgctgctccggccaccgagga

SEQ ID NO: 357523 - DNA, 122 bp, Homo sapiens
acccgcgctgcgggaagacagctgaacatccttgcctctccaggatgccctcaaaggaggcgagttgctgctacgccgcccttgacctctgcctttgcccgagcgctctgccctcctcaaaa

SEQ ID NO: 357524 - DNA, 122 bp, Homo sapiens
cgtggtgaccccagggatcaccgaggaccagctgtggagggccaagtatgtgtatgactccgccttccatccggacacaggggagaaggtggtcctgattggccgcatgtcagcccaggtgc

SEQ ID NO: 357525 - DNA, 122 bp, Homo sapiens
tccagacagcatttaggccaataaggtctttgaaaggaggcagccccaaagccctcaggccgacacctgagggcagggtctcaaacagctgtgcttgaagaaccggcaatcttgcttttccc

SEQ ID NO: 357526 - DNA, 122 bp, Homo sapiens
aactgaataagcagcattaaccgcgggcagaaacagaacagaaaccactaccttggcggccgcccgcccccgggcgtcgcctacgtcataacactgcgcggccgcccctcgcgcaccacgtg

SEQ ID NO: 357527 - DNA, 122 bp, Homo sapiens
caccctccttaagtggaggtaaacgtcccagcaggaagtcaaggctggattggcgctcttcgcgagcaccctgggaacgggagtctgggtcacgggtgctagagccctcccctctcctcccg

SEQ ID NO: 357528 - DNA, 122 bp, Homo sapiens
gattgagtttaatctaagtaggggcttaaaacaagtcagaaatgcaaatagtgggaaactcgtttcctttggcaggggaagttggcataatggttattgaaaggctgtgaaaaacagaagct

SEQ ID NO: 357529 - DNA, 122 bp, Homo sapiens
acaagagtgaaactctgtctcaaaaaaaaaaaattgtcgccaaagtcacaagaaactgaacgataatgtaatatgtgacacggacaaaaataaggtcaagtttctttgttataagaaaaaac

SEQ ID NO: 357530 - DNA, 122 bp, Homo sapiens
gcccctcggaggtgcttcacatgccctcagtgccgaaagagctttcctcggcggagcttccgccccaacctgcagctggccaatatggtccaggtgattcggcagatgcacccaacccctgg

SEQ ID NO: 357531 - DNA, 122 bp, Homo sapiens
agccgcgctgcgcaccggccgcgaagcgctcaagtcccctctcccgggccggctggcgggcgccaccagcacgcggccagttctgagtactttgcccagaacttctcggcgcgcgccgcccg

SEQ ID NO: 357532 - DNA, 122 bp, Homo sapiens
tccatcactctgaaatttccaagaacccgggaaccgtggttctaactgcctagtttagaccgggctggaaagagctaatgcattggaggcaggcgcggggggattggaaccaggtgggcaga

SEQ ID NO: 357533 - DNA, 122 bp, Homo sapiens
gaagggaaaggggcgggagcttggagggggcgggtccagaatggcgggagcttccggggccgccgcctctggaaggaaaaggggagggaacgtagagggggagggaacgtagagggggcggg

SEQ ID NO: 357534 - DNA, 122 bp, Homo sapiens
gctttgatgtttcctggtgcgtggcttggatcactgccctgtgtgtccctgggtgtgacccgtgtctggatcgttcagctatctgagccctaatgcaagctgagagggccaggtcgctccac

SEQ ID NO: 357535 - DNA, 122 bp, Homo sapiens
aaggcttcagcaatggcctcagcactaagatctctctgaccttctcttgcccttgtgtctcgctcctctttctcccctaagcacagggaggggctgtccctgaactttccttgtctccttaa

SEQ ID NO: 357536 - DNA, 122 bp, Homo sapiens
ccctcccgccccacgcaggtggcaggtacgtgcctcgcgctgtgctcgtggatctggagccgggcaccatggactccgtgcgctcggggcccttcgggcaggtcttcaggccagacaacttc

SEQ ID NO: 357537 - DNA, 122 bp, Homo sapiens
cccttcccctgcagagaagcctgtgccccgaccccttgggaaggcttcctccaagttgcacgtgaggccgggaattagcgttttagtctgttctgctaacaatcggtgtttctcagtgccaa

SEQ ID NO: 357538 - DNA, 122 bp, Homo sapiens
gagccagccccgccaggtcgcctccgcccggctgccggcccgagcgcgcggctccgggggcggactcccgccgcccagctgacacgcgattcgtcactcttgcagaactttccccctgaaaa

SEQ ID NO: 357539 - DNA, 122 bp, Homo sapiens
aaaaagtgacgcacgtcaaaaaaaaccgctgagcatggcgcccggcgaggagagcacgttcgcacacagtgcccgccggacccgctgcgccacggcaaaaaaacaaaaaacaaacaaaaaaa

SEQ ID NO: 357540 - DNA, 122 bp, Homo sapiens
ccccactgcctcttctcctgccatggtgttcaacctctctcatcctgtacccactgccagcgaggacacctctgggaaagagtggggtagaagtgacagcccacatctcctctggtggcaaa

SEQ ID NO: 357541 - DNA, 122 bp, Homo sapiens
ttctccttggcctcctttggcccaattgacaatgtccattctcaatgccttctcacccagcgctgagtcccactgggtgaaggccatgcctttcatgttcaccacaatatcccctcccccat

SEQ ID NO: 357542 - DNA, 122 bp, Homo sapiens
gagatcggggtggggggtggggggatgtcgccagagctcaggggtggggacagccttgtgcgcatcagtcctgaggcctggggcacctttcgtctgatgagcctctgcatggagagaggctg

SEQ ID NO: 357543 - DNA, 122 bp, Homo sapiens
tgatcaaagtcatacactgagatgtctgtgctagagtgtttggcacagtactgcttataacgaaaaaaatgccacccatctgaatgcaggggattgtatggacaataaataaaaattagcca

SEQ ID NO: 357544 - DNA, 122 bp, Homo sapiens
gtcagtggttttcgccccagtcccgcccaccgcgtttcgcgcgccaccaggccgtagtgtcgcgagatttcagggtgctttagagtgggaataattccagctttctagtgatgtcataataa

SEQ ID NO: 357545 - DNA, 122 bp, Homo sapiens
tcactgtgcatgctccagcatgaccaccttgtgctaataacatttaccaaacacttaatccgtgccaagccctgggatatatgaatcggagggagtgtctattttagtttcatcacaaccct

SEQ ID NO: 357546 - DNA, 122 bp, Homo sapiens
ttttttggcggtggcggtgacaggaccccggtgcgttgatgtggggctgcgcggcggcggcggcagcagcggctcaggcccctgcagtcctccgtgacgtcctgcaaagggaggggcggagc

SEQ ID NO: 357547 - DNA, 122 bp, Homo sapiens
ccctaagctgagggcttgctgtagacatttacccagccaggctagagccgagaaaggaggcgtctaccaagctgcagagaacgacgtcctgggcctgcgagctgggccccacgcagtgcaaa

SEQ ID NO: 357548 - DNA, 122 bp, Homo sapiens
gcctgtgaactggatgttctcgactttaaaagtgaatcattcatgtgttcattcaacaaacgctcatgcagtacttgttatgggcttttttatatgcttgctcagggtatgggagcctatgt

SEQ ID NO: 357549 - DNA, 122 bp, Homo sapiens
cgggagatggggcgggggcttgagctgccgtggggcgcttagttttgagtccgggtggtgcgcctggctttggggacagcccggggcacgcgggcccgggggtgccggcgggaggggccggc

SEQ ID NO: 357550 - DNA, 122 bp, Homo sapiens
aaaggcgtgagctaattcaatcatccttgccgcttttttgctcctccaggctgtagagggcgacaaaaaccgcggaggcgcattggggtggggggtgtctactgaaggccgctcccgacgtg

SEQ ID NO: 357551 - DNA, 122 bp, Homo sapiens
gggcgccgccgggtcgagtcacttccggtgccctgacctttataggagtaaacagacccccgccatccccgcctcccctcctgcccaggtgactgactaatccgccgccttcaggagacaga

SEQ ID NO: 357552 - DNA, 122 bp, Homo sapiens
gaggggcaataaaacaaataatttaaaaataaatctccatgaaaactctggagagcagcccgccgcctttccaccgtgggtcaaagttccccgagaggttagaaagaagagaaagtagtttc

SEQ ID NO: 357553 - DNA, 122 bp, Homo sapiens
tcccagcaaaccgggggccgtgagagggcgcgcggcatcccagtgggtggcagctggaggcggggcaccctgaggggcggggaaggactagggtgcggggagggggttgcaaaaggagccga

SEQ ID NO: 357554 - DNA, 122 bp, Homo sapiens
cgcatgttcagtcctacgttgaatcggtgaggaatattgtggtgcatgcgttccttaagacgccgactaaattctggaggaaaatgttttaaaaaatcattagagtactgcaaatgatccca

SEQ ID NO: 357555 - DNA, 122 bp, Homo sapiens
acccataaggcccctgccaaaaagaccttcctgaaggcggaggaactgtgagagtgcctacgttggcccaaggcctgacccgacgatcccggggaccctagccctaacggccccgcctcctg

SEQ ID NO: 357556 - DNA, 122 bp, Homo sapiens
ccatatatacattccttggaaagctgaacaaaatgagtgaaaactctataccgtcatcctcgtcaaactgaggtccagcacactgctccatcaggggctcgagagagaggaacaacatccat

SEQ ID NO: 357557 - DNA, 122 bp, Homo sapiens
tgtttaatgtgcttccaacacttaccgagggccgactctgcaggcgagcaaagcagacaccgtcttgccctcactcctccctctcctggtgtggggaagacaaatgtcgtgcgagtcccctc

SEQ ID NO: 357558 - DNA, 122 bp, Homo sapiens
ggggtggcggtagggcagaggtttccagccctagtgcggggtgagaccccacaccagaaacggagcccagagcaccggttgggtcgggacagggttggtgagggactctgggacgtgttgag

SEQ ID NO: 357559 - DNA, 122 bp, Homo sapiens
ctgcgccgggagggtctgcgccccgcgcgcccgcccccgccgggctcacactcacctcagcgccgccgagcagcacggcagcccaacctcgcccgttcggccctccctccccgccaatcgga

SEQ ID NO: 357560 - DNA, 122 bp, Homo sapiens
ttaagcacctgccccttagtcaggccagggaccttctgccctgagccccgtgccctgcagcgctgttgtagcctagcccctgaggccgtttactatgtccctgttgtgttgcagctccccct

SEQ ID NO: 357561 - DNA, 122 bp, Homo sapiens
ccagcctgctccccttaggaatgagtgtccctggagggggagagcctggaaccaaagccccgccaggaactgcttcccctaaactgaggttctctgaaaaaaatgttcgcctggctgataaa

SEQ ID NO: 357562 - DNA, 122 bp, Homo sapiens
ttgggtctggaccgcaagggggcggggtcttgaggggttctgcgggccggcattgggagccgcagaaggagggcgtggtaatatgaagtcagttccggttggtgtaaaacccccggggcggc

SEQ ID NO: 357563 - DNA, 122 bp, Homo sapiens
cgtagccccggcccgcggctagtgagacggggagcgcatgggacaaaattctcctagccgcgggccgcgcaggctcctttggaggcaagtcgctttctgtacactgctggttaactgcttcg

SEQ ID NO: 357564 - DNA, 122 bp, Homo sapiens
gccacctggcagcagcccggttccccatcctgcggggttcctcccgcccgcagaccggctcggccataaaaaccttgctgagaatcaaagagagagaaatatatggaacggaagagtcgacg

SEQ ID NO: 357565 - DNA, 122 bp, Homo sapiens
ccaaagtgctgggagtacagatgttagccaccgtacccagtgagagtttcagtgctctatcggattccctgcctactccatgttgcatgtaatgttccacctcagggatgtttctctccttt

SEQ ID NO: 357566 - DNA, 122 bp, Homo sapiens
gtcacgtgtgtgctcctagccggggtcgggggagctggtatcttggcccttctgggaggacgcgcacagcccgaggaggcagagccccagacgggaatgggcttttcagaggtggggtgcgg

SEQ ID NO: 357567 - DNA, 122 bp, Homo sapiens
agagatagagatagagataatgaactggaagccaacagtgtaattctgctcgtcccaaaacgcacatcataaaaaaaaagtccaatgtaagagactttctaaatcttcctgcgggactctca

SEQ ID NO: 357568 - DNA, 122 bp, Homo sapiens
ggagaccgaggctcctctgtgacgtcagcagccggccgggacacagcgggagggcaggtgcggccgcggggcctgccgacttcacgcagggtccgtggggtccccgcggcgcgcagcggctg

SEQ ID NO: 357569 - DNA, 122 bp, Homo sapiens
ttgcaccttggtccttggccaagcctccccttgccacgggggcatgggatgacctgtgaacgagacagggtgcaggagtcacagcatagctggtttgcgaggcagctgagggcggcaggagg

SEQ ID NO: 357570 - DNA, 122 bp, Homo sapiens
ccctctgcagcggctggcccgggtgctaagcccctcagtgcccagggccggcaggtccggcggggctggctggctgctccaagtgcagggcccgccaagaccacgcccacccggaactccag

SEQ ID NO: 357571 - DNA, 122 bp, Homo sapiens
ccacatcagaacccgcccatccccagtcccaggaggaagacccgggagtaggttgtgaaacggagtctagagggaacaagacgctcacctgggccacagaacaatagaaggggaggtggggg

SEQ ID NO: 357572 - DNA, 122 bp, Homo sapiens
gcatcaatttttaggccagacctaagttatttgaaacccggttgtacacaccccgtcccccgaggcctagttgaaacttccctcacctgtgcggtggtttctgctgtagcctgcctgttcct

SEQ ID NO: 357573 - DNA, 122 bp, Homo sapiens
tggagccggggaagggctgggaagtcctcacccaggtccatgggggcaggtccaaggctgcgcaccgaggcgccatcatggaccccttctctgccggccgcctgcagttctggggctcaagc

SEQ ID NO: 357574 - DNA, 122 bp, Homo sapiens
gcctccgataccgtttaacagcctttgcagcaggtcagagaagcgctgcatttcagcagccgcggcctcatcgtcatcgtcccctctccacaggccgccgctatccgagcctccgccagacg

SEQ ID NO: 357575 - DNA, 122 bp, Homo sapiens
ctgggtttccatccagtttacctttgtgagccccaactttacaaatgtgctgctttttttcgcaaggactcagctttatgtaacataacctatttcctccaagggcacccagccctcccaat

SEQ ID NO: 357576 - DNA, 122 bp, Homo sapiens
tcccagctggactgcccctcaaatgcagcggctttgcagagcagcctgtgagacagaccgcgcttctactcaagcaaacatggcatgaaaatcactgtgagagcagagacgcaggtccgagc

SEQ ID NO: 357577 - DNA, 122 bp, Homo sapiens
tgtcctgggggaagcgcgagggagacgtgggcacgagctgcggggactcgctccctcaaacgaggtcctttgaactttccagggctccctggaagagttggattttcatttggttccttggt

SEQ ID NO: 357578 - DNA, 122 bp, Homo sapiens
ggcagccgccctaggctcagggctgtgagcggctggggccaggggtaggcggcggtgcggcgggcggccaggcgccgggaggcgtggctggggtgccccgcggccagaaggccccgccgccg

SEQ ID NO: 357579 - DNA, 122 bp, Homo sapiens
gcttgggttacctcttcttggagtctatataaagaatgatgtttactcttgaacactcttcggtgctgaggtgctgctgggcaaagaaatatgcagaaaagaatgtaaacatggttggggct

SEQ ID NO: 357580 - DNA, 122 bp, Homo sapiens
ctccccagcgcaggacgcccgtggggcaaggccagggctgcatccctgtgctggggcagccggcggccgcggatctttgttctataaatagccccgtcccactcccacccccacctccaccc

SEQ ID NO: 357581 - DNA, 122 bp, Homo sapiens
ggctggccgaaacgctgacagcttctggaagagaaaccagcgtgtccgtctggccatggacgcagtgcctagatgcactcaccccaccaagcagtgcccgagctctcccagtgggccgggac

SEQ ID NO: 357582 - DNA, 122 bp, Homo sapiens
agtcccatgcatgctcacacatatattaaatgcacccctcgcatgtgtcacattcttgcacgggagcgccccttcttgcatgcttttatcttgcacactttcaactcatgcacaccactcat

SEQ ID NO: 357583 - DNA, 122 bp, Homo sapiens
gcagggttggaagccaatggaaagccagaggcacatatgccaagtcagttcagtcccaaacgggcacaggggcttgttgccagctattcctgatgtcaggatccaataagcaggcttcatcg

SEQ ID NO: 357584 - DNA, 122 bp, Homo sapiens
acctcgtgacctgcccagtttggcctcccaaagtgctgggattataggcatgagccactgcgtccggcctcccatgagtatttattagcagtggagctcaccaagaacaatgacaagaatgg

SEQ ID NO: 357585 - DNA, 122 bp, Homo sapiens
agcagagtcaccctcagcctagggctctgagtgactgcaagaatcaaggccattgtcaaacggaaaccctgccatggttgtcaagagagaaatccacttctcttttgtttaggcatttacac

SEQ ID NO: 357586 - DNA, 122 bp, Homo sapiens
gttttgccctgtgctaggcaccatgctaaactctgagaaaaccacagagaacaaggcagacgccatccctgccctccagtaacatacaatttagtgatgaagctgggggatttaacaagcca

SEQ ID NO: 357587 - DNA, 122 bp, Homo sapiens
gcagcactacaggacgtcgggactgggcatttccttccaacatggccgccactgcctctccgcagccactcgccactgaggatgccgattctgagaatagcagcttctattactatgactac

SEQ ID NO: 357588 - DNA, 122 bp, Homo sapiens
tgtctgactgagggttctgggggcagaatcaagggctgaggcaggtggtcacaggaggcccggcttcagtgcacaccacacccaccgaacttacgtcgaagggcagcacctccacagacgtg

SEQ ID NO: 357589 - DNA, 122 bp, Homo sapiens
gccccacaacatttggccatgtctggagacacttgtatgtcccatcctggcagggcagggcgggaggctgaggaagggcatctagtaggtagagcttaggtatgctgctaaacattttatag

SEQ ID NO: 357590 - DNA, 122 bp, Homo sapiens
gcctcagcccccgtggtatcttgacttctgcgttaactggctttccacccttgcccagcacggttactttctcaatgatcaccgaaccgcgcaatccgacggccgtttcttggtcttcgctt

SEQ ID NO: 357591 - DNA, 122 bp, Homo sapiens
aagttcccgctctaattcattttccctaatctggacgcccctaatctacagcttttattgcgcccagttaaaagtcgagggaattcgctgtccctccgcgctcggataattacccctaaatg

SEQ ID NO: 357592 - DNA, 122 bp, Homo sapiens
ccaggaagcaccagctgcttgacagtaaagtcgctggtcctacgtgtgggctctagggggcgatgcagtgtaaggtctgtcctgggcataggcggagcggcagtcttgctcctcacagagct

SEQ ID NO: 357593 - DNA, 122 bp, Homo sapiens
gccatccctccccggactccggctccggctccgattgcaatttgcaacctccgctgccgtcgccgcagcagccaccaattcgccagcggttcaggtggctcttgcctcgatgtcctagccta

SEQ ID NO: 357594 - DNA, 122 bp, Homo sapiens
gctgagtgggagttgagtgctaggctgttggatttcagagcctgccctcttaaattgctacgtgacactgactctcatatgtatttatgttttatcaagcttaatataggataaattgtcgt

SEQ ID NO: 357595 - DNA, 122 bp, Homo sapiens
caggaaaagcagcagctagcataggcagttagtgatcagggccaaatgagtttttccagccgtcagatttcaaggaacatgaacgagaggaaggccggcaagcttaaggccgggtggggcaa

SEQ ID NO: 357596 - DNA, 122 bp, Homo sapiens
tcccgtatccgcagcgccagggcagtgctggtctgggcagtgcgcggggaagcggggacccgctgtcactgcgcctcccgctgccgacgccgcctggacggccgcactctccctgcccgaga

SEQ ID NO: 357597 - DNA, 122 bp, Homo sapiens
aggaaggaacaagagagtgacagggtgaagcaacttctcccagaaacttttgggcgcaaacgccctcaagtccggatcattggaaagtaactcgaagagaggagagaactagcgcaagcgta

SEQ ID NO: 357598 - DNA, 122 bp, Homo sapiens
aatgaggaacgagaatatggccctcaggaatgttttctgtttaggtagaagactcaaaagcgtaccatgaaaccgagaagtggcctcttcgagggtgagggaggctaatttataagatcaag

SEQ ID NO: 357599 - DNA, 122 bp, Homo sapiens
ttctgcctgttagacgcctattctttagattaaaggaagatcattttcattggagctagtcggtaacaggaagtcctcgttaaactgcctacgtagagtatttggcactggatctgcaaatt

SEQ ID NO: 357600 - DNA, 122 bp, Homo sapiens
aggcccctggctcagccccggccccagccctccctcagctccctggacagtcctagtgctcgtggggtccgtgtgggtcttgccaggggccacctctgctgcctccccatcagtgtgttctc

SEQ ID NO: 357601 - DNA, 122 bp, Homo sapiens
atattagaaactgaatgatgtctgcaaggcatccagcattatcaaattcttgggcctactcggattgttttttggttggttctaagaaaaactttggaaaagatcttatctagctatgaaaa

SEQ ID NO: 357602 - DNA, 122 bp, Homo sapiens
tctaaagcggattcactctcaggtttctgctcaacatcccctttctcctcggattcatgtcggtgtttcttttcatgtcgtttggtgctctgtttgcccatgtcttcatgaacgccagtgag

SEQ ID NO: 357603 - DNA, 122 bp, Homo sapiens
gtttgcgatctgcccacgcgttcgggcactagggccaccgctcttgtgggcagaaggccgcgtccattccaggaagaggatcttctccggaaatgtgagacctatagcatattgatttaggt

SEQ ID NO: 357604 - DNA, 122 bp, Homo sapiens
ataggacacagaccagtgaagacgagacctgaaacgccggctgcagctagagacaaaggccgcgccaaaagcggaaagccgtcctcgtcgctccagctgcgtgcctgattggacggtttcca

SEQ ID NO: 357605 - DNA, 122 bp, Homo sapiens
taagtgcccttaattcctcatcctggcattagggttcaggagtagagaagggagactaagcgggacgcttcagtatgcgcccttggggctgaaggaacctccccgctaaacctcggtttccc

SEQ ID NO: 357606 - DNA, 122 bp, Homo sapiens
gataccttatacatggagtacaaacaggatcccacaagaaatcagcagcctgagagaaaacggaataaaatttgtttcagaaacacggcagagtaattccaactttccattgctttacacca

SEQ ID NO: 357607 - DNA, 122 bp, Homo sapiens
acaaggtcataccaaaggggtggtcggaaaggaacctggggaagggagagaaggctggaacgcttacttacttcttgttatcagtgtagaagcgtgtttggagctgagccatggcgaggagt

SEQ ID NO: 357608 - DNA, 122 bp, Homo sapiens
ggatgaatggatcaaagccgggagcagggctgcccccctgcagctctgccctacctctcccgctttaccgtaagtcagcggtaggtctgcagctctccgcctctacctcctccccgctctgg

SEQ ID NO: 357609 - DNA, 122 bp, Homo sapiens
ctcaccacttgtcagggagtcgaacacgtgtttctgtggaccaaaccgatgacgtttctccgcacctaccaaagggaatcgggttccctcatgcacttaggaaaaaagaaagaccacatggg

SEQ ID NO: 357610 - DNA, 122 bp, Homo sapiens
gctttcctgctacatcatcccatggtggaagggcaaagagatagagaaagagagagtgcgcgcaagagggggccagaactcatcctttaataaggaacccactactgaaataacaaacccac

SEQ ID NO: 357611 - DNA, 122 bp, Homo sapiens
agctgctctagaggttctggggagggagctgttagcctcccatatgagcgtgtggcccatcgttgccatccacacctgcccctctgtgggtgaataagtggtttcctttctcagctggttga

SEQ ID NO: 357612 - DNA, 122 bp, Homo sapiens
acactaaaattcccactgagaacatttaaatatgtttgttgaaggcatcaaagtaaatgacggagaaactaaaacttaactagagatacaactatattgggaggagagagataggtatagga

SEQ ID NO: 357613 - DNA, 122 bp, Homo sapiens
gaaagccagcagatgaaggagaaggctaaggagaaggactcaccgaaggagaagagcgtgcgagagagagaggtgccgattagtctagaagtatcccaggacagaagagcagaggtgtcccc

SEQ ID NO: 357614 - DNA, 122 bp, Homo sapiens
atggggacctggcatcaaggacctgctctgtaaaataaagtgataatgtctatccagcagcgatgcttttgagtataagcaactataagaggctattgccaatcacgttttccccatgacag

SEQ ID NO: 357615 - DNA, 122 bp, Homo sapiens
cctgcgcttcttcgggacccagcctttgtccccatcagccgcctcccactttacggcagacgtacccccgttcaccccacgttactagtaggggaccgaccttccgggggcccaacaaaggg

SEQ ID NO: 357616 - DNA, 122 bp, Homo sapiens
gaagctgagatccagaccctgaagccaacgcagaacggaacgagacaagcgggagctcttcggcgcatgcggatagaccagacacttcttaggcctccctcggatgggagctgctagctgtg

SEQ ID NO: 357617 - DNA, 122 bp, Homo sapiens
tgccaaagccctgatggaaatgggcccagactgctggagagtgcagcagggacaactcaccggggcagggggagctcgcagggtggctgggatagcacaacctcttcctcacacagggcatg

SEQ ID NO: 357618 - DNA, 122 bp, Homo sapiens
ggtctgcattttcttggggtgactttgtttctctgtgtccaggggcactgctgggcctctcgctcttgctgaatggccgggacattggcatcgccctggctgacgtgaccgggaaccacaag

SEQ ID NO: 357619 - DNA, 122 bp, Homo sapiens
ccgttttctctgggctcctgagataacctccacctgcctctagattctgtgccagctgatcgttatctatctcatcaactcttgttccatcaggaaactgcatcttggtgagtgggaagttt

SEQ ID NO: 357620 - DNA, 122 bp, Homo sapiens
cgggcctagaccccattcattcattcattcgttctgtcacccacccgtcctgcgcgcacgcgagccaccctaagccccaggacctcaagaacccccaccccacggggcacagacaaggacag

SEQ ID NO: 357621 - DNA, 122 bp, Homo sapiens
tgcagtgtcccacatacccagggtgaggcagttttgccagaggcccttccattttcaggtcgtggtgtaagaaggatatgtctgatgtgtgagctcatcttggtctggtgtgagatcagacc

SEQ ID NO: 357622 - DNA, 122 bp, Homo sapiens
agcctaaaacaccagggtcaggctgccgggctcgagtcccagctcggccccctgtcgccacgccataactgcctcccagcgtgtttcctctgcagacggtggctcatcacagtgccagcttt

SEQ ID NO: 357623 - DNA, 122 bp, Homo sapiens
ctcgcgcgagacttggcccagcggagcacagggcatgctgggagttgttgtccacgatcgcgagacccgccccctccccatgcccttcgccgcccagcgagttgtggagccgcagctccgag

SEQ ID NO: 357624 - DNA, 122 bp, Homo sapiens
ataagcaagcacacacatatcgggtacaccccagggcaccaattccagaatagttatcatcgcaaagcttcctgtggcctttcaacagttttctgaacatattttagacactaaaatcatca

SEQ ID NO: 357625 - DNA, 122 bp, Homo sapiens
tgggcagagccggtggcaagggcctcccctgccgctgtgccaggcaggcagtgccaaatccggggagcctggagctggggggagggccggggacagcccggccctgccccctcccccgctgg

SEQ ID NO: 357626 - DNA, 122 bp, Homo sapiens
ctggaaccaggcaggttctggcgtgagtgttctggggcatttgcattcctgtgattcctgcggctgtggctcccccatggcctttagagagctgctgctggatttgcagcagtgtctgaact

SEQ ID NO: 357627 - DNA, 122 bp, Homo sapiens
atggtggcagtccggcggccgaggctgtcagcggggaggcacgatttgcctatttcccagcgtccagtgtgggagatactacggctgtgtccgtacagaccacagaccagagcttgcaggct

SEQ ID NO: 357628 - DNA, 122 bp, Homo sapiens
ccactctcaccagcaattccgtgccgtctgctgggaagcgcggcttgcacagggcctggccgatgtggacaggcttcggtgctggctgcttttgacacagacccaggagggagcgcagcccc

SEQ ID NO: 357629 - DNA, 122 bp, Homo sapiens
gaacacacctggagcctgatgctgacctagcctgggcttgcatgacctccacggaactcgcggaggccagcttccaagccgggagagtttttgcctcattgtgggtgggcctgtgtgctgga

SEQ ID NO: 357630 - DNA, 122 bp, Homo sapiens
ggttgttgcttgtgttttggtgttttggttcacaggggcttcttcgaagcttacacttttcgcacgtgagcgggagaagcgtttcgccggttgtgggcgtgcagaacacgatcctggttgac

SEQ ID NO: 357631 - DNA, 122 bp, Homo sapiens
gttgtaatccccgtcaatatgacagtgattaaaaaaatggctgctactaaccacatgcagcgtggtttaaatctgactcatctgctaggcatcccatcctaatcaaaagctattcaggggct

SEQ ID NO: 357632 - DNA, 122 bp, Homo sapiens
aaaaggaaaaaaaaaaaaatccccacaatctagccaaagggtccgaatgtgactttctcgcgaagcagcacacgatgttggacagcaaagctgttacttggcaaggtggaactcggccgaga

SEQ ID NO: 357633 - DNA, 122 bp, Homo sapiens
catttttttctacctatggcttaccagtaaccttcagattcttgtagtgccccccagtcccggaaggtgtgtgtctggcaacctggacttaccctgttaaacactggcagcatcatatacag

SEQ ID NO: 357634 - DNA, 122 bp, Homo sapiens
cctgtagggactttcagagagcctctctctacacccccggaaggtgccctcacatggatacgcgccatacagaggacacctatggccaagccagaaggcaaagaatatttagtgacaagttc

SEQ ID NO: 357635 - DNA, 122 bp, Homo sapiens
tccactgatctaggcagtgaaaactggcttctaagtatgaccttatgacttcagtgatgtcgcaagcaggttccagtccctgtgcctccccttcccgctcccaggaacccatccagcctcag

SEQ ID NO: 357636 - DNA, 122 bp, Homo sapiens
gctcctgctctcacctctggtcctgcctccttgctcacagctgtcaggctagatgtgtcccgggaccctggccttgacttctgtgtatgctcactcccaggggctcccttccagcttggtgg

SEQ ID NO: 357637 - DNA, 122 bp, Homo sapiens
ttgcgggccagcgcgagttccgggtgggtgggggatgggcggaccccgcactcggagctgcgagcaggccccaccggccccaggcagtgaagggcttagcacctgggccagcagctgctgtg

SEQ ID NO: 357638 - DNA, 122 bp, Homo sapiens
gaaaaagtagagaaatgtaatatttctttcctgctgtactcactgtaactgtgagaggatcggctcttttaaccaacagataagaaaggaaatattagctatgaagaaatgtctatcaagtt

SEQ ID NO: 357639 - DNA, 122 bp, Homo sapiens
cggcgatcttgaagtagtagacagcgccacgcagccaggagccaccgtgggccgggtcggcgaagtggccgatgttgatgacccacacggccacgcagatcacagagatggcgtgggacagc

SEQ ID NO: 357640 - DNA, 122 bp, Homo sapiens
aaccacagcactttctctcttcccagagtgattccatgagatgacggactctaaaacaaacgtgtgttaaagtcacgctctagagcctgcatccacgccaggctggcacacgcagccccgtt

SEQ ID NO: 357641 - DNA, 122 bp, Homo sapiens
tgttcaaactcgtgttgttcatgggtaaactgtacacacaaatcatgcacaataggaccacgtatctatctgtgatcgatgagaaatggaaaacaacaggtccacagatattagagaagcac

SEQ ID NO: 357642 - DNA, 122 bp, Homo sapiens
cgtgccctgatggcgcttatcaaaagtgtcatctacattcagtgaaatcccacgtggtcccggcgctgcccttcagccgtctcggtgcctccaccctaggcagatgcgctggtgggcctctc

SEQ ID NO: 357643 - DNA, 122 bp, Homo sapiens
tcctccaggtgttgcagaactccgcggtcggggccgggatcacgggggagacgcaggatgcggtccctcgccggtggcccctgccagcccccgggtccccttctcctccatcagccggtagt

SEQ ID NO: 357644 - DNA, 122 bp, Homo sapiens
gccaggtgtctgtccaaggctgcagagctggcaggcagttggacactgactgccctctcccggctctcctgtggctggtggtgacagggtggttagaaaagtgtcttttccgagttggccct

SEQ ID NO: 357645 - DNA, 122 bp, Homo sapiens
ccactccctaagcgcctctggtcgggggatggtcttccggagagccggctggcagggacgcgttttccggaggggcttcgggccggggcactggaggcccagagggtgcctggcgcgtttgg

SEQ ID NO: 357646 - DNA, 122 bp, Homo sapiens
acccccaccagatgtgccatgtcaacgtcagcctcgcgcacatctggcttcaatgccggccgccagccccagaacaaatggcggctttcccgctgtattcagctagtcagcgttccccggtt

SEQ ID NO: 357647 - DNA, 122 bp, Homo sapiens
gggctgcccgtccacttgctctttttgcggttctacaagcgtgacaaagacgagcattaccggtaagagagaaatgagaaaggacccaaactataatcagttccttttttttttttttttga

SEQ ID NO: 357648 - DNA, 122 bp, Homo sapiens
cccaaataagcaatccctaaaacagcagtttccaaaaattcactagtaggagggctagaacgcctcctagtttgttgggaatggatcgaagaattgcgtaggcgaataggaagtaccaccac

SEQ ID NO: 357649 - DNA, 122 bp, Homo sapiens
ggaagtccaagggaagggagctgaggtgagagaaatggcctctcttaggtcccaagtctccgcccccagcctgcaccactcaagtcggggaagtgacaactcttcctaaacctcgacttcca

SEQ ID NO: 357650 - DNA, 122 bp, Homo sapiens
tgtggagagaggcgtgggcgggcgggaactggggttacgcgcggtgcttgccagccagtgcgagttccgggtgggcgtgggcttggcgggccctgcagtgggagcggccaactgggccaggc

SEQ ID NO: 357651 - DNA, 122 bp, Homo sapiens
gagcctgcctggcccggagcccggggccacgcccccacgctttgcatatgcgaatccgggcgtccagacctttcatcccagtgtggaagcccagattttcctggcccagggccggttttctg

SEQ ID NO: 357652 - DNA, 122 bp, Homo sapiens
cggcgcgctctgccagggaccccccccccccaccgccggtgcccgagtgggccgcgtaggcggggcccagcccataggccgccagctccagccgctgcagcgttctacgcggtccgggacgc

SEQ ID NO: 357653 - DNA, 122 bp, Homo sapiens
aatactgtctattattaatattattatcaccattgtgtctaccctacttggctccagacccggcccatgcctcagcgaggccgcagtgactcctcctggccagcagagggcgccagcggaca

SEQ ID NO: 357654 - DNA, 122 bp, Homo sapiens
caatgctatggagcttgatagccccatctcacagaggaaaccatggcttatggaggttaacggcttatgtgtttaaggtagcacagctaacaagagtttgagccagagtttcaacccaagtc

SEQ ID NO: 357655 - DNA, 122 bp, Homo sapiens
cctgctgacagtagctggtacctgttacctactcagagtgtcacatgccacaagccagagcgtcttggcagttctcagcaccttgacatcacttccttgctaccactcagagcggcagtgac

SEQ ID NO: 357656 - DNA, 122 bp, Homo sapiens
ttcgtcggaggccacagcagcaggcgtctcggcctcgcagctagggatcggaaagatgaacgtaccatgcgaggaaactttgtaagcgggagctggagagttctcggcgggcatgtggggat

SEQ ID NO: 357657 - DNA, 122 bp, Homo sapiens
gttgtccagccaatgtttaaccacagtattttcacttctgcagtctctcctgctgcagaacgcatccgattcatcttgggagaggaggatgacagcccagctccccctcagctcttcacgga

SEQ ID NO: 357658 - DNA, 122 bp, Homo sapiens
ataaaaggaactgtgggtccttttgagtcacccaggaggacacagagcccccaaattaaacgaagggcacccatgcgagggctggccgaccctcgccacctatgtcttggtttcccccactg

SEQ ID NO: 357659 - DNA, 122 bp, Homo sapiens
accaagttccccaaggccccttgagactcaatttctgaagagggtctgctcagaattccccgtccccatgatctgcccggctgtcgggacactggtgagcctgctcagtggggagtcccttt

SEQ ID NO: 357660 - DNA, 122 bp, Homo sapiens
aggggacgcaggactctgcaccctgaccctagagcttgccctaggatggcccggccatggcgaggccctggaacggtgaagactctctgcccatcaacctagcacctctgccctaccctcag

SEQ ID NO: 357661 - DNA, 122 bp, Homo sapiens
gtccagattacgcagccccagcgagtaggtgggggctccctcaatatcaaactgcacaaccggggtccccccaccccccaccccgtccctccctgcaaatttgagacggctccaactcagta

SEQ ID NO: 357662 - DNA, 122 bp, Homo sapiens
atggcggcagcgatggatgtggataccccgagcggcaccaacagcggcgcgggcaagaagcgctttgaagtgaaaaaggttgggtctcgccagcgccttcctcagggaagctagagaggcgc

SEQ ID NO: 357663 - DNA, 122 bp, Homo sapiens
agaggacgactgtgtgccccaggacaatttgcgcatggtcctagctggccggctctaggtcgacggccccaggcggttaagctacttacaaagccgtgaccggtttgcccgcggcgcaccag

SEQ ID NO: 357664 - DNA, 122 bp, Homo sapiens
ctaaaatgtacaatcattacagtttataccaacacctgctttcctctgggagtctggaaacgttggtatgtgccaggcaggggtggcctaagtgaaaagcccccagtaaaagccctgggcac

SEQ ID NO: 357665 - DNA, 122 bp, Homo sapiens
attctgtctaaattccttaccacaaaacaaagtaatcagaatcccactgtcctgatcaaacggttcacaaatgcacccaaaaagattcccatagcatatgtgtgtctatacacacacacaca

SEQ ID NO: 357666 - DNA, 122 bp, Homo sapiens
ccttagaaaggaaaggaattctgactcatgctacagcatggatgaatcttgaggacatgacgttaagtgaaacgacaaatcggtcacaaaaggacaaatactgcatgatctcacacatgtga

SEQ ID NO: 357667 - DNA, 122 bp, Homo sapiens
cttctgcaagccagcggcccatgtgggcgcccgcaagacgcgaaacctgaacggctgcggcgtgcggcacctccctccgcgccaagttagttcacgctcccaactcctgcctgcctccccgc

SEQ ID NO: 357668 - DNA, 122 bp, Homo sapiens
tttctgttttatactcacagcgcttcacagcttgcactagccatgttccaagtcttcggccgctgcatgcagccagcagttagagtgcgggactggacagcgccggccggatgcttctgcct

SEQ ID NO: 357669 - DNA, 122 bp, Homo sapiens
cggctctgatacagacgcttttctccccagggccgggaatcctgcaacagcggcagaagccgcccgcgcctcgggcttccggcggcccagctctactagggaagcgtcgcggctgctctgag

SEQ ID NO: 357670 - DNA, 122 bp, Homo sapiens
tcctgtcatttaccaacttcactacgccccacacagatccacccgcttatctgccgccgccgtagcccttaccagttctttgggcggcttctcctgggtctttccaaacagccccatgacga

SEQ ID NO: 357671 - DNA, 122 bp, Homo sapiens
ctattgctgcccccggctctgcagagcgcaggaaacaaggggaggcggagccctgggctccgggacggcaggtggcagctcccacatggggccttgctaggatctttctgggcaccatgggg

SEQ ID NO: 357672 - DNA, 122 bp, Homo sapiens
gtcatgggatgcgcaagcactttgtctcttgctttgttttcagtcgccatatttaatctacgtcgaaacttcaaaataacattagggggaaaaatgtagcgtcatgtttatcagacgaggac

SEQ ID NO: 357673 - DNA, 122 bp, Homo sapiens
gaggaggcgggggaccgctcagaagggcagggaaggaggagccggcgcggcgccgcgacacgtcccacagcctcagagcgccgggaccacaactcccggcatgccctgctttagcccgcgcg

SEQ ID NO: 357674 - DNA, 122 bp, Homo sapiens
cgcttctgcccactgactggcagaccaggcatccaggcacccgggctttgtgtcaggttccgatccttctttctgcacgtgctgtctgtgcagtagttcatggtcagccccagaaatgcaca

SEQ ID NO: 357675 - DNA, 122 bp, Homo sapiens
ctttttaattgaggtgtaacttacaaatagtacagcgaacatcttaaaagtacagctctgcggggcgcggtggcgcacgcctgtaatccagcactttgggaggccgaggcgggaggctcact

SEQ ID NO: 357676 - DNA, 122 bp, Homo sapiens
cgcccactcccatcccatctgttcgggaagaagatgtcggcaccagcagcggtggagcgccgccaacccgcaacagcagccggccgggcacctgccttcggcggggtggagtcggagaggag

SEQ ID NO: 357677 - DNA, 122 bp, Homo sapiens
gtgctggaggatgagacagctgcaggaagcccccctcccccatccacacgtcacacccaccgctccttgggcctgggcttaggagaaaaaaggggaaactggattctggtcacagggcagat

SEQ ID NO: 357678 - DNA, 122 bp, Homo sapiens
ccacccgaacccggcgccgtggacctggtgtgaggctggggagcccgtcctgaggggtgccggctcgaggcgctagagccacggagcctggtcccgggctccaagtcccaggaatgtgggag

SEQ ID NO: 357679 - DNA, 122 bp, Homo sapiens
tctccatctctgttctgcaaacctgtggggaaaagaaagatcagattgttactgtgtctacgtagaaaatgaagacataagaaactccattttgaactgtactaagaaaaattgtttctgct

SEQ ID NO: 357680 - DNA, 122 bp, Homo sapiens
acaaaaacatttatatccagcgtatcctttattgggaagctactggaagatgctctaccacgaaaaaagaaggcttctaatctttttgtttgtttgttttgttttttgaaacagagtctagc

SEQ ID NO: 357681 - DNA, 122 bp, Homo sapiens
tgggagagaaccacatgacggtggagccacacgtccaccagagcctaagcgttggggccccgagtgaccacacggaaccacgctgccccaggcacaggagcactcaactctgcagcctcacc

SEQ ID NO: 357682 - DNA, 122 bp, Homo sapiens
tcaggggtaaggggttgggtcagaggccaggatttagggctgggggtcctcagagggtcccggtgcatcctgaggcccagtggagccttgagtgtgaggtgaggtctcacctggcactggtc

SEQ ID NO: 357683 - DNA, 122 bp, Homo sapiens
tgattgtgagacaactggagtgttgggtaaaagggctcactcctcagggaaggtgccccccgattccccaacaatctgctctccagctgtgtcaaaaacaggactctccagcttctagtggc

SEQ ID NO: 357684 - DNA, 122 bp, Homo sapiens
aggagtttaaactgagtaggcagaggaaacaggggaaggaaaagctcacacacacacacacgcccacgcgcacacaaagcagggtacagagagaaaaaccaagacagagactgaggaatact

SEQ ID NO: 357685 - DNA, 122 bp, Homo sapiens
cccggcggtggggtcggcgggggcgggggatgaccacggtcatgtgagagtttgcaagcccgggaaccggggccgggccaggacactgaaccccgtggctcctgtcactccagttctgggct

SEQ ID NO: 357686 - DNA, 122 bp, Homo sapiens
aacaaaccacaaggagcctgcagccatgagcccgcaacccctgacaacgggaggaagacgcgccacagggactgggacagcggccaccgcggtgacacctacagccacgcaagcacctgcgt

SEQ ID NO: 357687 - DNA, 122 bp, Homo sapiens
cacagtgaatcaatgggccctctcagaggcccgggcaaccgcacaagcaagaatgcagcacggagcggagtccaggatgctcagcgtgggcctcggagtctgtgtgcgatcagctggagtcc

SEQ ID NO: 357688 - DNA, 122 bp, Homo sapiens
ctgccaacccgaccacgaccacttgattagagatcacttcggctgcttgagtaactgtctcgacttccaccatatccgtcacgtgaactgctataatcatcgcttccaccataagatggggg

SEQ ID NO: 357689 - DNA, 122 bp, Homo sapiens
atctggtggagacctccgtaacacacctccccggaggatgaggccccgagtgtgaagcatcgggatctcacggtaaacaccgcagccacccgaggtagcttaggttcaatgcttaggcatcc

SEQ ID NO: 357690 - DNA, 122 bp, Homo sapiens
caatgagaaaccgaaactcagccagcctcatttgcatatacacgaggtaaataatgagggcgtttgggctcaccagcattttcctgtggtcatttgacggtatcacttcggctgcgaacatg

SEQ ID NO: 357691 - DNA, 122 bp, Homo sapiens
gaagcacggggcgcaaaagatgagcaatgggcggctcggctgcgggagatggagcacgcacgtgctgggaaccggccagcccagggctccgcccccatccacaggagatggagcacgtgctg

SEQ ID NO: 357692 - DNA, 122 bp, Homo sapiens
tcccactcccgcctgaaactcctccgacagggcttcgcttcgggggctcagtccccagcgcgtacacactcgcgtggtgtcggcttagcctcttgtaaaggaagcagggcaggcaggtggga

SEQ ID NO: 357693 - DNA, 122 bp, Homo sapiens
tgtgaaaagtctgaagcacagcgcggttaggaaaagtcacaccacagaaagccagcagaacgcgccgggaggtggtgaccgcctgacaggtacccccttctccctcccgccgcccggttctg

SEQ ID NO: 357694 - DNA, 122 bp, Homo sapiens
tttccgtaaatgtctgcactgaggatttctttttggtttgccttttatgtaaattttttacgtagctatttttatacactgtaagctttgttctgggagttgctgttaatctgatgtataat

SEQ ID NO: 357695 - DNA, 122 bp, Homo sapiens
cgtgctccacaaacacggtgtgcctgtatcagataccacacgtgctccacaaacacggtgcgcctgcatcaggtaccacacatgctccgcgaacatggtgtggctgtatcatgtaccacacg

SEQ ID NO: 357696 - DNA, 122 bp, Homo sapiens
acattcatttgcacaacgagcgcactttgaaagactccagcgcaggcctgtgttcctggccgcaacaaaacacctgcttgaagcggagacaaaatgccaagctggagagagttcaaaagaac

SEQ ID NO: 357697 - DNA, 122 bp, Homo sapiens
acaaaagaacctgtccatcgcggaatccaggccgcttgactctcggtttccactagagggcgcctcggatgcagatatcggggagaacgccctgctcacttacagactgagcccaaatgaat

SEQ ID NO: 357698 - DNA, 122 bp, Homo sapiens
cctcctccctgcaggaactcctgcgttgcgagctgtgcctgggcatcatgggtgggaaaccgcgacactcactgtacttcattggctaccaaggtaggcccaccccctcctcactcctccca

SEQ ID NO: 357699 - DNA, 122 bp, Homo sapiens
cgactgcttgccttcctcgggccgctccatcgggattcacatctgcggagaccccggaaacgcccatggagactcccgaccccagaggccgagactcggcgcccgccccaccccgcgggccc

SEQ ID NO: 357700 - DNA, 122 bp, Homo sapiens
attttggctgcacagtggaaccacctgggctgtttgaaaaaacctaggcctagccaggcacggtggctcatgcctgtaatcccagcacttagggagaccagcctggccaacatggtgaaacc

SEQ ID NO: 357701 - DNA, 122 bp, Homo sapiens
tgggaaggtgccaggggccccgggtgctggaagagcaagcaccacgcgggggggtaggggcgccccagccctctactggccagtgtccctccagtcgtccagcccttgctgccaggggcccc

SEQ ID NO: 357702 - DNA, 122 bp, Homo sapiens
cgggcacaggtcgaagcagaatatttgcctcttctgcctcttctcccttggcctcaggcccggaccaagtgaagctcttgggaacaggcatttggtggactggtctcagcctctgggactca

SEQ ID NO: 357703 - DNA, 122 bp, Homo sapiens
atctaggtgtttctttcccattttagatggagatgtaacagttaactttgaaaattcaaacgggcacatgatacccatcggagaggaatctacccgagaggaaaatgtagtaaagtctgaag

SEQ ID NO: 357704 - DNA, 122 bp, Homo sapiens
ggccccccgcgcgtccgcgcagcgccgcctgctctcgttctcctcgctgagcgcggagtccgagtcccagccttccgggctctccgcagtccgccccgcagctgttctggtaccggcaggag

SEQ ID NO: 357705 - DNA, 122 bp, Homo sapiens
tgcgctgaagagcaccctgcgcttggttccagctctgctctgtcacctcactgcagggcacggggcaggatgctcccctggcccacgcttcagggttaggccccagccgcacagagaagcac

SEQ ID NO: 357706 - DNA, 122 bp, Homo sapiens
taggaaaacaagtccagtctcaccttgctgtgatgcaggaataagaacctgctgggtctgcgcttgctgaggtactgtctgctgaggctgagcttgctgatgatggtgatggtggtgatgct

SEQ ID NO: 357707 - DNA, 122 bp, Homo sapiens
gtttaataagatcctctgggggaaaataaaaggtacaacctggtcatctagctgggtttacgcatccacaaatgtgagattctctttagccacatggaagaaaaaccccatgacatatttat

SEQ ID NO: 357708 - DNA, 122 bp, Homo sapiens
gcgcttccctactactacttgtcccttccactgggcattcccacttggaagagtgtgatgcgctgccagagcagtttctctagttccgtactcggagctcaaggtgacagaggactgcgctt

SEQ ID NO: 357709 - DNA, 122 bp, Homo sapiens
gagactccagagtcgaggctcctagcatcccctacgtagaacactgagaaattccgactgcgggaccccagtctccgagagaccccagattctattcctggagcctgagagcccgaagttca

SEQ ID NO: 357710 - DNA, 122 bp, Homo sapiens
tgccgcactctgctcttcctaacgaggtcgcctcccctaaccccaccgcggctttatcagcgcctaactgacctgggggaagggaaactcccacgccagcccactctagccatctcccggct

SEQ ID NO: 357711 - DNA, 122 bp, Homo sapiens
cggctccaccctggtttcggcgcagtacttgagcagacggtggcttgggtctcactctagcgccctcccccttcctctctggctgtgtgcccaggctggccctgcccaccttgctcagtctc

SEQ ID NO: 357712 - DNA, 122 bp, Homo sapiens
agcgggcgccgtgcgcgtgtcccgcggccgagctgctaataaagttgcagcgaggagaagcgcagcgacggcgtcgggagagcgcgcctagccggctcgcgagtgagtgagggtccccggcg

SEQ ID NO: 357713 - DNA, 122 bp, Homo sapiens
gaatccgctgccgcaggaagatgagcatcagcagcaggatggcttcaagcaccgccaacacgatcactgcagaggacggggcagacagacctaggtcagggccagggctggggccgggcatg

SEQ ID NO: 357714 - DNA, 122 bp, Homo sapiens
tgattcctatccttgccacctgcctctacaaccccaagagtttctatctgagcatctaaacgtcttttaggctgaaaggctcaccatggctttgcttggtccttctctagttcttctgcagc

SEQ ID NO: 357715 - DNA, 122 bp, Homo sapiens
ttcgcaggctggtgagttgggaaggcgggctgctgctgctggaacgcgttcccacccacccgggtgctgcagcgccggcctgcgccgtgggaagtgaggcctctgtgtgtgtgtgtgtgcat

SEQ ID NO: 357716 - DNA, 122 bp, Homo sapiens
aaatcatggctctgctcctccaggcagggacagaatccaagggcccaagagagtcactcccgaagaccagagagagacaactgcccaatgtctagtccagttcccagggaactgtcacagaa

SEQ ID NO: 357717 - DNA, 122 bp, Homo sapiens
gaggctggcggtggctctgaattccaagcatagttctcatagttgggaaagtgccactcccggctcgataaaccgaccaggagccgccgccgccagggccatcttctcaccagcagggagag

SEQ ID NO: 357718 - DNA, 122 bp, Homo sapiens
agcccccaaggggttggctttaggcacctgactcagggaaaagagctgctgtgaaagcagcggggttcaaatgccagccagagcttgaggagagtctgaggattaacttctcctgtgttaat

SEQ ID NO: 357719 - DNA, 122 bp, Homo sapiens
aaaagggtgggagcgtccgggggcccatctctctcgggtggagtcttctgacagctggtgcgcctgcccgggaacatcctcctggactcaatcatggcttgtgtgagtgtggggaccccccc

SEQ ID NO: 357720 - DNA, 122 bp, Homo sapiens
agagaaaaaaagctacataaatatatattatgtggataaatctatagacaagagctctctcgcgcgcgctctctccctgtctctctgtgtgtgtctttctctgtttttttttcctcctcgca

SEQ ID NO: 357721 - DNA, 122 bp, Homo sapiens
ggccagcgtcctctgggttcagggcgtcttcaccttggcagggatggcagagccctcttgcgccccggcaggtcggcggggcaggccaccccttggattgtgacacccactcctctcaccta

SEQ ID NO: 357722 - DNA, 122 bp, Homo sapiens
gtccccggttgtccagaggcacagtttcctaacttctttcctctttaggcaagactaactcggtgttgctcctcccggcgctgacttcgaggcccggctatggacggcgagagcgaggtgga

SEQ ID NO: 357723 - DNA, 122 bp, Homo sapiens
cagggtgaggggctccggtgtgtgtgtggtgtgtgtggtgtgtgtgtgtacgcgcgcgcacgcccttaaggaaaaatccatcttttataagtgctgtggcccacttttaactggatctcgtg

SEQ ID NO: 357724 - DNA, 122 bp, Homo sapiens
attgtgacatgaaagaggctggaccggttgttacaacaattttttccgtctagaattcggcggtaaggtctgagacaacacctcagcttagatcagtgccttctctgaacagcgttcactaa

SEQ ID NO: 357725 - DNA, 122 bp, Homo sapiens
ccggacagtcactcaccttctctaaaacccacctccacctagtctataaaatgcagagaacgaacaatgcctactccactgaattgtatgagcattagaaagggtgtgtgcaaatcacctga

SEQ ID NO: 357726 - DNA, 122 bp, Homo sapiens
tactgtcacacatattgtctagaagcaaacgcttctacaaaatttatttacctgtgttgtcgaattacttgctactgaattctaaggactcttatttctatgatggttttcattttcaatta

SEQ ID NO: 357727 - DNA, 122 bp, Homo sapiens
ctccatctctctcagggacccaagggtagcggggaaagtgcccatgtctcttgatctccacggggcccgctccgagcccgcgcccaccaggaggatggtgtggggcccggcccgctctcacc

SEQ ID NO: 357728 - DNA, 122 bp, Homo sapiens
aatgactctcgaggtccacgcaccacagaaccgtcgacgaagagcatgatggaggtggaacggaagctggcccaccgcaagaccagcaagttccccgagaacccccgaggtcagtgacactg

SEQ ID NO: 357729 - DNA, 122 bp, Homo sapiens
gccacgggactgggtcctcaccagcctacaggggacctgggccacggattccgatcaggacgcatggaggacatgccctcactggccccagttcttggtgccaacctggcagggatgtgcca

SEQ ID NO: 357730 - DNA, 122 bp, Homo sapiens
acccaagatcacagaataataagtggtgagctgggatttgcacctgggtctgtgcgtgggcgagtccacctggggcccgtgtcttcactcagcgagtatttattgagcatttagggaattca

SEQ ID NO: 357731 - DNA, 122 bp, Homo sapiens
gggataaccgtgaaaatgtttgcaattgcgaaacaatatgaaacccataaaacaatggagcgtatttacattaacacctagatcgcgttgcttaaaagcgtccattacttgcacggatgagg

SEQ ID NO: 357732 - DNA, 122 bp, Homo sapiens
aagatggttagccaactatcttgccaaagtcagaggttcaaggaggaactccgccatccacgtgcacaccttggtatttaactctcctagagtaggagccacaaggggttaggcgcatgcaa

SEQ ID NO: 357733 - DNA, 122 bp, Homo sapiens
tctgaagaagaaagaagaggacaggaaagaaacttcagtctgagggttgaggacacgtcccggagcagaggaggaccaagctcccaagccccctgtcaccttgacacgcagacggttcccca

SEQ ID NO: 357734 - DNA, 122 bp, Homo sapiens
gtatttgaaaggctggtggagagaaagtgcggagttcttgggtcagagcggagcgggattcgttgcaatggaccttcagattagattagaaatgtaaataagtgtatatttatatttataca

SEQ ID NO: 357735 - DNA, 122 bp, Homo sapiens
cagcccccaacaaccaggaatctcttgccgcctctggattgacctattctggacattccacgtaaatggaatcataaaacatacggcctttcgcgtctggcttatccacggagcgagatgcc

SEQ ID NO: 357736 - DNA, 122 bp, Homo sapiens
atcacaggcttctgtcccccttcccgggagccgacgtacagatggctgttacgaaacagccgccgtagccaccacagtttatatttcatttaggcactgtgtctacttctcacgagttcata

SEQ ID NO: 357737 - DNA, 122 bp, Homo sapiens
taaccgaacttcaagaatcatttagctcattctatgactggaggtctcccaggcagcaaccgcagcccacgaagccctcagcgggtgcctctgccatctcggcatctccaccctgggctctc

SEQ ID NO: 357738 - DNA, 122 bp, Homo sapiens
tctcaattacttccacctaattgccctggcattaagaaacagttccccctgtggcctcaacgtgcaacagatctacagtttcactcggtatgtgccgggggccctgcgaggagggggaagtg

SEQ ID NO: 357739 - DNA, 122 bp, Homo sapiens
gctggcaccagccctatagggatcttgtgaggaccgagcccccgaacaggcaaaaagtggcggtgcctggcacataggaggcactcccacagctgtggtcagctcaactacagggacccgca

SEQ ID NO: 357740 - DNA, 122 bp, Homo sapiens
gctcgctcagagaccgggctcctagcccagctccggccggcgccccggctcgggaggcgccggagctggggccagcggttacctgttgtccagcttaacggaaaccacatcccctccaagca

SEQ ID NO: 357741 - DNA, 122 bp, Homo sapiens
ggcgagggctgaagatcctgcacttaattctgcttggctgctcaacattcaaaagcaggtcgccaacgatctcccctttcggatcatgaagggaacccaagcaggccgcgggacccgtgttc

SEQ ID NO: 357742 - DNA, 122 bp, Homo sapiens
gccttcactctcccctctacccactccagccaggcttgcctcttcctccaggaaactgcccgggacagggtcctcagcgatctgtgtactaccaaatggaatccagtgttccattctccatt

SEQ ID NO: 357743 - DNA, 122 bp, Homo sapiens
gggggacagatgtaggctatggaacggggaccctgtgagtcttcggagcaagccagtgaacggcattcagtacccatctacagccggtggaccttcagaatgagtctctggagaaaaccggg

SEQ ID NO: 357744 - DNA, 122 bp, Homo sapiens
tcacctgaaccagttgaagcaggaggccatccagatggtgctgacgttggagcaggcagccggcagtgagcactacgacgcctcgccctgctccccgccaccgctctccaacatccccaccc

SEQ ID NO: 357745 - DNA, 122 bp, Homo sapiens
tgcctccacaggaaatcacacaaaagggcccattttggtgagtaaggggatttgcaagctcgctgctctccgtgcccaggtcactggggttggctgaatggtttactctcattctttctggt

SEQ ID NO: 357746 - DNA, 122 bp, Homo sapiens
ggaggggctgcgtccccccgcgcatctggggctgagcggggctagcagggtctctggccgcggctgtccagtccgcaggtctatctgttcacgcgtcgactcgcccgactgccccactctcc

SEQ ID NO: 357747 - DNA, 122 bp, Homo sapiens
ggggcagctgggaatccggaatgctgcccgatggccctgggtcctcgctgtggggcaatccgggcttgcagacgaggtaaggtcgattccatttggcccggggatggtcacacgcgcggggg

SEQ ID NO: 357748 - DNA, 122 bp, Homo sapiens
taccgggccattgcagagcggctgtgtgctctgggcttcctgcggacactggagcagtgtcgctacagattcaaaaacctccttcgaagctaccggaaagccaagagcagccacccaccagg

SEQ ID NO: 357749 - DNA, 122 bp, Homo sapiens
ggcgtacctacgcagcagctggaacgtgctggatggctttcttgtcttcgtgtccatcatcgacatcgtggtgtccctggcctcagccgggggagccaagatcttgggggtcctccgagtct

SEQ ID NO: 357750 - DNA, 122 bp, Homo sapiens
aaattgggctaagtcacttttccccaggaaagaatatttccctctcctgcatcaagtctgcgtggccatcctccccccaccatccaagactattaggttttgtccctgcacccttcactggc

SEQ ID NO: 357751 - DNA, 122 bp, Homo sapiens
atgatctgaactatgggagagcttctctattcacactaacgctgccactagcatgggtggcgatttggagactccacatgaggtcattgcaccagacagggaactcatgctgggtcactcac

SEQ ID NO: 357752 - DNA, 122 bp, Homo sapiens
ctgctacgtggccaccaccaaaaagccccagctgcagatttatttctaaatatgcaaacacgcagacacaaagggcaactggtaactaggtacgtggcggaagaatgcggcttctgtcaccg

SEQ ID NO: 357753 - DNA, 122 bp, Homo sapiens
tccacccatatctccacctctatttctccagcaacctgtgtttacttcccagcttcctcacgtactcatctgtacttgtttcagcaagttccaaatttgggtttacatattggaaattttat

SEQ ID NO: 357754 - DNA, 122 bp, Homo sapiens
taaccaaaggttgggctttcccatccaagtatcatggagggaggaaagggcaggggagcccgattctgtgcaggagggtgattctcatgcaacttacagtgaacacagtgccccagatcatg

SEQ ID NO: 357755 - DNA, 122 bp, Homo sapiens
aatggaaccataatgagccatacatagttcacagtcagttcccaaaaaatgaggccctaacgtaagatgttaaggactaaaagaggtcagaatcaaaagatattttgggctggacactatgg

SEQ ID NO: 357756 - DNA, 122 bp, Homo sapiens
tcctggccatcgccattgaccgctacattgccatccgcatcccgctccggtgagcagggccggggttacatctgtgcaaaggctgttggtgcccaggctttggtctgtgcccggagccaggg

SEQ ID NO: 357757 - DNA, 122 bp, Homo sapiens
cactgcggacctgagccgctaacagagactaaaggccggatcagaatcgcggagtgccggcgcttttcgaaagcagccgccgcggccgcccagcgccaagaatgcatcgcgagcagcgccat

SEQ ID NO: 357758 - DNA, 122 bp, Homo sapiens
aaccgacaccaactgtcttttaaccactcgcgcccaaagccgaaaggccccgcctcctaacgccagaaatcccgcccagtctcctcgtgggtctcagccccggaccacaaagacgtttcatt

SEQ ID NO: 357759 - DNA, 122 bp, Homo sapiens
tatttgcaaagttatggaactttcttctcttagagtccaagttgatccctaaaataaagacggacagagtcaaggatacaattctagtctttccgagctggcttttggcctactgtgcagca

SEQ ID NO: 357760 - DNA, 122 bp, Homo sapiens
ggagggaagggagctggtttgcggaggacccagtcagcgaagcgccgggattccttccttcgccgcgagcctttcgctgccctttcctctgcgcggaggccggcgctgcggcgcggtcccct

SEQ ID NO: 357761 - DNA, 122 bp, Homo sapiens
gtccagcagtggctgccaccagcgctccagaagctgcagggggcgtggtcattgtgaggtcgtcatgggaaggcggggccggcgggggaggtcggggggtgtacaaggataggggcgtggtc

SEQ ID NO: 357762 - DNA, 122 bp, Homo sapiens
ctctgctctaggcacttgagagtattttgaagacaagataaatgttcacagcgctcatatcgtgaacagtagagatgagagcagctgtgtaagaaaccagaagtaaactattctcagagtca

SEQ ID NO: 357763 - DNA, 122 bp, Homo sapiens
gggcggccggtccagagcctccctccctgcgcccctgcctcccgcccggtgcacttgaagcgctggtcctgggctccagggcttctctggctgagcgctgcctcatccccacggtctccgga

SEQ ID NO: 357764 - DNA, 122 bp, Homo sapiens
cattttagattcggtaggtttcattgcaggagaaggtatattagggtgacctggttttcccgggtctgagaggtttctcaggacatagaacttttagtattaaaacaggaaaactgagacag

SEQ ID NO: 357765 - DNA, 122 bp, Homo sapiens
cccaccccagatttacaaaatcagaacctacattttaacaagatccgcagataattcatacgcacagtcaagcttaaggagcatcttgcttgtaagcccaacgtggacctcttcagcttcag

SEQ ID NO: 357766 - DNA, 122 bp, Homo sapiens
aagccgcggggcgtacctttagcacgggacgctgctttggggggatcgccctcgacacagcgcccctcccggcacctggccagaacctcccagggcgaaggtcggggccgagaagcttgtga

SEQ ID NO: 357767 - DNA, 122 bp, Homo sapiens
gaattaacccttcagggctgggggccgcgctatgccccgccccctccccagccccagacacggaccccgcagggtgagtttttgggggctgaggagggccattttctttaagatttagtggg

SEQ ID NO: 357768 - DNA, 122 bp, Homo sapiens
gtcaaggatcatgagcgagaacaccacttaagaggatagtgaactagtctgcatgtgagacgctgagatcctatgtcaggctgtgataggagggaaacagaaaccaaaggaaagaacagctt

SEQ ID NO: 357769 - DNA, 122 bp, Homo sapiens
aatcccagtacctttgttactagcccacagtcatttaccagctcatctctgggccaggatcggacatgagatgctgttaacattttacatgccttaagccatcaacagaaagataatttttt

SEQ ID NO: 357770 - DNA, 122 bp, Homo sapiens
cctccagcgccgccttgagcgcgccctggcccgccacatccgcccactgcaccgggggcccgcagtccaccatcttgctcgtcaccagctccagggccccagggtccacgcctttgggagtc

SEQ ID NO: 357771 - DNA, 122 bp, Homo sapiens
ctttgccatggtatgatttttgaggcacgtggtgattctgtctgatttgtaaactgacaacgtgatcagggccaaagaggaagttcagctaggccaaaccttcctaagaagaagtcactgtc

SEQ ID NO: 357772 - DNA, 122 bp, Homo sapiens
tgtttagattgtttaaaaggaattggaggctgtggctttccatccagtgtcgagagctcccgagcaagttgaacgtggcgccggctgcttagccagaggaagccagcgtctacctgtgtcac

SEQ ID NO: 357773 - DNA, 122 bp, Homo sapiens
gccttcactatcaactgcacagcgggcagaggcagaggaacacagaaccttctcacacagcgggataaaagggtgaatttggagctgacaggcaaatatatcttgtgatatatttctctggc

SEQ ID NO: 357774 - DNA, 122 bp, Homo sapiens
gcagacctacagcttctacactcggagccgttgtaggctgggagggttccgttcccacagcggacgcagctggcgctcccgtccgcgttccagcgcctgtaacagcctgcgtggggcagagg

SEQ ID NO: 357775 - DNA, 122 bp, Homo sapiens
tgtggtctgcttcctagattatacaaatcattacattttaatgagcatgaagtcaccacacggaggaaaatgtaaatgtgtaaacctcaagtttgccattatcttataagaatgggtgtgct

SEQ ID NO: 357776 - DNA, 122 bp, Homo sapiens
atccaaaagctatggccaccgcgaggaaaacaacagtcatgatgcgggccaggaggccgtcgccgtgggaatgcagtcggccctgcgcatgtggtgtctgagcagggcccgagaccttccag

SEQ ID NO: 357777 - DNA, 122 bp, Homo sapiens
ctcaagtacatggttattgatatgcatcagtgatcagccaactgccccacgcctgctgcccgagcagcggcagcgacagcagcagtagcggcagcattgcaacaatccctattttctcaatc

SEQ ID NO: 357778 - DNA, 122 bp, Homo sapiens
gtggggggagtgagtgaaggagggtaggaaggggtccccttataacccgattgggaagaccggctctctgagcaacaaaaatgagcgacattataaatatcagacatacaatgtcaaaagat

SEQ ID NO: 357779 - DNA, 122 bp, Homo sapiens
cggcctcaggggcagagatgtccgtttctttgtgcaccgaaagctctgagaaggacatcccgataccagtgaacttctagatttggaatgagcttcttaccgagcatctcacattccaaagt

SEQ ID NO: 357780 - DNA, 122 bp, Homo sapiens
atagttatttatacttcaaactttttttaattaaaaaaaataagataaatgatttggtaacgtgtagagagcagacattacgaacacactgtgctccattgtccttcatctttagtgtttta

SEQ ID NO: 357781 - DNA, 122 bp, Homo sapiens
ccaggcctgggatccacacacaagacacacacacccagatggaagcacaatgcctagtctcgctctttcctcaatcccgatttaaactaatttggcagttttatgagattaaagagggtgta

SEQ ID NO: 357782 - DNA, 122 bp, Homo sapiens
gcggggtcgtgacgtccttggcgtggctgcaggggaggccgcggcggggaaaatggcggacgggaaggcgggagacgagaagcctgaaaagtcgcagcgagctggagccgccggaggtgaac

SEQ ID NO: 357783 - DNA, 122 bp, Homo sapiens
gttgtgttgttgccacatcctgagttctgggctgcaagccaccctgctactcaccgatgccgggagagcaaccaaaatatgggaagtgtcgcaagttcctatgaaggaaggccgcctaacac

SEQ ID NO: 357784 - DNA, 122 bp, Homo sapiens
ttcctcctaagccagagatccctgggtccagggtgagggcacggcattcatgcttacccacgggctggtcaacaaagaggtgctgacctgagagtagggcacataacctcagccactggggt

SEQ ID NO: 357785 - DNA, 122 bp, Homo sapiens
tcgggggctcaaactgcctggagacaggcggggctcctgctgaggcttggtccgcccggacgagtaaggagaggagccagggaggacctgctggcgtgagacgcctctgcccggtgattggc

SEQ ID NO: 357786 - DNA, 122 bp, Homo sapiens
gacctccagcaataaaagcaggaattcaagtgccagatactcagcatattaggtttcctacgtaagtcacagggtaatatgttctaaatatctctaatgtgatccaaaaccctaaaaagagc

SEQ ID NO: 357787 - DNA, 122 bp, Homo sapiens
ctgactgcccggaccctggggtgtggagctcttggggcccttgggaagactgcagtgtttcgtgtgggggcggggagcagctgcgctcccggcgctgtgctcgtcctccctgcccagggcct

SEQ ID NO: 357788 - DNA, 122 bp, Homo sapiens
aacagcttggcctaaaagggataggatagagacagctcaaaatgaaaaaaggcctctgggcgcccactcttcaacaggcaggaagcagggtgagaaagctgtatattatgggctaattgtta

SEQ ID NO: 357789 - DNA, 122 bp, Homo sapiens
aatgcgcagagccccctgcagcccgcgtgctgcgccgagacctcagccgtcctcactgagcggaatggttgtgttgtttgtattgggacttttaaaaaatccagtctcaaagctaagtgctc

SEQ ID NO: 357790 - DNA, 122 bp, Homo sapiens
actgagatatactggcgaggcttccctggccgcaacgccgccgtaagtgctgctcccacgcgcggtatccccgcgtactgctcagtgcccaactccgacgggctctcaagtgccgcaacgcc

SEQ ID NO: 357791 - DNA, 122 bp, Homo sapiens
agatccatctcaaagcatgaaaaggccaaatatgaagccctggccaaactcgacaaagcccgataccaggaagaaatgatgaattatgttggcaagaggaagaaacggagaaagcgggatcc

SEQ ID NO: 357792 - DNA, 122 bp, Homo sapiens
tttctttacatcttcagcatatacttcaagcaagtaacaaaagtactcaaaagaaactcacgacattaattccatttgttatttcatctagtagtttttgaatgactactttgcatttagca

SEQ ID NO: 357793 - DNA, 122 bp, Homo sapiens
ataccttaatgtcaactcaagttccactcgggacttaagtgtagaataaaaacaaccagacgctgctcaaactgttaacaaattccctattggccagtgactttttctcctataaataataa

SEQ ID NO: 357794 - DNA, 122 bp, Homo sapiens
gacttctcgcgagattcgtagccgaagaaacgagatctgaggaggcaggaaggcggaaagcgaagggagtgtagaatatgttttaagaacgtgtgaaaacgaattgcctacttagggactgt

SEQ ID NO: 357795 - DNA, 122 bp, Homo sapiens
tggatctggccttctgtccctttcctcttgagttataaacaatcctgtaggcagtaccagcggcaggatatgtggcttagctgctaagaaataaactcacttttactgtgactttgattttt

SEQ ID NO: 357796 - DNA, 122 bp, Homo sapiens
cgacgcagtggttaggactgagcctgacagtagccaaagatccagctcacgggaaaacaccgtacccttactgacccctcccctccgccttctccccattctcccaccttgcgtccgggcta

SEQ ID NO: 357797 - DNA, 122 bp, Homo sapiens
cgtttcctgtgggtaactggaacatagcctaggtcggggtacccaaacctggttgcagctcgtaaccactcggaacgtttatgaaaatgcagattcctggatcccacctaaacgcactgaat

SEQ ID NO: 357798 - DNA, 122 bp, Homo sapiens
aatcaagttcacttgctgagtattcctcaggggacgggcaaaacctttcttcatggcgggcgcagagaccctccccgaccccgaccccacctcggcactcacgagttggcgtggatgaaatc

SEQ ID NO: 357799 - DNA, 122 bp, Homo sapiens
ggtccgcgcctgagccatgggaggcggggtgcccgccggcagaagtaaacagagcgagtacgcctgcgcacgctcttcctgggtcaagagccggctcggttctgggattctgaggctcccca

SEQ ID NO: 357800 - DNA, 122 bp, Homo sapiens
gaagtgcagaaagaggcacagcgcatcatgaccctgtcggtgtggaagatgtatcactcccgcatgcagcgcggtggcctgcggctgcaccggagtctgcagctgtcgctggtcatgcgcag

SEQ ID NO: 357801 - DNA, 122 bp, Homo sapiens
ccagggcttgggagagtgcgctccagggtggggtggttgctgtgagaccagatgatgtcacggagacgctcgggatgtttttgcccttccacactcttcacggcctcccgtttttgctcctt

SEQ ID NO: 357802 - DNA, 122 bp, Homo sapiens
cttgagcagtgtggtggcggtgagtgccgtgtgactttgctgtctgccatctggacccgtcggggaacgcagactctgtccagtttgtgttgcacttgctgaggaaaccccacccacttccc

SEQ ID NO: 357803 - DNA, 122 bp, Homo sapiens
tcaaacacaggatgcgagcgccctttggagaagtcgcgctcggcggaaacgctaactccccggccaagtgcaaatgtaaagaggccctgagagcactttgtgcaaatatcaggccgggaagt

SEQ ID NO: 357804 - DNA, 122 bp, Homo sapiens
aagagaagatggaactctttgtgaacttctgcgaggacaccatctttgaaatgcagctggcggctcagatctcggagtcggacttgaacgagaggtcagcgaataaggaagaaagcgagaag

SEQ ID NO: 357805 - DNA, 122 bp, Homo sapiens
tggccccaggttcgtggtcccatcttcaaccccagggtttactgtctctatattctctgccgtgaagtctaagggcagctcaaatttcataaacggagaaacagtcctatttgtcgattctc

SEQ ID NO: 357806 - DNA, 122 bp, Homo sapiens
tgcgggtgggcttgaagcgcgtggacttgtagaactggatgaggagctcgcggaccatggcggccaggtcttgtatgatctcctgccggtgctgctgcacgcgcacggtggcgcagtagcga

SEQ ID NO: 357807 - DNA, 122 bp, Homo sapiens
gtggctcctgttcccagggctgctactccccagcctgcatccaggggaccctgagctggccgtggaggccctccctgacctgagaagtctcacaatcataccatcctgctctaccatcttta

SEQ ID NO: 357808 - DNA, 122 bp, Homo sapiens
gtctctctccgcagtggcagaggacagtcaggcgccggggccgggcgctcgccaagggaacgcggcgcaacagaggggcggccggcgggctgcgcgggcagccaagggaggcccaggagggg

SEQ ID NO: 357809 - DNA, 122 bp, Homo sapiens
atcctttattgtccctattttacaatgagaaaacagatttcttggagagtttaagtagttcgaccaaaatcacacaggagtaagtggcagagtacagtgtgagttcaggtctgagttccaaa

SEQ ID NO: 357810 - DNA, 122 bp, Homo sapiens
ctgcccccggggagtctgtcctgaattcactgaaggaatctatttgtgactttcaaaaggcggctggtgtgcgcgctctttctcagtgacatggtgcgatgctggttcttagaaatgcggag

SEQ ID NO: 357811 - DNA, 122 bp, Homo sapiens
cccattatgtctgcatgatgggactactcccgtacagtggtgagcgaccttcccatgtcccggttcaaagacactgtagtggtggtttgaaagcagccctgatgggaccactgacatcacag

SEQ ID NO: 357812 - DNA, 122 bp, Homo sapiens
gggtgtgccaatgcctgttccaaacgctgcttttaatgatctcgggtggatacgcagaagcggcactgacagagcatccccttttcggtttttccgagaaccaccacaggctgttttccact

SEQ ID NO: 357813 - DNA, 122 bp, Homo sapiens
ctggcatgtttcctcctgctgcaggcgtgctcaggaagtgctgtgtgtgcatggcgcccgcgggcatggcctgtgtgctgggtgctgttttacttcactcacgtcatagaatcgcagacagc

SEQ ID NO: 357814 - DNA, 122 bp, Homo sapiens
caatgaatgttgccctactatagagcagtattatttgaggctgacaaaaataaatttgatcgatacatagagtacaagtgacagcacccaaaataaaaagttgaaagaagttcagtaaaagt

SEQ ID NO: 357815 - DNA, 122 bp, Homo sapiens
gtttttccaggctaaggatttcttcggggttttgtttttctttggtttggtttggtatagcgccacaagttgctgttgactcatttagcttctagccaaaggaaacccctgagcctcttttt

SEQ ID NO: 357816 - DNA, 122 bp, Homo sapiens
ttgcaaaggtatgtgaggagagagaagggaaggctcgtctggttttggtgaagtcaagaacggcttcctaaaaaggtgaatgaacaaagtctagaaggctgaaggctgagcagaagctgcaa

SEQ ID NO: 357817 - DNA, 122 bp, Homo sapiens
ctcccgcccgcccgcggtgggctcctgcgcggccctagcctctcagacgtgtgccgtccccgctccacggctcccagtcccatcgactgcccaagcggtgaggagtgtgggtgcacggccag

SEQ ID NO: 357818 - DNA, 122 bp, Homo sapiens
tcaaagctgcttcatgcagggatgggtaggaaatgagaactcttgcattgaccctgaccacgtgctccagtactttcaagcagcgagtgcccttggaccccacagtaactcatagcatatgg

SEQ ID NO: 357819 - DNA, 122 bp, Homo sapiens
gactgttctttcgactttggtccagtttgagtctcaggcacacaactttttggtctgtaccgctttggcctgtcccagaatctgacctcctcccacccccgcagcaccttccgctggcctcc

SEQ ID NO: 357820 - DNA, 122 bp, Homo sapiens
gcactcctcagcccttgggaggtagatgggactgggcgccgtggagcagggggcggcgctcgtcggggaggctcgggtcgcacaggagcccatggaggtggggggaggctcaggcacggctg

SEQ ID NO: 357821 - DNA, 122 bp, Homo sapiens
cttagagaaccgagtctttatgcatgaatgtacctgcataaccatttgctaaatagggcccggaggaggctcataggagggtgtaggggcaggagccttctggctttgagccccagggttga

SEQ ID NO: 357822 - DNA, 122 bp, Homo sapiens
caacctctacccactcctgttcaaagccagctacctgctggagcaggcggaggtgacgcgcgcggtgctggggcgctggcccctggaggagttccggctgggagcgctgctgggtcctggtg

SEQ ID NO: 357823 - DNA, 122 bp, Homo sapiens
aagtgatggggagcgataaagacaccaacttcaaaaccagggaccaggagggctgggtgtcgaggcgaggcgaggcgaagcccgggggataagggggtgtggagctggggacgggaacaggg

SEQ ID NO: 357824 - DNA, 122 bp, Homo sapiens
aaccccccgcccctcaggaagagcgatctgcgattgggccgcgcgagtgtcactcaagggcgccgagtctagaaaaggcgcaccgcggccgggcagagctcccacacgccgaagggctccga

SEQ ID NO: 357825 - DNA, 122 bp, Homo sapiens
caggggtctgtctgcagcctgcagcgccccagctgtgaccagagaagcattaaggagcggcgcgggcaagaatttggcatcaaaggaaatactgtaggtttcagcatcggtctctcccgctg

SEQ ID NO: 357826 - DNA, 122 bp, Homo sapiens
tctaataaaaatacaaaaattagtctggtgtggtggtgggcacttgtaatccccgttattcgggaggctgaggcaggagaattgcttaagccgggaggtggaggttgcagtgagccgagatt

SEQ ID NO: 357827 - DNA, 122 bp, Homo sapiens
agtacgctgctgcgaggggctcctggaagaagatgaaggcccgcccctttcccgaagcaccgcccactgacagcgtgttccaatcagaggcggagaggaacaaaagaggcgaggtccgggag

SEQ ID NO: 357828 - DNA, 122 bp, Homo sapiens
gctgcctctgggccagcgcaggcttctggaaggttctcctgagccagccaaggggcttcccgggtgacgtgctcctgttcctgggcgggcgcccctcccacaggctgctgcaggtcccgggc

SEQ ID NO: 357829 - DNA, 122 bp, Homo sapiens
cagtgtcctcctgctcacttgcatgagtgttgaccgctacctggccattgtgtggccagtcgtatccaggaaattcagaaggacagactgtgcatatgtagtctgtgccagcatctggttta

SEQ ID NO: 357830 - DNA, 122 bp, Homo sapiens
tcttcttcttctttttttttgtttttgttttttaatactgcggttccatcctctgcgcttcgtaggcgctgacacacacccatacgcacgacctgctgccccagggcctggcttcctgcctc

SEQ ID NO: 357831 - DNA, 122 bp, Homo sapiens
tataaaagcacagcgggatgagctgctttccaaaaaggatctcggtgattggaccgagctcggcgtgattgacaagagcttagtttggtaaagggaagacacgcaagctttcacagcaggag

SEQ ID NO: 357832 - DNA, 122 bp, Homo sapiens
gccctctcccaatcgcacaagtgtaggggcggggcattctttggggggcccaatgaggaacgcggccgaagctggcctgtcaagagaaggggctgggggcggggagatggtgagtcggggat

SEQ ID NO: 357833 - DNA, 122 bp, Homo sapiens
gtaaggtgaacccaccggaaggaataactaggccatcattctcagctgcctgctgtctgtcgttgtgtgcagagctacaggggtgatgcccacctcccaggtgacagccacccctcccaggt

SEQ ID NO: 357834 - DNA, 122 bp, Homo sapiens
atcacccttatacagtttgaacgggcttccgggtaccaacgatccattttgcccttgcgccgcgctcccgctgctctgcctttccccaaaacgcgccccaccaatccgcagcggcttcgtca

SEQ ID NO: 357835 - DNA, 122 bp, Homo sapiens
ccaatcacaggcagggaccagggtacccctagccaattggtgatgagacgggggtttcggcgcttctaggcatgtcaatgttttttctctacttcctgggtttttctggtcccttcaccgac

SEQ ID NO: 357836 - DNA, 122 bp, Homo sapiens
agctgccttcccgcagggcaagcctcgggacctgcagcccgccatgcctgagccttcccccgcctctgtgggctcctgtgcagcccaagcctccccgacgactgccgtcccctgctccacgg

SEQ ID NO: 357837 - DNA, 122 bp, Homo sapiens
ccaaaacacctgtatagttcagtctgaatttagaagtgtcacttgcaagagaggcagcaacgtcaggcccgtgagactcaagagaagtctctttccatgatagatcttcttatacttggtag

SEQ ID NO: 357838 - DNA, 122 bp, Homo sapiens
gctctggaggcagccccggggagccggcatggtcagggtcatgctgttttcagttgtggacgagtgcttagctttgcagacctgattctttatctctaaaacgagagagattaataactggt

SEQ ID NO: 357839 - DNA, 122 bp, Homo sapiens
agataatctaattgtctattgtttaacataacgaacaagaagctataaaatccaaactgtcgcccctactacacctcaaacaacctagatgttactgtttcacataggtggcacttagcagg

SEQ ID NO: 357840 - DNA, 122 bp, Homo sapiens
ccatttgggcgccaatctactaaagaaatcggccccagggtgtgaggtttctcacatgtgcgtgaaaacgcttcgagaggggtgcagccgcggacacaaaaaccgtggcttgagtccccgcg

SEQ ID NO: 357841 - DNA, 122 bp, Homo sapiens
taatttgtgtttgtagcccttagatgtgtgctgcgtgaccaagaacctcctggcgttctacgtggacagggtgttcaaggatcatcaggagccaaaccccaaaatcttgagaaaaatcagca

SEQ ID NO: 357842 - DNA, 122 bp, Homo sapiens
ggagtcagaactgggtcttaattatttttcccccagcacctagcttggtttctggcacatcgtatacacttaatatgcaacaaaagcaaaaacaacaacaataattataaccagaagacttc

SEQ ID NO: 357843 - DNA, 122 bp, Homo sapiens
acggctgtaacaacctggggatcatcatggaccactcaccggagccttccttcatcaacccgctgagcgctttgcagtccatcatgaacacccacctgggcaaggtgtccaagcccgtgagt

SEQ ID NO: 357844 - DNA, 122 bp, Homo sapiens
tctgaaattttaggggttccttttcccagcggcaggcatgtgctgatgtcttagtccattcgggctgctatgacaaaataccatagactgggtggcttataaacaacagaaaaaaaattatt

SEQ ID NO: 357845 - DNA, 122 bp, Homo sapiens
tatggccgtgaaatggggggtcagttagtgcctggcagcgagccatcactgtttccataccgcttgtctcaggccagtgcctgcttaactgctagaggaaaagaaaacccaagccttattct

SEQ ID NO: 357846 - DNA, 122 bp, Homo sapiens
ttgcgggccagctggagttccgggtgggcgtgggcttggcggccccgcactcggagcagacggccggccctgccggccctgggcagtgagggacttggcacccgggccagcggctgcggagg

SEQ ID NO: 357847 - DNA, 122 bp, Homo sapiens
ctgcggtctgatttagcccttttaggttaaaagctggagaaggggctgaagtctcaaacgcgcttagcagctcctgaacgcggttcccatcccagcgcgttctgagggaggccggggctaag

SEQ ID NO: 357848 - DNA, 122 bp, Homo sapiens
cctgttttgtgttttcttcccctctactctcttccattagcaaagaaaatggagtttgggcgctgtgtcaaccacgtaaacttttacttatacatcagtgcagaaaagaacaaaataggaaa

SEQ ID NO: 357849 - DNA, 122 bp, Homo sapiens
cttgtggttccccagtgtgtctgggctgtttcctacacacttgtattcgccctgcattcgcggcgtattcctttgatcccaggtggacttttatccgccgttcattttgccctgctttggaa

SEQ ID NO: 357850 - DNA, 122 bp, Homo sapiens
gggcccaaatggcagcatccccaccccacggcgccccagcgctgcaaagcgcagcccttccgtaaacggcctggggaaatgaagttggtggactctgcctgtcctcgtccggtgtcacctcc

SEQ ID NO: 357851 - DNA, 122 bp, Homo sapiens
cacttggcactctgcagccacggggatgaggctgagcactggttctcggcctcatggcgccgctggggccacagcctgacttcacctccccttcacccaagtcgtgtgatgggcacgtgtga

SEQ ID NO: 357852 - DNA, 122 bp, Homo sapiens
aatgctctcagcttccagaatcgcatgtgtctctcccctctcgggcgggtggtgagtccccggaggacacctgactccagccttcgcaccagcagcttcactggctctcggtccattaactt

SEQ ID NO: 357853 - DNA, 122 bp, Homo sapiens
gttattaatgattcgaaagcaacccatgcattagccttggatcctttgctgctttgactccgcaagggctttgtcattaagctggggaattattttcactgtggattcagtgggaccaggtg

SEQ ID NO: 357854 - DNA, 122 bp, Homo sapiens
actgataagagataaagcagtctgaagcctgctgcttcagccagcacagcacaccacacacgctcgcactttcaaaagcaatgtgatttctatggttcttaaaagctttcttcataagggag

SEQ ID NO: 357855 - DNA, 122 bp, Homo sapiens
tgatttaaatgttcatatttctttgtttaaagtctccctacttaaacgcatgctccaagacgtcagagtttttgttttgttttacagatttaaatgctgaattcttggtgcctggcatatag

SEQ ID NO: 357856 - DNA, 122 bp, Homo sapiens
aaacgagtgggcgcggtgtctggaattgggctgggggctgggggaggggagacaccattgcgatccatttctctggggtgtcagtttgtttaaggttcattgaaactgcagtagtatctcta

SEQ ID NO: 357857 - DNA, 122 bp, Homo sapiens
ggggctgcagcgggcggctcctgcggggtggctgtcggaggagcgcgccgaggagctgggcgggccgagtgggccgggcagcagcaggctgtgcctggaaccgcgggagcacgcgtggattc

SEQ ID NO: 357858 - DNA, 122 bp, Homo sapiens
accctctcgtccatgggaacccgggtggcatcaactcgattctcttcccgccctgagactcgagccaccgagagcccattcaatgctgccaacatcagcggcctcttctgtgcctccaggcc

SEQ ID NO: 357859 - DNA, 122 bp, Homo sapiens
gcttccaaggcccgggaggcgcgctctgtcaagttgctgattcgggagatagcagtgaatcggggttccaccacgcccccagaatactattcacagcagctttgtcattgaccgttctccct

SEQ ID NO: 357860 - DNA, 122 bp, Homo sapiens
gattatttgaagtaacaattgaactctgttatccacatgcactgcattcctcaccaccctcggacaccaaaatgccccaaagatgcttttgtacaccctccctattcgatcctaggcatgtt

SEQ ID NO: 357861 - DNA, 122 bp, Homo sapiens
gtgggattcctgagcccgccctcccgccctccgcgtgtgggattcctgagcccgccctcccgccctccgcagtccgcgtgtgggattcctgagcccgccctcccgccctccgcgtgtgggat

SEQ ID NO: 357862 - DNA, 122 bp, Homo sapiens
gatcagctccaggccttgcctagagtcgcacacaggaagtgaccacaacactaaggcatccggaggctgctggcccagaccacggaccgccccctgctccgccccttgaatctgcagccccg

SEQ ID NO: 357863 - DNA, 122 bp, Homo sapiens
agtgtctgaataccatctatctttatagtctgaaaagaacagtactgctgaagagttatacgtgtaggagttagagctacacatatttttgtttgggcttaattgtgggccttaagagaaat

SEQ ID NO: 357864 - DNA, 122 bp, Homo sapiens
ccttggtgccaccttagtgcctgttctgcggaggctccactggacagtgcagttgatgcccggggccgagggggctctgcctgggaggctgttcacctgcctgggtgcaggaccccagaggg

SEQ ID NO: 357865 - DNA, 122 bp, Homo sapiens
cttcatctgttagtggttttcaagagtagtagcatatgtggaccatgctgtaataatctccgaaagacagatttgttaaaggttcacaaatgcttaagcacaactatattcaaactaatgtt

SEQ ID NO: 357866 - DNA, 122 bp, Homo sapiens
tctgactgaaccacttcgcctttcagtgaacagagggacttggccaccgaagctccgagacgcccggaggcgcagcgctggacgcgctgacaggcgagcgcccacgggtcgcgtgcttcccg

SEQ ID NO: 357867 - DNA, 122 bp, Homo sapiens
tgcacggagtacgcatgcataggggagtggggacgggagagaaaacgggagccagccccgcgtttccgttcccttacgcacttccgggtccggacagcgctgcctgcagctttgaggggagc

SEQ ID NO: 357868 - DNA, 122 bp, Homo sapiens
cgagggggggctgttggaacttggcggggctggaccagcccggccgtgggaggtgcgggccgcggcggctgcagcggcggggtggctgcgctgagcaaacagcggccccttccggccgcacc

SEQ ID NO: 357869 - DNA, 122 bp, Homo sapiens
gatcactggctcccgcctcccgccccgtgcccggccgtggcagagcccttgtccgcccagcgcctatcgcggagtcaaagctgtacttcctcatcgcccggtacctatcggcgggcccgtgt

SEQ ID NO: 357870 - DNA, 122 bp, Homo sapiens
ctgccatgctgcctgtaaccaggtgggggcgccctctccctcctggagctgaagggacagcgccgccgctcacctacctggacccgcacgctcttttttgcagagggagggaggtgtggttt

SEQ ID NO: 357871 - DNA, 122 bp, Homo sapiens
acttttgaccttctgtctcatcagccaggccacaaacgcgatgtttacatagccatttaccggaagcaagagcctggaccacagagcagatcaccagcagcatatggctcacgtgtgggcga

SEQ ID NO: 357872 - DNA, 122 bp, Homo sapiens
gggtgcgctttgggcatggggaagtctgaggtctcggaaaatcttttctacatatacacccggccctcactttctggacgcacgcagcaaactctcaaaataaaaccaccaaaaaggagaag

SEQ ID NO: 357873 - DNA, 122 bp, Homo sapiens
gtgaaatgcggactggcagcgtccaccaggcctggcagcctgaggctcaaggtgtggattcggtgagttcatgtctgtgaagctcccaggacacgctgcacgcagccgtgaggaatgtcagc

SEQ ID NO: 357874 - DNA, 122 bp, Homo sapiens
agccgaagacagcacagacttgagcggcggcgccgcgggaggcactagagcgggcccgagcgaaacataaacaaacgcacgcacacccgagctcgggctctgaccgcggctcggctgcgcca

SEQ ID NO: 357875 - DNA, 122 bp, Homo sapiens
cagaatcccagaggcctgcgggcggctgacccggggcgagcagggctgggcctcctctgccgtgtctgggatctgacttccctgaggttaggtccggcacctgtcagaaaccaggcctgaca

SEQ ID NO: 357876 - DNA, 122 bp, Homo sapiens
cactccttcctcggcggcggggccccgacccccgcggctgggccgccacctcctcatcgacgccaatggggtcccctacacatacacggtgcagctggaggaggagccccggggcccgcccc

SEQ ID NO: 357877 - DNA, 122 bp, Homo sapiens
aaataagtcacagcagatgggggacaaaggcccatagtaccctgggtataaaaaaataaccggaatcctagtttgtgtcctgaggctagtgaggctcaaaacagggagattccggcaggatg

SEQ ID NO: 357878 - DNA, 122 bp, Homo sapiens
acccgggtgcagctcagcaagagaagccgccgccgggcccccatctcccactccctccggcgcagccgatttagtgagtccgagagcagatcacctttggaggatgagactgacaacacgtg

SEQ ID NO: 357879 - DNA, 122 bp, Homo sapiens
atctagcatggcccctggcatgtggtagaaactcaatgcttcaaagtcagttcgtggttacgagcacagatggcgaggccagattgcctgggttgaaatcatggctctgcctttttccaggt

SEQ ID NO: 357880 - DNA, 122 bp, Homo sapiens
aaatcatccatgttctcgggtgttctctttctgcagccaaaaatccagtgactttttccacggcccatctattaaacattaataaggtccaagtatcgttcttttcttaactaacttctccc

SEQ ID NO: 357881 - DNA, 122 bp, Homo sapiens
tctttaaagaagggatgtgggctggggcgcggggacagtcctggtggagcacggaaaatgcggctgtaaagttgtaattaccctattgtgccgagttccgagaaagttcttaaaattgttaa

SEQ ID NO: 357882 - DNA, 122 bp, Homo sapiens
gtctgcccggtccgggcagggagtgaggccacagtcagttctccctaggaggccgcgcagcgggtagggtatgggactgggggacgcaacggggacctggccgaatcagagccctcagcaga

SEQ ID NO: 357883 - DNA, 122 bp, Homo sapiens
cttctccaaagacttcattcaggcccttaaggtgcctgggcattttcaggtaaaaacagtcgttctgaatgtggaaggtataaaatacacttaaggagagcaatggtcttttttcccaggaa

SEQ ID NO: 357884 - DNA, 122 bp, Homo sapiens
ctagtctccccccttcaacagcacaccaaataagcccaagaagatgacaggaaccgtccccgccaacttcacacgagtactaaggcgaagacagccatcttgggccttacccaggcagctgt

SEQ ID NO: 357885 - DNA, 122 bp, Homo sapiens
aagtatatgcattcacagatgagaagcatgcttcagacaacacaaaattcatttttaacccggctttcttttggcagtaaatttctcttcctaatcatattttgcataaactaatattagag

SEQ ID NO: 357886 - DNA, 122 bp, Homo sapiens
gcccctggacaggtcgcgaggaggccgggtcggacagacctgcggcccgtggacaggtcgcgaggacaccaggtctcactggaggacgggccggcttctcccatgccctgggtcctccgcac

SEQ ID NO: 357887 - DNA, 122 bp, Homo sapiens
tatcttctggtctgtgaaagtcgcctcttagggagggaggtgaggtttcaaggaggctcacgccatagaggcagcattaccagctgcctcagtggacagatgtgtgttggcatgctgggagg

SEQ ID NO: 357888 - DNA, 122 bp, Homo sapiens
atgtggtgacgcaccctctccctatatattgccccatataatcctcttgtcactttccctcgaggagacagtgctttggagaatactctcagtgttctccttacttgggccaggtaataaaa

SEQ ID NO: 357889 - DNA, 122 bp, Homo sapiens
cctgcctgattctcctgcctcggcctgccgagtgcctgcgattgcaggcgcgcgccgccacgcctggctggttttcgtatttttttggtggagatggggtttcactgtgttggccgtgctgg

SEQ ID NO: 357890 - DNA, 122 bp, Homo sapiens
tccctccagatctggcagggcacctcctgatccagcgaggtgcccattgccactcccaatcgggctaaaggcttgccattgttcctgcacggctgagtgcgtgtgttcatcctaatcaagct

SEQ ID NO: 357891 - DNA, 122 bp, Homo sapiens
agatcccgaagttcgagcatccctcggataggccgggtgtcaggcctggtctctcaggcccgtccaggtgggcgtctttcactgcagaccttcagggccgggatgctgtggccatccctcga

SEQ ID NO: 357892 - DNA, 122 bp, Homo sapiens
ttagaaaacaatcaaagggttattgcatgagtctggatgaatcccactctcagctgtccacgggcccgaccacctcatctagccccctttttggcagggagaacctggctcccaagttctcc

SEQ ID NO: 357893 - DNA, 122 bp, Homo sapiens
tagtgtttgctacctccaattttactaaaggatacagcactttagcctgccaggggatgacgttgtctaaacacattttcaatgttttctttttaacagttaatatatttccaggatgaaag

SEQ ID NO: 357894 - DNA, 122 bp, Homo sapiens
gtcagatccctcgcggctcgtccggagcccctccccgcattcttgccacagagctggaaacgacgcccctgctggctgcctgtctcaagctgcacggactcctggggacaggacggggacga

SEQ ID NO: 357895 - DNA, 122 bp, Homo sapiens
gggaggagcgaggcaggtggcttgtcagctgacaagctgggactgccaaatgccctgaaccggcttttcaaaccatagtggtagatgttgaattccgatctccctactgcccttagactaga

SEQ ID NO: 357896 - DNA, 122 bp, Homo sapiens
aagtaaaacagataagagggaatgatataaatcttggaagaacatggcatgttttggaaacggcaatcagtcaagcaaagctggaatgtaaaagagatgaagagaaaaggaggaagtggcag

SEQ ID NO: 357897 - DNA, 122 bp, Homo sapiens
acctttcatgaggtaggtgcttccacctctccatcttggttctagggaagaccagaaaggcgtctttatagccaactggtattctttgccttgacacacatgtccaaaaactattaccactt

SEQ ID NO: 357898 - DNA, 122 bp, Homo sapiens
gcccccccaccccatgccgttcttctgaagtaagggtggctcactcgccactgggtgacacgtgagcccccaaaaaggcattcaaggttaaagaggcagtagctgggtcatggtcacgggga

SEQ ID NO: 357899 - DNA, 122 bp, Homo sapiens
gggcctacgaaggccgccgggagctgggcaggagccgagtcgaaggaggctgtttggagacgggagctgggcccacgggcgcagacgcgagcaaagagctgggcccggagaggaggccggga

SEQ ID NO: 357900 - DNA, 122 bp, Homo sapiens
cgtcgactacaaattagacctctgcttccaccaggcctccttgatagttcagctaagagccgtgcggtgagtctcctgacgttttatggcacttgacgctggtaaccactcccttcccgagg

SEQ ID NO: 357901 - DNA, 122 bp, Homo sapiens
cgtcgtggttggagtcaatgagctcctcaaactccttttttctgtctttcacccagttgtcgtcaatgtcctggccctgctggttctccacggtgcccacgggcagggagatgaactcgggc

SEQ ID NO: 357902 - DNA, 122 bp, Homo sapiens
tctccagcgcgcgggatccgctggcgactgacaaaatggctgctgcaccaccggaagtgacgcaaggcaagggcggggactgagccctgattggagcgcactctcgttttctggcttgatgg

SEQ ID NO: 357903 - DNA, 122 bp, Homo sapiens
atgggagcagttctcttggggactttaagggcaagccattacctgctgtgtgggggcactcgcctgtttctccatgttctccttggcttcaggcccctccagccatccagacgaagtgaggc

SEQ ID NO: 357904 - DNA, 122 bp, Homo sapiens
cccatggcgtccctgcaggcagggagccgcggagtccccgaaggccgctggatcaggaagcgctcagacgcccgcgcagcccgaagctttggcgcagccccgggggcggggcgccaggaggt

SEQ ID NO: 357905 - DNA, 122 bp, Homo sapiens
gtcctgcctatggagtgactgagcctagggacctagtcccgcctccagccctccccttgccgcctgcccaggcccgtctgctcacccctggatatacttctttgtcaagagaagcagaggtg

SEQ ID NO: 357906 - DNA, 122 bp, Homo sapiens
gggacagtgggaagcacaggtcatcttccaagaccaaattaacccccaggagcaatgggccggggcccggtggaaccgcctgtttcgagtcctgccctcagaaatgtgggccctgtctcgcc

SEQ ID NO: 357907 - DNA, 122 bp, Homo sapiens
gtcgaccccgaagccgggcctggggtcgtgggaaccccttcggcctcagccatctccccgcggcagccacaacatccggggccgtggcccgacaagtcacaataacagcaactgcgcagatg

SEQ ID NO: 357908 - DNA, 122 bp, Homo sapiens
ctatttttaactaatggcacttaacagagtagtggtttagaatacaagcttggcatcaagcggatctgggttcgaatttcacctcatttactgtatgactattggccctctaatatagcctt

SEQ ID NO: 357909 - DNA, 122 bp, Homo sapiens
gggtactggggaatagcctatgccgttcacattgcccactgccaggggaacatggatgtgcggttgccactttcagaggacccttaaaatgtgtgtgtgttcatgtgcatgtgcgtgcatga

SEQ ID NO: 357910 - DNA, 122 bp, Homo sapiens
ctgccctccagccccgcgaccctcagcctgggcagcccccgcggggtcctccgatgcccacgctttccgggaggccagcctgatccctgaatatgctgcttgtcccgtctgtctccgactcc

SEQ ID NO: 357911 - DNA, 122 bp, Homo sapiens
tgtatgacccaccttgtcactctgcattgatgatgttgctggcaccgggagtccgttcagcggtgcggtgctgtgcttcatcagggcttccgaagtagccatgcccacacatttatatatgg

SEQ ID NO: 357912 - DNA, 122 bp, Homo sapiens
agcccgacagcagaggacgctggcccaggcgtgggccccaccctcatagccggtgacccccggccagcaggtctgccactgtacctccaggctgccacccacaggcgggcaccctccaggac

SEQ ID NO: 357913 - DNA, 122 bp, Homo sapiens
atccggagaaagccgaccgctacctcacagagccccgcgaccaatgggcagcctagggggcgggtaagaaggcgtggcctcatctctttaaggagggtttatccgaagctgctctgggtcct

SEQ ID NO: 357914 - DNA, 122 bp, Homo sapiens
attaatgttgcggaagcacagccatagctctcactttaaaatgtacgtgtatgggccgggcgcggtggctcacgcctgtaatcccagcactctgggaggccaaggcgggcggatcacgaggt

SEQ ID NO: 357915 - DNA, 122 bp, Homo sapiens
cacgagtcggcagccgggacagcagtcggagagcgggcgcccgggtgccctgtgggttggcgcggactttccgagggctgagtcccggtcccccggcggtgaccccgcgcgcctgtggccgg

SEQ ID NO: 357916 - DNA, 122 bp, Homo sapiens
aatggcctggcacatgtggtcctgggaaatccccagcaccctttgggaagatttactgaccgtctatagaaggcctgtgtaggccaggcacggtggtggctcacgcctgtaatcacagcact

SEQ ID NO: 357917 - DNA, 122 bp, Homo sapiens
tccctccccgagcctgcagcctacgcgagccccgcggggctttctggagggcgggcccggcggccaatcatcgctcccacctggcccgattgacagcaggtgcccggggctggctgcgcgaa

SEQ ID NO: 357918 - DNA, 122 bp, Homo sapiens
gccccagcagcaccgcctggaatgcatgcgtgtgttctcagagctgcaccaattacaaagcgttttgcctaaagattacattataagtcatcccaggcactgtcttaaacacacacactcct

SEQ ID NO: 357919 - DNA, 122 bp, Homo sapiens
gaggaggggaagacatcccaggcagagagcacagcttgagcaaaggctcaaatggaggcacggtgaagaacttcccacagtcaaagtgtttggaaaaacagatgaagctagagaagtcacag

SEQ ID NO: 357920 - DNA, 122 bp, Homo sapiens
taagccacgaccgagctgccaggcggcagacctgagcccggggagcccgcgccgaccactcggggacaccggaagccagtgcagaaacgtttaatagaaataaaaaggtctgcatagagccg

SEQ ID NO: 357921 - DNA, 122 bp, Homo sapiens
tcaatccaggtacgctgtggtttctattcaacccactggaaactcacttccttgtgatgtcgaatagtggcatacagactacttaagtctgccttctttctgtgccctgccatttctcatca

SEQ ID NO: 357922 - DNA, 122 bp, Homo sapiens
ctacaaagactatttcaattcacaccatcaataatactgtagaaaaatgccagtgaaactcgcatttatcatgtttgtattctgcctttttttttttttttgatatggagacttgctctatc

SEQ ID NO: 357923 - DNA, 122 bp, Homo sapiens
ggctccgccccttccccccacttcccccccgtcgcagtgccctgctcccattggccttttcgtacattgcccgccctgtcattggctaatccggagcgctcggcccgccccccaggcctggc

SEQ ID NO: 357924 - DNA, 122 bp, Homo sapiens
cgagtaaaaacagtgacttttacatgggcgcaggaggtcctctggagcacgttatggagacgctggacaatgagtccttttacagcaaagcgtctgcaggcaaatgcgtgcaggccttcgga

SEQ ID NO: 357925 - DNA, 122 bp, Homo sapiens
ctttctcattaactgcccttttgtctctttgaagatacctgtctatgttccagtcgaatacgaaattctagtaattcaagtttttcaacttaccacccacattcctggattctgacagacag

SEQ ID NO: 357926 - DNA, 122 bp, Homo sapiens
cgtccaggaagactgcgaccccagagtactcagcctaggaggaaccgggggagggacctgcgcagctggttctgagcaaagactttggccaccgtggctctcactgacttcagcacgtgttt

SEQ ID NO: 357927 - DNA, 122 bp, Homo sapiens
aacgcaagcccggcgggggcccggggaggggccgccgcgttaatcccgccgcctcccacccgcacagcgggcgctcggcctgtattagccggataaacatattccttgaggcgaagcctggg

SEQ ID NO: 357928 - DNA, 122 bp, Homo sapiens
aggaggagctgttccgctccttgcagcaacggctccagtgcatgatgagggctggcaccacgctggtggagtgcaagagtggatatggcctcgacctggagaccgagctcaagatgctgcgc

SEQ ID NO: 357929 - DNA, 122 bp, Homo sapiens
ccgtgccgcggtcccctccagcccaaagcctccccgccccctccgcggctaactcggctccgggacaaaggactttctgtgtcgccgctttatctccgttccctgtgataacttggtctttc

SEQ ID NO: 357930 - DNA, 122 bp, Homo sapiens
agtacgacatgttcgccagggataccaagagttgagccagcaccgaccctgctgtgtaggcggccagcgtgacgctcctgcagtagccgctcactctctggtagtgctcggggctgaccacg

SEQ ID NO: 357931 - DNA, 122 bp, Homo sapiens
cccaaactgagtggcttaaaccaacagaaatttattctctcggctgggtgcagtgactcacgcctgcaatcccagcactttgggaggccaaggcaggtggattgcttgaggagttcgagacc

SEQ ID NO: 357932 - DNA, 122 bp, Homo sapiens
gctgtaggcaccggacggaagcaggcggtgtgaggaccgacgacgcgggcatggcgggggcggcctgcgagccggtggccaggccgagcctgacctccatctcgtctggggagcttcgcagc

SEQ ID NO: 357933 - DNA, 122 bp, Homo sapiens
tgagagaccagctcgggtctgaagtgtttctctatctactgtgctgagatctctccttctcgaaccctgctatgcctttgcatacgctgttttctccacctgccacgttctcaccccttctt

SEQ ID NO: 357934 - DNA, 122 bp, Homo sapiens
cagggcacgcgggggctcggagttccccggggctccccgagttggggcgtttggacctagcggacggggagaagagcggcgcagctcccgctgccgggcccgggactgcgagctcccgccgt

SEQ ID NO: 357935 - DNA, 122 bp, Homo sapiens
gcccccgcctccacgccaggcccacggagtcacacttcactcggcggccgccaggccctgcggctccgccccagctcctccgagctgtccccgaaggccgggctaatcccaggggcggcccc

SEQ ID NO: 357936 - DNA, 122 bp, Homo sapiens
ccgaagtctgtgatggtcccaagtccgggtacacggtgaagtaggccccatggacggggacgcccctgccaaatttctactgccatggcacggggagctgggggcttctcccgcaaatagaa

SEQ ID NO: 357937 - DNA, 122 bp, Homo sapiens
atcttccgcctccccaaatgtgatggcagtgaaccctgacctcagaggtccctgcctgttcgctctctccctagaaagcagtacctgcggcaggtcattgcagagtacgaggcactggaccg

SEQ ID NO: 357938 - DNA, 122 bp, Homo sapiens
actgcaggtagcggctcagctcctgctggctgcagcgggaccagtggaagcggtggaaggcggcctgcaccaggggcgccatgatgctgcccagccgcacctcgtcgccacagcggttgccc

SEQ ID NO: 357939 - DNA, 122 bp, Homo sapiens
gtgccagacagtggacgcaggacagtgggtgcagcacactgtgcatgagacgaagcagggcgaggcattgcctcactcgggaagtgcaagcggtcagggagttcccttccctagtcaaagaa

SEQ ID NO: 357940 - DNA, 122 bp, Homo sapiens
cgctctttttgtggaatctgcaagtggatatttggatggctttgaggatttcgttggaaacgggattatatataaaaagtagacagcaacattctcagaagcttctttgtgatgtttgcttt

SEQ ID NO: 357941 - DNA, 122 bp, Homo sapiens
cccctgccctctcaggactgcccagtccttgcacctcaaagttcgccttttcatttaaagcgtaaggcaataaataccctgcagcagcatgggagaaataagttgctggacaaggagaaaag

SEQ ID NO: 357942 - DNA, 122 bp, Homo sapiens
gaatgcttcctttcctggcccttaaaccccggcactggcctatggcggcggacgagggcgcgagtcaattctgccgcgctaggacgatgggacatgggcttctcttcgaggaggtaacatgt

SEQ ID NO: 357943 - DNA, 122 bp, Homo sapiens
tattgcaattccccgtcttgataaatggactgtgtttaggtagcgggcaaggtgaacccacggggcatttacaatgacatcacttgcctttggatgcccactgaaccaggactcatttctgg

SEQ ID NO: 357944 - DNA, 122 bp, Homo sapiens
cttccctggggacaatggcaagatggctgctgccttaacacatccacccaggatggacagcggccaccggtcaatgagctggttttcccatcgggactgggatctgcatcagagtcctcgga

SEQ ID NO: 357945 - DNA, 122 bp, Homo sapiens
cacacttatgtttttagtcaaagcctataagaataaacattacagtaatctctccttacacgtggttttgcttactcatggtctgcatcagtccaaaaatattaaatgaagaattccagaaa

SEQ ID NO: 357946 - DNA, 122 bp, Homo sapiens
acgactctcaggataacagttcacattccccactaggcaggcgctcgtggctttgggattcgttcccagtgggcacctcggagtggcaacgcttccccctgaagaatgagattttgagcgtt

SEQ ID NO: 357947 - DNA, 122 bp, Homo sapiens
ttaccggcagtgcgaggagaattactgtacggggcggatctcccacaggcgctgtcaacacgcaaccccacccgtgccccgccgcaggaccagccccctttggggcacccggcggacgtgca

SEQ ID NO: 357948 - DNA, 122 bp, Homo sapiens
cctcattcttgagtgatcctggtcgcgtagatgggcccgattgttgacagttcattattgcgcttttgtccatttaatctttcttgctgtgttttgcatgtgcatgccttaatgagctccgt

SEQ ID NO: 357949 - DNA, 122 bp, Homo sapiens
aatctgattttgacggagtgcaggccatttcaggcagaaggaaaagcagaaataaaggcgcggaagaataaagtacctgctctgagggatccctggaatgtaggaagcagaggcactgtggg

SEQ ID NO: 357950 - DNA, 122 bp, Homo sapiens
cacggggtccacagagggggataggaactattgaagggaattcattccgtatagtcagcacgattagggcaattggcctgggaatggtcggttagcacaccagttacattaatagaactaag

SEQ ID NO: 357951 - DNA, 122 bp, Homo sapiens
cttaggcccctgtcatattttatagcacaaggaagttctcttttgatgtacttttgaactcgtgtttataattatctgtttaaagtatatatcctgcaggattccaagtttcccaaggggca

SEQ ID NO: 357952 - DNA, 122 bp, Homo sapiens
gcctggccccggagcgcaggggtcccggtgcccccgccccccgcgcacacccaatgtcaccggccccacaatgtcacacggaagcggcgcccagccggctcagcacctacccccatcttggc

SEQ ID NO: 357953 - DNA, 122 bp, Homo sapiens
gcccccacgcccctcccctgcagagtggccagatggagtcctgagccctggacatgggcccggctttcctggatatcaggacttccaataaataaagactctgtatactgggctttgattcc

SEQ ID NO: 357954 - DNA, 122 bp, Homo sapiens
ttatgctccctgttcggtgctggaaccctccccttctctgattggccagatgcctacctgcgctcgccccagattgggcgccagctggggcggctcgttggctcccaggggccccgctctct

SEQ ID NO: 357955 - DNA, 122 bp, Homo sapiens
gggtgggggactagggcgggcccaagcgccaccgggtgggtgaggccgagcagggcgcggcgctgtccagagtccagtggggaacccggtagcccagtaggggctgtagagtgagtgtttcg

SEQ ID NO: 357956 - DNA, 122 bp, Homo sapiens
tccagggccgaggcctccttgacgccgagagcaggatggccacatcgttgttgttggtctcgagggagatcctgtggatggcggctctactggtgaagaccaagaaggccttgggcatgatg

SEQ ID NO: 357957 - DNA, 122 bp, Homo sapiens
gagataataattaaagcatgattggccggggcgcagagcagcaggtccgctttgtctccccggggcgccgcgcggtgcagttggggcggcgcggcgagcggggcgcccgggcgcgggtgcgg

SEQ ID NO: 357958 - DNA, 122 bp, Homo sapiens
ccccccgtcgctgcgcccgaattcgcctccagtagaagacgttcagcgggcgacttggcccggcgcctgggatcggtggctatgcgttccccaactagcaccctcgctgtccttgtgcagtg

SEQ ID NO: 357959 - DNA, 122 bp, Homo sapiens
tgtatcccatgtacataagctcccggaggagcggtggccgagcaagcctctgggcccgagcgttcggtgtctccacttcactcaggtatagtgttccctggaaccgggaggctgccagctgc

SEQ ID NO: 357960 - DNA, 122 bp, Homo sapiens
acaaaaccgccattgtcatcccggcccgttctcaatgagctgttgggtacacctctcagacggggtggtggccgggcagaggggctcctcacttcccagtaggggtggccgggcagaggcgc

SEQ ID NO: 357961 - DNA, 122 bp, Homo sapiens
caacggggtcaggggtcaccaggaagtgactacaagactctagctcagaggtcactaatacgtcacaggcagagtgaaggggcattattaaagatagtttgacaaattctttttaatctcat

SEQ ID NO: 357962 - DNA, 122 bp, Homo sapiens
gcggcccgagctattggtgacttcggtgccaaagtggatccacttgcccgacagcggctgcgtcatgatgtagacatccacctggaggggagaaggggcgggaggtaaatgggggccctgcg

SEQ ID NO: 357963 - DNA, 122 bp, Homo sapiens
tttgtgtgactttaagcaagttctttaaccactctgtgctcagtggtgtcatctgtacagcggcaataacaaacaacaatggctatttaagaggttgtagggatgggatcagactacttgat

SEQ ID NO: 357964 - DNA, 122 bp, Homo sapiens
atttcaaggtgccccttgcattctctgccaaaattcttttcacaaggggttcttgacactcggtgagaggcacagtcacatctataatcactgtaaaagtaattataattgttagcttttaa

SEQ ID NO: 357965 - DNA, 122 bp, Homo sapiens
caactgcctgacgcaaaaacgcagagggcccactgagctgtttaacacttgagccgtcctcggacggcaaaactaaaagagcgcactgtaacgcacaccctctggggctttaggggtcatgg

SEQ ID NO: 357966 - DNA, 122 bp, Homo sapiens
ccggccggcgcaaggccagacttctcgcctccactgtgttgattgcggttgccagggcagcggcgcattgctccccgcctcgtcctggtgacgtcacagagcaatgtccaatgggaaagcag

SEQ ID NO: 357967 - DNA, 122 bp, Homo sapiens
tggcggctgcctcagggtacgcctctggagtaccgtgcctaggttactaaacccttggatcgcgcttccccaaggagccacagacttactggctcttccagaattctgcatcctacttgcac

SEQ ID NO: 357968 - DNA, 122 bp, Homo sapiens
gagaccctggcctcgagaacacctgtcaggttatgaaggttagaagttctttgctgggcgcggtggctcacgcctataattccagcactttgggaggccgaggtgggcagatcacgaggtca

SEQ ID NO: 357969 - DNA, 122 bp, Homo sapiens
ccgtcggaaagacagcgcggacagccctcagcttgcagggggcggaggccgggcagcctgcgccctccgagccactgttctgcggcccaggcccatgatcaccctcctctcagcccacggac

SEQ ID NO: 357970 - DNA, 122 bp, Homo sapiens
tggatggattttccctgcgtggaaggagctgttacgcgccagggctctgagcagcatggacggggccccagcgcagccacgctcccgaacgaatgccctcctgggagggcccggctgcctgc

SEQ ID NO: 357971 - DNA, 122 bp, Homo sapiens
ctcgcccacgaagtaggtggcattggcagtgacgatctcaaagcagtgtgggttggtgcccggcggcacaaggctgaagttctgggcggactccaccgtgaggatttctgacagcggaattt

SEQ ID NO: 357972 - DNA, 122 bp, Homo sapiens
cagagatgcctgaagttgtctagaagagcagcctggatttatcctctggcccagactctgcgtctgactcaaccctgcaatgtcaccaatttgctggggattctgagccaggcatttatttt

SEQ ID NO: 357973 - DNA, 122 bp, Homo sapiens
gtgtggtctgtcagtctgtgccccatatggcagggtctctgtttcccagaacatattatccgattattatccctttaaaagtatggttaattttctgagcaaaacaatggtattaatatttc

SEQ ID NO: 357974 - DNA, 122 bp, Homo sapiens
ctgtcacagggcccacacccagcaagccacactggctcaagggcccagaactatccagaccgttgaagagtcccaccttgaggcacaggacagaagcagtagggagaaaactaaacattcct

SEQ ID NO: 357975 - DNA, 122 bp, Homo sapiens
aggcagcagtgcccccaccgtggccccccacgccccattaacccccacacccccattccgcgcaataaacgacagcattggcgccaagcctggccgcgtgtgattgcccgagacccgcaggg

SEQ ID NO: 357976 - DNA, 122 bp, Homo sapiens
agtggaatcaactatgacaagccgctgcctcccatccaggtggcatctctccgtgcagagcgaatcgcaaaagagaaaaaggtcagcgccctgggcccttctgcttgagtgggaaaatgtgg

SEQ ID NO: 357977 - DNA, 122 bp, Homo sapiens
caggcctccagaggtcagtaaattaaaaaatagacacatagataatcgccagggatgatacgtgagaacaccggatgtggagatgcacggtgtcacgctggtgaatcaaatcaagcagcttg

SEQ ID NO: 357978 - DNA, 122 bp, Homo sapiens
tccgggcctcagttttcactggataagcggtcgctgagcggggcgcaggtgactaaatttcgacggggtcttctcacgggtttcattcagttggccactgctgagcagctgagaaggtggcg

SEQ ID NO: 357979 - DNA, 122 bp, Homo sapiens
gctgcggctcaagtaggacgaggagaactgtctgcagctcatgacacagctggtagctcacgggttgagaagcagtgataggagtgctaccggctcccaagtgcagggtacagagctgtccc

SEQ ID NO: 357980 - DNA, 122 bp, Homo sapiens
ccaggcgactccgggaacatggaggcgggagtgagctcacatcctccctgccggccggggcgggccctgcgggggcggggccgggtggagagggcggggcctgggcgttggcaccctaccca

SEQ ID NO: 357981 - DNA, 122 bp, Homo sapiens
atttataaatggaatatgagagggacatggaaatagcatgaaagagtcacaattttcttacgatcactaatatcctacactaatgtatctgggtggcagagcggatggagccataatggtgt

SEQ ID NO: 357982 - DNA, 122 bp, Homo sapiens
actccatttgtagagggaaagagctgaagtccagctggggaaagctgtgaagagctgagccggggaaatcaggcagggctcgcccaagcacacagaaacttggatgataggtcagactccag

SEQ ID NO: 357983 - DNA, 122 bp, Homo sapiens
tccaccgagcggtacacttcacaattctgcgtgcccgaagtgtgcaggagccagaagatgcggatccgcacaaccacgctgggaaggaagcagatgacaaagacgatggccaccaccatgat

SEQ ID NO: 357984 - DNA, 122 bp, Homo sapiens
aagtcaaagcttttatgccttgagtattaagcttgctgggatcaatacatgggagcagatcgtggcaattctggaatctgggacaagcatcatcagagtgtgatcccatcttgagtgctcag

SEQ ID NO: 357985 - DNA, 122 bp, Homo sapiens
tggaggaaggaaagcccatgggtcagagccccctgcagctgctgaaggggacagcgggagcggctgtcacctggcgggggctgggaggctgggggtccccgagctcttccccgacctgctct

SEQ ID NO: 357986 - DNA, 122 bp, Homo sapiens
aacaagattcccattcttagcaccttcctcacagcccggggggacccggacgatgctgcccgccgctccatgattgatgacacctaccagtgcctgacggctgtagcaggcacacccagagg

SEQ ID NO: 357987 - DNA, 122 bp, Homo sapiens
agccacatcccccacagctggagctgcagcccccacagccagagccacagcccccacggccggagccacagcccccacagccagagccacaacccccacagctggagccacagcccccacag

SEQ ID NO: 357988 - DNA, 122 bp, Homo sapiens
cgacgctggggaaggtgacatcgatgaccagcacgccaggccggccttgggaggtccgcacgtcgcccacctggagggctacggagcctttcacatggcaaggcaccaaaacgcgggacatg

SEQ ID NO: 357989 - DNA, 122 bp, Homo sapiens
ttgagaaaaaccagcctcagatccgcctctgcaggagttgggcgctccccactccctgcacgccccgactccaacactggcttcagcttcaatcccagaaaagtggatcaaaacgacaggtt

SEQ ID NO: 357990 - DNA, 122 bp, Homo sapiens
tgccagcggtactcgtagcggggcccgccggccatgaccgggcagctggtctcactgcagcgctccgccatagtgccgtagatgaggttgatgcggttgaagaagtccaccacgtgcacggc

SEQ ID NO: 357991 - DNA, 122 bp, Homo sapiens
gctggagctcagggactggctgttccgaggcagagcggctgactgagttccctgagcctccgcgttctcatctgtaaagtgggtacgtttccacctgaagggtgtcgcacattgcgaatgcg

SEQ ID NO: 357992 - DNA, 122 bp, Homo sapiens
cccgcagtgggcttgtccccaggtctgtctctttgtggggctgtattataatgtgatcatcgggtggagcatcttctatttcttcaagtccttccagtacccgctgccctggagtgaatgtc

SEQ ID NO: 357993 - DNA, 122 bp, Homo sapiens
cgccgcgtggaagcttcgagtctcgactccactgttgacccctagacgagagtagtgcagcgacggggccgtgatgtgcgtcctggctttcttaacgacacctctcctctgtatttcctttt

SEQ ID NO: 357994 - DNA, 122 bp, Homo sapiens
agtgatgagtgacgattccacaggctttaagacaatgcattaaagtgtaggctcggcattcgaggccctccacaattagggctcgatgtgcattccctctgtcatccacacgttcaaccgac

SEQ ID NO: 357995 - DNA, 122 bp, Homo sapiens
actaagtccgtgctccatcacttcctgtcccaggtcgcggggccggacattttctccaagcgctttcctggcacagcgcgcaggcggcctgcgccaaagctctggcttcctccaggcgccca

SEQ ID NO: 357996 - DNA, 122 bp, Homo sapiens
tctcctaaccctgcgtgtggggaggtgacttactctgtctcttgacatccagtgttcttgcgggccaaataacaccccactgaaaaggtgttctgcttgtggacatcggatcccaattcctt

SEQ ID NO: 357997 - DNA, 122 bp, Homo sapiens
tgatttgctggccatcttgccgtactatgtcaccatttttctgacggagtccaacaagagcgtgctgcagttccaaaacgtgaggcgcgtggtccagatcttccgaatcatgcgcatcctca

SEQ ID NO: 357998 - DNA, 122 bp, Homo sapiens
aacgcaagcagagctggaaatgcttctggaccctgcatcttaggggaatggcattggaagcgatcttccagctggctcaccagagctggtgagtgcagcgtgtgcctctctgggctgattgt

SEQ ID NO: 357999 - DNA, 122 bp, Homo sapiens
aatgtcatcacaagtcacctacctgccctgtcagctcagcatcaatctcgctgggctgggcggtaatttatgactggtgcctgcaatttgcaaacctaatggggaggagggacgggggagcc

SEQ ID NO: 358000 - DNA, 122 bp, Homo sapiens
gccgccccctcccggaatcgacgtgactacttactacagcacccttcctgctggcgtgaccgtgtctaactcccctggagtgacgaccaccgccccaccacctcctgggaccacaccactac

SEQ ID NO: 358001 - DNA, 122 bp, Homo sapiens
tagcagaataaggtgccatctatggatgtggtgctgtgtggtctcatgtagccccatccacggcctgaccttcctgaaatccataaacgctgagctacagatgtcacatgtgtctaagatca

SEQ ID NO: 358002 - DNA, 122 bp, Homo sapiens
ccaggtgcgtgcgctggtggcgcagcagcgacagcggcttgttgaaggtcaggccgcactcggagcacgggaagggcttattgttgctgtgcatgttgcgctggtgtttgcgcaggtccgaa

SEQ ID NO: 358003 - DNA, 122 bp, Homo sapiens
gttctttacaggtcttcgagttacacgtcactgctgtttggatcccaaacaccagcggaacgcatgattccaggttgatttgttgactcacattaaggaaacccagctggagaaagtatcag

SEQ ID NO: 358004 - DNA, 122 bp, Homo sapiens
gggtcgggctggattgcatgtctgatgtgtgtccgatgaatgtccagtgcgtgtccaatgcgtgtctggtgagtggtgagtgtctggtgtgtgtctgatgtgtgtctgatgcatatttggtg

SEQ ID NO: 358005 - DNA, 122 bp, Homo sapiens
cattgttaaattgcctataaatacctggctactcaaatacactctcagtaactaataagtcgaataaagtatttgtcacatgtccatttatatttgcataatattgtctggaaaagcctccc

SEQ ID NO: 358006 - DNA, 122 bp, Homo sapiens
agaaaccagaaacaggacttgaatcatcatcataaaggaaagtgttaattcatcactcaacgaacaatgggccttccgctccatcacgtcttctgtccagggttcccagagccccctttact

SEQ ID NO: 358007 - DNA, 122 bp, Homo sapiens
tgttaccccaacaagggtgccacccaaggtttctagttcgagaaaaaaacttcccagactcgcattgctaatcacacctactgagtataagtaaaagcaagtgtggctctccccgaccagcg

SEQ ID NO: 358008 - DNA, 122 bp, Homo sapiens
tagtgccgggcttggtgtcggcggcgctgagggcgggggcggcgggcggctgctgggtctcggcctcgctgctcatggttgcggtgatggtgactgcggccggctgcggcagctgcggctcc

SEQ ID NO: 358009 - DNA, 122 bp, Homo sapiens
caccattcggacacggggacaccgcatatccagctcaccgagggcctggcgaactcaccccggacctgcagcatccagacaccacacatccagctcaccgcagggcctggcgaactcacccc

SEQ ID NO: 358010 - DNA, 122 bp, Homo sapiens
gcagtaagttcgtagccgccctccgaagccgggcgtgcatgggatggcagagttggcgtgcgtgcgtgagtccaccagtgtggcatgggcatgtaaggtgcgcggagggactgcaccttctc

SEQ ID NO: 358011 - DNA, 122 bp, Homo sapiens
gcaaacacagcataggctgacctcaggcccaggggctggcctggcacagcacatgctgggcgctgcccgcccctagatggaatccctcctcaccacggactgaccacagcctggctcactcc

SEQ ID NO: 358012 - DNA, 122 bp, Homo sapiens
ccgccgggctgcgggtgcagatgcgggagcggcgcggtgggcgggccgcgggtgcgggagcgcggcggggtgcggcagcgccggtacccgagggagcccgcaagacgcgccccgcccgccca

SEQ ID NO: 358013 - DNA, 122 bp, Homo sapiens
cgcactgctctgtgggacgcggcgacccctctcccgcggcggccgggaccccgcgcccaccgcgtctggagcccacctggcggccccactggctacatttccgacctggaccccggccggct

SEQ ID NO: 358014 - DNA, 122 bp, Homo sapiens
agtgtgctcccgcggaccgcctcgcgggctgccaaacggccggaccccctcagcgcgctacgcccccagccgcgctcgccctgcctgtgtccgccattacgcgattccccgccctgggcggc

SEQ ID NO: 358015 - DNA, 122 bp, Homo sapiens
gctgatagccagacttctaggggcttgactgcttttcccagactaatctccttaaagacccgttaagcaggggagagacggtggagactggatgaactggacagtgggggtagggagaaagg

SEQ ID NO: 358016 - DNA, 122 bp, Homo sapiens
cacttctgtgttgctgtttgctgcttcattgtgaaacctttttgctggatgtgttacatgcgatgagcttgggtgttataataaacagagaggaaggctgcaataatgtatttcagttagga

SEQ ID NO: 358017 - DNA, 122 bp, Homo sapiens
gaagctccccgagataacgctgcggccgggcggcctgatttgctgggctgtctgatggcccgggccgaggcttctccctgcgcctgggactgcggccgcctctctaaatagcagccatgagg

SEQ ID NO: 358018 - DNA, 122 bp, Homo sapiens
tgcaccaaccttactcacccttcggtttccttctcccttctgcagggtgagtggaagccccggcagatcgacaacccagattacaagggcacttggatccacccagaaattgacaaccccga

SEQ ID NO: 358019 - DNA, 122 bp, Homo sapiens
cccgggagagtcccaggcgcctttacccaggttcattttcagtttaggccaaaatccccgcgggttgggcggggagggggcggggctagctgggcggggctgactgcggggaccggctaggg

SEQ ID NO: 358020 - DNA, 122 bp, Homo sapiens
gggctgggccgtggagcgaggtggtgcggggccggacgcgggagtcaggtgaggggaaggcgattcccatcctggagacaccgcattagagatggggctgagtgcccctgagcctccagatc

SEQ ID NO: 358021 - DNA, 122 bp, Homo sapiens
ggtggctatttcctctcccgctgtggtccctggagacgccggaggagatttccgtgacaacggcaagctggctgcaacgaagccgcccacgtaggcctccccggcctgctggaggagagggg

SEQ ID NO: 358022 - DNA, 122 bp, Homo sapiens
agaaaataaatgcttttatgatgctccccacgcaggttctgcctgactccgggatgctgccgtcccagctctgggctgagccccttttgtaattacatggggaccctgtccccatgggcgca

SEQ ID NO: 358023 - DNA, 122 bp, Homo sapiens
tcgatgaattgcgttaggacacctgggctccgggagagccgttccactccgcaaagtaagcgtgttatgtctacaacccaacggggacgcgctaagagccctaaaggccctgctttcatccc

SEQ ID NO: 358024 - DNA, 122 bp, Homo sapiens
ggcacaaacagaaatgtgaccaatttctacagctgcgaaaacgacctctgtgcagcaggacggagacaggggcagctggcgtccttgggtgggctctgagccccgttcatccctgagactct

SEQ ID NO: 358025 - DNA, 122 bp, Homo sapiens
catcaaaagaaaggtggtgggattgaggagggaaagaaatgaagggcatagaaaattccacgaagtggatcaggagttgccgaataaagaacagttaactaaatgtggtttattgatgatgc

SEQ ID NO: 358026 - DNA, 122 bp, Homo sapiens
tatgtggcactgacctgtctaaagagaggcttctgttcttgattcaagcaagagttgaaacgtttctgcgctctttgtaccaggtataaatgtagtgagtgtatgtcataagccattgtgtg

SEQ ID NO: 358027 - DNA, 122 bp, Homo sapiens
acctgccaggagaggggtccaaggttcctcccccacgcccccctccccagtccctggctgcgtccccagccctgccgcagaaacactccccatgctcaggaagcctgagtcctctcaggccc

SEQ ID NO: 358028 - DNA, 122 bp, Homo sapiens
caatgccccaactccctcccggaaccttttgctccgagccccccgccagcgccgcaatcccgtcactgtattgtcctcctcggcaccgagcgatctgatccgccgagccagaaagacacccg

SEQ ID NO: 358029 - DNA, 122 bp, Homo sapiens
ataaaggggagctaaataaactatctcaacggccacttctagggttaaaagtctctctaacgcctcctcccaggacgtgccaccccgggcgctcctacgcaagcattttctgggggcctgac

SEQ ID NO: 358030 - DNA, 122 bp, Homo sapiens
gagagagaaaggaaaagtgagcacagaattcacctgaacacctcaggcaggaaactgtcccgagctccctttggggagagccagacagtgcttctgagtgaggacacatcagagtaggaaag

SEQ ID NO: 358031 - DNA, 122 bp, Homo sapiens
actgactcaggtcccggcccctcaactctcctggagggctcgggccaggctcgggcctggcgacctggaggacatgtctgaagccacccccttggatagaaatgattctgagaatacagggg

SEQ ID NO: 358032 - DNA, 122 bp, Homo sapiens
aaggccagccatgcctcccacacagctgcccaggctgggcttcctgacaagcttgtggctcgtggcaaggaggtgatgagatccaaatgtgcaaccacctccacatcagagctccctttcat

SEQ ID NO: 358033 - DNA, 122 bp, Homo sapiens
gagattctattataacccgtctaaacgattgcaaaattcctcctttggttttggaagcagcgtttgctctcccgtggctcggattctctgaggaccagggagttgacacacaaaccccgcca

SEQ ID NO: 358034 - DNA, 122 bp, Homo sapiens
tttagttcaaattatcctgctacaataaataaatgaagaatagctggaagaatgagaaatcgaggtgctgatacagcactgcagccacgtgggtgtcctcaaatcactttctggagctgaag

SEQ ID NO: 358035 - DNA, 122 bp, Homo sapiens
tggagaaagatgagggaatagctggtagtggatcagttagaacacataaaatatatttatcgattaagttgttcgtcttatatggatgcagttcacagtgcccccataacgattacaatagt

SEQ ID NO: 358036 - DNA, 122 bp, Homo sapiens
atccagaggcccgtctccccgtgatgctgtgcttcagcggtcacactcctggtctgctttcgtggtccgccctgtacaccgggctccgccttctagatagcagtagcacaatgagtgaaagt

SEQ ID NO: 358037 - DNA, 122 bp, Homo sapiens
ccgagctagcagtggcaacctgctggggtctccttccacgctgtggaagcttagttctctcgctctttgcaataaatcctgctgctgctcactctttgggtccacactgcttttataagctg

SEQ ID NO: 358038 - DNA, 122 bp, Homo sapiens
ttgtagaccctgccactttctcaattcgtacctatatcttaatgtcattttagggttgctcgctctctctcctgcactgggctgtaagccccaggaagcagaggctgcatctggttttgtgt

SEQ ID NO: 358039 - DNA, 122 bp, Homo sapiens
gggcacacgtagccgtgcagggtctcgcgcagcccgcgtcaggaccccggggcacacgctcgggcagggggcgtgtccccacgccaccagaaaaagtgttataggctgtttttttttttttt

SEQ ID NO: 358040 - DNA, 122 bp, Homo sapiens
aggctgcccagcccattctcttgctcagaatccttcccagactcagtgccctgggaagaccgtggatgggatggatgaatccagatctccaggcgagtggtgtcatctccaacatgccggaa

SEQ ID NO: 358041 - DNA, 122 bp, Homo sapiens
gccaaaataaaagaatgtgggcgttttcaggagatctggtcatctattttgcatcctttccgaaatatgttacttcctgcataatgaagtaaaaggatttgctgctgggcagtgctttcctt

SEQ ID NO: 358042 - DNA, 122 bp, Homo sapiens
aggcagctccctggcctccagaaactcacagtcagtggtgggagggccgtaacagacccgcgcagttaagaaccagatgatgatgttgctgtagtatagtttggagagtgcagagaaggaag

SEQ ID NO: 358043 - DNA, 122 bp, Homo sapiens
tgcaaatgtgctgaaagacatggactctcttcagaaaggcgtgtatgcaaatattttccacgcaaaatccaaggttttatcaacctcctgaagtccaagttaagaattttaatctagtctga

SEQ ID NO: 358044 - DNA, 122 bp, Homo sapiens
ccgagtgagaggctggggacaccgctgcttctcggggattttgcccacttcagtagaacccggaggacaggagtagggggggtggggcccctttggacccagccaatggctgtccacagagg

SEQ ID NO: 358045 - DNA, 122 bp, Homo sapiens
gtgggggtgggatatgaaccccccccagtcaccatcctgccggtcgcagagcactgcgtccgtgtgatgaacccccaccccagtcaccgtcctgtcggttgcagagcactgcgtccgtgtga

SEQ ID NO: 358046 - DNA, 122 bp, Homo sapiens
cgtgtggcttctctgaagccttggagggcgacgtggatgacacagcatcagccattccatcgcggggtggggacacagtggcggcaggaaccgtcctcagcccctggcggccacggcagttc

SEQ ID NO: 358047 - DNA, 122 bp, Homo sapiens
gctgacacataaaattaactatcatatatgtagaacatttagtacagcttctcagacattcgttaggaagtgctcactaaccacactctctggtccggtcttatgtccccaatcatgtctgg

SEQ ID NO: 358048 - DNA, 122 bp, Homo sapiens
ctcgctggaagttggagacctgcgcctggagcaaattgatttcctgtttcagtttcacgacgtggttttctgcctttacagcccgtttggtcatcagctccaggttctgctccacctgctga

SEQ ID NO: 358049 - DNA, 122 bp, Homo sapiens
tccagactccgaaggaacaaactctggacacaccaaatgtaagaattgtaacactcaccgcgacggtccgtggcgtccaccctcgcagcttctttcttgaagtcgccgagaccaagagcgca

SEQ ID NO: 358050 - DNA, 122 bp, Homo sapiens
tcactatgttgctcagtctggtctgtcccaaactcctgggctcaagcaatccacccacttcggcatcccaaagcatttggaattacaaatgtgagccactgcacctggccttgccatgcttt

SEQ ID NO: 358051 - DNA, 122 bp, Homo sapiens
cagtggcaggaccgcacacctccgtcttggagcccaaccaagcggtctccgtttcttgtccgggctgtaagaccagtccattcggtgcctggaacctcactcttagaagattgatacccttg

SEQ ID NO: 358052 - DNA, 122 bp, Homo sapiens
ctttgcagacagcaagcccatacatccaatatttaccaccaataccagggcagatgacttcggtgtgagacgtgaggtgagttcgaaaaggccacgcacaagcaaggggcgggggagcgggc

SEQ ID NO: 358053 - DNA, 122 bp, Homo sapiens
cattgagcgcatgggccagaccatggagcgcattggctctggcgtggagcgcatgggtgccggcatgggcttcggccttgagcgcatggccgctcccatcgaccgtgtgggccagaccattg

SEQ ID NO: 358054 - DNA, 122 bp, Homo sapiens
ctgtgtccggccatgggtggaatggcacccgcagcggctctggtaggaactgatggccctcgaggcttcagaacagccaccggccccctcaagccccgccccccagtgggcggagaaggcgt

SEQ ID NO: 358055 - DNA, 122 bp, Homo sapiens
acccagccttgcagggaccagggctttagggctcacggacccaacggccaggtcagaccgcgaaccgggaggagcgcgggccccaccctaaagagggcgcagccgggagctggggagcgggt

SEQ ID NO: 358056 - DNA, 122 bp, Homo sapiens
ctagtgtactttttccatgctaattgaaaatggtcatgttccaacatgatttcaccgcttcgttgtttctctcccatccttcttttagttggctgattgcaattctggcccaactcaaccct

SEQ ID NO: 358057 - DNA, 122 bp, Homo sapiens
catctctcagccccagaggagaggtgaaactaatgtcaaggttcctggcggatgtttagacgatggagaaaaagcatgcacagttaaataaacactcgaagtcactatactgtctaccatca

SEQ ID NO: 358058 - DNA, 122 bp, Homo sapiens
ctccgtcggcggctgcagcctcccggaacaatgtcattttttttatgaatgaaagtggcccggcgcttgaatgtgcgtgtcattcagcggcgtgacaggggccgtcgggaggtcagcgcgcg

SEQ ID NO: 358059 - DNA, 122 bp, Homo sapiens
tctttaggggacttgtgacagaattcccttccggggtcttcagttttttcagctgcaaaacggaaggattacactagaccttcgaggtgtcctgggcgcctgaaatgtgcagattacagagg

SEQ ID NO: 358060 - DNA, 122 bp, Homo sapiens
ctaaacaaaccatcagggccccgcatcgcctggcgcaattggaataacaaatgcgacgcacgcaaattgtccacctcgtgttgctaagcgattgtttgtcggccccgcacgcacagctcagc

SEQ ID NO: 358061 - DNA, 122 bp, Homo sapiens
cttactctgtggcaggcactgtactcagcaatttacacacattatctttcgtgtgtatgccgtccttgccaaagtcctgcaaagtacgcagtgtctccactttgctaataagaaaactggac

SEQ ID NO: 358062 - DNA, 122 bp, Homo sapiens
gggtggaggtgtcctgaggctgatggacagtgaccgccactggcccccaacatgaccacacgtgggtgctgaactcggggcgccgtgcccaccggcatggtcctcccgagctccgacagcat

SEQ ID NO: 358063 - DNA, 122 bp, Homo sapiens
agggacgcgtgtggccgtgttccaccagaactttctgtacacacatggtggtggcccgcccggacccatctggttaattcttgactctcagggcagcgtctcctgtgcctccaggagagggc

SEQ ID NO: 358064 - DNA, 122 bp, Homo sapiens
gctctgtctgctcagcaccaccaaggaacgccaggccaggaatgaaagtcaaggaggctgcgacattaatgacccacagtacgggtgagtcttctgcctctcccagttatccacagacttct

SEQ ID NO: 358065 - DNA, 122 bp, Homo sapiens
ccagacccttgcaccatcttggggcttcgtggtgcccgcagggtgtagaggaccattttgcggtgcccacggatgccctcggtggctacctcccgggacttccagacacctgtgggacgggg

SEQ ID NO: 358066 - DNA, 122 bp, Homo sapiens
gaaccgcctatgatgtcataatcacaatcccattacctcatcctgctgggggggagggggcggagagagaagagagggagtgaacagccctgggctatcctgagctttacaaagtgttctgg

SEQ ID NO: 358067 - DNA, 122 bp, Homo sapiens
cgccaggttcaggtcttccaaatgtaactttaatatgccctggagtttcttctttctatgcggtgatgagaatttctgagttgtatgctctgcttattgctgtgtgtttaattgcttgtgac

SEQ ID NO: 358068 - DNA, 122 bp, Homo sapiens
atgtaaaatactaatagctaagacttattgagttgcttatgcatgccacaggctgtgagacgttttgtgtgttcgctcattcaaacctcaccacctctgagatgtgtcattatcatcacccc

SEQ ID NO: 358069 - DNA, 122 bp, Homo sapiens
tttactatttgtttctagtgctaatagaaggcagctgtctcaggtaaaggcaaaatgctccgacatcatcagggaggtgtggactgctttgtgtaaacagcctgggtcatgttagtttccac

SEQ ID NO: 358070 - DNA, 122 bp, Homo sapiens
aagccaggagcaggctgtgagaggtttccctggaatgggggtctgggtgccccccacccccgtttccacctcccgcctgcaccgccgggagctccggaggagttcccggggacctagaaaca

SEQ ID NO: 358071 - DNA, 122 bp, Homo sapiens
cagcgcctcctccacggaagcgccgctgtccagctccgggcctggcacgttgtcgtactgcgatgcagtggagccccgcttcccgtcctcagcatccagggccttcatctttggccgcacgt

SEQ ID NO: 358072 - DNA, 122 bp, Homo sapiens
ttaccccccttcggccggaacgcgcatgtcccagtaattattattatcaataatgcattgcgatttatcatgagccctgacagctgattggcctgggtccaagacctcagagatcatttaaa

SEQ ID NO: 358073 - DNA, 122 bp, Homo sapiens
agaagaaaattttatggaattatataccacaaaagacaactttaaggacactggtttcttcgaatggaaactatacagttaaagtagattctggattgcttcatgctatcctcacttttaag

SEQ ID NO: 358074 - DNA, 122 bp, Homo sapiens
gcgggcgggccgggactggggcgtctggtcccgccgcgaccctcgcttcccttctccctccgccaccccaacccacaaggaggactttgcttccaacacagctcgcgccccgaggctcccaa

SEQ ID NO: 358075 - DNA, 122 bp, Homo sapiens
tgagcagaagctgtggggctgatttaagtgtgtgctctgacagctcccgggctgctccggcgcttatctcttctaatcttactttcattgacttaaaacagctgccggtttgccaggggaaa

SEQ ID NO: 358076 - DNA, 122 bp, Homo sapiens
aatgtaatggggtgaagaggagccttacggagagcagaaagtttcttctggcttcagaaccgagctgatgcagtgtctggggctgctgtctgggtcacaaaaataatttggatgactctgtg

SEQ ID NO: 358077 - DNA, 122 bp, Homo sapiens
gctgagttaaggcaggccactaaacacatgatcaaattagaggggtcagcatttatgactcgactttctttagcaaaagaagggaaggtgagcccaagcaatagacagagcttgatgaatga

SEQ ID NO: 358078 - DNA, 122 bp, Homo sapiens
cggccgcccccggcaccacgtaaaccgcccccgcccgcccagctgcggcccaggccggagcggagcctgccgtcctccgcctgcctgctgctcgcctccctagacctgcgcgtcgcttcccg

SEQ ID NO: 358079 - DNA, 122 bp, Homo sapiens
ggctgtctctgctgaagacagcatatagcaccctgccagagccaggcgcagccacggaggcggccaggcaggtgccaaaggcagcggcgtggatgtcggggtcccggcactgcaggtccatc

SEQ ID NO: 358080 - DNA, 122 bp, Homo sapiens
agtcagacctgtttgctaaaccatcaggccacgtcttatctgacccctcgcagccctcttcgtcgtggggtttgaaggcagcatctgagaactggcagtgaccaacctggcgtgtttgtgaa

SEQ ID NO: 358081 - DNA, 122 bp, Homo sapiens
agtagtccgtgttcccctgacagcagtccagaatgtggcggtgtcacttccttctgctgtcggccattctcttctgcacacaagtcttcttagacagaatttataggacactggaaatcaag

SEQ ID NO: 358082 - DNA, 122 bp, Homo sapiens
gaagttctccctgggtgtgagatgcgggttcgaacatgtggtgtgcgcgccagggctggccgcttccggttaagtggacgcggggacttgactgcgtcccctgccttgcaggtaactggaat

SEQ ID NO: 358083 - DNA, 122 bp, Homo sapiens
ggaaaatgcctaagtgcagcttctagacccaagggagacctaaaaatcctgggacattttcggttgtcacatggggattggtgggagggggtgagtggggtgttgctggcaaacctcccaca

SEQ ID NO: 358084 - DNA, 122 bp, Homo sapiens
tctatgttcctcaagccccctgaagctcagaattcactttctccttccagcacactattccgcatcctgtttcattaccttaagtaatgacactgcttttatttagtaaccaagctaaaaat

SEQ ID NO: 358085 - DNA, 122 bp, Homo sapiens
caagagctggccgctgaggaggcctcggccctggaactgcagatgaaggtggacttcttccggaagctgggctattcatccacggagatccacagcgtcctgcagaagctgggcgtccaggc

SEQ ID NO: 358086 - DNA, 122 bp, Homo sapiens
ccaatgaattaaaaagtatcttagtctaagacaagctctctttctacccagccacccccacgagatcccactccgccccaacaaccctcagcccccatcttctatcagcaaactgggcctct

SEQ ID NO: 358087 - DNA, 122 bp, Homo sapiens
cgcatctcggttattatgattgtgttgttgctatcacttttgctaagtcataaagctgcacgtcttttctgacatgggatttaggggtatcccaggaacagaaaagaaggctgtatgatgcg

SEQ ID NO: 358088 - DNA, 122 bp, Homo sapiens
aaacatataatctgagtaaaaactgtatatttatcaaatgcagcatcaagagaagccccccggctcccacttggtgctacctgttctgtaagctcttgctatatatatgtattttaaaaatc

SEQ ID NO: 358089 - DNA, 122 bp, Homo sapiens
catctgcctgccatagcctttgttcagacttcttgtcaccgtgaatcccactcctgtggccgggccaccctgttctgagaacagaaaggagcttttccttgctgttattcttttagcagaaa

SEQ ID NO: 358090 - DNA, 122 bp, Homo sapiens
ccgtcaggtttctccacaccgccggccgtcgaggctgctcagggcgccaagagggcagcacgggccttagattttgctctcggcctctgtccttcgcgtcctcgcccttaccgaggcgtggg

SEQ ID NO: 358091 - DNA, 122 bp, Homo sapiens
gccgagccgcggacccgcccagagatataaataacattatctgaggagggacattcctgccgggggacatcgctgctgccgggaccagatagtcccgcggcgggggcggggaggcggggccg

SEQ ID NO: 358092 - DNA, 122 bp, Homo sapiens
tacccaccacctgcgctaccctacgacccctacccaccgccacctgggcccttcgcccgccgggaggctccttatggggcaccccgcttcgacatgccagactttgaggacgatggtggccc

SEQ ID NO: 358093 - DNA, 122 bp, Homo sapiens
cgtcaagagacctcaacgcatgcgcacataccggcgaacggcgctccactctctccccagcgctctgtacctcacctcccacgtgaccctgtggaaggcaatggcagtaccccccgccgagg

SEQ ID NO: 358094 - DNA, 122 bp, Homo sapiens
cgagtctgcggggccaggtttggggcgggggtgcggagctggaatcgccgcttcctcctccgcgtcgtccccatgggttcggactccatggggtccgggtggggctggggacgccctccgtc

SEQ ID NO: 358095 - DNA, 122 bp, Homo sapiens
accccctcagactttccactgcgaagcgaaaccgtaagccctggggtgcggggggcgggccgggaggaggggaagtggggaaggtggagggaaggccgggcacaggggtgaaggcccagaga

SEQ ID NO: 358096 - DNA, 122 bp, Homo sapiens
tgttcttcccgaagctgcccttgttttgtggtggcggcacaggaagtgggcctggggatgcgtatgcccggatgaggtcgtcgtcctcctgctcctcctctgaactaaaaggaggggtccta

SEQ ID NO: 358097 - DNA, 122 bp, Homo sapiens
cactgcacagcagcaaagaggagggttagcaaggtaagtggagatgagaagagggtggaacgcacactcactccttggtcctggatataagcaggttctcacggcagtgtgagcagcagtca

SEQ ID NO: 358098 - DNA, 122 bp, Homo sapiens
ccgggcccaacagtttgtggtaaatcgggaagcgggccgggactacaattcccataatgccgcgccagctggcgtggacatccggcgcgccgaatccggatattttaaacctgagtctttcg

SEQ ID NO: 358099 - DNA, 122 bp, Homo sapiens
gccggccgctccgagtgctgggcccgccaagcccacgcccacccggaactctagctggcccgcaagcaccgctgcagtcctggttcccgcccgggttcccgcctgtgcttctccttccacac

SEQ ID NO: 358100 - DNA, 122 bp, Homo sapiens
agtatccatcttctctactggacatgagcaaaatgagccccctccttatccctaccattccggagaacagtccatcacttggagcataaagcttagtgcacaagtagatgaatctattcagc

SEQ ID NO: 358101 - DNA, 122 bp, Homo sapiens
gccctttggttgatggtctttacccagggtggcagctggggcctcccaggcagacatgctcggctcgaaaaggccctttaaggagttctgcctgaaggaggaagggacagccactagaacgc

SEQ ID NO: 358102 - DNA, 122 bp, Homo sapiens
atgtagaggaggcagctctggaaactgctttagggaatcactgcaaaccattttgtcaggcgtggattcagagtcagcatcccttccccccttcccccgttctccccttccccccttccccc

SEQ ID NO: 358103 - DNA, 122 bp, Homo sapiens
ttcctcttcttgagccagggatgtggctcccagccagagctgaggcttttggtaaacacacgcatctgttcaggcctgacctgttttcctaatcttcctggtccacagagaggcctaaagct

SEQ ID NO: 358104 - DNA, 122 bp, Homo sapiens
tttgagaccaggctgggcaacaaagcaaccttatctccacaaaaagttttttaaaattagcgaggcgtggtggtgtgcacctggagtcccagctacttgggaggctgaggtgggaggatggc

SEQ ID NO: 358105 - DNA, 122 bp, Homo sapiens
aaacacacacaccaatgacaaatcagcctcactgtgtgcctcgcattgccccatttaacccgcatcctgcgttgttggaaagtgtgtatgtgatgatgacgctgaggaagatgacagcacag

SEQ ID NO: 358106 - DNA, 122 bp, Homo sapiens
gctccaaccccagagaacggctgtgttgaggtgttttcgccccttcctcggtgctttgttcgaaaacatcctttgaacagtgtgcaaacaccaagcatggttttccactgggaaagccagct

SEQ ID NO: 358107 - DNA, 122 bp, Homo sapiens
gctttccccattcttctggctggaattctccggccgtcactgcagtgtccagagatgctgcgctgtagacccgggaccccttaggcgcctcttcccgtccctctgccaaagcgcaacgcctg

SEQ ID NO: 358108 - DNA, 122 bp, Homo sapiens
acaacacccacgccgagatgatccagaagctggtggacgtcaccacggcacaggtgtaaccgtccatgttccgtgtgagcagagtccctaccaacgggcaggtctgcatccggggagaatgc

SEQ ID NO: 358109 - DNA, 122 bp, Homo sapiens
ggggccggggcccggagcggggatgggcgggcgcagccgggattagctggcgggcgagggcgcagcgcagggaggaggaggggaggcggcgccggcgcgggcggggcggaggatctggagag

SEQ ID NO: 358110 - DNA, 122 bp, Homo sapiens
agccaggtcgctgtgagccaggctctgtcgctgcctctcgggcctgttatttattggcgccggctctgagcccagccccgtgccggagcgtagggaaggcagggaaaggtgctggggttcct

SEQ ID NO: 358111 - DNA, 122 bp, Homo sapiens
aaaacaaattacacttcttaaaagacacgtatttcctaaaaatgcctcctccctgataagcgatccaggctaacgttgcagctcagattaccctcccttggcacagtgggtaaaactgcctg

SEQ ID NO: 358112 - DNA, 122 bp, Homo sapiens
aacccgggcttagcggggggcaaagcggcaaatgaggggtcagcccacagggagcccgtgcggtcctgctgagccagcaggcgggacgcgcttagagacggggctgcccaccgacgggaagc

SEQ ID NO: 358113 - DNA, 122 bp, Homo sapiens
gctacaagtacccacctggcgtgggtagctcacgcctgcaatcccagcactctgggaggtcgaggcaggagtggatggccaacacagggagaccctatttgaaaacaaaaaacaaaaaaaag

SEQ ID NO: 358114 - DNA, 122 bp, Homo sapiens
ctgctgcctgtgtgttctcctctgtggagatgagcctgggatccagaagctgtctgagcacggctgtcagctgtgctgtccttcctccttctgtgctgagcctcttcccggggcaggagcac

SEQ ID NO: 358115 - DNA, 122 bp, Homo sapiens
tctggctcagcgcacaaatctgtccagggcagatggccgggcccccgtgggcttggccttcgcctccttatgatgctgctgctgaaggctctgccggaccttgtcctggggaccggagacgg

SEQ ID NO: 358116 - DNA, 122 bp, Homo sapiens
caaaggaaaataagatttcttgtaagaacaccgtgaccacatctttaaaatgacccatttcgtggctcccacaagatttacacctccacactgaggccggaagtggttttgcccctataaaa

SEQ ID NO: 358117 - DNA, 122 bp, Homo sapiens
ttcagaaataagtgctattctttagttattctacaaaatattgtactcccaaaagatttccggtactgttttatgcactgctgattaaaacctctgggtatgagagaagtctctatttcaaa

SEQ ID NO: 358118 - DNA, 122 bp, Homo sapiens
gttctaaagaaatcaatggttttggcttggcatctatcttgtctatacccagatgtctatcggtgtgcactatagcccacagttcatccacagtatcttcctctaaagaaaaccatagcaaa

SEQ ID NO: 358119 - DNA, 122 bp, Homo sapiens
ccgcctgctgcctcctggcggctcctgaactccagccccctctctatcagccgctcactccgtctcaatatgtctcaagatggcggccaatgtgggatcgatgtttcaatattggaagcgct

SEQ ID NO: 358120 - DNA, 122 bp, Homo sapiens
gcggcgcggacagcggctgccgagcaggggatctggaaagcactggcccctgagccccagcgcagcgcagggtgtcgcaggggttagcccgggtggcgggaagagcccagggagcaaggccc

SEQ ID NO: 358121 - DNA, 122 bp, Homo sapiens
atgatataaaagaaaaaacttaaaaaacaccccaaaccaaacaccaatggatccccaaagcgatgtgactccctcttcccacccggataaatagagacttctgtatgtcagtctaccctccc

SEQ ID NO: 358122 - DNA, 122 bp, Homo sapiens
aagttgaaatacctggaccgataccatactgacagtaagtgagggctggatttgaactcgcgtctcatatcacagcccaagatctttctgctacacatttaattcattcttaccatccaaga

SEQ ID NO: 358123 - DNA, 122 bp, Homo sapiens
attaatgaacaccatttgcacctgaaattcccttgaactcaacgcactgaccacaacagccgaggcctgagattcctcgcttgtgatctggcacctcctggatcatccccgtcccatttcag

SEQ ID NO: 358124 - DNA, 122 bp, Homo sapiens
tgcgccgtcgtcacgcgcctagcttccggcgatgggtggtcctgggatccggaggggaggcggggtggaggcggggcttggggctgtggagaggctgtggtaggtaggtgggtacagaccga

SEQ ID NO: 358125 - DNA, 122 bp, Homo sapiens
cgccctgccattttttgacattttaataggtgaaacacattttattttaatgattagtttcgatttttaattaggttgaatatttttcatgggtttatttgtactaaataaattttgatcta

SEQ ID NO: 358126 - DNA, 122 bp, Homo sapiens
agacaaaagaaaaacaggccagggaaaagcagtgtgccccggactgccgccctttctcaccgcctggggtctcgggtgtcctcctggcacccaggacagctggacctcgcctccaacccacc

SEQ ID NO: 358127 - DNA, 122 bp, Homo sapiens
gtaacagggagcagaggtgggagttagcgaggcgaccacgaaaacggtgaaggtcggaaccgacagcctcctccgagaagggtgaggaaagggtctgagcctccccgttccctggactccgc

SEQ ID NO: 358128 - DNA, 122 bp, Homo sapiens
gtgggagagccttagcgggagccaggctgcgccatggcttcctctggacagttctgctggcgtgccctgcttggcggggtacagtggggcaagcggggtataaacccgcttgttcagcttgg

SEQ ID NO: 358129 - DNA, 122 bp, Homo sapiens
gttttcccccaaactctttggcttcgcggagcgctctccccgccacagccacctccccaccgtccttctgaatctctgtccgaaacgctatagagaacagaaggagcctgcccaggtggccg

SEQ ID NO: 358130 - DNA, 122 bp, Homo sapiens
gctccgcaatcctgcggtccgcggtacccgcatgttgctatggcgacgggaggcagcggccgtctctctccatggcaacgggagggaaaagtttctggcaaacaggaatggggggtcatttc

SEQ ID NO: 358131 - DNA, 122 bp, Homo sapiens
ggaactttttgaatgaaaattataaaaaaaacacacaacaactaaagctggaattttattcgtaaggacaatgaagaatgactttccaaagcagatatcctgtttgttttagactctgggct

SEQ ID NO: 358132 - DNA, 122 bp, Homo sapiens
tgaagaccgccgcagcatcaggggcctggactcaactcctccccagagtcggaggtgttgcgccatgcccggggtggccaattcaggcccctccacttcctctagggagactgcaaacccct

SEQ ID NO: 358133 - DNA, 122 bp, Homo sapiens
tgcagcagacggacccaacgctgttgtcagtagtggtggcggttcttgcggtgctgctgacgctaggtaaaaggcggccggtggtcatggcgggtttggggcgggcagaggtccgggctttg

SEQ ID NO: 358134 - DNA, 122 bp, Homo sapiens
gggagcgagggccgggaggcgtctaggctgtggcgaggggagaagcatcccccatccctccgctccccgtctcgctcaagctcttcctgcgccacgggcaggtctcccagcctcgccatcgc

SEQ ID NO: 358135 - DNA, 122 bp, Homo sapiens
ctcccaggaggacctgtcctcccagatggtggagatggacaggaggactatctacccacccgtccccacggccctgaccctctgacctcaccctctccgctgatttcttcatgttagttcaa

SEQ ID NO: 358136 - DNA, 122 bp, Homo sapiens
gtatcccactgccgaggagcgtggccccacggcagcgctgatccatggagactgcgagaccgtggcacccctactgctggagaccacagtcctgatgtggacgcagggaacggggagcacat

SEQ ID NO: 358137 - DNA, 122 bp, Homo sapiens
cacgctcaggagcgatgagaggggcgccctggccacgcttcaggaaagcctgtgtctgcgcgcggggcaaggggctccacgacaaaaggacaagatttgacttaaattaagtttttcccttg

SEQ ID NO: 358138 - DNA, 122 bp, Homo sapiens
cctggtgccgagggaccgtccaaggggtccccgtccgcacctccctgccctgattccgggcgctcactgaaagtctcgatgatttgccaagccccccgcccccgccccccagcacagccggt

SEQ ID NO: 358139 - DNA, 122 bp, Homo sapiens
ttatcaaactttctggtagttaacactctgatgcattaaaagtggcatggcatatctggtcgggcgtggtggcttacacctataatcccagcactttgggaggctgaggtgggcagatcacc

SEQ ID NO: 358140 - DNA, 122 bp, Homo sapiens
tcccagcgtccctggccccggccccgctccgcagcgcgccgcaccccgaggctcgggccccgcacagctgcagccggtgccctccggccaagcccccgcctggcgtccccggccccagcccc

SEQ ID NO: 358141 - DNA, 122 bp, Homo sapiens
atacagaaagtgatgaaaggaggacgcaggctctcaatgacgtcaggtattcccgggacccgcccaccgtgggcgttttccacctacaggcaggcgtctccgggggcggggcttgctcaggg

SEQ ID NO: 358142 - DNA, 122 bp, Homo sapiens
aggacaggtggccttggggacacactggacgctctggtcggcgggatcagcagtggacagcgcccccggggcttcccctgcgccccagcaacctgcggaggacgtcgagcggattagaggtg

SEQ ID NO: 358143 - DNA, 122 bp, Homo sapiens
tgaacccaagaattcaaggctgcagtgagctatgatcgcaccactgcactccagtctggacgacaaagttgggggaagaaattagaaaaggaaagtctaatccaatttatttttttttaagc

SEQ ID NO: 358144 - DNA, 122 bp, Homo sapiens
tagaaagcatggaaagagcttaagtaaaatagctgcgtgtcggcagggcgcggtggctcacgcctgtaatctcagcactttgggaggccgaggcgggcggatgacctgaggtcgggagttcc

SEQ ID NO: 358145 - DNA, 122 bp, Homo sapiens
agtccgctcgacacaagcagtgaggaggcgtgcgggtgggtgcgccagggcggcctcccccgtcgcgctcgctcctcttacagctcttcgtgcttgatgcggtgggagcggcgcgtcacagc

SEQ ID NO: 358146 - DNA, 122 bp, Homo sapiens
gaacttctcggccccggcgctgactcagtcccggacgagcccctgcgccgcagcggcccccgacagcccagttctggtgtggaggtggctggtgctcccaaaacggctagcgggagcagggg

SEQ ID NO: 358147 - DNA, 122 bp, Homo sapiens
agcaaaaggaagagaaaagccagcaaaaaactcagtttgctcttaataacaactctttttcgcgtgttggtgagctgtctcatcagccagcaatggaatcattgttaaagactcctctggtt

SEQ ID NO: 358148 - DNA, 122 bp, Homo sapiens
ctccagctctcagattctccccagcttttggaggacctggaagttgaaaaagtcacagaacggctctggagtcactccggcacagcgtttgtgctgcctgtgtgttggagagccagcctacc

SEQ ID NO: 358149 - DNA, 122 bp, Homo sapiens
ccagagtctggctttggagtctctattcgtaaccactatctacagtgcttcaaagaacgacgcaattatcatctccttggttccaaataccctatctcttgtactgtgtgaagtttttccca

SEQ ID NO: 358150 - DNA, 122 bp, Homo sapiens
acacctgtttttggaaaatgctgcagatctatttccaaatactgtcttccagcccactctcgctcccactgaggcagcatcccacgggacccaacgtcaccacttttccagtccaaaaaatg

SEQ ID NO: 358151 - DNA, 122 bp, Homo sapiens
tattaatcagtcacgggagctctccatgcatttggtattttaatctggggggtgtgcacgcgatagcattgtgaaacgctggccccagagcaccctatgtcgcagtgtctgtctttgattcc

SEQ ID NO: 358152 - DNA, 122 bp, Homo sapiens
agtcagctgtcactgttgtttacgtagctccactcctgaatgaaaatggacccactcaatcgaaggccactcactgctttctcatctcccagggcgcccttacatgcctctggcacctgcca

SEQ ID NO: 358153 - DNA, 122 bp, Homo sapiens
gtgtttgtgtgttggggggggtgcgtctgtgtgtgtgcgcgcgcagtgcctgtctgtgtgcggacttctgtctctctctcaggtctctctctctctctctctctcccttctcgctctttccg

SEQ ID NO: 358154 - DNA, 122 bp, Homo sapiens
agagtggtttgtgttaacagctaaaaataggtgtagtaatatgattctcaaaatggacttcgtggaattttaatgccaagatatgattctgagtgtgctgttaacaacacacgtacggtaca

SEQ ID NO: 358155 - DNA, 122 bp, Homo sapiens
caccctttgcttgctttcccctgggcttgtgagcctggcccccttctccatcctgcagggcgttaacaaaggaataggacatatttctgctcaccttataggtgccttttaggaagttgatt

SEQ ID NO: 358156 - DNA, 122 bp, Homo sapiens
gtcctccccggccctcctcgcttcccaagatttgtttgcaacgtctacacccgtcaccaccgcataagcaccagggtgaggaggtctctttgcaggaattaatatcgatttcagtctcctgc

SEQ ID NO: 358157 - DNA, 122 bp, Homo sapiens
ctgggagatggccggactcgaactcgtccggcttctcgccattgggcttcacgatcttggcgctcgaactgaacatggctttctcctgggagaacttgcagcgcctgcttaggaagagaccc

SEQ ID NO: 358158 - DNA, 122 bp, Homo sapiens
caccattgcttttgctgcttttctggctttccctttcggacatgcgcgctcggagcaaggcgccctcgcactcagcttaccgcgcatgtacgttgccaggggtaacgcaggtagccaaagtg

SEQ ID NO: 358159 - DNA, 122 bp, Homo sapiens
ctagcgcctggccccgtgcctcggtttatccggagccggcgggggcggagtggggtggggcggcgaagcatcttcaccaccctgggacctcggccgggaaggggcgggggcccagtgtgggg

SEQ ID NO: 358160 - DNA, 122 bp, Homo sapiens
aaaatactacatcaatggaaaatatgaagactgagtcatacttacacttacacgttcatgcgcatggtgtcgctcttcactgagaacgtttccgcgaagaaagccgccgtttctttcttcct

SEQ ID NO: 358161 - DNA, 122 bp, Homo sapiens
acccctggtttcggaagagtgagagtgttgatttgggagggtgagggtggggcctgggggcggggcttcttggcctcagattagacagtgactttgacacgaagttgaagcaccttaagccc

SEQ ID NO: 358162 - DNA, 122 bp, Homo sapiens
gcagacagggggctgggaccctggtctcctgccttctttgagtttcctgacttgtccgttcgtcttcaactggcccactgttccccgggctcttaaaaccacacctcatttaggcctctggc

SEQ ID NO: 358163 - DNA, 122 bp, Homo sapiens
tcctgacctgtcagcaactggctggagctgagttgtccacaaaatgatgcttttatacaacgtaggtgcccttctgctcaccacagtccaatggaggcatttagtttgattttagtgccccg

SEQ ID NO: 358164 - DNA, 122 bp, Homo sapiens
acaatgtgtgctactcttgcttcagggtttaggcttggacagtacttagctttctgatagcggggctaaactagcctactgtgctatgtatatagatacaggcttagattctcctttatgct

SEQ ID NO: 358165 - DNA, 122 bp, Homo sapiens
agactctgcgggtctgagtcaccaggcagccgggctcagtcaaggagccgggctggggtccgggcggtaggggccaacctggccccaaagctcgctggttaggcctctgagcgggccggtgt

SEQ ID NO: 358166 - DNA, 122 bp, Homo sapiens
tgcggggagttctaggccgaccgggagcgagagaacgctcgggggcgaagcgcgccattgcggccctccccgccgcctgcggtagtccagtcccaagatggcggccaccatgaagaaggcgg

SEQ ID NO: 358167 - DNA, 122 bp, Homo sapiens
acactcttgtgggactgagaccttagcctgcaggatcgggtactgtctccagggagaaagcgtcacaatggaacagggttggaggacgcccagcgggtgtccgcggagactggatggaaccg

SEQ ID NO: 358168 - DNA, 122 bp, Homo sapiens
ttggagattccctagcgtgtcaatgggagaatgcattaggcacagatgccagcggggaaacgtgttcagaccagagcgggtttcaagggagcaagctaaggcgtttagcgggggttgagcct

SEQ ID NO: 358169 - DNA, 122 bp, Homo sapiens
agggacaggccctctccgtgctaccctctggagtttcttgcagtgtgcttgtgaagtgaccggtgatgtttcctttatgtgccctgtgatgggcggttctgttcctcctttttgtttaaaat

SEQ ID NO: 358170 - DNA, 122 bp, Homo sapiens
gggcggggtgggttgcggcagcagggtggaggcctacgtattttcgtgggggtggggttgcgacgcagagtttaccatatttctccagggttgctccggccgcagaagttggcaaggttgtg

SEQ ID NO: 358171 - DNA, 122 bp, Homo sapiens
gccgccgccgtcgctgccacctcccctaccgctagtggaagaagatggcggaaggcggagcggcggatctggacacccagcggtctgacatcgcgacgctgctcaaaacctcgctccggaaa

SEQ ID NO: 358172 - DNA, 122 bp, Homo sapiens
tttgttttagtgaaacaaaactgtgatgacatccctaagcttcctccagaagagcttcgacgtggagaaacggggtggacgctccacctaaccgcgccattgggaaaagaggaggcacctgg

SEQ ID NO: 358173 - DNA, 122 bp, Homo sapiens
agaagagaaactggctctttctccgcctgcgcgggccaggcccgaggcacgtgccccccacggggaggcgggacccctgagtcatttcctgtgctatcagctccggaagcagagtgggcctg

SEQ ID NO: 358174 - DNA, 122 bp, Homo sapiens
ccttgtccccgccgccggaatgaatgagcattctgcagcccgatgtccctgtcccctcctcgccgggccattctgattggacctggcccagtgcaatctgtccagacaagccctgcttgctg

SEQ ID NO: 358175 - DNA, 122 bp, Homo sapiens
gtcccgagccctgtcccgcagggaggcagctaaggcccggtgagaaattgagcacagtgtcggtggaccggcactgctgggggacccagtacaccctctgcagccactggcccgggtgctaa

SEQ ID NO: 358176 - DNA, 122 bp, Homo sapiens
ttggacggtgtggctctgtcgcatttgcatactcctgcaccgagttccatgtttcagggccgggtgtgcctcagtcgtgttctgtcatccgtcgtgtctaagtgtgtttccttcacaagatc

SEQ ID NO: 358177 - DNA, 122 bp, Homo sapiens
tgaggcaacactgaggaggagttctactccttcctcatccccttccaaagcccctgaactcgagtagccgcccctcccatcatggttcccttagtgtggtctcgccgcacaccccgcccatt

SEQ ID NO: 358178 - DNA, 122 bp, Homo sapiens
ttacaacctacttaaccatctataagtatgtgggtagttctatcacgtataattcaccagcgctattaactgtctttctttacaccaaatggtcccgagatcttgataattctgatgcatga

SEQ ID NO: 358179 - DNA, 122 bp, Homo sapiens
ccagagaaagcactcattcccttccttgggattcctttcctgcccatcagttatatacatcggggcagcttaagtgattattaaatactgaaaaacttctataccaattggtaaaaagcagt

SEQ ID NO: 358180 - DNA, 122 bp, Homo sapiens
atgcttgcacagcaagataggggtaatagaggagggtttaaggaggaagctacgcataaacgtgtgagtagggttagagaataccaataaggcatggtgaggccctggagctgttcacactg

SEQ ID NO: 358181 - DNA, 122 bp, Homo sapiens
gaaagatttcgtggccaggcctttcatttcacctccggatatcagaatactcagactgttcgtcttcccactcgctgcttccggaaggtccctgagccccaaggcccccgactctgcctcgg

SEQ ID NO: 358182 - DNA, 122 bp, Homo sapiens
gtcagcagcccctccaggggtctctgggacacttccctggcggcagagaccttccctggccgcccaggatccgcacctccaccgggcctcctcctccaggcagccctccttgaccacattcc

SEQ ID NO: 358183 - DNA, 122 bp, Homo sapiens
taacaactttttaaacgtagttatgtgccgttaccaacctgctggtccccatccgtcatccgctctttctgccactgatcaccttctcagcacttcctcatcaagttcctagttccctgaag

SEQ ID NO: 358184 - DNA, 122 bp, Homo sapiens
ccagggcagacctggaagaaaggaaaggagaggagaacaaacttctaaaagcacctactacgtgctcagctttaagcgaaattattaatttatggtttaccacttgccttcaaggaactgtc

SEQ ID NO: 358185 - DNA, 122 bp, Homo sapiens
aaagacgcagggaccgcactggaaacgcacaggcaggccagcttccagcacagatgcacccggccacgcaggaacgtcaaagcatcacaaagacccacacatgccccggacaaagtaaagcc

SEQ ID NO: 358186 - DNA, 122 bp, Homo sapiens
gaccacggacgggcgtggtggcgtgcgctagcgtgagcttgcgggggctggggagccacacggacgtgcctacaatgggcctttgaggggccctcctgcctgggctgctggaggggagtggc

SEQ ID NO: 358187 - DNA, 122 bp, Homo sapiens
gcgcggccggggcaggtggggggcccaggcgaggaagccccctctgcgccctgggctgggcgaagggccctgcgatgcgacgggggcagccccagcgcgcgcccagtcctcacgtcgccacc

SEQ ID NO: 358188 - DNA, 122 bp, Homo sapiens
gtctgctctagaatccaagagctactagaaaggctgggtccaaggtaccctgccccagcacgcccacaccacattgaacactccagctatattgctctgaagcgaaatcattttcataagga

SEQ ID NO: 358189 - DNA, 122 bp, Homo sapiens
gaccgggcgcctaggagcagggggcggcgccggtcgggtagggtcgggctggcgggagcccggggcggggcttgggcatggctggctgcaggtccccagccctgccacacggggaggcggct

SEQ ID NO: 358190 - DNA, 122 bp, Homo sapiens
cacggagacgccgagggcaccgccccctccgccggacacccgggcctggcgtcccgcctgcgccccgcaccctccgcgcctccgtcgcctgcctcctggggcccagagcccggccactcccg

SEQ ID NO: 358191 - DNA, 122 bp, Homo sapiens
actcgtcccatcactcaccaactcatgacatcttcagtccgaaaggggtcaggctgagaacgtggtcctacgtgttggtccactccaagaaaattataaagtaggaaaatactggtcttgtt

SEQ ID NO: 358192 - DNA, 122 bp, Homo sapiens
caggccgctgggcaccttacccctttccacttttattttgggcttctaagtttcttggagcgcaggcgcctaggctgggacccgaagagccctaagccagccctctttcagcacccgtcccc

SEQ ID NO: 358193 - DNA, 122 bp, Homo sapiens
agacattgggagtaatatcatcctatcccacgttgaaattaggaacagtatcaccgggggcgtgtacgccccctgcgatattgaaagtaatatcatcctcttccctcctgggtgataggaac

SEQ ID NO: 358194 - DNA, 122 bp, Homo sapiens
gcagcagctccacgaaagaaagaccagcccccaagtgcagtgacagcgcagagtagcgaccgagaagttcccaggccagctgccaccccgcccccatgccattccccagaacaggcacaggc

SEQ ID NO: 358195 - DNA, 122 bp, Homo sapiens
gcgccgcggtcgacataatcagcacccactgcgcaggcgcaaacagcccaaggctgcggccggctgcaaagcgggaacaatcatttacagggttgctgtggagaccaaaggcagctcagctt

SEQ ID NO: 358196 - DNA, 122 bp, Homo sapiens
tgcctggatgacctagggccccacattgaactggggcctgggggatgcataagtttgtcacgtaaggggcatgtgcaagaatggaagatgtgcaaaaaagggaggaggaggcatttcacgga

SEQ ID NO: 358197 - DNA, 122 bp, Homo sapiens
actgaacgcgcctgcgcggaaagggaagcatccacccttgccgattgccacctctttaaacgctgttccttcacttagcaggtgggatcaagctggcaagaggaggcagctgttgctgttaa

SEQ ID NO: 358198 - DNA, 122 bp, Homo sapiens
gggggagtcggggacccgggccaggtgggggtgaggcctgggagttctggtgagtggactcggggaggacagctctggagagcaagccccaccctgcccacagcaccacagtcacagtccta

SEQ ID NO: 358199 - DNA, 122 bp, Homo sapiens
cttggcgacaagtttagtgaggggatcgctgtgttcctttctagtccagttaaaatgacccgagcttttcccgctccctcacacacctattctagtacaggtcggatgtgtttttggggtag

SEQ ID NO: 358200 - DNA, 122 bp, Homo sapiens
aggtctccttccagaggcttccgctctcagctggtctcacatctcgcaggctcttcaatgcggaggccaagttatttataaaacttgcccatccccgactcttctggactttaacgctcttg

SEQ ID NO: 358201 - DNA, 122 bp, Homo sapiens
ggtcagggccgcggtgagcaccaggtcgccaggagcagccggcgtcgcctctggcgcatccgggcccatcccccacagcacccccaacgatctcggggtccagccacaccctccgcccgccc

SEQ ID NO: 358202 - DNA, 122 bp, Homo sapiens
tgccctgaaagcaaaactccagattcagctgggtgaccaccatggccaggcaatgcaccacgatcccaggagcacgaagtcagagcctggggtgctccagtcctctcctcctggcccacacc

SEQ ID NO: 358203 - DNA, 122 bp, Homo sapiens
ggacaggaaccctaactctgagcctaacctctgtgaggattcatgaatgcaagaaaaattcgcttcaacaaattctaagagagtttccaaatctgttactgggaggagctttgctacaaagg

SEQ ID NO: 358204 - DNA, 122 bp, Homo sapiens
ttggggtggtgtgcgtgacctgcatgagtgcctggggcatctcctgcacggaatggcacccgcaccaggtgcccctggcctcgccagccagaggaccagtcctggacggggagggggaggac

SEQ ID NO: 358205 - DNA, 122 bp, Homo sapiens
cacatttcccatgagcctaagcacgcgcttccgtcactcggcggccgcgggggcgaagcgcgaggccccacacagagcatgcgcatcccccttgacgtttgctgccaccccacggcccaggg

SEQ ID NO: 358206 - DNA, 122 bp, Homo sapiens
cgtgagaaccagcgcctggaggctgtcctggcgtggcggcgctctgagctggtcttctggcggtggatggtgaggaagcccgcgcatccctctcccggcatcccttcccacagcagccccca

SEQ ID NO: 358207 - DNA, 122 bp, Homo sapiens
tagtttaaacaaaaatacaatcttcagattttccccactgaaatcctgaccttgatgatccgggggatatttctgattgtgaccatggaaggaaaggagtcccactggcattcagtgggtaa

SEQ ID NO: 358208 - DNA, 122 bp, Homo sapiens
tgatttacctccatagttatctgagagacattcatccaatgacatgctgacagttaacagcgtctaaaaaattaaaaacctctactatcaaagaagaggtatgttatatgcgtaacattctc

SEQ ID NO: 358209 - DNA, 122 bp, Homo sapiens
ttttgtttgttttaataacaaccacttctctagatccgcttgctccctttcttctcttctcggtcccaggaagtaaataccctttcccagctcctctcctcctaacttcccagtccccccag

SEQ ID NO: 358210 - DNA, 122 bp, Homo sapiens
cacaagtaacccaggcccacatctatgagatctcagtcatttcgcagttagcccagcacccgccttgtccttgttcatcagatgcctgcacttgcaaattattctctcaagctaaccaccaa

SEQ ID NO: 358211 - DNA, 122 bp, Homo sapiens
aggcttaaatcttgctggtcctcctacacccagcatgaataccatggtccttttctgacccgccaggaggaatactctacctacccaaacagcttcaactgctctatctgtaccttcttaat

SEQ ID NO: 358212 - DNA, 122 bp, Homo sapiens
tgagaggcaggggccagctaagatcccagtgccttagaggccaacagagagcttgggagtcgcagacctgggctgaaacccggtgagagagagcacctgcactctcactggctgtgtcctca

SEQ ID NO: 358213 - DNA, 122 bp, Homo sapiens
cagtggcgcccgggggacgtgtcggaggcgaggcggggcggggcggtcccggaggcggggcggtctcggaggtaggggccgtcctggaggcggggccgtctcggaggcgggactgtcctggg

SEQ ID NO: 358214 - DNA, 122 bp, Homo sapiens
aaaccgggtgccggcaggcgccagtcgcaggtgtgctgctgaggcgtgagaatggcgtcccgcggccggcgtccggagcatggcggacccccagagctggtaagtcccggggcccgcggaca

SEQ ID NO: 358215 - DNA, 122 bp, Homo sapiens
agcctgtgtgccccaagaaataaagctgctcccctgccccagtagagaacgcccgagaggcgggagcgaggcaccaaagcacaagctgggcctctccggccttccaggccaccggccgcggg

SEQ ID NO: 358216 - DNA, 122 bp, Homo sapiens
cgggttgattccccgggcaagatgaaggtggctcggcagagttggagggggctggtgaaacgaggaggaattgcaggctgggcaaagtgttcctgcaaagagcgggctttgcaagccataag

SEQ ID NO: 358217 - DNA, 122 bp, Homo sapiens
ttataggccagtgtgaggattcatggagaccaggcaaggcatatgagtgccttgtcctcccgacacacagcaagctctcaccaatatgggtcattttcacacatcagtctgaggcctgttcc

SEQ ID NO: 358218 - DNA, 122 bp, Homo sapiens
aagatgctgccgaactgcgcattgaacagggccttggtgatgcacctggcgagggagacacgatgcgctcaaggggtgggcctggggtggtggcttggctgggactcctgccctggccccac

SEQ ID NO: 358219 - DNA, 122 bp, Homo sapiens
ggccagtcctgctcctgggagccagtatttctggactgccggaaagccttcttcttatcccgcggcccagcgaggagagcgccagccgttcagggtgacagaaaagcacagaggcagggccc

SEQ ID NO: 358220 - DNA, 122 bp, Homo sapiens
ggttatcagctctctggaaagcctctgggcgctgctgaagccagagcaggttacctagggcgaaccaaagatggggcattaagcaccaagtcctcccaagtgctggctgagggtccaggtgg

SEQ ID NO: 358221 - DNA, 122 bp, Homo sapiens
cccaagaccagcatttctgagaaggctcgggtcagtgtctgcccaaggaactggggagtacggggcttgggcggggaatgatcctccagttgaccatcctccggccacccaaagagttgggc

SEQ ID NO: 358222 - DNA, 122 bp, Homo sapiens
aattgtttattaatgcagcaggaaagtcgctgttcaggccctaagtaagctatgtatctccggaagtgtcccccatgttgcattctccaaaactgtgcagaattttctcctagttttccatt

SEQ ID NO: 358223 - DNA, 122 bp, Homo sapiens
gagatggcctcttttttcccctaaccatctggtggcattgcccacaccctgctgaggaagcgagctgcgttccaggcactcaggcaactctgcctctgccctagtgcagcctcatccataaa

SEQ ID NO: 358224 - DNA, 122 bp, Homo sapiens
cccaagtctatcagctttcaggcatctccaaacactccctttgccttcctattctgaattcgcacgcccaaaaaagctgagatcagagactctgtcagtttacttggtagttttttcacatt

SEQ ID NO: 358225 - DNA, 122 bp, Homo sapiens
atctcctcacttctcttctggttggtgctcccttctccagccactagccgaaagagttaccggcccagctccatggagccttggatggagcccctgagtccttttgaggatgtggctggcac

SEQ ID NO: 358226 - DNA, 122 bp, Homo sapiens
ctgcccctgcgctaggcgccgggcggtggatgcggcctggactttgggccaccaccgactcgggggagcccccttccgcagctgcctgccgactgaccacttgctcagggccggccctaaag

SEQ ID NO: 358227 - DNA, 122 bp, Homo sapiens
gtcacaggtcctttgtgctctcccctcccacaagcacccaccctgtcctcagccctcatccggctccccactgacagccctcaggaagcgagcagcagggccagaggctcatctgccgagta

SEQ ID NO: 358228 - DNA, 122 bp, Homo sapiens
gggagaaactgcagtgagcaaacacagtaggacctgagttgggctcgaatgtgctttaagcgactcaggacagagcagctgctctgtctcccagcttgcaagtgcagcctgcatttgtcact

SEQ ID NO: 358229 - DNA, 122 bp, Homo sapiens
gctgcagcccctgcttcctagccactggctcctgtgttgggccccagctactcccatgatcgccattgccactgtggccctattcaacccaaggcagctctgtccctgaagatcacccttgc

SEQ ID NO: 358230 - DNA, 122 bp, Homo sapiens
cgccgtaagtgctgctcccacgcgcggtatccccgcgtactgctcagtgcccaactccgacgggctctcaagtgccgcaacgccccgccccttgccacctccacacgtctcattggccagag

SEQ ID NO: 358231 - DNA, 122 bp, Homo sapiens
tgtctaggagttgtggctcctatgtacagcatagtggtggagattaagtgggataatatacggcaaagcatttttttagacagcgaagttctatggagttgtgtggggttcttgtaccatct

SEQ ID NO: 358232 - DNA, 122 bp, Homo sapiens
gcttgatagtgaagggagttgctgggaagagtcattacaacacaggcggaggacagcctgcggaggccacccacaggtcagcacagctggagaattaggtgatggggggccgtgatgttgga

SEQ ID NO: 358233 - DNA, 122 bp, Homo sapiens
ccagccgatgaagcgagtgcaaagggctgtacaaacgcgaggcactgaacaaacactgagcgtgccgtccagatgtcccgggggaggctgaggatccacaccgtggggagtgctctgccccc

SEQ ID NO: 358234 - DNA, 122 bp, Homo sapiens
cggaccgctgggaggagccgagtgcgggtaagcagctgccggcaaggttctcgccttggccggctctgaggagccatgcagggctctggagcggccttggaggtccggacggaggcggagct

SEQ ID NO: 358235 - DNA, 122 bp, Homo sapiens
gcagaggggcagatgccggctgcaaagggccgctgtgcgtgattttcctctttagccttccgccatgttcctaatgtttctcagtgatcacaaatgactattgtcattagaacattaagggg

SEQ ID NO: 358236 - DNA, 122 bp, Homo sapiens
ccaacctagcgcgcttcgtgtggcgcgagttaccaggcgacgccgcgtcgccaggcatgccgggacttgtagtccatttataagagggttgcgcttgcgctgtagccgcccagcgacctgtg

SEQ ID NO: 358237 - DNA, 122 bp, Homo sapiens
tgtgacccgctcctggccgggctgctcttggatgaggtactccacgatgttggtgtggcccgtcacgctggccgggagcaacggggtcatgccgtagctatcacgttccatgctggccttgc

SEQ ID NO: 358238 - DNA, 122 bp, Homo sapiens
gtcccaccacccgcccggcggctggagtctctgctgcccgaggtcctgatgggcacccggcgtgcctggtttcttaatcgagttccgtctgctcagctgttgcacgctctgtgaaccagccc

SEQ ID NO: 358239 - DNA, 122 bp, Homo sapiens
agggggcacacccgcggcctcactgcttcgatgggtccgctcgtgcttcctcaggctcgacgacaccacaaaggatttcccacatgcgttacagtggaaggggcgctcccccgagtgcaccc

SEQ ID NO: 358240 - DNA, 122 bp, Homo sapiens
cccagcactgatccaccagccgcgtctctggagcctcaggagccgcgcgcgtttgcttcgcgctcataagcatgttgtagaggatgctgccctgccactggtggttctcgcccgccatggcc

SEQ ID NO: 358241 - DNA, 122 bp, Homo sapiens
gtaaggtgccggggccagtttgggccgggactcctagaatttgaatcgggggtggtctaacgctgtcgcctgcggggtgtgcaggaggcccctagtgaagccaagagttcgtagagcctggg

SEQ ID NO: 358242 - DNA, 122 bp, Homo sapiens
cattatcagggtctaggcagatgctaaaaaagaaaaaacaatgggtggaagtcagcagatcggggcctcattcctgttctgccactcgccacctatgtggcctcaggcgagtcacttaacag

SEQ ID NO: 358243 - DNA, 122 bp, Homo sapiens
gtatttctgttccaattcctccaactttttaagctgctgccgaacttgctgcagactctccgcaactatagtgaacctgggaagacacaagacacagatgtctctatgagaaacagtccaga

SEQ ID NO: 358244 - DNA, 122 bp, Homo sapiens
cccaggcggccctatacctgacaggtcctcacccgggccttacggctccctcccgctccccgcaaaggggccaccttcatttactaaaagggaaacagccactcaaagggccgaagtgatcc

SEQ ID NO: 358245 - DNA, 122 bp, Homo sapiens
aggaactccagctattccaagcccactcctcttttttttaagaggaagaaatagaggttacgataggggacagccagaactgaggattttccagctcaccaccaaagcacaaaagataaaag

SEQ ID NO: 358246 - DNA, 122 bp, Homo sapiens
gtcacccttactgtcacctcccctgtaacctccgccccacatggcttcaccccaaagccccgcgctctgagcgcggccggctccaagctccaccgcctcagtgagcaccctccagatcccgc

SEQ ID NO: 358247 - DNA, 122 bp, Homo sapiens
cttaacactgcatttgtcaacatttatagaactttacagcacaaagagtgaaacttaaagcgtgtgaattttcaaaagtcatttaagagtccaggggatcccgggttggaatgcagactatg

SEQ ID NO: 358248 - DNA, 122 bp, Homo sapiens
gctagatactaaccaattccaacagaggcagcacatttcgtctggtctttgatttccatacgaacagcatttgcaaattcatcaggagtaagtttggtctctgcaaggatttcggtaatgtc

SEQ ID NO: 358249 - DNA, 122 bp, Homo sapiens
agccagggccctctaactggagctcttccagctggggtcctagaggaagtcccagctggccgcgggagggaggaggaggaagggaaagaaccaggcgccggggctgaagcggcggcaggaag

SEQ ID NO: 358250 - DNA, 122 bp, Homo sapiens
gcccggcagcagaagaaactgctggcttcgcctttggccgagttggcggctggacgaggacgcagagcccagctctcgagagttcaagcaaccgacggttccccagggctcccaggagcggt

SEQ ID NO: 358251 - DNA, 122 bp, Homo sapiens
ctcggccccgcacacgtatccactgtgacgcgtcggtcactgtcccctcggccctgcacacgtatccactgtgacgcgtcggtcactgtcccctcggccccgcacacgtgtccactgtgacg

SEQ ID NO: 358252 - DNA, 122 bp, Homo sapiens
gatttcaaaatgaatatgcataattaaagaaccagagatcagtgatcaggaacagggatccgcggtctggtccagggctcagtggtcaggaacagggcccagtgatcaggatcagggctcag

SEQ ID NO: 358253 - DNA, 122 bp, Homo sapiens
gtggacggtgagggtgccggcctcacctcggaggcatggaagtaccaggttacttcacatcgagaggaccgttttcctctttccagtcggctgcggttggcactgaagaatcttggtgctga

SEQ ID NO: 358254 - DNA, 122 bp, Homo sapiens
gacgatgatgtgtatgtcaacgtccctgaactggtatcagagctggtcttgcgagggggccgttgggggcaatgggagagaagcacggaaccccagagagaggctgagcaggaaggaggcca

SEQ ID NO: 358255 - DNA, 122 bp, Homo sapiens
agagggatacccccaaacccagggagcccacaggagcttcagaagggctcggctggagggcggggcccctgttgcacttgctcactggggactggggaggctctgatcgcagaccgggggtg

SEQ ID NO: 358256 - DNA, 122 bp, Homo sapiens
cccccgctttccccgccgccccccggtggggggcgcagaaccctcccaccctcagcccctcggcccccagcctggctctttaagttactacagaaacacggaggtcgggaagctccctccca

SEQ ID NO: 358257 - DNA, 122 bp, Homo sapiens
gaggtgactgtgtgtgtgtgtgtgtgtgtgtgtgtgtgtgtgtgtgtgtgtgttcacgtgcgccttttagtaaaagcaaagtttacttagtagcagtcctctctgggagtcccagcaagact

SEQ ID NO: 358258 - DNA, 122 bp, Homo sapiens
gaggtggaggggacgcggcggtactctggcgtgtgagccgagggtggagtgcagagggagcgggagcgggacgggaggtcttctagctttggttctatggtggcagatccggctgggttccg

SEQ ID NO: 358259 - DNA, 122 bp, Homo sapiens
cagcggagggcctaggacccccacagcacgcggtgccaaggctacgtgggctacggaggacgcagtggtctggggaggcccgcgggtacccccgcttaccaagccagccggcatcagattct

SEQ ID NO: 358260 - DNA, 122 bp, Homo sapiens
gcttcctcagcctcttctctttaggcccagctgctgggcaaggaattccagtgcctcctacgggggcagcacacttagatattcctggacatccagatagctcacatgtgctgaccacactt

SEQ ID NO: 358261 - DNA, 122 bp, Homo sapiens
ttccctgaccaggaagcgaggtgactgacaagccctgtggagcgtccctgcagaggactccggccagcctgactgacgcaatccaaagagcgctcccgggtaggaaatggccccggtggaat

SEQ ID NO: 358262 - DNA, 122 bp, Homo sapiens
tttgaggcgcggaacgaagtggcacgcccggatcccagctgatcagcggctgggctttggcgttggctcccccgggcgagaccattgtgactcctcgggaggggcgcacgccggggaggggg

SEQ ID NO: 358263 - DNA, 122 bp, Homo sapiens
agtttattaaaaagctctggagcaggaaacaaagggaagaacaactggaagagacccaagcggacccctggaaggacgagtgcagcctttgacctttggatttggggctggaaacattggca

SEQ ID NO: 358264 - DNA, 122 bp, Homo sapiens
atgtctgcactgcccaaatttgttaggcgttttgtttgttctctgatttcttttaaagcacgcatccaggctggatgaagtagctcacacctgtaatctcagcgctttgggaggctgaggtg

SEQ ID NO: 358265 - DNA, 122 bp, Homo sapiens
cgaagccccagcagaggcctgcctggctgtgctctgggtgccactcattcatgagggctgcgctgcgctgcgggcaccacgattcccacggaggggctgtaggtacttaaggggccctcaga

SEQ ID NO: 358266 - DNA, 122 bp, Homo sapiens
aaaaaatcttggatttgcaaaattactccctcgggttctgcccgtgggtcctccccatgccggtgtctgaaattccccaagcaaaacgcgggcactgcacttccccggaacggtagtagacg

SEQ ID NO: 358267 - DNA, 122 bp, Homo sapiens
ttgtgagcttttcaccctctcaaccagcttatgagtgtcacttggggatttggagagagtcggagggaggaaggaaatcttttctctttgtgtcttcagagagactcaggagattctgctta

SEQ ID NO: 358268 - DNA, 122 bp, Homo sapiens
cttgtcactggcttgcgggggtggtctccccacttgcagagtctggtctccacaggacaccgtccttcccttcccttccaaggggcaggccccacgcaccctcgcccaaaaaataaaggagc

SEQ ID NO: 358269 - DNA, 122 bp, Homo sapiens
tgtgtggctcgctgcgggcgttgaagttccctgttggccaggctgaagtgcctgcgcgagcgtgaggggacaaggactgccttgggcccagcgtggcggcgtttcggccaacccagttgggg

SEQ ID NO: 358270 - DNA, 122 bp, Homo sapiens
ggaggctgaggcaggagaatcacttgaacccaagaggtggaagttgcagtgagctgagatcgcaccattgcgctcaaccctgggcgacacatcaactttcataaagccaggcaggtggaact

SEQ ID NO: 358271 - DNA, 122 bp, Homo sapiens
ttccacctgaagccaaactgctaagcagttaaaactcaaggagccgtcggacaggtttaacgagagtgaagtgtgccgctccacacccacctttgcaagacagaactgcttcacgggtttga

SEQ ID NO: 358272 - DNA, 122 bp, Homo sapiens
aaaggtgaaaaggtcatttaaagggtcgatatgttaaatcaaaacttaaaccacaacctacggattttttaaaaatcacacgcattaatgttcagtatttagtaaactgttgagaaaagcaa

SEQ ID NO: 358273 - DNA, 122 bp, Homo sapiens
atgctctcatgtgcttctgcctgcagcttacttgcctccctcttgggctggttggaaagccgtgggctggttactatgggaattgatgggtgctgctggcagtgagagaaggaaagtacttg

SEQ ID NO: 358274 - DNA, 122 bp, Homo sapiens
agaggtcaagcgaaagcccccatctgccgttcctggttcatttacaaaaaaattggggcccggaaatgggcgaggaaggcctctggctcgtcgcgagagtgtgttttgaaagagtcgcagca

SEQ ID NO: 358275 - DNA, 122 bp, Homo sapiens
ctccctgacccgttgtgcttcctgagcgaggcagtgcctcgccctgcttcggctccggcacggtgcactgcacccactctcctgcgcccactgtcaggcactccctagtgagatgaacccgg

SEQ ID NO: 358276 - DNA, 122 bp, Homo sapiens
ccgtctcctcacctgccccacccgtggcctgggtttaaaatccacatacccgtctttccgcggccaaagtgatgctgccaggattggttatgaccccaactgccccgacccccagaagtgca

SEQ ID NO: 358277 - DNA, 122 bp, Homo sapiens
agttaatttggccagcttcttcacaattgaaacacaatttaaattcttgttggaatagtccgatcacttaaaatatggactatagacacattaccagttcagcctgtagaaagaacatgtat

SEQ ID NO: 358278 - DNA, 122 bp, Homo sapiens
tgcaggaggagcagggcggccccggtgggtcgctgctcggtgcctgagggcccctttccacgacatctggtggacttgagcggcaccgggaccctatcccagagctaccagtatgaggtgtg

SEQ ID NO: 358279 - DNA, 122 bp, Homo sapiens
cgctcagccagatctaccagtacgtggctggtaacttccctttctacaagcgcagcaaggcgggctggcagaactccatccgccacaacctgtcgctcaacgactgcttcaagaaggtgccc

SEQ ID NO: 358280 - DNA, 122 bp, Homo sapiens
ccgggactggtaaactttcaggcaaggactcaaccttgtatatttcaactggcccgaaaccgcgggcctgtgtgtacatagaattgctagcatttcccctccattccgcaagcaccttaaca

SEQ ID NO: 358281 - DNA, 122 bp, Homo sapiens
tgttaaatctgtaacgcaatacgtctggcagagccacgcagcacttttataatagcatgacggacctgtttgaaaacctcatgagaaggggcgggaaccacagtcagttcccgcccttctgt

SEQ ID NO: 358282 - DNA, 122 bp, Homo sapiens
gaggcttccaagttctctcttctgggcctcttctcactcactctcttttctaaggtcggccgggcaggcattgccatctctgagaagtttaaaaggtttctacagactaagtgaaatcatgc

SEQ ID NO: 358283 - DNA, 122 bp, Homo sapiens
atcactgctagatgaattgcccaggctacagatgtttcactaattatcttttcatcataacgatatgcaaacccacttgtatccctccacaccctcactcattacaataataatgtctcgtt

SEQ ID NO: 358284 - DNA, 122 bp, Homo sapiens
attgaagcgaggctggggaggggctggagctgggagtcacggagagatcagggaccagcgcgtcatgcatgggaagagggaagaaaaggagctgggaggtccctttaaaaggctgggcctgg

SEQ ID NO: 358285 - DNA, 122 bp, Homo sapiens
gttggagggcagctcttgcaatcttatcagaagctgaggtgagtgttacaaaggacagaccgtccctggccctccggggcaggagcgcagaggacactctgcaagaacttataggtctcttg

SEQ ID NO: 358286 - DNA, 122 bp, Homo sapiens
gggtctgggcaaaagacaagataatgatttcattcttttttatggatgcatagtattccacgctgtatatgcataacatggatacggctagagaacattaccctaagtgaactaacacagga

SEQ ID NO: 358287 - DNA, 122 bp, Homo sapiens
aggttggtgatggcggtagatgcagagaagtaggcagactggaatacagtgagggttgtgcgggaacttgtacaaatgtggacaacttgtgacactggagagaaaggacaatccaatccaat

SEQ ID NO: 358288 - DNA, 122 bp, Homo sapiens
agatactccaggtaattttgtgctgccggcattgacactctctgtatccccattcttcgacgcattaaattatccttacaaatttccttctgaaatagggaaaaacatagagttcaaaagtc

SEQ ID NO: 358289 - DNA, 122 bp, Homo sapiens
ggaaaaagaggggcctcggcgcctcgggaggctgcccctcgcgttcaggcaattctcccacgctgcaggaccctggcccacactctggctgccccgaagggttcccgaggctggcgggagga

SEQ ID NO: 358290 - DNA, 122 bp, Homo sapiens
tgtttttattccacctctgaaatgagaaccgcaggctttctcttctacttaagagtttcacgtcattttgccataagaatgcatctggtctgaatttcagggtgagcatgggcagcacaggc

SEQ ID NO: 358291 - DNA, 122 bp, Homo sapiens
tctttagaagataacattcatgaagaggagctagtagtgttctaattctgaaagtcactccgggtctgtacctggagactgaaattcgaacacagagactatgattctgaatgtgtatcata

SEQ ID NO: 358292 - DNA, 122 bp, Homo sapiens
aaatggggccagtgtaggagacctgagggtggggcccttatgccagacctccaggggtagcgacctcacctgaccccagcttcggcttcctgtgctgcagaaggcgcttgctcccaagcccg

SEQ ID NO: 358293 - DNA, 122 bp, Homo sapiens
actaaagacagacttgcagttcagccacaggactaggcctctctgctgctgagctcccagcggggtcccactgctccctccattatccttatagggctctctctgagtggatctaaaccctt

SEQ ID NO: 358294 - DNA, 122 bp, Homo sapiens
gtctgtaaatattttcttcctggttttcaattagccttcacaataaaatgctatcctgcacgttgctatttctttaactgctctaattggaggaatgaaattgacacccactctgccctccc

SEQ ID NO: 358295 - DNA, 122 bp, Homo sapiens
cgtgtgctacaaacaccaagccagtatgcaggttcaggcaaaactctggctgcctccctgcgcccctttcactgcgtcgatggtttacagataactgcatttctataaaccctctctccacg

SEQ ID NO: 358296 - DNA, 122 bp, Homo sapiens
atgtgcctaattatggactctgatcccagaaaattgcacatgaacacaaaattttacttacggtttccagggaatcaccaaacccttgaagcacatccatggactccctcccttcatttaaa

SEQ ID NO: 358297 - DNA, 122 bp, Homo sapiens
atagatgtgtctgtagaagggattggtgtgtttagaaagcaggtactgtggttcagtggacgtgtctgtttctacgtatttgagatgtgattcccactgaatcactgcctccttggaactgt

SEQ ID NO: 358298 - DNA, 122 bp, Homo sapiens
ttaatcacctcgcctgggaagcgcggagcccaacactactgtggatgtcctggcagggttcggaacaggagctgcaagcagcctaggtccccggagtgacaggaaccctcggacagcgttct

SEQ ID NO: 358299 - DNA, 122 bp, Homo sapiens
ccggccctgactttgctaggtgtgggcctgaccatctgtgtgtctggggagaaggccatgcgtttctcagcactcagagaaagacctgccaggggagcctgtctctttttgtctgccccagg

SEQ ID NO: 358300 - DNA, 122 bp, Homo sapiens
acggcccttactggatacggcgtcaggtgccgcccctcgtggactgattgacagaagaagcgatcttgcacagctgagtggagccagatgagcaagttcctgacacagcccttggcagggcg

SEQ ID NO: 358301 - DNA, 122 bp, Homo sapiens
caataataatatggcagctgccgcggaggtggcccttcagcggagatgtgatgtgtcaggcggcgaaccagcagaggaagggtgaccatgcagatggagcctgtgtttaagggctcagggtc

SEQ ID NO: 358302 - DNA, 122 bp, Homo sapiens
gctggagctcagggactgggtgttccgtggcagagcggctgcctgagttccctgagcctccgctttctcatctgtaaagtgggtacgtttccatgggggaagtggaagaccccgcgctggag

SEQ ID NO: 358303 - DNA, 122 bp, Homo sapiens
tttgtctatctcgacgtatgcctcagtgtcatcaaggagactctccttgacatgcagtcacggccatgatccatcttcagagcttctctttcttccccaagttaagtctgtcagcagagaac

SEQ ID NO: 358304 - DNA, 122 bp, Homo sapiens
agccccaacaacagggcgggttctccaccggtctcctgcccacccgtggtccagtccttacgaggcttgccccagcctcagtccagccccagcagatctagagagtaccactccccagcccc

SEQ ID NO: 358305 - DNA, 122 bp, Homo sapiens
tcggccaatcatcgctctccaagccaggacctccctcccccggaggcgtggcgaggatggcggtcctgcggaaggggcagtggctggtcctgctcttagagtatcttggtgctgctgggttt

SEQ ID NO: 358306 - DNA, 122 bp, Homo sapiens
cgcgtccagcgagctgctggagaaggctttgagaaccagtgcccgcgggagcaccgaacccggggccaagttcttgatcttcaggtccaccggcctcttggttttgccttgcactgcaggga

SEQ ID NO: 358307 - DNA, 122 bp, Homo sapiens
ctctgggctctgtgccctgcagctcggcaggcattcgaggcggacagaaacggggcttggcgccccccgcgtgcacgtgtgctagcccaggcaggagggagcgcctcggcggaggagtcaag

SEQ ID NO: 358308 - DNA, 122 bp, Homo sapiens
ggggctgaagtgcaatggcatgatcatggctcactgcagccttgacctcccaagctcaagcgatcctccaatctgaggcccccaagtagctgagactacagacgcatgctatcacactgagc

SEQ ID NO: 358309 - DNA, 122 bp, Homo sapiens
tctcctcctccgggactggacagagacatggaaagagaggactgaggtgggcagggtatccgcgggactctgctgtcctctggactctcccagccatctgaaaggaggcatagtgggcagag

SEQ ID NO: 358310 - DNA, 122 bp, Homo sapiens
agctgcatcaggaattcagccaggtagactgggtctcctgaaaagggctctatctcaggccgctccagcggtgccagagggggttgcgggggcggttcctttgacgcgggcggaggcagcgc

SEQ ID NO: 358311 - DNA, 122 bp, Homo sapiens
gcacaagcacagagtatctgacacaaagaagatgcttcctacacatctgctgaaggaatgcgaacaatcttagccacctgccctttctctccagcaagatggtagtaaattggtagagagag

SEQ ID NO: 358312 - DNA, 122 bp, Homo sapiens
gggaacatctataggcagccctggtgagtggatactgaaagagaacattgagtgttggggcgtgagggttagggatagccatggtacattgaaattagtggtactggtgtgtcccttcaaaa

SEQ ID NO: 358313 - DNA, 122 bp, Homo sapiens
caaggagaacctcagccaccaccagagggtccacagcggggagaagccctacacctgtgccgagtgcggcaagtccttccggtggcccaagggcttcagcatccaccggaggctgcacctga

SEQ ID NO: 358314 - DNA, 122 bp, Homo sapiens
cggaagtgcttcgcggcggaggcccgggcaactcttttgaatggaatcgggctgattcatcgccggtttgcagacagagccgcgtcgggtgtgcgccgctgctgctgttgcctctgtcttcg

SEQ ID NO: 358315 - DNA, 122 bp, Homo sapiens
aatgcacctccaattgtcagatgaagcccaaggttccagtggtaagtgtgggcaggaagacggagaagctatgagctggaaagtttcctataatcatctaggagaaggcccctttttcctgc

SEQ ID NO: 358316 - DNA, 122 bp, Homo sapiens
aaaaaaacagaccgagaaaagagccatcacttgtctagagtcaaggattcagataccgttcgtgttaggaccagctaggctcctggtttttctgcatcccgcaccagactgacactgatgga

SEQ ID NO: 358317 - DNA, 122 bp, Homo sapiens
tcctgctggtactgcgggtgctgccagcctgcggggcgaccgctcgggatcccggggccgcggccgggctcagccttcacccgacttacttcaacctggccgaggcggcgaggatttgggcc

SEQ ID NO: 358318 - DNA, 122 bp, Homo sapiens
cagacacacactgagcagagaatgtaaggcacagaagacacacggcgtgattttaaccaccgcaaagttcgaaaccaagcaaaactacacagtgtggtggttggggacacatgtggtccaac

SEQ ID NO: 358319 - DNA, 122 bp, Homo sapiens
ggaggcacagccagggcctccgccctttgccagacaagggcacaccccaaggtctgggagcgtcgttctcagaaaagtacaagttcttctttgaaggagctccagaaaagcctctcccgccc

SEQ ID NO: 358320 - DNA, 122 bp, Homo sapiens
gcagcaacgtcgaagcgcgcacggggtaacagccctcaaactggggaggccggtggttctcggaccgcgaagggcagcctcccttccggaacttgttttagacaacactctctccaccagag

SEQ ID NO: 358321 - DNA, 122 bp, Homo sapiens
atgtggaaggccccagcggagaaggccacggagaagacgcccagcgccccgctgagcccccgctgacgcagcccacaagggacccacccagtgccaagtggtgcagaagcaccactcaatcc

SEQ ID NO: 358322 - DNA, 122 bp, Homo sapiens
caactcttagcgagtaaatgggcacatccacactggagttgaacacaggggcgccggccacgggttcaggctagcccgggcgtctggcttccctgccaggatggctgcctcgttactgagat

SEQ ID NO: 358323 - DNA, 122 bp, Homo sapiens
gcaacaccgtctttgaggaggcagccgagatgaagataagaccagagaaatccatcacgccggcttttagagccacgcaccctctctggaccctgccgggattaaaatgcacagtcctctgt

SEQ ID NO: 358324 - DNA, 122 bp, Homo sapiens
cccggccccgcctggcccgcgcgccccgccgcccggcttgcgcctgccgctcccacccggcggtctcctacccccagggccccgactcctccaaagtctccaggccccgggactccctctct

SEQ ID NO: 358325 - DNA, 122 bp, Homo sapiens
gtgtccccggcaggaccccggagcaacgtctcctggagcctgtgcagaagctgggcttggcgagggagggggtgcttccggggacacccgcgcagggaaaaggaggatgctagtgacccatc

SEQ ID NO: 358326 - DNA, 122 bp, Homo sapiens
taaaagaagaggggctgcaatgaaggaagaagtctcgggacgctccacgccacccggcggcggttatcaaatcacaggctgaaaacctggagaaaggtccgcgacgccggggacacacgccg

SEQ ID NO: 358327 - DNA, 122 bp, Homo sapiens
attcatgtcggtgtttcttttcatgtcgtttggtgctctgtttgcccatgtcttcatgaacgccagtgagatatgttaggtccagcagcacagaagccgtcaggcctcggaatcgcgccaca

SEQ ID NO: 358328 - DNA, 122 bp, Homo sapiens
agtgtggcagtcactacaggtttgaggaaggctctgtcgctgctctggccgtaggcacagcggactctggaggacactggtttgtactgcatgcgtgtgaggatggctttcctcctggaagg

SEQ ID NO: 358329 - DNA, 122 bp, Homo sapiens
gtgacgtcatccctaggcgtcacacaggtctcaccccctgctgtgaagttgcagaaaactcggaaggcatcccgagcacagccctggttggggtcgacccagtactctcctgttgggtgagg

SEQ ID NO: 358330 - DNA, 122 bp, Homo sapiens
attttctattttttgtagagatgaagtctttctatgctgcctagactggtcttgaactcccgggctgcagcaatcctcccaccttggcctcccaaggtgctgggattacaagcatgagccac

SEQ ID NO: 358331 - DNA, 122 bp, Homo sapiens
tacctgtgggtttaagaataaagttcatgaagagaattttaaaattctgcattataccttcgttaatacaatattatgatatttgaaatcaggatgagcctgggttggctactctacacagt

SEQ ID NO: 358332 - DNA, 122 bp, Homo sapiens
cctggctgggctgcagcattctcgagaccacggtcacccggattcttggcgtctgtaccacgtccagattctggccacggacgcatatctcacgtcctccactgaaacagaccgtgagctta

SEQ ID NO: 358333 - DNA, 122 bp, Homo sapiens
gaatgcccccggttactgtggtaaccagggcagccgaggtgtgtcctcggggctgggaggcgcccgcccccccaccttttctcgccgcccgcggggccaggccgggccgctgcggtgcgcgg

SEQ ID NO: 358334 - DNA, 122 bp, Homo sapiens
acccctctctctgggagctccgtcccgcactgcctgcctcatgcagggcccggctgtctacggggatgtttgggggaagctgccaggtttcgcatcacccctgagtgagccagggatgcttc

SEQ ID NO: 358335 - DNA, 122 bp, Homo sapiens
ctttattcataatcagatagatgcaaattaaaactacaatgagcatcgtgtttcccttctcggatcggcaagtatcaagatgttaacaaggttagtggaggctgtggggaacaggtccaagc

SEQ ID NO: 358336 - DNA, 122 bp, Homo sapiens
ccagttaattagtcaagaaatgaatcaagtcccagcggcctggcagaggctcttggggcgcgggttttgtgcaagccacaatggtccgtggggctctccccttgggcggagtggggcgcggt

SEQ ID NO: 358337 - DNA, 122 bp, Homo sapiens
tgaagcagttgatgtccggtttgcggcagatgcagtagatgggcgcattctccccattctcggacttgctgtcctccccggcatctggaggctctgggtctgaaccatctccctcctgcagg

SEQ ID NO: 358338 - DNA, 122 bp, Homo sapiens
gtgggagggcccagtgcggggagggcccagtgggaggagggccatggggtggggacctgacggggctgcccacggagggagcaccactgctgcattgctctctgcaaacaaagactcttgat

SEQ ID NO: 358339 - DNA, 122 bp, Homo sapiens
ttttccagctcaagtttacaatcacagttacaagtggtagaccaataagaaattgaatagcgagatcctggatatgatacaaccacagtaggattagataagatcaccacacatttctggcc

SEQ ID NO: 358340 - DNA, 122 bp, Homo sapiens
gccgagcggtaacagacccgtgggagaataacgaaacgaggctccaagacaggcgggagccggatggtgcatgacctgagaggccaagtcaaggattttgaactccacgctaagagcagccg

SEQ ID NO: 358341 - DNA, 122 bp, Homo sapiens
gtgtcatgtgactattacttgtggaaatgagatcaagttaggcattccctccgtggaaggcggaaaagaaaacagtgcattctgggtgttgtagttcttgggtggaaggtccaggcaggcga

SEQ ID NO: 358342 - DNA, 122 bp, Homo sapiens
ctaacccgcccccacgctcctcatagatgctcagtccctaaaacgtccagtagggaagcccgggaccatgccatagaaactccttgctgatccatcccaatcggcctcgtggtttgcttatt

SEQ ID NO: 358343 - DNA, 122 bp, Homo sapiens
gttagatactgcctaactccagggtgcctttcacataaactaaggtgtgaatacccgctgcgctgcacttgtgcagtacccatctgtgcagtcataggacttgacccctacagggtacttca

SEQ ID NO: 358344 - DNA, 122 bp, Homo sapiens
aaggtattgaaaagttgcccaccatagccagtaagaaagctgggacttcagttccacaaccgcaaggattgaattcagccaacaagtggaatgagcttggaaagggatttgtccccagaact

SEQ ID NO: 358345 - DNA, 122 bp, Homo sapiens
gggcggcagtgtctgcagaaggagccacgcggccgcgcttaatgaacagtgacatctgctcggctctttaattaacgagcccccacgcgctgtggcaggacacagggaccacgtcctctgtg

SEQ ID NO: 358346 - DNA, 122 bp, Homo sapiens
tgcaggctccgggagtgctgcgcggcagtagctgccgcagtatttatccccgcagccggccgcagctctttgttgccggaagagccgcccgctcttagcccggccccccggcccggaggcca

SEQ ID NO: 358347 - DNA, 122 bp, Homo sapiens
ccctggagcccggagtgcccggtacccacctgagggcaggtcgagctccacgccgacccacgtgccctcttggaagtcggcaggccccacgtatctcaccacgcccgttttgtgggcgccca

SEQ ID NO: 358348 - DNA, 122 bp, Homo sapiens
gcaatgaagtgtgtgataatttctgcggtgtgctattgagccgttgctaatggcagcctgcgtctgggcccagctggtagtggctttctttctctttcagtgggctcggcacttggagtcaa

SEQ ID NO: 358349 - DNA, 122 bp, Homo sapiens
gacaaggacaatgactcggcagatctcagggcgggcgtggccctaaagctggggaacgctcgagaactttccaggggagacactgcagaggagctgggtgtccaggttaaatttggaaaaaa

SEQ ID NO: 358350 - DNA, 122 bp, Homo sapiens
ttgaaatgggaaagggatacagatgttcggctgggcttccccgggtgggtccctgaaatgcgtcctggttagcacatggggtgggagcaccttgcccgagccttacctctctaccctctctt

SEQ ID NO: 358351 - DNA, 122 bp, Homo sapiens
ttttgcttccctagcctgggacaaatttagcatttaatatttacatagctgtaggtgaaacgtgctttttatcactatgttctgttgcaagtaaatttgtagtgtatagtgtggcacaggaa

SEQ ID NO: 358352 - DNA, 122 bp, Homo sapiens
ctccctccccccgcgcactgggctcctgagaagcgggagcctccccgaggagctccgccccgtgctccacggcgcccagtcccatttaaattaggaaacatatatgtcaaatttggtgagtc

SEQ ID NO: 358353 - DNA, 122 bp, Homo sapiens
ggaaagcggggggagggaagcagaagtcgggaagaaaagagaaaagcagcaggctgattacgaggtgtcaaaactgccaggagcaagaaggtgatagcaatcaggggtgagaagagtgcggc

SEQ ID NO: 358354 - DNA, 122 bp, Homo sapiens
aggcactagactctcatgaggagcttgaaacctagatacctcacaagcagagttcacggtcggtttgcattcctatgagaatcaaacgcccggctgatctgataggaggggagctcaggtgg

SEQ ID NO: 358355 - DNA, 122 bp, Homo sapiens
gcaagtgttttgctgccaggaagtggtcttacaattacattacaaataatgccccacccacgggagaagcggtatttccccttctacctgcccgggtagacaaggaggtctgacctgttgtg

SEQ ID NO: 358356 - DNA, 122 bp, Homo sapiens
gcgagcccgggacgcgaatttgagggcaggacttcgggagccagagcctggcggcgctgccgcagcgggtcactcccagggggccggcacccagacttggcatcgttagcgcttgggtgctc

SEQ ID NO: 358357 - DNA, 122 bp, Homo sapiens
tggctagtgctttgattggcagagcacagaaatccggcggcggggggccacggaaagactcgggcccagggaccacggagggggcacctggcgcggagcccccaccctacccccggctagct

SEQ ID NO: 358358 - DNA, 122 bp, Homo sapiens
gccacctgcgagcaagcccaggctgggctggtgcgaccccggagggtcggaccggagcagcgtctgtaggcggccgccttctcttcccgggggatggcgggaaagaggctcggcaactgctg

SEQ ID NO: 358359 - DNA, 122 bp, Homo sapiens
gaagtcctcctgcgtggggaaaggtgcacctgtgagctgccgatcggggaggaatcatcacgggctttttggaaagtggtttggcaatatgcatcaaaacccttaacagagttcatatcctt

SEQ ID NO: 358360 - DNA, 122 bp, Homo sapiens
atgatcacttatagaaccattacccgctaggatgaaactccccacacaagagatgaagcccgagagaaaagagttgaaggggaaggtccccacgaggagacagtaaccgaactgcagcgccc

SEQ ID NO: 358361 - DNA, 122 bp, Homo sapiens
gagctaagataatgacttatggatgtaaactgtgggctttctgtgggtgccggtgcttcacgtcttcattttgaaagagcatcattaatttcagagagagtgtttatgtatctacctattta

SEQ ID NO: 358362 - DNA, 122 bp, Homo sapiens
aacgatccgggcacctggggaagcgggtcccgcggccaactgggaagcctcccctcctcccgctgctctacccgccgtgcaggaagcaaagcacggatttctacaggctgctttcccttgaa

SEQ ID NO: 358363 - DNA, 122 bp, Homo sapiens
gacagaccgaggcttagtgtgattgaaaagcttttcaaggctgcagaaggagttaagtggcggagctgggaggtgctggaaggccggctgcagactgtctccatgtaacttctttttctgca

SEQ ID NO: 358364 - DNA, 122 bp, Homo sapiens
ctgagcagaggctttcggagtgagctgagcaggcgagcccgagcacggcctctcagggagcgagcccataggctggggagccgtccctggagatgcccctgggctccttgcggggcatggct

SEQ ID NO: 358365 - DNA, 122 bp, Homo sapiens
acttcaattcctaaacaggcataagcttcattcagggtgttcactggccacgaccagggacgcccagcacccagtgcagggcctgccctggaagaggtcagtagtgcaaagttagggctgga

SEQ ID NO: 358366 - DNA, 122 bp, Homo sapiens
atggtcccctcagtcctcaaaatccaagccagatgcccggctacagccttcaagtgtgcacggtccccaggcccctctttcactcaccaccaaactcccaccacactgtccttccttctatt

SEQ ID NO: 358367 - DNA, 122 bp, Homo sapiens
tccctcagcctattggatgtaggagattagaattatggggcttcaaaagaggagggataacgatagtggtcacaaaaaaggcatgtgacttcctgcagagccacagtcagcacccctgctga

SEQ ID NO: 358368 - DNA, 122 bp, Homo sapiens
ctcccgggtaggaaatggccccggtggaatgccttgccagagcagcgcatagcaggctcccgagaaggattaacactggctgaacaccgggaaggaactggcacttgaagtccagacatctg

SEQ ID NO: 358369 - DNA, 122 bp, Homo sapiens
tgcggggagcccccacccactggggcggctactgcctaaggtacaggaggtggcccggtgcgtgggggagttgctggctgcggccggtgccagccgggccctacctacgtcctcctccgggc

SEQ ID NO: 358370 - DNA, 122 bp, Homo sapiens
tctaggcgctgccctaggagccaggagcggcagatactgcctccccttcaaggccctcaacggcggaaagagcaatcgctgcatactgatgacagggaacagccacctcttccacaacccag

SEQ ID NO: 358371 - DNA, 122 bp, Homo sapiens
taaaaatgtcaggagacactgaatgagcacttactgcacaccacatttgtgcttattttacggatgaagaaaactgaggctcagaaagaggatacgggtcctgtaatttgcacaactactaa

SEQ ID NO: 358372 - DNA, 122 bp, Homo sapiens
attagacacaattggccgcaaacgtttgacacacacaacctcacgcatatcttcgtatgacggatcactcggtaccatgttgtaatatggcaattggtactcttccacaatccctcctgtga

SEQ ID NO: 358373 - DNA, 122 bp, Homo sapiens
ctcagccttatgtatcgcactgatcagaactttccagaatctgcggcatttactcaccggcgcctccaccggcccctccacgtgccacttccgcttccttcttctcgagccttctggaaaga

SEQ ID NO: 358374 - DNA, 122 bp, Homo sapiens
ttcggagtagagaaaggccaggaaagtccaggctgcggagggcggctcccagctcgcccacgttccctcccatccccgtcccaggacccaccgaaccccgtcccccttcctttccggagacc

SEQ ID NO: 358375 - DNA, 122 bp, Homo sapiens
gcaataccatttaatcacgtagctacctcaataaaactccatgtctccacattgcaacaccgttcaatcaagtggctgcctcagtactttccttgcttgtcccaggaagtccccatcacata

SEQ ID NO: 358376 - DNA, 122 bp, Homo sapiens
cgcggggacccaagacgcgcctctgcgccgcctccgctgctccaacatggccgcccgctgcgcgccggaagtgcactgcgcttccgcttccgggacccagcccgccctaccgacccttgacc

SEQ ID NO: 358377 - DNA, 122 bp, Homo sapiens
gcccctgccaggtccacctgcagcagcgtggagtccacgtggctgctaaggttcacggctcggagagtgtcaaggagaaccacaaggcagacaggagaaaccccatgtccccgccgcccgcc

SEQ ID NO: 358378 - DNA, 122 bp, Homo sapiens
aatcccctagcgggtgcccattgtctgtgtgcacgctcctgggagttgggattccggagtcgtggaaaggacagaaagctgaatttcatccagggccaggtgattttgatggggtggtcatg

SEQ ID NO: 358379 - DNA, 122 bp, Homo sapiens
tgagttagaaacctgaaagctgtgaggggtgttaatcagtttcttggccatttaagcattcgtcacatttgttttttccacttttttgattcatcattttaaaaagcctccaacttggggat

SEQ ID NO: 358380 - DNA, 122 bp, Homo sapiens
ggggctcaggggagtgaccccaagctgcggggggtgaccctcacctgaggcctctggaggcgctgagtgggccggaagccgcgggagccgcgggacccgcagagagtgcccgcctgtgttgg

SEQ ID NO: 358381 - DNA, 122 bp, Homo sapiens
ggtagaccagggtcgttgggggccgggcccgggtcaggtttgggggccggggtggcaggtcgttgggggggccaggcccgggtcaggttttggagccgggggagcaggtcgtgggggtcagg

SEQ ID NO: 358382 - DNA, 122 bp, Homo sapiens
aaactccctttccaggtaaacctgcccaacccttgtcctatgcccagcgaagcccaggtacgatgggtcaaggacccctggcttccacattgtctgagtcacgttccagttggaaaggccat

SEQ ID NO: 358383 - DNA, 122 bp, Homo sapiens
gccggggcccagctgtcagtcgccgccgccgcggcccttccccgcagctagcggccccgacgcccacccggagaagatgagcccccgctgccccccgcagcccagtcagacgcggagccgcc

SEQ ID NO: 358384 - DNA, 122 bp, Homo sapiens
ctgatctgtcggtacctcagtaaagtgtgtgcagaaatctttttttcccctttgaattagcgggtggatactgttctatttgtgattcacctctccaaaatgatcaatctaagactaatact

SEQ ID NO: 358385 - DNA, 122 bp, Homo sapiens
tgcggctgaagtgtttccccggcttcgtgagggggtttccattgattcaccctgggcactcgctcgctccctgcctcctcctcctcctcctccttctcctcctcgccctcctcctcctcctc

SEQ ID NO: 358386 - DNA, 122 bp, Homo sapiens
tcccggcatgctcagcgccgcccgggggcccacgggagctcgcgccccacagcccctgcgcgtccagccctctgcgagggccttggctcgcccctgcggggtccaacgccagcctgcggctg

SEQ ID NO: 358387 - DNA, 122 bp, Homo sapiens
gtgtgaggtttgttctttgcgatatgtcttgctgttgctcactctcagtctttgggtccacgctgatcttatgagctgtaatactcactgtgaaggtgtgcagctttgctcctgaagctagc

SEQ ID NO: 358388 - DNA, 122 bp, Homo sapiens
tcgtgctgtcatatgccacctggcgtgtggcactttgttacgacagccacaggtggggggcgaggaccatctgctgaggaagcttcatttataccgggagggatgcgtggaaactgaacagc

SEQ ID NO: 358389 - DNA, 122 bp, Homo sapiens
ggttgggaaacctctgatctgttaaactaccaaaaccacatcacctccatccttctccagcgactccagcgtgcgccctctttcaggctcatggatagttctctgctcagaactacttggca

SEQ ID NO: 358390 - DNA, 122 bp, Homo sapiens
tgggaaaattaaggctctctagagagactaagtgactttccacataagtaataaatgtctcgaaagtcatctcccaaatcaaaattcagtttttaaaaaattattctgttcacagatctccc

SEQ ID NO: 358391 - DNA, 122 bp, Homo sapiens
ctcggcgtggggcgcgcgcctccggggctccctggggaagagccggttccccgcgccgcacgctgggagcttgatttgcccctttcagaccatgtgggcctttcatttgcatatttccgaat

SEQ ID NO: 358392 - DNA, 122 bp, Homo sapiens
ctcctcgcccgtccgcactcctcagcagtctcagcctgctcagctgggatgtggtcctgacgcccccgagattttaagagcaaaatgcagaccctgtctcatcgcgggactcagcgattcac

SEQ ID NO: 358393 - DNA, 122 bp, Homo sapiens
aggggcttggagcttcctcccccaccccgcggcagccccgcccagccccctccgggttgtcgcccataaagaactctccgttgtcatggaaattagtgactgctaagcgggagggaaggggc

SEQ ID NO: 358394 - DNA, 122 bp, Homo sapiens
ggactttcctactcaaatggccctttgtgtgcttttaaaagacagggcattaacctcgtgcgtggctaaagcatgatggatgacttggaattctccatttacatttggctggtggccacaga

SEQ ID NO: 358395 - DNA, 122 bp, Homo sapiens
actgctccgcgctgctacctcccccatgtgcacggccgccccctggggcccgggattggacgccccttcccactgctgttgtcccccaagcctgatgggatcgcacgagtgggcgggggagg

SEQ ID NO: 358396 - DNA, 122 bp, Homo sapiens
ccgcgtactgcgcacctaggctgtgtggcagagcccatgctcccgggctacacaccacagcgtgttactgaatactgtaggcggtcgtaacacagtgccaagtgtgtgtgtatctaaacgta

SEQ ID NO: 358397 - DNA, 122 bp, Homo sapiens
ttacatacccccagctcctgcctttggaagcggaggttatcttacctagttaatttgccacgatcaccgagcatggcggattgatgccctgcccctgccgccactgccgggcccgggccccc

SEQ ID NO: 358398 - DNA, 122 bp, Homo sapiens
tctgtgcgcttgcgtgtgctggaggagcggggagggtggggcggagtcgcttggttggtgcgttgccctgctaaagtatcagttcttgggcgtggtgatgtaatgagctttgagcagggcgt

SEQ ID NO: 358399 - DNA, 122 bp, Homo sapiens
cccaccctctcccagaggcgcgactgggattctgcgccaagtcccagtgggggaggggatcgctccacgatttcctgtttaaaccctgacccgtcgcctgtgggggggcggggatgggggaa

SEQ ID NO: 358400 - DNA, 122 bp, Homo sapiens
agactgtgcaggtgtccacattctctccaccttcggaagacagggtggagatgctagacacggtggagatagtgctggtcgtctcgaggtggtggtcgctgctactccggctgtccacctcc

SEQ ID NO: 358401 - DNA, 122 bp, Homo sapiens
ggtcagcatggattgaccttaggttccctgcctccagaccttattgccctgcctcatttacgttaggtttctttcttgtcaccttctaaaatattttttgttattaggaagtatgtttttga

SEQ ID NO: 358402 - DNA, 122 bp, Homo sapiens
tcgatctcctgaccctcgtgatccacccgcctcggcttcccaaagtgctgggattaaaggcgtgagccaccgcgcctggccgagattttatactttcttaaattaaggaagaactgtagact

SEQ ID NO: 358403 - DNA, 122 bp, Homo sapiens
ccactagagaaaggaaaataagcccagagtctgatgcaatccaagcaggctgccttttttcgtggtgagatctgtgtttttaggcctttcactgagaattaccccataacatttaaatgtat

SEQ ID NO: 358404 - DNA, 122 bp, Homo sapiens
attctgagaccacagcaacccctcaaattcaagagtacttctctagccgagaacatctctcgtgaaatgaaatttttaaaatgtgaccactgtaaatgcagggacattataactaaagctgt

SEQ ID NO: 358405 - DNA, 122 bp, Homo sapiens
ttggctctgtggagtgcggtgcctgtgggccaggaggcaccatctgagtacttctccctccgtggggtcctccgggaaaagagcgcgctggctcgggatcccgggcggactcccggcgagac

SEQ ID NO: 358406 - DNA, 122 bp, Homo sapiens
agcgcatagcctgggagtgctggcccgcgcgccagtggatggtgcccaggttgtagcgggcgcggaataggtcctcgtaaaggtggttctgcctgcagaggggtgacgaccactgagcaccc

SEQ ID NO: 358407 - DNA, 122 bp, Homo sapiens
tgtggtacccagactagtagcaccagttttcgctgagaacatgttagaaatgggaactgtcgcgctacgctccagacctaactgaatcggaaactcagtttccgggtttgggatctgtgatt

SEQ ID NO: 358408 - DNA, 122 bp, Homo sapiens
gaaacagtgcttccagcgaaggaaacggcaggtgccaaggccctgaggctggaggaagggcgctcagtgttgaaggggcaggaagaaagccatgccctggagcttagtgaatgaggatgaac

SEQ ID NO: 358409 - DNA, 122 bp, Homo sapiens
agtcggagctggataagcggagcccgggtctcatcttgggctcccttctccccccgcagccgttcagaggggaggggaggaaaagtcggacctagttcagccagcccactaagtctgctttt

SEQ ID NO: 358410 - DNA, 122 bp, Homo sapiens
tcctgtgggggcggggcactgctagtggagagggccttctgatggcattccctgggcatccgccaaccctgagctcacactcggcatccctcgggaaatggtgtaagggccactggctggtt

SEQ ID NO: 358411 - DNA, 122 bp, Homo sapiens
atttagctctgatatttacttgtctatagcccataaaagtgggccagttgtttctgcttccggcctttattcatttcccctaacagggttggaggtgcgactgaatatacaatagttgtttt

SEQ ID NO: 358412 - DNA, 122 bp, Homo sapiens
ctcatgctatcctccagcctatgcctccctacgtgctgggattacaggcgtgagccaccgcgccttgcggaattggaattacatatgtttaaatagtcgagaaatgaagtgaagcattgagc

SEQ ID NO: 358413 - DNA, 122 bp, Homo sapiens
aatttccatcttttgcctttgtacttttccattacacacaggacattataaccagatcagcggggcagccaagagagcagaatttatatttctaaatgaaagttgatagttaatagcctagc

SEQ ID NO: 358414 - DNA, 122 bp, Homo sapiens
tgaactcctgacctcaagtgatctgcctgcctcggcctcccaaagtactaggattacagacgttagtcaccacgcccggctgctatctttgattgttttcattaggaagattggtccaaata

SEQ ID NO: 358415 - DNA, 122 bp, Homo sapiens
gccccacagattcgagtgggacggtgaggtctacacactgagccggtgacaaagtccccgcgaggatggaggagggacctcgtgctcctcaccccaacaggccccgcatttccttgatcctt

SEQ ID NO: 358416 - DNA, 122 bp, Homo sapiens
gggcaggcaggctggggtgctgagcgtgagggcgcgggctcccggctgtgtggctcgtggcgcctggctccgtgcaatccctgccggcactgccggctgcccgccttcctccaggacgccgg

SEQ ID NO: 358417 - DNA, 122 bp, Homo sapiens
acagccagcaccgaaggcctatcagcccagttcagctgccacaaatggggaaactgaggccgggaagaacgtgtctccagtatccagcccagcatgcacagtggtccgcgtgggtggcctca

SEQ ID NO: 358418 - DNA, 122 bp, Homo sapiens
gtgggacgttttcagactgtcatcacttctataaatggagagatgttgaatccctcagatcggttggggtggaaagaagactgaggaccactgatgttctggcctgtccttattcaaggaag

SEQ ID NO: 358419 - DNA, 122 bp, Homo sapiens
ggcgaggaaagctaaaacccggcagtcccgggccagaggaggccaaggcaagatgctggacgggcggggaccgatggggggcagcagaccatggccgcgcacccagtgcgcccccggggcct

SEQ ID NO: 358420 - DNA, 122 bp, Homo sapiens
ctaggctagactgtgatgcagtggttaaagccaagtattgcagaagagtgattaagcattcgtgctccaaagccagatagcctaggtttcaatcccagctttgccacttacttgctgtgtga

SEQ ID NO: 358421 - DNA, 122 bp, Homo sapiens
ccgcgccgcccgggcccagtcctgggggatagatccctcggggcccaacggctgggccaccgccggtctccggccactgctgcgaggacaggcgctgcctaactaatttctcctctaagggg

SEQ ID NO: 358422 - DNA, 122 bp, Homo sapiens
agtcatttgaacctcacagagaccctgtgaggtggcagggcagggcagggagtctcatcacgttcatcctccagaccaagaagtgcaggctcagagagatgaagtaacttgtccaagcctag

SEQ ID NO: 358423 - DNA, 122 bp, Homo sapiens
catgaccacctacccaattaggacccccaagtcaggctgttcagattgttgctttgactccgctgtcccccatgatggcaacacacctacttactctttggtgatcacatagcccctgccat

SEQ ID NO: 358424 - DNA, 122 bp, Homo sapiens
ccttggggactgctcgactgtggccaggcctccatccagcccttcagagctggggcagctcggtctggggacagtgtctcatcgctccctcgccacaggggccaggccctaatcgctttctt

SEQ ID NO: 358425 - DNA, 122 bp, Homo sapiens
ggggggcgaggggccgagggggtgcctgggctcgtgcatttacacgaagtccctccgagacggaggcgggcgtgggtgattttattgcaaactttggggagccccttccttggctgcggccg

SEQ ID NO: 358426 - DNA, 122 bp, Homo sapiens
ttcctggagagacctttgacccttctctgtcttaaatttttcacttctgaaatagaaagccgggtcactggtcatcttatcctgcactttgggcataaagaagcttaggtccaaagcgccat

SEQ ID NO: 358427 - DNA, 122 bp, Homo sapiens
tccctgccaccaggacacccttgcctgaagacccaggctcctcctgcctttatccccagacgggaaggttggagcccagctcagtgtttaacaggcatgtcaaagcctacagggaatgcaaa

SEQ ID NO: 358428 - DNA, 122 bp, Homo sapiens
tgtggtgagatcacagttcactgcagccttgacctcctgagtagctggggacaacagacacgtgtcaccatacccggctaatttttttttttttgtagagatagggtttcaccatgttggcc

SEQ ID NO: 358429 - DNA, 122 bp, Homo sapiens
actgaaagataactcttaaaaattctgatctgacacctgtataaacatttctgatttccacgattgtaagaaaacactaagtatacatttactacgtgattctttttcacatttttggtgca

SEQ ID NO: 358430 - DNA, 122 bp, Homo sapiens
ttgggactctgtgttaaagccacgcacgctccacttataaaggagagtgttaggcttgtccggaaaggcctccgagatgcaggcgagagttttccccaacaaaccaaggagtccggaccact

SEQ ID NO: 358431 - DNA, 122 bp, Homo sapiens
gttcccgccaggtccgtgccgggcgagagagatgctgcccggcccgcctcggctttgaggcgagagaagtgtcccagacccatttcgccttgctgacggcgtcgagccctggccagacatgt

SEQ ID NO: 358432 - DNA, 122 bp, Homo sapiens
ggttgctgcagccctgctgcggggtgacaggaggcccaggcttcgcattgctgtgggtgacggtcatatggatcccggctcctgcggcgtcctcgctccttccctggcctcccggagcgggg

SEQ ID NO: 358433 - DNA, 122 bp, Homo sapiens
tgggaagctgcagtaaaggcacgttcaggactcaggaccgtggctgcagcagtggccagacggctgagggcgtgcgctgctcctgggccagacttgtctgcccagccccgaaccttttccag

SEQ ID NO: 358434 - DNA, 122 bp, Homo sapiens
ctggggcactgactggaaaggaattaatccaccaaaattgcaattgatgttttgtttcttcgttaggcactaaagagtatagtagtaataggaagaaagacttccaaaatcgtcataatggt

SEQ ID NO: 358435 - DNA, 122 bp, Homo sapiens
aacaagagctgacaggaaaatggggagcggcccggccccagggctccacggctccacgggcggggccctaacattccagagggcagaacctctgacctctgacccccaaccctagccacctg

SEQ ID NO: 358436 - DNA, 122 bp, Homo sapiens
tggcacgttaagttgaggattcctccggagacgccgtccacgtggatgtgcggcccctgacgggacgtgatgacccgctcactcttccaggtgccagctccgcggatcccttccagctcccc

SEQ ID NO: 358437 - DNA, 122 bp, Homo sapiens
ctgcagtgactctggggttcctggttaggacccatgttctctaggtcccagcaccctgcacggggcagtgtttgtgacactgggcccagctattctgagagaaggactccaaccttccatca

SEQ ID NO: 358438 - DNA, 122 bp, Homo sapiens
cctgggcggggggctccatgtcacccctgtaggacgctatggcacaggctggatggacctcggcagggaacgcagagagatactggagcttcacggcatttctaaaagagctgccatagggg

SEQ ID NO: 358439 - DNA, 122 bp, Homo sapiens
aatgaattggcaggagccgcggccacatttaaagggccagagcgcgcgttccctcccgtccgcccccaagccccgcgggcctcgcccaccctgcccgccgcccctccgccggcggccgccct

SEQ ID NO: 358440 - DNA, 122 bp, Homo sapiens
taggataaaaaatgcggaggctcaaatccatacgctccgatgggtcttcccgctttcctccggcccagtacccagcgatgctctcgctcacccggcgtccacgaaatggcagtccattttta

SEQ ID NO: 358441 - DNA, 122 bp, Homo sapiens
ctcttcctgtctcccttgacttttacagaccctcttgtttctatggaaacaggagttctacgccagctaggcccaggttcagctttctcagaaaggagatacagagactataatggcatcag

SEQ ID NO: 358442 - DNA, 122 bp, Homo sapiens
gagggagaaacccgaggcacgggggtagggaggggacaggagaagcccgaaggccccagccggagtattccgggaacctgggatctccggcttccatccgctctgcccctacctcgtcacct

SEQ ID NO: 358443 - DNA, 122 bp, Homo sapiens
attcccatggcaggctctgcaccagtccccggcgctgcctgcggcatctgattctgccggcgctgcccgcttagcttatgggtatgcagaagatctgcatcatggttcctgctgaagaaggg

SEQ ID NO: 358444 - DNA, 122 bp, Homo sapiens
gtgaagcccccagacctgccctgcccctgcctggagattgcgccttgcagggagtgacaacgggccccagccgtcccttccttttaggaatatcaatggaggaaaccgatgtgtcaactaga

SEQ ID NO: 358445 - DNA, 122 bp, Homo sapiens
tgggctcgccaggcggaagtggttggagactgcgtgttttcctagaaagtcctcgaccttcgtcggggagaggaggggagtgataaattggaaggcggacaagcgacaagtgcggtactgga

SEQ ID NO: 358446 - DNA, 122 bp, Homo sapiens
acctggagaagaggaaggacacggcccgagcggcctctcggtggagctggggcgtctgagcgcgggctcggtgggtccgcgcggcgcggagctgggtataggggccggcgcgggctcctccg

SEQ ID NO: 358447 - DNA, 122 bp, Homo sapiens
gcccgtgcggcgtctccaatccgcgccaaggcgcccccacacgcccgctcctcacccctgcgtggagatgcccttgaccttgtggcctttggccagcccaccggctcccccgaccccagctc

SEQ ID NO: 358448 - DNA, 122 bp, Homo sapiens
cgtgttctgtgctgtccttgggagtggcgcggccgcttgccagggctgcagagttggccacgcagcctctccaggaggccttgagccaagcacaggatgcagcccagcagtggtggcaccgt

SEQ ID NO: 358449 - DNA, 122 bp, Homo sapiens
ccggtgtccgctggacttcatggcttcatttactctaatggactatcttagactgcaaagcgcttttcagtttacaaaagaaagagaaagtggtggggcaagcatcctggggatgggggtgg

SEQ ID NO: 358450 - DNA, 122 bp, Homo sapiens
catcctgtgtatttgtacgcggatgcagaggagaacgccaggattgcttgagacaggacgcgtggagaccccgctagcacggcgcccttcctgctggccgctgggtcacagcactggtgacg

SEQ ID NO: 358451 - DNA, 122 bp, Homo sapiens
agggagctggagttcccctaagttccccggcgcccccgagcacgcgggccgcagtgtcggcggggcgccttgctccccagcaggccaccccccgagagcgccaactcgggagtgcaggggcc

SEQ ID NO: 358452 - DNA, 122 bp, Homo sapiens
cccaattggccgtgcctcagctcaagagtttgtgtttggtcgtcggttccaccttaatcccgcccatcagttctacttaggggttcaacaacccggggtggagcttaatctgtgaccacgcc

SEQ ID NO: 358453 - DNA, 122 bp, Homo sapiens
tctggttggctcaggttgtcagggggctgagctgcagcctccaattggcgagcggggcaccgaggggaaggcgcccaggaggtgggttcatccgcgtggggaagcgcccggggtggccacgc

SEQ ID NO: 358454 - DNA, 122 bp, Homo sapiens
cttgctccattccctacctgcagtgggaggccgacaacggaaacgcaatgtcagtttccgcggaagagacccgcgccccgaacctgtagccagaacgccgaagcagttctcgcgataccctg

SEQ ID NO: 358455 - DNA, 122 bp, Homo sapiens
gcaagtggctgaatgccggtaaaaggcaggaaaagagcggagcccagggctccagggggtcggtttgggacctgcttccaccagcagagtctaaggtcatccccttggccgtgcgccaccct

SEQ ID NO: 358456 - DNA, 122 bp, Homo sapiens
ggcattttctggaggacaaatccttagctgaacttttgaatgagctctctgtatgggtgccgtaactgtggtaaaagtgaggccaccaaggccaagctcaagaccaccaaccatttggagcc

SEQ ID NO: 358457 - DNA, 122 bp, Homo sapiens
ggaaaggggacacaaaacactggaagtcagttatcatatggaatcctaggttcaaggtcccgtggggcacttgaccttcaagatgacttcttgagtcccttccaagtgtactttcctttctt

SEQ ID NO: 358458 - DNA, 122 bp, Homo sapiens
ccgacggcaggaatgtggctccttgcctcggaagagggtctccagaggctactggggccgcgtctgccccctccgactggcggctgccctgggcttgatcatgttcccctctcaggccggag

SEQ ID NO: 358459 - DNA, 122 bp, Homo sapiens
gaggggcgggggcgcgcggggacccggcacggagcgcaggggcaccagggaggacaggggcgcaccccgagttacctgtgtcggcccccgagccggcgtgcaacagtctgacctccggccgc

SEQ ID NO: 358460 - DNA, 122 bp, Homo sapiens
ccaaagattatgcagttgaaaatccacaattttatgctgcctttgtaaattaccacgctgcgtttgatgaatgtttctccacttctgcggaggcgccgcttcacccgcgagaggcgggaagg

SEQ ID NO: 358461 - DNA, 122 bp, Homo sapiens
ggctcatttcacaatcagcccaaggctgggaaagctggaatgggatgggaacccctccgccgtgcatctgaatttcaggggtcatgctgatgcctctcgagacatacaaatccttgctttgt

SEQ ID NO: 358462 - DNA, 122 bp, Homo sapiens
aagtcatgttggctggtatccctgccccacagggtttcaatgtcaggaaaagatatggaacgcagcaatgggagtgacagtggaattgcttcagctgactagcatccatgctccctatacca

SEQ ID NO: 358463 - DNA, 122 bp, Homo sapiens
agacctggagccaggcacagaagatttcaaaatggcagctgagcctgcaccactccttggcgaagaagggtttaaagtcagtgaaccttaattaaaatgaacagttggcctcacagttttca

SEQ ID NO: 358464 - DNA, 122 bp, Homo sapiens
tgagtccccacctccagggccagaagctgcctgcctccgctccccgcagcccaggtgcggcgggcagcacactccctagagccaggaccactagttccgtcaaatccggggcgggccattca

SEQ ID NO: 358465 - DNA, 122 bp, Homo sapiens
acctcaagtgatccaccagcctcggcctcccaaagtgctgggattacaggcatgagccaccgcagccagctccctgtgccacagtttgtaacttctcagttactggtggtatacagaaataa

SEQ ID NO: 358466 - DNA, 122 bp, Homo sapiens
tcccaagtacctgggactacagcgaatgccaccacacttggctaatatttaaaaatttttcgtagacacggtctcactatgtttcccaggctggtttcaaactcctgacctcaagcaattct

SEQ ID NO: 358467 - DNA, 122 bp, Homo sapiens
cccacctccccggccctcctaagaggcggtgggtcagtccgccggtccagcccgtaccttcgggaccaaagaaggctccacactgtgcacagaagaagtgttcagggtgccacgtccggtca

SEQ ID NO: 358468 - DNA, 122 bp, Homo sapiens
agagccgggcaggggtggcccaaggccggccgagcacccgtaatccaccagagaacaatgcgcgccggagccttttcgccccgagagcccctcgcacttacctcagtagacgcgaattaatt

SEQ ID NO: 358469 - DNA, 122 bp, Homo sapiens
ctcggctcttcagacgcgagtctgccgatgctcccggccgaatagaccacttctttaatccggtgtctgaggagttttggctgcggctggtcctgctataccaagtgtgtgctgatttgctc

SEQ ID NO: 358470 - DNA, 122 bp, Homo sapiens
ccttacgcaggggcccgcgcccggcaccgtcgcctcccggggacttgcggggccccgctccgctcaccctgccaccgcctcgaccgctgagcccgccggagcccaccgaccgcggtcgctgc

SEQ ID NO: 358471 - DNA, 122 bp, Homo sapiens
cacaaagtaaacttttaaaataaggcaaggcctagggcctcgcgaggcttctctgaggagcgaggaccagtcagtcacagccagtttccactgcctccacgctccggcctaggccagcccct

SEQ ID NO: 358472 - DNA, 122 bp, Homo sapiens
ccagggggcgggggggtcctgcgttcggttgcgggtgtggatggggtgggcggtgactggcgctctctggggaagggcctctggctggattaaacctatcgcgagtcaggattgaagccctt

SEQ ID NO: 358473 - DNA, 122 bp, Homo sapiens
accggtggggtcgctggggttgggggagagactgaagaaagtgcgcctgggcggaggcggcgaagggaatctctgggcccgaggaatataccttgtccctgcactagtgtgtgttctcttgt

SEQ ID NO: 358474 - DNA, 122 bp, Homo sapiens
gcggtgccccgcggaggggctgagtttgccagggcccacttgaccctgtttcccacctcccgccccccaggtccggaggcgggggcccccggggcgactcgggggcggaccgcggggcggag

SEQ ID NO: 358475 - DNA, 122 bp, Homo sapiens
cagcagcttccacataagatctcaggagttgggcaagtgggcttgagtatgtgctctaaccggcaaaatatcagatgtatgaccttcctttgggggtgttagactggtaaaataaaatcgcc

SEQ ID NO: 358476 - DNA, 122 bp, Homo sapiens
gtccgctgcactaaggaggggaatctcaggcatcaccgagccgtttcgggcatgaggccccgccccatccgcctgcacaaggctcctgcaccccactcccgagagcacctgactgcctgact

SEQ ID NO: 358477 - DNA, 122 bp, Homo sapiens
gcaattaagcctgtttcagagtgcacttcgcaggcggcgctgaatcgatagatcctccggcggcgtggtgctgcaggtgaggaatcagtcaggtaaatgcctcccaatctgttcctgctgtg

SEQ ID NO: 358478 - DNA, 122 bp, Homo sapiens
cagcacccgctgcccaaccatgctcacttccacagaagcagcggatctcagcctgggctgcgcgccctgcgccgggctaaggactctgtgcgcgcctcagtactccaaaggcactggctgtg

SEQ ID NO: 358479 - DNA, 122 bp, Homo sapiens
agccctatcccaggaaaagcagcacccctcaagtggcaaacagtgacctccacacccccacgcctgccttcctaagtcctgtccgtggagatggaggggcagacaggggccagttcctggga

SEQ ID NO: 358480 - DNA, 122 bp, Homo sapiens
gcccaggtttacagaggcgggatgctcaaggatgcccagccaggctcgggacttgctcttcgcaagtcctgtcgcgcgctcgctgccccgccggttcaggcggtgaggccaacgcgctccgc

SEQ ID NO: 358481 - DNA, 122 bp, Homo sapiens
gggtcctctggcgccatagtccaagacgccagggggctgggtcctctggtgccttagtcccggtcgcggggagctgggtcctctggtgccatagtccagggtgcggtggaacaggagtcctg

SEQ ID NO: 358482 - DNA, 122 bp, Homo sapiens
cgcgcgcggctgcagcgcgacaggggcggggccacggccacaaagcagcccccgagaccacgtggcctccgagcagctcagggcgcccttgaaagttcttggatctgcgggttatggccggt

SEQ ID NO: 358483 - DNA, 122 bp, Homo sapiens
gggcgggggcgggggcgggggcgggggcgcgggcgctggcgcgggatgggcgagtggctgcgcgtgcacgcggctcgcgggaggtggcgggcgggggcgagcgctgctgcacgtgcgcgggg

SEQ ID NO: 358484 - DNA, 122 bp, Homo sapiens
cttgcaggatgaggagccggtctccagacggggggcagacgggtgtccccaggccaggggcggcctccatcccggcacgaggctggagacagccctgagagggggaggccgcgggctgcagg

SEQ ID NO: 358485 - DNA, 122 bp, Homo sapiens
tcctgggtctagttccagaggctcctttcccggcactgcagtgagttcaggtgaagcagccgcctaattccacaggcccggcctcctctggagagacagagcgggagaggggagagtgagca

SEQ ID NO: 358486 - DNA, 122 bp, Homo sapiens
ttttattttttgcttaatcaaactccattcccaaatgcactccatctctggctctgagggcgctccctcctctcagccgggcagcctggcctctcctgcccagacctgcggtcccagcatcc

SEQ ID NO: 358487 - DNA, 122 bp, Homo sapiens
taagagctgttaacagtcaccgcgaagggctgcagcttcactcctgagccagcgagaccacgatcccaccggaaggaagaaactctgaacgcatcagaacatcagaaggaacaaactccaga

SEQ ID NO: 358488 - DNA, 122 bp, Homo sapiens
cgtggaccccgtcattgttcccggctagctcttatctcccaggagcaagtatcctgtgtgcgcagcgcatgaatgtgtctgggcatctccgcgtatatttatatagtgtgtgatgcgaaaag

SEQ ID NO: 358489 - DNA, 122 bp, Homo sapiens
gagagaagcaccatggtccagccaccaggctccctgtgtcccttccatgggaaggtcttccgctgtgcctctcattccaagggcaggaagatgtgactcagccatgacacgtggttctggtg

SEQ ID NO: 358490 - DNA, 122 bp, Homo sapiens
ccctggaatcgcctgcccttcctccaacacagcgaccagccggtcagaatcccaacccctcgactccggaaatgatctgagagacggaacttccgaacgtcgcaatcagatttgggcgggct

SEQ ID NO: 358491 - DNA, 122 bp, Homo sapiens
gcagaatcgttccttccttgctgcatttcctccttagactaatagacgttttggaaagttcggctagtgttcgtgtgtttgtcgtagcacccagagcctccaccaaaccctctccatgtctt

SEQ ID NO: 358492 - DNA, 122 bp, Homo sapiens
tttccggacacctgagcaccccggtcccgccgaggagcctccgggtggggagaagagcaccggtgcccctagccccgcacatcagcgcggaccgcggctgcctaacctctgggtcccgtccc

SEQ ID NO: 358493 - DNA, 122 bp, Homo sapiens
cgcccccggagtaacaaacggcctagcgcggccgggcttggggcctggaggcggggcgggcgcggagccccatgccgtgcaacccctgtcctagcccctcaccgccagctcctgcttccgct

SEQ ID NO: 358494 - DNA, 122 bp, Homo sapiens
ctaccgcctggcagccatggtaacagcctgggggatggtccctaagatggggtcagagaacggctgagcatggccatccccccagccctgaactcccactcagcctgggctcatcccaacct

SEQ ID NO: 358495 - DNA, 122 bp, Homo sapiens
ttggaatctggtgtgaatttacactgaggtgcagccctcgtgtccacaatgctccgtacccgagtgtggctgccgtgtggatggcacagcctcaggggccccccttgtgagtaataagcccc

SEQ ID NO: 358496 - DNA, 122 bp, Homo sapiens
atgtaaacctctctgcaaacttgcaggtgaacttggccataagagttcagtacatagggccgtcttgccactgccaggccctcctaccaacaacacaccccaggcagctccctttccagaga

SEQ ID NO: 358497 - DNA, 122 bp, Homo sapiens
aaggagctataaatgttgaaacaaattctggaacaacattaaaacagagcctctttaaagcgtaaatattacaggacctatacaacaacaacaataacaaacaaacaacaacaacaacagaa

SEQ ID NO: 358498 - DNA, 122 bp, Homo sapiens
tgagggacatggtggagtcggttatgctgctgaaggaggaggcctatggaggagagggggcgtgtgtaaaaggcacggggctgcccgacactgacttcgcctccccagccccgccctgctcc

SEQ ID NO: 358499 - DNA, 122 bp, Homo sapiens
cgcgttctctggagctttgggcctcagggcgcctagaaggcgaggacgcagacctgaaggcggccggtgagcggggcgggttctgctgggtcgggaagaaaaataattctgcaaggtatttt

SEQ ID NO: 358500 - DNA, 122 bp, Homo sapiens
gtgttctagctttctgtgtgcttaggtgcccgagctactgagggtctaagtccgggcagccgaagagtgtggtaggtaacggtcctcagcgcaagggtcatttcgtcgctgggaagggacgg

SEQ ID NO: 358501 - DNA, 122 bp, Homo sapiens
ccgcccacagtagcggccttcctactggactccctgccctcgcccctgctcacgtagagccgcctcttctgaaggaaaatcctactagctccgggcccataaggccctgcccaatgcggccg

SEQ ID NO: 358502 - DNA, 122 bp, Homo sapiens
ccccgcgtttcgattccccagagcgccgcgagctcccgcccggcctcacacaacttcctccgggtggcacagactgcagcaacagtgactctcctcagcattcaccaccaagctggagcgat

SEQ ID NO: 358503 - DNA, 122 bp, Homo sapiens
agcgcggccattggctgcggatgagctcatacttgagccttagaataaaccaccaatcaccgcccggctcggctcctgccggccttaaagccgcaaggtctgcacggctgggctgtgagggg

SEQ ID NO: 358504 - DNA, 122 bp, Homo sapiens
agtagaagatagtccctgatacccccctttgatgccaacctcccagcagccttcacccatcgcagagaccagaactctgtagggacccagctctgatgggggagtaaatggatccctgaccc

SEQ ID NO: 358505 - DNA, 122 bp, Homo sapiens
gccccaggccgctcctccgggtccgggctgagcgtgaggccgtcgacggacacctcgagtcgctctgcgttcagcaccgccgccatctccggctgctgcacctcctcagcggggacagacgg

SEQ ID NO: 358506 - DNA, 122 bp, Homo sapiens
tcgctccccacggcactggcccggcgctccccgctccgctcgttcggctcatgcggcccgcggccgccagggggcacgccccgcaccccgcaccccgcatcccgcacacacgcgcactcagc

SEQ ID NO: 358507 - DNA, 122 bp, Homo sapiens
atgatcatgttgtagtttaacagaagacatagcaggcgtaatttcctatttaaaaggacacgaagaaggttctatagtatatcacatggcaatgaagttacataaccagggctccttgtgtt

SEQ ID NO: 358508 - DNA, 122 bp, Homo sapiens
tgactgccatgctggagcagcctggcaatagtggtccttcaatgtcatcctcggaagaaacgagaggtggctaccatctccccactcttcctctgcagatgctcttctaccctaaagcccag

SEQ ID NO: 358509 - DNA, 122 bp, Homo sapiens
agatggggtcactccttccctctggtctacagccactgtgggcgctgcttccatgagccccgaggccactggagcccactgggtttcccggcctgttccagcctccacagctctatctccag

SEQ ID NO: 358510 - DNA, 122 bp, Homo sapiens
ctccctgcccagactgtctgtgcccaggaaatggtgggtgtggcaaaatgttggtcctagcgtgcagagccctaccggggggctttcacaacatgtttgagagtttattctgaattatcggg

SEQ ID NO: 358511 - DNA, 122 bp, Homo sapiens
gccgagcgccaggccaccatggctgggagcaggcggagggccccggaggagcacagttagcgcgagagcgcccgaaggggaggccgaggaggagcgggaggaggagccccgccgcctctgca

SEQ ID NO: 358512 - DNA, 122 bp, Homo sapiens
tacttggtatgcgccctatgtaaatgaagaggctgaagtaaagttacaaagtcatttactcggtttgcgccctctgtaaatggagaggatatttgctatcatagctgaagtgtttccatttg

SEQ ID NO: 358513 - DNA, 122 bp, Homo sapiens
aggagagacctacatttaaaaaggcaggaacctaccaactgcagagtgagaattcccattcgtgaggtcaaatcgaggtcaagaatttcctaaccatctctgaaaaccccctatttaggggg

SEQ ID NO: 358514 - DNA, 122 bp, Homo sapiens
agaggctcctaggcgacagcgcgcaatcattcctttgccgccccctgctatccccgggaccgccaaggaggtggaactcaccacagcctgggcagactccaccaccataaaggcgaaaccgc

SEQ ID NO: 358515 - DNA, 122 bp, Homo sapiens
gggcactgccccgcgcacctccgcggccgcccttggctgcgccgctgtcgcagaggaaggcggccgccagtagcagagcccagcacgttgcgggtgcccagttcatcttcgtggggctaaac

SEQ ID NO: 358516 - DNA, 122 bp, Homo sapiens
tccgtgcgccacaacctttcgctcaacgactgcttcgtcaaggtgctgcgcgacccctcgcggccctggggcaaggacaactactggatgctcaaccccaacagcgagtacaccttcgccga

SEQ ID NO: 358517 - DNA, 122 bp, Homo sapiens
ggccttaacggtttttcttcgcttccttgacagcctggctgcaacaattcattcattagtcgcattccatgaggcgtggcctctgttttacctgttttcgttgttactgccacaatgtccac

SEQ ID NO: 358518 - DNA, 122 bp, Homo sapiens
gtttctatttaacagagaatctcaatggaagagattgatttgaaaagttgaaggaaaaatcgtgcatacatgtttcaaaactgtggtcttacagtaaccacagagttaattcttggttgact

SEQ ID NO: 358519 - DNA, 122 bp, Homo sapiens
tcagtgttttctgatcactttttcttcggtacggagacgtagtgaggaatatgacaggcccggtttccagccagagacaccggtattgagcatatttataactatcccgttggcattcctcc

SEQ ID NO: 358520 - DNA, 122 bp, Homo sapiens
ccatactattttccagttagtgtaagttcctttgcaaaaattctcatttgaactgataatcgaaatgagagactgaggcaaaagtctcagtcgatggaggtttattacaccagttttagggc

SEQ ID NO: 358521 - DNA, 122 bp, Homo sapiens
agatcttcacgccagatggagtgaaaaagcaaggagcagaagatgggtgggagcccactgcgctttttaaaatctgcacgtctgcttagagtacacagaaatcctggcacacaaaacagtag

SEQ ID NO: 358522 - DNA, 122 bp, Homo sapiens
tcactctcagggtgacatcgcggttcaggtccgtcacatggacactcagttcccacgtcccgtccgcgtagcagccatctggcatccttatcccgtccagagccatggctccttcctgcgag

SEQ ID NO: 358523 - DNA, 122 bp, Homo sapiens
tacccggccaaaggcgctggtgctggggccggagctgaaaaagccgctgaagcgactggccgcccggttcttccagctgtcgccagtgttggtgctgccactgctgccgctgggcagagagc

SEQ ID NO: 358524 - DNA, 122 bp, Homo sapiens
acgggacacgcacctaggggatgcgtgacccggacgcgggcttggtgggctctctagagtcgtttcttatgtggcactttctgtctttgtctgctgtgtcctgcactgattaaagggtggag

SEQ ID NO: 358525 - DNA, 122 bp, Homo sapiens
agggcggccaggtccagggccttgccgccagtgatgatggggatgttcagggagagcttccgccggcggctcggtgacgatgtcttggtgatggacagaggtggcggcgaggagaacttgcg

SEQ ID NO: 358526 - DNA, 122 bp, Homo sapiens
gtggtcgatgggaccaggcgccgcagagcagggggtggcacccattggggaggctcgggccgcgtgggagcccactgtgggggggggctcgggcatggcgggctgcaggtccccagctctgc

SEQ ID NO: 358527 - DNA, 122 bp, Homo sapiens
tggccaactcggaggagatcgccttctatgggggccatgaggtggggcaggttggggtgccgggcacggagggaagcgtgtggcagggaggcccgggggcaggcagccgtgagcggtgggga

SEQ ID NO: 358528 - DNA, 122 bp, Homo sapiens
gaggccgaggcggcggtggcgtcgcgtcccccctctccgcccctggcctcggggacgcggcggcaccttcacactttccgcttggcccgctgctcgcctttcaggccgccgcgttttcaatt

SEQ ID NO: 358529 - DNA, 122 bp, Homo sapiens
actctggacgtgtggcggccctgtcggcctgagccacatctgctgtgagaggcagcagtacgttccttggggcagcagcgagagcaaggctggatccaaagacctccgagcagctcctccgg

SEQ ID NO: 358530 - DNA, 122 bp, Homo sapiens
ccaagggagcctggggaagctaccccacaaaacgaatcacttggctattaacaacacagacgaggaagcaagcttgaggaaatatttaaggaccacctcagactccagactgtattctcctt

SEQ ID NO: 358531 - DNA, 122 bp, Homo sapiens
taccttgctggagcaagccgcgcaggcactggctggcattgcgcatgcgcaagcagagaccgccccaccctccgcggaacaagcctccggtctgcaaagccctaagccccgcccctctacgg

SEQ ID NO: 358532 - DNA, 122 bp, Homo sapiens
cttttctcctcccggaccccggacatctttgggctttcttacgagggaggcttatttttgcgcaggtgtaaggttttatccagctgccagacaacttgtgttaatctttctttgctttgcct

SEQ ID NO: 358533 - DNA, 122 bp, Homo sapiens
ctgacgcttcctattttcaacccagccagtgcactccctcactaaccctcagtgctcagccgagagagctttcttgggttccagttcccagactcacaactcctattctgtctgctgctact

SEQ ID NO: 358534 - DNA, 122 bp, Homo sapiens
gttcatgccccacctccaggtttagaaggagaccaggacatgaaatctgtccgcaggtgacgcagtgggacaaggatgttttttgaagatttgtgcagagtatttttgtagggttggcagaa

SEQ ID NO: 358535 - DNA, 122 bp, Homo sapiens
ctgcctcccgccccctagtggttgtggccgctctgtcaccacggctcccggggcctctgtcggctccactttggttgagacgtctccacagcccaacaacggcggcgatctgaggagaggca

SEQ ID NO: 358536 - DNA, 122 bp, Homo sapiens
ttttatccgcagtgtgtgtggctctgccttcctcgttgcttgtgtggaaacccaggtccacgtggaggaatcagacggctcagagggcggctgcggaactgagaaggcatctgctcactgca

SEQ ID NO: 358537 - DNA, 122 bp, Homo sapiens
aaataccttttgtttctctcacgttggggctacttgttttagggcgcaaaggaacggcctcgaaagggggtccttccccagccgagaaccaggaatcttccctcggcccgcgcgcgcgaccg

SEQ ID NO: 358538 - DNA, 122 bp, Homo sapiens
taaagatcccatttaatctcgcgcctatctatcacgcggctgccttcatcctctttgtgccggggtaatatgtgctcattacaaaagcaaaacagatctggcatgaataaacgcaggatgaa

SEQ ID NO: 358539 - DNA, 122 bp, Homo sapiens
tgcagtttctcaggtacagcctatccattctctaatcccactgctgggcagtgactaggccgggtggtggcctttcggatgggtttcacggaggtgatatttaaaagatgagagtgagagaa

SEQ ID NO: 358540 - DNA, 122 bp, Homo sapiens
agcagccctggaagccgtggaaaccgtggaacaactggaaaccaccgccaagggcataagcggaggtgtgccaaacgggtgacttgtcctgagaggcctgctttccattgacaggcatcctt

SEQ ID NO: 358541 - DNA, 122 bp, Homo sapiens
ccaacttggctcctggggcctcgacgtccacctccatgctgggctgagacacctccacgtcgggggccgtcacatccatcttcgggcctttcaggtccagcttggggcccttgatgtctatc

SEQ ID NO: 358542 - DNA, 122 bp, Homo sapiens
aggaggaggcggcaggtccgtgacagccagaagctgggagcagcccccgccactgccgggcgggggttcgcacccgccacagggtactgcagacccacatgctcgctccaaccaacacagag

SEQ ID NO: 358543 - DNA, 122 bp, Homo sapiens
gcaggtgatggggctcccctccgtcctcgtgggacgggtcctgccttgggccccaaaagccgaccgcggttcattagcgctgcttctgggatcatcccgcagccctttccgcgctcctttgc

SEQ ID NO: 358544 - DNA, 122 bp, Homo sapiens
tcccagcttcggaggtagaagaccccaagacaggcgggcgatgcgaactgcaagactttccgagctccgcaatcctgcggtccgcggtacccgcatgttgctatggcgacgggaggcagcgg

SEQ ID NO: 358545 - DNA, 122 bp, Homo sapiens
aacagacaatttgaaggccactgagcttcaggcttcattcagctgggtcgtgtctgcgggcggggctcatagagatgtcgctgggggtcagcgggtgcttcgggcagcgaaaaaacccacct

SEQ ID NO: 358546 - DNA, 122 bp, Homo sapiens
ttaataatcttgtggatgcagctgacatgtgagtcttgagagtttctgactcttccatagcgaattctaaagggaaggaaattctgtgagggcaggaggtgaggctttatcagagactatga

SEQ ID NO: 358547 - DNA, 122 bp, Homo sapiens
cgagaagctgacagcagaaaaccgctactactgcgagtcgtgtgcctccctgcaggatgccgagaaggtggtggagctgagccaagggccgtgctacctcatcctcacactgctgcgcttct

SEQ ID NO: 358548 - DNA, 122 bp, Homo sapiens
tcctctctggggctggggatccaactgttacatgcctgggctccggctccgtatcgaggccgtatcagctctgcggccccagtactgggaagctacccctcgccccctcaacctccttcgta

SEQ ID NO: 358549 - DNA, 122 bp, Homo sapiens
tacgcccaggagtgtaccaaagagggggcctgcgtgttctggaggacgccggacctgtgccgtaagagcctgcccgaactgcactcagggccgggacgggggctgggaggtgctgtattgcg

SEQ ID NO: 358550 - DNA, 122 bp, Homo sapiens
tgagtctggtgtctgggcctcaatcaggcggcccgggccgtccttctcctgttttcctcacgtttccggcagataaattctgaaatggacctcgtggctaaaacccagccctgtcgccttct

SEQ ID NO: 358551 - DNA, 122 bp, Homo sapiens
tcccaggcccagccaggaacctaagaggagggaggtggatatttgcctcccctacagtatcgtgtacgtatatgactttttaaaaaagaaaatctggggccacatggcagtggctcacgcct

SEQ ID NO: 358552 - DNA, 122 bp, Homo sapiens
gtagcatatccctgtgagggtgcaccttgggtcctcctgaaaagcacaaggcagaggtatcgtatatgagaacacaggaactttatagctttttaaggcatccagtgcttactttgcaagtt

SEQ ID NO: 358553 - DNA, 122 bp, Homo sapiens
ttgccggccaatcgcgtgctgtggggaccacagaagtccctctctgcttgagtgagtgaacgctaccagcaactggtctccgtcctccaaagctgagatgagagcctcacagcaaaagcagc

SEQ ID NO: 358554 - DNA, 122 bp, Homo sapiens
tccgcggccagctggaaccagccgcgtaacgggaaccctgggctaggggccgggcaggcacgtaccgcatgcagcgggcgccggccaagagagagcgcagccagcctcgcccaggcggggcg

SEQ ID NO: 358555 - DNA, 122 bp, Homo sapiens
ggagcaggaagcgtcgccccatccagccgtcggtgtgctcgccagctcggaggccctcggcgggccctggccagacccgttgtgatcttcagcctgtacacagatgtgtcgtaggcctgtgc

SEQ ID NO: 358556 - DNA, 122 bp, Homo sapiens
ctcagcaggcaaagacctacaggccctcttaacacaagatctaagtttcaaagtatagtccggggacggagacggggacgggggttgcgggtgggaggtaacagcctaaagaaacgtcgtat

SEQ ID NO: 358557 - DNA, 122 bp, Homo sapiens
cggagaaataaagagtggagcaaagcacttcggagcgattttccaactttaaccaacttgcgccccaactccagaggcagaactccgctcccagagagcgacgcgtcgccgccccgggtggc

SEQ ID NO: 358558 - DNA, 122 bp, Homo sapiens
tgagacacatgtgagtcagtgtcctgtggccttctatcctcatggatcttcttctgtcctcgtggcagccaccgtgagaaaggcagcctcgtgagcccattctgcagatgagaacactgagg

SEQ ID NO: 358559 - DNA, 122 bp, Homo sapiens
agtaggcaatagggcagggtgtaggtcactgactccgaagctccctcatggcctcatgcacgaaagcacacaatcctggatgtgctacagcaggaagtaccaaggccggagtggagcactga

SEQ ID NO: 358560 - DNA, 122 bp, Homo sapiens
cgaggccaactagagggggcgggagcagcgcacttttgagacgctccctagagtggaacccgggctcggctcaggctccgcgggcggggcgcgcgccgagagaggctggcactttggcgaca

SEQ ID NO: 358561 - DNA, 122 bp, Homo sapiens
cggggatgctgaggagcgctgggtccgggagcagccctggcccctgcggacttccgaggccgtgaaaacccctgcgctgcggcccttcccaggcccccgaggccgttcgccgttcccgaagc

SEQ ID NO: 358562 - DNA, 122 bp, Homo sapiens
agaggggatttcaccatgtttgccaggctggtctcgaactcctgacctcagatgatccaccggcctcgccctccctaagtgctgcgattacaggcgtgaaccaccacgcccgggttaaactt

SEQ ID NO: 358563 - DNA, 122 bp, Homo sapiens
aggagccaagggagggggttgcttcttctttccaagaatactgtagctttgagtttgcaccgttccttgtcccaggaaaaagttaagaaacttaaaatgttttgttttgcttttaaagaaga

SEQ ID NO: 358564 - DNA, 122 bp, Homo sapiens
aactacagtaccattgcacctttaaggactggagacttgctattagctcggcctccttcccggcccacctctgaactctgattgacagggcgccgggcgaggaggagctgaaggaggctgga

SEQ ID NO: 358565 - DNA, 122 bp, Homo sapiens
ctgcccagtgttccatggggcatggctctagagtcattctgtttacaccgagctgcctctcggttggataactgtgtggctgaagaacgacacggagcattaagctaggcccccgagagtgg

SEQ ID NO: 358566 - DNA, 122 bp, Homo sapiens
taacccttttggccacttcctgggaggctggtttccatggagacttcccttcaactttgccgtttcagacccaaagaatccagttaaacattgacttggttatgctactttctgaaatactc

SEQ ID NO: 358567 - DNA, 122 bp, Homo sapiens
gccacaacgctgtgcattcccccaaaaacgcagatgcccacctgctctctttagggaagccggagaggccgccgggaacaggcagtgacggcggtgatccagtggatcctccccagggcgtg

SEQ ID NO: 358568 - DNA, 122 bp, Homo sapiens
aggcctaagcagaggaatctgtctacacagctgtactgtcacctgggggcagcctgaggacgccccttcagggaggtggcccttcagctcggcagctactttaggttgaagaacttctctct

SEQ ID NO: 358569 - DNA, 122 bp, Homo sapiens
cgcatttgctgctgctgtccatggatgcagctcttgtcctaagagatctcccacccttgccgccctctggatccagcgtccaccgagcactttttccagttccttcattctgcgcgcgagtc

SEQ ID NO: 358570 - DNA, 122 bp, Homo sapiens
agggacaccatggcagccacatttattcgaagttagagttcttgaaaaaaaaaaaaaagacggtattacaattgagactgcatatacctaaattaactttgctctagagagatgcattttgc

SEQ ID NO: 358571 - DNA, 122 bp, Homo sapiens
ggtggtcgatgggactgggcgccgtggagcagggagcggcgtcatcgggtaggcttgggccgcagggtagcccatagagggcgtgggaggcccaggcatggcgggctgcaggtcccgagccc

SEQ ID NO: 358572 - DNA, 122 bp, Homo sapiens
gaaatctcctccctgctgcctgtgagcctcttttgatctctccttccataaaaatgagcacgcagcattcttcagatgaaaaaagtttataaaaacacaaccaagtgaacagtaataatacc

SEQ ID NO: 358573 - DNA, 122 bp, Homo sapiens
tgccggatcgtctttccggatggaccggcggtgcacgtttaaaggccagtgatgcgcatgcgcgttatggagaccggaagaggagctggtgtccgtgggtggtggagtcaaaccggcactcc

SEQ ID NO: 358574 - DNA, 122 bp, Homo sapiens
ggtcccgcacggcggctctcccggaccagaaccgagccccctcctcctaggctcatatcgcgggccccctccccagacctgggtggaattgggttccacccaaccctgagggacccagcccc

SEQ ID NO: 358575 - DNA, 122 bp, Homo sapiens
tctccctacacagcagggacccaggctcactgctgccttctggcctttgcttttcggagccgagctgagtgagtcccaagggaatcaccctctgttttataagctttgaaaccagagcatcc

SEQ ID NO: 358576 - DNA, 122 bp, Homo sapiens
ccactgagggtggcgtttcgccgcctggggcctctgcaggtggaggccctagcacggctgcgcacatcgagcccccgactcaggaagtggcggaagcccccccggctgcatcctccctttcc

SEQ ID NO: 358577 - DNA, 122 bp, Homo sapiens
acttgaagcgactcatgactgcgcatggaggacctccccagcggaagcggaagtggccgccggcaactccgcccttccggctggccccgctcagtcacccgcagcaggcgtgcagtttcccg

SEQ ID NO: 358578 - DNA, 122 bp, Homo sapiens
agtgaagtctcacagattgagttactcctgtggtagtcaggaaaattgaaggcgaaacggcgccatgatggtgggtaattaattgtctgggccctttggtgatggggctgtctgtgctgtgg

SEQ ID NO: 358579 - DNA, 122 bp, Homo sapiens
ccgtcatcacacacggtgccccactggcctttctgttccacctccacccgcccttcacagcggtggaggccccccaccagccgcactccagatggagacgctgcaaagagacgggttgttag

SEQ ID NO: 358580 - DNA, 122 bp, Homo sapiens
atcggtccacgctcatcacggctaggaagtagatgctggagaagatgttgtagtggtcgacggccagcaccagcttgcagagcagctccccgaagggccagtactgcagcaggtgctccgcg

SEQ ID NO: 358581 - DNA, 122 bp, Homo sapiens
ccgtgtggctggacgaggtggggtgccggggcagcgaggcgtccctgtggggctgccctgcggagcggtggggacgcggagaccgcgcgcacgaggaggacgcgggcgtgcgctgctggggt

SEQ ID NO: 358582 - DNA, 122 bp, Homo sapiens
ctcctgcagcagcagcagcgagaaggtgaggcggccgcaacctcccctgggcgccagccccgccctctgcccgccctgtccacctgcaggctccgtgtctggcccgggcctctgggacccgc

SEQ ID NO: 358583 - DNA, 122 bp, Homo sapiens
ccgcccgggcccctgcaactccactcgcccgtagcccgcgcgctgctgtcctgggctgcgcgggagccttgcacccaggagccggcctgccaggcacagcagcctgcctgctccgggtcccg

SEQ ID NO: 358584 - DNA, 122 bp, Homo sapiens
gcctggcttccgcttcctccgtcttctctcccccctccccccaccccactcccaggatcccgttttcacaactgttgcggcttgtctggggaggccgcattgctcctgaggctccagtccgc

SEQ ID NO: 358585 - DNA, 122 bp, Homo sapiens
caatctcattccttccctttacatcacatggggaggcttgcctcctggctggggacgccccgagttcttcctgagtctctactgtttcatctgttgatttcaccaaaacaaaaagatggatt

SEQ ID NO: 358586 - DNA, 122 bp, Homo sapiens
cacacccagggcacagccctccccagtgctcctgaaacaggcagtgctgtctacagcaggcgtctcggcagcgtggagacagaagtcacctggctgccggcttccatctcggatttggtgct

SEQ ID NO: 358587 - DNA, 122 bp, Homo sapiens
ccctggagatgacaagggcatggaaaaagtcaccccagtgcccaagttacagcctcccatcgggtggaagggctggggtgggaaattcagtgcaaggtacctcgaaggctattgctttctag

SEQ ID NO: 358588 - DNA, 122 bp, Homo sapiens
aggaaatacctgaaaagagatgtcaagttgaaaaacaatattttcttcaaccaaggtgtacggaaatgaaatgggttactttataaagcagtatattagctgtcactggaagtgtgtagcat

SEQ ID NO: 358589 - DNA, 122 bp, Homo sapiens
ttcacaaaatggggttgattatcgttaaatttcacagctgtttgaggattaaaagaatgacgtatctatattgtttatgtgccaagcactgacacttattcattagtgctcgtttctttcct

SEQ ID NO: 358590 - DNA, 122 bp, Homo sapiens
tcggcgccggccttgtctcggcattccgggctcgaaggctgtgcggtctgccaggagctgcggccccgtccggcccgggctggtaaggcggaccgcaggccggcttgtgggggaagaagtgg

SEQ ID NO: 358591 - DNA, 122 bp, Homo sapiens
aagacccagcgtaatacctgtatgctcaataaaaagtatttgctggtactccttcctgcccgtcgtgtgacctgactgctctgggcttctgggggctccccctaaactcgctccacgaaatg

SEQ ID NO: 358592 - DNA, 122 bp, Homo sapiens
gtccctggcaagcacatcaaattaaatgtcaaaaatatcccaatgctcataattcaccagcggccgatgtctgaagttacagcttcaggcatttatcacagacagcactttgaaagggaaaa

SEQ ID NO: 358593 - DNA, 122 bp, Homo sapiens
atgaggcgtggggcgcgccgggcgagtccctgcttgcaggaggcgcccgagaggccgtcgcgtaccctggcaagaggagctggttagcacctcccgaccccgagaaggcccagggggcgccc

SEQ ID NO: 358594 - DNA, 122 bp, Homo sapiens
ttccctaaggccatggggtacctaggaaaggatcataattcaggctgccacccagccccccggcctcaccaggcgcagcctggccacttccctctactgacctttccagatgtcccaggtca

SEQ ID NO: 358595 - DNA, 122 bp, Homo sapiens
taacagacagaagattgttgtcacccctgaacaaccctccttttaaagtcctaagggaatcgcaggttggtaatgaatgtttaattggccatagaagaaagtatattttttaaagggagagt

SEQ ID NO: 358596 - DNA, 122 bp, Homo sapiens
caaaacaaaattaatgcagttccaacgtttactggtgataatatacactagagcttgtaacgtacattcaactgtatacgcatcatcacttcgttttgcaaaacttattttgtttctcatca

SEQ ID NO: 358597 - DNA, 122 bp, Homo sapiens
tctcaaggctccaccggggaccctcttccggttctcaaggctccatcggggaccctcttccggctctcaaggctgcatcagggagagcagaacacacgtcccaggcttctgcttgttcccgg

SEQ ID NO: 358598 - DNA, 122 bp, Homo sapiens
ctgaaccaggcccttttggatcttcatgccctgggttctgcccgcacggacccccatgtacgtacccgctgcatccatggctacccaaccatacccctcaagcctctgctccctttgggcaa

SEQ ID NO: 358599 - DNA, 122 bp, Homo sapiens
caggtgccagccagcatgtccagccatcagtaaaaatatttaaaaatacagttactcggccgggtgcagtggctcacgcctgtaatcccagcactttggaaagctgaggcaggcggatcacg

SEQ ID NO: 358600 - DNA, 122 bp, Homo sapiens
cgcagcgcgggagggagcgcgggggctgtgagtccgctctggggcggagcttgggactcccgcccaggttgccggggggagggaggtgcagcggcgcggggtgggagagcagggagacagtg

SEQ ID NO: 358601 - DNA, 122 bp, Homo sapiens
ttgatgaggttggagtagagactgcaagaataattggggaagtgagcctgtgcactttttcggaagacagatggatgcatattctatataaggaaagttaaaaaatcaagtgtatggtcccg

SEQ ID NO: 358602 - DNA, 122 bp, Homo sapiens
tgcactgagctgagcactctactcatattctttacttaagtccacgatcttccaaggggtcgtctgaaaacagctcagagaagtgaagcgacttgctggaggtcgcacagctgctagggacg

SEQ ID NO: 358603 - DNA, 122 bp, Homo sapiens
gttttattctctctctgcttcaccccccactgggactgggcagcctttcttccagtggagcgtgctttaaagtaacccaaagaagaggagggggaacgggggagaaaaaccaaaaggtgcag

SEQ ID NO: 358604 - DNA, 122 bp, Homo sapiens
agaaaaaaaattggcgttgattaggcagtatctaatctccctaagcacaggaagtgaaggcgattgagtctgatttgcaggaggccccgaggttgcacaaagcagtcactcccctagcatgg

SEQ ID NO: 358605 - DNA, 122 bp, Homo sapiens
ctgggaccatgtatcaaatcgtaatttccaggccctgtgattgcaactgtaattttccatcgacagagctctctgccatacaacatgctttgatttaatcctcacaaaggctctgggaatta

SEQ ID NO: 358606 - DNA, 122 bp, Homo sapiens
ggtaacataagtggcggtgcactgaaagagatcattctcttcctaacccgaaacaaaagtcgttacagaattcctcctctctaaaagcacagacagaaaatactcatatacgagtttcaggt

SEQ ID NO: 358607 - DNA, 122 bp, Homo sapiens
ctcacagcgccctggggctggacaccaccggccggagcatggcggacagcacacacggcccggggcgggaaccttggaaactttacacagatggggagctcagccattccacgtgtgctttc

SEQ ID NO: 358608 - DNA, 122 bp, Homo sapiens
tttccgggaaggctgctctggaaccaccttgttagggctgtcttttgaggtctgctcctccgcacccgacttgctgggcccgtctattgggccctgctcctctgcaccggacttgttagagc

SEQ ID NO: 358609 - DNA, 122 bp, Homo sapiens
cttctcagagaacttgcagccatcagattcatttggagaagtttgataaaggttactttacgcttagacagaagaaaaaaccctaaggtcttgaactgagccttatcctctgatacagttta

SEQ ID NO: 358610 - DNA, 122 bp, Homo sapiens
ggctccacgtgccagtgtttgtgtacgtgcggccgtggcggggctggacagggtccgggtcgttgaggattaggctgctcgggcgtaaccggagctggggcgcggctgccaagggccggccc

SEQ ID NO: 358611 - DNA, 122 bp, Homo sapiens
gtgttcaggggagggtaggtccctggggatgggatggtcagagaccccgtggggccaattcgtttacctcttgacatcagtagctacaccagagaaggtgctgacacctgcacaaagacagc

SEQ ID NO: 358612 - DNA, 122 bp, Homo sapiens
gctttgggtccggcctcccgctgccgccagggggcgcggggccggaggacccttctctttcggtgaccctggccgacatctaccgggagctctacgccttcttcggtgacagcttggccaca

SEQ ID NO: 358613 - DNA, 122 bp, Homo sapiens
tttttttttttttttggtcggaggaaagaaaacagccctgcgcccggatgcgtagagagccgacaagtggaaacagggacacaccctcccgtgagcccgcccaagctggagccgcggcgcgc

SEQ ID NO: 358614 - DNA, 122 bp, Homo sapiens
gcaaagcgctatgagagagagagagagaaaccaaaaacaaaaatcccagcaaaaggaggccgagtccaaagagaatatgtccggtttctatttcaccaagctcctggactcacatttggccc

SEQ ID NO: 358615 - DNA, 122 bp, Homo sapiens
tacagcacccccttcgtcagggcggtgtaggcggttaccatggcgatgacgtccagagggcggggaggggcggggctatggagaggaggaggaagatggcgggcgggctgctctgaagagac

SEQ ID NO: 358616 - DNA, 122 bp, Homo sapiens
agtgctgcctgtgggactgcctccctcaggtggggacctgcactaccacctctcccagcacggggtcttctcagaggctgacatgcgcttctatgcggccgagatcatcctgggcctggagc

SEQ ID NO: 358617 - DNA, 122 bp, Homo sapiens
ctgccctggcagctggactgcactttgcccccgcccggcctcagctgccgcccgcccagacgccagcaagcccccctcccacgacagggctgctccgggagcttcggagacccgccccgggc

SEQ ID NO: 358618 - DNA, 122 bp, Homo sapiens
gtcgagcctggcgcgccgcagccatggccatcgctcaactggccacggagtacgtgttctcggatttcttgctgaaggagcccacggagcccaagttcaaggggctgcgactggagctggct

SEQ ID NO: 358619 - DNA, 122 bp, Homo sapiens
gcagccaggtcacagttggtaccggctcaccatcggtgtcacaagaaaaccttgcagactcgccctcgtagacggtcatggaccgtggctttgttagaattcttgctgccaaagtcgtcttg

SEQ ID NO: 358620 - DNA, 122 bp, Homo sapiens
ttacccgccctgtgctttccgatggcttctgcggggcgagcggggcctggccggggggtgcgggcgggagggcgagccagcggcgcctgcagcccgggccgcgtaacgctgaccgctgtgcc

SEQ ID NO: 358621 - DNA, 122 bp, Homo sapiens
cctggctgtaagactgggaaagccactgcttgagtcaggacctcattggctatttttgtccgtgagaagtcctctacaccacgacttgggaggcagcctgggagaaagagaaattagtcgtg

SEQ ID NO: 358622 - DNA, 122 bp, Homo sapiens
cctggcatagagtagctgcttcataaatatctaacgactgacaaacaagataacccagcccgtcaaaattcccggaaagggtctaactgggtcatgtgacacattgtgaccaaggagaagct

SEQ ID NO: 358623 - DNA, 122 bp, Homo sapiens
gccactccccgcttacatttatgtgtcagtgttttccaactacttagagtttatgtacctcgtgatttcttgataccaaatctttgtgtggtttctgtatctgtaatacaattttgtcctaa

SEQ ID NO: 358624 - DNA, 122 bp, Homo sapiens
aaacccagacccccagatttccgcaatctcactcagcctgggagacagctgctcccttcccgggctaaattggctaacacagtttggtaccttaagaggaaatgtgccctacctatatgagc

SEQ ID NO: 358625 - DNA, 122 bp, Homo sapiens
tctcaggtgcaggctgagggctggtctcttgggtcttggtttaggtttttgcttttctggcgctgtagtgaaaagaatgagccccagagccaattcacccaacccaaccccaggtgctcctt

SEQ ID NO: 358626 - DNA, 122 bp, Homo sapiens
taaacagtttccgtgacaggcttagcacggggcctgggagacccaagcgcgcggcaagctcgggtcctctctgtcggcaggtcctcacccttaaccggacccttgcgccgccccgcctgcct

SEQ ID NO: 358627 - DNA, 122 bp, Homo sapiens
tgttacagttcttaaggtggcgcgtctggagtttgtcccttctgatgttcacttgtgttccgagtttcttcctctggtgggttcgtggtctcgctggctcaggagtgaagctacagaccttg

SEQ ID NO: 358628 - DNA, 122 bp, Homo sapiens
actctccgggaacttgatggtaggggatttcttcctcgtagtctcacctccagctctcaccgagttcttggaacataatccagctctcagcagatgtttcttggctgggactgtccctggaa

SEQ ID NO: 358629 - DNA, 122 bp, Homo sapiens
atttgccgctcgcagccaaaggggcgagcgggctgcaggagcgcgaggcagagggctcggcggccgctcccgcgtccccgcggcgcggcagcccggcacgacccagcactttgttctcattt

SEQ ID NO: 358630 - DNA, 122 bp, Homo sapiens
ggtgtctaacaggatccggacctagctcatattgctgccgcaaaacgcaaggctagcttccgccagtactgccgcaacaccttcttatttcacgacgtatggtcgtaaagcaataaagatcc

SEQ ID NO: 358631 - DNA, 122 bp, Homo sapiens
ttcaatgggacacctgtggctcctgggtatttggggcctctgtgggctgctcctgtgtgccgcggatcccagcacaggtaaccctttgggcacgctaggcaggcaagcaggagaggcccgcg

SEQ ID NO: 358632 - DNA, 122 bp, Homo sapiens
ctgaccagaccaagcggttatcaaggaataatctcttcagctagcaacaaatgcataactcgatcgcttatatgcgacatgatagggcgttccctaggcaaaatatcaaagatacagggaga

SEQ ID NO: 358633 - DNA, 122 bp, Homo sapiens
cgtcgtgccagacagtgcttggtacttgcaagaatggccgtgtccccaggagccggtggacgaatctgtccttgctgccacctgtgcggccgcagagtgagacaggagggaccggcaggcat

SEQ ID NO: 358634 - DNA, 122 bp, Homo sapiens
ttccgtacctgggaacgcagggcaggtggggcggggagtggaatgaaacagtctgatcggcggttattggcagaggaaaatgaaagaacaaactccctttgcattttttggcttggtgtgca

SEQ ID NO: 358635 - DNA, 122 bp, Homo sapiens
taatatgtaaagtactttagtgttttcataaggcgccaaataaattagttgttattctcacgacctagcatataggagttcaatgttgggtagaggaatgaataaagaacctactttttctg

SEQ ID NO: 358636 - DNA, 122 bp, Homo sapiens
ccaagtgctggatgtcaatgactgccggccacagttctccaagccccagttcagcacaagcgtgtatgagaatgagccggcgggcacctcggtcatcaccatgatggccactgaccaggatg

SEQ ID NO: 358637 - DNA, 122 bp, Homo sapiens
tgccttcgccgaggcagggagaggtgcctgcagtgcgagccgtggacgctagggggcagccgctcggctcgggcccgaccgctctgggctgcgctcctcgcttgccctcggactcggctccc

SEQ ID NO: 358638 - DNA, 122 bp, Homo sapiens
ttttctagagaacttttgactgtcactttaggcatatggccctgtaaagacttctgtgtacgtacctttgttgtatgtgctcttgtagattgttcgtgtattctttttttctactttccttt

SEQ ID NO: 358639 - DNA, 122 bp, Homo sapiens
tcctggcccatgcagcacgccctcccattttggtgctgcagcagcaccaaggcgtagctgcgttcgcctctgccgcctccttacactcggggcacgtgagcttgtcctgcactggctgcgct

SEQ ID NO: 358640 - DNA, 122 bp, Homo sapiens
aaactcactgtgtctcaagcacagagacactgggaggtaaccaggctcgatgaaggtggccgcctgcacagtggtttggaccctggtgtatatgtgtgtgtgtgtgtgtttgtgtgtcgggg

SEQ ID NO: 358641 - DNA, 122 bp, Homo sapiens
cgcaggcggtgtcggggaccatggcggtggcggggagctgggtggctgctcgctttctaccgcccacgaggcccgcggggcctatttatccccaaggcacggccggccccagggacggccca

SEQ ID NO: 358642 - DNA, 122 bp, Homo sapiens
taaataaataaataaataaataagactggctatcccagagcctggggacaggagagtgtgcgctgcaaagccagccatttgaggagggcctagtctgaactgaataggtcaatgggctggag

SEQ ID NO: 358643 - DNA, 122 bp, Homo sapiens
gggacacttccccggcctggaagccaggcctcctgccacagccctccccaaccccagccccgacctgcctagaccctgaaagtgaaatcattttagctgatgattaatgagctgcccggcat

SEQ ID NO: 358644 - DNA, 122 bp, Homo sapiens
accggcgcacgcgcagagcgagctgacgcaggtgcgtggcgagaaggcgggctcggaaggcggaagagtcacccaggagaggaaaaagaggcctggcgagagcgccccctttgggcctggag

SEQ ID NO: 358645 - DNA, 122 bp, Homo sapiens
cggcagtgggctcctgcgtcacccaagcctccctgacaagcgctgccctctgctcccccgcgcctggtcccatggaccatccaaaggctaaggagtgcaggcacatggcctgggaccggcag

SEQ ID NO: 358646 - DNA, 122 bp, Homo sapiens
gggatcaggatgtggatgtcttgggggccttattccctcttccacggtgaggaactggcccgggactgcacagaggaaagctgacctggaagcctgttctgatgcatctggaagcacacggg

SEQ ID NO: 358647 - DNA, 122 bp, Homo sapiens
cacgctggagactgacagaccattttcaggaatatgtggtccaggcagctgtttctgcttcgttgaaggcttggcctgctttctcagtttgagcaccagatgaaggagatgacatgtgtttg

SEQ ID NO: 358648 - DNA, 122 bp, Homo sapiens
ccgactgccatcctggtacaggggtgggcgactgatccgtgtcaggggcaccggcctagacgtggtgcagcggcccctactgtctgtgtggctggaggctgacgcagaggtgcaggcttcca

SEQ ID NO: 358649 - DNA, 122 bp, Homo sapiens
accattgcctgcggaaagatcgtgtcgcacacgcacctcggagtttctggaccagtcactcgccaaagaagttttcaaattttgttggcccccatttgaccaaaaaagtgatactgaattcc

SEQ ID NO: 358650 - DNA, 122 bp, Homo sapiens
gatctcagcggaaaacgcatggcacctgccaccgtgcatcagaggcactgttcacaacggcgtggacagagtgcaaggaacaaagcaggatgatgaggccccgggggccggcagcagcggtc

SEQ ID NO: 358651 - DNA, 122 bp, Homo sapiens
tggcggggacgaggctgccacggtcacctgggcaccgcctggggcctcgaagtaagaagccgtgctgctgggggcgtacatctgaggctcggggttgtaggtgtaggctgttcgtctgttag

SEQ ID NO: 358652 - DNA, 122 bp, Homo sapiens
acaacgtcgctagcgagttccgtttccctgtttctgggaatttgtgactgtcaaaacaaacgttcaggtgaccattgccctaaaccgcactgacgaaagggctaaggaccagggaaggagct

SEQ ID NO: 358653 - DNA, 122 bp, Homo sapiens
ttctgaacttcttttgcctggatatcattctgaatatctctttctgggacctaaacaagtcggacctaaataaaatagtttctgcacagcaagagcaactatcaacagagtatggacaacct

SEQ ID NO: 358654 - DNA, 122 bp, Homo sapiens
cccgacgctcaggcggccatctcccaggaggaactgagggagaacagcattgcggtgctccgggccaaagctcaggagcacagcaccaaagtgctggggactgtgtctgggccggacagcct

SEQ ID NO: 358655 - DNA, 122 bp, Homo sapiens
gagagggtggggaaacttggctcgggagtcgggccctggactctcattagcatttaaaggcgcccggtgcgctttctatggctccaatccgccgggacgcgagcgcgcgggtcgcgttgcag

SEQ ID NO: 358656 - DNA, 122 bp, Homo sapiens
gagctttggataatgacatggcaggaggatcagactgagaacaggctggtcccttcctagcggtcaccgtgtgacttgggggccagcctgagcagtgtacatgaagtcaggccttggggccc

SEQ ID NO: 358657 - DNA, 122 bp, Homo sapiens
caaccacctgcccccatggcaatgcaaaatacgtttcttacccctcaagctgccctgtatcgctctgcagactgtgccttgtaaaagagtatttggctaagggggtgagggtaggctctgat

SEQ ID NO: 358658 - DNA, 122 bp, Homo sapiens
gttgacgccacggtttctttagcgtcttgctggagacattgactttcagagcccctgtcccgccttccattccccactacttggcagcccaccgcgtccacccgcggagctgcggaagccag

SEQ ID NO: 358659 - DNA, 122 bp, Homo sapiens
agaaaaggaaaggagtccaattcatggtggcaagaattaattagcaaaagaaatgcacagcgattgtaaaaagagttttacacgtagatcataatgttgtcttcactttctttcccacaagt

SEQ ID NO: 358660 - DNA, 122 bp, Homo sapiens
cagcacctcagagcatttccacccttcagtgatctccccttcatgccctcacagccctcccggcccccacgcgccaccaaacctctcaggttcggaagccacgggtcagggagccccagccg

SEQ ID NO: 358661 - DNA, 122 bp, Homo sapiens
gcagagctccagggttgcagaaggcgtgcacaggtcacgaaggaatggctgttcaccccccgaggattcctgttcagtccgatcacttgatctccatcgaggggctgctctgtaaactcccc

SEQ ID NO: 358662 - DNA, 122 bp, Homo sapiens
ctggaaaatgccatgtgtgacatcatgaaaggtgacgtggctgttgcccaggctgtggaccgcaaatgtccgggaatgaggcatgtctcccgggtggtggactcctgggcggtttcagtctg

SEQ ID NO: 358663 - DNA, 122 bp, Homo sapiens
ctgggatatgtgcgttcttattgaaataaataggggcacttgaactgaggtctaaggaaacgaacattagtgttgtgctttgtagagaagagaccctagagaaagaccccaaggaagtgcct

SEQ ID NO: 358664 - DNA, 122 bp, Homo sapiens
cgctccagccctagcaaccgccaagctgcccgttcatagcaaccgcctagttaacctgaacgcgcggccagagctcccagttgggtccacctccgaataaagaagcttcttcccaggccagt

SEQ ID NO: 358665 - DNA, 122 bp, Homo sapiens
ggatgcagctagaaggcccatcagtgaatcagaaagtgggccatcaccagacaccaaatccgtcagtgccctggtcttggacttcccaacctccagagccatgagaaataaatttatgttgt

SEQ ID NO: 358666 - DNA, 122 bp, Homo sapiens
ctccgacagggtggcacaactgctgttctgtgggcctggctggggggctgcggccacgtccgcctggcagcttagcacgaagggctccttggacacgctgcactcaggggccaccagggtca

SEQ ID NO: 358667 - DNA, 122 bp, Homo sapiens
gccaacacaagggcacttgcatttctagtatttttcttagaatttgcacatctatgatctcgttttttcctctcctaagtgtcttctagggtaagattgggtggttattaagctcaagatgc

SEQ ID NO: 358668 - DNA, 122 bp, Homo sapiens
tgcttcagcatcagcgtgtcatacacgaggcctggggcggggcagaggggccaagatcagcgcacatccaggggcgagccgaccacccactggcaggctgcccccgggtggtggcggaacca

SEQ ID NO: 358669 - DNA, 122 bp, Homo sapiens
agcgtagcgagtcaggtgaaggcggagccaagaactgcgagagctgtcactagagcccaccgggcgttctgcttgcttcccttcggacccacgcgattcaggctcagggagtcgcggacccg

SEQ ID NO: 358670 - DNA, 122 bp, Homo sapiens
acagtctctgccgcggctcccgcagccccctcctttccccacctcttcaagtatcgtccgcgcagcggtttctcgcgagagaaatactttttttaaaaaaagaaagaaaaagaaaatgacac

SEQ ID NO: 358671 - DNA, 122 bp, Homo sapiens
gtgttttctagagggaattcgtgagctgagccgaggagcgagcaggcggcttctcctgaccggggagacgcgggaggtttgcaaacagaccttggcctgggctgcgcagggacaaagtgttc

SEQ ID NO: 358672 - DNA, 122 bp, Homo sapiens
cacgcctcgcaaagagggaagagtgggcggggccacgtgccgttgtcagagttcgcaactcgagcgcccagagggctcgcgaaaagtcccagcctgcaagccaacctcgctcagcggacgac

SEQ ID NO: 358673 - DNA, 122 bp, Homo sapiens
ataatttaagtttggtatttctatatttttcaatacataaagggtcaggaacctcttatacggtaatgagatggaaagaaaacaacagcttcccgtgaaagaggcctaatatagtcaaatac

SEQ ID NO: 358674 - DNA, 122 bp, Homo sapiens
gaagagcgggcagcaagtgccactcaggtgctgtgggtccttggtccctcccggccccgccggagcccctcccacctgcacagccaggtgccatgcaggcctggacagctccccactgggga

SEQ ID NO: 358675 - DNA, 122 bp, Homo sapiens
agagctataaacaatgtgatactatgtcctgttaactcacagagaacggaagggctggaacgggacccagccagcagggtttgtgaccgcctctgctgtgacgtcacagcctggtgaggagg

SEQ ID NO: 358676 - DNA, 122 bp, Homo sapiens
ttagaactccgatgattaaaagcttcgggtgtctatcggggcgcagcgccacactcgaagcgcccggtactgcggagcgcggctcgattgcagccgagaagcgcggaacccgcaagtggggg

SEQ ID NO: 358677 - DNA, 122 bp, Homo sapiens
ccccacaccacacccccatggacccttgcccagggtccagcccacagtaagcatctctcccgaacacccctgcagggcttcctgtcctcgaacagctcacaggagtcaccaagtcccctttg

SEQ ID NO: 358678 - DNA, 122 bp, Homo sapiens
aaaaaaaaaaaaaaaaaaagcagatgctgattcaacaggtctggggcggggggtagaaggcgctgagattctgttttcctaacgagctctcaggtactgctgctggtccaccggccacactg

SEQ ID NO: 358679 - DNA, 122 bp, Homo sapiens
tgggtgaagcccggggcgttgggccagccctgcaggttaaaggaagcggggtcagaaaaacgaaatctagatcctaggtttggggcctgccttcacctgttggggaccttatgcaaattctt

SEQ ID NO: 358680 - DNA, 122 bp, Homo sapiens
ggtcgggggcacggagctggggtgtctggcttctggtggggctggcaggcctctgtgaggcgcagctgtgcccagaactccaagttgcgtttgccaccactaccgatgtggctgcgccagcc

SEQ ID NO: 358681 - DNA, 122 bp, Homo sapiens
tcgagactgaggcgaaagactgagcctgcccagtaatcgcctgtggaaaggcgacgacggcgccctcgtgactccgcgccgaccaaccaaagctcgcggccgtccccatgagccaatcgcga

SEQ ID NO: 358682 - DNA, 122 bp, Homo sapiens
aggaaagggcacacagagcatgtttaatattttgtttttcctttgggagtgggtgatggacgagatgcattcatgtgctaattcatccccagatcatgttgctgccattctctttgaggtgg

SEQ ID NO: 358683 - DNA, 122 bp, Homo sapiens
ttcttctgacttaaagcaccagtagcagcacagttagtccagttattcggaagctcagcacggagccacattgctgcagcatagaaggccacggattcctccatcagcatggactacacttc

SEQ ID NO: 358684 - DNA, 122 bp, Homo sapiens
ttcccccacccgctagcgagaacgcgggcggggactctgccgattcgatccttgtgggcccgtgggcccagaagtagcagtttggcggctccagatttagtgattctgcagtaaaatcacag

SEQ ID NO: 358685 - DNA, 122 bp, Homo sapiens
cctttcccggggcgctggtggccggcggggcgtctagagctcaggctggactggggcccccgcggcgtgtgtccgcgctggcagcagggagagggggcttgtccgtgagaaacggccccagg

SEQ ID NO: 358686 - DNA, 122 bp, Homo sapiens
cagagaaggtgggctgaggggaggagaaactgggctgcgggggtccgggagggtggattccgagaaactatgtgcccagctgaccctgcccgccccgccgcggccctgcagtccccgggcca

SEQ ID NO: 358687 - DNA, 122 bp, Homo sapiens
gggacttgctctctgggaccctggtggcctctctagtctggcctgtcagccaccagagggcgctaaaggaccatgggcagagtctgaggcagtggtggtaacgggtgaaggtgatggtggtg

SEQ ID NO: 358688 - DNA, 122 bp, Homo sapiens
agggttttggtaggattaaatgagttaatacatgtaacacatttagaacaatgcatgacacgtaataagcatttagtaaaagctattattagtatacatgtgtgaaacaggaaaataatttt

SEQ ID NO: 358689 - DNA, 122 bp, Homo sapiens
gactggcttggtggcaattcaaccccaggctgcgggcctagtggcctttccctgccatggcgcaatcttggaagcggcaactgcggggagggcgaggagcggtgcagtttccgccgcgcccg

SEQ ID NO: 358690 - DNA, 122 bp, Homo sapiens
agcatatacagtgtggatatgctggctgaagggatgattcatgtcttgggtaggatggtgcgggatttcatcatggcactccacagcatgcaatttaaaacttgtcaattgtttatttctgg

SEQ ID NO: 358691 - DNA, 122 bp, Homo sapiens
agaagctggccctgtcccctcaagcaggagctccatcttggccattagctgggacccagacgccaccccttccccattgctcgaccttgcctgctatgagctgaaggccaagacgaccctcc

SEQ ID NO: 358692 - DNA, 122 bp, Homo sapiens
acctcaccgtggagaccttggcggcagcttcacaccacgcccttgctgcttgccgagcagcgtgaacggatgttgaaggcgtagagccaagtaaacagtggacatacaatgcaataccattt

SEQ ID NO: 358693 - DNA, 122 bp, Homo sapiens
ctgacagtttgtggcatcttgccaagggtccctgtgtgtgtgtatgtgtgtgcatgtgtgcgtgtctccatgtgcgtccatatttaacatgtaaaaatgtcccccccgctccgtcccccaaa

SEQ ID NO: 358694 - DNA, 122 bp, Homo sapiens
aggggcatttgcaccggggctgggcgggcgcacccagagccaggcgggcaggaacccctgcgcagccatccggtgcctgcatgtccctggcgcggaagggacgcctcaccagcctcggcgcc

SEQ ID NO: 358695 - DNA, 122 bp, Homo sapiens
cttttagtcgcgtgtacaagtaagctatagattgtttaactttacacagttgtctaacctcgaattcatgttttagtgaacaagttaccagatccttctcctctgaactcgggttgcaaaaa

SEQ ID NO: 358696 - DNA, 122 bp, Homo sapiens
ctgaattaagagaatgaaattcactttaattcatttatttgtcctctacttgagccacctcgtcgggccgtgagaaatgaagtctggcgcccgctggcaccgggccgaggggctgccgcgct

SEQ ID NO: 358697 - DNA, 122 bp, Homo sapiens
tctctgctcgtctcgtcaccccaaaggtggtcatggaagccacctccaaaccctactccacgctgagtgctgccctgtgtaaaagacgacagctcagcccatctctccacagcctcccccga

SEQ ID NO: 358698 - DNA, 122 bp, Homo sapiens
taaattctagcaggtggtaattaataaaatactttagaaaacatgtgccttagcccggtgcggtggcttacgcctctaatctaagcactttgggaggccgagacgggcggatcatgaggtca

SEQ ID NO: 358699 - DNA, 122 bp, Homo sapiens
gcaccggctgctgtggggcagatttgctttcgggctctcacttgtaacagtcacttcccgcggcccccctgcacccatcactaaccaggaaacgttatcggggtcctcccgacctgcacatc

SEQ ID NO: 358700 - DNA, 122 bp, Homo sapiens
ctgaagcttttaccttggggcactgtcttctgagctacaacgtgtatttaaagtcttcgacgaaaccatgaaacttcctatgctggtactaagagtcacgtattcccctgctcaagttacta

SEQ ID NO: 358701 - DNA, 122 bp, Homo sapiens
gcacacccctgactccctagcaacagaactcacaatcctggggcctggcgggcaggcgggcggggccggttgctggggtgatgtcctgtaaggcctcttcccacagtggccccaggggtctg

SEQ ID NO: 358702 - DNA, 122 bp, Homo sapiens
gtcctcttcccgcgccgcgacctgcctgaaactctctgggcagcgctgcacccgcagccccgactctctcccagattgttcagggatgacagagggtcattagagcagaatcccgactcggt

SEQ ID NO: 358703 - DNA, 122 bp, Homo sapiens
aacatttttctaaaaaattttcccaattcaattcaacaaatatttattttccagaaaaagcggagatatataaagaaatagaaatgtgtgggtttttttcttgtttttgattgaaaagccta

SEQ ID NO: 358704 - DNA, 122 bp, Homo sapiens
tggccgaggcacgaggccgccaccaggagctttgcatccccctgtgtgtggtgccggccacgattagcaacaatgtcccaggcacagaaataagcctgggctccgacactggcctgaatgct

SEQ ID NO: 358705 - DNA, 122 bp, Homo sapiens
ggcggcggcggcggcagcgccaggagctgctacagcagaggcggaggttgctcctgtacgcgtacgggccgctcggccggagccgcagcccggaggcgccgggcggtgcgctgggagctgct

SEQ ID NO: 358706 - DNA, 122 bp, Homo sapiens
gaggtatgaatcttccagctgagcaacaccctggaccaggcacagaagcatgaccatcaccgtggttttgtgaaaccaacagaagatgaacatgctaactgttggtgggtagagagaccaca

SEQ ID NO: 358707 - DNA, 122 bp, Homo sapiens
ctggctctgcagttggtacttgccggagaaactcatggtggcaatagagctccctcttcacgactgacctgcggctctgccgaccagactgtccactgtaggctgttttatagggggctccc

SEQ ID NO: 358708 - DNA, 122 bp, Homo sapiens
gcagcaaccaagcagggtgagtgtgcgggctgcgcgggcggcgcggagcggagggagccgcgcggcgccacactcactcgcactcgcactcacaccggcgtgcacgccggcccgggaccccg

SEQ ID NO: 358709 - DNA, 122 bp, Homo sapiens
gtgatttgagaccagcaacaggcagcaaccgaggctcagggcagaaggactggtgcggggcggggggtaccctcaagcaggtataagggctcagcttcagacttgtagcttatgtaggacaa

SEQ ID NO: 358710 - DNA, 122 bp, Homo sapiens
tttctcaggctctcctcgtcgctggactcgttttgttctgctatgtcaaagtccttctgccgcttggctctggacttctcctctggctccggcttcgctgtagcctccagcagcctggctgg

SEQ ID NO: 358711 - DNA, 122 bp, Homo sapiens
acaaaacaaaaaattggatggatttggcagattagacagttaaagaataaactgcaagatcgaagaagccattcagaaaataagagggatacagcaggaaagataccaatcatatgggtaat

SEQ ID NO: 358712 - DNA, 122 bp, Homo sapiens
ctgtgagctttgagggcaactgccatgtattatgcatcttttgaatccccctagcctagccgggtgctagcccaagttaggtgcttattacagatttgttcagttagcgaatgaatcaatga

SEQ ID NO: 358713 - DNA, 122 bp, Homo sapiens
cacttctacccgggaaagtactaagtagcccagtggcagcagatgctaaaaaagggctgtcggtgatttaaaaacaaagctatttaggccatgtgtggtggctcacacctgtaatcccagca

SEQ ID NO: 358714 - DNA, 122 bp, Homo sapiens
gcaaaccaggtgtgaggagaatcacggaaacagaacatttctctaagaaaaatagcagcacgaggatgatgataagtgagaaccagtactcggcaccaatgtctgggagaccaggggagctg

SEQ ID NO: 358715 - DNA, 122 bp, Homo sapiens
ccctccgagggcggaggacgcgggcgaatatcctgctgcccggtacaagatggcggccggcgcccacccctgggctttgtcattggacggcgcctcgcccccctggtttctctttcttctcc

SEQ ID NO: 358716 - DNA, 122 bp, Homo sapiens
aagaactcagcagttgtaactcactgtaactctgcttatcctctgctttctctgttttcccgtatggaggggtagacatggaaagaaaggcagatcatgattaaaggttacagaaggagaag

SEQ ID NO: 358717 - DNA, 122 bp, Homo sapiens
gggaggcggcggccggagggcccaggacagccccgggagggcggcgaggcggagcaggagcgccccggctccggccacattctcagagtcaggaaaaggggcgagaggccacatgtctccct

SEQ ID NO: 358718 - DNA, 122 bp, Homo sapiens
gtggtcttttcccacctggtcttcagtcacagatgggggctggggcggtggcgccgtcttcgtcatcgaggtagaccctatggagccacaccgccctgccgagttctctgggtgcaataaat

SEQ ID NO: 358719 - DNA, 122 bp, Homo sapiens
aggccttggggagggagcactccagggagtcaagccatagcccccagcagaacactaaagcgtctgtcgcatctctctctttacccatctgtctgcctctcctctgcataggagaccctcag

SEQ ID NO: 358720 - DNA, 122 bp, Homo sapiens
tgcgcgcgcccgttcaacgtccggagcatcggtgcagtttcgagggtaaagcctttggcgcggtgatgtggacttttgttctctaactacaactcccagcatacgtcacccctcacgtgggc

SEQ ID NO: 358721 - DNA, 122 bp, Homo sapiens
taagaaagcatagttattttacaaattgtttttactgtcttttgaagaagttcttaaatacgttgttaaatggtattagttgaccagggcagtgaaaatgaaaccgcattttgggtgccatt

SEQ ID NO: 358722 - DNA, 122 bp, Homo sapiens
cttttttttttttttttttacataaaaggattgaagcaagtcagagcaaggggatttattcgtaagtggaagcgcgattgtagtcttttgtgaaataagatgaaaaaaggttttcaaaacac

SEQ ID NO: 358723 - DNA, 122 bp, Homo sapiens
aacgatgccattttgcttttcacaacttggcattccaatcacagaattgccctcttgcaccgttttcctacttgaagtttccagggcttgaataaaagacgtgtaaggaatattttcaaatt

SEQ ID NO: 358724 - DNA, 122 bp, Homo sapiens
gccccgcctctgggtgtgtggcgtgggcacgccggccgctcagaaagcgcgggaaaggcacgcagccacgccccaagggcgcagcctaggacaggggcttctggagcttctggcagccgtct

SEQ ID NO: 358725 - DNA, 122 bp, Homo sapiens
ttgggaggtgaccacattaaaatgataggaattcactgtgggtgacagcataaagccaatcgtggcttcctcactcttcgtggtgagccagaagttgttaaagactgggccaagaagattcc

SEQ ID NO: 358726 - DNA, 122 bp, Homo sapiens
catccacacgcccgcctgcccgtccacacgcccgcccgcccgtccacacgcccgcccgtccgtccacatgtctgaccgtccgtccacatgcccgccgtccatccacatggccgccatcgact

SEQ ID NO: 358727 - DNA, 122 bp, Homo sapiens
gcaaacaggcgttgctgcaataacagcagggatggaagttccgggaagggttatcacagccgaggttgttcggggcaggcttcattgaggatttgggacatgaatggaatttgagcttccct

SEQ ID NO: 358728 - DNA, 122 bp, Homo sapiens
ggacagaaaccattccctctaaaaaaatcgtttactttgacgataggtagcaacgaagcacggaagaatcttgaccctttgaggaacccgtaactgacgcaagtgccataaatgctactttg

SEQ ID NO: 358729 - DNA, 122 bp, Homo sapiens
caggttcgttacataggtgtacatgtgccatggtggttagctgcatctattttatttccacgtttttaacacaaaaggttgcatactatatattattttgtacctttaaaaaaaaaaatggg

SEQ ID NO: 358730 - DNA, 122 bp, Homo sapiens
tgacctcatgatccacccgcctcggcctcccaaagtgctgggattacaggcgtgagccaccgcgcccggccgagaaagacaattttttactgtttttaaaagttgctaacaggagtattaca

SEQ ID NO: 358731 - DNA, 122 bp, Homo sapiens
gcaaaggagagcctacctggagggcacctgcatggagtggctccgcagacacctggagaacgggaaggagacgctgcagcgcgcgggtaccaggggccatggggagcctgctcgatctcctg

SEQ ID NO: 358732 - DNA, 122 bp, Homo sapiens
gaaaataacgtagtaaagggacgcaagagcaaccttgcttcttccacaacaaggcccaggcgccgccttgcaacccggaaatgcagggtgcagtgcggggggtaagggaccggccaactatg

SEQ ID NO: 358733 - DNA, 122 bp, Homo sapiens
ttccattgtgagacctccgtggtgagttcaggagactgattaagaggtgcagggttgggccgtgcagaagggagggtcgggggccaccgcacagggcctcgccttcaaagacacttcctctg

SEQ ID NO: 358734 - DNA, 122 bp, Homo sapiens
acactacccagaatcctcagcgcggccgggactacgctacccagcatcctcggcgcggcccggaggctatgcgaccctgcgcgtcgcatcccctcggtggactacactccccagagtcctcg

SEQ ID NO: 358735 - DNA, 122 bp, Homo sapiens
gatattactcccagtaaagcagtgggtgtacattatccctgtgttattgtctctaatatccggagccgggggaggggagtagaggataacattccctcaaatttagcaggcggtttgacgcc

SEQ ID NO: 358736 - DNA, 122 bp, Homo sapiens
tcagaacacgcatcccagtctagggtcagcttctgcaaacacgcatcccagtctcgggaccgcttctgcgcctgtcttcagaattacacccggtgaaagtggacgtctctgtccgttcccct

SEQ ID NO: 358737 - DNA, 122 bp, Homo sapiens
tgacattcttctatcattttccatctgctcttgaacaaataaaaccctggcatagtcagacgctctcccactctcctctcccttcaacacatagagcaactttggtgtggcctctagtcagg

SEQ ID NO: 358738 - DNA, 122 bp, Homo sapiens
ggtgggacccctgtggcccatgtccccgaggcagccaactgcaccacccccaccctcgcacggctggtcaggacccactctcccaggcccagagcctctgctgtggcctcaatcttgctccc

SEQ ID NO: 358739 - DNA, 122 bp, Homo sapiens
cccccgccccgtgatattgtccttaatatccttctctgccccaggcagagaagatgatatcgcagaaagtgtacaccctccagtgatactgtgaccatgatccagaagggaagaggatgata

SEQ ID NO: 358740 - DNA, 122 bp, Homo sapiens
aggttttccagttgtatgaaaccaagaactcccgccactccaccatgatcgtgggctgcacgggcagcggcaagactgcctcatggcgcattctacaggcctccctgtcctctctgtgccgc

SEQ ID NO: 358741 - DNA, 122 bp, Homo sapiens
gccgtgcaacggcgagggcgccggcggggcatacgagagggcccccggcagccagacggacggcaggagccagccccggaccctgggccacctgcccgtgattagaagggtgaagagtgagg

SEQ ID NO: 358742 - DNA, 122 bp, Homo sapiens
ggctcggcccgtcgtgagaaactgcgcccgccagcgtctgagtaccggacgaggcgccagcgaggcttcacgcgcctcgcaggatcccgcccgcctccggcgccccttcctccctccctccc

SEQ ID NO: 358743 - DNA, 122 bp, Homo sapiens
tcttaggggtggtgactgcccggtggccacttcttccactgggtcccttgtgcacatcaccgtactgtgaggagggaagctccggtgtccagcagccctcccaagatacaggtgacagggct

SEQ ID NO: 358744 - DNA, 122 bp, Homo sapiens
tggtgcaaagattaaataattccgtgtcttcaacttgactgcccagcccagtgaaggacacgtaccaagtgaccaaggttcagtcaccaatggttcacgaacaggctttagggaagtcctgg

SEQ ID NO: 358745 - DNA, 122 bp, Homo sapiens
tcctagtaggactaaacgcttaacgttcacacgggaattcatggttctcctaaaaccctgcggtggaatgccttccttcaccgagcatttattgggcacctactaggtgctaggctggctct

SEQ ID NO: 358746 - DNA, 122 bp, Homo sapiens
atgctggggagaggtggcccggggcggggctatcgctgagcacagaggtgccagccaccccgtgaggtgctggtcatctccctcggcttacaccctcagctctgtggtcttttgtttgactg

SEQ ID NO: 358747 - DNA, 122 bp, Homo sapiens
gatgcggcgcgctttgataacaggttaatccggccaacattcgctccgcgagagagccatcggagggctccgggagactgcggcgccacggagggagaggcggcgagaggcccctctgcgag

SEQ ID NO: 358748 - DNA, 122 bp, Homo sapiens
ttctgttgaacagaagcccaaagacctcttctgaccttgagactatgccttctcccaaatcgcccctttgctttatctcctaagaactctgaagttgccatgcctgttcctttctctcccac

SEQ ID NO: 358749 - DNA, 122 bp, Homo sapiens
ttttatgaggctcctgagaatcaacccaactgaagcatttcaattcacttgaatgagaaacgtgtttagtatcaaaagagcccaagaagacactggtgtgaaaggtacaatctcagaggttg

SEQ ID NO: 358750 - DNA, 122 bp, Homo sapiens
ggctagatcaatgccatcctcacttgattttcctccaacacctggcattgctgggggcatcgctgggcctggtacataggaagtgcttgggaagtgtttgctgacaaggatctctctgggca

SEQ ID NO: 358751 - DNA, 122 bp, Homo sapiens
cgggagggccatcgggtgaggccccggccagcgcctcagactgccagagagcctcagccccgccccacaccgtcccaggtccctgcctggaggatctggagctggggactgctgtgaggtgg

SEQ ID NO: 358752 - DNA, 122 bp, Homo sapiens
gacagcaccacctgtcccctggaaggcaaccctgccccatgaaggacactcacggagggccgcccggcctccatgcctggcgctcagtagcgtggccagggctcccagtgtgggctcggtga

SEQ ID NO: 358753 - DNA, 122 bp, Homo sapiens
gtgggagcagagggccagctcagcagctgaagccatggagattagaggtaactgaggctgcggacagccatcggaggtgagaggtgtagagagaggccaggaacccccacccaagcagagaa

SEQ ID NO: 358754 - DNA, 122 bp, Homo sapiens
aaaaaccaaatgggagaaaagttgtgggtgatgtggcatacgacgaggccaaagagagggcgagcttcatcactcctgttcctggcggcgtagggcccatgacagttgcaatgctcatgcag

SEQ ID NO: 358755 - DNA, 122 bp, Homo sapiens
atggcttcacaggctctcagcaactgctctggccccagggcccgagtccatcctctcccccgcctccgactcttcttcaagactgagatcagagggcacaaaaggatgggcacacgggctta

SEQ ID NO: 358756 - DNA, 122 bp, Homo sapiens
gggagcggggcggggagcggggcgggcgggagggagaggggagcgcgccggagacgcgcgcgcccagcccaccccccgcgcccgccgccgcccggacaataaacagcagctttgcgcggggc

SEQ ID NO: 358757 - DNA, 122 bp, Homo sapiens
gacagtgggatgtttgatcttgctggggtcagcccagagacccaggagagaccactacagcgggttcatggggagggagtatgcagcaagtcctttgtccccttcccttcccagatttccct

SEQ ID NO: 358758 - DNA, 122 bp, Homo sapiens
gtccaaaaacagacgcgcaggatggccaagcaccagagtttatcgtttgcccataataatcgggttgattcggccaaggtttccctcccccaacacggtgcgcactgggaagcgcgaggacc

SEQ ID NO: 358759 - DNA, 122 bp, Homo sapiens
cagaatgcctatatttgagaaccacacgtgccttcatagggtcagcgaggtaaagcttctcggcagcgcggctgaactcctcccaggtctggtactgcggcatcgtggcctagagtggaaaa

SEQ ID NO: 358760 - DNA, 122 bp, Homo sapiens
gaagtctgactgttctgggggttccggggtacacttgtagcccccagttatggtccccatcgctgaggatcggggtcccaggggtgcttcgagtcggtagaccctaaagtttgctctgagca

SEQ ID NO: 358761 - DNA, 122 bp, Homo sapiens
gcaagacaccctcagagcacagggtgctgccaagagcccggccgagtgcagctggagcgccgacgtcgccaaggatacacagtgctgacgcagtacacaagtgcgtcacagtggtcctccgc

SEQ ID NO: 358762 - DNA, 122 bp, Homo sapiens
cagcggcctgctggactctgagaactgggaaagatcagagcaagccttgcctcttatcttcgggaaaccagaatatgtttggggtggtaggagccacacagactcttctgagccccctcact

SEQ ID NO: 358763 - DNA, 122 bp, Homo sapiens
gtgagagaccaatagacagataggaagagagaagatataaggaatgtttcagacagagatcgtcaagcaagatggaaaaaataagacgtctaagcaagactgagattaaagagatgcaatgt

SEQ ID NO: 358764 - DNA, 122 bp, Homo sapiens
gtcgagcacagcagcttctggcccaggtgctaagcccctcattacctggggcttgcctgccggccggccactcccaacatggggcccgcggagcccacgcccacccggaattcgtgctggcc

SEQ ID NO: 358765 - DNA, 122 bp, Homo sapiens
tctcccttcttccctaaccctttccccatttctctcaccacttctttgccagtctagatccgtcctggtgccttactgtgcatacagttctactcgtctcaggtgaggaggccacttaattt

SEQ ID NO: 358766 - DNA, 122 bp, Homo sapiens
gactcttctatgtcacttccgtaccggcgagaaaggcgggccctccagccaatgaggctgcggggcgggccttcaccttgataggcactcgagttatccaatggtgcctgcgggccggagcg

SEQ ID NO: 358767 - DNA, 122 bp, Homo sapiens
gccaattcccaggttctgcttttcgggttagcatcttggggtatttcttccccgtgtaagcgtgcgtgcagatgcacgtggctacgaaggcgcgtagagtcacaaacctacagatgcgggag

SEQ ID NO: 358768 - DNA, 122 bp, Homo sapiens
ttctgcgtcttcttaacccgtctttggcattgcccgggccccgagtcacacaggaggcagcgccggctccagggggccaggcggggaccttctcctcagagccccgggcagcttctgcgacc

SEQ ID NO: 358769 - DNA, 122 bp, Homo sapiens
agcggcgcctgccgcgtgtagccttctgaagtccggtggatcgaggcgaggaacggtgaacgtcctctcgtttcagctggcttttcccgagctggccccctggggagttgccagtggcacgg

SEQ ID NO: 358770 - DNA, 122 bp, Homo sapiens
tctgaaagtagagccactgacagcttctattttcatagacctaaatatgggcttgccacccggataacattacacgcatggcctctcctggtgctccccacacccgggtgaagtccgtgtta

SEQ ID NO: 358771 - DNA, 122 bp, Homo sapiens
tttcgtgagcatatatattatgttctcagactttgtaacctatgaatctcctgtgaggaccgacctacgaatgctcagaatacaaaggccggagtgagcagtgctctctgtgagagagaatg

SEQ ID NO: 358772 - DNA, 122 bp, Homo sapiens
aagtctaaaatgggtccatgacggtcatgagggtcccattgggaatcacagccctaagcccgtgacagagtagacttgaaggcttcctttggtgctggagaagtttgcttttcttcaagtcc

SEQ ID NO: 358773 - DNA, 122 bp, Homo sapiens
gccgacaccgcttcttacgactgcggagcttgggtcactgcagggcctgaggaattttcgcgtggtgccggctgaccacaaggactgtcccaggaggcccccccgctccactgaccaccagc

SEQ ID NO: 358774 - DNA, 122 bp, Homo sapiens
gagccgtgatccattattgtgtccttggctctgcagctccatagcttctctccccactaccgcccctcccccagccccaggtagatctggagttgattaatagttttagtaaactgactcac

SEQ ID NO: 358775 - DNA, 122 bp, Homo sapiens
ggcggaggcgggtgctggggctggcctgtctgcagctccctggccctacccagtggggatcgcgtgtcagtactggggtttggtgggctgccaaggggtgagccctgaggcggttttctggg

SEQ ID NO: 358776 - DNA, 122 bp, Homo sapiens
caacaaataccagcaaaccaagccagtgactaatccctgttgtgtgtatgagtgtatacacgtctgtgtgcatgcgtgtgtgtgcgcccacctgacttcttagcatacccagcccggtacat

SEQ ID NO: 358777 - DNA, 122 bp, Homo sapiens
cataaatggctttatgaaaaccatttcttaccgtggtagcagatgagatgaacagctgaccgagaaggcatgactgggcaggtccagggtcagcactccggcctcacatactgcagacgggg

SEQ ID NO: 358778 - DNA, 122 bp, Homo sapiens
ggcaccgaatgggctcactggggctccggtggaccccccagctcgggcctgccctgctcccggccccaccttggtcatgatgatgatggtcacatagtgcaccagagccccggtcaccacca

SEQ ID NO: 358779 - DNA, 122 bp, Homo sapiens
caatgccggagctggtgactacagctcctgcagctaccacagggtccacgagctcagggtcgaaggtcacatcacggggccttagtgtatcacaggcatcatagctgcggaggacaattcgg

SEQ ID NO: 358780 - DNA, 122 bp, Homo sapiens
ggaagcgtcagcaggtggggatctcggggcagcctgcattccagctctacctgggattgtcgccgtgcacatggctggaggagcgtctctccgccactgcgcacattttgcagcctgcaccg

SEQ ID NO: 358781 - DNA, 122 bp, Homo sapiens
aggtagcgcggatctgctttggttttgactgagaacccgggttttgactgagacctccgtcgggaggaggggactgggtgggagttagcgggcgaaacgattccccggagtggccccgagcg

SEQ ID NO: 358782 - DNA, 122 bp, Homo sapiens
actgttatcattttaggagccttgaggtaatggagcactactgggtagtacagataaaagcgtggaaatggcagatacttggagctgcataagtgaactgcgatggaacagaagacctcatt

SEQ ID NO: 358783 - DNA, 122 bp, Homo sapiens
agccagtgagtgtctggttagaggctgggctggggctgagcacgagggccaagaggtgaccgccggccagaaccagccgtggctgcccagtcgcccagatggtggtcccagggcagggagtg

SEQ ID NO: 358784 - DNA, 122 bp, Homo sapiens
tctcacgtgatgtaaggggccaggggtgttatgcacacagctcagggtgtgcaagtcctccgctgggccagggcagacacaggcaggcagggccagtgggtgacacaggccgtcactcaccc

SEQ ID NO: 358785 - DNA, 122 bp, Homo sapiens
ggaagccaccgccgccggcccgccccgcgccggcaccagcgcacgggcccggcgggggcgcgggggcagccacctagcccggaccaccgcagcccggagggctgtcaacagagtggtgtatg

SEQ ID NO: 358786 - DNA, 122 bp, Homo sapiens
gcagcagcaggagcctcggaggcccggccatgttccccacacccagctctcccagccgggcgagtgcagctgagcctctctgggtctacaggaccccacagagagcagcacacaggagaccg

SEQ ID NO: 358787 - DNA, 122 bp, Homo sapiens
taaggtgtgtgtgaaggaagaaccagacgccgggagagggagcttcggatcgcagctgcccgctgaagcctcttctggggaaataacctgaggaccgatgacctccttacatccatgcccgg

SEQ ID NO: 358788 - DNA, 122 bp, Homo sapiens
cacccacagacctcagagagaatctgctttggactgaagcattccccccacaagactcaacggagtccctctggcagctctgctctcccacctaggggctccctaacgctcaggccgcccct

SEQ ID NO: 358789 - DNA, 122 bp, Homo sapiens
ttcgggggccggctttttcccacagcatgggtccctggacatacgtgcaggatgtcctgtcgcccatggttcgcgcctttccgctgctgagtagctcttcacgccatggatggatctcagtg

SEQ ID NO: 358790 - DNA, 122 bp, Homo sapiens
gagcccagtggcacttgggggcccagcccagtaagcctcgggagtggcatgagctctggccgcagtcctgccatcagagggattctggggctgggtgggggaggccatcacctggcgatagt

SEQ ID NO: 358791 - DNA, 122 bp, Homo sapiens
ccctggtaactccatctcaatatagtaattgtcctcgggggcaaatgcgagtccctgtcacgcttttgacgccacagctttggagttgtcatggaaacagttgaacaaatgaagcccaggaa

SEQ ID NO: 358792 - DNA, 122 bp, Homo sapiens
gggcagaaagaaaggctaaaagttcttaggagaatgtttgcctttgcatgtatatgctggcgatgctaataagtcccagctagacctggcagtgagtaagttcaggggtggcaatttaattt

SEQ ID NO: 358793 - DNA, 122 bp, Homo sapiens
aagatcgtgccgctgcattctgggcgacagagcgagactccgtctcaaaaaacaactcaccgaggtctcctgtagcccatatgggccagatacctgtagaccttcctacatgctgccttgag

SEQ ID NO: 358794 - DNA, 122 bp, Homo sapiens
aaatgtgatgttttgctctaagcaacctaagagaaatacatgtatttgtaaagcatttcccgagtttgctggaacacacttttatcccacgaacagtgaaccttaagttctcaaggcagaaa

SEQ ID NO: 358795 - DNA, 122 bp, Homo sapiens
cacaaagccaatacacttggcctgcgtgtgaggcctctcctcacagtcagggcgaagccgcggctgctccaggccccctggtgccacctgaggcggaggcccgggccccacctgcgcaatcg

SEQ ID NO: 358796 - DNA, 122 bp, Homo sapiens
cttctcagatggggttttcgtgagggtacaacgtcggcattagacattccaggtgacgcccgtacgcggtgggcggttcgggccggagctctggaacgctggccctggaggcgtcgacccct

SEQ ID NO: 358797 - DNA, 122 bp, Homo sapiens
gggacacgcccaaggtcccacgactcacaggacaggacctgagtccgtgagaggagcccacgcgcctcgccctggccccgttgctcctgccggctgcgatcgagacccaccctggcgcgcgg

SEQ ID NO: 358798 - DNA, 122 bp, Homo sapiens
agcgggcgatgcagcaggccctcgtgatgcacggccacgccatgatgctagctgaaaagccggcctcctctttcttcttgtggttctaaagcaagtctctataatcttccttcagcctccga

SEQ ID NO: 358799 - DNA, 122 bp, Homo sapiens
tctacttaccccaggaaaggaagacgaagctgggtgcagctggactgctaagctcaccttcggataccccaatgacagtggaagcacaaaccctgatgaggctggtcgggggcttgtggtga

SEQ ID NO: 358800 - DNA, 122 bp, Homo sapiens
tggtcttcaacagggcattcttcagttccagactggaaggatatttggtgtggagcaaagcgatcatccatccaatccaacaataataggtagtttctgtgtgtcaagcactgtcaggccaa

SEQ ID NO: 358801 - DNA, 122 bp, Homo sapiens
ggggggaggggaaggctggcgcctgcgcaaagccgggggcgggggcagtggcttgagagccgggacaaaacacgagttttagctaatgtggaaccataaatacaacacaagactccccatcc

SEQ ID NO: 358802 - DNA, 122 bp, Homo sapiens
ttttccccagtacaaacccattgtggggacaggcgcttttgaagaaaaaattcagattcccgggctgaagtggctcctcacagccttgaacctgacccccagcttcccgctaaagccgagcg

SEQ ID NO: 358803 - DNA, 122 bp, Homo sapiens
gatttttggctgctaattaatccttgttctcttttcctggtctgtgtcaaggtacctgtgcgtgcacgcagacgggaagggctggggaagcgggaggactgagaaaagccgggtgggttttg

SEQ ID NO: 358804 - DNA, 122 bp, Homo sapiens
atattcttgtttcttgccaatgaagagaagctgttctagtatctttgtgatcctttgagccggaaggaggttctaagttaggagaaagtactaacttatttaaaaaaaatagaacaaacaaa

SEQ ID NO: 358805 - DNA, 122 bp, Homo sapiens
agggggaggttatgcgggaccctcacccaccgctctggctgggtgctccagacatacccccgccctcccgaggccttggccctgcagagttgcaggaaagggtccctgaggacagacacggg

SEQ ID NO: 358806 - DNA, 122 bp, Homo sapiens
cccaggggccctgatcccagcctgtagggaaactgaggccagggttccttcgtcctgcaccgcacaggggggcctggcgtgagggtggggggcccaggtgggggagccccgcccgtgtcccc

SEQ ID NO: 358807 - DNA, 122 bp, Homo sapiens
agctggttgggtctgctccacccatgaggatggagtgcagcctccaccgggaaccaggggcgcgagtcgctgctcagtggcctgggcctgcatgtggcgcggcgggagctgctgcctagggc

SEQ ID NO: 358808 - DNA, 122 bp, Homo sapiens
tctggggttgggtgtgccccctaaccccccagcacagtcctggccactccagtcctgctccggggcttaaagaacacggactaggttgctcagtcatcgcccaccccccgcaccgatttccc

SEQ ID NO: 358809 - DNA, 122 bp, Homo sapiens
ttagcgagtctcaagatgggattccaaagtgcagaggcagcggttttaacagctgagtttcggtttctcagaatcagcagcagactgcgcccgccccagagaacttccccacgtattctcca

SEQ ID NO: 358810 - DNA, 122 bp, Homo sapiens
accggaaacggaagtagtcgactcgaggtgtgggactacctttcccagaaccctccgcagcgcagtccgatcctaggggcgatggtgtcgtaaatgcgcgtccacctcgagtcacgcccact

SEQ ID NO: 358811 - DNA, 122 bp, Homo sapiens
ttctcagcagacaagaagcgggtggagactgcgctggaatcctgtggcctcaaattcaaccgggtgtgtggggtggggacaggggcggggtggggtgtcacggtgggcacccacccttacgg

SEQ ID NO: 358812 - DNA, 122 bp, Homo sapiens
accaccctcagcaaaaggctgctctggaggaggtaaagtgtgtgctgcagcacaggcagccgcagggcagcacgactcagccagctctgcacctgacctgatggcctcaacacctccaccga

SEQ ID NO: 358813 - DNA, 122 bp, Homo sapiens
ggttcataggcctagagagacccgacagcgggctgcccagtgtgagtgagaatgcctgcacgtttcggtggtcaggggcggagaggcctgtactccagattccccaaagagatcaaaacatt

SEQ ID NO: 358814 - DNA, 122 bp, Homo sapiens
gaaggcgtcggggagcctcccatggtgccttctggatgtgctactgccttatctttcgcacgtgggtctgtagtccggctggaagtgctttctgcacagggtgagctgacgtttgcaaaggg

SEQ ID NO: 358815 - DNA, 122 bp, Homo sapiens
gagggatgggtccggacccaggtgctcacaggtgccccctggtggctgctttggggagaacggactatgggggccagaggaggagccaggaggggactgagctggtcctagtggaaggaaag

SEQ ID NO: 358816 - DNA, 122 bp, Homo sapiens
gcagggtgttacgattgttaacgtgcagtgggcagttcacctgctacgctatccaacaggcgccctgctcaggcccgacctcgcactgccgcgcgggccggtcccccccggcccgggtaact

SEQ ID NO: 358817 - DNA, 122 bp, Homo sapiens
tagaggccaagggcttgtgtcaagctctgcattttgccccgcaggggaacctctataccccgcgattgaactcgaaagactcctcccggcggatgaaagccgctactccctggctggctgag

SEQ ID NO: 358818 - DNA, 122 bp, Homo sapiens
ggtctctcggccggtttgggtctcaccatcggggggcagcggcatctccatggctccggccgcggggaacgtcctccggcgccacacgatcgaccaccagcgccgtctgcggaagccggccg

SEQ ID NO: 358819 - DNA, 122 bp, Homo sapiens
gggacccgggccttgactcctcctccctcggcaaggcgtctccatgtcctcactgagctccgagggtgactacgccatccccccggacgcctgctcactggacagtgactactcagagcctg

SEQ ID NO: 358820 - DNA, 122 bp, Homo sapiens
gcatttaacgtctgtgagcctcagtgtgcacctgataaagtagggctaataatacatgctcgtctgaagggcattcctaagaggaaaatgcttgttattctgcagatcacaacacactttaa

SEQ ID NO: 358821 - DNA, 122 bp, Homo sapiens
gtgaaactccgcgatccgctccggcgctctttacaaataaggggaggagggccctgtccccgcctccgtagcacgtggtgacccatttccccagcctgaactcccgcgcgcgtccacgccgg

SEQ ID NO: 358822 - DNA, 122 bp, Homo sapiens
cccggggccgccctgcgagaggttgtcaccaacgcacgtgacctggcgcccggccggcggcgcgctcagctccgaaacaagcccgggcaacaaaaaccgggagctgagcgtgaaggcctggg

SEQ ID NO: 358823 - DNA, 122 bp, Homo sapiens
gctgaggaaccactcctggcgttgcggaaggtggggtgtggggccggaagaccctccccccgcgtcttcagaggagcgctgtttctggaggagttaggggaaggaggctgcctggtaagcca

SEQ ID NO: 358824 - DNA, 122 bp, Homo sapiens
gccaaggccttccagtgccggggctggagcgcctgcaggtggtgtaagcagagggggcgtcgtcctcggggagctcacagcctggggagaggcagaggggtcgtggggtagacccagggccc

SEQ ID NO: 358825 - DNA, 122 bp, Homo sapiens
atcatctgccctgtgcctgacacaagggacacacgggacatgcagaaccagatcagccaccgctgccgggcggactcaccgtctgcagaccctcaggccctgggagtttctcggcccgacct

SEQ ID NO: 358826 - DNA, 122 bp, Homo sapiens
aggtgagtaggggcggcgcaggtgtcctgccctggggatggggacgaaggctgaccgctccgatgctgtcgcgcccccggctcccggtcggcctttgtcatgtctaccgggagagcgaaggt

SEQ ID NO: 358827 - DNA, 122 bp, Homo sapiens
gagccgaaagggagctccctgctggcggctgtggggataaacgcccggcctgcctggcagcgccagtgcgcgccgccagacgtgggccaggcgggccgggcgctgccctggcagcctccgtc

SEQ ID NO: 358828 - DNA, 122 bp, Homo sapiens
tggtgacctaatttgtgtgccagttatagtctgcacatctccattatttaatttcctgaacgggaaaaagtagaactcagtgaactactctcatggcttcctgctgctacgatagtgaatag

SEQ ID NO: 358829 - DNA, 122 bp, Homo sapiens
ctgcacatccgccggcctaagctgctgctcaccgaaacccactgggactctggctgaggccggccccaaggagctttgccgaggagggagcaccttgcccctgcccagagcggtccctcgca

SEQ ID NO: 358830 - DNA, 122 bp, Homo sapiens
cagtcagaaagtggtaaatcctatggagaagaatacagctcagccggggagcaagggtaccggcagtggcacagaagccgtgttgtctgggactgtgaaagcagacactctgcctcccaagg

SEQ ID NO: 358831 - DNA, 122 bp, Homo sapiens
accctcttgctggatacacaggtcccctgtcaattccacctggtggactgggatatccgccggacacatattcttaaatgaatgtgaagggagagggaagaaggcctcatctatacttccgg

SEQ ID NO: 358832 - DNA, 122 bp, Homo sapiens
gcgtcgcggacaaagacctgggcatgcagcatgggcgtgtagcagagctgtgccccgtggcgccggctcagcagcctccaggccagctcgctctggtccaccatgggggccacgacgtggcg

SEQ ID NO: 358833 - DNA, 122 bp, Homo sapiens
tgcgctcggaccctaccttagactggggctggaaaccctgggtgcctgacctggggcgtccgattcccgcagcaggaagcagaaacttcgctctggattctgccggtgggaagggtggcagc

SEQ ID NO: 358834 - DNA, 122 bp, Homo sapiens
ggccgtacaccgggctgctgcggttgaagtaccggatccagttgtcgtagatgctcaggtcgccagggcctggtgagcggatctggccggaaggagaatttagtctcggtgcgcggccctcc

SEQ ID NO: 358835 - DNA, 122 bp, Homo sapiens
atgaactgcaaatggggtttcagatacaccttcccaggagcatgtctgatacgggcggggcggagtgggccagaggctcccggctgtgtctctaatagcacagaacccaggagctggcaggg

SEQ ID NO: 358836 - DNA, 122 bp, Homo sapiens
tggctgtcctggccctggtcctggcagggtgcagcgtcgagcccgcggtggcggggcgcccgggaggcagcttggcaggcagggtccctaagggtggaaataaaatacccccatatcgcatt

SEQ ID NO: 358837 - DNA, 122 bp, Homo sapiens
acatcaatctaaagtttctgcaacatctgcaaacttgaatgctattgttaatgtgaccaacgccttaaaataattgcattagggtttttggcatcactttataataagtggacagttaattg

SEQ ID NO: 358838 - DNA, 122 bp, Homo sapiens
tatgaggaaacgtcaaccccagcaactgttcaaaacaaaatgccattgcgggatcagcttcgccggcccttggccggttcagggttgcttttcccacagcctctcgaactttgtgcaagaat

SEQ ID NO: 358839 - DNA, 122 bp, Homo sapiens
aaaaataccaagcagttcatcctataagtggattaactctgcttcccaacctcactctggcggggaaagccctcctcagctcactgtggatctaatttacatgtcctcacatacctcaaggc

SEQ ID NO: 358840 - DNA, 122 bp, Homo sapiens
gatccacagctaatttgcggcctctgtttagcagaatttaatagcaggtattactgctgccgcggtaattaaggacctttgtcaataagacggaatggatggccacacttggttgtaatcag

SEQ ID NO: 358841 - DNA, 122 bp, Homo sapiens
tctggagcctgcggcagcggtggcgagccacagggcggcgaccgtgagctccgggagctgcgcaaaccacctggagaccatgtctggggatgcgaccaggaccctggggaaaggtgagtgct

SEQ ID NO: 358842 - DNA, 122 bp, Homo sapiens
gcaagctggacagcaggcagatcagaggggggtgagacaacagtgacagcctgacagggccgactggtgccgcagatggctggtccctccgcctccgggccacagccttcctgggcactccc

SEQ ID NO: 358843 - DNA, 122 bp, Homo sapiens
atcaggtgatccacccacctcgacctcccaaaatgctgcgattacaggcatgagccactgcgcctggctgaaaagtactatcttaaattagaaaacatctaggtataacataaacacactgt

SEQ ID NO: 358844 - DNA, 122 bp, Homo sapiens
tttctttgctttcttatatacagttcctcttgtacacattgtgaaagcaatggcgtgtgtcgtggagtctcctcactgctccacccaacgccaaaatgggtgtttgcgattggaaaatgtca

SEQ ID NO: 358845 - DNA, 122 bp, Homo sapiens
tgctcctgttgcggcggccgctctaccgcaacctgctgcgctcgcccaaccccgaaggtgcgcaagggcccagagcagccaggaggcaccaccctgaccgtctgtctcttcctctttccctg

SEQ ID NO: 358846 - DNA, 122 bp, Homo sapiens
cagaggagaagagactgtgtcccgcctcccacctcggggcttcctgtgagcaacagagcccggaccagggcctcccggggcatctgaggaatgcgaaacctgtgtccaaggccctgcccacc

SEQ ID NO: 358847 - DNA, 122 bp, Homo sapiens
caaagcccgcccctcccaaccagaagagaaagctccctctggccagctgtggtgggctcacgttgcttcctggaagggattgaatgtcactgcccgtgatggaacagggagtttcagaggct

SEQ ID NO: 358848 - DNA, 122 bp, Homo sapiens
cttttcatagagcaggtttgaagccctctttttgtggaatctggaagtggacatttggatcgctttgaggcctgcggtgaaaatggtatatcttcacataaaaactggacagaagtattctc

SEQ ID NO: 358849 - DNA, 122 bp, Homo sapiens
gccgccgctcccgggcggagccaagtcccggactggattgcgcagatcggactctccttccgcaactccgcctactttggctggcgtctcctccgacccaaaggagagctgtggtgtatgtg

SEQ ID NO: 358850 - DNA, 122 bp, Homo sapiens
atactgactatctgggcatttaaaaaatcagctctctgatcttcggtatatgccattttgcgtgtacttatcttcctttaccttcctgtggcaaccccttcaccacaccaatcagtgtattc

SEQ ID NO: 358851 - DNA, 122 bp, Homo sapiens
tccagacgagcatggtatctgtggagggcctcacaaagctggtggacccctcccagctgacggaggagtttgatggctccctggactacaaccatgaggagtggatcgaactgcggctctcc

SEQ ID NO: 358852 - DNA, 122 bp, Homo sapiens
gacttgggggtcctgagtgggatagactcagaggggtgggactccagaggggagcaggggcgagacatcccgtcccactgtggggggtccagaccctgcatctgcactcctgcctatgctgg

SEQ ID NO: 358853 - DNA, 122 bp, Homo sapiens
gtgtgtgtgtgtgtgtgtatgtgtatgtgtgcgcgccttatctcaaaatattgtgtttaacgtcttttaaaaaaagtattgtcagtggtaatggaacgcttttcacagtgatagttaagaat

SEQ ID NO: 358854 - DNA, 122 bp, Homo sapiens
aaatctgagaaagcaacacaaatttatggtcttctttaaatcaacatttgaaaacaccatcgcaaaattacaactgagacagtgagagatctaacctaaccaattccatcttgcttctaacc

SEQ ID NO: 358855 - DNA, 122 bp, Homo sapiens
gccctgacccgagtcggagctgtgtgtcgcagccgccccgaccccccgccgatcatgcgccggcgcccctggctctccagtcccactgggctgtgagccccccactcccagcccgtcagggc

SEQ ID NO: 358856 - DNA, 122 bp, Homo sapiens
gtcttactctgttgccctggctggcatacagtaggaagatcctagctctcactgtatcctcggtctcccagactcaagcgatcctcccacttcagcctcttgagtagctgggactataggca

SEQ ID NO: 358857 - DNA, 122 bp, Homo sapiens
ggagctgaggatggctgtgcccggctccttcccgctgctggtcgagggctcctggggccccgaccccccgaagaacttgaacaccaagttgcagatgtacttccagagcccgaagaggtcgg

SEQ ID NO: 358858 - DNA, 122 bp, Homo sapiens
tgtgtcagtgtgatttctccatatgtctgtgtgtcgtccatgtgactatgccagtgtgttcgtgtgactgtgtgacggtgtctccatgtggtaatgtctccgtgtgtctgtacatgtgagtc

SEQ ID NO: 358859 - DNA, 122 bp, Homo sapiens
gtaatccaaaccgtggagtccacataactcacatacggaaggcccgatggcagcatcgcccgtcagcttcctaggcagtggccagatggtgataccgctgacatcagggtgccaattatatc

SEQ ID NO: 358860 - DNA, 122 bp, Homo sapiens
tgctgtcttcagagggtctgtggtcctctgatcaacataggctggtgggagtacaggactcgcctcctcagggttccctgtgctgccacttttcagccatggccacaaggtgagtattggaa

SEQ ID NO: 358861 - DNA, 122 bp, Homo sapiens
accaactggtgaggaagataatgtagtggtacaagtgaaaggtgcagtctattgaaccagcgtgctagaagcacggtaagtgcagaaaagtcactcgatgtggtatatattttgaaaacaga

SEQ ID NO: 358862 - DNA, 122 bp, Homo sapiens
gcggggaccagtgctgctactcccacagccctctgacacccggggtctctgctgatgctgcgcttcactgtccagagacctccaatcacagaccccctggacctggggctgccactgggccc

SEQ ID NO: 358863 - DNA, 122 bp, Homo sapiens
tatgcaaatatgaccacgcctttcaactgcagggctcctcacttctggaatgactccaatcgatctgttagctccaaactaaacctaaccctccagacatgctctagcaaactaagacagga

SEQ ID NO: 358864 - DNA, 122 bp, Homo sapiens
cactggtcctccatgggagccccaggccctggggcagggctatatggacaggaaacacaacggtgaggaagggctttcagaatccacatccttcagtcctcatgcatgagtcagccaccaca

SEQ ID NO: 358865 - DNA, 122 bp, Homo sapiens
tgaatactgtaatacgatggggtcccccaggaccccctaaacaacaaatgctcaaaggagcgacggattaattggggcacccagactccccagagcaatgaaaaaagtgcctagagcatcag

SEQ ID NO: 358866 - DNA, 122 bp, Homo sapiens
ccttcagctttgattaatatgcatgtctatgctccgtagtgcgggccaccgcctcccgttcgacccctggcactgggagactgagctgtagcgaccaaaggcttgggatggggaggctgagc

SEQ ID NO: 358867 - DNA, 122 bp, Homo sapiens
cctgggcgacagtgtgagactccgtctcaaaaaagcaaacaggccgggtgcggtggctcacgcctgtaatcccagcacgttgggaggccgaggcgggtggatcacgaggtcaggagatcaag

SEQ ID NO: 358868 - DNA, 122 bp, Homo sapiens
gaactgggacagtttcctaaaatgaatagaaattacaacttgctgctcagaagtatggagcgtagggtaagaagggcagctaagaattgcaaataagcatattgatgtgggttagcagtgac

SEQ ID NO: 358869 - DNA, 122 bp, Homo sapiens
ccgacgctgtctgggaattccgggcgtttcggctccttggtcgcagaggcaggaggcgtgcgtggcaggagggttcgggttatatactcctaggtcctgggacagaatagttacgacctctg

SEQ ID NO: 358870 - DNA, 122 bp, Homo sapiens
tcagacctccaccccagactttctgaatcagaaactctgggggcacagcccaggaatcttcgttttcacaaacctccaaacgaatataaagatcgtagattatatagaccgtagggccgatg

SEQ ID NO: 358871 - DNA, 122 bp, Homo sapiens
agattacgggcgtgagccaaaatgccctgcctctttcacttttcttgttctgcctcctcccgttcctgctcctgcctctccagggttggggagtgggaagaaggaatgggagggaaaggcaa

SEQ ID NO: 358872 - DNA, 122 bp, Homo sapiens
agtacacatggtaggggaggagccagggcgactcaggagtgccacgcacctgctctagagcggcagctgtcccagtccctgctgtggaagtgggggacagggccctctcctgggggccattg

SEQ ID NO: 358873 - DNA, 122 bp, Homo sapiens
ccccgcggccccagcgggccgggcactcgcagccgcgctcgggccggcggacgctcgcgccggctcaccatgcactgccacgccgagctgaggctgagctcgcccggccagctcaaagcagc

SEQ ID NO: 358874 - DNA, 122 bp, Homo sapiens
gggttttgggctggaactgcagcgcttagagagctcggtggaagctgctaaaggcggaggcggggctctggcgagttctccttccaccttcccccacccttctctgccaaccgctgtttcag

SEQ ID NO: 358875 - DNA, 122 bp, Homo sapiens
cctggatgagctttcgtcagtttaccacaggcccccgcaggttggataaaccaggtggggcgcttcagctggctccactccgctacggccttaagccccccaacctagagaaactgattggc

SEQ ID NO: 358876 - DNA, 122 bp, Homo sapiens
tgaagtttcaccagctcctccagcgccgcacgctctgccatcccggctgtccacttgagccgcctgctgtctcgacctgcggtggttgccccagcctcagcaaggatgacttccggctatcg

SEQ ID NO: 358877 - DNA, 122 bp, Homo sapiens
ttcctcttctccagagcgagctaaatcgattgaatcagtgccagacactttgttgccagccgatgaaatgaggttcacctattccttatcccgtttcaggatgagaatttatgaaattaccc

SEQ ID NO: 358878 - DNA, 122 bp, Homo sapiens
tgtgggagttgtaggagggacagactgaaagctgtctgaggcggcgataggcattcctggcgccgcgcgcggcgcattgtgggagatgtagttcagctcctcagggcaagccggtacgcaga

SEQ ID NO: 358879 - DNA, 122 bp, Homo sapiens
ggagcgggccctccccggaggaggttaggagccggcccggccccccaggaccccgccccgcgtccgccgggtccccgcctgcactcacccatggagcaggccccgtgccgcgcggggggcgg

SEQ ID NO: 358880 - DNA, 122 bp, Homo sapiens
tgcctgccctgcctgtgacaggaagcagacgcaggcaggtctgagtttgcagcaacccaccgcagcatgtggatctaggctaattttgaggaagcccttccagactcatgagaaaactgtta

SEQ ID NO: 358881 - DNA, 122 bp, Homo sapiens
taaagaggcagcccgccctgccgtgtgagcccgtgccctgcgtgtgggcacgtgggaacccgtacctgagcagcattcctgacacgggaccttccttgagaaaattcccctgtggaagaatc

SEQ ID NO: 358882 - DNA, 122 bp, Homo sapiens
tgaactgcgtatagcgattcagtcactgaaagagacagatgacgacactacccatagagtcgaccggacgcaggttaataaggaaaccctttgtgaggtggaggcagggttaagagaatcca

SEQ ID NO: 358883 - DNA, 122 bp, Homo sapiens
aaaaatcatactcatcgccaaactgtggtaggcccccagatgccttggtgactgccaccacggacccaagagcaaactgtcaaaaacaagaaaagatggcatgtttacacagggatccccat

SEQ ID NO: 358884 - DNA, 122 bp, Homo sapiens
aacggtaggcgctccataaatacttgttgatgtgggtgccatcgtgtagatgacggagcacgaacccgaggctcagacaggggcggcgacttgtccaaagtcccactccgtggaggaagcgg

SEQ ID NO: 358885 - DNA, 122 bp, Homo sapiens
ccaggctgggaggagccctgcccggcggcgctgggtcgccaggacaactacgcggtcccccgccccgcctccaggcctcgtcaggcgctgcaagtccggctcagaagcccggcccggggcca

SEQ ID NO: 358886 - DNA, 122 bp, Homo sapiens
ggtgatgactttacagccggcagaaaacagcaccacccaaaagaagcagctgacgtcaaacgccatcacaggctaggattgcttggtgggtttacctaatgcttggagctgagaaatggaat

SEQ ID NO: 358887 - DNA, 122 bp, Homo sapiens
atcttcaacattttgctttcttttaaacaaatgtggcttttccctcatttcacctagctccggtcctcagacatcatgtcctttattttccgactattataacattcctgtaagagatactg

SEQ ID NO: 358888 - DNA, 122 bp, Homo sapiens
atcaccaccataatcaagatatagattcccatctctgcagaaagttacctcctgccccttcgtaattagtcacctccacccttgacccaggcaaacaaaaatccacttttcattactaaaga

SEQ ID NO: 358889 - DNA, 122 bp, Homo sapiens
ctttgttaactgatctgtcatcatctgaggtgcttcccctctctcacttggctgcagcttcgctggccacctggctgcactcctctgtgaccagctccacccctcctcagaacttttgcccc

SEQ ID NO: 358890 - DNA, 122 bp, Homo sapiens
ttggctcactgcaagcttcgcctcccaggttcacgctgagtatctgggactacaggcacccgccaccacgccccgctaattttttttttttttgtattttttagtagagatggggtttcacc

SEQ ID NO: 358891 - DNA, 122 bp, Homo sapiens
gcctcccctacgcctagctccggagctgtcagttactcgaacagtgcaacgagattttggcgccacagctgggagtgaggcttttgttccataacaaaaacaagcgcctgagtggcaaggct

SEQ ID NO: 358892 - DNA, 122 bp, Homo sapiens
gtgtagggcggggggcgcggggccgagcgggaagcggtgcggggcgggctggggggcggacgcacggagcgggcagcggggtggggagtggaagtttgcagaggggaggctgccttctccca

SEQ ID NO: 358893 - DNA, 122 bp, Homo sapiens
gacttttaccgcggtggagtgagcgaatcccttctctggagctccataggggagggtgcccgcttcctgagtggccgttccgacctccggtcaggagggggaggaacagagcacggccggcg

SEQ ID NO: 358894 - DNA, 122 bp, Homo sapiens
aaaatgagggtgaagaagccccagctgagaagcctagcaatctcctcaggccccttcaggcgtcgacagatcggtttgggcgacacccctcgatctgcctggcgcgcggcctttcccgccga

SEQ ID NO: 358895 - DNA, 122 bp, Homo sapiens
cttgtctatatgcacccaccctatagtgtatctggcctaaagtaggtacctggtaaatgtcgaatgaataagtgaacaaacaaatgttgatattacctggtaagtacatggtagagctggga

SEQ ID NO: 358896 - DNA, 122 bp, Homo sapiens
tctcatccagagtggacagggtggaatgggatcatccctgctttcaaatagggacattgacgtacagagagaggagtgggttagctggggccccagggcacagcttcaccaccctggggagg

SEQ ID NO: 358897 - DNA, 122 bp, Homo sapiens
gaaggttgggggcggttctcctcggtcaggatttgtctctcctccttagctccaccttcccgggctatgtctctgtgctgctctctgatccaggtgaccacccgttttcatcccaggtatct

SEQ ID NO: 358898 - DNA, 122 bp, Homo sapiens
aggggaggggcgggtctggggttctggggcgggcgggtgtgggggcggggcggggcggggcgggggctgcgctctgccctgtcgcgggtttatataccctttgggcacttaaccgactgtgc

SEQ ID NO: 358899 - DNA, 122 bp, Homo sapiens
cccggagagggacgcggagccagcggtcgggcaaagccgcattccccgcgcttggggcctcggctttgcccctgggtgctccccggttacttccagggggagtaaaggctccgaggcctcgt

SEQ ID NO: 358900 - DNA, 122 bp, Homo sapiens
ggtttctctccaggcatcttctgttcctctggtttctctcgcaacttctatccccctcctcggtgcctaggaattcttgtcagcttcctccgctttgccagaggcagcccttgcagctgtgg

SEQ ID NO: 358901 - DNA, 122 bp, Homo sapiens
tggcctcgagcgcggcggctgacagcacagcccgcctgagctgcctcccgcgctcctccccgaggaaaggattttgatttcaaagaaaggaaggaaggaaggacaactcccagcttccccgt

SEQ ID NO: 358902 - DNA, 122 bp, Homo sapiens
gatgtaatcacgttccctccgtattgacgttagtgcatgctcagttgctaattttgaaggcgggtccgcccggtatctagaaattgccgggctggtttgttttgggcggacgtgacgtaacg

SEQ ID NO: 358903 - DNA, 122 bp, Homo sapiens
tgcggacttaccacaattccaacataaattccgccaggatgcctacctgcagacttaccacgattccaacataaatcccgccaggacaccgacctgcggacttatcatgattccaacataaa

SEQ ID NO: 358904 - DNA, 122 bp, Homo sapiens
tcagcgccaccatggcccggcagacggggcgggcggggcctaggggcggggcttgggggccggggcggggccttacggggagggcggggcttgggggcagaggcgggggccttacggggagg

SEQ ID NO: 358905 - DNA, 122 bp, Homo sapiens
cccccccctcccggaggcttcgaccccgccccgcgactcttccggtgagctcccgctgcgcggcgccggggttcgcctctctggcttttgcccacgttacgtcatagacatgcgcgcgacgc

SEQ ID NO: 358906 - DNA, 122 bp, Homo sapiens
acctgaccgggttgtgctccgtcgctaccgcctccgggctgtcctgggactcgggggcggcggcaaggccacgggagtctccggcctcaatggggaatctccgaccctgcgggggctcctgg

SEQ ID NO: 358907 - DNA, 122 bp, Homo sapiens
ccttgggcttctagagatggtttgggttcacgtttgggagtttagcccccactccacacccgagtgtggtctatcgcctgacagattgtgcctgaggatgaaagccctgctgccttcctgga

SEQ ID NO: 358908 - DNA, 122 bp, Homo sapiens
aatctccccaaacatcatgacttatctgactggttaaaatgagtatcactgtctttcctccgtcatcttaagtgcatcacaggctttatattttcagacctttcatactaactttctgccta

SEQ ID NO: 358909 - DNA, 122 bp, Homo sapiens
ccaggacttcctaatggaaaccaggcggtcacctcctggagcctctgctgtggccaccaccgccccccatctccagacccatgccaccccccacaacagcctgttctcccggggctttgggg

SEQ ID NO: 358910 - DNA, 122 bp, Homo sapiens
tctctcctggctggcagcggggatctgtgtctccaaggaaagtttgccccgagcccttcccggcccggcgtagggttctccggaaaccatcactcacatctagcacttggaggcctccaggg

SEQ ID NO: 358911 - DNA, 122 bp, Homo sapiens
tgctgtcttctgcatctgggaatcaggtaacagctcacttagctggtggggggtgctgggcgcagcctgcagggccctccaaggctctttcctagtctctggggactgtggtcctgggctgg

SEQ ID NO: 358912 - DNA, 122 bp, Homo sapiens
cacttcctggttcacttcttccgggttaacgcacgctcccggcccctcctccgccactaccgctctccggaggagttgtcctcgagcatgcctaacaatggactaaaatgacaaaaatgagc

SEQ ID NO: 358913 - DNA, 122 bp, Homo sapiens
gttggtttttcccaagtgatttaaggattgaatcaaagctaagcagctctttgcttgtttcgttagcagctcatgactgcattaatcacaggcactactgcggtgaagatgaaatattcctt

SEQ ID NO: 358914 - DNA, 122 bp, Homo sapiens
agataaatttagaactcatatctaacagctggcatgtctggcatggggctccggctggggcgcagtcttcagcatttggggctctggggtgcagggggcagaggacggccggggctgtggtg

SEQ ID NO: 358915 - DNA, 122 bp, Homo sapiens
gtttcaggttccctttgatgtcagtagcccagagcctttgcagagcgggaacccactgcacgtggcagatgtgttcagtgttttctgtagaaagagacgcggggatgagttctccaccattg

SEQ ID NO: 358916 - DNA, 122 bp, Homo sapiens
cgtcagctgtttatctctcttcctcagaaagttgtttcccagagagctggctgaatgaggcgcactgtccccatgtcagtgctgctgcgttagggaatagtgttggagtagtcgtctaccct

SEQ ID NO: 358917 - DNA, 122 bp, Homo sapiens
tgctagtacagctctcggcggaggagccagggccgggtctccaggccgggagggggcggccgcggtgcgcccgggcagcgctccctgcgcaagtagttcttctatgtctttacacgcacttc

SEQ ID NO: 358918 - DNA, 122 bp, Homo sapiens
agctgagtggagtaagaggacagatgagagtctgaggccacagttgcctcaaagtgaccacggaccaggcagtctctaatgaataggcaaggccacaacctccattctcccagaaaagaaga

SEQ ID NO: 358919 - DNA, 122 bp, Homo sapiens
ctcctcctccgggggctcagcccctgcagtctgagaggtgcacggtgcctgtggcacctccgctttgcagaggaaaagagctcccggaccttcagaagctgctccgcgctgccgccaccacc

SEQ ID NO: 358920 - DNA, 122 bp, Homo sapiens
ctccgggccgggccccgcccctctcgctggcggactcagcgcgtcctccgccagccctcgcgtctgctgcccccgccatccagttggtgcggtccatggcgagcgcatcatggcgattgaag

SEQ ID NO: 358921 - DNA, 122 bp, Homo sapiens
atgtcactagggaaaaaaagatttgccttacaactttgctggaacacatcagtttggtgacgttgggacactagtgttatttttgagaaggcgcataaaaccaaagtaaattattctctatg

SEQ ID NO: 358922 - DNA, 122 bp, Homo sapiens
gggtctcgcggccggccgaggccacttacgtgtgctgctgggggaagctgtaggcagaggcgccgggggcggcgagcagcggtagaagcggcagcagcagccacagcgggcgcgggggcccg

SEQ ID NO: 358923 - DNA, 122 bp, Homo sapiens
gtaatcctggaggtaacggcgcttccagagtcacatagtccctaaagtgacactagagggcgcagtatggacatagctgtgaattgcgctctggacttgtgagtgacttagccaatccaagg

SEQ ID NO: 358924 - DNA, 122 bp, Homo sapiens
cgcggcgctgcagggagccggctttgtctcccggagaggcgtctccgggctgaccgcggccgcagctccgctcctctgcctgagccgtgcggcagccctgggagcctctcaacgccgagctt

SEQ ID NO: 358925 - DNA, 122 bp, Homo sapiens
ctgaggtgaactaggcctcaacggccccctacatcctctgcagtactccaaccttcgcgtcgaccccaatccaacagagaggctgagagaaggtgggggaaagggccactcctggtctaggg

SEQ ID NO: 358926 - DNA, 122 bp, Homo sapiens
tggggcaaagggggagaaatattagtcttcgccctgtctaccaaccaaggaatcagccaacggttttactgtgatcaaagattaaatgaattggcacacgcagagttgacgtttcaataagc

SEQ ID NO: 358927 - DNA, 122 bp, Homo sapiens
ggagcaggcggaaggtggttactggtgacagcggtgacaggctgagccctggtttctgtgcgtggccctcacaagccgcccagccctgccactcacctcctctgtggtctagggtagtcacc

SEQ ID NO: 358928 - DNA, 122 bp, Homo sapiens
acgatttgcttttcacaactacgcgttaatgaatagggcagcccacctcctggtttgccccggaatgcccagtttcaggcctgaaagtcccacggagcatctcccatcctcaccctcggcct

SEQ ID NO: 358929 - DNA, 122 bp, Homo sapiens
tctctccgtctaaggggcgaaggtgaaactccgagtccacgaggcccagcgtaggtgctccgtaagaagggaagagacttggtcccggatctggctccgatgcctccggccagcccgcccag

SEQ ID NO: 358930 - DNA, 122 bp, Homo sapiens
cagaggagaacctgcagaccatctggtccagtgttctagccagggggccacagaatctcccgtgtgctctgagaccgctgacgtgctatggcctcagggggccacggaatctcccgtgtgct

SEQ ID NO: 358931 - DNA, 122 bp, Homo sapiens
taaggcaaataatgataacgggatagcgctaaggggtcttctcagtgcagacccttagagcgcgcactaaccccatcatcaaaacacggcaaacacgtggaaaaaggacaacctgcccaggg

SEQ ID NO: 358932 - DNA, 122 bp, Homo sapiens
taaaccttcaggaaacaacacaggaacgtcttacatagactttaagtcagcctgcttttccgggtggcgtatccagtaatcatgttgacaaattaatggtagagaattagttgtacattaaa

SEQ ID NO: 358933 - DNA, 122 bp, Homo sapiens
tcagacagttgcctatgagagcctagttttttagtaaaaagagttgatattttagattcccgggtaaagagagagaagatcaaaaaaggaatccagtgtaataccagtatttaaaggatagg

SEQ ID NO: 358934 - DNA, 122 bp, Homo sapiens
tccccagtcgctgtggggtgaggggcctgctcaggtctgggtgtctgtgcccagaattcacggggaggagccagcccctcatgcgggtgcctgtgagagagcaacagggtgggtcactccag

SEQ ID NO: 358935 - DNA, 122 bp, Homo sapiens
ttaaaataacaatgaaacaatagcttatgcaacactttgcaaatatgatattttcatttgcggtattgtacaaaccaagcacatcaagcagcaatgttaagtaatttgcaaaagaccaaggg

SEQ ID NO: 358936 - DNA, 122 bp, Homo sapiens
ccactgtgagaacttgggtgccggttgcccttggcagggggcagggggcagtggctgaagcggggtcgggtgtctgttcttgatctggatgggagtcccacgctccagtcacgcggtgccaa

SEQ ID NO: 358937 - DNA, 122 bp, Homo sapiens
gtaactgaacaaacagtcctgctgaaaaatatgcttttgtttcactaataaatccctcctcggaacactcccgggccgggccctcctcgggcccagcctaccaggccttcccgcccagtgcc

SEQ ID NO: 358938 - DNA, 122 bp, Homo sapiens
ttcgggccaacttccacattcctgctccgcccaggcggggggtgagtcggggtgagcagccggctccaagctggccggcttcctggaaagggagggccagcaggagaactgcagatcctccc

SEQ ID NO: 358939 - DNA, 122 bp, Homo sapiens
ttccattgctgctggtgtactagtaagtgtcattgattatttgggccttattttttggtgcgtttgtgtttatgggttttgaattctgcaggatgttttaaaatatgtactatttattttat

SEQ ID NO: 358940 - DNA, 122 bp, Homo sapiens
cagccctggtggggataattaccctgacgctcgtttgcagcgtttaatttgcttcctccgcgctggaagcccacgtttggtgatgtatgtgttatgatggccacgtgtccttcccccatcag

SEQ ID NO: 358941 - DNA, 122 bp, Homo sapiens
ttccctttcactttgttacttaataggagaaacccaggctttcgctgaaggcgagaagaacggggccttttaatatggactcgttgccggaaccgccacgacaccagggcaggctggccagt

SEQ ID NO: 358942 - DNA, 122 bp, Homo sapiens
ctaccatggagtcgcctgctgggagcagccagtacacctgggcgtgcgacctgggcaatgcgggggccgattgctcaggggggcgcctgcactgccaggttcaaaccccaccggcagggagc

SEQ ID NO: 358943 - DNA, 122 bp, Homo sapiens
tctcctccaaaatctttggctgcaacaaaccagtttagtctcaactttctattatccactcggtgttcattacaccaagaaactcttgcaggtagtctaggaattggtttactctccgtctt

SEQ ID NO: 358944 - DNA, 122 bp, Homo sapiens
tggtgaggaatggatgtccgctttgctctgtgatgtttacacagagcgtgcacagctcagcgcattcacagcaagatttgattcaagcgcctccctcgtacttgaaccatgaaatggagata

SEQ ID NO: 358945 - DNA, 122 bp, Homo sapiens
aactcagcaagcacagctcctgactgccctaaaatgagatcctccaacaccttgcggagacgccgttcaacactgcacacaaccttaggaagaaactaggcagaattctcacacgagaattt

SEQ ID NO: 358946 - DNA, 122 bp, Homo sapiens
cgaagttgttgttggcggcggcagtggccggctgcgctggggaaggcccggcggggtaagcggcagtgcagctgtagccagggctgcaggccgcgccgccgtaacccggataggcggggtag

SEQ ID NO: 358947 - DNA, 122 bp, Homo sapiens
aggtgcgatggccccagtcctagcagccctcgcccatgtcctgtgcccttacatggctcccggactgtgcagggagccgatacgtttgctgatagcaatactggaaccaccgggtgcgatgg

SEQ ID NO: 358948 - DNA, 122 bp, Homo sapiens
agtgaacaaaaagtcgaaccccgggagtgagctatggtttagcccagttaccatggagaccggtagtaacaccagttgtaaacccaaggccaagagaccatggccacgttagcccggctgca

SEQ ID NO: 358949 - DNA, 122 bp, Homo sapiens
ggcgtgggcgtggctggggacggcttgggggtggggctgcgcaggaggctggaggagccccgcgggacccagaggcggggcgtcggcccggggaccactgctcctccggggcgtggctgcag

SEQ ID NO: 358950 - DNA, 122 bp, Homo sapiens
ccgggagtcccgccgcgcccgcagcccacccggcgctccgaaggcacgcgcctgcgaggacgccagactgcaacggcggggctcctatgcaaagagctcccacaaatcaacaataaaaagca

SEQ ID NO: 358951 - DNA, 122 bp, Homo sapiens
gcgggcaaggcgctgcagggagggactccaaagacacacgcgcgcagccctcctcccgcccgcagcccttcagctgctacagtggccacagctattccgaggtctattccggcctcgccgcc

SEQ ID NO: 358952 - DNA, 122 bp, Homo sapiens
ggcgcgggcccgcgcgcacccgcacgcctcgggcgccaggcgccgccgtgtgggcggagccgggcagcctcccctgtcggcgccagccacggctcccggccccaagctccgcccccggcgcg

SEQ ID NO: 358953 - DNA, 122 bp, Homo sapiens
gagcacgctgggatttggcgcccccctcctcggtgcaacctatataaggctcacagtctgcgctcctggtacacgcgcttcaacttcggttggtgtgtgtcgaagaaacctgactgcgccct

SEQ ID NO: 358954 - DNA, 122 bp, Homo sapiens
tgctcatgacctgacctctgtgccttcctggcagtgatgagattcgccagagaagacctccgtgcttcacctccatcctgcccaacacagaggtcgcctctcaggagccacatagactcaag

SEQ ID NO: 358955 - DNA, 122 bp, Homo sapiens
gccggaagaagctcaggaagccgactggctgtgcagtttccgttcctgttggctggggcccggaagtgagagaccacgagggcccctccctccacccaaagggcatcacgccctgcctttgg

SEQ ID NO: 358956 - DNA, 122 bp, Homo sapiens
atggcgcctcaagaccccctccgggaacccacgcccgcctgaccttactatcacctcggccggaagtgtctccggccttttcggaagtcactttcacctaaccttacagactaccgctccgc

SEQ ID NO: 358957 - DNA, 122 bp, Homo sapiens
aagacggtgggaccagccccacccctgccgatgccaggctgaggagtgggccgagccacccggggtatcctggggcagctggcagcacctggccccgctggtcacccacctggcaggatctc

SEQ ID NO: 358958 - DNA, 122 bp, Homo sapiens
cacgccctaatccccaagtagctcttccgggtcactgcagtcttcacgggctccagactccgcccatggtccgtccttcaggccttgactccgcccacgcatcgacgtagaatttcccggcc

SEQ ID NO: 358959 - DNA, 122 bp, Homo sapiens
agacaccctgggaggggcggaagcaggccctaagggactggactccagctccctacagtccggcacctacttccctgtggcctcagagggcagcgagccggccctactgcacagctgggcct

SEQ ID NO: 358960 - DNA, 122 bp, Homo sapiens
cacacacacaaacacacacacagagccacagcgtgagaattccaaaaggttctgcacactcggtggagaagattgaattcagagcaagcggatgcccccgaaagcaggctctgtccctttaa

SEQ ID NO: 358961 - DNA, 122 bp, Homo sapiens
agaggcaatgccgcaccccaaaccctgtcagtcactcacactgaggacattttcacgaggcgttaatgggtgatgtttgaattctggttgccagcacagatcagggcaaagctcttgtaaaa

SEQ ID NO: 358962 - DNA, 122 bp, Homo sapiens
gctagagggaggccatgccccttcattgcgtctctgaaggcccatcatgccacagatgggcgatgctcagtggctgatgctacctagctctgtccagtcccacaaatccagatcagtgtgag

SEQ ID NO: 358963 - DNA, 122 bp, Homo sapiens
ccgcctggggcacggcacccaggacggtggcagagctgacctgactcgagtgaccggcagcgtctgcagggaggatggggacgaggaaaaggctcccactgcgccgggcctcacctttgagt

SEQ ID NO: 358964 - DNA, 122 bp, Homo sapiens
tattattttttctttcaacttatgcatatattttttcaaattgctactcagttgttaggacgtatatacatattaggttgtttagacataactgtttaataaatgcaagtgttagatatatc

SEQ ID NO: 358965 - DNA, 122 bp, Homo sapiens
acaaatctcctccttgcagaacatttgggcaccaatcatactaatctaaataggacagtccggcaatctctgtagagaggtttccttcagaaaagctttcagggagcatgaggaaaacagtg

SEQ ID NO: 358966 - DNA, 122 bp, Homo sapiens
cgaacgtgggccgagcggaggacacagagtaaaaagcgacgcccgctgtatacataaatccgcacccgctgcccgcccgggtactgcctgctctggcttccgctctcttccgaggctgggca

SEQ ID NO: 358967 - DNA, 122 bp, Homo sapiens
agtaccttcatttgttcgtttactcattcatcaaaccctgctaaggtctcaagttgttcacggcctggctttgcggagctacctctcgccccataacatatttagtgatgcctgaactccat

SEQ ID NO: 358968 - DNA, 122 bp, Homo sapiens
aaagtggaatcagaggaaacgccttcgaaggccgcttttctgccctgtgtggctgcgtcccgcgtcacggagcactgcgcaccgcctgccgctctgactcgcggcctcctgggctcctccag

SEQ ID NO: 358969 - DNA, 122 bp, Homo sapiens
cgcctccgtccggggcgcgggcgaggtggccggggcgggggaacgcagggggcagggccgcggcggcgaggccggggggcggggaggagtgggcccgataaaaggcggcgcggcggccccac

SEQ ID NO: 358970 - DNA, 122 bp, Homo sapiens
gagtttctgagaaatgcggtagacgttctagaactatccaaaaatcagggagcggagctccgggccaacgggaaaatatctgaggtctgtggggctagctcccgcaggcctatcgcgagtcc

SEQ ID NO: 358971 - DNA, 122 bp, Homo sapiens
aacagcgggaatggcaggtgaagacaaagaggcatcctatcggagaggcagataataactcggctccttcctagaaatgtgggtttgattaacattaattataacagcagctgagggaaaac

SEQ ID NO: 358972 - DNA, 122 bp, Homo sapiens
aaatgtaaatgtaggagccgccagtcatatttctgctctgattgtaaaaacatccttttccgagatggttgacagagccaagctaagaagaaatggtttatattttcaagtaacacattcat

SEQ ID NO: 358973 - DNA, 122 bp, Homo sapiens
tgccgaccaatcagagcaggcatacgccatcgtgcacagtgattggctcacaggtggccacgtgacctaggatacgccaatgaggagactcactgggccagtagagaaaaggaattgaggct

SEQ ID NO: 358974 - DNA, 122 bp, Homo sapiens
ccccattgggtcatcattgcttttggggatgcagacatgggacaggcacccagtgttaaccggctgctgtgagccgccattcgaggacgactctctccccggttcccgggctgacaatgggt

SEQ ID NO: 358975 - DNA, 122 bp, Homo sapiens
gggagcgaacggccaaaaggagatccggggatgggaccccaggcttcttcggaggaggcccggggcaactacgccccgcggccgggagggaagccctcgggcggccgcctgtagagggcccc

SEQ ID NO: 358976 - DNA, 122 bp, Homo sapiens
agggctaggctgggccccgggagagtttacttttttttctgttttaaacaaagtgctttccgccggttcttccctccgggcgtgtttgctgggaccccggcaggtggcacgctttgctgagc

SEQ ID NO: 358977 - DNA, 122 bp, Homo sapiens
ccgccggggaagcctgcacggccctccgaggagaggtcggggactgctccttgggctctacgtgagtgccgcgccgaggcgcctgcgaggtcctagagctgctgtgcgctcggccctctcct

SEQ ID NO: 358978 - DNA, 122 bp, Homo sapiens
tgatctgagcaatctccaaggagccaggctcaaaggatttggaaaataaatatcgccctacgtggaaggggagccagcagaggatgaaggcaaacaccactacagctaaaaggacaatggga

SEQ ID NO: 358979 - DNA, 122 bp, Homo sapiens
ctcaggtgatccgctctccttggcctcccaaagtgctgggattataggcgtgagccaccgcgccaggcccacaagtatttctggaatgctttctgtacacatggtgctggggctggggatgg

SEQ ID NO: 358980 - DNA, 122 bp, Homo sapiens
ggtgcgggatataatctcgtggtgcgccgttttttaagcccctgggaaacgcacagtattcgggtgggagtgacccgattttccaggtgccgtcccgattttccaggtgccgtccgtcaccc

SEQ ID NO: 358981 - DNA, 122 bp, Homo sapiens
ccggtgtctgcctcctcagatttctgtagagcagcccagcaggttaataaatttgcttgccgactttgggtcttcttgtcctttctcttggctaaccttataagcccatgtgcataactccc

SEQ ID NO: 358982 - DNA, 122 bp, Homo sapiens
agaaggctcagattcgcaacaaaagaaaaaagggacgcaccatattaaccggtggagaatcgccaccaagcaggcgagtccggaggaaatagacgtgacctcagatgattaaaaacataaac

SEQ ID NO: 358983 - DNA, 122 bp, Homo sapiens
ctcaatacagaagacagagcagttcggtttctgctgctagaagcttgctcctccttgtgccgggaaacaaaactgcattatgataatgctatatcatagcatgtgtggtcaaaaagacaaaa

SEQ ID NO: 358984 - DNA, 122 bp, Homo sapiens
tgaggcagtagagacgcggcgccacctggaacaggggtctgttatcaaaagcccttggctcgcggggtcattagggattccgtgcacacacctggagtgttgaataatgaatcaggctgccc

SEQ ID NO: 358985 - DNA, 122 bp, Homo sapiens
ccgaggatgctagctagatgctcagaagccatccggtatgcgtggctccttcatagcagacggcctgacagaccccgtgccaatcaaccttggccttgaggcctcacgaagttcttaagcgc

SEQ ID NO: 358986 - DNA, 122 bp, Homo sapiens
cgcgacctttccggggacggtctcgggagtgccatggggtccctggggctcggatctcggcgcccgcgtctccgccgggggcgaccccacagccaggctccttcttcggcacagaacccgcc

SEQ ID NO: 358987 - DNA, 122 bp, Homo sapiens
tctctggtctctttgctaacctcgggacccgcagttgcaaaggctgagggacggggtgggcggagcagacgctgaggactgcggtgcccttaggggcacggagtcgcttggcagcaaccgct

SEQ ID NO: 358988 - DNA, 122 bp, Homo sapiens
accaccattttaccattctggctgcgctctagtctccctggcccgcaccaacggcagcagcgaggtgagccacggcaggctccagcctccactgtgctaatgaagttgctcctcctcctttt

SEQ ID NO: 358989 - DNA, 122 bp, Homo sapiens
ctggactagtacatgtccgcagcgggccctgggaggctgcagaatgggaagttgttaaaacgtcaactgcagcagagattccaaagtgacctaaaggaaattcgaatttcttctgccccatt

SEQ ID NO: 358990 - DNA, 122 bp, Homo sapiens
atggtcgggccctgggcggggcaggggctgcacctgggcctctgggccacctgcctggctcggtcgcgccccttctttggtttccagctaacgacgcggcgcccaccgagagctgggggagc

SEQ ID NO: 358991 - DNA, 122 bp, Homo sapiens
tgcaagctccagggatctgtgtgtgcgttggggagagtggagtacatcatttctggaaaacggggcctcaaaacgtagcgccgtttacagatgagaaaagatgcatttagaggcttgaactg

SEQ ID NO: 358992 - DNA, 122 bp, Homo sapiens
caccagttcctgggcctcagtttccacatctctgtaactgatctcccagctcaaagtctgcgtcccagtgcactgagtgcgtgtgcagcaccctgggtggcagaggatcagagccttgagcc

SEQ ID NO: 358993 - DNA, 122 bp, Homo sapiens
gccaagaacgactagcttatactcacgcatgatgcaagcttgtcaaaacctagtactctgcgaacctctcacgctgtcaccgggtctctgcagccagcgtcgccccgtgctccccgcgggtc

SEQ ID NO: 358994 - DNA, 122 bp, Homo sapiens
gccggatcccccgctctctcctgggcgggccgcgctgccctgggcagggcgggcaccacccggggggaggaaagtggaaggactcaaggttcagtgcaagcccacccatcctgtgaggcgat

SEQ ID NO: 358995 - DNA, 122 bp, Homo sapiens
tccgccattttgtttggtctcagctgccagttcccagaggaaccctctcttctggccacacgcccgcttgatggtcacaggcctccgtcagcggcttctccatccctctctggcaagctgaa

SEQ ID NO: 358996 - DNA, 122 bp, Homo sapiens
ccgtgatggaggacacgatctgcccaatcaggcgattgaggttggtgtacgtgggacgctcgatgtccaggttgcgccgacatatgtcatagatggcttcattgtcgaccatgaaggcacag

SEQ ID NO: 358997 - DNA, 122 bp, Homo sapiens
aggaagagaactgctcaacacaaaagtggacagaaaaagatcagtcttagagagtcttggcggggttagaatttatcctgttgcatgctcgatgtgatatcactaaaggatctaagcaggat

SEQ ID NO: 358998 - DNA, 122 bp, Homo sapiens
gagagacggcggcggcggcgcgggcacccggccccccagcgggaggatgaagcggcggaacgccgactgcagtaagctccgccgccccctaaagcggaaccggatcaccgagggcatttacg

SEQ ID NO: 358999 - DNA, 122 bp, Homo sapiens
cttccaagcctctgcttttcttccccatccactcatctgacattgctattcatcctatttcgtatttcttttatagcactgactaattcaactataatggtttctctgagtgtttcctaaac

SEQ ID NO: 359000 - DNA, 122 bp, Homo sapiens
gcccgccaccctcgaagaactctcgtggggccgccccgccctgccgcaggtcacgcgctgcgcacctggagggcatctggccagccgccagctagagcctgcccctgctcaggctcggctca

SEQ ID NO: 359001 - DNA, 122 bp, Homo sapiens
tatcttgcatgtcctcattagtacactttgcaaacaaacctactgaaaataaaacttcagcgaaaactctaaatgactaatgggggtaaggatctgaaatacctttacattaggcagcaaac

SEQ ID NO: 359002 - DNA, 122 bp, Homo sapiens
ttcaccaagcgctacgcggaggaggagatgtaccgtccacacccggccttctaccgcccgcgtctcagcgactgctccgactactcgggccagttcctgcagcccgaggcgtggcgccgcgg

SEQ ID NO: 359003 - DNA, 122 bp, Homo sapiens
gctcaatacttacttgggaaaatgacaaatgtgaccaactttgctttgggaactttcccccgtcttctccccactcctccggagaacccgaggacagagcaggtcttgggagcacgcccggg

SEQ ID NO: 359004 - DNA, 122 bp, Homo sapiens
aagcccctgaacctcacattactcacttgtcaaatggaaattataatacttcccacctcacgtggcacctgtgatgattcaatggcaaagaccaggtaaagcagttagcaccatgtctggca

SEQ ID NO: 359005 - DNA, 122 bp, Homo sapiens
ggacgacctgtggcccaatggcggcggcgcgcgggcacgctgggggccggccagacgggccgacttttccagaagacccggatagttcctcccggccacgccgcgccggctctgggcactca

SEQ ID NO: 359006 - DNA, 122 bp, Homo sapiens
aagcgctggtcccacgccagccagaaaccaccagctgctcgtcccatgtgaaacaggcagcgctgtcccaagccctcattaagaaaggagaattaaggaagcaattcccgtgattcccacga

SEQ ID NO: 359007 - DNA, 122 bp, Homo sapiens
cgtgacgtcatttccgcgtcgtccggtttggccttcagcgcccaatcccaaaacgcgaagcgtagtcccaccctcgactgagtagcctcgcgctaacttgagcggcgcaggcgcagaggaga

SEQ ID NO: 359008 - DNA, 122 bp, Homo sapiens
ttctactggtctctcttaaagataaatcttttttcctttcttcaagtaaatatccttagtcgcctctaatattttcaaaaggatgtggctttgaacatcttcaccctcatgcttgttcttct

SEQ ID NO: 359009 - DNA, 122 bp, Homo sapiens
tgtcttcaagttgaaacaggtttcttgtctctaattaagaataagctttgaaactaaggtcggcagggaagtggattttctggtaaagcatgaaaacgaaacatctcccctaccagacaagg

SEQ ID NO: 359010 - DNA, 122 bp, Homo sapiens
tctttgtcccatggggagaaccctcatgccagagggctccttctgtgtgcctttcacccacgctagtgtgagttcctgataggcagggatgcggctcccttcgcctctggaccctagacagc

SEQ ID NO: 359011 - DNA, 122 bp, Homo sapiens
gctccggctaggagggcaagcgggaggtggcccaggctccgatggggcggcggggccgagcgtggatgggacaccgggcggcaggcggagagggcgcaccagcagggacaggcggcggggcc

SEQ ID NO: 359012 - DNA, 122 bp, Homo sapiens
gctgggaaacatggcgaccgagggaatgatccttactaaccacgaccatcaaatccgtgtcggagtccttacaggtaaccgggggaggaggtctgggacctatgaggctgctgtccctgcat

SEQ ID NO: 359013 - DNA, 122 bp, Homo sapiens
tgacctgttgaccgttgcccaggcatcctggcggcacaccccattggactgttcagagctcgccccagcgcccccgattgggtagattcgggctccaccccctgcgtcacagaagtcatcta

SEQ ID NO: 359014 - DNA, 122 bp, Homo sapiens
aacaaataaacatccaaacttcactccccgtccctctcattgagtgctattgctcccccacgggcccagtgaaactggcagctgaagtcaagggaacctcttgagtccagtccataaaggtt

SEQ ID NO: 359015 - DNA, 122 bp, Homo sapiens
gccgccatggtcgcagcggcggccattccccgcagcctcacttccggcaactgtcagtcccggcgagtccgttccccggagtggagctacaagtcccaaagggtcttcctcagcgcgaaatc

SEQ ID NO: 359016 - DNA, 122 bp, Homo sapiens
tcgattttctttgaaattcatctattttctcacttgtctacatcaaggggaaatagggagcgaggataggtctgaaccaaagtactcccacttaaatggcatgatgtgtctacgtatctatg

SEQ ID NO: 359017 - DNA, 122 bp, Homo sapiens
aatggtaaaattcattgtgatcctgacctctgatgctgtcagccacaggaaggggcaaaacgacttgaggcttgaagccgtgtctttccccaagctcaggttcaccaaacatggtctccaga

SEQ ID NO: 359018 - DNA, 122 bp, Homo sapiens
taatttgggccaagctcggacacgctgagccccagggagcctggaactggttgggcggggcggggggggggcgcagggcttcccgtccctcttcccctccccttcccctccccttcccctcc

SEQ ID NO: 359019 - DNA, 122 bp, Homo sapiens
cttgctggttgccaggctcttatctcagccagtccagactccagcccaacccaggaaggacgcaaaccagaggagaagagaggaggaggaggagttagaggtggcccctctgattagggcag

SEQ ID NO: 359020 - DNA, 122 bp, Homo sapiens
ggtttccggttccgctatcttctttttcttcagcgaggcggccgagctggttggtggcggcggtcgtgcgggttcgcgccgggccgagagcgggttgggggctgcgggaggctgcaggggcc

SEQ ID NO: 359021 - DNA, 122 bp, Homo sapiens
ggaacccctggagggtctcagattcttactctttgcaacttcctaacggagcagtgctttcgcccgaggaaagtttggcaaaactgaaaggagggacaggctttgctaggggtaatttagtg

SEQ ID NO: 359022 - DNA, 122 bp, Homo sapiens
cttaagaccagacagaggactctagccaagaattccaacagtccccgaattctggcaacacgatctaagcatctctcccagttacatccttcctggcaggctctgaaaagaatactgggaga

SEQ ID NO: 359023 - DNA, 122 bp, Homo sapiens
aaggaagttggagtcctgtgaccgacagtcttgttagagacattattagtatgaccccatcggtggtagctaatgactgagaaaaacatggtgattattttcaaaaatgagtatgaaaatct

SEQ ID NO: 359024 - DNA, 122 bp, Homo sapiens
gtcgggtgcgcatgtgtcctgggtcgtcacgtggagggggaggggaggtagaggtacaatcggggtaaccaactaccagccattcagaagggcttagacaatgtcaacttttccacactgtg

SEQ ID NO: 359025 - DNA, 122 bp, Homo sapiens
taattctgcagctgcacagagacaaagcactttatactaaacaaacacgggtgcaagctgcgtgccctaaaaggtaaagctctataggatgccctgcagtgtgatttctaactgggcttcca

SEQ ID NO: 359026 - DNA, 122 bp, Homo sapiens
cacccccgctcccgccccctgccccaggcagggcctcaccacaatgctttcttccggccgcgcaggtggttctccaggatgactccggccaccgtccggcctttgcccacgccggccccatc

SEQ ID NO: 359027 - DNA, 122 bp, Homo sapiens
attcgtgctctattgtgacgtccaaagcctgacccaaggaactgattcaggtagaggcgacgccagctcagtgtagggggcaagctctgcaagaccttggccgagtgacttctgctgctttt

SEQ ID NO: 359028 - DNA, 122 bp, Homo sapiens
attcttcttccaggacatcctgtgacttaaccaaaggcatgaaagctactgatggaaggccgttgctctggctctccaggggtgagctggggtcagcccatgccctgggactggagggctgt

SEQ ID NO: 359029 - DNA, 122 bp, Homo sapiens
cacccgacggcgcgcgcccctccacccatacgggtccccacagcccacttccggtcccttcgcagaccctgtggcaaccaccaccgcctggtcccgaggaccctgccctccactggtcgcct

SEQ ID NO: 359030 - DNA, 122 bp, Homo sapiens
tgggtgggaagaaggaaggcccggagggaagccgccatcagctcagccacccacaacggccgccccgccggctgttcccagcagggctgtgcccctctagtccttggatggattttgcagag

SEQ ID NO: 359031 - DNA, 122 bp, Homo sapiens
actcctcccaggtcttctgatagccgtcagcgtctccgttgataaaatcatctcgcatttcggggccgcccggaacttggtgcagaaggtgaaggtggctggggggaggctgttgggatgag

SEQ ID NO: 359032 - DNA, 122 bp, Homo sapiens
tgtattccctttttaaatacttaattttgttaatttttgctttcccattctctttcttgacgctaaaactctacctgtactatcaataatgtttaccccccaaaatcgcctcctggcttacc

SEQ ID NO: 359033 - DNA, 122 bp, Homo sapiens
tacattttccctctaaaaacttaagtgtcacatttcaaaacaccagcttctttagcaaaccggtttttctgtacataacccagacaggcacctctctggggcccccatgtctacacagagtt

SEQ ID NO: 359034 - DNA, 122 bp, Homo sapiens
agtggggatttagtaaatgccagcacatccaccccctcgtgcatatcctgcctgccttctcgcatttccaggctctgaagattgcccttgccttttggcaattggcataaatgaatttattt

SEQ ID NO: 359035 - DNA, 122 bp, Homo sapiens
gtggctattgtggaacagagtgtggttgccgtccccccaggggtagggctgtggagagagcgggggagggagcgcgcgtgagcgccgtgagtccggagtccgcgccccgcgcgacccccccc

SEQ ID NO: 359036 - DNA, 122 bp, Homo sapiens
gccgcagatcgctgtagtgggcggccagagcgccggcaagagctcggtgctggagaacttcgtgggccggtgagcgggcgcggcagggatcgcgggcgggtggcggcctagggcgcggaggg

SEQ ID NO: 359037 - DNA, 122 bp, Homo sapiens
accgctgggagaaatgagtttctgttgcgagctgccaagtctgcagtactgtgttatggccggggctgaccgtcactcacccaaggtcacacagagaggagcaaccaggattcaagctcagt

SEQ ID NO: 359038 - DNA, 122 bp, Homo sapiens
ccgagcctgcccgactcccacagaaggtttggacttgttacacccacatgcctaggggagcgcagcggcgatcacacccagatagggaaggagttgggccaggacagacagggctggagaca

SEQ ID NO: 359039 - DNA, 122 bp, Homo sapiens
aaaaaggaaaatatttagtttctgaataaaaaggggctattggcaaccaggtttggatggcgtcagaaggaatgcctgaagaagtgatatgccatgttgctgcccagtttcacactggaaga

SEQ ID NO: 359040 - DNA, 122 bp, Homo sapiens
tggttaaatattttctcatactgccggagagaaggctccggttcagcactgagatcaggacgggcctcctctccccgggccccgccccggccgcaccttcaggtaccaccggaagtcctcgc

SEQ ID NO: 359041 - DNA, 122 bp, Homo sapiens
aggaggaaaccaggggagaagctgctgcaccgctcttcaccagggcacagggaaaggagacggctacccacctctaagtgacggcactgcgccgctcttcaccagggcacagggaagggaga

SEQ ID NO: 359042 - DNA, 122 bp, Homo sapiens
ctgaacgcgggccaggcagctgcggcctgggggttttggagtgatcacgaatgagcaaggcgtttgggctcctgaggcaaatctgtcagtccatcctggctgagtcctcgcagtccccggca

SEQ ID NO: 359043 - DNA, 122 bp, Homo sapiens
cggccgggccagtcgcggcactcgccggctgcggttggtcccagagctgcagcgcctgcacgggcccggagtccatgttacgctttgtctaattcccctcgttacagagtcatgtgctgctg

SEQ ID NO: 359044 - DNA, 122 bp, Homo sapiens
aggctgctctccctaccttgggtagggggccctcgagactagagtccaacagcgcggcctcggtcagccccgagtcgtcatccatgctgatgaagatgcccggggtctcgcactcaggcccc

SEQ ID NO: 359045 - DNA, 122 bp, Homo sapiens
gcgggtggggtctcggcctccccgagtaggctttgtggtccatcactactgtgctgtagacgtggctgggtcaccttctttctttgtagccctgggaaagggatttcacctttctgagcctc

SEQ ID NO: 359046 - DNA, 122 bp, Homo sapiens
atcaagtagtcattcaagcaaatatgaaattacaactgtgggctatgcgaacagatgacgcgaggggcctgtccagtctgggagatacgggtgggttcaggaaaagctgcccccaggagggg

SEQ ID NO: 359047 - DNA, 122 bp, Homo sapiens
acgtccgctgttgctacacatactaattgtagagtatatttactgtgaagaccgaaaaagcgtttattcaacagaaagcgttagggtcaaagatgtgttttaacgtgtcattttttcactct

SEQ ID NO: 359048 - DNA, 122 bp, Homo sapiens
gtctaaaaaacacagcagaagtttgagatctcgtctttgtcctcataaactgttctttcacgtaatgtatagtttttttgtgtgtcagacactagttatgtctcgctttcttgaaacaacag

SEQ ID NO: 359049 - DNA, 122 bp, Homo sapiens
tctccggggccccagggcgccggcccagcatgggcagttgctcattgttggagataaggtcgcgctggtcatccatgactggcttctgatcttcccgacagctcctgcttctcctcctgtgc

SEQ ID NO: 359050 - DNA, 122 bp, Homo sapiens
ctggagaactgcatctgcgcaggcccagagtgtcctcctggagcaggcgagccaggatggcgcctcctcgctcccagcaggcgcccccacgcggcccgtgcggagcccagcaaccagagccg

SEQ ID NO: 359051 - DNA, 122 bp, Homo sapiens
cctgctcacacgtgccgatgcggagtgcccgcctgctcacacgtgcccatgtggagtgcccgcctgctcacgtgccgatgtggagtgcccgcctgctcacacgtgcccatgtggagtgcccg

SEQ ID NO: 359052 - DNA, 122 bp, Homo sapiens
gtcctgcagtcttgggcaaggagagccagtggtccctacagtgaggcagtgaggcagtaacgctcccaggctcctggactggcctcaaagtccaaaatggccgagcttctggcttcccatcc

SEQ ID NO: 359053 - DNA, 122 bp, Homo sapiens
gcctggtgtgtctcgggtcagagaacactagcaggcactagcaggtggctgcggcagggccgcagatcaaagtggtaactggggatctgagttcggcagtgacgcgcgtccctcacgtgacc

SEQ ID NO: 359054 - DNA, 122 bp, Homo sapiens
ccatttgaacttacatgggagggaggacatgcatgtgattctattcaccagttgcacacacgaggaaaagcaaagaatctgggccaaggcacaagcccatgctgacaggaaacatgcattag

SEQ ID NO: 359055 - DNA, 122 bp, Homo sapiens
ggccccgcccccgccccgcccccacccgccggccccgggggtcgggaccccagcgccgcgcgcccagcgccccgcgcccccgccccacccacctgtgcagaagtggccgccgcccatggccg

SEQ ID NO: 359056 - DNA, 122 bp, Homo sapiens
ggggccccccgttttatgtgtgagtctttctgcgtgagaacccggaattcttcatggttccgagggacggatccctgactttgctgttaatagtgttaaggtctgtggtgaggtcccgtgtc

SEQ ID NO: 359057 - DNA, 122 bp, Homo sapiens
ggcaggtcactgtacagtctgggtggaaatcttggacaccaacgataactctcctgaagtcgccgtgacttccttgtccctcccagtacgagaggacgctcagcccagcacggtcattgccc

SEQ ID NO: 359058 - DNA, 122 bp, Homo sapiens
tgacaggtctccatttcccgtcaactctgtaagactgataactgccctacaattttggctcgtctgacttcctcacagcttccagagagaaatcattgccatatatgcccccagtaagctct

SEQ ID NO: 359059 - DNA, 122 bp, Homo sapiens
ggggggggggatcggttgtccccacccctccccctggcggccgtgcccacgtgagtggggcggccaatgggtgactggtgcagatttaactatgtttaatgtcagatagcaataaagtagaa

SEQ ID NO: 359060 - DNA, 122 bp, Homo sapiens
tttaaactcaatggagcccggacgatgggaaagaatagggtggagccagagtggagagggcgtggccttgcgcccgcctgacatagcaagactgcagaggaaatcgccgtggcaggaaagcg

SEQ ID NO: 359061 - DNA, 122 bp, Homo sapiens
cattgaatgggttaaggaggggaggtggcgggtgtcccttaactgcacctggcccagtatcggtcacgtggccagggtttcacctgccccgctgagcagggacaatcaggctgcttgttttg

SEQ ID NO: 359062 - DNA, 122 bp, Homo sapiens
ctcccaccgaggaggagggcgcgtcccgctcgctccgtggagacgccgcggaggcgcacacgcctcacgcctcctcgcagaagccacaggggctgcggctctttgtcgcggccacaccggaa

SEQ ID NO: 359063 - DNA, 122 bp, Homo sapiens
cctcccatctacatttctcgccatgcctatttacaccctgttttctctcctcaccttcagcgtatagactcgatctccctgctcgttgaggtaatactggagaaacatgatcgcttataagc

SEQ ID NO: 359064 - DNA, 122 bp, Homo sapiens
gaaaagcaaccatcagtcctcatttcataaatgagaacactgaacctcaaagagtttcagcggtgcttatcagagctctaggaggctgaggcaggagtcgccccaaaggcccgcagatccac

SEQ ID NO: 359065 - DNA, 122 bp, Homo sapiens
tgcctgtgcttggcagccacctctgtctgtcggaagagccggcgtgacccggccgttccccgacctgctctacgtgcggtgccgtcctggtcaagggttcctgttttctggctgcttacgcc

SEQ ID NO: 359066 - DNA, 122 bp, Homo sapiens
gtcaagaggaggatgcggtaccaggcagggccgatcgcgtttcagtgccggaaaggcgggcgggactcccagttttctggcgaccggatgggcgagtcttcgtcgggcctgcttagaccctg

SEQ ID NO: 359067 - DNA, 122 bp, Homo sapiens
ttaaaaaatgacatttctgctactttgtgccaacttggtaccgctgctgcccctggcttccgggcctgggagccctgcagggtacaaccaaacaaattttgcattattcagtgggacaatgt

SEQ ID NO: 359068 - DNA, 122 bp, Homo sapiens
ttgtgtttttatttttcttccgctgagatcaggactgaagcagggacgcagtgctcagcacgcccagcccaccgcgggccactgcgcggagaacctctgccagggtcgcctgctcacgtccc

SEQ ID NO: 359069 - DNA, 122 bp, Homo sapiens
ctggtcagcctggactggaatgattgtttagaggcaggctgttcccacggctgcctctcgcggtggggggcctgtggatgcctcctcccgcccccacccgactcccaagcctcagtgacatt

SEQ ID NO: 359070 - DNA, 122 bp, Homo sapiens
attcccatgaaggacgaaagcttcagtgttttaagagtattcctcttacgtgtgttgcatcgtttcccactccaaccagaaggacaagagcaagtgcttggtcccacacattttcctccatt

SEQ ID NO: 359071 - DNA, 122 bp, Homo sapiens
tcgaggggcctaggggaagccggggcttgggagggcagggctttctctgcttgcggacatcgcgaagggcctctggcaggcgccgccgggtggcggcgagacgcctccgcgcctccggggtt

SEQ ID NO: 359072 - DNA, 122 bp, Homo sapiens
gacatgggccctgctggctgtgccttcacgctgctccttctgctggggatctcaggtgagcgccagggtggggttgagaaggcagaggcagaggatttttactaaagagggcatcacataga

SEQ ID NO: 359073 - DNA, 122 bp, Homo sapiens
gcagcgccgagggggcgggacggggagggctcgcggagtaggccaacggttggccccaaccgccactgactacagcctgcgcccgcctcttttcgttgccgttacctgtttccggcagtcga

SEQ ID NO: 359074 - DNA, 122 bp, Homo sapiens
cggtcccggacggggagggcggctccagtgcaatagctcggggagcacgcgggctgcgtccggaagggacccaagtctgcgagcggagagcaaacggggcggaaattcgttcttcccacact

SEQ ID NO: 359075 - DNA, 122 bp, Homo sapiens
cagacagtgatgctgcttcagctggacggctcttgaatgcctccatagaggagacgtggtcgctgcctcctctggtggggaaaaacattctacctcccttcggtggttaacacctcctcaaa

SEQ ID NO: 359076 - DNA, 122 bp, Homo sapiens
cggctacgcacattccggaggaggcgcgcgctgacacgcacacacacacacacacacactcgagacactgcagggccctgcccatcctcgagttcacaccagccccgccactattatgggca

SEQ ID NO: 359077 - DNA, 122 bp, Homo sapiens
aggaagaaataagtaaataaaatattaacttgccattgagttcctttgctagaattcacacgaaattaaatgaatctacagtttcttttccttcttcccaaataaatatttttgaagttggc

SEQ ID NO: 359078 - DNA, 122 bp, Homo sapiens
ttccaggtgccgtctgtcacccctttccttgaccaggaaagggaactccctgaccccttgcgcttcccaagtgaggcaatgcctcaccgtgcttcggctggcgcacggtgcgctgcacctac

SEQ ID NO: 359079 - DNA, 122 bp, Homo sapiens
gtcgcttgggccctgggtggcaggtttgcgcagccctgcggcgatttcaaggcaagtgaccggaatgggtcggaagcgcgtcccggtgagtttcagggagcgtcccttaggtttccgggggc

SEQ ID NO: 359080 - DNA, 122 bp, Homo sapiens
ttcttccgtgagcggtcggcagaggcgccgcagagccccgcggtgtacgcccgcatcgggcgcatttgcctggtatgcattggcagagccaccaggctgccccttccaccagttctggcttc

SEQ ID NO: 359081 - DNA, 122 bp, Homo sapiens
aacagaaagccctatcgacttcgttgtcacagacacgatttctggcagccagaacacggacgaagcccagatcacacagagcaccatatccaggttcgcctgcaggatcgtgtgcgacagga

SEQ ID NO: 359082 - DNA, 122 bp, Homo sapiens
gaatcctgtgcacggggaagagggaggcgagctcgggagatgtgggagcacagggtggggcggctcctgcgaggagctcctggctgcacaggctccatctgatatgtcagctcccgcatccg

SEQ ID NO: 359083 - DNA, 122 bp, Homo sapiens
cccaaaggagccgtccgactatgtctaacatggagaaacacctgttcaacctgaagttcgcggccaaagaactgagtaggagtgccaaaaaatgcgataaggaggaaaaggccgaaaaggcc

SEQ ID NO: 359084 - DNA, 122 bp, Homo sapiens
aaatacggtcctgtcctgagaactccctccccctcttcttcctcccagcattcatccccccggaactgcggggctggccctgaactctgtgtctgtcacgtagaatgtaaagacctggaaag

SEQ ID NO: 359085 - DNA, 122 bp, Homo sapiens
cgggtcctaacggtcccctgccttgaaatcccttgttgagggcctgcaaccttgtgcttccgaccggagacgcctttggtccctcggtgtctgcactggctgctggtcaaggcttcagtgtg

SEQ ID NO: 359086 - DNA, 122 bp, Homo sapiens
cacaagctgtattagctttgctgctatataggtgttatgtgtaaatgccacctattaatacgggactgaaaacgttagagacacactgcattgcagataaaatgcaggcagcacaatatggc

SEQ ID NO: 359087 - DNA, 122 bp, Homo sapiens
agctgacattctaacctggagctgcacattcaagctttgacacatgcctctcactggtttcgtctaatgcttataataaacctgtagagtcagcaactttagaaagatgggttgaagaagtg

SEQ ID NO: 359088 - DNA, 122 bp, Homo sapiens
gtacccgacgggtgttgctgtgagctcaggaccatcccggcgggctgtggatgggatcatcgtgtgtgtatggccacagccctccgcctcgctcgctcggtgagcacgtgaatcaaggaagg

SEQ ID NO: 359089 - DNA, 122 bp, Homo sapiens
tcagggcagcttcaagagagttgggagggggcgaggaccctgcttctaattgtcgttagtcgtgagctcttagaagtgaccaggactttgcaaagagggagtgtcgaatggaaagcgaaggc

SEQ ID NO: 359090 - DNA, 122 bp, Homo sapiens
ccggcgacgacggcgacgcctcgctcgtcagatgggagttacctgtgaccgtcttgggtgcgcttgcgcaacgctcctcttcagccctaaccggctcagctgacgtgcccagaagacgaaga

SEQ ID NO: 359091 - DNA, 122 bp, Homo sapiens
atttattggcggagatgtgaattatcccatttccctcctacagttccttcacatgcacctcgaagaccatttacttttgggctactgctgagatgaatggtaattctaagtttttgactaaa

SEQ ID NO: 359092 - DNA, 122 bp, Homo sapiens
aagagaagggtggcaaccacagcttgccaagagatttcccttccagctctgacattcatccggacaagataaacaagagtaggcagcagccctcaccctctggggagagtcgctagatgtca

SEQ ID NO: 359093 - DNA, 122 bp, Homo sapiens
ccgcgagatgtgtgaacattcaggggctttcgcccgccttatctctcttgatcctctattcgaccccgagaagtaggagaggcagggataagtccctttaacagccaaggagatgaaaccag

SEQ ID NO: 359094 - DNA, 122 bp, Homo sapiens
cgagcgcagcggctgcagcctggtgtgggcaccagcgggaggggcactctccgagcgctgcggcccggagtgactggggccgcggctgccaccgccacaccccctgcgggccccccgcctgc

SEQ ID NO: 359095 - DNA, 122 bp, Homo sapiens
gccatctacaagggcccaggcagcgaagcagggccctgactgcccccccggcccccctctcgggctctctcacccagcctggtactgaaggtgccagacgtgctcctgctgaccttctgcgg

SEQ ID NO: 359096 - DNA, 122 bp, Homo sapiens
tggcgggggcgcccagactggccggaggtcccgagctgggaaggggctcccgccccccgccgggccctgctagtgggtgtgactgactttgcccctcagagtttaaaaacgcgcgtttgggg

SEQ ID NO: 359097 - DNA, 122 bp, Homo sapiens
ataaaacttttttttttttttgagaatggattttagccttatgtttggttgatagttttgcggggtataaacttctaccatggaaattattttccactgggcattgctgcattgccatttgg

SEQ ID NO: 359098 - DNA, 122 bp, Homo sapiens
gtctggggaagaccccttccctcagccccactaacagacctcatcacctcacctggtccccgccagtcacttctgctgggaccagagcatctgggccgtgtccccacagctgtccccaagtc

SEQ ID NO: 359099 - DNA, 122 bp, Homo sapiens
tctacacacccacatcacatctgcgcatccacatcccattgtgcacacccacatccaccgcggtgcgcacaggcacagctgcttctcgtgctgtctggaacacgttgcttcttactcctcat

SEQ ID NO: 359100 - DNA, 122 bp, Homo sapiens
gtcctgtgattcctgaagatttttgactttttagaattataagttttgcacagtagtcttcgggaagtctgtccatgtccgtgggtctttcccatgtatgagctcattctgggcatttaggt

SEQ ID NO: 359101 - DNA, 122 bp, Homo sapiens
gggccaggagccatcccagcctctaagcccccgaccctacctcggcccccggggctgccgcggaagggcccccaaagcctgctcatagccaagggacaggtatgtggccaaggccccccaca

SEQ ID NO: 359102 - DNA, 122 bp, Homo sapiens
cacccgcgtgatgctgtttctggcgttgggcagcccgtgggcggtcgaactgcctctctgcggaaggaggactgcattgtgtgcggccgccgcgctccgaggtccccgggcctctgtctccc

SEQ ID NO: 359103 - DNA, 122 bp, Homo sapiens
tgcacagtgttactcttattctcttaatctctaatgaaaagcctatttggtggtatagtacgagtcctaatgatgaatgagtcctaatgataaataagacatcattaggacttctacttttt

SEQ ID NO: 359104 - DNA, 122 bp, Homo sapiens
ccccgcggggcagggctcgcggcctgcagctcgccatgcctgagcctccccagcccccggcgccgtgggctcctgtgcagcctgagcctcctggacgagcgccgccccctgctccacggcgc

SEQ ID NO: 359105 - DNA, 122 bp, Homo sapiens
actccgacagtgtgccctgggtgggcaccaatcaatggcgagtaatgcctgttgcaaagccgagtttccttagtttcttggccccaggaagtcaccaaggcctagtgcctgggtcagggcta

SEQ ID NO: 359106 - DNA, 122 bp, Homo sapiens
taaacctgcctcctctgaagtaatatcattggtattgctgggaataattagatatttgtacgtgtactataaagaggatgtcgtgtaataccatggaaagtgcattaggtatgaacaacatc

SEQ ID NO: 359107 - DNA, 122 bp, Homo sapiens
cccgaggtcctggtgcaccgtggaaggaacagaccttgggctgggatccaccgggggtgccgggggtgcctggtgccttcctttctctaacaggcctggactccatctccagcgatcctgat

SEQ ID NO: 359108 - DNA, 122 bp, Homo sapiens
ggcctattctgcagtctcctctgagcgcctgggaccccccaccccagtgaacatgcacagcgcgccacagttcacgtccgcgaatataacccaaccccactgtcggccatgcttcccaggta

SEQ ID NO: 359109 - DNA, 122 bp, Homo sapiens
aagggggcccgaggacagagcccctgccgggccccagggggagtgtcgtcggctcctttgcgtcgccggccggcggcgtggcggggactctggccggcagcctcccgcgccgtccggagcag

SEQ ID NO: 359110 - DNA, 122 bp, Homo sapiens
cctcgccccaccgctgtgcctgagcgccccccccccccatcccgcccggggacccgcgcccgctcctggaaccgcacccatggccagcgccctgtccccaaccccgctttagtttccaccca

SEQ ID NO: 359111 - DNA, 122 bp, Homo sapiens
ctgtagagggacagttggcacatgtcacgtggttgcaggcctgtgcctcatgtctggagccgcaatgccttgaggaaggaaggccctgacacaatgaaagcttggggccgctgggatctgga

SEQ ID NO: 359112 - DNA, 122 bp, Homo sapiens
cctcccttgcagagacgcctcccctttggtgttggggtgtcacagtcaggcctgcggaggcgcagggtgaacccatggctgagaggattctcactccccttggcaggggccttttgggcttt

SEQ ID NO: 359113 - DNA, 122 bp, Homo sapiens
gggggcggagcgaggagtgacgggttcctagtggttgggaccctgtgagaaccggaactgcgaaaaccggagaagggaattgttgaccgcgaaagggactaaggaaattgggattccagttc

SEQ ID NO: 359114 - DNA, 122 bp, Homo sapiens
tgttcatgctgtctctccaggagggcaaagcccctgttcgcgcccctcctgcctgcccttcgagccttccggatgctgagaaaaatgaacctttcactaattttcagatttcctgataaaag

SEQ ID NO: 359115 - DNA, 122 bp, Homo sapiens
gtctgtgggacgcttgcagccaggaggaacgcgtgagggaagggatcagcggttcctgagcgtagtattgagagtgggacgtttcttgtcacatttatactgtaggtccatttctccacttg

SEQ ID NO: 359116 - DNA, 122 bp, Homo sapiens
agttacatttttcatttgttggtgtacatgtgctacctgttttatggggaatgtttaacacgatcctccaagttggttctatgcataaccattcaccaaatactgctgctgtgattccttga

SEQ ID NO: 359117 - DNA, 122 bp, Homo sapiens
aaagtggctcgctggtgggcggggagccttatctctggcggtgggttgaaaatccggcgccgggcagatgcccacgttcgctggacccctgcttgccggcgtccgctacaacccaaggaagg

SEQ ID NO: 359118 - DNA, 122 bp, Homo sapiens
gagaaacaccttggttttgtaatcaagactggatctaccagtgacttgctgaataaccttcggtgattcctttctcttcttgggtctcactgtatttcaaaacatgaagaatttcattgtaa

SEQ ID NO: 359119 - DNA, 122 bp, Homo sapiens
gcaggccacctggcgcccttacggatttaacgggccggcttccgaccccctcctgcggcgcgaccactgttcctcgcctgtgtcccccagaggggaaactgaggcttgggggcggtgcagcg

SEQ ID NO: 359120 - DNA, 122 bp, Homo sapiens
gggcagtcgggaatgcagcgaggcagccaagtccagttcagcaccgagcagactctctgccggccacctcctgccgctgctattcaaagccaaagtctgacttgcaggatgcaggcctccag

SEQ ID NO: 359121 - DNA, 122 bp, Homo sapiens
ttcccattgggcaaagataatattatatccttgggagaaatacagtgttttgtaagtggacgatactctaaatgaatttgtcatggatgacaaatgagaagcccacagcttagcattttcca

SEQ ID NO: 359122 - DNA, 122 bp, Homo sapiens
ctctgttgtccaggctggggtgcagtggcgtgattgtggctcactgcaacctctgcctcccgggttcaaacgatccaccagctgtggcctcccaatgtgctgggactacaagcatgagccac

SEQ ID NO: 359123 - DNA, 122 bp, Homo sapiens
ataatcttccccgggggaagaaattcaatttggcctgaatatcactgtatcctcactaggcggatggagttggcagccttgtacgaggttctgctagggaataatgcaaatacttccccttg

SEQ ID NO: 359124 - DNA, 122 bp, Homo sapiens
ccctcagtcggccctcggaggagtgcgccagccctgcggaggcagtgtctacacaggcctcgcagcttccgcctagcactccgcaaggtttccgttgcattgtggggcagggaccaccgcgt

SEQ ID NO: 359125 - DNA, 122 bp, Homo sapiens
aaactaaattgaccatgcatataatattctttgtttaaatgaaagcatactgttgaaacccgcagtgttgcatttagaaaacagttgaacagaatgtcaatgtgcattcatgcaaaaaaaca

SEQ ID NO: 359126 - DNA, 122 bp, Homo sapiens
aaaggatgtgggaatcattgtaaactcaaaagttaaagatgtgccaagagctgtctcccacgaacttgtttaacaaacgtactgactttgtatgttgatccaatacccatgctggccactgg

SEQ ID NO: 359127 - DNA, 122 bp, Homo sapiens
cagacctcattgaaagtaggagtgttctcaaggtcccagaccttactcagggaccccagtcggggggtggggcagtgggaggcagagccccttgctaggagcttctagccaggcccaccttt

SEQ ID NO: 359128 - DNA, 122 bp, Homo sapiens
gagagtgggagccatgactctcctttcagcgcggtggtgaggattgattgagctgacttacgtcagagtgctgggaatcacacacaatcgtggctgagaagagagaggctggctttttgtgc

SEQ ID NO: 359129 - DNA, 122 bp, Homo sapiens
tattcctagtccggattcccactgagaagttggtgggccagctagtgaaaatcatacatccgtgaaagccatcctcaaagtgatccagggtcacctccacaccggcactctccaaacgcttg

SEQ ID NO: 359130 - DNA, 122 bp, Homo sapiens
gctatcttgggagtaacgtcatacgccaccccctggagatgatattcagatcaatatcaccgggtgggtgtacacctactgcaatattgaacgtcatatcatgctctctccctccctggaca

SEQ ID NO: 359131 - DNA, 122 bp, Homo sapiens
agtctttgccctcatggagcttaaatttctagtggagtcaggagagacagaaaatgaacacgtcatcccctctgtggctcttgctggagccctgtgaagcctctgttgtggtggggaatggc

SEQ ID NO: 359132 - DNA, 122 bp, Homo sapiens
ccattttccaatctaactatcaggcccttctaagtgcatggccctgtgtgactgcacagacggcacgtccagaatgccggccctgcccatgcccctttccagctggtgatggccccactccc

SEQ ID NO: 359133 - DNA, 122 bp, Homo sapiens
ctaatgagggcctcgtgctggagagggacggcggcttggccaatgcggagctgggtctggcgcggcaggaaggcgggactgccagtggggcgccggggcggggcggagagccgagcgccaac

SEQ ID NO: 359134 - DNA, 122 bp, Homo sapiens
cgccaaaagggtcagaaccacattttcaattccgcttgataatttctagaatataatagacggtgcgaacaaagagaaaataaataaagcagtgaacttcagaactagagggcatcgacgcg

SEQ ID NO: 359135 - DNA, 122 bp, Homo sapiens
cacattccgggcaccaggctccgggctcttcagagcatttggggcgggcgacggaggtcccgtccactctcgcttgggtgcagaagggcgcggcggtgccaggaagccgccttggaggctcc

SEQ ID NO: 359136 - DNA, 122 bp, Homo sapiens
tgagccgggtccccttccgcaagcgcccaccgatccggaggctgcgggcagccgttatcccgtggtttaataaagctgccgcgcgctcaccaagtcctcttccgcgtctgcttccgcgtcgg

SEQ ID NO: 359137 - DNA, 122 bp, Homo sapiens
cgtgattggaagcgtggtgtcgcggtgattgtgtggaagtgtggtgtgattgcgtggaagcgtgtcttggtgattgcatggaaatgtgtgattgcatggaagcgcagtgtcacggtgattgt

SEQ ID NO: 359138 - DNA, 122 bp, Homo sapiens
tactgaggactcctgtggttccactggggccaccgacataatccaggaaaatttcatgatcggaaggtcaactgacgagcaggcgtagttccatctttaacctttacttcccctttgccaca

SEQ ID NO: 359139 - DNA, 122 bp, Homo sapiens
cagctggattaattttttttatttcagggcagggcggtggtcactttcagccttcagggacgcctgagttgtgcttggcagcctgcaatactggagagctgcccctggagggcgcaagggaa

SEQ ID NO: 359140 - DNA, 122 bp, Homo sapiens
gaccacgtccaacatggctgccgcggcgcgttcgaagacgccgcgaacagggtggagttgcgcactacctcacgggagaggtagtccacagccctaagcctttccccagctggagaataaat

SEQ ID NO: 359141 - DNA, 122 bp, Homo sapiens
gtgctggccgcccactcttcctcggcgtctccttccttctcatggagccccttcccatagcgctgcccagtgtgggtctgagtggggtgggattcccatcagacttcagtaaacagatgaac

SEQ ID NO: 359142 - DNA, 122 bp, Homo sapiens
aggtctaagtcctaccgacgttagagggatagacgaattgacctttccaggtcctctgctcgccaccagcctacggagcggcgccaccccctcctggcgagaccgggcgcggaagacgcgga

SEQ ID NO: 359143 - DNA, 122 bp, Homo sapiens
ttctatctcagagttgttcaaggattaaacaatatgtttagttcataatggttagaaaaccgatctatggggttagaagtcaggatagtgattccacttggcagggatgtggaacagtagtg

SEQ ID NO: 359144 - DNA, 122 bp, Homo sapiens
ctggctttccgcggctgcccgcctcgcgcgtcttccctgcccgggtctcctcgctgtcgccgccgctgccacaccatggccttcgtcaccaggcagttcatgcgttccgtgtcctcctcgtc

SEQ ID NO: 359145 - DNA, 122 bp, Homo sapiens
agttgacattcttaaaaaagagccttccttattttttctttttctctttgaatatcattacggacacatggagttttatttatctgatgttttataatcattttacagtctctgttcttttt

SEQ ID NO: 359146 - DNA, 122 bp, Homo sapiens
ggcggggcgaggaaaaggacttcgaccagattcttaaagagacaggcgcctgcccaaccccgccgcccaagtttgggaacaaaacgcgacggtgttctagagctttccagagggagcactgt

SEQ ID NO: 359147 - DNA, 122 bp, Homo sapiens
cttggtgctcataactacagggacaatgtgtaattttttcgtattaagtttttgaaatttcgagaggaattccttgccctgattgctactcaaacgtcctgtaacattaggtaaattgcagt

SEQ ID NO: 359148 - DNA, 122 bp, Homo sapiens
gattccctgggttcgattatgggtatgggtctgcttcctaccatgctattcctctttcctcgctctctttctctctctctctctctctccccgccacttccttattctttctacttttctta

SEQ ID NO: 359149 - DNA, 122 bp, Homo sapiens
ttaattcttaacaaccttaggttattttattcctgctgtcctctgctctttttatggccacggtctgttccacctcagaactgaagagagatgttggtagggagaggctcttccctcacctc

SEQ ID NO: 359150 - DNA, 122 bp, Homo sapiens
cagcggtggcgtaagtagtgttgacctggacatcacttaaagctctggaacagcaaagggcgtacagtggagacgactgcaatacatacttaacagtttaaaaatgtataatatttgggaca

SEQ ID NO: 359151 - DNA, 122 bp, Homo sapiens
tccatgccaggtgctgagatccatgcctgccgaaccctctcattcacccacagatgcccccgggactgtagtcagccccattctcacatgggaacactgaggcccaaagaggcgaagcgtca

SEQ ID NO: 359152 - DNA, 122 bp, Homo sapiens
tttcctctcagacggagagggtagtcgcaggaggtcagggtcaaggtcatcagcagggcacgctgcagctgcccgactgcactacacacaagaggagggaaggcgttccatctccgtcacag

SEQ ID NO: 359153 - DNA, 122 bp, Homo sapiens
acagcacgtggtccgcatcacaggctgcgttattgagtgagccagtctccagatgccaggcgcatgacgagtccacggagcgggacctccctccccacgcatcccgggctcccggggcgggg

SEQ ID NO: 359154 - DNA, 122 bp, Homo sapiens
gtaggaacaggggagagtgcacctgctaccagtcaagctcagccagactgcaagaggaggcgaggcggagccagccgagggagtgaaccatggacaagttgaaatgcccgagtttcttcaag

SEQ ID NO: 359155 - DNA, 122 bp, Homo sapiens
gtggcccttgtttaccttctcccaactctgccggttcgcgtcccgcttcagggacggatccgcagtccccagccctctgcctagggccctgcaccatgggtggtaccaggaagatgccggct

SEQ ID NO: 359156 - DNA, 122 bp, Homo sapiens
gtctgccgggactaggccgcggccaggccgggcacagcggtacccggtccggcgcgtgtgcggcctgctgacaaaaggccgagcccgcagggccaatccgcgcgccaccccgtagcgcctgg

SEQ ID NO: 359157 - DNA, 122 bp, Homo sapiens
actaaccaaaactcaggaaataactcctggaagcaaacaaacttagcagtgaaaaacaagcgcgtccagtaacaccagaaaaacacgtggcgggggtggggcatctggtcgcaaccgcaggt

SEQ ID NO: 359158 - DNA, 122 bp, Homo sapiens
cagccccgcggggacagggcgaagctctggactcctcccagccacagcatctgccaacaccggcttcccaacgtcccactgcgaggcctgatcaggctgcttgctcgcggggacgccaggac

SEQ ID NO: 359159 - DNA, 122 bp, Homo sapiens
tttatatatatgtaagtgtatgtatatgtgtatatgtctatacatatatatgtgtacagtcgtaggctgcataatgatggttcagttaatgatggactgcagataacggcggtggtccataa

SEQ ID NO: 359160 - DNA, 122 bp, Homo sapiens
ttcaagactttcctcctccatgaagccctccctggccaccccagcagacaggggcctccgcgtgaacagacgatgatgaaactagtgatcacagttttaccttgtctaatgctttgagatgg

SEQ ID NO: 359161 - DNA, 122 bp, Homo sapiens
tcttttgttttccctcctccagcgaggaatgcatatatcctcacacatgtagatgtgtgacgtggaatgtgaacatcctactttgaattttctagtgattatctttaatttttttttaaaac

SEQ ID NO: 359162 - DNA, 122 bp, Homo sapiens
atgaggaaaaacatcttcccctgctgtaggctgggagcgggtgtgttagtgcagggcacccggggcagggccacccagggcagggccagggcgagagtggctgccaaggcttcctggggatg

SEQ ID NO: 359163 - DNA, 122 bp, Homo sapiens
cacgcacttcgggtctcagacgcttttacttattatggttgcccttttcccctacagctccgtcaagggtcttctccaggaacccacagccccatagttcccccattaacctgctcctggtt

SEQ ID NO: 359164 - DNA, 122 bp, Homo sapiens
ctcacaaaggtgactttgtgcccgtgaactcggctgcagcccacagtttgggcttgctgccgccggtgcagacaggaaatagctgctctgcggcagcccgaccccgtggccacagagcagcc

SEQ ID NO: 359165 - DNA, 122 bp, Homo sapiens
atttcgatttttatcactctacccttaatttcagccttttataatatcgtatgattttgtcgaatagtctaactggtgggtcaagaacggactttcaccttcagatcctacatgtttccttc

SEQ ID NO: 359166 - DNA, 122 bp, Homo sapiens
gtgtttgcctcaggacgcttcatcttctcatccctcgtcctcaacattaaaaacagctcacgcgttccagccactgcggggcacgttagcatgagaagcaggtgagcccctcgcgtgcccgt

SEQ ID NO: 359167 - DNA, 122 bp, Homo sapiens
gccggcttaaacaaagaggtctttttctcaagcaggttccaatcagcgctaggccggattcgctatggcttttgcctgccccctagtggtcaaggaaatagttgcagccaagtgttaggatc

SEQ ID NO: 359168 - DNA, 122 bp, Homo sapiens
ggggcggggccgaggcgggccgggggtggggcggaagctataaggggcggcggcccggagcggcccagcaagcccagcagccccggggcggatggctccggccgcctggctccgcagcgcgg

SEQ ID NO: 359169 - DNA, 122 bp, Homo sapiens
tgggtgcaggggcctcaggtgcaggagctgcgggtgctggagtctcgagtgcagggaccccgggtgcgggagccttggatgcaggggccagggtgcagggacggccggtgcaggagcctcgg

SEQ ID NO: 359170 - DNA, 122 bp, Homo sapiens
gctcagtgaagtttgtttttatccacattctgaagcctacttctgtcatttcagcaatgtcgtcctcagcccagttccaaatccttgttggagaagtactgtggtcatttggaggaaagagg

SEQ ID NO: 359171 - DNA, 122 bp, Homo sapiens
cctcggccgcccccttgtggcccaggtagtggtcgaagggcggcggcggcgagggcggctcgtgcaggaaggccgcagcccccgagggcccccgccggtgctcctctaggccgggctccagc

SEQ ID NO: 359172 - DNA, 122 bp, Homo sapiens
ttttttttccttaaaggtcctactgactaaatatttttttttaatcaagagacttaggtacgcataagcttcctgctaaattctgtagacaccttctatttatgggttacattatctggttg

SEQ ID NO: 359173 - DNA, 122 bp, Homo sapiens
gcaacacagagtgctttacccatgccttaaggcagctgtcacatgactcttcccctaatacggttgtgaggtgctcacgtgttttggagatagcaaaagtctcaaataatatggcacagacg

SEQ ID NO: 359174 - DNA, 122 bp, Homo sapiens
atataaataaagcttaggccacaggttccaatttcttttatttagcatgtatttcctgagcgctgatcatgtgctaggcattgttctaagagcctggggtacatcagcaaacaaaacaggca

SEQ ID NO: 359175 - DNA, 122 bp, Homo sapiens
ttgttgagcattccggccacaggccacccgctggcccttccttggtgtggcacgagaccacgggcacttgcaggagctccctgcatgctgttttgtgctttggtctcagggagcaccctcct

SEQ ID NO: 359176 - DNA, 122 bp, Homo sapiens
gggaagagggagggagcgggcggagagctggggccaagtgcattgtgtctggcggcggcgcgcgagcccaccggcggctgcggcggggcgggaagccatggagccgcgggcgctcgtcacgg

SEQ ID NO: 359177 - DNA, 122 bp, Homo sapiens
ttttcaggcccacgaaggagctcctcgcggtgccgggagcgccccctcgtggcgaagccgcgcaggcacagtgtctgggacacctggggtccaggtgccttcccaacacctgaaaggcggga

SEQ ID NO: 359178 - DNA, 122 bp, Homo sapiens
tcttaacgggtgcaagcctctctgagcttctagtcctatccaatgttgactcttacccaacgtggcagagcagaagccacaaggaaaacgtaaatggagcccacatcccccgccagaatgct

SEQ ID NO: 359179 - DNA, 122 bp, Homo sapiens
cggccctcctgccactcgcccccaactatcacagtccacggcggagctggaggcagatcccgcccttgcagggctgggtaagagactgaaacttggagaatgaactgcaggcgctgcacatc

SEQ ID NO: 359180 - DNA, 122 bp, Homo sapiens
gcactggttataagaaaagaaaatgaaaacagccgaaaacggctcaaaacagggacatgacgaaggaagggacactgtatagtgagcaggtttacaagatgcttccgggataagcaggaggg

SEQ ID NO: 359181 - DNA, 122 bp, Homo sapiens
ctgtggacacaacttgcttctgcctcatcctgccttagtgtgcaatctcatttgactatacgataaagtttgcacagtcttacttctgtagaacactggccataggaaatgctgtttttttg

SEQ ID NO: 359182 - DNA, 122 bp, Homo sapiens
gagcgcggggcccccacgtggggctgcgggactcggcctacgactgggtgccgctgggcgcgacgtcacaatgccctcttgtgtctaaaactatgcatgaaaagtagcaatcaggccctacc

SEQ ID NO: 359183 - DNA, 122 bp, Homo sapiens
ttcctcagcgacctagcgtgggcacgcgccactgcggccaaaagacagaaatctttttaccggaagagatgaaatagaaagcaggagccagaggctgacttacagagccagtgtgcggatca

SEQ ID NO: 359184 - DNA, 122 bp, Homo sapiens
ggcaggatggggggctgtgtagacgctggccacgtggcaattgtaggagaaccatgggatcgataaatgttcactgttgtccctgaagcgcaaaactgcagggctctggaaagtccgtgtgt

SEQ ID NO: 359185 - DNA, 122 bp, Homo sapiens
tataaacacggacagcagccgaaagggagagtgctttagggaaagataactacactcactcggttacagagtactgtagtctcaggtggaatgcacagtgccaccaggaagggctcttcgca

SEQ ID NO: 359186 - DNA, 122 bp, Homo sapiens
aatattctgctctcttccacaattaaatgggtgtagacactcagcaccataatttggtttcgagaaatggtatggaaggtctcaagaaaagttacacaccttatcaagtggagtcacaacat

SEQ ID NO: 359187 - DNA, 122 bp, Homo sapiens
tccccttcgggacaccaagtttgtttagggcctgagcacaggggcccagcaggttctttccgacgtcagcggctgcgtacggaggccgacttaggcaggccgctccaggaacaaggccgtgc

SEQ ID NO: 359188 - DNA, 122 bp, Homo sapiens
cactgttacaagaaggcttctgtgacccccaatgatttctcactttgatgaatccctaatcgtgatctatattatgccatgtacagtttgattgaaaacttgtccctcccaatattatgctt

SEQ ID NO: 359189 - DNA, 122 bp, Homo sapiens
aggtttcctccacacctagtcattgggtgatgcctaagaaggctgatttcttgttggctccgagggcagctctgtgagtgaaagaacctggatggtgtgagaggaacaaagcaggaggccct

SEQ ID NO: 359190 - DNA, 122 bp, Homo sapiens
ttcgccgtgggtcctagtttgctgacagttcccaggcccctttagcttttggggaggaggcgagactaggacctaaaaagtgctgggagctcggagtagaggggttcatgttgccagtttct

SEQ ID NO: 359191 - DNA, 122 bp, Homo sapiens
cacacagcagccccacttgcggtggcaagttccagctttccacctgtgcctctgaccaggcggctataaattgggcgggtcccacaactccctcctcaggttctgtaatttgctattaggtt

SEQ ID NO: 359192 - DNA, 122 bp, Homo sapiens
ccctgggccttggatattgagatggagagcatgggtgatcccagaaaacctatccaccaccggacccctgacagatgagatcaggggcttcttcctccattcggccttcggggtcagggggt

SEQ ID NO: 359193 - DNA, 122 bp, Homo sapiens
gaaaccggaagtcggcctctggggtctgagcccgtccaccctttgcagatcggtaacagccgaggaaagcacagatattttaagtcctcacataattcccacgtcattagccaaaccccagg

SEQ ID NO: 359194 - DNA, 122 bp, Homo sapiens
gaaatcttaacttcggtattcaatactcctaatttactatattgctacaaccactgtaatcgtgtcctactcttaaatctcaccacagtcacaacaaagattcttgcgccacctgcttgaaa

SEQ ID NO: 359195 - DNA, 122 bp, Homo sapiens
gggccctctgcccaggcgccgaggctggagagctcctcccgggctacaactggtcactggcgtggtctctatccgcctcgggcttgacggtttggccaggagaaggggcgtggggcgggtgg

SEQ ID NO: 359196 - DNA, 122 bp, Homo sapiens
gatttagttacattacttgctttcaggaaatctgcaaaataaatccaagttttaccttgtcgacaatacttttctcttagattttgactatatgttcataaaaacatagatcttagagctaa

SEQ ID NO: 359197 - DNA, 122 bp, Homo sapiens
gtgaggagggggaggcgcggcgcgggggccggcggcgtcacttgtgctgggaggggagggcgggtggagacagctgcttgacagctacttcagcccaactccaggaggctgcgcttcggtgc

SEQ ID NO: 359198 - DNA, 122 bp, Homo sapiens
atggtgtcaactttggattcctctcaatgccgggccctgtggcacccgggaaagtctccacgcaggaaggcccagggtcctgcgggtgtacacatgggaaggcacaaaagctacagatattg

SEQ ID NO: 359199 - DNA, 122 bp, Homo sapiens
ctgcggcgcggggacgcccgccttttgctattattataaacgtgcgtgcgactaaaccttcggatttttagactttcttctcgcttcctctgacccaggctgagggagcccccgaggctact

SEQ ID NO: 359200 - DNA, 122 bp, Homo sapiens
ccctcaggagcagtcggctgtccgcttggtgtgccgagaaaacggctcttaatgtggccccgggtgtgttttccagcatctagaaatctcccagagagagcaaggcatgtatcgtggcttgc

SEQ ID NO: 359201 - DNA, 122 bp, Homo sapiens
atggcgacactgcaggcggtactgagtgaccatgtccagtccggctccgtccctcccacacgggggacaagcttctccgaggaggcctggccaaggtggaacaaataccctgatgtcgaaaa

SEQ ID NO: 359202 - DNA, 122 bp, Homo sapiens
gatgtaccgcagccgaatggcgcagtatgagaccccgagatctcttctcgttttagatcgcgagccccctccccttgcagtcagacctcccgttaatttcgttcccagtgtgcctttagttc

SEQ ID NO: 359203 - DNA, 122 bp, Homo sapiens
ccccagtccccgcggcagccccaggcgcttgctcccctcccccggctctccgtagaccggcggcctcctgctcgcgcctcactgcgccctctgctctctgggtcccggacccctgctcgggc

SEQ ID NO: 359204 - DNA, 122 bp, Homo sapiens
acacacaagtttgcggcaaagtggtatcatggcctgaaagtcatactcctgttgccatgacgataccttctgttttggcattacccatcacatttgatcacagccctgtgaggtaagcaggg

SEQ ID NO: 359205 - DNA, 122 bp, Homo sapiens
agagccatctctaatggagtatcggatctccccatctcttctggcgtcctcatcatgagccgacaccgtcattaccaatgaaccaacaggtgcatcttctttcactgtccccttttccacaa

SEQ ID NO: 359206 - DNA, 122 bp, Homo sapiens
tcgtaactcctccgcaaacctgacactacttgaaatcaccaggtaaaaagagaaaagatgcggcccacccaggcactcgtgtcctgcttgtgaagctgctgggtttgtgaggacctcgaggg

SEQ ID NO: 359207 - DNA, 122 bp, Homo sapiens
ggaggtggtagtgatgatggtggtcatgtttatggtagtgatgacagggatgatgctggtcgtggtaatagtggttatggtagcaggccatgttataacgctagcagctttgctctggatgg

SEQ ID NO: 359208 - DNA, 122 bp, Homo sapiens
ggaggattttttgtcacatgaggttactgtagtttcacatcctctaaagcaaagctctgtcgaaactctctattctcacatggcttcagctcaaacaaccaccctactcagctgccttccta

SEQ ID NO: 359209 - DNA, 122 bp, Homo sapiens
tggatgtgaaagggggcaatgggtgtaaaccaagacttccagataaacctggttcccatacgtatgacatttcctcaatgatcttgctgtgtttatggcttgttttacgagtatcatgcact

SEQ ID NO: 359210 - DNA, 122 bp, Homo sapiens
aatgagatgacgcatgtgaagcgcttacccagtgctcggcaaggggaagcactctctaaacgttagcaaataccatggtaggacacaaggcccctgactctccgctttcagcttactgaaga

SEQ ID NO: 359211 - DNA, 122 bp, Homo sapiens
cgattgtgctgtgtacggcggtgtgcgtgcgtgagtaaagagtgtgtagctccggccaaacgctagcccccaagggcgcgagtgctacactgcgcccagctcaagtttctgtggaaactttc

SEQ ID NO: 359212 - DNA, 122 bp, Homo sapiens
agcctggcattggcctgacccctgctgggagccatgggaagtgcaggagctggacctttgcgtttcaaaaccttgctgtttattcttatctccttcacggaaatcaaatataacacctgctg

SEQ ID NO: 359213 - DNA, 122 bp, Homo sapiens
ggaggcttcccatactccccagctcctcctataacccggaatatgacccaaatcccatcacgagagcttctgccttgcaactcaaggcttcgccccagtaagattcagctctgtctgggtgg

SEQ ID NO: 359214 - DNA, 122 bp, Homo sapiens
gacattctgtgatttgaccaccatcaaacagcaagttagcaacaccaagagacattgaaacgaaaccttggagccccacaccagtgccttcagctcctgcacacacttggcctcctgacctc

SEQ ID NO: 359215 - DNA, 122 bp, Homo sapiens
cgcgcccgcagggcccgcccaccgctttgcttacgccgctgcccgtgggccaccccggcgcgcagggtccccagcccgcgcctccgccacagccggctttcccgcgcagccacggactgcac

SEQ ID NO: 359216 - DNA, 122 bp, Homo sapiens
atccctgagctggcagcttcaattggctctccgtgtcctggctggctggcagctcctgggcgaggtggcatgtgccgtgactactagagatcgctgtcatgggcccactcccccgccttctt

SEQ ID NO: 359217 - DNA, 122 bp, Homo sapiens
acagcaaaccagaatttattttgaggcctctcaggttcagctttcaagtcacgtgactttcgcgtcctacacaactcttattttcacttgaaaacaagtgtgacgtcgtgaattccctaaca

SEQ ID NO: 359218 - DNA, 122 bp, Homo sapiens
ttctgaggtgtgggcccccaggaagtgttacagttctctctcattcccgccatttacagccgagcgaacgagggcgtgtcacaactcattcggtcccgctgcctagatgggcgagccaacca

SEQ ID NO: 359219 - DNA, 122 bp, Homo sapiens
gatcacatatgataactattgctttaaaaaaaacaaacgccaaatctggtttgtgtgcttcgacaaatgagattcatggtgttacagggaagaggtccctatccagaccccaaaagagggtt

SEQ ID NO: 359220 - DNA, 122 bp, Homo sapiens
ggggacagggtgagttgggcgggccgctgcggttctccgagagcaccacgagggggagcccggacccctcctagcgccttccgagccctcccgcacagccttgcaagcaaaagtttttctta

SEQ ID NO: 359221 - DNA, 122 bp, Homo sapiens
aaattggacctcaggttttggagtgtcctaggaggcaggcagcctacactgcgcgcataccgatgtcacagcaaatgtgaggaaccgcacatattctgtagcctttactgcctttactagag

SEQ ID NO: 359222 - DNA, 122 bp, Homo sapiens
acgctggcttgtgccaccgtagacagacctcgtattgctttctctttgagagtccccaagcgcttcctgcacaatagcctgtggatccacaccgctaataataataataataataatgaggg

SEQ ID NO: 359223 - DNA, 122 bp, Homo sapiens
acaggtcatatcaagagttttttgaactccagggtcttcatgctccgaaatactcatttgcgtttccatgtattctatcctcttaaaagttctcggtcacagtgcaatatagcatttgcagt

SEQ ID NO: 359224 - DNA, 122 bp, Homo sapiens
ttacattagacgaacatcgtaggaagtcgtgcatagatcggtgtgacatagagaagcctccgacccaagctgcgtatatcgcacaaagaccaaacgaccctggacgttctagacagaactct

SEQ ID NO: 359225 - DNA, 122 bp, Homo sapiens
cccaccctgttgcggatggctgaggttggagtgaggcgcccttgtggccgctcccgaacccgaacgcttaggttaatcctagatctctgcggaaaaccaggattctctttacttccaggacc

SEQ ID NO: 359226 - DNA, 122 bp, Homo sapiens
cagcctctggttttttatttttttaagaagccatcacctgagcaaccaaaaattcctctgcgctggggtccgactgccctctggtggccatttggggaaaactgcagcccggccaggcagct

SEQ ID NO: 359227 - DNA, 122 bp, Homo sapiens
gcgcacttcctctactgtgtggtatgtgtgctggccctccgtttagaaaaactaacttagcgcacttttctctccctgttggatggacaaagacctctttcagcttgggcaccgaggaaggg

SEQ ID NO: 359228 - DNA, 122 bp, Homo sapiens
cgccgcagcccctctacctctttgcaagcgctgcgctgggcctcagtccgaaaggcggatcgccggcgcagacagcgccacggccatgacgctcctgctgctgtcgccgccgctgtttctgc

SEQ ID NO: 359229 - DNA, 122 bp, Homo sapiens
gatttaatgtattgtttgtcgttagcgttttacatactagattttcatcgtgcatagtcacgttgtttgaacatttgcaagcagagccgactaactgctgttggcctgtttctttgtatggc

SEQ ID NO: 359230 - DNA, 122 bp, Homo sapiens
ccagaacagaagcaccaagaaaattatcaccattattatcatcagaggtaagagtgacttcgcatctttggctttgactgctgttgagtaagggaagatagaaagtagcaaaggacagtcag

SEQ ID NO: 359231 - DNA, 122 bp, Homo sapiens
gcccaccctaagcgacgcctccgacgcggaggaaaaacgcgattcggcccgccctcattccgagaagcagcacccagaccacgccctcaggggcagcgacaaataggcgagggttgatttgg

SEQ ID NO: 359232 - DNA, 122 bp, Homo sapiens
cgcagtctctgctccaagtctgtttttgatgatgcccttagaagcaggggcagcggcaagcggcggagatagggattaagttcctaacagtcttcttcccctgacctggcagatggggacgc

SEQ ID NO: 359233 - DNA, 122 bp, Homo sapiens
gatccgaatctcatctccaggggatggcgtatgacgttactcccaatatagcactgggtgcgcatccacccggtgatgttcctcctcatattcacggaaaaagagaatgctattactcccgg

SEQ ID NO: 359234 - DNA, 122 bp, Homo sapiens
gggttaaaatagcaaaaatgccatctggcaagaggctggctttgttcagactgtgtgctgcgttgtcgctggggtggtggggacattttccaagccaccattagaatatgagctgtcacctg

SEQ ID NO: 359235 - DNA, 122 bp, Homo sapiens
ggccgccaggtctagtgagggcgttggcggagccggggcactgccctggcggggaggagccggcgcggcgggggcggcgcgttaaccagctcggggcccgggagcgcgcgcggggagggggc

SEQ ID NO: 359236 - DNA, 122 bp, Homo sapiens
cgccgcttctcctcgcgcatgatgcgctcgcgctcggcccggcattgctgcagcttggcgcgccgctccgcctcgtaggcctcatacaggccggtggccacccgcatggagcggcccggagc

SEQ ID NO: 359237 - DNA, 122 bp, Homo sapiens
gggatgagccccccacagaggcaagcccactagagctgagattcactccgagttcctgagcgcctgagccgcgggcactgcgtctctgcagcttccagccaacacctgcgcccgtgaccaga

SEQ ID NO: 359238 - DNA, 122 bp, Homo sapiens
caaccatattcccacctattccctaacgacaacaaacttttaaggtccaggttaccgccgcgtctccctagcaaccgtgccctttaatggttgccggaagaggctataatcacgtgctccga

SEQ ID NO: 359239 - DNA, 122 bp, Homo sapiens
gagcacgttccatgccattataacttccctttcttgtgcaacataactgttaagtgagaccgcctatattttcggcaagaacatgaacagtttgcttttgaggatttaatcaagtacacgaa

SEQ ID NO: 359240 - DNA, 122 bp, Homo sapiens
aaacacagtattgaaacttggacctgctggggctatgggggattctgaaggtggcaatgccgctggcccagatccagccccaggcccactggccatcctagcttcccttctttgccctctag

SEQ ID NO: 359241 - DNA, 122 bp, Homo sapiens
tcttagcaaatagagtcccagcttcactgactgtagctgcttgaggagaaaacaagaccacgtcttagttccataatagattaaaggttttcatgagccatgctgtggctgtgcagttcccc

SEQ ID NO: 359242 - DNA, 122 bp, Homo sapiens
ggaattacaggtgggagccaccgcgcccggccggaatcagtttttttcttttaggagccccgaacccaaagctctttgaaaagctgccgaagctccaaggttcctccgcttcctgcccgcag

SEQ ID NO: 359243 - DNA, 122 bp, Homo sapiens
tgcggtaacttgagttgttgaggttttgcttgtgaatttctcattcttctttccctttttcgttccagagcgccgccctgtgctgggctgccgggagctcgtcttcaggaacctctccaaga

SEQ ID NO: 359244 - DNA, 122 bp, Homo sapiens
gttgctagcgtgagttatttttgtcagctgagtcaccacgccagaaagcaagaaatgacccgctttatgtctgctctgaggagctggaaccagctgggatctctggaccactgaaagccctg

SEQ ID NO: 359245 - DNA, 122 bp, Homo sapiens
cgcgagtagctcggcagggggactcgcttggctttcgtgccatccgtggacacagtcgcgcgggtaggtgaccgggttggatttcaaagtccagcaggaaatcctgccctctgggttgcact

SEQ ID NO: 359246 - DNA, 122 bp, Homo sapiens
ggaaactgggagtctgacagcaaaattcaacggctccccagtccgcgcagggtctcttcccgggactcaagactcaactgggaccggcacgaaccacgacacacagggtcggggggacgcgg

SEQ ID NO: 359247 - DNA, 122 bp, Homo sapiens
tggagcttcacttggcctgagtccctgcggattggacttccatagatttgaaacttcctccgggtaccacaagcatcaggcctgtgattaagagcaaagagcggccaactattgtaactctt

SEQ ID NO: 359248 - DNA, 122 bp, Homo sapiens
accgggcgaggggaggtggggagcggggactcgatttgcatcttaaacgcggacgccacgcggggctgctggctccaccccggctcgcgagcgctgggggcgcccggactcccacccgctcc

SEQ ID NO: 359249 - DNA, 122 bp, Homo sapiens
ggcacatcttgcttgcacatgtggcctctaccacaaacacttcaaagtgcctcctcagaccgacataacattctgacgccgactgtaaatgcccttgacacgcagagtggaaaatatcaaac

SEQ ID NO: 359250 - DNA, 122 bp, Homo sapiens
atctcatgataaccttatgaagtagatggtattattattgcccttttacagaggcgtaaacgggaggctttgggcgtttaggtatttgctgtcatttacatagctagttaagtaactgcgct

SEQ ID NO: 359251 - DNA, 122 bp, Homo sapiens
aatttcatagtagcagcagtcaccaagctgccccctatcaaggtgccctatggcaagcagcgccaggaggctgctccactggtgagggctgagggggattggtcggaactggcagggattgg

SEQ ID NO: 359252 - DNA, 122 bp, Homo sapiens
cgctctagatactgagtgtcatccgctttgcaccaggcactctgcgggcagccaaaatggcggccgtgaaaacgaagcccacagacctggctggaatgctcacgggcagatggaccacaaga

SEQ ID NO: 359253 - DNA, 122 bp, Homo sapiens
gctctgaatcacagccagtttgcacaacagtaatcttacttgctgggtcctctgagggagcgagaagaaactgtgaaacaaatttccatcgctttgaaattggttggcttaactgggcaggg

SEQ ID NO: 359254 - DNA, 122 bp, Homo sapiens
cctggcgctgcgcgattccgcatggaagagtgacctctggaggcaccgggcgggcagcggcgccgcgggctccccgcgaccgcctcgcccgcccgcccgcctctcccggactccgggacccg

SEQ ID NO: 359255 - DNA, 122 bp, Homo sapiens
gtatgtcaggagtgaatgggctgatatattcaaagtaatgcaaggaaaaaaaaaacctgccgactaagaatacaatacccagcaaagctgtcctaatgagggcaagagtttcccagacgaaa

SEQ ID NO: 359256 - DNA, 122 bp, Homo sapiens
agttgcccgaaagccctacctgaggatggctgtgtccccctgcctcacggtgatgttgtccgtgcctcggttaaaatccacgctgcgaacaggcagtcctgtgggaagaaggcagagcaatc

SEQ ID NO: 359257 - DNA, 122 bp, Homo sapiens
gtgcgggcccagtaggcctcaggccccggccacctggtggaccccagaatgcccctcctgcgagtcgggacacactcagagacagtgtgcccggcgcctcaacccctgccactgtccttggg

SEQ ID NO: 359258 - DNA, 122 bp, Homo sapiens
agtggttcaacgtgcgcatggggttcggcttcctgtccatgaccgcccgcgccggggtcgcgctcgaccccccagtggatgtctttgtgcaccaggtgagactgattccggtaactttgccc

SEQ ID NO: 359259 - DNA, 122 bp, Homo sapiens
gtggtaaccatgtagggccccattgccagcacagaacctggcacacagtcggtgcttggacgggcacacgggtgggcagatggtgggcacagacgcggcaatggccacttcccaggcacgtc

SEQ ID NO: 359260 - DNA, 122 bp, Homo sapiens
ccagtgactgccttaatatccttctctacctactgccttaaggccaactcaatgtatccacgtaaagagtaccctaaagccagtaaaagattatcacgaacacccagagatgtttatggcca

SEQ ID NO: 359261 - DNA, 122 bp, Homo sapiens
tggaaatatgaatagcagctctgcttagaggttggtgtgagcacaaagtaggataatgaacgtgcagtatccattcaaacaatgcctgaaaggaaataagtgcctataaagcggtcattttt

SEQ ID NO: 359262 - DNA, 122 bp, Homo sapiens
agaacacttggagcacccaccccttccaagcagattctccattaaagccccacaggctgccgtgccacctcaaccctactggggcagactctcaactcgaaacatggaacctgagtcttgga

SEQ ID NO: 359263 - DNA, 122 bp, Homo sapiens
gagggtaggtcccagagtcccagggctgggttcagggatgcaacgccgcctgaagtgtcccgcattggatggatgaagaggctttacagcctgtaattctcaaacacagccaagactctggc

SEQ ID NO: 359264 - DNA, 122 bp, Homo sapiens
ctcccatcgtccactcacctgtcaccccgatggcagacacggggcccacacgctggccaccgtggaagccgtacaggttcatcttgtacttgttgtctggctccaggccggagatggtgacc

SEQ ID NO: 359265 - DNA, 122 bp, Homo sapiens
tccagagttgacttacgcgaggacagaggtgtgcagaggcacggcaagctgggccccaggcgagaagcatggagtgagggatgtggaggcagcggaaggcatctgggagtctgggctgcccc

SEQ ID NO: 359266 - DNA, 122 bp, Homo sapiens
ggccccagcctagccctgacctgttgcgcgcgggggccgccgggaattgtagtttgtttacgagactccttcacatccccagtcacgcagcactaggaggaaacggactccacttcccagca

SEQ ID NO: 359267 - DNA, 122 bp, Homo sapiens
agcgagtcccgacccctgcccccgcagcgtgagtggtcgcgggttcccgagggccagccgcgagttggctgttttgcttccatgatttcagccctggagctgtccctgaggcagctgccctg

SEQ ID NO: 359268 - DNA, 122 bp, Homo sapiens
tctaccgccaccatgtgaacttcaagtcctggtgggtgggcgacatccccgtgtcaggggcgctgctcaccgactggagcgacgacacgatgaaggagctgcacctggccatccccgccaag

SEQ ID NO: 359269 - DNA, 122 bp, Homo sapiens
ctggattactataaatgctgtcatcactctgcctgtgtaggaagaacattagctcaatttcgtaagcaaattctccctttataccttctcaatcagccaatgtgttgcgaatgtgagtcttc

SEQ ID NO: 359270 - DNA, 122 bp, Homo sapiens
aatttaactaaaaatatgactgctctctcttcagagaactgctcttttcagtaccagttacgtcaaacaaaccagcccctagatgttaactatctgctattcttgatcatacttgggaaaat

SEQ ID NO: 359271 - DNA, 122 bp, Homo sapiens
gtccacgcgaaattgagttcttggctgggcccgtgcctcgtgctccggacctgggatcctcgaggcatctctgccccagccctgcccgccctctctgagggcctcgggaatctgccttcctt

SEQ ID NO: 359272 - DNA, 122 bp, Homo sapiens
cctgtactgagggccaggtggtttctctccagtcatggtaatgtgggtactggacaagcccgggctctggccaccaggcaaatgggtaggtcaacaaggcaaagttggtgggagcttcaccc

SEQ ID NO: 359273 - DNA, 122 bp, Homo sapiens
catacatgtggaaggagctctgtgtttctgatctacccgagggtcctggactgttctgagcgtgtcttctcaggatcaggaacacacatcagccctctgcgatgtggaagatgaggctcacc

SEQ ID NO: 359274 - DNA, 122 bp, Homo sapiens
accagagatgcgaagagggaggcaggggctagccggtccatccggagccactccgcgccccggaaaagcttagtcggggcactctcgcagtaaccaatcacctcccgggacggccctcgacc

SEQ ID NO: 359275 - DNA, 122 bp, Homo sapiens
gaagagagcacagtgagcagggcaagccgtgggtctggtggccccatgcagcccaccccacgtcatgctgggccaagccccctactcacggtggcagccctgcgggttggcgtaggtgagtc

SEQ ID NO: 359276 - DNA, 122 bp, Homo sapiens
aagcgctgaccgggggaaggcgggcgctgccggcccgtggccggggagcaaaggctggcccgccgcgccagggtccccctcgaactcccggaggtgtggtccctccgcagcgcggccccggc

SEQ ID NO: 359277 - DNA, 122 bp, Homo sapiens
gaaatgactctggaggggcggagggtggccttggttggcttgtggcgtatccctagcatgcggaacagtgcccacacaaggggagcacctggcgaatgtatgttgaatgaaattaattatca

SEQ ID NO: 359278 - DNA, 122 bp, Homo sapiens
ccaccggacggatggtccgaggaccggcatggacccgggtcccagcgagggcggggggagcgtaaggctgggcctgggctgcggcaccggggaggtggcggggaggaggccggcaggaacag

SEQ ID NO: 359279 - DNA, 122 bp, Homo sapiens
ggggttggacggcctggaggagctggagctgtgtccggccggggacctgccctacggctacgtctacatccccgcgctctacctggcggccttcgccgtgggcctgctgggcaacgcctttg

SEQ ID NO: 359280 - DNA, 122 bp, Homo sapiens
gagcatgggcgtccaggctgtccagggctccttcttgccctgggactgaccctgggagggcgcagcgccctgggagaggatggtgctcaactttaaccgggtcggcgccctcgggagaaaat

SEQ ID NO: 359281 - DNA, 122 bp, Homo sapiens
gttctaattctctctctttcacttaatgatcatatgacctgggtaacttacctcccctcccggaagctacatggacctcactgtaagttgcagataataacacctatcttggaggatagttg

SEQ ID NO: 359282 - DNA, 122 bp, Homo sapiens
gctgagcagcacgtgtggggaacaggccgcacagcaacagccttgagaattgagccaacacggatccactgcacacagccgctgggatacggcttgtggcctgacccagccgggatgagtgc

SEQ ID NO: 359283 - DNA, 122 bp, Homo sapiens
ttgaagtgattggaaccagggcaagtttagatcttgacctgaaatgccagaaaaggagatcgtgactcctgaaggaaaagtgctgcagaaatctgaacaaaaatgtcagggcctgaatacta

SEQ ID NO: 359284 - DNA, 122 bp, Homo sapiens
cgatgggcagccgggcagagacgtcctcacttcctagatgtgatggtggccgggaagaggcgctcctcacttcctagacgggatggcggccgggcagagacgctcctcactttccagactgg

SEQ ID NO: 359285 - DNA, 122 bp, Homo sapiens
agctgccactgacgctgccatcgtagctccgggcagtgactttacgtggtcaaagagtgacgagggaaggaagccaggcgtttcctacagcggcccctggcggtaggaggactcagggggcg

SEQ ID NO: 359286 - DNA, 122 bp, Homo sapiens
agtccacgcgccagcagcttcgcggatgtcagtgaacgctcttcgcttgcgcagtcagaacgtcctccgcggccgtgtgaacatccgggtcacaggcgcataaggaccaatgagcgaaggca

SEQ ID NO: 359287 - DNA, 122 bp, Homo sapiens
ggaaattcacagagagaatatgaaaatcaggttgtcctgtacagtatctgcaatcagttacgatacagaaataacttaaacatgtcaagaaagatgaacgcggatactatgaggaactgcta

SEQ ID NO: 359288 - DNA, 122 bp, Homo sapiens
tcgcgttaatcccgcagggctattggccagagtctttgtttaattacgtttccttggagccgccctggcagtgaggcgcccaggcctgcccccagcacttggctccaccccctgactgtccc

SEQ ID NO: 359289 - DNA, 122 bp, Homo sapiens
ccaccgaaagtcaaaagcggggcctgggaaggccgctgggaggcatgagctgggctgggccgaaagaggccactgggaggcaggaggagctgggcctggagaggctgactcgaggaactttt

SEQ ID NO: 359290 - DNA, 122 bp, Homo sapiens
aggatgacagaagcactccatgctggcaaccacacaacctgctttgcctggcatggtctccgttgcaacctgtagttgctgtgtaattagtcattgtgctctctttcactctcaaaattact

SEQ ID NO: 359291 - DNA, 122 bp, Homo sapiens
gggagcccgagcgctgcgcgcccaccatggccgcccagggagagcccggctacctggcggcgcagtcggaccccggctccaacagcgagcgcagcaccgactccccagtgcccggctccgag

SEQ ID NO: 359292 - DNA, 122 bp, Homo sapiens
actagaaactgttagactattaccatcatctctgtaaaatcagctagctggttagggtctcgctgtatagggcatgtgatttgggcatcatgctattctattttccttaagatggaaaagat

SEQ ID NO: 359293 - DNA, 122 bp, Homo sapiens
ggacccgtcctgcccctctggcctcatctggagctctctcctttccctgtcagtaaccctcgggcccccctggggccactgaaagttcccccagccaccctcagcgagctcttcccagcagt

SEQ ID NO: 359294 - DNA, 122 bp, Homo sapiens
gtggggagacgtaagagctaagctgggccaggggaagggcaggaattgccatggcaggctcgctacacacaaatatttatcagagaagaaggatagtaaaaatgtatgggttgcagttgttt

SEQ ID NO: 359295 - DNA, 122 bp, Homo sapiens
ccaggcaccagccgcgcgggcgtgggcagcacagccgcagttcccttccactgcaggtcccgaagccgctgatattccaaacgaggaagtgtaaggaaagcactatcctcggtctagccgca

SEQ ID NO: 359296 - DNA, 122 bp, Homo sapiens
agggcttgtaatgcctgaagaccataatagcactgacttatgataatctagttcaagttccgtttgcagaagtggatctgtcatacttccggtctaagcccagcagtattaggctgcactag

SEQ ID NO: 359297 - DNA, 122 bp, Homo sapiens
ctacctcagagcaaggggcggggcggcggaggacccgaagggcgcgagagcggaacactgcgtacgcgcacttccggtctttgtggcttgcagctcggggtgggtggctcatttcctggccg

SEQ ID NO: 359298 - DNA, 122 bp, Homo sapiens
aacgcaaacaccgctcgaattcatgaccccaatagaaaacttaaggccgcaactaagtaacggatcgctgcgaaggccaaactagccacgccaacgcccccactggagcctccccagcgctc

SEQ ID NO: 359299 - DNA, 122 bp, Homo sapiens
gggcccgtctgcctctgtgtaagttcccccggggccgaagcactctccaaagaggtctgccggggctaggactcggccggctggggccccgcgcctggaagagggcctggcacacagtgggc

SEQ ID NO: 359300 - DNA, 122 bp, Homo sapiens
tcaagtttcatattctcgcccaaaaggaggctgtcaccctacgcccttgacaagaagtctcgggcaaaaagttcccttattgcgacggttccagaactcgcttgcttaggagacggccaagg

SEQ ID NO: 359301 - DNA, 122 bp, Homo sapiens
gccgggggagggggcgccccgcgggccgggggcgggcgcctggctctgcgtggggcggggcggctcccacctgcccgcgcgctggcccccgcctcccccgcgcggccccagcctctcgtgcg

SEQ ID NO: 359302 - DNA, 122 bp, Homo sapiens
acgatcgatttgaattggggtcgtcggctgctgagatcccaaggacgccgacctgatgggcggtccctctttggggtttgccaacctgccggtcctttccgttttttgatcttttgaaaacg

SEQ ID NO: 359303 - DNA, 122 bp, Homo sapiens
cgagccaattccggccgcgccggaagtctctactgaggaaagctatgaggatactctgttcgtaagctcccggtgaattttgttccacagactcggaagaaaggttggataagagttcactg

SEQ ID NO: 359304 - DNA, 122 bp, Homo sapiens
cagggctcctggtgcagggccggccgaactgagacggggcgcggcggggtcggcagggggcgctgccgggccccgcgagctccccggtggcgggtgcgcgccgccctcgcctcccctcgcgc

SEQ ID NO: 359305 - DNA, 122 bp, Homo sapiens
gtgagaaagtcccgcccctagccgatggagggctgggattggttctccgggaccgattgacggctcagggcacgagcggggaccgcagcggcggaggtgagggcgccagcaggaagtgggag

SEQ ID NO: 359306 - DNA, 122 bp, Homo sapiens
actgtcccagggctaaagcccacagcaggctgtgtacccctgcatcttacaaaatgctggcgcccctgtctgatggggctcctcacgggttgggtcggactgagcttttacccctgggctgt

SEQ ID NO: 359307 - DNA, 122 bp, Homo sapiens
ccaacgtgcccgcgtcgcggccttgccggccctactgggccctgcacaacgtttttaaaccgagggttttatctacatattattcatgtggtccgtttttattgagcttctgaggacctggg

SEQ ID NO: 359308 - DNA, 122 bp, Homo sapiens
tgggctctaccaatcagcaggatgtgggtggggccagataagagaataaaagcaggcttccggagccagcattggcaacccgctcgggtccccttccacagcgtggaagctttgttctttcg

SEQ ID NO: 359309 - DNA, 122 bp, Homo sapiens
tttagccgcacagcagcctggaacctgaagttttcggccgctgagcgttctgggtgattgcgtagtgcgagggccaacgaaaccttctgggaagtgtagtccagcaagccgctcacttttcg

SEQ ID NO: 359310 - DNA, 122 bp, Homo sapiens
tgcccagtgagtgggcggccagagggcagggcaggatgggtaactgtgtgtgcctccgtgcgtgcctcgcgtgaaagctccgccttccgtcagacggacgtgggtcgggactccgcctcgca

SEQ ID NO: 359311 - DNA, 122 bp, Homo sapiens
cagggggtattgggcagaaaaatgagcacatatctgctattttacctcttgatttctcaccgcacgcatgcgtgcacatgcacgcacagacacacacacacacacacacacacttttggaaa

SEQ ID NO: 359312 - DNA, 122 bp, Homo sapiens
gtaataatacctacaactaatacctaagtcacgggattactataaggcttaaagaagtaacgtacagcacaggccatgttgcctgacacaaggaaaagtgtcgagttctgtcactttcaaga

SEQ ID NO: 359313 - DNA, 122 bp, Homo sapiens
tcccgttagttacaaacttgggatcccgggacccggaaagcaagggggaaaaataaatcgcgatggggccaagggacagctgctgcggcaacttttacccagcggagcccacctacagcctc

SEQ ID NO: 359314 - DNA, 122 bp, Homo sapiens
aggatctgcagccccttggagtggcgcgacagcttgaagatgcggaagacccttaccaggcggatgaccctcaggatggccagagacatggcctgctgtccattgccctgtcgttcggccag

SEQ ID NO: 359315 - DNA, 122 bp, Homo sapiens
aatctgtgcctccctgaagccagggaggaaaagctgctgagggagggggcgggggctgagcgggaacattcatctgtgtgggctcaggacgcctgcagcaggatccacagtgcaggctccca

SEQ ID NO: 359316 - DNA, 122 bp, Homo sapiens
attggacgtggtggctcacacctataatcccagcttcttgggaggccaaggcaggaggatcgcttgagaccagcaatttgaggcaaggccagtctggaccacatagcaagaccccctctctt

SEQ ID NO: 359317 - DNA, 122 bp, Homo sapiens
acactcataaatatttctccttactggactccctgttaacttccaagatgccttttctggcgtctcctgacagctgtttctctgacaccttcagcttcctctaccttcctgaatggctttct

SEQ ID NO: 359318 - DNA, 122 bp, Homo sapiens
gtaagctaccgcccagaggtccttcaaggcgcacgggcgtgttaggtgctccaacgggcacgggtgtgttgccaacagcccaccgcaggcccagcacccttggttccacggcagcctctgag

SEQ ID NO: 359319 - DNA, 122 bp, Homo sapiens
ttattcatctgaagtagcagaaaagggatggcgtttcccccacgccggccagtcccttcccggtttttcatccgagcacttgctgtgggaggaacatttgatcccagcggtcgtggcgtcag

SEQ ID NO: 359320 - DNA, 122 bp, Homo sapiens
atggtggggcggctgcctgagggatggctgagctggaggctcaaggggggctggccaggacgccgcccagggcaaagaaagtaagtggcccgaacggcggcggcggcagcggcggcctcagc

SEQ ID NO: 359321 - DNA, 122 bp, Homo sapiens
cacagcccatggacaaaagcccaggcttgcgggcaccagctcacggtcccagtccaggctcggccacttaggcctgtgagacctcaggagctgctgtcaaacgtgtctcgctgtgggatggg

SEQ ID NO: 359322 - DNA, 122 bp, Homo sapiens
cgcataatgccccatgttaaccatcctgggggatgtcagggcggccacgctgatgcactgcggtcgggcgcagcggcacagccttcagagccgccgccgctcggttccttttcccatgatgt

SEQ ID NO: 359323 - DNA, 122 bp, Homo sapiens
cttgatctcctgaccttgtgatccacccgcctcggcctcccaaagtgctgggattacaggcgtgagccaccgcgcctggcagattttggtttcattcttaaacatacctttctttgaacaga

SEQ ID NO: 359324 - DNA, 122 bp, Homo sapiens
agggagcctgaggcctgggtggtgccgacaagtcggcagtcacgccaggtcaggaagcgccgaagccgcgggaaaccctggactccatcccgggatttgtccccgtgtcgaagatggtatcc

SEQ ID NO: 359325 - DNA, 122 bp, Homo sapiens
caggacccgggggaacgaaacacgcgtgctgtctgcagagtcgctttgaaattcctgccgcgtttttgcaacaggcaaagcccaagtcacgctactacagacccttgcaaaattaagcaaag

SEQ ID NO: 359326 - DNA, 122 bp, Homo sapiens
gtctcggatttggaggttccggttcgaggctcgaggggcctgaaggtggctctccctccccgggcccaagacgatggtatggcctgctccgccaccatcacgtgggctcctcctctgtgacg

SEQ ID NO: 359327 - DNA, 122 bp, Homo sapiens
atgatttaaaaagcatacctggatcaatgatagccagtgtgcacactctgtagtattttccgcatgctgtgcccagttcaatattattgccactgtagtgatggacaccagttttagccaac

SEQ ID NO: 359328 - DNA, 122 bp, Homo sapiens
tatcaagaaaatatagtgcctagtttatagtatgtacccccaaatggttctcattcctgccgtatttcctttgacaaaatgaatttctgccacaccttctccctcaactaccttttaagatg

SEQ ID NO: 359329 - DNA, 122 bp, Homo sapiens
actgcttgtgcagggtctggttagtcagatcttccacgtccgagtcttccatccagttgacgctgtaccagtcccccaggtacgtcgacctcttctcatcatagtaacaggtgtaggacgac

SEQ ID NO: 359330 - DNA, 122 bp, Homo sapiens
cgatgatgagcaaaaaacgcctgatccagtctatggcgcgtttcggtgggaagatgaacacgccttcccagcagagtaaaacgtgattacaccaaggaccggtaccctctcccttccctcgg

SEQ ID NO: 359331 - DNA, 122 bp, Homo sapiens
tgggccctctccgcaccagaccctgggccgcagtgcctcgtgggaccggcgcccgcaggccgagcccctgcagcctccttgctgcgcaatgtcccggggcccccctcccgtggccgcttcgc

SEQ ID NO: 359332 - DNA, 122 bp, Homo sapiens
cagttctgggaatggtgggaaccctcctgaaatccaagttcccagatgccagccaagggccggctttgtaagcaggcctttccaaggataagcagttagggctgctacctcaactttttgtt

SEQ ID NO: 359333 - DNA, 122 bp, Homo sapiens
aaggcaagccccagtcaggcggaaggtagctggctgcggggcgcggcgactggcgggcggcgggcggcgggaggcgccaaccgccacagacgactcccagctggctgagggcggggagggag

SEQ ID NO: 359334 - DNA, 122 bp, Homo sapiens
aggaattttgtgttttcagaaaccttccaaaatggtaacagaggtcccctctgggcagtgcgattataggggtttatttgttttcgctttattttctttaaacttttctgcagcctcaaaat

SEQ ID NO: 359335 - DNA, 122 bp, Homo sapiens
gcgtgtccgatcccgcccctcccccaccccgccgccggcccgggggtcgctcaccttccgcgttgccccagaccaccatgcccgggcccggcggccttctccggccttgcggaccccggccc

SEQ ID NO: 359336 - DNA, 122 bp, Homo sapiens
ccggctgtctagttgctcgctgaatcttttcatgattgtgttcttcatggctcgattcaccgaaaaggcggatttccgtctggcagcttgaacccattctcaaggtcttatagtctcccaag

SEQ ID NO: 359337 - DNA, 122 bp, Homo sapiens
ctcacctgcatgccacacacacgcacaccaatgactgcagatgtgctctgctgacattttcggatctggttggctgccttctcctctgaagcatcatcaccatgttgtcgtgtgcccatctt

SEQ ID NO: 359338 - DNA, 122 bp, Homo sapiens
ctccatctcttgaggaaagggtgaccgacctgtccttttaggaaaaggaagcttccagcacgctactgagtaaaggagccttactggtggtggtgaaggtgataccatcagaggggccagct

SEQ ID NO: 359339 - DNA, 122 bp, Homo sapiens
ctcgccccggcccgccccggcaccgccccttccaccgccccgtctaggcccgccccgccccggacccagccttggccctgcctgccccacccccgccagactccggcctttgctccgcacct

SEQ ID NO: 359340 - DNA, 122 bp, Homo sapiens
aagcaactacagctggggccacgcccacagactccgggctgtcggggcgggcggcactcgcgcttccagcctgggccaaccaggctgcttgaggctcgaagcgcatgcgcggtctcgccctc

SEQ ID NO: 359341 - DNA, 122 bp, Homo sapiens
cacccgccagagtggggacggaaaagaaccgggtgggcggaaaaccaaggtcgcgggagacgatccaaagaggatgggctacggtcagacttcgacagtcacaaccgcccctggaaaaccat

SEQ ID NO: 359342 - DNA, 122 bp, Homo sapiens
gctgcaggtcctggcgttgtgctggatcatcgcgcccgtactctgaagttttctccgtggcgctctttgagaggggttcctcctgcatcttgagaatattttgcatttcggctcccttctct

SEQ ID NO: 359343 - DNA, 122 bp, Homo sapiens
agcgctgaagcccctctgggcccggcatggggagagagacatggcagagacagacagtcacgcagctgcagacggacagacagattgtcaaggtgtgtgagtttctgccctggggccccagc

SEQ ID NO: 359344 - DNA, 122 bp, Homo sapiens
tgctacccaggagcgcgagccgaggacccctgcggggcaaggggggctggtggaatctggcggtccccagctgcccgtgtcccgggtcggtgcgctcggcgcacccgtggtgacagtgcccg

SEQ ID NO: 359345 - DNA, 122 bp, Homo sapiens
tggtccactagccgtccgtatccgctgcagcctgtggggcctgcgggccggggagccgatcgcgcttcagctcagcgcctttcctggtacttgaagggagatcgaccgtgttatattcgctt

SEQ ID NO: 359346 - DNA, 122 bp, Homo sapiens
agagtgccagtgtctcttgcagaaggcccacacaagcgaaaacggggcgcaatgcgtgggcgggaggcagggattcaggatgatgttgaggcaggtttgtgggggagcagcaaaaacggggc

SEQ ID NO: 359347 - DNA, 122 bp, Homo sapiens
gttccttcagccatccctcggatcctcttaaacttttctaagtttcaggagtgtgaatgacgcattcccctagtgttaagtggcgacagttctccctctattttatctcttcagtcatttta

SEQ ID NO: 359348 - DNA, 122 bp, Homo sapiens
tacagctgctcccctagggaagaggaggctggactcagaggccactgtccggagctgcgccggcccctttatgtgcacatgtccaagctccacaggagaacgcagccgcttccttcccttcc

SEQ ID NO: 359349 - DNA, 122 bp, Homo sapiens
tgggtggcttagaaatttattgtcttggccattttcctccggaagtgcggatcccagcggcggtcctgtagctgagcaggcctgtggcttggttctatgtccctgtggctatgtttccagtg

SEQ ID NO: 359350 - DNA, 122 bp, Homo sapiens
cggcagctcgggggtattccgggactccagccctgcggactggaggctacctggggggcgcgcgaccccggtggccgggccctgggggaagcggacgcgaggggggcgccgggctgcggcag

SEQ ID NO: 359351 - DNA, 122 bp, Homo sapiens
agctactcgtccaccggctccaacgccaacatcaacaacgccaacaacaccgccctgggtcgcctccctcgccccgccggctaccccagcacggtcagcactgtggagggccacgggccccc

SEQ ID NO: 359352 - DNA, 122 bp, Homo sapiens
tcctccccttcctacatagaagcaccaaaattatacctcagtaaacagttttgcaacatccgtgtctggcaaaatgtataccaaagaacttttacatgccaaaacttaacattcatttttgg

SEQ ID NO: 359353 - DNA, 122 bp, Homo sapiens
acaaccatgtgttccttatccctattgcggaacaccccggacaaccgcagcacgtaagcccgctggggtggctctgccaaccagggacagagtgaggatttttaatgaacacatcgattata

SEQ ID NO: 359354 - DNA, 122 bp, Homo sapiens
tgtgatttaagacttcacagttgcaatagttaactcaagctaaacttgccaggtggtgggcgtgggggctagatggtgaagatcagagccagacagccactccccgtgtttctgggagatgc

SEQ ID NO: 359355 - DNA, 122 bp, Homo sapiens
cgtcctgcccacggccgaggccgcggctgtcggggtggcctggacgggtgcagggctgggcgggggcggcaggacttgaaccggcgcctgctctcgcggaggcagcagcagagctcacccct

SEQ ID NO: 359356 - DNA, 122 bp, Homo sapiens
gcgcgccctggagcgggagcaggcgcggcacggggacctgctgctgctgcccgcgctgcgcgacgcctacgaaaacctcacggccaaggtgctggccatgctggcctggctggacgagcacg

SEQ ID NO: 359357 - DNA, 122 bp, Homo sapiens
ggtccagcgcccgaagtccacgtacagtagctgtagatgccgagccggtcctgttgcctccgggaacccagtcctcctcgtcctccaggccgcgttccccgggtcccgcggcccttctccag

SEQ ID NO: 359358 - DNA, 122 bp, Homo sapiens
agactccaacgcctgggacttgacaccttctgctaaaactcttctctacattcaacgtgccgcaggctcacctttcacaaaacgactagattttggctgatgagccctgttcccgtgggcgt

SEQ ID NO: 359359 - DNA, 122 bp, Homo sapiens
acgtcaccatcgtaagaccacaggacccttcccagccgctcctgtatatgacgtcaccgccgtaagaccacaagtcaccgccccagccgctcctgtagatgacgtcaccacagtaagaccac

SEQ ID NO: 359360 - DNA, 122 bp, Homo sapiens
aggggtctctgcctctacccaggactctttcatgaccaggaggctgaggcccctcacaggcggcttcttactctctccttaaacctgttctggagacatttcccctctccccaaggattccc

SEQ ID NO: 359361 - DNA, 122 bp, Homo sapiens
cccgcactgtcacagccaccaccagcaccaggaccaagggagccgccatgataactggggcgggcgcgcgggcggggagggaaggcgaggcggaggagcctcgcgcgctgtgcgccacgctc

SEQ ID NO: 359362 - DNA, 122 bp, Homo sapiens
gagcaaaaccagctcctcgtattgtgtcccattcacagctggagcagctcgggcactaggcgaggcagggggtgcggcgagcggtctccagccggctgcctgcggtcggtgccgcccgcaga

SEQ ID NO: 359363 - DNA, 122 bp, Homo sapiens
acaatgccaactgctttcctccctcctgacagcacttctaccctagccgggcccagcccccgagcagtgcagcctcccgagtgcagagtgcagcccctgcccgccctggcccagctgcccat

SEQ ID NO: 359364 - DNA, 122 bp, Homo sapiens
ctggttaacagttgctgctgcatttcaatattattctgtcttactcctctcagaaagcttcggtaggctacagtctgcattgtccatttttcctggagattggatttgccacctttgctggc

SEQ ID NO: 359365 - DNA, 122 bp, Homo sapiens
ctccttgaagccctccctcaatcctgaggatgccctcccctaaatatttcagagcagaaccgactacaaatggggcccagtgcaaaatgaaaacgtaagggtccctcctgtgagactgcact

SEQ ID NO: 359366 - DNA, 122 bp, Homo sapiens
gggccatgctgaaccagcaattccacttctgggtgcgttctgtggggaaggacgaggccacgtgcatatggaaaggcatagaagattgttccctgccaaagcagcatgtggaaatgcatggt

SEQ ID NO: 359367 - DNA, 122 bp, Homo sapiens
tcctcttcactcccacagtccaggccgctgtccgggctccgggtggccgagcggctgaaccgacagcccctgtcttccagaaggaagtcctccacgtgggggacggcccccgagcccctgtg

SEQ ID NO: 359368 - DNA, 122 bp, Homo sapiens
agtctcacggaggcttaattaaagcaggtatgtaacaagaacttaggacagcacctggcacgtagctaatatttacggagaatttagaatgatgaattgatgatggtggtgatgacagtgac

SEQ ID NO: 359369 - DNA, 122 bp, Homo sapiens
gcccagagctggggctgtaacagggtaaccggctgagggggacgacggcagcagcggggccgttacctgctccgcgctgttcccacgactgcgccaacgccgcagcgccggcgcgtccccat

SEQ ID NO: 359370 - DNA, 122 bp, Homo sapiens
gccaccccaggctgtgaccctgaccccacaggcctggacaccgtgtgctcaccacacccacgcccagcagcctcacctgggttccgcaaccacagtctcatggcatggcattttgcttaaag

SEQ ID NO: 359371 - DNA, 122 bp, Homo sapiens
ggacggggaggcaggagccacggctaagccggaagcctcaggctgaaagcagctcggccccgcgcagccacggccaactcaactcagcaaacacacgctgcgctgcagaggccccgtcccca

SEQ ID NO: 359372 - DNA, 122 bp, Homo sapiens
gggtgggggcagcaagggagctgggtagagcaggaagaggggtgccttccctgacagtggcgccctcccactgatggtgggaggtcaggcagctgaggctccccacaaagtctccttgtcct

SEQ ID NO: 359373 - DNA, 122 bp, Homo sapiens
gggggcgtggctaagggagggaagggtaatttgggggctcttgagagatgagagaaacaacgactggagggattaagaagaactcttaggagcagcttggcctaaagggtaagagttgtgtg

SEQ ID NO: 359374 - DNA, 122 bp, Homo sapiens
acccgggcagggctcccacagagacaaggagggcacaggtgtctgccccctctttaaaatcgatctacacacatccacgcacatgcgaccccgaggaaacgaaacccactctagaaaacgcg

SEQ ID NO: 359375 - DNA, 122 bp, Homo sapiens
ggttcctttctgagcttccagctctgtagtatctatcagcccgctgatagggcagcctcccgacgccactcaaaacatcttaaaggccccaagccaaaccccgctactagtagaaccaacag

SEQ ID NO: 359376 - DNA, 122 bp, Homo sapiens
tcctccgctgccggaccagctccctcccacatctggctcctagagacccctgggatcccgcgcacattcccctggaccggcacccgacaaagcgcccggagaggcttggctcgctcgttggg

SEQ ID NO: 359377 - DNA, 122 bp, Homo sapiens
gcgcgcgcgtgctctctaatcccccgccttccggctccggcggcgacgctcgtccctctccgctcgtccctcgccgctgccgggccaccagtgccagcctgcctcaggagactccatttgcg

SEQ ID NO: 359378 - DNA, 122 bp, Homo sapiens
aaacctcagaaactcagttcacactccacgggaaactaaaaagccaacattatatatacacgcacacatacacatacatatgacaggtttgtgttttttaaggataaatatgcacattgctt

SEQ ID NO: 359379 - DNA, 122 bp, Homo sapiens
aaagcagcaaaaacatatcttcctctctgcagaaagaaaaatgttaacaaggaaacacagcgatgtgaacggactgtccgtcaactcctgctccactggatcccccatccagcttcacctcg

SEQ ID NO: 359380 - DNA, 122 bp, Homo sapiens
gctcagttcatgctggtttccttcctgcctttagtagggacctgctctgtgctcacacctcggctgcatgcaccctgctgtgacggaggctagtgtggaagaggtcctgtcctcagggaatt

SEQ ID NO: 359381 - DNA, 122 bp, Homo sapiens
gtggtttccttccccagcccatatttggttctcatgaaaacagaagctccgtggagaaagcgaagaaagtccttgaaagtcgcctgttcaaagccgccactgccgtgatgccccctgactcc

SEQ ID NO: 359382 - DNA, 122 bp, Homo sapiens
tggcaggagcgccgtttcctccaggttttctgtttcttattaaagtttttagtccgagggcgtagttgctgactctggtgttggcgttagccctggccttattaaacagaaatatacagcca

SEQ ID NO: 359383 - DNA, 122 bp, Homo sapiens
agagtctccagttgcatgaccatttggagtttgatggcctgaaggcaagaacagacaaaccgggttgttagaaaacatgtatcaaaaggaaaccagaggacgggtaaagatagctaaaaaat

SEQ ID NO: 359384 - DNA, 122 bp, Homo sapiens
agaggattgtgacatggaccctaaatgtcgccacgtttgcgtctccatcccggaatatgacgctggtagctcattagctccattcaagcctacaaattgcatcaccctcctcctctgcccag

SEQ ID NO: 359385 - DNA, 122 bp, Homo sapiens
ctcctctccttctcttttccccactgtgcccagcatcatgtcttactgacagtggatgctcgactgaatgaacaaatacatgaaataaggaagaaaggaatgaatcagaacaaactcaaggc

SEQ ID NO: 359386 - DNA, 122 bp, Homo sapiens
tggcgactgcgcctgggcccgcctggtgtcttcgcatccctctccgctttccggcttcagcgctctaggtcagggagtcttcgcttttgtacagctctaaggctaggaatggtttttatatt

SEQ ID NO: 359387 - DNA, 122 bp, Homo sapiens
aggcctggccggctctgccatgatgtagtggctcactgcccaccacctggctggacatggcgctggtcacctgacacgcggctgccctcctgccccagcatgccgatcccaggcacacggcg

SEQ ID NO: 359388 - DNA, 122 bp, Homo sapiens
aagacttcgccgccagtcgtaacatcacgttacttctgtccctcgcctcacagactccttcgctctttccactacagcgagaggacttctccagggccgcatcaccctgcggagggaggaag

SEQ ID NO: 359389 - DNA, 122 bp, Homo sapiens
atcttcctggcaggcagagctttaagcagtattcctaggccctcaatttggaggacaatgcggattggtttcatcaagggcctagaaggtacaagatcagaaggtaagagaaaaagagttct

SEQ ID NO: 359390 - DNA, 122 bp, Homo sapiens
taggcaggggtggctttgctgggcgggccttacctgtgacctgagtgggagcgatctctacggcgctgcgggaaggaggcaagtccggcaggaaccagcgcatggtcgggggcgagggacgg

SEQ ID NO: 359391 - DNA, 122 bp, Homo sapiens
agcaaaatgcttattagagtttttgtctgagcacagtagcctggccctgcatatcttgggcgtttgattaccatgctggaataagaagagttgcatttctcattttaatgagcatatggaaa

SEQ ID NO: 359392 - DNA, 122 bp, Homo sapiens
gccggcgtccccaaggctgagagtgggcgcgtccgtcaggaggagtcgtctttgtgagcccgccccggcggggaggagctgcccggctcaggccccgcccacccggaggatcttggggctgg

SEQ ID NO: 359393 - DNA, 122 bp, Homo sapiens
tgcccggcccgagcggggaggcaccccgaggcgtggaagggtcggacagcgatggatttccgtcgctcaggccaccaggagaagccggggaaagcacctccatcttcggaatttttagcggc

SEQ ID NO: 359394 - DNA, 122 bp, Homo sapiens
gtcatatgcggcttctgtatagatacagaaatttccaccatcacaaagagctctgctggacggcacaggtctaaggtctagaaagctacacattttaacacaaaatctgtattataaaggaa

SEQ ID NO: 359395 - DNA, 122 bp, Homo sapiens
gaaatgtgcttctaagacagaaaatgtattttctcatcaagggtgtctggagacacagaccgtgaccttggcgcagcggtgtgcatcagaggcgtgtgctgagaagggtggtgttaagctgt

SEQ ID NO: 359396 - DNA, 122 bp, Homo sapiens
ctcggctgctgtgatgagctttgtttcttcatttgttcattcattcaccagactttttgccggggcttgccgtgagccctacgctgctctgaagaaagccgggctggggtgagcgtgatgga

SEQ ID NO: 359397 - DNA, 122 bp, Homo sapiens
tgataaagggggtgatttatcactgaagtctctccgctgcttcagtggtctggggtgagacgtgcctacgagccaatgtgtccataagccgatgtgtcccagcaggtgtcacctgcaccccg

SEQ ID NO: 359398 - DNA, 122 bp, Homo sapiens
gggaccagccaggggagcctgcactctcaggtagggtcactgccccctgcctgccacctacgggccacttctccaactcaaagaaatcccagggctggggctggatcaggacccagagactt

SEQ ID NO: 359399 - DNA, 122 bp, Homo sapiens
tgcgtccctcctgtgcgcggctctgggaatgccgggctggggctggttgtctcgtgcgggcgttcctgttcccggggaggtcatttgcaccctgaatcacccactgcgagcccttccaaccg

SEQ ID NO: 359400 - DNA, 122 bp, Homo sapiens
agtctcgcacgcacgcacaaagtcgtgcctaacaattggaaagtaaccctgacccgaaaccgggacaccaaggttgtgtccagtgctcaggggcaatcggccagcttggctggagcggacag

SEQ ID NO: 359401 - DNA, 122 bp, Homo sapiens
ttatcatccatcgtgtagacaatctcacctttccattcatgtctctggctgcatccttagcgtctgctgggctttcaaaggtgacaaaagcaaatcctcttgatttgttggtttcacggtct

SEQ ID NO: 359402 - DNA, 122 bp, Homo sapiens
aaatgtgccagtgggtgcggttgacaggccagggccgatgccacggagtgaccagggtcccggcagaatctcttgcagctgggcctggggctgacacgggaagggggctggactgggaagcc

SEQ ID NO: 359403 - DNA, 122 bp, Homo sapiens
tgctgggattacaggcgtgagtcactgggcccagctcggattcaaagtttggaagcaggccggacacctgtaatcccagcactttgggaggctgaggcgggcagatgaccctgaggtcaggg

SEQ ID NO: 359404 - DNA, 122 bp, Homo sapiens
ctcgagggtaacccgacccgggtctagagagagtccaggagggaaaggaatgagcacgagcgagagagcagcttggcaagtccggtccaagcgcccctctccacgcccggggtacctatccc

SEQ ID NO: 359405 - DNA, 122 bp, Homo sapiens
aggatggtgacacccagaccgatgccggcggagaacccgattctctcgggcagcagccgacggacactccctacgagtgggacctggacaaaaaggcttggttccccaaggtaggagagtgc

SEQ ID NO: 359406 - DNA, 122 bp, Homo sapiens
actgctgttggtatatgccatggcctcctgccaacctaccagccttcgatccttcagttccgacaggtctcacactctgagccatgcctcctacctgagggacagtgccgtgatggatgact

SEQ ID NO: 359407 - DNA, 122 bp, Homo sapiens
gccccggccccggcccccgggcgcctgggccggatgtcccgatgagagagccggcgctggcggccagcgccatggcttaccacccgttccacgcgccacggcccgccgacttccccatgtcc

SEQ ID NO: 359408 - DNA, 122 bp, Homo sapiens
ggtagagtggaaaggttacctaggtttcagtgcttgaaaagatttcagaaagcagtagtacgtctggttagactagaatcagtcctctcctgggggcagtggaatataatattttctgactg

SEQ ID NO: 359409 - DNA, 122 bp, Homo sapiens
atggcaaagcagaggataggggagcaaagctgagaagccaagctgtacctgtgccccccacgcccacctgccagctcattaggggatcttgtcccaggggtaggagcagacactatagtaac

SEQ ID NO: 359410 - DNA, 122 bp, Homo sapiens
cctttctgcgggccgggcccgtggtcacccggcctggacggagagaggaggtgagaggggcgctgcgttggcctccatcgactgtcggcctttttcagaacgcctacttcgggtcaagcttg

SEQ ID NO: 359411 - DNA, 122 bp, Homo sapiens
tgaacacctgtcctgtgaaaccagactgtaagctccatgagggacagccctgtcctcacacgaatctccgacgctgaaagtagtgagtggcacgtggcagtgactgaaaaccttgctgactc

SEQ ID NO: 359412 - DNA, 122 bp, Homo sapiens
aggtgctttggcttctctcttttgcttctttaaccattgtgagatagacatgccctctatcgctgatgtctcttcagcctgggctcagaatggaccagtggagtgagccagaccctggccag

SEQ ID NO: 359413 - DNA, 122 bp, Homo sapiens
agggaaaataggtgacttttaaaattatgaaggttgatctgtttggtcccttacctgcagcgagaaaagtgatttgaattctttgaggagttactgagtatccttggtgcccaaagatggca

SEQ ID NO: 359414 - DNA, 122 bp, Homo sapiens
ttttgagttgtctgtctatataaatgttagaatcagtttgttaatagccacaaaataactcgctgggattttgacgagacttcatcaaatctatcaataaaggagggaagaactgacatcct

SEQ ID NO: 359415 - DNA, 122 bp, Homo sapiens
gaggtccccccagggtcccacactgcccatgttccccaccccagggtcctgcattgcctgcgtcctcccctgcctagtgttttagatgccacagtgacccgtggccttggcatccagggcat

SEQ ID NO: 359416 - DNA, 122 bp, Homo sapiens
ttgttgctgcgcttgccattccaggaagcgggccgcctccagtagcgtctctatgctcatcgcgccgagagctgccgggggcgcgccggggccgaggctgcggcccgcgagccgggcacagg

SEQ ID NO: 359417 - DNA, 122 bp, Homo sapiens
ggaagccgcctaggccagcgggggccggaggagtgagggtgggctcctggctggtgactgcggccaccccggagagggcaggggagggagctcccacctgttgtccagccagttgtgcagct

SEQ ID NO: 359418 - DNA, 122 bp, Homo sapiens
acagaggactaatcaaatttcattgttaagatactcttttgtttttaacctgtactatcacggtttaaggccatttttttttcagttgactcatggaaagcatctatttagccatcttaaac

SEQ ID NO: 359419 - DNA, 122 bp, Homo sapiens
gggccttcttcaacactccacccctaggctgtgttcaaaactgcagcgtaactgagaaaacggtggcagcctggggtgaatgcagtccctcccttttcctaatccatgaaactcctctacat

SEQ ID NO: 359420 - DNA, 122 bp, Homo sapiens
ttggccttggcaacttctggccaatccgccctgcccctctgggtcccggcgggccggctgcgccctaggctcaaagggttaagcaggtgcctctccgggcgaggcgctattggccgagggct

SEQ ID NO: 359421 - DNA, 122 bp, Homo sapiens
cggtgggggaccccactcacccccttagggtcgccacccctcacggcaacttgtgcctggcgtcaataaagacctggaaggatgttgtgcttctgaagccccactgggtgttactgcagcag

SEQ ID NO: 359422 - DNA, 122 bp, Homo sapiens
gtggcagggggtccccaggtccggctttctggcagcccctgggacgggggccttggaggtcgccgggcaccctctgagcggcggagccaaacggaccctcagctgttttccatccctcataa

SEQ ID NO: 359423 - DNA, 122 bp, Homo sapiens
cattttcttgactccgaggcggtcccgtccctccctgcggcgcggctgggaccacgttcacgtgcgtcacaacggcgcccctttgtggaagaacttggcaatcttttcttggttcaagtgca

SEQ ID NO: 359424 - DNA, 122 bp, Homo sapiens
actgtgtgctgtgtgtgggacccttgaagaggtgccttccctgagcctgcttaagagaagcgcagagtaaaggaagggcccacaaccctgagcaacttagtcagtgtctttgagcttttgtt

SEQ ID NO: 359425 - DNA, 122 bp, Homo sapiens
cacgcgcgtacacagacacacacgcagagagcactctcacgctgggcaagctcgggatcgcgctacccttcccgagttgaatgatagtgtttggtttctgtctcttgccatgtgcatgtgta

SEQ ID NO: 359426 - DNA, 122 bp, Homo sapiens
tcccagcagtagccagccaatgaaaaataggctcagggggttcccgagccaatggaagcccgcgggccgtgaggacttgccactagaaacgtttatggtgtcccggcccggagacttctgtg

SEQ ID NO: 359427 - DNA, 122 bp, Homo sapiens
cgctctcctaggggaggctcccagatcactgggtcttcctcacctgcctcggtggaatcccggctgttcgcagccgcactggatgaagctctcgtctcctctctggttcctcacaggtgtcg

SEQ ID NO: 359428 - DNA, 122 bp, Homo sapiens
tctattcggcttgccccagcgcgctgccccacgtccccgaggccccggcccaggcccagccggcgagtcccggcctgctccactctgcacaaaacgaaacccaaatgcccaaaaagctcagg

SEQ ID NO: 359429 - DNA, 122 bp, Homo sapiens
caatgcagcgaactcaatgctgggcaccgaaacgtgcatctcccccggattcccaccccgcgtccctgctccacgctccaggactcgccgccagtggggtccactccgccggcgcgggggct

SEQ ID NO: 359430 - DNA, 122 bp, Homo sapiens
ctttaaggtcctcttaccttttaataattttctgtgcttactctcctccttccccaccatcgccaccagaaataaataaggcttgtggtgaacttaggtcttcaaaacatttgttgcagcag

SEQ ID NO: 359431 - DNA, 122 bp, Homo sapiens
gaaaagaaaccgaaatgaaatgacactaagcaaatcttgaagagaactagcgctacagaacgcaggtattcaagagcgcgcaagggccaagaaccacccgtttccgggaaatgagcgttgct

SEQ ID NO: 359432 - DNA, 122 bp, Homo sapiens
ggcagccaggatacctggcttccctcggaacttctttttggctttgctgggcacagcattcgggcttgcctcgcatcactttcgcatatttcacgtgttaagtcacataaataaaatacaaa

SEQ ID NO: 359433 - DNA, 122 bp, Homo sapiens
cctgaggtggtggcggtggtccgtggcctgtgtcagctgtcatgtgccggctgcagggggcggacaggccaagggacccaccccgactttacgattagagtgttgggccaagggtttctctg

SEQ ID NO: 359434 - DNA, 122 bp, Homo sapiens
tggtcagggtcggggctgctcaccgcaggctgcgtttctcagccaggcttaagggcatcccgcgaagcatgtggtcccgctgtgccactgccaggctctggagctccttcaccaggaggctc

SEQ ID NO: 359435 - DNA, 122 bp, Homo sapiens
tatagtgttccattgcaaggataaaccacaatttattatcagttctccaggtcttgggcacgttctcccctgatttgtactgcttcgatcatttctgtacttgcttcccagtccttatctgc

SEQ ID NO: 359436 - DNA, 122 bp, Homo sapiens
accaatcccttcgatcaggatgttggtaagtgtttttgcctctccctgcccattcctcaccggactgcacgctcactctgccagcccctgcctgcattcaggaccctcgggccagggccaag

SEQ ID NO: 359437 - DNA, 122 bp, Homo sapiens
tgccatctgtcacccctttctttgactaggaaagggaactccctgaccccttgtgcttcccgagtgaggcaatgcctcattctgcttgggctcgctcacggtgcacgcacccactgacctgc

SEQ ID NO: 359438 - DNA, 122 bp, Homo sapiens
cacagggcagcctcaccaagaccaggatgttgggcatgacgatgtagtcgctctccgagccgtgggacttggagggctggaactggaaggtgcggtactcgaggaaggacacggtgtcgttg

SEQ ID NO: 359439 - DNA, 122 bp, Homo sapiens
agggggatgatgcagggaggggaatcccacctgctgtgagtcacctgctggtataaagggcgggccttacaatgcagggaccttaaaagactcagagacaaagggagaaaaacaacaggaag

SEQ ID NO: 359440 - DNA, 122 bp, Homo sapiens
ccgggcaacaagagcgagacaccgtctcaaaaacaaacaaaaattagccaggtgtggtcacggcgcacacctgtggtcccactcgggtggctgaggtgggagggtagcttgagtgtgggaag

SEQ ID NO: 359441 - DNA, 122 bp, Homo sapiens
ggtcacattacctgaaaaaacaaatcaaggacaggagttcaatccttctgccccttaccccgtgcttcctcctcccctccccagcctccctacacttcctagggctaaagtgaccttgaatg

SEQ ID NO: 359442 - DNA, 122 bp, Homo sapiens
acgggcatgcgcgccctgctggacactgtggtgcaagctctcccccaggtaggtggagcccgcgccatcctcagcgcaggcccccggaagacggggttgcagggagcgcctcgccgtccccc

SEQ ID NO: 359443 - DNA, 122 bp, Homo sapiens
ggggtcctgaattagggtgcgagcagccaggcgccatcccggggcgggttgtggggtcctcggtatggggaggttgggaaacagagaggacactggggagaggaaagataaagggaaaatcc

SEQ ID NO: 359444 - DNA, 122 bp, Homo sapiens
ggccccgctgagctgggccactacatgctgcagccataaaagccatatctctgatcacagcgaactcacaggccagtgagcccagatatcaagcatgcacagacaaaggaaacctgaagaca

SEQ ID NO: 359445 - DNA, 122 bp, Homo sapiens
gcaccaaatctgctctggtatgtcaccttatctctcgtccccgctgttgtccccaaacgccgcctgtcaaaggagacgccacccgcattaggacctagactggggcccttccgctcggggtc

SEQ ID NO: 359446 - DNA, 122 bp, Homo sapiens
tccactggaaggtggggtccttgtcgtggctgtggtcgtggtcgaggtcgtggtcgaggccgtggtcgtcgtcctcgagaactggggactgaggagacaactgttcagtctgcagctaagag

SEQ ID NO: 359447 - DNA, 122 bp, Homo sapiens
ttacaaatttgttttttgaaattaatcaactcatgcttagaagtaggctcttgtttattccgctaggtaacataagtagaaaacacatctcttcaagacagagcatctgggaaaggtattac

SEQ ID NO: 359448 - DNA, 122 bp, Homo sapiens
caaggaggctggactgtggctttggatagtcaaaataccactgacatgaaactgtatcatcgcagtgttgataatttccctggaagaagcaaatcctcccataactataaatcaatccctca

SEQ ID NO: 359449 - DNA, 122 bp, Homo sapiens
aggggtcagcccattttgggcctccactgccggctcttcccctaactattgtgagtgtctcgcagtcttggctctgctgtttgggacgtgccagggtgcgccaagcctccgcgtatgctcgc

SEQ ID NO: 359450 - DNA, 122 bp, Homo sapiens
caatgacaacgctcccagttggatgctggtactctcagctaaaagtgttcagagaaggaccgaactccactcggcctctctcagattctgaaatgaggaaaagtttagtattcatctaatta

SEQ ID NO: 359451 - DNA, 122 bp, Homo sapiens
ccgcccctgacttcacttgataacaaactagaaactgaaacagggtcgggatgccgatgccggcttggagttagagatgagtcaccgctgagagcagctgcagtagctgagcagtggcagca

SEQ ID NO: 359452 - DNA, 122 bp, Homo sapiens
tgtgcctgtttttctcaactctattttaaagctacggagagatccggagtccacgccaggcgacaagaacgcgctctaatggaacgaagttggcaatacctatcagcaccaggggcagtgcg

SEQ ID NO: 359453 - DNA, 122 bp, Homo sapiens
gggcccgccttttcccagtctgagccaatccaaatggaggcggaagcgctccgccttcatcgcctggaactctgggaggtgcttatttctgggcacgccccctttcccctctgagccaatcg

SEQ ID NO: 359454 - DNA, 122 bp, Homo sapiens
ctgcaggggccacgcgcccggccggtctcctgagtgatgtcgccggcgatcagatcagctcgtgtgagcaccgagtgtggcacacgactggcctcaggaccccttaagtacccggcgcaaca

SEQ ID NO: 359455 - DNA, 122 bp, Homo sapiens
tcctcgcagctggggccccactggcgcccccgcgggagcgctacgggagaggcgcctatgcggctgcaggttttattatggagctgtcaaggtagaaaggtacggagaacgggaacccaccg

SEQ ID NO: 359456 - DNA, 122 bp, Homo sapiens
cgccccctggcctggctgtgagctctccgcaggagtggggagtgtgggcgttgggccccacgtgcgccccctggcctggctgtgagctctccgcaggagtggggagcgtgggcgttgggccc

SEQ ID NO: 359457 - DNA, 122 bp, Homo sapiens
gtccttgctgtcagctgattcctcctctgactccctctgaagcccaccccaacaggccatcgacctctggccaaagacggatcctctgcccagagagaggacagagtctggatccaattctc

SEQ ID NO: 359458 - DNA, 122 bp, Homo sapiens
tgtttgtgatgtctttattggtttagggagtccgagaggctctatgctggctatctcggtcgcgtggatttttgcgcaagtttttagaaaaacactgactcgagtagagagcatttctccgg

SEQ ID NO: 359459 - DNA, 122 bp, Homo sapiens
gttaaatcactctactccacaaggaaccaaaccaaacagcatcagcaccaggctgagtcgcggaaaggatctgtcagaccgctccactggcatcgactcagctcgggagctacgttcaaaga

SEQ ID NO: 359460 - DNA, 122 bp, Homo sapiens
aaggttcggctccttagagactgtggccacctggaggtgtgttcccctccaggcctttcccgttgagacttttcctagtttccctagagggaagtgtcaaccttgtacgtgtctgatctgag

SEQ ID NO: 359461 - DNA, 122 bp, Homo sapiens
cagcccgagtgacagtgcgagactccgtctcgaaaaaataaaaacaataaataaagtgaacgtatataccttaaaggtatacacacaaattacctgttgggcagcaccatctgtggccagca

SEQ ID NO: 359462 - DNA, 122 bp, Homo sapiens
ttgccaccaagcctcctgcacctgctgcaaaggccaggactcctcagcaaggaaggccaccgcttcccggctccttctaggccaggccgactcttcctccacacccacccctgcctcctctg

SEQ ID NO: 359463 - DNA, 122 bp, Homo sapiens
gcggagacagcagcagcgcgtggcagcggttcctgcgggacagctggaactgatggagcgcgggcgacgccgagagcttgggggcgcctcggtcttcccctccagccgacccggctgtcgcc

SEQ ID NO: 359464 - DNA, 122 bp, Homo sapiens
tccacaggaccatctccgaggctggctcaggatgcggcgccaggggcactaggctggcgccgcgggtctccagcgcgtggcgcacgtcctacacgccccgcactggcgcaggcctgtacacc

SEQ ID NO: 359465 - DNA, 122 bp, Homo sapiens
acccccagttgtgcccttagcgtaggcgcttgccattaccgtcagtgtgtcttgaccaagcgcctcttgctgcttccacgtccgggcagcagcagcagcagtcgcgaaagggtagggtccag

SEQ ID NO: 359466 - DNA, 122 bp, Homo sapiens
atcttcgcaggttggcgatggaccccatcttccatggatgctagtcctggaaaggcagaccggcaacagccgaatgctctgttccccctgacaccagtggaggctactgagaacgcctggtc

SEQ ID NO: 359467 - DNA, 122 bp, Homo sapiens
ttccaacccaggaggtgtttacaaacttagggacataaaccagggaaagtctatgagagccgttacttggtcaccagccaaaggtcattgcctctgtacctcattgtctttatcaccttatg

SEQ ID NO: 359468 - DNA, 122 bp, Homo sapiens
tggaaggctggtgccactgcgcgagtgagtaatcgcagccaggcaccggggaaaggggaacgcagagggcctcccagtggctgaagaggtaaatcccaagccctgcgcatctcagctgccct

SEQ ID NO: 359469 - DNA, 122 bp, Homo sapiens
gcagcaactgtgacctctgccccgcagacccggacatgccgccagagaggccaaggcgtacgctctccgagccttccctgaccccatgtgcccaagcctggcccagcaacgccatgtgtgca

SEQ ID NO: 359470 - DNA, 122 bp, Homo sapiens
tccatcatttgacataactgattcttctcttttccttgtaacgctttttcattcagcttccggagctccacaattcaactttcttcctcattcaccacctctctttctcaatttattttgtt

SEQ ID NO: 359471 - DNA, 122 bp, Homo sapiens
ctcccaccaagcttttaaactgaaaccacagaataactcttgcttgagttattactaactcgataactcttgtgtttttttgtgggacaggatttacctgctagtagtttgctgaaactcca

SEQ ID NO: 359472 - DNA, 122 bp, Homo sapiens
tccccgggcctctgcacgtgctctgcgcgctggctgggggtgactccaaggagctcagagcggggtgcccggcacctctcgccaggcgcctttcgaccttctaaagcgcgaatggctggact

SEQ ID NO: 359473 - DNA, 122 bp, Homo sapiens
ttgctaatcctgtccccagtgagcaagatacctttgcaaggtcattcacgttaccctccccgctttgtgagtgtgtgcttacgcgcgcgcgcgtgtgtgcctgtgcgtttggttaagtgacc

SEQ ID NO: 359474 - DNA, 122 bp, Homo sapiens
acaggctactcaactggggattgatgcgcggtgcctctgaggttcagctctgggcctgatcgtccaagaaagggcagctaaggtgggcatagtgaatcacgcctgtaatcctaggactttgg

SEQ ID NO: 359475 - DNA, 122 bp, Homo sapiens
aggtgctgggaagctgggggcatggtgctcaccttctcacccttatgacccttcagaccccgaattccgtccacaccctagaattagagaggggatagaagtagactgatcaggggatggag

SEQ ID NO: 359476 - DNA, 122 bp, Homo sapiens
cctgacgcagcgagagcaattggcaccactgcactctctctccaccctccctccgaaggacgggcggtgcccagctcctgcgcccccgcacattctggtcccacagtccctcctggctgctc

SEQ ID NO: 359477 - DNA, 122 bp, Homo sapiens
ggcgcagacatacagggtctgtcactcacccgtgctcaggtggctgctgcgcctggagaacgcgctgcttgcggattcctttccttccctttgagtttctttactgatatatcagaaggagg

SEQ ID NO: 359478 - DNA, 122 bp, Homo sapiens
atccctttgcttgaggtgacttttctctttcatagctcactggctggctcaacataacctcgacacaaccttcactaaaatcagaagagaaatgatcaaactgtctcctgccaagtaagcat

SEQ ID NO: 359479 - DNA, 122 bp, Homo sapiens
ctgggcggaggagccttggctggggactgcctggaaacgggctgggcctgcctcggacgccgccggtgtcgcggattctctttccgcccgctccatggcggtggatgcctgactggaagccc

SEQ ID NO: 359480 - DNA, 122 bp, Homo sapiens
gggttggaggcgcagcgccgcggggcccaagcccgggtctgccagcgcgacgtcctctcgcggccctcagggcacagcccaaggctgtcagcctcccggcccaggtgagcgcgacggcactg

SEQ ID NO: 359481 - DNA, 122 bp, Homo sapiens
attttcaggggtgaggtgaaacgtgttagctattggtgatgtgaatttgccacgactgtccgtatgtgtgtctgtgtgtgtgcgtgtgtttgggggagggggttagtggtgttgcagagagg

SEQ ID NO: 359482 - DNA, 122 bp, Homo sapiens
cggcgcccatcccaagctgccagggcctcgataggcagggcgcggcaggtgccaggaccacgtgcaggctgcagagcacggcccgcacgctccgcaccactcgcagcgccatgttcccaggg

SEQ ID NO: 359483 - DNA, 122 bp, Homo sapiens
accttccccctcagttttcccattagcaagctcctggacttttttctgggccaggagattcgcactgtttacaaccgggagaagctgatggagatgttgaaggtgacggagccctataatga

SEQ ID NO: 359484 - DNA, 122 bp, Homo sapiens
actccattattattaccacagtgattgtctagcctgatttatatgttttaattgccttgacgaagaacaaaggggtcaaatgcataagggcagaaagctacacatttctgtctgaagcagtg

SEQ ID NO: 359485 - DNA, 122 bp, Homo sapiens
cagggtctcccgggctcaagagatcctcccgcctccaccttccaaattgctgggattacacgagtgagccaccgccctgccctggctctagatgtttaaattcatgtactccgcacatcaac

SEQ ID NO: 359486 - DNA, 122 bp, Homo sapiens
tacatgcgtttctagtgatgcataggacacggagtggaggagcacgtttcctgagggaatcgggagtcctctggaatctggaactctgctctggctgtgctgtggtgaaggtgccactgggc

SEQ ID NO: 359487 - DNA, 122 bp, Homo sapiens
gtgtgggggcctgctcctggtgggctgttgattgcatcccggaagccacatggcctaggccgttttcccctttgattggccaaataaatcacatcatctcacctcagtactcttcctctctt

SEQ ID NO: 359488 - DNA, 122 bp, Homo sapiens
ctcagagtagcccggctctctgaacctccaggctactgcagctctgagtggggagagggacgggccgtggcatgcacatcaggttgctggcctgcctccagataccatgccacagagctggc

SEQ ID NO: 359489 - DNA, 122 bp, Homo sapiens
ccgggcagcgggggaggccgggggcccgttccctccctgcagccccgcgcccgcttccagcgctgttcgggccgctccctgtcttcctgcagcccacagcccactgacagcctcgtgctggc

SEQ ID NO: 359490 - DNA, 122 bp, Homo sapiens
aagcccagcggaagaggactccggaaaagtgactatctcggaagaccagggtagagctcccgggagaaaaaggcgaagatccccggccccggatcgccatccccttccctggcaccagcttc

SEQ ID NO: 359491 - DNA, 122 bp, Homo sapiens
ttctgcccagtaaagacccatcagcctgtgcttggggcagagaggtgtggccctgtcttccggggacaccaggccctgagcccaggtgctgtgctccccctgcaggctgcgtccagttcctg

SEQ ID NO: 359492 - DNA, 122 bp, Homo sapiens
ttcctgcctcccacctccccctagatgcaccctccgaaagcagtaatttaaaggcacagtcggcagcagctggagtggggttcagagcctgcccgtgtgccagggaggagcttgggctgcca

SEQ ID NO: 359493 - DNA, 122 bp, Homo sapiens
gcagcgccgggtggcgtccgtgttcccacgtcctcggcagcgctgggtgacacttggaggcgtccatgttccagcgtttggctgctgtcataggtgtgtatcggtatctcatgattttttat

SEQ ID NO: 359494 - DNA, 122 bp, Homo sapiens
acagtgacctccaacaccttttatttagtgctgcaatacaccgtgtggtttgacggcacgcggaacatatcacgtgccaagccaacaccttaagagggtgggaagctttgaaaccaggaaga

SEQ ID NO: 359495 - DNA, 122 bp, Homo sapiens
gtatcttgtaataatagctgagatgcatggagaaccacctctccttcaggcgctgctcctcggcttccgtggacgggcatggctatttctcggaaccctctgaggttagagctgtcatggtc

SEQ ID NO: 359496 - DNA, 122 bp, Homo sapiens
ggctctcccaaatggagccttgaaccaggagttctcttactggaaccatcaacctcaatacggccccagacctttctggagaaggcgggggtggagagaataaagagctcttttgcgcagcc

SEQ ID NO: 359497 - DNA, 122 bp, Homo sapiens
cagcaggggtccccaatccccgggctatggtccagcaacagtccatggcctgttaggaaccgggccacatagcaggagataagcggtggttacagctgctccccatcactcacagtactgcc

SEQ ID NO: 359498 - DNA, 122 bp, Homo sapiens
tgttccgaacaggaggggcacggccaaataagaatacaacttcagcaggaaagaatattccgtttctaacacgcgtaataaaatttctactctccagagagaatgtctgaagcattgaagag

SEQ ID NO: 359499 - DNA, 122 bp, Homo sapiens
ccccaccacccccatccctgcgaggtggtccggccgtaaccccctccccccatccccacgcggtggtctggccctaaccctgtcaccgcatccctaggggggtggtccggccctaaacccgt

SEQ ID NO: 359500 - DNA, 122 bp, Homo sapiens
ctggggggtgcttaagtcccgcggtctgctctacaagggcgtctatgaaggttggtattgcgcttccgacgagtgcttcctgcctgaggccaaggtcacccagcagccgggcccatcggggg

SEQ ID NO: 359501 - DNA, 122 bp, Homo sapiens
aacacatctctatctgcccaaaccaccactggtggccattcagttatgggcagccctacgcgttcccgagtgaatcatcatggtgggtaatactcgtatctctgatgcatttagtgaaaaca

SEQ ID NO: 359502 - DNA, 122 bp, Homo sapiens
cccccgaagctgcttcttagaccaaaggcttgctccttgcaaaagactgaacagctgcatcgtttcctaggtaagaggctgcatacgaagctttagaaggctaaacgtggctggcccgggaa

SEQ ID NO: 359503 - DNA, 122 bp, Homo sapiens
atagccacaggagaaggctgattccagcccggagtgggagatggaaacctcgccctgagccggcccagccctccccaggccatccaaagggagtgactgttttcaggggaacaaacctcacc

SEQ ID NO: 359504 - DNA, 122 bp, Homo sapiens
caagctcgcgtagactcggcctggccgccgctcccgggctgccgagtggaccggccgtttcgccgcttcaaaggctgtctttgttttgctccagctcaagcttagagaaacttaagccaaca

SEQ ID NO: 359505 - DNA, 122 bp, Homo sapiens
cctcttctgctcccttcacaacactgtcagagcaatggctatgttgaggagctgagctcgcgggtgctatatttaaccagtgttctcagcaagtcaagcctgtcaacagctgagaagtttgg

SEQ ID NO: 359506 - DNA, 122 bp, Homo sapiens
aagacgcctgcgggagatggcacacctagctaggaccccatactgggcaggcgatccttccgagcatgagcacctggcgctagcgaaccacaattcccagcacgccaggcgcccgtttccgg

SEQ ID NO: 359507 - DNA, 122 bp, Homo sapiens
tccagagcagcctggtccaaggcgtctggaaacggaactccagtgaggcccattaggctccgcgggaaagccgagacccgctcagggagggactgggtacgccgtggtgggcagcgtggctc

SEQ ID NO: 359508 - DNA, 122 bp, Homo sapiens
cccctcctggcctgtttacccgggagcccagcaacaaatgggagcttctgtgctgctgtccgtgcatacggcccaggagccgggctcatccccgagacgccgtgttccctcccgctgtccgc

SEQ ID NO: 359509 - DNA, 122 bp, Homo sapiens
gatcaaaattaggataggcaggacatggaaatttatactccaagcaactcataggaacttcggtgcatgtccaagtcagtgatggcctcagcacagggtctgagctccccaggtccagggga

SEQ ID NO: 359510 - DNA, 122 bp, Homo sapiens
cctaaggaagggcatactcccaaattacacctcaaatgtaatattggaagacaacagacccggcaaatccttttggcctgatttatgaatttttaaaattcagatatttgatttatcttaaa

SEQ ID NO: 359511 - DNA, 122 bp, Homo sapiens
ttagcttctctattcttccttttttcacacctcacagaggatgctggtgggagaccatgacgccatcctgggattccagctctaaatctgtgatttagggagttagttgggtatatataact

SEQ ID NO: 359512 - DNA, 122 bp, Homo sapiens
aaatgatgtaacttgtgccagtgttatgggaagttaaagatccatctacaagggttaatacgcccttgtttgttacatgagtaggaggatttcacccatttagattagctcagcatttaaag

SEQ ID NO: 359513 - DNA, 122 bp, Homo sapiens
gagggccgcgggaaagtaggcgacagctattcaaagcttttgggggtctacctttgtattcgttgctccctcagaggtggaggtgaggggaaagtgaagtgtagtggttccactctgatcac

SEQ ID NO: 359514 - DNA, 122 bp, Homo sapiens
gcacacccacaaccctcccaggagcagccgctcccggcccctcccactgcccgccttgcccgggcggtgacctaaaacaccagctccagagacacacgccccaaacacaggccactctgagt

SEQ ID NO: 359515 - DNA, 122 bp, Homo sapiens
caaactcctgagctcaagtgatcggcctgcctcggcctcccaaagtgctgggattacaggcgtgagccatcgcacccggctgtccgtcaatattgtcaaacgactggacagcaggcactctg

SEQ ID NO: 359516 - DNA, 122 bp, Homo sapiens
tagggatgtcctggggcttgtggaaggcccagtagaaggaggcaaaggctccagcgaggacgcattggcccagggccagtacccagttaagggtccagaagagccccaggaccccatagatt

SEQ ID NO: 359517 - DNA, 122 bp, Homo sapiens
gatcagcgttctgtttctcagatccatgtgctggaatgtggctgccccacagctcccaggcgtacacagattcccctttcagcagtcaacttgcctttcttttttttcttttctttttcttt

SEQ ID NO: 359518 - DNA, 122 bp, Homo sapiens
tgtgtgtgtgtgtgtgtgtgtgtgtgtgtgtgcgcgcgcgcgcaggaggctcctcgtttccgacgcctgattctggagggggtgtgaagaacaaagacaagagccccagttgcaatttctga

SEQ ID NO: 359519 - DNA, 122 bp, Homo sapiens
cgcctaggcctgcgcgggtcaacgcagcttggcggctgcgagccagcgagcggcgcgtgacgaagagcctgagcgacgggtcactttggccaatgatctgcagccgccagggtattgcagcc

SEQ ID NO: 359520 - DNA, 122 bp, Homo sapiens
ctccccgtcctccgcagccgtcaccgccggccgtcgccgcgccctggcctcccgcactcgcgcactcctgtccgccgcccaccgcccacctcccacctcgatgcggtgccgggctgctgcgt

SEQ ID NO: 359521 - DNA, 122 bp, Homo sapiens
ttttgagctctggaactccaggctgtctgtgccgaattcctaccagccaagcaggcggggcgcaggctttgccgattatgaaaaagggcacgtgtgtccaacggctgcggacttgccacgcc

SEQ ID NO: 359522 - DNA, 122 bp, Homo sapiens
agcgcgcccagacccctcggggctgcggggcggaagccggggcgtgacttccggcgccgccgggtgtggggcggaggtgtggggcggcttccggagaacccagcggcgcgggactggggcgg

SEQ ID NO: 359523 - DNA, 122 bp, Homo sapiens
tcacgtcaaggagttttcagtccctccctagatacaggaaaattgagacctctttcagaacgggacaattccacttgttctggagctcagtgggtggagtttgaaaaagattgcacaacgaa

SEQ ID NO: 359524 - DNA, 122 bp, Homo sapiens
tgtaaattccaatttgaccttaagcatttgaacatagattaaatggaccttaatcccaaacgcttattggaagtttcggggtcaagaatgaatgtttgttttattttggcatttgtcttgat

SEQ ID NO: 359525 - DNA, 122 bp, Homo sapiens
aaaaaaaaaaaattagccaggtgttgtggcatgcgcctgtggcaggagaatcgcttgaaccgggtggcagaggttgcagtgagccagatcacaccactgcactccagcctaggcgacagagc

SEQ ID NO: 359526 - DNA, 122 bp, Homo sapiens
acttccctgatcggaggaaaataacccaagcagtcacggcaggcgccgccaggacgaggccgccacggcctctcttcttcctgccactcctgcccagtccttccgtgggggccactcgagga

SEQ ID NO: 359527 - DNA, 122 bp, Homo sapiens
cataaaataattccattataaaaaaatttctattataaagtgggtctggcccttgaattccgcggaacgaggtggtgccaacgctgtgtttcaacccggtcactaaacatccgcgagcatcc

SEQ ID NO: 359528 - DNA, 122 bp, Homo sapiens
ggggtaggggcgtccggcctgaagcccggtccccagccacggccttccccgcaccgcccgcgctgcgcccggctccaagcccctccgctcccgccaggccagtccttccggcccgggccgcc

SEQ ID NO: 359529 - DNA, 122 bp, Homo sapiens
caaattgaaaacccctggagtggatgccccatcttggcttgaagaacagtaaaatcacagcggaaaataaaaagaaagtcgcgttgttatatttctaaaccaacctaacaagaattaagcag

SEQ ID NO: 359530 - DNA, 122 bp, Homo sapiens
tgcagagacgaacggtgatctgtgacccggtggtgtgcccaccgcccagctgcccacacccggtgcaggctcccgaccagtgctgccctgtttgccctggtgagttccccgcaggggagtgg

SEQ ID NO: 359531 - DNA, 122 bp, Homo sapiens
gaaaactacgttcagctcctggcaggtcccaggcaagtccgagccaggcttgcagggaggcgaatgctctgtcctgggaaagggaggcagaggttaagggctgttcccaccctccagtgacc

SEQ ID NO: 359532 - DNA, 122 bp, Homo sapiens
acattcacaaggggagccagcagagggccagaggcagggagctgaacccctccagcagtccgggaggtctggcaaggtaccctctgggcaggcagctcccagggccaggagcctcatctgtc

SEQ ID NO: 359533 - DNA, 122 bp, Homo sapiens
ggtgatccacctgccttggcttcccaaagtgctgggattacaggtgtgagccaccgcgcccggctgagaatacctgtatttctaggcaatggatgctgtagtatttagagctccatgtctcc

SEQ ID NO: 359534 - DNA, 122 bp, Homo sapiens
cgccggaggaggcaggttctgggccaaggggatgggggtgggggggaggtagggagcccgcggacaaaggaggcggccggcggcccagctgttttgaaaaatgcttcctgtttctttaaagg

SEQ ID NO: 359535 - DNA, 122 bp, Homo sapiens
ccgtgtgctcctgcggtgtgggatggtcgcggtgtgggacggtctgcggtggtgtcttcgcgttccccagggagtgtgccctgtgcatctccatggtacctgaagtccaggaagctgcctgc

SEQ ID NO: 359536 - DNA, 122 bp, Homo sapiens
cacactcacccgtgacgcccacagcagacactgggcccacgcgccgcccctcgtggaggccgtacaggtgcatcttgtacttgcgcccaggctccaggccccccacggtgacttcactctcc

SEQ ID NO: 359537 - DNA, 122 bp, Homo sapiens
tgtggtgccgtggtcagtgagtctgggggcgtgtgtgtgggtttccgtactacatatccccggattttctagtgtccacattctcaacagagatttccatcaccgttgcagtcctgttgcag

SEQ ID NO: 359538 - DNA, 122 bp, Homo sapiens
gattggacgatccgtaaacgctgaggcccagtctgtgcggttcacttgcgttcctccacgcgccccccagcacagtgggaagcacacagtaggtgctccgctctgctcctgtgccccgcccc

SEQ ID NO: 359539 - DNA, 122 bp, Homo sapiens
agggaacaggcaaaggctcgggaggcaggagacctgtgatctagcctggttctgtccctacgctcgggtcagcaggccgcccaggctggggagggcgacactgaccctcggggtgccggccg

SEQ ID NO: 359540 - DNA, 122 bp, Homo sapiens
ccgcgcggggaaggattcccgggaggcactctgcgccgctcctgctgcaccgctccctgacgtcctggtggggaggctctgaggacacagcgttgctcataataatagctcgtatttattga

SEQ ID NO: 359541 - DNA, 122 bp, Homo sapiens
tctgtcaatttcacttggatttacagaggttttgaaaaatcagaaaatttggcaacactgcgccctcagtccatgacgactgtaagtgtcaaaccgcggctgcttcctgaagacactgtctg

SEQ ID NO: 359542 - DNA, 122 bp, Homo sapiens
ttctgacctcccgaggtcccccaaaatgtggattacccctgctcactctcccccaacccccggccccttatcgatcctctgaccatacatctctgggtgtgtcctactcttgctgacacttc

SEQ ID NO: 359543 - DNA, 122 bp, Homo sapiens
acctggagacgcagttcacgtccaggctcttccactgtggaatcttgggcaagtcagtaacgagcctcagtttcctcacctgcaaaacgggtacagcattcctgtatgatagctcacgccgt

SEQ ID NO: 359544 - DNA, 122 bp, Homo sapiens
taggttccctaggtatgggttttatagctccctgtacttcacatcaaaggactcatcccacgtgttgaaaacaaagtacctaacacaaagtcctggggtacacagaaggcactcaaaaaata

SEQ ID NO: 359545 - DNA, 122 bp, Homo sapiens
ctctctccccttctctgctggcaggatgggcaacactccagattcagcctcagacaacctcggtttccgctgtgctgcagacgcaggccggccgccaggggagctgtaagcagccgggtggt

SEQ ID NO: 359546 - DNA, 122 bp, Homo sapiens
ggagtttagaccactcctcccggcgccgggctcagcccgccttcgccttccctctccccgcggaaccccttctcgtcgcccgaagaaacccgaaggtcttcggcaagttccgtccccagcgc

SEQ ID NO: 359547 - DNA, 122 bp, Homo sapiens
tgagggggagtgagggacgatctcggcttcagatttcactctggctgaggatatctggaacgatcgcatcgtattaacaattgtatgtttacctgtggatcactcccaattagtctgaaagc

SEQ ID NO: 359548 - DNA, 122 bp, Homo sapiens
gatctccctgctgaagcagcagctgaaagagtctcaggcagagctggtgcagaagggcagcgagctggtggctctgcgggtggcgctgcgggaggcccgtgctacgctgcgggtcagtgagg

SEQ ID NO: 359549 - DNA, 122 bp, Homo sapiens
agcagtggaaggagaagctggctgaaaaagcacacccaacaacttcccagtcacagcaaccgaaacgttcactgttcacatttttttttaaagacacacgtataggaaatatattttcccaa

SEQ ID NO: 359550 - DNA, 122 bp, Homo sapiens
aggatgaggcaggagaattgcttgaacccaggaggcggaggctgcagtgagctgagatcgcgccactgcgctgcagcctggcaagagagcaagactccatctcaaaaaaaaaaaaaaaaaaa

SEQ ID NO: 359551 - DNA, 122 bp, Homo sapiens
ccgcctctgctcccttcccctcactccatctgattcggccccgtttccttgtccactccacgttcttctgagcgtgtctctgggacatggttaaggttaagaagcggcctctgaacgaggga

SEQ ID NO: 359552 - DNA, 122 bp, Homo sapiens
gctggggagaaggggaagcagtgaggagactgactgatgtcctgatgcccatgccccacacggcggtcatgaagactgagtggccccatgtccagaaagccctcagcacagggcctggcact

SEQ ID NO: 359553 - DNA, 122 bp, Homo sapiens
ttttctacgactcgcggtagctcaggcagagcgggttcctgcagcggcgcgaccctctgacgtctccgcttctaattggtcaagagctgcgactgcagttctgaagcctaactggttgcccg

SEQ ID NO: 359554 - DNA, 122 bp, Homo sapiens
attttatatgatattttgagtaattttatgcatgaaacaaagttttgacaggcttttgaccgtgattcatcacatgagttcaggcatggaaattttcatttggagcatcatgtcagcactca

SEQ ID NO: 359555 - DNA, 122 bp, Homo sapiens
tggaccctcgcggtgagtgttacagttcttaaaggcggcttgtccggagttttttccttccggtgggctcgtggtctcgctggtttcaggggtgaagttgtagaccttcgcggtgaatgtta

SEQ ID NO: 359556 - DNA, 122 bp, Homo sapiens
tcgtctcccactgaatactggactccatctgaacagttaactgccacaattaactacatgcgaacctgaggaaggtcagtccaaaacaaacaacgctactaaataagatagaaattttcccc

SEQ ID NO: 359557 - DNA, 122 bp, Homo sapiens
cagcgaggatttcagaaggggctcacctggtgcaggaaaagttcagttggcagcccttcgcgagcaggtcctccccagcccgcaccgagaaggcaggcgcccgggccctctgactccagtgg

SEQ ID NO: 359558 - DNA, 122 bp, Homo sapiens
gcggaagtgggaactgcacctgagcgacagtactgcaaaccaataggcagccggccacggcggtcaggcgccttcggtcgcgtctggaaagcaccaaccaacggtctaaggggcgggccgga

SEQ ID NO: 359559 - DNA, 122 bp, Homo sapiens
ggtttaagagtcttttgcatttgttctgtgacacctttttttgaattgactgttttaaaacggaggcctattttttccggtttgggactcctagtggttatggcatcccataatgcttcgtg

SEQ ID NO: 359560 - DNA, 122 bp, Homo sapiens
ttgaactcctgacctcaggcctcggcctctcaaagtgctgggattacaggcgtgagccaccgtgcctggccgacgaacaccattattaaccctagagacatgatgtaagaacccaaccctta

SEQ ID NO: 359561 - DNA, 122 bp, Homo sapiens
cgacagctgacttgctgagaggaggcggggaggcgcggagcgcgcgtgtggtccttgcgccgctgacttctccactggttcctgggcaccgaaaggtaaaattgcagcccctttcagatcca

SEQ ID NO: 359562 - DNA, 122 bp, Homo sapiens
tgggagcgacaacggtgttatccaatgggccgacagctggagccgcccctggccaatgggcgcgctcctccgcgatgggcggaagtggtgaggcagctctgagggccgttgttcagtgcggg

SEQ ID NO: 359563 - DNA, 122 bp, Homo sapiens
gtttattaacattatctggtcgtgtgtgctgtggacgatcacgtgtgctggacttgtgcccggctggcagcgctgtggacttgttcacgctggcgtcacacaggggcgggagccatgcgttg

SEQ ID NO: 359564 - DNA, 122 bp, Homo sapiens
gtgccgcaaagtcctgcagtgtgtgccattgagaggtgaagccggctgggcttctgggtccggtggggacctggagaacttttctgtctagctaaaggtttgtaaatgcacccatcagcact

SEQ ID NO: 359565 - DNA, 122 bp, Homo sapiens
gtggtgtgcgaggtgtttggacgagaccaggaggaccggcactgggccaccatctgggagcgtctctctcacacctccctcggtgacggggagggaaggagggccgggcccccaggagcgtc

SEQ ID NO: 359566 - DNA, 122 bp, Homo sapiens
gcttctgaaggggtaagacttagaaagaagaaagtagtgttatatgactctgaggtttcacgtcttagagatttggtgaatcagtgaactcattaactataacagagaatgaatatgtaaga

SEQ ID NO: 359567 - DNA, 122 bp, Homo sapiens
agttctcccttgggctgggtggacagcacgccgcgtgcactgcccagggcgtgaggaccacgcacacctgtctgggggatgtggagacctggcgatcaggagcctggaagatgcagaaagtc

SEQ ID NO: 359568 - DNA, 122 bp, Homo sapiens
ctctctcggaagccggatcccgagccgggcaggatggatcaccaccagccggggactgggcgctaccaggtggtgagttcccggcctcctgtgcctcccgggactgcctcccgccgcggcgt

SEQ ID NO: 359569 - DNA, 122 bp, Homo sapiens
tgccggccaatcgccgccgactgagaggcgactattggaggaagcgggatgggcggtgcccgcgccgggccgctaggggtgcggggttggggaggaggccgctagtctacgcctgtggagcc

SEQ ID NO: 359570 - DNA, 122 bp, Homo sapiens
gatctgtgttcctgccgcagtctcacgtggaactgcagtccccagttttggaggtgagagcggatgggaggtgaatggatcaggggagtggatttttcacaaatggcttcgcaccattccct

SEQ ID NO: 359571 - DNA, 122 bp, Homo sapiens
tacttggaatgtgagccggatccaggtgagcccctccctcagctccagacccctcctgcccgaggccctcagctgctcacagcacaacacactctcctggctccatctgcttcccttgctgc

SEQ ID NO: 359572 - DNA, 122 bp, Homo sapiens
gcttcctacgtagagccctaacctcctttgtagcgagggcacttgagaatttctgaacctcgagttgtaatggagctgtatggaaaggtaagcaggcgaaaggagttccttggggtgcttag

SEQ ID NO: 359573 - DNA, 122 bp, Homo sapiens
gcaattgtttgacatgtctttcctgaacctgactcatttcgctgagctgatacaacctctcgtttttacagaaagtgctctaagctacaagagaaatagcctccctatcggccttcctatat

SEQ ID NO: 359574 - DNA, 122 bp, Homo sapiens
ttttcaccccggcccggacggctgggcgtcgaggaaaggcgagctagtgtccatcctcagcgcaggcgcggtgggaggcctagcgcgcgcgcctccgcgggtggtcgcctggcagggaagtg

SEQ ID NO: 359575 - DNA, 122 bp, Homo sapiens
aacactttgtaaactgtaaggttttactaagctgtaaggagaaatgtttttatcattagccgagggaaggtaagagcccctcaggatgggtgagcagcccctacttgcatacagatgcaacc

SEQ ID NO: 359576 - DNA, 122 bp, Homo sapiens
agatgcgcacagaaagccccatgctggagtacaccaagacacgcacacacacacacaccacgcacaggtgccagggccatgccagccggatgagagacctgtgcactgatacatacgtcccc

SEQ ID NO: 359577 - DNA, 122 bp, Homo sapiens
tatatgggcaaataaaaattaggagcactgtccaactgctcatgtctaacacatcttttccgctgcttttcctgtgactgctttctactggcttgcatatattgttcctttgttgcatggat

SEQ ID NO: 359578 - DNA, 122 bp, Homo sapiens
tgtctcacttgtttcttatggcagataaagatggcttatccatctcttaggaacaaagcacgccactttagacagtcacaaacatgaacgaccttatttaggaatcaggtgcctcagagaga

SEQ ID NO: 359579 - DNA, 122 bp, Homo sapiens
gcgcacgtccgcagggccggcgcggcaacgggctgagcgcgcaggcgcggcgctctggcgcgcccagggacacagtccggctggaaacaagctccccccaatttcagggccgttgtcgcctc

SEQ ID NO: 359580 - DNA, 122 bp, Homo sapiens
ttacttttgtttttgagcagaggtgggtaacgtttaggggttctctcttcctcttccctccgtgaccctcctaactggggacgagcgaaccctaaggcctgtcttatataccctcaatagga

SEQ ID NO: 359581 - DNA, 122 bp, Homo sapiens
gtcacctgggatgggggcatccaggagtccagcgtcagccgtcaaggctcatgatctaaccgcctctgcaggaagggccgtccgggatgcctgggaaggcagccatgcccacacccctaggg

SEQ ID NO: 359582 - DNA, 122 bp, Homo sapiens
ccctccatgtcctgcacactctggacaccagtggcagtcaccaccacttgtagttactgtcggggcacaccactgcaggctctagagccagacagacccctggggttcaaatcccagctcca

SEQ ID NO: 359583 - DNA, 122 bp, Homo sapiens
ttgaaataccgtttccttccacccagttggaaattattctgattgtttcctggggaagcccggggtctaaggccccaaatccaaacgaggaatttctgaaagacggggtgggggtgggattc

SEQ ID NO: 359584 - DNA, 122 bp, Homo sapiens
gcggccgaatggggcggaggagtgggttactcgggctcaggcccgggccggagccggtggcgctggagcgggtctgtgtgggtccgaagcgttttactcctgttgggcgggctccgggccag

SEQ ID NO: 359585 - DNA, 122 bp, Homo sapiens
gcgagaacctttcacagggagtggagggcgggcaatagatggtgtagcctgcacggagggcgggcaaaggtgtattggccacctaggggagaaaagggttaacaaattgccctctgagaaag

SEQ ID NO: 359586 - DNA, 122 bp, Homo sapiens
ctccagctttttgtcagtaagactaactttcccaaccgttctggatgtaaatccgtgtaccggcaagagtcctgactggctctgatggtaccccggatttgggaccgggtgagcttggctcc

SEQ ID NO: 359587 - DNA, 122 bp, Homo sapiens
tttttccagcgcctttttctggccgctccagcgagggagacgccatttgcaagctgcttccggtggctccggaaatgaaactgttcttaaaccctaccggctaaaacgcctacactcaaaat

SEQ ID NO: 359588 - DNA, 122 bp, Homo sapiens
accatggtaaacaaggggtggagtccctgcacacagctggctaggaacatgtgactgaggcgccactgccatctggcggtcagattctctcctgagcagtgacccagcttcccacaggctga

SEQ ID NO: 359589 - DNA, 122 bp, Homo sapiens
atacatcatatttgcatgaaaaccacctaaaattactatttagtaaggccccaccttcttcgcttttcaggtagtcccactttactttctttaggagtccctgctgggtgatctttctttca

SEQ ID NO: 359590 - DNA, 122 bp, Homo sapiens
aaaactctacccctctccccgtggccagccaaggcctcaaagggcgccacctggtcacatcggcagcctccgtgtgagcaaggacacagagcccacaccccaaacggaaaaaaatcaacctc

SEQ ID NO: 359591 - DNA, 122 bp, Homo sapiens
tggttcaaactggtttgggcagggtgcggcctgggcgggctgcattccaggcctcaggctcgcggctgtccggggcctccccaagggctgcggacctagggcagggagcagcaggggcaggg

SEQ ID NO: 359592 - DNA, 122 bp, Homo sapiens
gttgagctctcctgtctcacatctcctttgccacgggtgctgtgctgagttgggggaaggcggagagactgcttgaaataatggcagcattcgtatcccagagtaatttaatagcattatct

SEQ ID NO: 359593 - DNA, 122 bp, Homo sapiens
aaaagctagcttccctgcctgttcctagagaaggcacagcaggagaggaaaaataaataacgttcaaacaaatgtgtataaaagctaaacaaatgttttcagctgtttcattctcacttaca

SEQ ID NO: 359594 - DNA, 122 bp, Homo sapiens
ccagcaacaggcttctgattggcccgaggcttccaaaggcggagcttcgtctcccgcgcccgctcgactgtgttgctgttttggttgttgtctcccacttgtttatttctctaacagatcct

SEQ ID NO: 359595 - DNA, 122 bp, Homo sapiens
cagaggggattaaggagacatcgcattccggggccaggagcatcactgtcccctgcaggacgctgcagaacctacagatacatacaggtgcacccggcttggccctggacccccagacacac

SEQ ID NO: 359596 - DNA, 122 bp, Homo sapiens
gctgccaaacgcttctctccatttctggccgcggggccgcggaccgccctttaagtagcccgttttatccctggcagaggtggagccttaggcaggcctagagactttcccgggtcctccag

SEQ ID NO: 359597 - DNA, 122 bp, Homo sapiens
ctgaggaggaagaaaactacatttcccacagaggcacgggggcgaacaccggccgggctacgtcattgcttgaaccaaccaatagcagctccgggcggcagtgaggcaagcgcctcaggcgc

SEQ ID NO: 359598 - DNA, 122 bp, Homo sapiens
cgcggcgcgggcccggggagcctggggctggcgggggcagggcaaccgcgagggccagggcgggggcggctccgcccaggccgcgtagccgcccgccgccccgcccgtcctcccgcccgcag

SEQ ID NO: 359599 - DNA, 122 bp, Homo sapiens
atctccgagtaaacatttcagtcctaataaacaggagagacacgggcgtcagggctctgtcgattcccatcctgatttaggacctgcctcccttcttaccatacaataggagagtgttttaa

SEQ ID NO: 359600 - DNA, 122 bp, Homo sapiens
ggaccagggcttcacttggaaactgaccggagtgcagaagcagcacctcggggaggaggccgcagccctctgggcctcccggttctgtgtggtggggacatcagcccagaagattaatgaga

SEQ ID NO: 359601 - DNA, 122 bp, Homo sapiens
agggaagaaaaatgttcagagtatgtgatgaggtcacccaagggggcagaacaatacatccgtgaaatcagttttctcaactttcaattatgccctaccacttcgattcttatcatcctaaa

SEQ ID NO: 359602 - DNA, 122 bp, Homo sapiens
ccacggggaagggggcggggccgttcccccagccggctaccgtgcatgagggggtgggaccgtggcccccgagccccgagccctgagccccggctgtagccccccgctctcctatggtgctc

SEQ ID NO: 359603 - DNA, 122 bp, Homo sapiens
aaatgggaccatattcctcctctgcccagaaatctccacagctggacttctgtcggtatgcgtatcaccactggaatgtatggcaatgtgccaggagagttccagaataaacatggtgactt

SEQ ID NO: 359604 - DNA, 122 bp, Homo sapiens
tgcccctttcccaccgggcccaggctcctggcatcagaaagctgaacccagtatctggcccgggctgtgtgcttccagcctcccctcctctcgacaccagaacagagcctggcccccagctc

SEQ ID NO: 359605 - DNA, 122 bp, Homo sapiens
gggggaggaggagcggggacggcagggaagaaggatgagagaagaagaggcacaggcaggcgtccaggccctggtacctggaataccagctgctacagtttagagagtgctctctcaggcgg

SEQ ID NO: 359606 - DNA, 122 bp, Homo sapiens
aaacgaatcggattctagcctgctaccaaggctaaaagcgaagggctgtggggacccagccggcaacactccccagagcccacgtgctgcgttaagggcagagcccacgccaggcaggaagg

SEQ ID NO: 359607 - DNA, 122 bp, Homo sapiens
ggggctgcacagggctggaggtggcagcgggagcttcggagaagtggagcgacccaaaaccggattgtgggggtcgctgcggaactctgtaaatttgctaaaatcattggattgtacattta

SEQ ID NO: 359608 - DNA, 122 bp, Homo sapiens
caaattcctgatttctcagggagaaaaggcaaagtgtcttagcagcctgatgcatgtcttcgaaaaagcttaacaagtattcccggtttgtggtggagcatgggtatgtgtgcacacataca

SEQ ID NO: 359609 - DNA, 122 bp, Homo sapiens
tacaattcccagaatgcgttgcacccaggtccctcagctcttccggaaaggttttgttcgcgtaactttgttgataacaggtactgctggctgctgggtctcttgggcaagacacaggtatc

SEQ ID NO: 359610 - DNA, 122 bp, Homo sapiens
tcgcacattggctggaagttggctggttttccttccccattttctgacccaagcgatttgcggatcccggggagaatctggccgcacacatggcggcctgaaacgttcctccgaagtctgac

SEQ ID NO: 359611 - DNA, 122 bp, Homo sapiens
ttctgccgaggaggcgctcccctcccctccgcccccggggccctgcagggtgtgcggcggcggtcgtggttatttagacatctttatctctcgtgagttggatcgggagaggatcgcacggt

SEQ ID NO: 359612 - DNA, 122 bp, Homo sapiens
ttctgcagctagaaagacttgagttagacaagcagcagcacacgcctccctacctcatggcgacagaaaatggagcagttgagctgggaattcagaacccatcaacaggtgccaagctgggg

SEQ ID NO: 359613 - DNA, 122 bp, Homo sapiens
tccggaccccagctccgcctgccgctctggatgatgcaggactagaggcatcatcgccatcgccaccgcctccgcgcatcccgggagccgcggcaagacgcgggcgcagaggcgcagtcacg

SEQ ID NO: 359614 - DNA, 122 bp, Homo sapiens
cttgcaggcacatggcagctggagaatagggcagtaatattgggccactaatacacaagacgagattaaatggtttgaaatattctgaatcctggttttctccgagcttagaaaatgaccta

SEQ ID NO: 359615 - DNA, 122 bp, Homo sapiens
tcttctcagagaggagaagtcacaaacctgtgtaatgtaattatagaaatgacatcttatcgtctttgccatattttatcgattaaaggcaattcacagggcttgcctttattcaagtagaa

SEQ ID NO: 359616 - DNA, 122 bp, Homo sapiens
aaatcaattgacaaatattcatatgcactctcatagcaccgacatgtaagcaaatggccacgttgtgaattttgttacaaccacagcttctcaatactacatcatatctccctcctttgggg

SEQ ID NO: 359617 - DNA, 122 bp, Homo sapiens
agggcctcagccttgggatgtcttcctggtgggttcatctcccgcttcaggctctggccccgcgcgagcctcttgactagaatattggcgcaggggctctggagacccgggcctcccgctgt

SEQ ID NO: 359618 - DNA, 122 bp, Homo sapiens
gagggtctccgctcagcccatctgcggtttctcacagtgatagtacttcatccacgcagtcgctgtctcatggaggggcgccagagctgttggtggggctctcgtacaatgccacaacgggg

SEQ ID NO: 359619 - DNA, 122 bp, Homo sapiens
gaagccgtgcgtctccacgtgcaagaggaactggagcgagctccccgacgaggagcgcggcgagatctacgtgccaggtgaggctccaaccgccctccggcctggggcacccgcggcggcgt

SEQ ID NO: 359620 - DNA, 122 bp, Homo sapiens
ccaggggctggccgtcaacaccggtgtgcaggccactacgcggcaaggtgctgagaacctcgtggggtctgcgtccggaggcaggtgggtggtggctctgggtgggctacaggctgtgaggg

SEQ ID NO: 359621 - DNA, 122 bp, Homo sapiens
atttgagtggaaggcagagatttctagcaccctgtcccacatcccggccggaggcacgtgcggtgcaatcacgggcctgttcccacaccaccaccaccgagtcgacggcttacctgagggtt

SEQ ID NO: 359622 - DNA, 122 bp, Homo sapiens
ggtaatactttatctttctcttccgtggcttctcagcagcattggcattctgagcacttccgcctttgtgaatcattgtttaccttgggcttccccgtcttccttacctatctgtctgcttc

SEQ ID NO: 359623 - DNA, 122 bp, Homo sapiens
ctacgtggctgttcagaggctccctccctgctgaatgctgaataggaagtgagtgctgctcgctccgcagctttccgcagtaaggaggaggggggaagggggctcaatcccgccccttcccc

SEQ ID NO: 359624 - DNA, 122 bp, Homo sapiens
ttcaagtgatccgcctgcctcggcctctcaaagtgctgggattacaggcatgagccaccgcgtccagctggcttgctgatttgtctgatgaattgggttcctacgttacagaaaatcttaga

SEQ ID NO: 359625 - DNA, 122 bp, Homo sapiens
cgccgacgaccccgagcgccgcttgtctgcctcgccccccggccgcccggccccggtggacggcggcgccagcccccagttcgacctggacgtgttcatctcccgcgccctgaagctctgca

SEQ ID NO: 359626 - DNA, 122 bp, Homo sapiens
ccctggaattctctctggccgcctccctctgcgctacgccatactggtgaggagggcgcgcgcccggccactctccgctctggccttgcaccttccttgcggcgctactctcgggtgtccct

SEQ ID NO: 359627 - DNA, 122 bp, Homo sapiens
taacacttctcaaatgtgaagattgggaaatttaaatttaaacctgaagaaaagcattatcggtgttgctggattgattcagactgaacaacttgtaatgagatattagcattgatatctca

SEQ ID NO: 359628 - DNA, 122 bp, Homo sapiens
ctctgccctcatcatgagaccatgcccaggctagtctgctggaaggaagtcagaggcacacggaagagagccacattcagccaaggccattctagaccagttgttccctgtcacttcactaa

SEQ ID NO: 359629 - DNA, 122 bp, Homo sapiens
actacctcacttaagcttcaggttgttttcctcgcacaacagcagtgcggagaagctcgccgtggtggcggtgactccaggaagtgcaggtggatgcacagccgtggggtgagcccgtgggc

SEQ ID NO: 359630 - DNA, 122 bp, Homo sapiens
tgggtaagatggatccagaacatggggcggactcaggcagcggcgggaatcaggcggactcgtttggaccgaagcctccgccaggcaccgaagccgtgaagtcgcctgcgcagcaaagggag

SEQ ID NO: 359631 - DNA, 122 bp, Homo sapiens
gaaattcagcataaaagtctctcccaatccccattgttactcccctcaaataggcaactccgcggactagatcctgatttggggccttcctacatcttcctttacggggtccaagaccggca

SEQ ID NO: 359632 - DNA, 122 bp, Homo sapiens
cagagatgtcagcatctctgccatccctcatccctcgctccaccccacacgcccgccgtacggaccgtctgcgacagctgctaggcctctggactagatccaggctgtcagccaaagcccat

SEQ ID NO: 359633 - DNA, 122 bp, Homo sapiens
tccaaaaaccatgttcggatagatttttgcgaactgcacagataaataggagcagaaggccggtcacctctgtaaccagcggtagcagcagcagaagccgcagcttcagaggcagccggaga

SEQ ID NO: 359634 - DNA, 122 bp, Homo sapiens
tcccggtggggaggggcgcggccggtggcgaggagggcactttcccgggtcggagaaggccggatggcagcccgccccgaaagtcccggcccgctggattgggggttcgggggtggggggaa

SEQ ID NO: 359635 - DNA, 122 bp, Homo sapiens
catttattttataaaaagcgaaaagagttagtcaaacattttgttttaaagtcagtaccacgatgtatttggacataagggtaaattactaatattgaaggtttttaatcactctgaaaaat

SEQ ID NO: 359636 - DNA, 122 bp, Homo sapiens
gtgtcatctgaccaaaccaaggcaagtctgggcagttacgcagacaccccgagaaaggtacgccaacgcccagataaaaagtaagaaaaagtaggaaaaaccctcccatcagaccagcaatt

SEQ ID NO: 359637 - DNA, 122 bp, Homo sapiens
actggcttgagcagacagaacggggaagactccactctgtcccgaggggccagccgcaggcgtccccagggccaccctgccctgaggtccttgtgtggccgccctggcttggcagccctgcc

SEQ ID NO: 359638 - DNA, 122 bp, Homo sapiens
tcattctaacatttaatgaggatgtcccagcttagaaatcacttcacatgcattaacattcgactcattacaatattgtaaggtggatagaactgacgttttatgttactttttaacaaagc

SEQ ID NO: 359639 - DNA, 122 bp, Homo sapiens
ccagcctggaaatatagtgagaccctgtctctacaaaatttcttttaaaaattagcggggcggggcgcagtggctcacgcctgtaattccagcactgcgggaggccgaggcaggcgggtcac

SEQ ID NO: 359640 - DNA, 122 bp, Homo sapiens
ttccggcggcccccctcccagccttccagggcatggagctagtcctgtgtctaaaggagtcggcaggaaaaaggcgcggcaatgcgagtgggtggtcgccggcctgctcggtgccgcccggc

SEQ ID NO: 359641 - DNA, 122 bp, Homo sapiens
actcccaagcaaccagagtccggtccttccaatcaggaaagtcggaatctctgatgtcatcggtcattccaaactggcaactactttgaagaaaaacacatgtaactgccagactgatctct

SEQ ID NO: 359642 - DNA, 122 bp, Homo sapiens
cattgctttgccatcttgatctgtcaagcagttacctctcatacatcagccaagaagtgacgttacttacatgcaatacaaagagagtaaatccaagagcagtcttattcctggattcagaa

SEQ ID NO: 359643 - DNA, 122 bp, Homo sapiens
agaaaattcagctatcttaattctattttaaatgttccgcttctccaacaaattgtttatcgtctctttatcacgctaagacaaggactctgtgggttttcagagatgcatttaatacttca

SEQ ID NO: 359644 - DNA, 122 bp, Homo sapiens
accaaacaacctgatcggccacggcgcagcaaacttttcacgcacctggcaactcccaagcgcaggagctgcaaaggagatgggaataaacaatggcaaaatggaactgtgcctgcccctcc

SEQ ID NO: 359645 - DNA, 122 bp, Homo sapiens
ctggctgtccagtgtgctggctccaccagccccaaacgactggtttccgttactgtcggccgagcctgacgtgccactcgaacattcatcatcactgccatacttgggtttgttcacgatgg

SEQ ID NO: 359646 - DNA, 122 bp, Homo sapiens
agaatattcatcatcactcctagaaaacaaattctctccagggtaagtgttatctagcagcgtcttgaagtgtcacccaccaagagtaccaaggactgaaccttggtgaatgtccatttgtc

SEQ ID NO: 359647 - DNA, 122 bp, Homo sapiens
agatttcgccatctttgttgtggtcaaggagtcttcttgggttcctgggttctttagtctcgaaatatataagacttttcgttcttcgctagtcttctgagctcgagatgaagcacagaagg

SEQ ID NO: 359648 - DNA, 122 bp, Homo sapiens
gtccccacatgcgggtggaggggccggggctcctcccggtacgtgcgggcccccggacagcggcctctcggacgtgcccttcggcgctgccaagacccgtcctggtacttgccgagccacgg

SEQ ID NO: 359649 - DNA, 122 bp, Homo sapiens
ggggtcctctctcctcgagccactctgggccgagccacacgggccgcgcccttccccctccgctccccctgagcccccaaactccgggctccacggtcgcaacgccgcgggcaccccagcct

SEQ ID NO: 359650 - DNA, 122 bp, Homo sapiens
gggggaccccagcataactcatgttgccgcaaatggagcagagttcggtaaaacctcagacgtaatttcctaacgggagccatgtcagcagcattttaactagaataacgttagactggcaa

SEQ ID NO: 359651 - DNA, 122 bp, Homo sapiens
atatccggcccttgcgatcagggcttgaggaacccgcgccatgaagtgcgtgtttgttaccgtagggaccaccagctttgacgacctcattgcgtgtgtgtcggcgcccgacagtctgcaag

SEQ ID NO: 359652 - DNA, 122 bp, Homo sapiens
cagccctggaggggctgcctcttccaaagacatgagctctctcctctcactgctagccatcgtggggactgcagccgctgcgggtcagtagtggcaggaggcgaagtgatggccatggtact

SEQ ID NO: 359653 - DNA, 122 bp, Homo sapiens
ccagcccactctgccaccttccggccaagagtccttttacctcaaggattccaagagccccgggagatccaaaacatcaaaccaaggccatggaggccccacctcgggaaggggtgctgagt

SEQ ID NO: 359654 - DNA, 122 bp, Homo sapiens
gatcaatgggaggctgaagtgaagttacaaagttatgccctatgaaaacatctgattggacgcagaaagcgaagttacaaagttacattcctatgcacatgaagacttggccctggagacca

SEQ ID NO: 359655 - DNA, 122 bp, Homo sapiens
ccggtcgttacgagcgagccccgccccgcacgccggcgccgggcgggcacactggaccagcgttcccagaacactccgcgaaggtgttcctgaacttcatttcccagaggctttagctaacg

SEQ ID NO: 359656 - DNA, 122 bp, Homo sapiens
agcctgtccctcagaacgagaacctcgcttctctctgatccccgaggcgtaagttagtggcgtcacatccggtccccggggcttccctgggttgacagcaggggcggagtggattctgccgg

SEQ ID NO: 359657 - DNA, 122 bp, Homo sapiens
aagacaagcaggtgggtgccgtggaggagccgagagccgattgcaaacaacagcagaggacgtctcctctgcgactgtgggactcccctttcctaggtgtcttttaaagcagaattgattcc

SEQ ID NO: 359658 - DNA, 122 bp, Homo sapiens
gtgccagcgcagtgagagctcgtgcaggtgggagaagatgagcagctccacccgccgagacgtgaactgctgcacccggatccacaggaaggtgcgcaggttgctcacgaagcctgcaggga

SEQ ID NO: 359659 - DNA, 122 bp, Homo sapiens
gaaatggaatggacaaggaaggcctctaggaggaggaacattggaggaggttctggagagcgtggagcagtgaatctggcaaacaggagaaagagaagaggaaaaaatgtgtctgtggcaca

SEQ ID NO: 359660 - DNA, 122 bp, Homo sapiens
tttctcatcacagaggggctttaaagaagaggctcgcagcgacaagtgcgttaactccagcgtggtttccagcacgtctcactctgctgttgcaagcagggctgcgagtgagcagtgctggt

SEQ ID NO: 359661 - DNA, 122 bp, Homo sapiens
agccataaaaagtcttgcctcgcggcatttctgtgagggtgcaacaggtggaaatgtgcacgcatgtgcccagcactgggtgtgcctcactgagtgggagccatcctccggattggttgtcg

SEQ ID NO: 359662 - DNA, 122 bp, Homo sapiens
cggcttccccgcgcccccgggctggcccgcacctcccctgatggccgctcaccctgtgttcgcagcaaatggagctgctcctggtgaacaagctcaagtggaacctggccgcaatgaccccg

SEQ ID NO: 359663 - DNA, 122 bp, Homo sapiens
tggcccacgcggtctgcctgcatgcacatctggtctgccgtctgcatgttttatctgctgcgaggctccgtgcccctggctcctgcaacaccttgccctggctctagaatactaacgccgcc

SEQ ID NO: 359664 - DNA, 122 bp, Homo sapiens
tcccattctggagtccaaagagcaggaacttgtacttgcgggccgggtccagccccgagacggcgaccgctcggaggtctccgctcacaggcactgcctggggctgcccctgcgcgtccctg

SEQ ID NO: 359665 - DNA, 122 bp, Homo sapiens
tccctctcccgtgtcagctgggaatctacgcctgctggagggggatttgcgaactttgcccgcgtgcgtggtgaaacacccaacgccacccggcccccggagaccggggtcggggggagctg

SEQ ID NO: 359666 - DNA, 122 bp, Homo sapiens
ttgtggctgaggtcagttccggcgggtgacggtgcggacgggtcaggagcgtagaggcggcggcaaaatggcggcgcctgaggagcgggatctaacccaggagcagacagagaagctgctgc

SEQ ID NO: 359667 - DNA, 122 bp, Homo sapiens
gaggcactgggcctgccccgccccgcccagttctctcctcctctccaggattttttgctgcggtcaccaagcgcaccctacttgggacagggaggtgacctgccgggagagtggcctggggc

SEQ ID NO: 359668 - DNA, 122 bp, Homo sapiens
agtgtatcaaggagtgagagtgaagcatacagtcaaagatctcctggcagaaaaacgatccgggcagacaagtaactcaagacttaatgtaagtcccaatttaatatattctgaggtgcttg

SEQ ID NO: 359669 - DNA, 122 bp, Homo sapiens
ccagatcgacctcagtgtgggtgagagcgcagtctgtgaccaccagcgcttctgactcagcggaaaacgccggcaaacaggactacacctcaccgcggcggcaaaagcggcctcagctccag

SEQ ID NO: 359670 - DNA, 122 bp, Homo sapiens
cagggaagggagagcctcaggagtctgacccccacagcacaccctcctggcagaactctgcgtgagaagaggacagcaaaagcccagccctcaccatgatttgaggctactgaggtcactga

SEQ ID NO: 359671 - DNA, 122 bp, Homo sapiens
tgtgggccaaggagctggagactgcctgcagcaggcacccttccacggggcatctcagagcgtgatccccagagcccccaaccctaacccagcacccgcaagtctctggaaggcagcggcaa

SEQ ID NO: 359672 - DNA, 122 bp, Homo sapiens
ttttctctcacctcatctccttttccttaaacgtctgttttgaatatcagacccctgtagcgttgaagccagcgctcgtttaattaatgcaggtgggaacgctgtcgccacagtttgcagtc

SEQ ID NO: 359673 - DNA, 122 bp, Homo sapiens
actccgtctcaaaaaagaaaaagataccaacacacacaacacacatcaccaaacatcatacgcgtttataaatgggggcgataggaaagggtccagaaaggatttgaaatgacttatgagtt

SEQ ID NO: 359674 - DNA, 122 bp, Homo sapiens
cgcccgccccgcccgggtcttctccacggggcgcgcccgaccggcacctccctccgagcgcggccacccactcggcctcccgcagctttcgcagcccggccacgtcggcctcgcccggtcgc

SEQ ID NO: 359675 - DNA, 122 bp, Homo sapiens
tttaaagaacttttcatatatgaaagtgttttcctcaggacagcagtgaaccagtgtaggcgtgtgattcttcaccctgggtgtcagagtgtgttttatatggattagcagcaagacttttt

SEQ ID NO: 359676 - DNA, 122 bp, Homo sapiens
cgggagcattcggactcctggtaaacctctctcagtggacagcagagctgtgcttgtgaacggccttcaggcccagcgccctcactgtgcccagtggggatatcactggtcatggctgatga

SEQ ID NO: 359677 - DNA, 122 bp, Homo sapiens
aatggtcaaagtgctatgtgtgaaaataatagtgtgctatgaaaaagtataaagtggggacgcatcttagttggtggtcagagatgcctccctgacaaggtgacatttatctgagacctgaa

SEQ ID NO: 359678 - DNA, 122 bp, Homo sapiens
ctcgtagaggcggcaagagcaagtcttttgacgacagcagtcgggcaggggctgtgcagccgccccggacgacaacagcgcgggcggcagcagcagcagcagcagcagtagcgtcacggcgg

SEQ ID NO: 359679 - DNA, 122 bp, Homo sapiens
atttacccagcccaacgaggtccaactatctttaggttagcacgacatataggactttcccggcccaagaactccctcggaaaccccaaggaaggaactttcactgagtatgcactaagtgc

SEQ ID NO: 359680 - DNA, 122 bp, Homo sapiens
tactctgggaaggtgatctctacggccaccggccacagggctccgtccctgagctcctcacgccgcagtagctaaagcacccttagctgcaaggaaaacacaggtgggaaaacagtttctta

SEQ ID NO: 359681 - DNA, 122 bp, Homo sapiens
gcaggcgagcgcttcggagcggactcgtttttttccgccagtcttggcggaagcctgagacgcaatagatggagactctccttttcgccttggcgtactctttttttttttttcctccctgg

SEQ ID NO: 359682 - DNA, 122 bp, Homo sapiens
atctgcgtcttttatctacgtaaacaaacttgtcattgaaaaagtccttggctttgaagtcgccggatggcgtaaataacactgacactcaaatcccccgtctgatttcagattgggtcgat

SEQ ID NO: 359683 - DNA, 122 bp, Homo sapiens
gggaagcttagagaccggtgagggagcagagctggggcgcctgtgtacagggatagagcccggcggcagcagggcgcggcttccctttcccggggcctggggccgcaatcaggtggagtcga

SEQ ID NO: 359684 - DNA, 122 bp, Homo sapiens
ggatggcccgatttcccaccccaagtcggagcttgcggttgagttgaagcgcaaaccacacgtcggagcgctcgggagtcaggtcccatgctgtgtccccctctttgttccgcagctcaggg

SEQ ID NO: 359685 - DNA, 122 bp, Homo sapiens
ctgtgctcgtcccccactcgttagtctgctgcctcccgcatgcagggtggacaccagcggcggtgatgggctgagtgttggaacgctctctatttcccggctgaaccatgcctcgttcagct

SEQ ID NO: 359686 - DNA, 122 bp, Homo sapiens
ccctattacagcaaagtacaatctgatgtatttttctgagtaaagtgataatatgtattgcggatttgttcacctgggttttcagaagacaattcctttaaattaatcttacattgggaatc

SEQ ID NO: 359687 - DNA, 122 bp, Homo sapiens
acacacccagcgccgaccgccacgttaaggatacagctcttccgaggtggagagggctctcgccagctctgactgctgctgaacccggatcctgctcctcctcccagaggaggtctgcaccc

SEQ ID NO: 359688 - DNA, 122 bp, Homo sapiens
gacaagtcctcttctctggcctccgttatgtcgtctcaaacacgcaggaggaagtttggacgacgtgcaggggtgaaaacatttcttttctttccctgtttaggttcttagttgacacgctc

SEQ ID NO: 359689 - DNA, 122 bp, Homo sapiens
tccaggctgctcttcctttcggaggtcgagttcctagcatttccatccgctcctccagcccgctccctgccggtttagctgaagcttccctttcggggagttacctaactacctcccgaagc

SEQ ID NO: 359690 - DNA, 122 bp, Homo sapiens
catccggggtcttcacagggtactgccctagcaccttactggaggccaggcttacggcaccggcggttatcagcctaagattgagctaggatccaaacccactctcactcctcaggagcgag

SEQ ID NO: 359691 - DNA, 122 bp, Homo sapiens
ccaagtttcaccagaaacttcagcctcaaactgacttctgtctagtttatgccaaagtcccgctcgaaacacctggcttgacccttcaagggagaatgggtagagaaaaggcaagaggcctg

SEQ ID NO: 359692 - DNA, 122 bp, Homo sapiens
tagtgttgggagaggctttgcaggttgggcccagccaaaaataagagatttttgtgaaaccgtggcaattcagttgagacctcagaaaggtcataaactatgaataaagtgtactttgaggt

SEQ ID NO: 359693 - DNA, 122 bp, Homo sapiens
ggcacctgggttgttagggctcgtgggaggactacaacccccagggtgcagtgggacaggcgttgccgggtcgcaggtcccgccagtgcgagcgcaacggaggtcgaaggcgttcagactct

SEQ ID NO: 359694 - DNA, 122 bp, Homo sapiens
ctcggaagcgcgggatcccagagcatcacggacgagcccgcgacgccccgccccgcgcagcgacgccccgccccgcgcagctccgcccccacgaagccccacccacacgccatcgatgggag

SEQ ID NO: 359695 - DNA, 122 bp, Homo sapiens
gcccaccatgctcaataacacacagaaatcagtcactcaaaaccaaagtccctggaacttcgcacaattttgagccttaaggaatcaacgacgggacctgactcagaggacaggcagctgca

SEQ ID NO: 359696 - DNA, 122 bp, Homo sapiens
agatgtttgtgttgggaggcagatcccttggtgcccttcccacggtaatgggtgaattctcgctctgttagttcacaagagagctggttgtttaaaggaggctggcaccttctccccctctc

SEQ ID NO: 359697 - DNA, 122 bp, Homo sapiens
aacacagccgggcacgtgttcaaaagcctctttcatggtggcgatggaccccaaaacccacgggttggaagagcctttgggaaagcgaatcgataccctgattgcagtccttgaagaaatca

SEQ ID NO: 359698 - DNA, 122 bp, Homo sapiens
gtggagcctgtgattctctggagtatttgactgtgttctactaaataaatttgtacatgtcgagaaggagccaagctggctggcctttaagttttcagtgctgagctggaggtggccccctt

SEQ ID NO: 359699 - DNA, 122 bp, Homo sapiens
ccacgtagcagaacaggataatccccagggacagcaggaagaagaggttgtgctggtagacggaggtgaggtaccacgtgagttcggaataatcacagcccgaagaaagcaccttgtggaag

SEQ ID NO: 359700 - DNA, 122 bp, Homo sapiens
aggaacctcagtccaccccctcctcccgcgccttgaaacgcaattgagtggcccgcgcctcggagtcgctgcttcccctgaaagtggggaaagaaggaaggtttctttctctgtccatgaat

SEQ ID NO: 359701 - DNA, 122 bp, Homo sapiens
cccctaaatcccttttcaagtctgtgctttgagctctcagggatcctctccacccaaaggcgccctccaaccaccatcaccaccagctccaccacctggggagaagcgtgaatcccaacccc

SEQ ID NO: 359702 - DNA, 122 bp, Homo sapiens
cagtgatgccaggagtgcgatgccagggctgagcatgggtcaccaccatagggaatcaaacgacgctgagtcgtgtgtcctcgcagtgagcctgggcagctcatgccgacctgcttccaagg

SEQ ID NO: 359703 - DNA, 122 bp, Homo sapiens
gctcccgcgggtccattcccaggactttgggttctcggacagaggccttaggacacggggcgggaagctggctctccagaccgaactagggctctggagttgccaaaatctggaagcaaagt

SEQ ID NO: 359704 - DNA, 122 bp, Homo sapiens
gtctctttgagggtgttttctggagcctgcggccaaacagaaagcagctgctgggggcagcgcgacagagtccccgaggcttgaggatctggaaaactcccaggcaaattgtcactagggcc

SEQ ID NO: 359705 - DNA, 122 bp, Homo sapiens
cagcggctcttttgtggccaacttagcaaaagatctggggctgggtgtaggggaactggccgcgagaggcgcccggattctttccaaagggaacaaacagtatttgcagctcgaacggaaga

SEQ ID NO: 359706 - DNA, 122 bp, Homo sapiens
agcggctttgagtgagtgcgggagctgcagataccgagacgctgcgactgccgcaggagtcgccgcagccaaactcgccgcgacgccgggagggagcgtaccgggaaggagagggagaggag

SEQ ID NO: 359707 - DNA, 122 bp, Homo sapiens
taaagtacgactctgcggaaagagccctttgggaatgaagcggcaacggtggcgcacctgcgatcctatcgtgggatgacaaagctctaagaggggtctcagggtagggaggaaacagctgg

SEQ ID NO: 359708 - DNA, 122 bp, Homo sapiens
gctgcttgtgcacaaagaaagtggagtgacagatgcaggtgtggctgcatccagtggcttcggccttcctgaggcgttttcacctggatgcaaaagctcacaagagaaaaggcatctgcact

SEQ ID NO: 359709 - DNA, 122 bp, Homo sapiens
gcatcatctcaaaagcagtgatttcatgaatgcgtcagtttccatttatgtcaacatcatcgctttgtctcttatctcctgatttcttgtcctccagcaagtgcaactgttagaattctcca

SEQ ID NO: 359710 - DNA, 122 bp, Homo sapiens
ctcagcctggctcctaatgagccagacatgctgaccaatctgcctgctgggaccttggctcggtcctctccggcaacttcagaaacttcataagcaaaacgtagcacttggtctaacgtgcc

SEQ ID NO: 359711 - DNA, 122 bp, Homo sapiens
cagggtccccatggctccaacatctgcagatgcactggcatagggtcatttccatgtgatcggtcttaggttttggggacctgttgtttgacaatagaaagcaagagggtggagacctgctt

SEQ ID NO: 359712 - DNA, 122 bp, Homo sapiens
caactgctacagttctgtctaggcagtggcttgggtttttatcgagcaacaacttagacacgtgactgtaatatgctgcaactgtgtgtactgaaaatatgtgaaaatggttgaatgtggac

SEQ ID NO: 359713 - DNA, 122 bp, Homo sapiens
ctctgggcttgctctcctaactcctgtgtcctaaatatagtttagaaaaatagcatgcaccggacaaacatgcatgtaaatgattgaatgtgatgatggtgacggcacattttatgcccatg

SEQ ID NO: 359714 - DNA, 122 bp, Homo sapiens
ctactatgaggagcagctcctcccacctgcccataaaagccaagtgcatgttaccagcagcggatcacagcccttccccgatcctctccgtgggagccagcgagcctctctccctgatctta

SEQ ID NO: 359715 - DNA, 122 bp, Homo sapiens
ggggacttggcaatgccaaggtgtttgctgaggctgtggactctccagcccgggagaggtcgccggacctttgaggggcattggaatcctgggctcctcctctgctgggtggagccgcgaac

SEQ ID NO: 359716 - DNA, 122 bp, Homo sapiens
cgcccccgaagggccccaggttgcctgcaccggcggtttcccacgtgcccaggcacctcccgttgcggctgcgcgtgcagtcgcagacagcccccaactcccgtctaattctcagcccctag

SEQ ID NO: 359717 - DNA, 122 bp, Homo sapiens
aagagtcagcagtaaacccagaccctggcggagggctggggaagagaagacaatgtggtgcgtgaacgcccgtggaacggaagaaccagctgcttctagaatcctctcaagcctggccagct

SEQ ID NO: 359718 - DNA, 122 bp, Homo sapiens
aggctccgcccctcgcgctcgccgccggcgtgaggctgcgttgatttgaatttggagccacgttcctctgcgcggaacgtggagcgaggagttgccattcgaatttcctacgcggcctccgt

SEQ ID NO: 359719 - DNA, 122 bp, Homo sapiens
ctggaaggcggtcactctttgcggacctgaaaattctttcctcaggtggtgtccctcctccgagctggccatccttccgggggagcccggagcgagaccggctctcgcccagtggtgttaat

SEQ ID NO: 359720 - DNA, 122 bp, Homo sapiens
ctttacttgacagctggggaaaccaatgcgcacagagcacccccagctcactcggggtctcggagctgatccatgagcggaggctgagatcctgggatcttgtcccccagcctcccggcaag

SEQ ID NO: 359721 - DNA, 122 bp, Homo sapiens
ctcacagcgggtccccccactccccggcagggtggcgttctgcttctggctcctctccaacgtgctgctctccacgccggccccgctctacggaggcctggcactgctgaccaccggagcct

SEQ ID NO: 359722 - DNA, 122 bp, Homo sapiens
aacgaatatggccacaccttcatgttcttaaatagattcttacatcatgaaaacacctatcgacttgtaatttttttctaactagtcagttcttcctcagacagaataatctggatgagcct

SEQ ID NO: 359723 - DNA, 122 bp, Homo sapiens
cccatggccccacaggctcggggagggccgcccagcccctacctgcccgcccagctgctccgcccgacccatacctgcccgcgaggctgctccgtcacctcggagccattggcagccgtata

SEQ ID NO: 359724 - DNA, 122 bp, Homo sapiens
ctcccaaatgctttgaaaaggacttaagtccagtgaagtcctgagtgtgaagtcacaggtcggaaatgtatttattcacaagacttatttaagatgcttgttttttgtaagatatgtacccc

SEQ ID NO: 359725 - DNA, 122 bp, Homo sapiens
ataccacgggtggcatgggcccctctagggagggtggcaggcacaagctccgcacctgcccggccaccagcactgcactgcggtctcccgaccctgtccccaggacagcggctctgcctgct

SEQ ID NO: 359726 - DNA, 122 bp, Homo sapiens
actcccctcactctgcctggggtcccgccgcctcggctcccactgtcatgccccgcgccccggtgctctcacctcagacctgctgtcaccacccccgggcccggcgccgccgccgccgcttc

SEQ ID NO: 359727 - DNA, 122 bp, Homo sapiens
cttgattcccagccctcacgctctctacctcacctgcatctcccttcaacgcagcggactcggaccacgcctccgcacgccattgcagtcctagcccagggcacctgcgtctcccaccccgg

SEQ ID NO: 359728 - DNA, 122 bp, Homo sapiens
gacaaaaaaataatctaccgctgacactcaacaagaaccgtcgtagaatggacaagtcttcggatcgcgctgtgcagatccctcagcaaattgtgacagtattatggcactttggcctaagc

SEQ ID NO: 359729 - DNA, 122 bp, Homo sapiens
tcctgtgctcaagtgagcctcttagccttccaaagtgttgggattacaggcgtgagccaccgccactggccactgccacttttctaattgcgtgaccttgggcaacttactttcccttttag

SEQ ID NO: 359730 - DNA, 122 bp, Homo sapiens
acctcaagtgatccacctgcctcagcctcccaaagtgctaggattacaggtgtgagccaccgtgcccagccaagttatctatatttgaaatgtgtgtttttttggtactattgagggatatc

SEQ ID NO: 359731 - DNA, 122 bp, Homo sapiens
agaccacacacagagacgggagagactccgagaccgtgggggacacacgcggcaaaaactcggagacttcagtcacaggttccctgacacctagagatggagagagacagaggcggccagag

SEQ ID NO: 359732 - DNA, 122 bp, Homo sapiens
gtggaccagcttgggcagcgtggctagaccccatccctacaaaaattacaaaaagtagtccggcgtggtgggctcctgtgggcccatctactccgtgggctgaggcgggaggatggcctgag

SEQ ID NO: 359733 - DNA, 122 bp, Homo sapiens
tcttgctaggcttggcaggtatttgttccctgctccttcacgctctcagtgccgtggccacgtcgctgggtacgccccaccaggcaagagacattttccgtcttgttctctgccacgtcccc

SEQ ID NO: 359734 - DNA, 122 bp, Homo sapiens
ctttcaaatagggagaatgtggtgaaaactgcagttaacatttgttaacagtgtgatcatcgggttcagcttatcagtaacctggttcctgtctcttaactgataaagaaaatgggaggttt

SEQ ID NO: 359735 - DNA, 122 bp, Homo sapiens
agcatcccagacacagcctcggagccctgggccgtttgggagccgaggcagcccattctgcgcgagtctgaaatcccaggtcctcaacatcccgcccccgactagacccgtctgccccctcc

SEQ ID NO: 359736 - DNA, 122 bp, Homo sapiens
ccagcagggggatgcggagcaggctggctgggctgcagggcgagcagggtcccagtgctgcgcggcgccggctgggtgcgctctgagcccgtgactctgctcgcgcctttataatccaacct

SEQ ID NO: 359737 - DNA, 122 bp, Homo sapiens
gctgctctggtagatttggaaggtggagttccgctttcccacagggccgggctccactctcgtctctggtttgtctcaggcacacatctgtgaatgttgacaagttagtgatgctcgtgaaa

SEQ ID NO: 359738 - DNA, 122 bp, Homo sapiens
agaggggaaaggtaccacaggcgccgccgctagggctcctcggtgggatcgcgcatgctccgtaggtctttagtaagtgtggctccctgcaaattcccaggttgtgtctccacagttccggc

SEQ ID NO: 359739 - DNA, 122 bp, Homo sapiens
gacatagctgctccggtctctgccctcagtccagggcgcccgggcgccacgggtcccactcgagtggtcctgcgccccagccagtccccaaacccagccagtcagcgcccccgtccccggac

SEQ ID NO: 359740 - DNA, 122 bp, Homo sapiens
attaaatcatagttctgtgaagaaacttctacgagaaccactttataaagtaacataatgcggctgggcgcggtggctcatgcctgtaatcctagaacttcgggaggccgaggagggcggat

SEQ ID NO: 359741 - DNA, 122 bp, Homo sapiens
cagcatggtctcgctccagattctcagagggtctgttaggattcttgtcgtggtgcttgccgtaaactccacctggtaccttgtgccaccacagacaccataggatccgccaaatgatgtcc

SEQ ID NO: 359742 - DNA, 122 bp, Homo sapiens
ggctcgccccgccgtcctgtccccgcctggctcgggtcctcgcgcgccgcgtccacccgccgccggccttttttgggtcgttggcgggtattttccgcctggccccacatcacttcccgtaa

SEQ ID NO: 359743 - DNA, 122 bp, Homo sapiens
cacgcagaggcgccaggggtcggggaccactgcattccccgtgactggggcgctggaggccgcggcgaggccccgcgacggctgctccgtgcgcccccggccggccgtcgcccacgcccggc

SEQ ID NO: 359744 - DNA, 122 bp, Homo sapiens
gtacaatgattgatgaaagatgagggaaggtggtttggaagactccaagaagcataataccgtcatcctgactggaaggtagatggagagagaaggcatcttagaagcatttgcggtggaca

SEQ ID NO: 359745 - DNA, 122 bp, Homo sapiens
acaggaggatacacggggacttccctagccagactcatttcctgagccctctctatctaacgtttcttctgagtcttcgtgttcaccctatcaaacaccataccaatctcagactgaagggc

SEQ ID NO: 359746 - DNA, 122 bp, Homo sapiens
gcgtggtgatcccagccgcccctgtcccgtcgctgtcctcgccctacattgagtacacgccggccagcccggcctacgcccagtacccaccggccacctatgaccagtacccatacgccgcc

SEQ ID NO: 359747 - DNA, 122 bp, Homo sapiens
gcatctaatacgcgtcgggggtgtgctgagtagagtacccatagcacctaacttaatccccgtgacccaggatgagggaaactgaggtttggaaaggaaaggtaactctcccaaggtcacct

SEQ ID NO: 359748 - DNA, 122 bp, Homo sapiens
gtgcagctcattgacgtctcagccgttcattttacagtggtggaaatgagcacaaagacacgaagtcatgggcctggggcccagggccagggtggggcccaggccactggctccagagccct

SEQ ID NO: 359749 - DNA, 122 bp, Homo sapiens
tcttctaaaagccctactttatgacttacaactttacaagtcagtcactattattatcctcgtttcatacatagggaaactgagacttctggaggctaaatagcttgccccaggtacacagc

SEQ ID NO: 359750 - DNA, 122 bp, Homo sapiens
gtttgtgctgctcataatgcccctggtgatctgggtctatagcacagacactaactttagcgatatgttctggtcttgactgacagttttccataaagaagatgtttaacttaatcaattaa

SEQ ID NO: 359751 - DNA, 122 bp, Homo sapiens
ggcaccccgccagacactaagccccaagcccctggcttgttgctaagaaaattcactgcccggtccagactcagcccttttcgccctttaagggtcgcgcgtgggaggcagctctgagaccc

SEQ ID NO: 359752 - DNA, 122 bp, Homo sapiens
acgagaagaccttccggatcggcttcattgtgctggggcttttcctgctggccctcggtacgttcctcatgagccatgatcggccccaggtctacggcaccttctatgccatgggcagcgtc

SEQ ID NO: 359753 - DNA, 122 bp, Homo sapiens
cggcagctctggggtgtagacgagcggtcgcagccggtacagagcgatgaactgctcccgcgtcaggttgtggtcccgcagcagccgagagaactgctccggggtaatgttaagcgcctgca

SEQ ID NO: 359754 - DNA, 122 bp, Homo sapiens
gggctgggcgttgctgctaggagttccctccaccgaaagtgtgtctcaggaatctcgggtcgggatctgggttgcgggtgctcggcagaagacaaacccagcacttttcttgctaactgaaa

SEQ ID NO: 359755 - DNA, 122 bp, Homo sapiens
cccgaccactcctggagcaggaggcggcagacacactgacaaacagggtgacgcgcacaccgtgcgcacaacgcgcatcacttgtccgcagaagtggaagacgtacctggctcgcagagttg

SEQ ID NO: 359756 - DNA, 122 bp, Homo sapiens
atcgctctgcgcctgcgcgccaccctagcgaccctgagagttaggggaagaggacgcctgcgcagtgatatgtactcgccgtctcctgcaactccatccgtaccgaacactgccgcgccccg

SEQ ID NO: 359757 - DNA, 122 bp, Homo sapiens
ttgagcatgacagacttctgctcctccagcaaggcgctctgggatgtgggggtgaaggcacggggtgagtgtccctgggcataatggcaggggcaggggctgagtgcggtggcttgactcac

SEQ ID NO: 359758 - DNA, 122 bp, Homo sapiens
cttcctctgaaatagagaatagcaagatcatccgagaaagcaatacaaatgtgcatgttacggttatttaaaatgaactttcttagccattttaatgtgtatgaatttccttattacagcaa

SEQ ID NO: 359759 - DNA, 122 bp, Homo sapiens
gtccttccagttctgggatcccacctccgggttaattccgcttcccttgaggagcgcatgcgcaatgggaccactcgctcaaagaacccacccgacccgagacggcgcgaatgtgcagtcga

SEQ ID NO: 359760 - DNA, 122 bp, Homo sapiens
cggtgcacgcttgctgcttaaaacaaatcaatctccatttggtagaatttagagtagcttcgaggacagtgtgttgagttgggtgatgatgggggcttcccctaaacccacctgaaagtctg

SEQ ID NO: 359761 - DNA, 122 bp, Homo sapiens
cgtctcactccagaacacaatgactcaaaaccgcacgacgtgtacttttggaaacagctccgcgggagagcacccgggacaatccccaaaccccgttgcccgcggggtggggccgcggacgt

SEQ ID NO: 359762 - DNA, 122 bp, Homo sapiens
cttggtcaatatgaggtaaagccaacaggatggatttgggaccacattggacaacgccatcggctgcaccggacgcccagcaacagtaggtaaattaggtcatcattaaattatcatgagga

SEQ ID NO: 359763 - DNA, 122 bp, Homo sapiens
ccccagatgtctatcaggtaccaaaggctgcttccatagctagtctagctgaaccatttccgagctacaaggcagtgaatgaaagtaaaaacaaagaaacactggttaaattttaaaaattt

SEQ ID NO: 359764 - DNA, 122 bp, Homo sapiens
aatcacaatgaacatctctgtataaaattcaaaatcacaaaaaatactttctaatttcgccgcccatcagcctaaatataagggtgattctccacaaaccagaatccaaaaaaatcttaggt

SEQ ID NO: 359765 - DNA, 122 bp, Homo sapiens
ctggtggccgtggccaggcctatgacctctgcagtgtggtggtgcactctggagtgtcttcggagagtggtcactactactgctatgcccgtgagggcgctgcccgccctgccgcttctctg

SEQ ID NO: 359766 - DNA, 122 bp, Homo sapiens
gggagcgcccctaacatcagggctagcacgaagcgggcgagcgtcatggtgccagcgctgcggggtctggtccatgctccccagcttctcgggcttggagcggagaagaggagggggcgggg

SEQ ID NO: 359767 - DNA, 122 bp, Homo sapiens
atatactacaaaatgatcaaatcacagcccttatggatcgccaaaactccccagtctagccgcatttgatgatcaagacctctttaatcatgcttttatacgccgtgtctcttgttcatagt

SEQ ID NO: 359768 - DNA, 122 bp, Homo sapiens
gcttctcttgggacaagagccgagcacttagtaggtccccgggccaagagctacgaagcccgaggagctggcagccccgcatcgcccgcgaccacccacggccgcaatagctccatagagca

SEQ ID NO: 359769 - DNA, 122 bp, Homo sapiens
gcgtggcgtggcggtgggcgcgcagtgcgttctcggtgtggagggcagctgttccgcctgcgatgatttatactcacaggacaaggatgcggtttgtcaaacagtactgctacggaggagca

SEQ ID NO: 359770 - DNA, 122 bp, Homo sapiens
gcctggtgattatgaggacttagtgggatgatgctctgggcaaccacagggattgctcaccggtgactcagtggttgactcaaaggctagagggtggtttgggggtggaggcagaggtccag

SEQ ID NO: 359771 - DNA, 122 bp, Homo sapiens
aactaagtcgaagggatggtggaagaagcagcaacttggcaataattccgcagccgacttcgcgtgttcaggcatcctttttctccagtaaaattttgtgcaactcgtctgcatcctcgctg

SEQ ID NO: 359772 - DNA, 122 bp, Homo sapiens
gtaccgggcctgccggggctctctgggccccgccctggtagctgaggccctggggtgctgcggcctccaggttatctccccactgcaggcacccacccagggagcatcccaggggcctcagg

SEQ ID NO: 359773 - DNA, 122 bp, Homo sapiens
gggggaggaggggatcgggtttcacggagtgttgggggataggactgggggcatccggcccgaaggcgccccctctgtgccccctccggggaagtctgggatccaggccctcgcccccagcc

SEQ ID NO: 359774 - DNA, 122 bp, Homo sapiens
tgcggtctactcaggcctccttgtcatccaccaagccctctctggcttcattggtactgccgcaggctgctgggcactagtatctcctggcgtctctgttgcacctgaggttccacggctgg

SEQ ID NO: 359775 - DNA, 122 bp, Homo sapiens
agctccaggtgcctaatattggctagtgggcttcagccaggaaatagtatgaaagtctcccgtggcctcttggggtttgctaagctagcgatgctgaaaatttggtccctaggccaacatca

SEQ ID NO: 359776 - DNA, 122 bp, Homo sapiens
cggccccctccccttggagctgcgcaagcgtacactgactttgctcctctctagtgcccccgcctccagcagccgcccccccacccccccgtctgcccaacacgcaggcgcgtctcctcaaa

SEQ ID NO: 359777 - DNA, 122 bp, Homo sapiens
ggcagtggccagacgtgcctggagtcacagggtagaacacgtagctccaacccacccactcgctcccatttaacccagcccgcagcctctccattactcctcggcttgcccccccacccccc

SEQ ID NO: 359778 - DNA, 122 bp, Homo sapiens
gctggcctccaagcgggtggacatccagaacaagcgcttctacctggacgtgaagcagaacgccaagggccgcttcctgaagatcgccgaggtgggcgcgggcggcaacaagagccgcctta

SEQ ID NO: 359779 - DNA, 122 bp, Homo sapiens
aattacccctccatcagcggtataagacagtattcatttttttaataccctcattatcaccgggaagaatcaatcgtttataccaatctgctaaacaaaaatggcaccttatttttaattat

SEQ ID NO: 359780 - DNA, 122 bp, Homo sapiens
ggccccgcgggggctgggaaggctggcagatgttgggtgtgggtaccacccccctgcaggcgtcctggcggccgggtcaggctggattggacgtctgggttcccatgcgtgcctccacccgc

SEQ ID NO: 359781 - DNA, 122 bp, Homo sapiens
ccgccccgcccccgggcttggccacctgcccaagaaacttgttggttgttgccctcaggtcgctcccgggcggggacacggaacccggccatggaagatccgtcgggggctcgcgagccccg

SEQ ID NO: 359782 - DNA, 122 bp, Homo sapiens
agccgggccagaaagtgacaggctggtccagcagccccaggctgagcttgggcacaaagccgggtgcagtggcccacagcggagctggcagggccccagcctcaatcccttgcgcccttaca

SEQ ID NO: 359783 - DNA, 122 bp, Homo sapiens
tggttggggcagcgcacataccgcgtgtgggaggtggcactggtggccgcatcgacctctcggtccttcagcagctttagccgctgcagctgctcctcgtggtctctgcgcatgtctaggat

SEQ ID NO: 359784 - DNA, 122 bp, Homo sapiens
cctagggcaatgaaatgttcccaaggtttacggagctcagaaactctcaagggagaagggcgggagtcctcaagaatttgtttcttgtttggtctcagaggagggcaactaagccccaagtg

SEQ ID NO: 359785 - DNA, 122 bp, Homo sapiens
gggtttcgtcggatttctgcccgccgctctggatcacacgtttgttctccctatttgagtcgcaaggccttccttcattccacctagcaggctgcttggaaaagggcagagactcattactt

SEQ ID NO: 359786 - DNA, 122 bp, Homo sapiens
gccccatctccatcgggactgcttggtggagccgccttcttcaccgacgtcgctgttcctcggatctgggagccaaatgctttgctagagctggtaaaatggaaccaaatcgactgtccaat

SEQ ID NO: 359787 - DNA, 122 bp, Homo sapiens
ggagatcgggccaatcccaggatctccagggattaggcgggagacccagtgtgaccagaacgtctggggaagtacgcgggatcgggtgggtccggggtcgctcggggtccggctcaccggta

SEQ ID NO: 359788 - DNA, 122 bp, Homo sapiens
cttctgcctcgcggcgtcccaggcagatagctggttattcaggtttcgttggaagaaatacgttctcgtccccctgaaaggcccagtccagtcaggtgatggactcctccctgaaactgcac

SEQ ID NO: 359789 - DNA, 122 bp, Homo sapiens
ccagtcagcttccagcagcagaaccacgcctaacagatgtctggctttggctcgaggaatcggagaacacagtcagaaggaggacaggatagttaccctcatttgtcgataaatccagtccg

SEQ ID NO: 359790 - DNA, 122 bp, Homo sapiens
cgacgcaggcgcgggccaatgaccgtcaagatggggggcggggccagagccaaagccctccgaagagggtgaggcctaaggtcgcgacggcggagggcggggacctaagggcggggactgag

SEQ ID NO: 359791 - DNA, 122 bp, Homo sapiens
cgggctcctaccccatggcagtgtctaggggtgaatgtttacagctgaagccccactgggcgtgcattacagggtgctttttttgggtttagcgtctgttggcggcttgtgttaaccagctt

SEQ ID NO: 359792 - DNA, 122 bp, Homo sapiens
tggaattgggcagtgctgggaggtgatcccaaatggagaaggtgccggtagagggctgggcggggatgagagaccatctcgatgctttaagaaagtcacttgggtggcttctgcagaatccc

SEQ ID NO: 359793 - DNA, 122 bp, Homo sapiens
tttaatgagatacctgcattcactcaccccctctcccgcaaccaccccttcagcaagtcgcgctccacccaattaggaggggctttaggctgggcctaaaaagttgggccaagaccccacga

SEQ ID NO: 359794 - DNA, 122 bp, Homo sapiens
gatagagtctgaaaccctggcaagccacagcttcctgcagtgtcctgttgccatgggttacgaagggagcgagagggaacttcatcggaaatgcctttaaacttttctcacacgcacaagct

SEQ ID NO: 359795 - DNA, 122 bp, Homo sapiens
cacagtgccacagtatcaggcaacacagacaccagctactttggaggaaatatttatctgcggaaggcagtagtcaatagccaccttattcctatattacggaaaccagcaaacttgacaat

SEQ ID NO: 359796 - DNA, 122 bp, Homo sapiens
ctccccgccctggatccgatgccgccggctctgactcagcgtccccaggggcgtgcgctgcgctgcaagccgcctgcaggtcccttggggctctcctccaggtgccttctctctgcacgctc

SEQ ID NO: 359797 - DNA, 122 bp, Homo sapiens
ggggcgaggcagcgtcgccgcgaggccacccggaagaccaagccgggtaggcgctgtctccgtcgcctccaacccccccggtccgaccagggaaggtgggatgctctgatggccgggcctgc

SEQ ID NO: 359798 - DNA, 122 bp, Homo sapiens
aggttgagtcattcccatgtcacctgatggtgactctttcctgcttccgtcttctactcacggggacccctgtgatgactttgggagcacctggatgatccaggaaactctccccatctgag

SEQ ID NO: 359799 - DNA, 122 bp, Homo sapiens
ttccctccctctctctattcctcggctctctccggctccctctctcgcctcggatgacagcgctgcctcttttgttggctccgcagccaatcgcggccgctgacgacacgggggccggggct

SEQ ID NO: 359800 - DNA, 122 bp, Homo sapiens
ggcgaacgggactgcggacgttcggaagctcttcatcttcactactacccagaattacttcgggttgatgtctgaactctgggatcagccactgttgtgcaactgtcttgaaatcaacaact

SEQ ID NO: 359801 - DNA, 122 bp, Homo sapiens
atgttcttgtaatatacaaggattaaaaaaaaatcctaccaagagagcagtaataggctccggcttttctggtctgggagcaaatataatgagcctccatgaaaatattgaatcgcttcccg

SEQ ID NO: 359802 - DNA, 122 bp, Homo sapiens
gtctctcctcacctcccgggccgcccctgcgagtccccggcgcgtgagcacgcctgcgcgcgcccgggcccttcctggcaggctgcttgtaagatgagtgaagaagcaggtgggggagaggg

SEQ ID NO: 359803 - DNA, 122 bp, Homo sapiens
agatctgccacagcaagagtggagagatcaaccccgtgaaggtggccaacctggtgaaggcgtacgtggacaagtacaggcacatgcgcaggcacaagaaaccagaggccggggaggagccg

SEQ ID NO: 359804 - DNA, 122 bp, Homo sapiens
ctggatttgggaaactttgggccaggatgcctggtgtaactgggaagttctgtgttgtcccgctttatgtacggctgagggcgcgagacctcacaattgggcacgcaagcggcggtgccacg

SEQ ID NO: 359805 - DNA, 122 bp, Homo sapiens
gaaggaaatgaatcatcatctggaaaaactgatttccttcccacggtcctagagacaaatcgaaatgaccagtcccaataaaaaattgactatttttccatctaacattaaattatggtcta

SEQ ID NO: 359806 - DNA, 122 bp, Homo sapiens
gtgcccgtccacctcgggaactaccgagaagatggtggctgagccaggagaggccggcggcgccatctttgatgtagtttttcttgctgcggagtttcctcagagaagaatctcagattttg

SEQ ID NO: 359807 - DNA, 122 bp, Homo sapiens
agagtgtaactgaataacttgtagacatgacatttgtgtgaacatctacaagagacaggccgttatcaccacccattcaacactccagccagaggaagaacagcaagggggccagccataca

SEQ ID NO: 359808 - DNA, 122 bp, Homo sapiens
ctgaaacactacccagcagtagaaaggaacccactatcggtacaacctaagcggatcttacgggaattgtgctgaggagaaaaagcctcccccgaaaggtcgcatgctgtgtgattccgtat

SEQ ID NO: 359809 - DNA, 122 bp, Homo sapiens
gaaccaagtggttgtaattacaagtacagggagggcggccactgctggactaggtccttgcgtcatttcccccattagggctttcctcgctacagtcagcctccccgactcaggatccagat

SEQ ID NO: 359810 - DNA, 122 bp, Homo sapiens
ctcggccctcaaccaaactgcttggggcacgttctttccgcgctcttgactcctacgcgccggcctatgacagctcggcgggagcatacagacctgcctctagactgctaagtgatagctgt

SEQ ID NO: 359811 - DNA, 122 bp, Homo sapiens
ccttctcgccaccaaggcgtggtgtcccctggggaggccccgcgaggtgctgagtggcaccgaactcttgctaacaggggtggctctggggaatcaaggagccctgtgttcaggctcacttg

SEQ ID NO: 359812 - DNA, 122 bp, Homo sapiens
cccacacctgcagaaaccggtggacactgcagtggaggggtcagtgggtacagaaggacacgtctcatgccggggcagccagcatccttggacctctcagctctggatggagagcagttctt

SEQ ID NO: 359813 - DNA, 122 bp, Homo sapiens
ctcccaggctgctaagcagagaagggagcagctgctgggtgggggccctggcccggagcacgagggcagccgaaattcttctgtgctgtgagaaactaggaaagcagctgcccttggggaag

SEQ ID NO: 359814 - DNA, 122 bp, Homo sapiens
aagaccataatctactcttgtctggaaatcatacaagtaggtatctcagcaaatgatactcgtgtgttatcgttcttatgagtaaatcattggcagtgagtgtgatttttttttttttatga

SEQ ID NO: 359815 - DNA, 122 bp, Homo sapiens
gaggtaggaactaattaccccctgtaacttcaggatgatcagcatgatttggggcagacacgcacacagaggctgataaagtcttttctgatgtaaatcagacaattccttcctagatcaga

SEQ ID NO: 359816 - DNA, 122 bp, Homo sapiens
cgattgggtccagcgccagagtaattttcattttcagcttcgctgttcctcctcggactccgtgctggagagcacacaaagctgcccagaaggcaagaagaaagcttgtttgtcctccctcc

SEQ ID NO: 359817 - DNA, 122 bp, Homo sapiens
ggtcttgtttaggctgcttcagtagggctgattgtgtgaaacagaggccccctggagtagcgctgaatcatggagtttatcttaaggatggatctgaatgagatctgatatcaggaagctca

SEQ ID NO: 359818 - DNA, 122 bp, Homo sapiens
agggagtcatttgtgactcaggtgcgctctctgcgtctgcaagtcacgttcccttcggcacgcccatctcgaggattcatcctctccaacgggtgacgagcaccgcctgccggcggcccgcc

SEQ ID NO: 359819 - DNA, 122 bp, Homo sapiens
actgaggcccctcggtcgctcccactcgtcgtgccctcacctagtcaggtcccgcagccgcgcctcctccccgcgcaggtaccgcctcagcagccccagcagccggcgctcgggcgccaggg

SEQ ID NO: 359820 - DNA, 122 bp, Homo sapiens
ggggctcctgagtaggcagggcagacgcgccatctagtggcagctctcaggacgtccacacgcctgctcctgcgggctcccgcgccctggggtggcaggcaccggcatgctagaggttaacg

SEQ ID NO: 359821 - DNA, 122 bp, Homo sapiens
catggggctcctcaggattatgatgccgcccaagttgcagctgctggcggtggtggccttcgcggtggcgatgctcttcttggaaaaccagatccagaaactggaggagtcccgctcgaagc

SEQ ID NO: 359822 - DNA, 122 bp, Homo sapiens
tgtgtcaggtaacttgttcgtctgaggcactgaggaactgtgtgctgtgctgcacggagacgtcccgggtgcccacggcgcttctcttcattagagtcccgaagccatttgccagatgctgt

SEQ ID NO: 359823 - DNA, 122 bp, Homo sapiens
tgttgcctttccatggcagagattttaattatcttagctttttaccactttcaactgctgcgaacctaaaatgtcagtgcgtttaacatctaaaataccaactcactaaaccacaaacttgg

SEQ ID NO: 359824 - DNA, 122 bp, Homo sapiens
atttgaaggggtgttggcaagaacatcagatggacgacaggggagaggggcccagctgcacggggagaagccgatgagggatgggtctttgctgtcatcaacattcataaatttatcattct

SEQ ID NO: 359825 - DNA, 122 bp, Homo sapiens
atccaatggtcaaacctcagtccccattctatctgacttctctgaagcactggacaataccgaccttcttctaattctttcctgatgtccttgtactatcatcctcttctcttcctcctgga

SEQ ID NO: 359826 - DNA, 122 bp, Homo sapiens
ccaaaatgcaaaagatgggtcattgattcatacactatatcaaactcttttatgacttggcgtttgttcagtactactttatatattcacaaaatactgtattgttggaaattaacacctaa

SEQ ID NO: 359827 - DNA, 122 bp, Homo sapiens
cacttccggctctgaaaacaaaccaaccaccagcaggcggcctgggcttagggcaggcagcgccagggagcgcgcggccgcttcctggtgggtccagtgtccccggggtggagggcggggcg

SEQ ID NO: 359828 - DNA, 122 bp, Homo sapiens
tgagggcttggctctacgggctggggctggatatcagacgggctcccggacccctgggggcgatgctgcctctcccagtgacaccagccgagtcccaactttttggctgccagtttgacttt

SEQ ID NO: 359829 - DNA, 122 bp, Homo sapiens
ttcacctagaactgggtaggcaagtgtgggcagtgttggagtgctggtgaggttaagtagcgtcattgggagaggtaagggaaacctccccgagaggaccccagtaccaagcccgaatttaa

SEQ ID NO: 359830 - DNA, 122 bp, Homo sapiens
ctgaggggccaagtgcgtggacgccatccttccagtcattccgtggactatccctccaatcgctgtggcgaaacgcactgctcatggacacagccgagcacctatttctgaagggtctgagt

SEQ ID NO: 359831 - DNA, 122 bp, Homo sapiens
ccacaggaacaggccccgtccaccgcctccacgccgcacctggaggcctcctcgcaggcccgtgccccgcctccctggctgcgccgcctccgtgtagtcttggcctcctcaggctgcctccc

SEQ ID NO: 359832 - DNA, 122 bp, Homo sapiens
gggccagagagggcggagcattgtcctccgtctgggagggtgggccggaggtctgacgggcggttgggtggatagactagctgcgggccgatggacagcaggatacctgggaaacagatgga

SEQ ID NO: 359833 - DNA, 122 bp, Homo sapiens
agataaaaatcaaccctccattgtaacgtttgtactctggttcttgatgtgcaggtagatcgttggccggagacaggatatgtgaagaaacttcagagaagggacaatacgttctattacta

SEQ ID NO: 359834 - DNA, 122 bp, Homo sapiens
cggcacagtgggacccccttctataaaccggggttgagatgtggttctgtgcccaaggcgcgggcccctgagggcctcctgcctctggaaataggccccaaggctgcactggggggataagc

SEQ ID NO: 359835 - DNA, 122 bp, Homo sapiens
gtgggaagggtgtgcgcgcgtcggaggccgcggctgaccctgctccggcgctgccaggtacggcatcagcccggacagcatcatcctgtaccggcagagcatcggcacggtgcccaccgtgg

SEQ ID NO: 359836 - DNA, 122 bp, Homo sapiens
gattgtgtatttaaacagaacacaccttttttttttttttttttttccagtaatagtagacgtcgccatgaaagtgaagaaggagatagtcacaggagacacaaacacaaaaaatctaaaag

SEQ ID NO: 359837 - DNA, 122 bp, Homo sapiens
ccgctgcctgcggcttgacacagggttggtacgtagcgtctgtcctgggcgttggtccaccgggattgcgtttatctggcgaccccatggagttcacaggctcggaaaaaccaatctaacgt

SEQ ID NO: 359838 - DNA, 122 bp, Homo sapiens
cggggaccactgagccgccgggtgcccacagaggctcagctccttcttttctgtgcaatacgagacccggccgcaccccgagtcacacaggcccccggggccacggcgttcgtctctcctgt

SEQ ID NO: 359839 - DNA, 122 bp, Homo sapiens
gagaagagggggcggggtcaggccggctcctgattgggtgttgacggggtaacgttgtctcggatctcccgccccctcccttctttcgctggccgcgcacgcgtgcaacgccccgcccacct

SEQ ID NO: 359840 - DNA, 122 bp, Homo sapiens
ccaatctgactccgagcccgcatccccctcaatcgtctcttttccccactccccagatcacggtgctgcttggtccccctcagagccatagagaagcagggggtgtggccatggaggggaaa

SEQ ID NO: 359841 - DNA, 122 bp, Homo sapiens
ccagaaccaggggatctcgctcctccctcttggggcagccataagcctaggagctcctgacgctgtccgggccccgcggctccccgcgctctctaggggagagccttggggcgtatccgggg

SEQ ID NO: 359842 - DNA, 122 bp, Homo sapiens
gcagtcacctgaggtggctccagtgggctggagaatccactttttaaatggccttcttcacgtggctggcaaaagttggtgttgactgctggctgggagttcaactgaggctgttggcccaa

SEQ ID NO: 359843 - DNA, 122 bp, Homo sapiens
aggcgtctgtcttccaagccagctgacgtaattcagaggagaataagaccctcccacttgcgtttgttaattgactttgatgagctcctctgctctgcctaagtggttctggaacagagagc

SEQ ID NO: 359844 - DNA, 122 bp, Homo sapiens
ctacctctcaggtggttaggagaacaaagtgagaggatgaatgtgcaggacctcacagggcgccttaaataaatcacgtgcacaaacgctccagggaatggccattttcactgtggctcagg

SEQ ID NO: 359845 - DNA, 122 bp, Homo sapiens
cgatcttttgcattcactgacattcttggatttggcatttacaacctcagggctctattccgaggaggccttttgcatttgatgtaaatattatggtgatgagaggtgacactgagaatacc

SEQ ID NO: 359846 - DNA, 122 bp, Homo sapiens
agttagaaatcagatgaaaatggccaggtgtggtagtgggctcctataatccgagtgactcgggaggccaaggcaggaggatcgcttgagcccaggagttcaaggctgcaatgagccatggt

SEQ ID NO: 359847 - DNA, 122 bp, Homo sapiens
tgacccagttcccagaggctgcactgccccggcagctcctgcaatctgcactcacagctccgacatgtgccaggggcctgcgtaagtcttactgaacgagggagtagtactgctgggtcagg

SEQ ID NO: 359848 - DNA, 122 bp, Homo sapiens
acaaacaattgtagtactgacttgaactaaatgatctcagcagagtgagatttcaaaaggcgcttaaaacctacagctctttgaatagttagcacacattctactcttaatcaggccttgtc

SEQ ID NO: 359849 - DNA, 122 bp, Homo sapiens
gggtccgggttccacgaaggccaggtccagtcagtttctcaggtgaggaaaccgagctgacgcggggctggcggcccggaggcaggctcgggaggtccgggcctggggactgggcgggcacg

SEQ ID NO: 359850 - DNA, 122 bp, Homo sapiens
tagctcgcgcgttaagaacgggcagaacgccactcaaaagcacgtcgggatggtgggtttcggattggggtgagtcccgccggcgttattaagggcgcaccagtgatcagctcaacaccgtg

SEQ ID NO: 359851 - DNA, 122 bp, Homo sapiens
cctagctcgctgcctctggcaagtggagtttttaaaaagctccagcagatcatgtcatgacgacttcgctgctcctgcatccacgctggccggagagccttatgtacgtctatgaggacagc

SEQ ID NO: 359852 - DNA, 122 bp, Homo sapiens
aaactttacaaataacataaacaggacagagagtaaaatgggcatggcttaggcatcatgcgtagcatggcagtccagcatagttagtcatgccaagactgttccctgctggccttgcctca

SEQ ID NO: 359853 - DNA, 122 bp, Homo sapiens
actttgctgcagctcgtttctttccaataaaagtttctgtgacttagtgtggacctgatgcggtgtgggggtggggcctgcggtgtgggagtggccggcggcatctggtatcctagcaactg

SEQ ID NO: 359854 - DNA, 122 bp, Homo sapiens
agagaggaaaagtgaaatagcttacaaaatgactgtgtgataaccagcacttgaagactacgtactaaaacacagaacccaaaataaaacacacacaactactcaacgtgatacacattcag

SEQ ID NO: 359855 - DNA, 122 bp, Homo sapiens
ccatggtacaaacgccatacacattcagtatactcctccgcttacagatggggttacatccggataaacctaccgtaaattgccttacaatgctttaacctatgatgggttgatggggaatc

SEQ ID NO: 359856 - DNA, 122 bp, Homo sapiens
ttacttgggaggtcccgggtatctgaagcggatcccgggtctggggacatgaaggggcgccgtggccttagggaaggccccaaagaggcctaggccccggaggaggcaagagccgcggccta

SEQ ID NO: 359857 - DNA, 122 bp, Homo sapiens
ccgcgcccgggctggggactcgggtgggctaactccccaggaggtccaaagggtgtgtcccgtggccaccccgcctggcaggagccgggccttgtcccggaggatgcgagcagaacccggga

SEQ ID NO: 359858 - DNA, 122 bp, Homo sapiens
aatatttactgcagctaagacttcagtaaaattgggggtggggggagggttgacattttccgactgcctgttacgtgccaagtgctttttgttaaggacataatgtttttgactggggatca

SEQ ID NO: 359859 - DNA, 122 bp, Homo sapiens
tcgcctgccctccctctcctgccccggcagtgcgcccacccgccgccacgggcagcctttcgacgcccaacctgcaaaccgcctgggggctgcccaggacgtccagaccctgtagcgtctca

SEQ ID NO: 359860 - DNA, 122 bp, Homo sapiens
tgcagcctctgctctgctaggcagaaaggtcacagcaacatccaatcatttcagcagaagcggtttgggtttaagtttcttttattagtccccaaagcagcacatgcctgttgcagaaaaat

SEQ ID NO: 359861 - DNA, 122 bp, Homo sapiens
tgggggcggagggtttggtcgggacgcggggggaggctgtgggagtccggggaggctctgcggagggagaggtggaagtcattccatcatgggacttttttgcggagtttttgtttgacatc

SEQ ID NO: 359862 - DNA, 122 bp, Homo sapiens
tatatttacatttaacagaaatttggattttttttttttttttttaccaatagaggtaaccgtatgaaagcaaccatggctgacattgtgtgaaacacctttacttggccattgtagactga

SEQ ID NO: 359863 - DNA, 122 bp, Homo sapiens
gcagctgcctgggtgtggcactcggccacacgtgggacattttttttttaacagggaagtcgtcatgccttcagcttcttatgaggtttctgagtcagctcctggctgtcatcagagaacac

SEQ ID NO: 359864 - DNA, 122 bp, Homo sapiens
ttgtcaacgggtttggtaacactcactgccctgatggaactccattcccggtccccagcgcgctccccaccccaaaaaggaccttggcaccccggcccgcccccggggagctccccttgcct

SEQ ID NO: 359865 - DNA, 122 bp, Homo sapiens
ggggtggccacggcctttcatccctgtacccagcccatgatgtggcccaaagcaagagcccgtgcgtctgagctggctggtgggggtgagcacttactgcgcacccactgtgtgcccagagc

SEQ ID NO: 359866 - DNA, 122 bp, Homo sapiens
gttgtttggaaataccccaaacaaactcgatgtccattcctaacgtgttattaagtgaaccgatctgactcgatgcgttttgttaaaaggactttctttagtttccctggcccacagtttat

SEQ ID NO: 359867 - DNA, 122 bp, Homo sapiens
ccatgtttttaggggattctgtgctttcccacctaaaaatcatagcactgattcctgtcacggtgctaggcaggagagggtcataccaggtcagaaacacttcttcttctgtgtgcacccat

SEQ ID NO: 359868 - DNA, 122 bp, Homo sapiens
gcttgtttctttccttctactgacaggtcctgaatctttatggagaacattaaattaaagcgcataataggtttatgtagtgtactgcacgttggagacattagtcatgtcccttaagcatt

SEQ ID NO: 359869 - DNA, 122 bp, Homo sapiens
cctgtggactcggcctttcccagtgggaaccctgccttcccgtgtccaccttccaatcctcgtccaccacccgtctccagggccagcacccaagcgtttggggtttccaggcacaggtggcc

SEQ ID NO: 359870 - DNA, 122 bp, Homo sapiens
cagccatgtgcatttgcttactagtgtctatggctacttttgcactgcaacagcaaagtccggtacagtccaggacagtggataccaaaatctgtgcacactcaaagtcccatatctggccc

SEQ ID NO: 359871 - DNA, 122 bp, Homo sapiens
ggagcctcgagaagccagtcagctgagccgccggagcctggagaagccagtgcgctgagccgccggagcctcgagaagccagtgagctgagccgccggagcctccagaagccagtcagctga

SEQ ID NO: 359872 - DNA, 122 bp, Homo sapiens
catactaaccaaccacgtgtccagtgaagaagtcctgccattttacagtgtactcgctttcgtttttaccatccaccaccacgaccttgaaattttgtgaaaaacgttcagtacttgatgtc

SEQ ID NO: 359873 - DNA, 122 bp, Homo sapiens
acgggccgcttcccgccctcgagccccgcccatttccaggagccttgagcccagagtctccgtcccgccctcaggccccacccacagcctcgggcctccgagccacacgttccccaaccccg

SEQ ID NO: 359874 - DNA, 122 bp, Homo sapiens
caaaacagaaaataccatgcttatgtgcttgaaggcaacttttccattcaggacggaggtcggggctgggaaagtgactatccccttattaccagtcagtgataggcaggggagccaaaagt

SEQ ID NO: 359875 - DNA, 122 bp, Homo sapiens
ggaccctccgagccaggtgcgggatataatcttgtggtgcgccgtttttttaagctggtccgaaaagcgcaatattcgggtgggagtgacccgattttccaggtgcgtccgtcacccctttc

SEQ ID NO: 359876 - DNA, 122 bp, Homo sapiens
tgacgcagcccgtctcatctccccggcagctgcaaggcacaatcctgcagtacgtgaagacgctgatggaggtgatgcccaagatctgccgcctgccccggcacgagtacggctctcctggt

SEQ ID NO: 359877 - DNA, 122 bp, Homo sapiens
tccggtgcgctccccgggactgcggtcccccagtccgcgccccgcccagccgtcccccgtcggctccagccaatccgcgcgcgctcccctggccgtctcccaccggatcaggtgtctcctct

SEQ ID NO: 359878 - DNA, 122 bp, Homo sapiens
ccaagacactgttctctgcagcaggtttgcacagggtgccagttagggaggagaaggcagcgaggaaccccgcactttaaggaacagggatgtcatagcagccgtctgcatgggggaggggg

SEQ ID NO: 359879 - DNA, 122 bp, Homo sapiens
ccaacaccgagtgcagctcgtcctgaacccagcgctccagacccgccggcgtcgccatggcgactcacgctccctgctcccggccctgaagcgtcgggcagccgcgctcactgctgggccgg

SEQ ID NO: 359880 - DNA, 122 bp, Homo sapiens
cggcctccccgctgcggccaagccagcgagttgcagcctgctccactcaccgagcgagaccgccgcagccagccctcttcgggccctggcaacccgctctccgttccggttccggcgcaggt

SEQ ID NO: 359881 - DNA, 122 bp, Homo sapiens
ggagcagtcctagaaaaatatgtcatcaggccagtatgcactgggcacctttatccacaacgatggccacagtgctgtggcctctgagagcctcattaaccagagaaggaggtgcgggcaca

SEQ ID NO: 359882 - DNA, 122 bp, Homo sapiens
agaagcgctgacaaggatagagctagaccctgctactgttttcctccttcctctggctgccgggacaaaacccctaggaatcgctcattccgtcctccctgccgagatcagagctccgcgac

SEQ ID NO: 359883 - DNA, 122 bp, Homo sapiens
aatgggagctcgaagtagcttccgttattaacagacatacaaacgcccctaaccgccacacgttccttagggatgacagtacgttacaaaagtgcttctaaagtactactgaaagctccgtg

SEQ ID NO: 359884 - DNA, 122 bp, Homo sapiens
agttggggtggggggagacttccgcattttaaaggatttccaagtggagccagtagcaagcggggattggcctagaggcagcttgattaacttatcccagtttcttcaggcaaagctggtac

SEQ ID NO: 359885 - DNA, 122 bp, Homo sapiens
gccccacccatcagcagggacacagaaaaagcaacctgctgagcggaaaggacccggtggcggcccaaagtctagggaggaaagggcttctggaggtgggggtgagcccccgggtcaagtgc

SEQ ID NO: 359886 - DNA, 122 bp, Homo sapiens
tgcacaacattcgaccttgactcatttccttatcgcctggcgaggctcaaggctctaatgcgcagctggacgtgtcccagaagctctgtagcctcctcccagctggcccttgaacgacggca

SEQ ID NO: 359887 - DNA, 122 bp, Homo sapiens
gaaagtgactccatgctcaaccttgagtcccgtgaggcttaggaaacagctgctaatgtacgccaattgagcgggaagcccatgtaggaaggcctggaggccgggaagccagggaggacgca

SEQ ID NO: 359888 - DNA, 122 bp, Homo sapiens
tgcaagaacccaggtcccctggctctgaaggctctctccacaacacagcaagctgtcagacgtctttgttgcatcatgcattgaggtagtgaatagtccgtaaacagtgaggaagggtaatg

SEQ ID NO: 359889 - DNA, 122 bp, Homo sapiens
ggaagctgggcgtgtacacattcaccctcactggtatggtgaagaaatgttatccaacagcgtgggtgtgggcactgcccaaattctttaccctggaacaactgaggtcaggcctgtagaga

SEQ ID NO: 359890 - DNA, 122 bp, Homo sapiens
gggactccggcggtggaaagtcctcctcccggcctcgtttcccgcatttcccagggcgggcgggtccctgagtcagaacccgcgacccacaggcggcatcgatctgaggcattcgtttttca

SEQ ID NO: 359891 - DNA, 122 bp, Homo sapiens
taaagtctgacgggagctctaaccaaagccaaccagctgagatgcgatccggccgctgggcgggggcgaaaaaaacaacttccggtcccctctaccccggcattcggccagctctatgatca

SEQ ID NO: 359892 - DNA, 122 bp, Homo sapiens
gccaaaccgaaagagagaccctggagagggctgagcccctgtgggcctggctggaggcctcgggtaggatgctgaggcaagagccacagcggtccgagtccaagaaccacgtccagactcag

SEQ ID NO: 359893 - DNA, 122 bp, Homo sapiens
aacgagcaaactccggacacaccatctttaagaactgttaacactcacggcaagggtccgcggcttcattcttcgtcagtgagaccaagaacccaccaattgtggacacactatctttgtcc

SEQ ID NO: 359894 - DNA, 122 bp, Homo sapiens
tccttcaggttcagctcgtggaagacattcaggatccggtctcgagacttctgggccgaccgtctcatgaggaccctgctgaggaacttcctgtcgaagtgggaccacctgtagggacagac

SEQ ID NO: 359895 - DNA, 122 bp, Homo sapiens
acgggcccagagcagaaagtccaggttatggaaggaatgagagcaaaggctgtgattgtacgtgcaactgtcatcttgctgggattgtgtaatgtcatgaggctgggttacgtcaataccaa

SEQ ID NO: 359896 - DNA, 122 bp, Homo sapiens
tgtctgggcggtcctagccaccagtcattcattagcatacaaaaagacattcatcactcccggggattccaaaagtcttagaagctcttgtttcagaaacagggaaaaggaccaaatataat

SEQ ID NO: 359897 - DNA, 122 bp, Homo sapiens
gtgtacacttcaggaagacgtggaaattcccagggcggaccaaaacttgagctgttccggcggtagtgatttgaggtcagtttgaaagagaagttgagaaagcggccgaggggcgaatttgg

SEQ ID NO: 359898 - DNA, 122 bp, Homo sapiens
ttgcccgggcatgtgggagctgccggctttccggacgccacgtgcagaccggaagagacacgcggggcttcaggtgagatccaggaccctgcaccggggcggcggggtcgggcgggctgagg

SEQ ID NO: 359899 - DNA, 122 bp, Homo sapiens
ccaggcctggaagtcatccaagctgcgcaagaagtcctgcagccgccgcgcctcccccagcgactcttctcgacgccgcatggtggccctgaggtcctcccagccggtctgcacctctctca

SEQ ID NO: 359900 - DNA, 122 bp, Homo sapiens
tcagggtggagggcccagtgctggaggtgtgcaaggctggctcgttcacctcgctacccccgttcaggaattctacaggatctggagtgggaggagctacagagggttcctggtccacactc

SEQ ID NO: 359901 - DNA, 122 bp, Homo sapiens
cgaggctccgagccaagatttctgccctaatagtttctcccttctttctgtctgctccaccgcacccactaaatacgcggcgctcacacacggacacgcgtgacacgcggcgctcacacaca

SEQ ID NO: 359902 - DNA, 122 bp, Homo sapiens
gtgacgtaggtggagcgcgcactgcctccgggcccgtctttctcaattgggaccggaaaacgttgtcgctcatcctatgacgcgaaagtaaccgagactatcaggatccggagacggaaatg

SEQ ID NO: 359903 - DNA, 122 bp, Homo sapiens
gcaggcacacgggcataggtaagcggaagggtacagccaacgtccgaatgccagaggtcacgtggataaggagaatgaggattctgtgctggctactcagaagataccgtgaatctaagaag

SEQ ID NO: 359904 - DNA, 122 bp, Homo sapiens
tggcctcattttcaaattctgtcatccttctctgctaccagatttccagtttttgaacctcgtatatacagaaatcacacatttctccccatttctactcaagcccatgccacacaaacctg

SEQ ID NO: 359905 - DNA, 122 bp, Homo sapiens
ggcttttttcctgccgcctcggcctccttcccggcgcgctgtggtcccggcgcccgcggtcgcatggtgccctcgcccccagcgccgccgctctcccacccgccccgccgcccaccctggct

SEQ ID NO: 359906 - DNA, 122 bp, Homo sapiens
ctgccgcccccctttaccactggatagagcggcggacacaagcaggagcgccaagaccagcggccgcgccaaccccacaagggcttggatggccgacccgggcagcagtttcgcttgtgctg

SEQ ID NO: 359907 - DNA, 122 bp, Homo sapiens
agaaacccctatatactcataagtcctttttaaatataaggagtttgcatgtcccctcaacgctgtctgctaacaaaagaacaccttcccaggtctctacgtcaacatactaaaggtcctca

SEQ ID NO: 359908 - DNA, 122 bp, Homo sapiens
ctattcacattgtacaattgttacacaatctacaaaaagtacaaaagcctagccattttccgatgccaggtcagagccaagttgcaaaaaaggaagacagcacagtaagttacaagaagagc

SEQ ID NO: 359909 - DNA, 122 bp, Homo sapiens
ctaatacaggactctgttaatgcatgtgcaccgatggagggcttccgaccacagatgtagcgtggattccagctgcaagtttatgagagagccagcttttgggttcaagtacctttcctgcc

SEQ ID NO: 359910 - DNA, 122 bp, Homo sapiens
gaaagggcgctgtctccgatttgcaggtgagcagacagcttcggagtgagaacggctccccgcgggtccccggtggcgcgcggctcccggaggcaaaacaaagctggggccggggcgtcgga

SEQ ID NO: 359911 - DNA, 122 bp, Homo sapiens
aacacctctaatcatactctttcagtttacaatatagaggacatctcagttgaattaccacgttatgtccaccaatttgtattcagatggaaaccatatgttcctccactttatctgctagg

SEQ ID NO: 359912 - DNA, 122 bp, Homo sapiens
ccgcgcggccgtaaagagtttgtagaggcagttcgggtgcggtacgttgcattccggtaccggacgccgagagcggtttgtctccgtctctggagttgtaggcgagaggtgatcatgtccgg

SEQ ID NO: 359913 - DNA, 122 bp, Homo sapiens
tctaggcaattgagatacagcagtaaataaaatagacaaagttcctgtccttaaggatctcgtattctaaagggaaagggagtaataatttcttcctgtattcccttttcctcacctactct

SEQ ID NO: 359914 - DNA, 122 bp, Homo sapiens
atctcaaagagccttggtaacgaaatttgagccggaaacagccttttgtgtgctagttcacgtttctcccacccttcctcagcaaattatcccactcccaaactaaagcccccctgacagcc

SEQ ID NO: 359915 - DNA, 122 bp, Homo sapiens
atggacgataggataggatacagtggaaaaataactgtttcgtttacatgggaaggtgcacgtgtaaagcctactggcagggggcttagaatttctaatgttcccatggagatcaacagggc

SEQ ID NO: 359916 - DNA, 122 bp, Homo sapiens
atttcccacctgactgaagactctaagaatacacatgatattgtgctggaaaatgtgacacgccgcacacaaattgcaatttccaagtagttcattgtcgaaagctgctgccaaattggttg

SEQ ID NO: 359917 - DNA, 122 bp, Homo sapiens
cgaggcttttcgtttcccggagtgtggatctcgattagccaaacattttgcggaagagcccggcctcatcccccaggcccaaatgctccttacaatcctttttgcctttaggtcgggccgac

SEQ ID NO: 359918 - DNA, 122 bp, Homo sapiens
ggtgaatctgcagagtgtgagagctggcggcccacttctgttccacgtgggcgcatttcccgaactgcgcgtggaaaagccgggctgccgcgactccgtcagtctcggccccgcccccgcct

SEQ ID NO: 359919 - DNA, 122 bp, Homo sapiens
aaagtgctgcttccaaacgccacccgtcaggacagattctaaaccaccttaacttgctgccggtttcaagtgaaaataaatggtacataagtaatcaagaagtcgcagtcccagacctctga

SEQ ID NO: 359920 - DNA, 122 bp, Homo sapiens
aggagcggggccggaccccaggcccagcatggcactggccccgcgtgacctggcgcaccccgcagagggaggaaggccgcatccagggccagctgaaccactcggactcatcgcagtacatc

SEQ ID NO: 359921 - DNA, 122 bp, Homo sapiens
ggaaaagcccgtactgcatttcacccataaacttgtccagctcctgccctgaggcattgacgagcagagctcccgttttgcagaggacagtggctttgatccacaacggtgtccccaaggct

SEQ ID NO: 359922 - DNA, 122 bp, Homo sapiens
aacctaagaattcctggactctgactgggcgtgagaaatggccggaagtagcttcgagtccgtcattcaagcagtagaggctctggagaaaaactggagcgcatctgcttaaagggccgccc

SEQ ID NO: 359923 - DNA, 122 bp, Homo sapiens
atagggtgtccagctttggaaattcatttgtgagccaagaagtgtgtgcgtgaggatgagcgtggcttatgataaataacttactgtaaagggcaagtttcagttaggaattaacgattcgt

SEQ ID NO: 359924 - DNA, 122 bp, Homo sapiens
gcctgctggactctgaggcccacgctgtctcccttgtgctgcctggcacccaggggctctcgaagtatgaaaatagacaccatgcatgacacgtgataagtactgggtacagcaggagtagg

SEQ ID NO: 359925 - DNA, 122 bp, Homo sapiens
agaggctcagggagaggataatgcggttgccaagtgccaggcttggcctgggtgagaacccggggctgcgcgagcacggtggcctcggtgcgtcccccggctgtccccgccgcgctgggcgg

SEQ ID NO: 359926 - DNA, 122 bp, Homo sapiens
ttatcttttaaatgggaccacagttccgccctcctgtctgtcccatcagccccagtaacacggcttgggaaggaactggaggactttgttggattcttgctcttgggaatgggaatggtgcc

SEQ ID NO: 359927 - DNA, 122 bp, Homo sapiens
agtgttgttaccaaaccatgcaaacagagagcgagaaccgaaactcctaaacaagtgtgtcgctaaattcagaccacacaggctcaggcaagttttacagacagtattatgagtttctaaat

SEQ ID NO: 359928 - DNA, 122 bp, Homo sapiens
gccacaaggccccgtctttgcaagctccccaggcggggtgcagcttcctttgtccctaggcggggtgcagcttcctttgtcctcagactgaacatctccctccgccaccggtgcgggaggag

SEQ ID NO: 359929 - DNA, 122 bp, Homo sapiens
ataggaaaaacacattaagtcattaccagcttgtaacaccattctgtgacttcattgacacgttattatgtatttgtcacttagctttctaatgaccctgcacaattttgttggcagaacag

SEQ ID NO: 359930 - DNA, 122 bp, Homo sapiens
ggcggcgcttccctcctcaactccaggcctgggaggtgactcatagagtctgccccctctcgcccttctgccctgggaggtcgggggtgaggatggtggaggggaagcgtgcgaagggggtg

SEQ ID NO: 359931 - DNA, 122 bp, Homo sapiens
ctcctgtggcttccacgacctaatcctaactccagggactcgcaggagttaggattaggtcgtggaagccacaggcgcctgggcgccctcctctacaagtgggaccttgagacaaagtgcaa

SEQ ID NO: 359932 - DNA, 122 bp, Homo sapiens
agcacccagcccagtgccaggcatacattgggcgctcagtcaatacctgtttcaagaaagcgtgcaattttctggtccgcaccggtgcaccactaggggtcgctcttcggggggggtggggg

SEQ ID NO: 359933 - DNA, 122 bp, Homo sapiens
aaagcagaggaggatgaggaggccgaacgtatccttcctgggatcctcaatgacaccctgcgcttcggcatgttcctgcaggatctcatcttcatgatcagtgaggagggcgctgtggccta

SEQ ID NO: 359934 - DNA, 122 bp, Homo sapiens
ggtgtggagggagaggcgcgggtgggaaccagggctgcacgcggtgtttgcgggccagcacgagttccgggtgggtgtgggctcagcaggccctgcactcggagcgaccggccggccctgca

SEQ ID NO: 359935 - DNA, 122 bp, Homo sapiens
aaattgcgcccgcattttacctttcccgaagtgggtctccaaattccgcgcccaccccaccgcccgagaagcccactacgcatgcgtccgcaccccaccggcgccccttcctattgagcatg

SEQ ID NO: 359936 - DNA, 122 bp, Homo sapiens
gcattgccttaagagctgtaacactcactgtgaaggtccgcagcttcactcctgagccagcgagaccacgaacccaccagaaggaagaaaatcggaacacatccaaacatcaaaggaacaaa

SEQ ID NO: 359937 - DNA, 122 bp, Homo sapiens
gccactggtttggggagacttccttttcctgctccagcctgtgggcctgtgcacaatagccgctggcacatagcccatcagataacaaggctggctctctgcaggcacagtgtggattggaa

SEQ ID NO: 359938 - DNA, 122 bp, Homo sapiens
gagccttgggcctcaggcttcctgtctctgttggggaaaaggcaaggcctccacaggaggcggatatggtctgcaggctattgccgagatgcctctttgccaacagccacctgcactgtttc

SEQ ID NO: 359939 - DNA, 122 bp, Homo sapiens
agccgcatatttgcaggacgctgacgtggggctacttcacccacagccagcaagcgtctgcgccagttctgggatttgtgtccaccttgttgtaagaaggcagctgcttgcgtgaggcatgg

SEQ ID NO: 359940 - DNA, 122 bp, Homo sapiens
tgggctgttgttttctgagccccaacagaaggaaaatgaatcatttttagaatcaggacccgtaaactggagaaggagtgtgggagaagcatccttgcctctaaacatcaaagctcattttg

SEQ ID NO: 359941 - DNA, 122 bp, Homo sapiens
gggcgggtgttgctggggagaaaagcgcggcacggccccgcccgagtcctgcgggcacagcgctctctgctggtgtgggttgagaactgcatgagactaattaaagaccaccatccacttaa

SEQ ID NO: 359942 - DNA, 122 bp, Homo sapiens
atggattgacatttcccttctaaaagaccccagttggtgaatactgattaccccagtcctcggccccagtgatccctcaacccccacactttaagccacttactctggtcggcagatcacca

SEQ ID NO: 359943 - DNA, 122 bp, Homo sapiens
gggttgggggcgggcggcgcggagctggcggaggggggcggcgcggctggaggcgggtgccgcggcgtcgcgcccccggtgcggccggagggggggcgccgggccgggcccgtgggcaccgc

SEQ ID NO: 359944 - DNA, 122 bp, Homo sapiens
ctccccctcccattgcctggggggattaagaggctctattgtccctggcctgatggcccccgcatttgcatatatcaagtccctggggctgggaatagtggcgcgggctgcacctgctgccc

SEQ ID NO: 359945 - DNA, 122 bp, Homo sapiens
tgtatccttccttctccactgtgcagagacccactgcctggggaatctgcctccactcaccgccagatgctcccaggaatcagcttctgtatgtgctactctacctgacccacttctcccca

SEQ ID NO: 359946 - DNA, 122 bp, Homo sapiens
ttttcaggtggcgcccccattacaagccggccgtccttccgggggggcccggagcaagcccggctctcgcctggtggcgtttctcactagggcctccaaatgttgtacttgagcgagttaga

SEQ ID NO: 359947 - DNA, 122 bp, Homo sapiens
gacgccgcttctcctcgggttccgagaatcacgcgaggtcccggctcagccacccgctctcggcccaggaatcccgcactctcccaatgacccggaagtatcgacctcaaagatgccctttc

SEQ ID NO: 359948 - DNA, 122 bp, Homo sapiens
gggggcgcgctgctgctatgcggcctcgtagcgctgctgggctggagctggctgcggaggcgccgggcgcggggcatcccgcccgggcccacgccctggcctctggtgggcaacttcggtca

SEQ ID NO: 359949 - DNA, 122 bp, Homo sapiens
aaaatagccaacatcaataacagcctcttccaaaaaggtttcaaaaccgggagaatcaagcggaaaatcccgagtttggagaccgggattttaaattctgtctgtggttctgaagagtaact

SEQ ID NO: 359950 - DNA, 122 bp, Homo sapiens
tccagcgtgcccccttcatggctgcggcaaaagtccccctggctccctggggaagctccacggcccagcagctgcagtgtgaggagcagacgtgagcccgtcccctcaggcggctggcccga

SEQ ID NO: 359951 - DNA, 122 bp, Homo sapiens
cgtctcccccacggtgcgaagtggtacggctcgcaggggcggggcccaggtcatgtgacgcggccgcggccgccattttgttctgcggtgctggtatttagagcgcagcggctgacgggccg

SEQ ID NO: 359952 - DNA, 122 bp, Homo sapiens
aaggggaagagggagtccttcgtgagttcgccgctcacattcggcggtgggaaaccgatccgaagatgcttttgtaggcgaaacgctcagctcgcgcggctctgaaccaccggggagcagcg

SEQ ID NO: 359953 - DNA, 122 bp, Homo sapiens
agctccgggcccggatggtggaggccccttcccgccctggcccttgggttagccgcctcccggccagcgccatctcccgcccttggtgctgcccccgggcggtacctgctctctcccagcgc

SEQ ID NO: 359954 - DNA, 122 bp, Homo sapiens
taatcacttaacttttaaaaagaaccttctgaatataaaccctcttctattatgaaactccgggagaactttaatattcagagattagaacccccaacgggacatgaaagttcaaggctatg

SEQ ID NO: 359955 - DNA, 122 bp, Homo sapiens
agggaaagagatgtgagttcctgaagcctcccgggaggctattgaaggaccaggtgatgtcgtcactaccctacccttccccttgttggctttgcggggccaacttgcagtcgccctctgcc

SEQ ID NO: 359956 - DNA, 122 bp, Homo sapiens
catttgaatgtcagtagatcacagtcagggaaggcaggaaggggaacctggggcagaggccggccttatcacacaggtgcacctggtctcctgggccgtgagagaccgggtcatgaggatgc

SEQ ID NO: 359957 - DNA, 122 bp, Homo sapiens
tcacagctggggaatggggtggtcgaatggggaggtccactgtcgcaatgttccaattcccgcccagagggagggacctccccttcgagggagggcgccggaagtgacgcgaggctctgcgg

SEQ ID NO: 359958 - DNA, 122 bp, Homo sapiens
actacccccggggcgtgtaccgccgaagcctgaagaggctggttgggccaaaatagcagtcgctgcaggcaccagtttcagcccgtcacctgagtgccggttcctgtgggcgcgccagtctc

SEQ ID NO: 359959 - DNA, 122 bp, Homo sapiens
tttttgcatatttaatattcagaaatatgtcttggcgttgagtttcgagatggcttgtggcgagccacgccgtttgccctagggctgcttggttaccatttgttgcagggctctgtggttac

SEQ ID NO: 359960 - DNA, 122 bp, Homo sapiens
accaccggcatctcttacctctgaataaggcttcctgcaattctcactcaacagagaagccggtttgatctatttaaatccttccatgcttaaaaccagtctaccaagtcccattgtttagg

SEQ ID NO: 359961 - DNA, 122 bp, Homo sapiens
ggtgttcatcgtctactcggagagcaaaatggtcattgtgtgcctcatcaccatgttcttcgccatgatgctcctcatgggcaccctctacgtgcacatgttcctctttgcgcggctgcacg

SEQ ID NO: 359962 - DNA, 122 bp, Homo sapiens
gtgactccaggaaaaggggctcctgggcccagggaggtgcgcgggctggggactcggccacggcgcctcccgccggtccttgccatctgaaggccgggaggagtggggagtcggcgcttgca

SEQ ID NO: 359963 - DNA, 122 bp, Homo sapiens
tgagttcaggaaataggagaacctggccccggagcaaccccagaagcgcaggaccacgaacgtcccgacccccagcagcaagaggccgcccagggccccaaagaagatgccgaagaacgcgt

SEQ ID NO: 359964 - DNA, 122 bp, Homo sapiens
atgttgctgccgatgtgggattttcctggcttcgtcagccaagcaattggctgcctttgccggaggctttgagaaccaaggcttgaaggccggcaggagcatccagggggaagcttggcttc

SEQ ID NO: 359965 - DNA, 122 bp, Homo sapiens
aggattcttgaatctcgggacccgttgccagaataacaaaatgggggcttcctgtaacctcggctctttaaagcaacacttctgataccagggttagggtttcagaaaatgcagccgcctta

SEQ ID NO: 359966 - DNA, 122 bp, Homo sapiens
tcttcagtgggctgccatcttttcctggatctcaaattcattctttaaaaaagtggaattcgtaactcctttggggatatttctccaaatttaaaaacacattctcttacatatcattgtaa

SEQ ID NO: 359967 - DNA, 122 bp, Homo sapiens
agggacagtgtcactgtgtgccctcctggggtggggaagggccagccagccttggcctcacgggacatggttcagctgcccaggcttcaaggctgctcccacctgatgctgggcccaaggag

SEQ ID NO: 359968 - DNA, 122 bp, Homo sapiens
ttctgtattcttgtttgttgaagtttaagaatcacagactacaggactcttaggtaaatgcggacagcttcagaacccaagtcatcttgtcttggttgtgatgtaccctttccctggtttgc

SEQ ID NO: 359969 - DNA, 122 bp, Homo sapiens
ggagccctcctagtgcctcccacaaagaccgctaacattaatctccaaaaccacgcacctcgtcggggaacaggcggcctgaacagctcacttcctgtatcttgagggatgaggagctggag

SEQ ID NO: 359970 - DNA, 122 bp, Homo sapiens
tcctcagcccttgggcggtccatgggactgggcgcggtggaacagggggcggcacttgtccgtggaggctccggccgcgcagaagcccatggcgggtgggcagggtaggctcaggcattgca

SEQ ID NO: 359971 - DNA, 122 bp, Homo sapiens
aaagcctaaaattaaggtctggccagcaacaaaagaatttagagaagcccaggactggatcgttttagtctattgttgaaattcagattcggaggcagcaccctaaaatgtttcacctctgg

SEQ ID NO: 359972 - DNA, 122 bp, Homo sapiens
ctgaggagggctgggggcccagggtctgtgggggtccccagcaggtggggttggggtctccggagtccctggagtctgagggtgtctctgaggtcccaggggggagtctatggcctgagggc

SEQ ID NO: 359973 - DNA, 122 bp, Homo sapiens
ggcctccaagacgcagactagaagcccatagctgctgggaagatgggcaccccaggtctccgcgcacggccttcccagggccacggtgaaacatggatgcgacactcaggcaccttcccggc

SEQ ID NO: 359974 - DNA, 122 bp, Homo sapiens
gaaataggtactttgatgctgcctctcattctcctcaaaccataggctaaggggtgctggcgggctgttgcctagcagccccaggcagccagactgcttccagatgccagtggtcacaagta

SEQ ID NO: 359975 - DNA, 122 bp, Homo sapiens
cgcagggtccgtggtgctggctgggcgccatagggggcgccccgttgtagtccaggttcccggaagggtgatgggaaaggtggttgaggccatagagggaggggccggcagggggcggcagc

SEQ ID NO: 359976 - DNA, 122 bp, Homo sapiens
tcagccaacgaagctcattacaagctgctcctcagacttcctgtcagctgggactgcatccgcctgttcagcccttccaggcctggagctggagcccaggagggaggccaaggggtcccact

SEQ ID NO: 359977 - DNA, 122 bp, Homo sapiens
ctggctgctctctctcaaaggtcccttctgattctctttgcggaaattgactactgggagcggctgctgtttgagacgccccattacgtggtgaacgtagctgagcgagccgaggacctgcg

SEQ ID NO: 359978 - DNA, 122 bp, Homo sapiens
ccgacttcccgggctgctgcagggacgcagtgagcaaggaggcgtggatacgatacctaccgtatttggttctaatgtgcgagggtcgcgcggggggagactgggatttcactggggagaag

SEQ ID NO: 359979 - DNA, 122 bp, Homo sapiens
tctttattctccattctgcctacaacgttgtctattccaaattgaacatccttcatgttccgttctccattgtcctctctccataccttctccttcatacaccattcttcattttgaatttt

SEQ ID NO: 359980 - DNA, 122 bp, Homo sapiens
tccatcctgttgggacttgattcgttcctcaaattttcaatttaccgtaaacaaaggggacgcgcgctgacccggaagtgaaagctggaacccggccggagtagctctgagcgccggctgtg

SEQ ID NO: 359981 - DNA, 122 bp, Homo sapiens
gcccccgcgcgactcgcagcctgggttttatggctgggcaggctcgaatggcagccgggtcgcggttacctgtcctaggaggtgcacactcctgtgggctgttgcccgctgacaccaacgcc

SEQ ID NO: 359982 - DNA, 122 bp, Homo sapiens
ggcttagcacagcagatgccagagtaagccccaatctagatggtgcaccacttagcgagacgcttgggaagacaaataggaaaaagaaaatgggtttggaagtagtttcccaagaagctgtc

SEQ ID NO: 359983 - DNA, 122 bp, Homo sapiens
gaagaggtcgtggaccatcccccaaaatgaatcccaacactggaagaccaagagggttgacgtttgctatcttgaaagctgcagcccccgtagagaaggtaagctgtgtattccatcaaagg

SEQ ID NO: 359984 - DNA, 122 bp, Homo sapiens
cataaaaaaagtctctctcccagacctcaggtaaaattaatgttctaggaacgtatgccacgcatttccactggctatccagtaccactctcgcgtgtcagcacattccaaaattagtttaa

SEQ ID NO: 359985 - DNA, 122 bp, Homo sapiens
cgggggccgcaactcactgccgttgaggctccgggtttgcagccgtggaggtagtgaggtcgtggcctagatgagagcccccatcagggctctgccaagggacccctggctctgagctgggc

SEQ ID NO: 359986 - DNA, 122 bp, Homo sapiens
cgcagaacccccggggtagaccccgacaacataaaagcaattgctaaactctactgtaaccgggatatggttaattccgagcttgggaaactagatgatgcaatagacagctgcacaaatgc

SEQ ID NO: 359987 - DNA, 122 bp, Homo sapiens
gcggctggggagagggtcgaggggcagcatccaaggccgtcttcttacaagggctgaatccgagcccagggtgcggctgcgttccgggggggttcctcccggagtgaccgcacccctgcccc

SEQ ID NO: 359988 - DNA, 122 bp, Homo sapiens
ccaggtgcagattctgttcctaactgaaagctgagtgttctccgcagcttattgtggccccgacaagcctgggtaactgcggccatcgccagagcagccttggcgctatggaggcgcccagg

SEQ ID NO: 359989 - DNA, 122 bp, Homo sapiens
cccacctccagaatctcccttccctatcccagcccagcccctgctcacccagaacagcagcgccaataaagacaccgcccatggcagctgcagccttggatacggagatgccgataatgatg

SEQ ID NO: 359990 - DNA, 122 bp, Homo sapiens
gccgggcttgcgatgaacttccggctgtcaagctcccggccgggctgactcaagcggaggcgcgcggaacagtcgccgaggcgattcccgcccaggtagttcagcgccccagtccagctccc

SEQ ID NO: 359991 - DNA, 122 bp, Homo sapiens
cgctacgcatgcaccaccaggtcctgctctcccggagccacagtgtgaggccaaggtcggcgcaggttcccgtggcccggcttccacctgcagcaggaggccctgggtcacggagagcattc

SEQ ID NO: 359992 - DNA, 122 bp, Homo sapiens
gcctggagcaatacacacgggactggccatggataggttattgacagttacgagaggagccgggtgcggtgattcatgcctgtaatcccagcaatttgggaggccgaggggggcggatcact

SEQ ID NO: 359993 - DNA, 122 bp, Homo sapiens
gcggtaacagctgcggcctgagtcactgggcccggcgcggggtgggccgagccccccgcccggccagggccacgtggcccctacccggaagaaggcgcccacccccgcaaagggaaagccgc

SEQ ID NO: 359994 - DNA, 122 bp, Homo sapiens
ccacagcacccggccatagcataatcttgaatactaaatgaggctgggcacagtggctcacgcctgtaatcccagcactttgggaagagaagcaggaggattacttgagcccaggagtttga

SEQ ID NO: 359995 - DNA, 122 bp, Homo sapiens
cacccctggaactctcagcttttcatgaatttggtttatatttttataatatttatctcacgccctcatgttagaataaaattgggatggaaagcctctaaattaagcaagaagctcagcaa

SEQ ID NO: 359996 - DNA, 122 bp, Homo sapiens
gctggcctgcatcagctggaggaaaagcagccttttcataactcctcagcccaaggggggcgttttattgtaattcatccgctcacaactgcgataggatcttgtatctcccacaaaggcac

SEQ ID NO: 359997 - DNA, 122 bp, Homo sapiens
cctgcagctgctgctggggtgcaaggccagcagggaacgtggatagctacggcatgaccccgttgctcccggccagagtgacgggccacaccaacatcgtggagtacctcatccaggagcag

SEQ ID NO: 359998 - DNA, 122 bp, Homo sapiens
gaatatgttttgagttatgcactcactgaagtgtccccatatttttgcagctcttctctacggaggaactggagctctagtgtttttttttttttgtggcagtccgtgttaagtttatacag

SEQ ID NO: 359999 - DNA, 122 bp, Homo sapiens
cggccatggctcggccccgggcctgcagcaccgaggcaggcagcgagcggcggccgtgggcggcgctgggttgcaccggtcctgctaccgccgctcctcggtgtttactttagaaaggagcg

SEQ ID NO: 360000 - DNA, 122 bp, Homo sapiens
gccctctcatcctgccactcaaacccccctccctattatctgtatctcggtactgaaagacggaggctgggaaaaccgtgcctccaagttagggccggatgccatctttgtccctcgattct

SEQ ID NO: 360001 - DNA, 122 bp, Homo sapiens
actcattccacaagtgtttgttgggcacagttctagacactgggcagctgcggctgtcagcgctgtcgtggtaccctctctcctgatcttaacatcctcattgggataatttataaacaaat

SEQ ID NO: 360002 - DNA, 122 bp, Homo sapiens
cgcctaccgccccaaatgctattataaattccaagtcggcagggtgagcttttccgtgtccgctctgcaaaatgaacagaagagcaggaagtgtggttggtgggaaccacggagatgtttgt

SEQ ID NO: 360003 - DNA, 122 bp, Homo sapiens
cctcccttaattttcatgcctctttaatattgtttcttttacctcactgacattctttttcgtcctcctaccttttactgtgggtgtcttattacccttctttgggagtttatcctttagca

SEQ ID NO: 360004 - DNA, 122 bp, Homo sapiens
tcacacttctatcatcaaaataaagcaatctgcacattttgtgttttaccatgtctgtgccgtgaaatcagctatcaacccaaattaccactttacttcactcatcccaaagagagttctgt

SEQ ID NO: 360005 - DNA, 122 bp, Homo sapiens
agccaagaaagatgtatataggtgtgtgagactactaagaggcatggccccaacggtacacgactcagtatccatgctcttgaccttgtagagaacacgcgtatttacagccagtgggagat

SEQ ID NO: 360006 - DNA, 122 bp, Homo sapiens
caggaatttacaatctaagtggcagttccgttcctggaacctatcttctttcacagatgccgttacagctgtttcaaagactgctggttttgaaaacgctcagtccctcccaccacgctgtg

SEQ ID NO: 360007 - DNA, 122 bp, Homo sapiens
ctttcggcccagcccagctcatacctcccggcggccttcccaggccccgcttttgactttcggtggcctctgcaggccccgaacttgacgtccagtcagcctctccaggctcggcctcctgc

SEQ ID NO: 360008 - DNA, 122 bp, Homo sapiens
agttcacactaaaagctggcttccaatgtctgctagaggcactgctaggagggggtcttgcgggccctactatctttccgggctcactgctaaagaattaatgcaatagggagagaatcctc

SEQ ID NO: 360009 - DNA, 122 bp, Homo sapiens
tagcctctatggcactgaggggtgcgccggctggtggaggagcagtccgatggagccctgcgttccccggggacacagggccaagctttgaggtggaaagtttctggttctgaaacaacaag

SEQ ID NO: 360010 - DNA, 122 bp, Homo sapiens
ccacagcactccccactcggccccgcccacagtgcggccacgcccgtagcacgcccctcccggccacgcccacaaagctgcccacatggccccgcccacagctcgcccgctccgcacccccg

SEQ ID NO: 360011 - DNA, 122 bp, Homo sapiens
gaaagaaaaagatatcagtatgcttcaccactgtgaaggaaatttccatttcccaacactcgctctagggagtatcataaatagaaacaacgggaagatcaagagttgcttgtatggcgagc

SEQ ID NO: 360012 - DNA, 122 bp, Homo sapiens
aacaacacaacacccttcctggagcacgaggcaagtccagctgccaggccccttgacacccggctactgaccaaccagcaaaggccagctagtactgggagaggatgccttgcccggaccaa

SEQ ID NO: 360013 - DNA, 122 bp, Homo sapiens
agatagttcttgtttctactttagtcagctgggctgggcgtggtcctgcgaggaggtgggcggggcgcactgtggggcggggccggtggggacgtgggcggggcgcattgaggggaggggcc

SEQ ID NO: 360014 - DNA, 122 bp, Homo sapiens
aaaaaggagacccaccaaggctggagctggcaagatccctcccacacagagcaaggagctcggtcagcaacacttcatatatctgtccagttggcaaagcccctctgtccaggagtatcagc

SEQ ID NO: 360015 - DNA, 122 bp, Homo sapiens
aattctctggggaggttctagacaagatccgtttgagatctgcaaaaccaaatgctaagccgtatgtgtgtctgtacctatgtatgggtgtctgtcttgcttttgctgttcattgagccttc

SEQ ID NO: 360016 - DNA, 122 bp, Homo sapiens
ccctgcgcccagcagacgggcaggtgggcgggcgtccactacctgtgtgcgcggtgcgggcggtgactgccaagttggagatgcccttggagaactgcttcgaattcatgtatctactgggc

SEQ ID NO: 360017 - DNA, 122 bp, Homo sapiens
gctactcccggcgtttgcgcaagcggtcccacgtgggctcgggcggggctagcgccgcggcgggggctgggcacgcccctagcgcatagctggcttctgattggctttccggtgctcgcccg

SEQ ID NO: 360018 - DNA, 122 bp, Homo sapiens
cctatcctgatgacacaccagcaactaccaggccagcaatattacagtgagttggtatgccggtatgatgttccttggcagctaaaagtttctgtgatctttgtatcatttgctttatcact

SEQ ID NO: 360019 - DNA, 122 bp, Homo sapiens
ggtgaatcagaaaggaccgtggtcagttatgtgggagtgcagaaagccagccagccagcacgattcgccttggaggaatgacttctcatgctgccacctcctgcttctctgctgggggtgtg

SEQ ID NO: 360020 - DNA, 122 bp, Homo sapiens
tccacctcgtatgctcgcgctgttttacctaatattattataatgcattggctccagcagcggacctgcgcggccggggaaaaggggcgcgcgccttggcgactgggggcgcatcgtgggga

SEQ ID NO: 360021 - DNA, 122 bp, Homo sapiens
ctcaagtaatccacctgcctcagcgtcccgaagtgatgggattacaggtgtgagccaccgcgcctggccattttttaaacttgtatttgtaatcttagaaaatgtgggcagtggggctgggc

SEQ ID NO: 360022 - DNA, 122 bp, Homo sapiens
cagtgaccggaggctgccgcgcgccccgttctccagagaaacaatccccggagagaaagacggccagtgtgaaatatcagctgtttcacaaattctgaggtaaaagaaaaaaaaaaaaagaa

SEQ ID NO: 360023 - DNA, 122 bp, Homo sapiens
cttccacgtccgtgttgtgtgttttcatggcgtgtcactgactccccccgctggggcccgcgtctcctctgtgcctcctcgttttgcggtctctccacatttcctggatgctcactgtgcac

SEQ ID NO: 360024 - DNA, 122 bp, Homo sapiens
ctccagcactcagtcaatcgacagacaccaccagctcctacaaggttcacacaatgtcaacgagaagaggaccttatagatctagtccaacttcctcattgtacagataaggatatggaaac

SEQ ID NO: 360025 - DNA, 122 bp, Homo sapiens
tggtttctgtgtgctgttctgctgcattgtgttgcctggtgagagacattgataaatgagcgtttaatgatctgcagcagttcccactcactgcgggcaggcggattttagaacagaagtgg

SEQ ID NO: 360026 - DNA, 122 bp, Homo sapiens
gctccagtcccaggccgtgacatgcatcagctcccacacccaggattgtcccagagaaagcgctctgccctccccgtccacagcaccacgagggccataactgcactgccacacctctccag

SEQ ID NO: 360027 - DNA, 122 bp, Homo sapiens
ggatgaaaagatcattttttgctgcatgctaaatcttgcaggaaaaatgattttttagtacgattctgtagaaatgaatctttgatataatgtaaatgctgctgtttgtttcaagtggtgaa

SEQ ID NO: 360028 - DNA, 122 bp, Homo sapiens
ccaggcacctctgcaggccgggaggccctttgtgcttcaggatcatctccacgtgcagaccgggtgggggcagcaggtcaggatggagggctcttccccaagaggagcactgtcactatcac

SEQ ID NO: 360029 - DNA, 122 bp, Homo sapiens
tccagcttgagcgacagagaccttgtctcaaaaaacccaccaacagcagcaaactagtatcggggtttcttgggcctctgctgactctcacaatgcaagagcagaggcaactggatctgtaa

SEQ ID NO: 360030 - DNA, 122 bp, Homo sapiens
acccgccctcggtttgaagggactctgacgcttgaatccttaagggctcacctgggctgtcggaccgccggctacggccccgcggcgtttccccgaggcgaccaccagagggcgcgcggact

SEQ ID NO: 360031 - DNA, 122 bp, Homo sapiens
cctgctctcataaagttaatattctaatggcggaccacagataataaacaaatagatacacggcaagtaatagtgttgtaaggaaaaataaattagggtacaccacatagaaggtcttactt

SEQ ID NO: 360032 - DNA, 122 bp, Homo sapiens
gcacgaagccagttggtacgagcacctagaagcagcactccccatttgtcatccttcccacggggaaggctgcctgctgctccgagccctcaactccaatgaagtacagtcgtcaagaaacg

SEQ ID NO: 360033 - DNA, 122 bp, Homo sapiens
agctagaagggagaaggtaggggaaagacccattgtcggaccggaccgtggccagggtggcgggctgaacggccttcttaaaactccttccgtggccgggaagcccgctggaccagagtagc

SEQ ID NO: 360034 - DNA, 122 bp, Homo sapiens
gaaatcattcgtattctgcatcgctcatgctgggagctgcagactggagttgttcctattcggccatcttggctccaccccctattaatgcagtttttgtgcctcattaatgacccatttga

SEQ ID NO: 360035 - DNA, 122 bp, Homo sapiens
catggaggaaagtgaaggggagagccaatcaaattgcatcttcctttgactcgcgaccaacgggaaaaagggaagggcaaaatcagcagggcaggtcttggaagtttgaaattggcggttac

SEQ ID NO: 360036 - DNA, 122 bp, Homo sapiens
gaggggctgggcagctgccaggcgggggcggggcagcaggtcacgtgcctggcttcgaggcgggcgccggagggggaactctgaccatgattggttcctcctaaccaggtgaccgcaggtcg

SEQ ID NO: 360037 - DNA, 122 bp, Homo sapiens
accagacgttgaatcttcttgtagtccttcccaggaggccggtcatggggtgagttctggcgtggggggagaggggcagtctcagacagctggccgaagtacggcaggcctgcggggccagc

SEQ ID NO: 360038 - DNA, 122 bp, Homo sapiens
tcctcttcttggctttatcagctgtgcatcccctttcagacatttgttaaaatttcttgccgggtcccttatcatgttgggatgttttcagctgtaaatagaaatcctgtctaaaatttact

SEQ ID NO: 360039 - DNA, 122 bp, Homo sapiens
gaccctcgctgcttccagccgagcccagtcccgagccgccgccgcctccgccgccgcctccgccgcctccaccacctcagagccggacgcccgccgccctcgccgcttccgccgctgccgcc

SEQ ID NO: 360040 - DNA, 122 bp, Homo sapiens
aaaccatgggctgctaggtgcttacgctggtattcctcggacccctcaatagacacaggtcgggtcatggaaagggatacatccattaccaccactgtcggcatgatgaaaatgatcccagt

SEQ ID NO: 360041 - DNA, 122 bp, Homo sapiens
ctaggcaaagaacacagcagtagtaattatccgggttttttcccctttgtcctctctcatcgcatgggctttctcgtggctagcgcacatcagggttcccgcggccgggcgggcgtgggcct

SEQ ID NO: 360042 - DNA, 122 bp, Homo sapiens
atgcgtccggtcacagcaggtttgcggtcaccctctgggtccctaccccggccacccactcgtctggtcagagcaggtttgcggtcaccctctgggtcccaaccccggccacccactcctca

SEQ ID NO: 360043 - DNA, 122 bp, Homo sapiens
ggagcgacggggatgcgctcattggtcaaggaaggggcgcctgttactagaggcgagaaccggagcccattggtcggaacacctcacaatggaccccagcggcgcgcaaaatccttatgatt

SEQ ID NO: 360044 - DNA, 122 bp, Homo sapiens
cattggcaagacagtgaaagcatttgcagatattcagcatgagagagagaaaaagaaaagcgaatttgaattttgaaaaattttactctggtcacagtgtggcaaccagcttggtgaggagc

SEQ ID NO: 360045 - DNA, 122 bp, Homo sapiens
ggaaggctgagccatagacagggcacagttctcctcaagcatgtcttttctctccacagccgacagcaccagcatccggatcctcctggggccccagactccctccgtctgcagcaggggtt

SEQ ID NO: 360046 - DNA, 122 bp, Homo sapiens
ggggttgggggcagaagtcttaccttggcagagagccccccctcattgaggagaacggcccggccaatgctgttgatctggacggtgtatcgggtatgggggatgaggagctgtggggagag

SEQ ID NO: 360047 - DNA, 122 bp, Homo sapiens
acctgggcggaggcgtgcggagtcgggtagagagcgaaatcacgcctcttcagtcagccacgccctttattcttgctcggcctcgccacagagagcaaatcagattggctgggcgacaacct

SEQ ID NO: 360048 - DNA, 122 bp, Homo sapiens
gcttgggcttcggaagactctgcaggatccttgtgcttctttcttggtctctggatggaccgcagagtgtgcagatgtagcttaaacttgttgctgttcgcccacagcttcagtggctccag

SEQ ID NO: 360049 - DNA, 122 bp, Homo sapiens
tgggatccagagcagcccagggagccctggattctggaaaggatgcagcagtggaggcagcggcggcaactccagctcctagcccgggatcactccacacggtggccccagccagctcgaag

SEQ ID NO: 360050 - DNA, 122 bp, Homo sapiens
agctgggctagtcctgttccctggcgtctgggcctttctgctctccgcaaggagctgggtcgcgacctgtcactgccagccgtgcgctcgccctctgcgccccgtctcgtggtcactgccgc

SEQ ID NO: 360051 - DNA, 122 bp, Homo sapiens
gctccttcagggtgataaactcagggaaattaaagctggaatggggacgcccaggccgaccgggcgtggcagtttcctcaaggcgcctcgggtttagtccacagactcccgtcctggtagaa

SEQ ID NO: 360052 - DNA, 122 bp, Homo sapiens
aggctgcctctaactccacaacaacactgaatgcatagtctcaaacgtgttgccttacggcgctgtgtggagatttctctggggtatataactaggagggggactgctggcccatggtgggt

SEQ ID NO: 360053 - DNA, 122 bp, Homo sapiens
cgggaagcactgtgccgcctggggagttgaagtgctgcctcttgctctaccccatgaggccgaccctggacgcctcccctgagacccggaggcggcttgggacggacttgaggaggaaggag

SEQ ID NO: 360054 - DNA, 122 bp, Homo sapiens
ggagcactacagctggcggtaatgcagggagcacggcggctggcggtaacgcagggagcacggcggctggcggtaacgcagggagcactacagctggcggtaacgcagggagcactacagct

SEQ ID NO: 360055 - DNA, 122 bp, Homo sapiens
aattagactgcacacatctgcctgcccccagaggggccaaggctaatcgggtatcctctccggggagctgagtgtccagggacatcccatattttagccgagtaattcagacttacttgcct

SEQ ID NO: 360056 - DNA, 122 bp, Homo sapiens
attcctggccccgatttcccggaactgggtctggagctttctgcacatcattgactcgcccgacatcggtctgccgaatacctgctgcccacttctaagccgccggccctaaaccctgggca

SEQ ID NO: 360057 - DNA, 122 bp, Homo sapiens
tgagtcagcttttcgcgcgaacttttcctccgccagagcttgtgggactgtctccctggccggggcaggggtgtaaggccttagtcttagtttactctatccctgggattgggtagtggtgt

SEQ ID NO: 360058 - DNA, 122 bp, Homo sapiens
ctgaaaagcagcgggagcccgtagactgtcgagggcctcccgcccctcccgtcgcgagggcggggccagtggcgtcatttccaggcccgccccctccggccccgcctccccttggtattttc

SEQ ID NO: 360059 - DNA, 122 bp, Homo sapiens
ccagaacgcagaccgcccgcagctcccccagaacgcagaccgcccactgctcccccagaacgcagaccgcccgctgctcccccagaacgcagaccacttgctactcacattcatcttattaa

SEQ ID NO: 360060 - DNA, 122 bp, Homo sapiens
gctgactgctagaattgaggacgatgtttgaagaccatacccagagataaaactgggaagcgagtctgagtagaactgagcatcctaccatctgtacctaaatctactcttaagatgtttga

SEQ ID NO: 360061 - DNA, 122 bp, Homo sapiens
gagcgccggggctgatgggaggtaacctctgggtcctgacagggaaaaggcaagcacttccggctccgggtccttaaaaaaaagacatgtcaaagaaagagtgctgcagaaatgccgaattt

SEQ ID NO: 360062 - DNA, 122 bp, Homo sapiens
gacacagcgcttcctggagagatacatctacaaccgggaggagttcgcgcgcttcgacagcgacgtgggggagttccgggcggtgacggagctggggcggcctgctgcggagtactggaaca

SEQ ID NO: 360063 - DNA, 122 bp, Homo sapiens
agagggctccaagcagaggctggtgggggcgtttgctgtgttcccggaactgcggggggccgctgggacctggcaaatgatgggaagccatgggtgggttttgagcagggaccgctgtggtc

SEQ ID NO: 360064 - DNA, 122 bp, Homo sapiens
gcactaggaagaggccggtaagaactcgctggcggcaaggctacgaactacctaaaaggacgtatggagcagggcctgggcggggttaggaggggatcctgtgacgtctcgttccctccccc

SEQ ID NO: 360065 - DNA, 122 bp, Homo sapiens
gagcccggtcagggcgagggggcggaggcttcgaggccttccgggctgccgctgactgcccgggcaagcctcactcccagctgaaaaggagccgtgtactgccgggaggtgggagggcttgc

SEQ ID NO: 360066 - DNA, 122 bp, Homo sapiens
tgctgcctccgataagggcctgaaggggctgtcgcgctcctggcggtgtgataaggagggcggggggaggccgcgggaaggcgtcggggtttgaggtccccgcctggcgacccgggatcggg

SEQ ID NO: 360067 - DNA, 122 bp, Homo sapiens
tcattggagcgaggagagcgagcgctatctcagtaggctgtgggcgaggtgcgggggtggcgggggcacgctccgggtccgccaggaggggagggatcggaaggggaagcggggagggaaag

SEQ ID NO: 360068 - DNA, 122 bp, Homo sapiens
gacagcgccgacttccttcctgtggcggtcgtcttttagttgctgccgtgacgactcagtcgtcctggactcaactgtggccatgatagcggattccctagacaggcatcgctgttgacgct

SEQ ID NO: 360069 - DNA, 122 bp, Homo sapiens
ccccgcctcgccacccgcgccccctctctccgccccggccgccgtcacccggcagcgcgacgcccagctcagggcaatggcctggtattaaagagtgaccttggcttagatataaaaataga

SEQ ID NO: 360070 - DNA, 122 bp, Homo sapiens
gccacaaccaaagctgcggagagaaggtggggaagggtgcagaatggccgtggggcacagcgtggcagactgttcagtctctgctgggtctttcctagggacctggaaggccagtgttgctt

SEQ ID NO: 360071 - DNA, 122 bp, Homo sapiens
actctcattctcttcttttgtctgagagtggagaatgtctgagagattgcatcacagtcacgttaacccttggtactgcacagcctaacaggataagaaaggttcagtctggataggaacta

SEQ ID NO: 360072 - DNA, 122 bp, Homo sapiens
caatatctagttaaagctgtccaagtgtggagaagacagggaaggcttattttgtaacctcgtcaatggcaatagtatcaggaaagcctccttttgaaatagaggagtggggaacaagggga

SEQ ID NO: 360073 - DNA, 122 bp, Homo sapiens
ttctgtcatgaaccgtgcaaactgccggatctcattgcctgagacgaggatgttggccttcgggccctggggctgcacaaagccatactggtaccaggtagtgatcttggagaggcccacaa

SEQ ID NO: 360074 - DNA, 122 bp, Homo sapiens
tggttgctgatccacccgcttctttctttatagagattaagagcggctccagtgtgtgtacggagagcctctttgaagcgctgttgcctttctgtggctagatccacgatcttctctctggg

SEQ ID NO: 360075 - DNA, 122 bp, Homo sapiens
tggctatttttttgtaatttttttcgagacagggttttgccatgttgtccaagttggtctcgaattcctggactcaagcaatctgctcacctccgctgggagaccttggcctctcaaagttc

SEQ ID NO: 360076 - DNA, 122 bp, Homo sapiens
ttaagactgtgctgcaacttggtcgagtttcagaaagttctccggagagcccaactgccgcgtcccgtcgcggcccctgcctgcgcggccgactgtaacaggatgctggggctccaggcgct

SEQ ID NO: 360077 - DNA, 122 bp, Homo sapiens
tctgcatctgccataggcttttttaacctcccttctactcttgtttcatttttgcatgcacgtacacataaatgcatttcactccctggcctaaccctgggtcagcacagatccactcacac

SEQ ID NO: 360078 - DNA, 122 bp, Homo sapiens
aagagtgaaaggaaaaccctaacagatctgtcctagtgattttacctttgttctagaaggcgctcctttcagggttgtggtattcttaggttagcggagctttttcctcttttccccaccca

SEQ ID NO: 360079 - DNA, 122 bp, Homo sapiens
cctggctgcgctccacccgtgcccggagaaggaactgcgggcaaggtgtgtgagagtcggcgcttctgggtccaagaagcctccaggagccgctccccggttacctgggtctcacctgcttg

SEQ ID NO: 360080 - DNA, 122 bp, Homo sapiens
ggaatacaggcgtgagccaccgcgcccggcctggttttacttttaacaagaggagtgggccgcacgcggtggctcacgcctgtaatcccaacactttgggaggccgaggcgggcggatcacg

SEQ ID NO: 360081 - DNA, 122 bp, Homo sapiens
ctcgatctcctgacctcgtgatcctcccacctcggcctcccaaagtgctgggattacaggcgtgaaccacagcgcctggccagaaaataaattttttaaaaagtaaaagaaaaagccaaagt

SEQ ID NO: 360082 - DNA, 122 bp, Homo sapiens
tcttcagagtgtcacaggaaatcgaagcctatcatgaattacaatttttttttagagtcccggctcactgtgtttggtaacttgccataccatatccggcttggttaggaggaggtattaca

SEQ ID NO: 360083 - DNA, 122 bp, Homo sapiens
gggagtcaggggggcggttggggtcgttggagtatgaggtaagctctgtggagaagcctccgatgcggacttggagagagtgacacttgataccagattcaactgcaaggaaaaaaacaacg

SEQ ID NO: 360084 - DNA, 122 bp, Homo sapiens
ttgtgcaatgaagtgaagtggaaattttaaaacttttattctacccattctgttatctgccgtctaggcaggctacaaacctccccaacatccctgccgctaaccccctctaaccgacacgg

SEQ ID NO: 360085 - DNA, 122 bp, Homo sapiens
cctaagaaatcgctacaagactagatgccgagttcgaactactgcctggacggcagcgcccgagcgcccgcaaaaataagcccccgtgccatttccggtactagcaaatcctcctgtatgtc

SEQ ID NO: 360086 - DNA, 122 bp, Homo sapiens
aataaaaatacaccagtgcagcttccaaaacactgacttgcatctccctctcctatccgccgggaatgtcttatccctgccttccagtggctgccagaaccaagggcatccgcggcgttcct

SEQ ID NO: 360087 - DNA, 122 bp, Homo sapiens
ccgctatgcttcccgtacagcctgtcacagggacgtctgcagctccctgacaggccggcccggcttctctgaagtgcacgtgggctcacacatgggccttctgccacgtggctgggtctgca

SEQ ID NO: 360088 - DNA, 122 bp, Homo sapiens
ttttaatgtgtatcacaactgcaattaatcttattaacatgctgggcctgttcctgctttcgctgccccaggtgtgtgagagtatttagggggcatgctttgaaggattcttgttctttgat

SEQ ID NO: 360089 - DNA, 122 bp, Homo sapiens
ggaatcccagatctcatcgggaagtctgtcagccaaaaacacacacctcaaagcggagtgcgtggtgcctccacaccgggctgtgtttgcggagctgggatgataagtgtgcaagggaggag

SEQ ID NO: 360090 - DNA, 122 bp, Homo sapiens
actccttcttttaactgcatcatcctttacttataaagaatttggagaggcaaataaggtcgtattaaaaccagttggagcatgatatataatgcatggtatagccaacaagcaacagtgaa

SEQ ID NO: 360091 - DNA, 122 bp, Homo sapiens
aagtttatgcttcagggatcctcattgtacagacctccataaagaccctgaaaggggctccgcaatggactttaagaaactcctcaaattatgagtgatcaaaattagtcactatacaagaa

SEQ ID NO: 360092 - DNA, 122 bp, Homo sapiens
gcggcggggcgggaggacggccttggggcgggaccccgggtcgggagaacgaccttggggcggggcgtaaggcaggatggggcggggtttgtgggggtcttggtggcaagtgagggtcccgc

SEQ ID NO: 360093 - DNA, 122 bp, Homo sapiens
gagagctcagctccgccgcgctgggagcggcagttaccctcaccaattagggagcgggggcgggagttgcatggcttccctgatgcgggtgaccaatgggatttgggatcatgagtggaccg

SEQ ID NO: 360094 - DNA, 122 bp, Homo sapiens
tcatgacacagatgggccttgtctgcttggggagtaccttgccccatgtggcaagtttgccgctttggcaggaaggcctgatgtgaagctagattgagaagggagaaggtgtgcagtttgta

SEQ ID NO: 360095 - DNA, 122 bp, Homo sapiens
aggtgttgacggtggccctgaggagcgggggtgcctccatacatggagattgggtggcaccggcttgggggctcctgccaccgctgtgctgggctgcaggggccctggagggtgtcccgtgg

SEQ ID NO: 360096 - DNA, 122 bp, Homo sapiens
tgtagtctctacctgattcaggaatctctaacccagtatcggaacgttaagcggcttctccgctttcctgccgtgagaaactcgaggtgacaacctccgtttccggttggctccggttgcag

SEQ ID NO: 360097 - DNA, 122 bp, Homo sapiens
gggatcggggactctggtgtcaaatgtttttgctcccatcctggctctgcagcttagcagcggagtgattctggccaaatcatggaatctttcagcttcagttccctcatttgtaaaatgag

SEQ ID NO: 360098 - DNA, 122 bp, Homo sapiens
caaaggtaaggactggcccaggtcgtggattagcctgcaaaagcatttgggggtcctgggcgggccattcgctgaagtcctaggcttaagtccgaactccccccaggacgaggcaggaggat

SEQ ID NO: 360099 - DNA, 122 bp, Homo sapiens
tgggccacgtgcgtctggggagtgcggatgggagccggggtccttgcgagagactgagtccggctagagaacagggtggagcccctttggaccttagagctgggcctttgggccttgggtct

SEQ ID NO: 360100 - DNA, 122 bp, Homo sapiens
agccagcacttctgtgggttgtatttaaatcttaagtacatgagagctgttgcctgcaggcgctggtattgcccaaggagggtagtttcaggacaaagtctctgaaaactccaggctcttgg

SEQ ID NO: 360101 - DNA, 122 bp, Homo sapiens
ccaaccagacagcagagctgtagaccaggaatggctgaggcctcgggcggagatgggccccgggtagttgatgggatgttcgcggtgctgagcagcctcagagaacagccagggtcccccat

SEQ ID NO: 360102 - DNA, 122 bp, Homo sapiens
gtgacaaagtcaggcggagtcaaaagaatgagaaaagacaagagagaaagcgggaccaggcggccaacgtatggaggctacgaaggcccccagctgtgggagcccacgctatttattggtga

SEQ ID NO: 360103 - DNA, 122 bp, Homo sapiens
agagggaggagaggcccaaatcggggaaaggaattaaatggaggtttagacgcgggtaaccggagtgggtgggccttcaacctggaagatgggaatccccagcgcacttcgggcagcgctgt

SEQ ID NO: 360104 - DNA, 122 bp, Homo sapiens
catgaatagcgcccacgagccatggtgacggtcaggctggggcaaaggccgagacaggtccgcgaccccccacacccgcaggccggggttggggaactcccttacgcgcgtcccctggggaa

SEQ ID NO: 360105 - DNA, 122 bp, Homo sapiens
aaatatgctataccttgcattccacaaataaatatgtgaatggcccctccactccaatgacgtatctctttatataaacacacacacacacacacacacacacacacaaattcaatcaatgt

SEQ ID NO: 360106 - DNA, 122 bp, Homo sapiens
tccaggcctgggaggagaggcggcaggacccgggcagcgacatctacaaatgacggcagccgggtgtgcttaaggctcagcagactcacagggacgtgcggaccgtggggcagagggaggct

SEQ ID NO: 360107 - DNA, 122 bp, Homo sapiens
cccagttgggtcttgcacttcccttacctctcccaccccgcgtgcgccccggcccagtgccgaagccccacttcaaagatgctctgggagaccgggatcctggctgctcagcgggaaggcag

SEQ ID NO: 360108 - DNA, 122 bp, Homo sapiens
ctagaagctcatgaaatcttgttgtctaagagtttgtatagagcttaatctccagccacccgcccccgatctctcctgttggttggtgggtgggctgaaatttccaaccctctaacactcta

SEQ ID NO: 360109 - DNA, 122 bp, Homo sapiens
acccagagtgtgtggtcagcctgccagagactctaaacgctgcccaacactcttcccgcccgtggttatcaatgcgccaaagagcagaagctcagagaattgtgattctttcgcttgggaaa

SEQ ID NO: 360110 - DNA, 122 bp, Homo sapiens
agccggctagagatctggaagagggcgggccaagggtgaggagggcagtatgcgcatgcgcgctcaggacccagtcagtgagccaataaggaatctcgcgagtgttgaaagtcggtggcgta

SEQ ID NO: 360111 - DNA, 122 bp, Homo sapiens
agccaccggccgccctgtcctgctgccggggttgcgcaccgggcgagggctctgggacgtcgggtagcagcaccacctgctggacaccggtggctgcactcggctgcacctgcggctggaac

SEQ ID NO: 360112 - DNA, 122 bp, Homo sapiens
gaggaacctccacttgttttggctgctgcaaatgtggtgagaaatatcagctataaatatcgagaggacttgtctgcacatctcatggtagctggctgggaccaacgtgaaggaggtcaggt

SEQ ID NO: 360113 - DNA, 122 bp, Homo sapiens
tgcccaccctgcgacaggcatctgcagttacctgctcatcggcacgcagcaggaagtcttcgctggggctcctgcccagcggactttactgcaccctcaccggccttggctcctgcccagac

SEQ ID NO: 360114 - DNA, 122 bp, Homo sapiens
ggtgagtggttctctcctggctgtgggaacgtgagcaaggttgtgctacctcccttcacccgaggctcacatcctctcctgcagtgtgggatgtctggacagtggctctcctccctccagaa

SEQ ID NO: 360115 - DNA, 122 bp, Homo sapiens
ctcccaggatcccatccactcagaaaaacacagtcaccacctgggttcctcctttccagtcgtttctcccagcactttcctctctgcacaagggagggaagtttcacactactgacaatttt

SEQ ID NO: 360116 - DNA, 122 bp, Homo sapiens
tctctctctatcatagggacagaaatcgctttggcaaacccagcttgcagccaatgaacccgccttccagattggtgtgaagacagaagtgaggtggggggaagggagggggtgtgagagat

SEQ ID NO: 360117 - DNA, 122 bp, Homo sapiens
gccaccactgggttgaagctttcctgttagtgttgcttcaaagactcttctgtaaccacccggagacccattcagtactacatccaggagcagacataaagcatcagcccccatcctgcttt

SEQ ID NO: 360118 - DNA, 122 bp, Homo sapiens
tgggggaaggggcgggaccgggtctctggacgccggcgcggacatgtccagggcagaaagcgcggtctttccagccaggtggtcagcccccaggcgcccccaatcacatttatgaacccagg

SEQ ID NO: 360119 - DNA, 122 bp, Homo sapiens
taggaccagagcccaggtaacttaggtctcttcacaattaaagttgattcaggccgaatgcggtgactcacgcctgtaatccaaacattttggaagtccgaggtgagcggatcacctgaagt

SEQ ID NO: 360120 - DNA, 122 bp, Homo sapiens
gtatagggttaacagcgcctctagcggggatatcgaaaggatcaactaggctctaagtatcgggagctagcagcaagggctgctcaccgtatgctgccatccgtccaggaagcgagtgggaa

SEQ ID NO: 360121 - DNA, 122 bp, Homo sapiens
cctgtctggccgtgtctccctctaaaatagaagctccaagaggggcaggaagttctcttccgtcttagaccctatgtgcacgaccttggatcgatcaacattgaacacctcctacgtgccaa

SEQ ID NO: 360122 - DNA, 122 bp, Homo sapiens
tccagagttaccttcaatgcccgtctttcgctccactgagtcacgtctcagaagagaccccgacctttgagcagaaacagatggagatcagaaggggaggaagagacactacaaggggctag

SEQ ID NO: 360123 - DNA, 122 bp, Homo sapiens
gcatttaaaacccattccttgctggacctggtagagacgcccccagtccgtcaggtctctcgctgcagttccgcagtttgaccgcaggggacggaatctgcggcggcctggaaaactggcgg

SEQ ID NO: 360124 - DNA, 122 bp, Homo sapiens
tgtgggaccaagacaaaagaggagtcccatcacctaggtgatgaatccagtgacatgtcacgatccccccttttggctggggccaggcacgagaggagagtcacatctcctaggtgatggat

SEQ ID NO: 360125 - DNA, 122 bp, Homo sapiens
tcaggacaaggcccatcattccctgttcccgccaggccgggtatttgccaggatgtgaaacggaagccaggcttttggagaggctgaagctgatttttgtaacaaggtctggttaccagcaa

SEQ ID NO: 360126 - DNA, 122 bp, Homo sapiens
aatccaggccacccagtcactagtcagccaatgcgcattgccgtctttggctcaggcgaccgttccctgtcaggccagcagagtgagagagtctaacggggtccctcttccaagggcgcggg

SEQ ID NO: 360127 - DNA, 122 bp, Homo sapiens
acgcccggggcggggtcgcctgggggcggggcctggggtggggcctgcggaccgagggggcggagccggccgccccggggtcctcagtccgctccgggagagttagggctccgagccgagcg

SEQ ID NO: 360128 - DNA, 122 bp, Homo sapiens
cacaaatttaatgaagtagaatttaccgttactattttatttgggaaagaaatgtgctcgcgactcaatagattggagtattcactcctggatctcaacttgcaatttgaaaacgcatctct

SEQ ID NO: 360129 - DNA, 122 bp, Homo sapiens
cagtactatccgcccgtgataaactcctccatcaaaatcggagtctgggggccctctaaccgtgaagtgccattcaaaaaggttatcctgaacaaaaacaataatccacaaggaattaataa

SEQ ID NO: 360130 - DNA, 122 bp, Homo sapiens
gatggccatgtgaccagcaaggacgtgaggctgagtgcagcggccagctggaagtcctggcgcccagggctgactcccaggcccaacgccagggccttgccttccttgtcacttctcccctc

SEQ ID NO: 360131 - DNA, 122 bp, Homo sapiens
gggcgccgcccacgctccgagggacccatgcccgggcaccacccacgctccaagtccgggcgccgcccacgctccgagggacccacacccggatatcacccacgctctgagggacccacgcc

SEQ ID NO: 360132 - DNA, 122 bp, Homo sapiens
gcttgctattgaaatcctcccttgctttgtaacattattaaagtcagtcattattaaagtcgtctcaaaaagagacacctctgcaacttctaagatgttgtcaaccaggaatcatattttca

SEQ ID NO: 360133 - DNA, 122 bp, Homo sapiens
agctttttgagctgctgcagggctgtcaaagtcgacaaaaccataacctttgcatttgttcgttgtcttatgcaaaattgcgtttgtggagactattttcccatatggttgacagagcttca

SEQ ID NO: 360134 - DNA, 122 bp, Homo sapiens
ctcccgcctccacagtgcccggtcgtcgagcccagagaagggtgacgggcccggcgcccccggtaaccctcaggtcctcaggagcctcggggccccctcagtgtctcctcgctatcactgct

SEQ ID NO: 360135 - DNA, 122 bp, Homo sapiens
gcttcaactgattggcaggaacgaagtgggtggagcctcctgaccctgccctcctgcttccgttgctagggacgcttcggccgaggataccgcaatggatcaggaagaggggctgaaggcct

SEQ ID NO: 360136 - DNA, 122 bp, Homo sapiens
gaggaagcaatagggccaggtgggagtcgagcgtacaagtgtagggtcagtccctgtcctcgtttaaaattttggtactgggttcatcatggaatttttgtggtaactttgattttaaaaaa

SEQ ID NO: 360137 - DNA, 122 bp, Homo sapiens
gtttttatgagttttacttctatgaactctggagaaaacaaaaccactaaacacttgctacggcccctcaccctaaccacattcacctcaggccatcgctgggtccttcgtcacccctttca

SEQ ID NO: 360138 - DNA, 122 bp, Homo sapiens
tgaagtcaaagcgagtcacttcttggtggccgtactgctggatgctgatgagctggccctcgtataccacaccaggcttcaggcctttgatggtgtaggagtttaagtggcctggtatggta

SEQ ID NO: 360139 - DNA, 122 bp, Homo sapiens
cagagaaatttcagaaacaaatttcttagaaataggaacaaccgatcagagagtgaaaggcgaaaaaaagtgaatacgatttatctaagggggaaatttagttgtgttgacaattctgtgtg

SEQ ID NO: 360140 - DNA, 122 bp, Homo sapiens
aacttgattcttacctttctgtttcttcctataaagtaaatgggcttaaaattcagctcccgtagggaattttccaaaaagagctttgtgggggacggaaaaaggcttcttggtggtcacag

SEQ ID NO: 360141 - DNA, 122 bp, Homo sapiens
agttttataaaactccgcagtttgcaaagagcttccacatacatcacatctcatttcattcgcacagttccacaaggttcatacatagggcaggtgcggagacaggtttatgacttgcccaa

SEQ ID NO: 360142 - DNA, 122 bp, Homo sapiens
acttctaatttttgtgggtatgtagtagctgtatatatttctaggttccaagaggtgtttcgatacaggcatgcaatgtgacataagcacatcacagagaatggggtatccgtctcctcaag

SEQ ID NO: 360143 - DNA, 122 bp, Homo sapiens
agcacctggcctgtgcctcgtccaggctctggtcggtgatggccatgatctgctgcaggacgtcgctcgtgtcgaggcgccgcggggcggggggcgatggcgcggggcgcggcggggcggcc

SEQ ID NO: 360144 - DNA, 122 bp, Homo sapiens
gagaagtcgagcacagcagctgctggcccaggtgctaagcccctcactgcccggggcttgcgggccagccagctgctccaagtgcagggccgctgagcccacagtcacccagaacttgtgct

SEQ ID NO: 360145 - DNA, 122 bp, Homo sapiens
ccaatccatttttggaaacatctaggcgtttcttgattaccatgctctggatggccaaatcggggggttttcatgcagtatcacacctggacttcgagccacaagtgaacacttctctgggc

SEQ ID NO: 360146 - DNA, 122 bp, Homo sapiens
cctcccaacctgtgaaaggcctggaaggttctgcgcagacgggccagggcctggcgctcccgggcctgcacacggccatagaggaagtcacatatctggtccttctcctcagcggtcaagtc

SEQ ID NO: 360147 - DNA, 122 bp, Homo sapiens
gggcaggattagacacaagagaagaatcaaacacttatgtttccttttagtcgaagacaccgggagaaagtagattgtgacccttagctatggacagcatccagagacttaaaaatagctga

SEQ ID NO: 360148 - DNA, 122 bp, Homo sapiens
gactcttaatgctcccaacctgttcccttggtccccccaagtctggcccgcctctattcccgtaatgccccttccgccacctgacccagccatggagatagccttgtctcaatgcattccta

SEQ ID NO: 360149 - DNA, 122 bp, Homo sapiens
tggccattggtaatcaactcaaccatcaacccttcttccctccccagaggttggagggtgcggccaaaagttccagccttctaatcctgccttggtctttccagtgaccagtccccagttag

SEQ ID NO: 360150 - DNA, 122 bp, Homo sapiens
gtcggcctcgagtcatccgtgtccccgggtgccctgcctctccaggatacctgcgtaactcgcagcagccaagccccactacgttcaaaagtgtgtttgtggttgtcacagtgcacaccgaa

SEQ ID NO: 360151 - DNA, 122 bp, Homo sapiens
ccccgctggaggaagaaaacaaacaggaagaccctgccctgttttgtttaggatcaaactcgcctctgtaccacctaccggagggactctggggtttgagttctggggacaagcgcgtgccc

SEQ ID NO: 360152 - DNA, 122 bp, Homo sapiens
gactcctcttagccccctcgtggcctgatgggcggccgggacggaggtgggctgtaagcccgccggcacccaccgtgtcctgtggaaggcttggagacctgagccaggctctactcggttag

SEQ ID NO: 360153 - DNA, 122 bp, Homo sapiens
cggagtcggcacagtcgtctctcctccctgaccatgaggaggggggcagaggtagcccaccggtgacattttagccagggttaatggccatagcgagaccagcgagggtataaatggttcag

SEQ ID NO: 360154 - DNA, 122 bp, Homo sapiens
gtgataccgagctcccgcgatgagaagcagcttgcaaggcttccagggcacagcacctgccgcagggacccaggctgcaacaaaaagaacaacgtcaactccatctgacacgtctccattca

SEQ ID NO: 360155 - DNA, 122 bp, Homo sapiens
ttacttttactttgaaaaatctgcagtcagaaggttcttttcttgtaggagcctattgtgcgtctcactgctatattcttgggggtgaatcacactaggccaatttatcaacctcgacagta

SEQ ID NO: 360156 - DNA, 122 bp, Homo sapiens
taccgggtctacatctccgcccgccctcacaatatcccaggaaacagacatccgcgtgctcgcggcatttgttaaccaatcagagcagtctgtcagagcacatgggagagcgacagccagtc

SEQ ID NO: 360157 - DNA, 122 bp, Homo sapiens
ctcccatgcaggatccggggatggccccagctgggccctcctgacattggagcaggggcccggctcacctggatttggggtgcggggcggctgaggctcacgcccagagccttctttagcag

SEQ ID NO: 360158 - DNA, 122 bp, Homo sapiens
tcactgtcttccacctccacatcttgtcccactaggtcttcaggggcaataacatggagccgtgatcacctatgataacaacgccttcttgaagaatacctcctgaaggacctgcctgaggt

SEQ ID NO: 360159 - DNA, 122 bp, Homo sapiens
agcccccactgtttgcaactctcctattaaaacagactaagatcattcagggttcagccccgccccagggccgcgagcgctcagggattttgattccagaccctgggcaccaggttggaatc

SEQ ID NO: 360160 - DNA, 122 bp, Homo sapiens
agcctggcgggggcctgaacctctctctcctggcctcttccgtcctgtaggcggcgtccccggcctccagattaatcttccatcggaaggtggggcctgtggcttcgagggtaacctcaggg

SEQ ID NO: 360161 - DNA, 122 bp, Homo sapiens
acttttcaaaacacttgcatcattaccctaaaaataggctgttatgcgttttgacaattgcgctatcctacactctgagggagttggcaacgcatgcggtatagtggagtgggaagagttga

SEQ ID NO: 360162 - DNA, 122 bp, Homo sapiens
ttcaggacagaattaatggtaactgactgaaacgagaacgggctgcagctctgtgcctagcggacctccacaccagcagcctaacgtgctcaaaatggaatgcagtttctcttagagctgac

SEQ ID NO: 360163 - DNA, 122 bp, Homo sapiens
gagccgagccaggagggcgcaggaggctctaggggaccgagaacccaagccaaccagggccgggcccagggaagagcaccccagaggagcggggaggggcagcctctggcgatttggtgatg

SEQ ID NO: 360164 - DNA, 122 bp, Homo sapiens
ggtgatggggcactcttccttcccacttgttttggggtctctgagggcagcagcccagcccggctgtgtaaatgagggagccattgttgtatcagtgcatggccataactcagcttcagaac

SEQ ID NO: 360165 - DNA, 122 bp, Homo sapiens
ctcgtcctcctggtcttataaccacgtatgaagtgtcttcctgcctggattttgttctaacgtgggcatggattctactctacaaccttccttgttttagcaaaccacaatggtttatacaa

SEQ ID NO: 360166 - DNA, 122 bp, Homo sapiens
aatcctacaatccggtccatcaatgtagccctacgtctaggagactgtttgctggtgttgcgcctctctctctctgtctctctctctctctctctctctctctctctgcctctccctctccc

SEQ ID NO: 360167 - DNA, 122 bp, Homo sapiens
tcctacaataaggtagagtcaatgcagaacccacaagctcattgatttccatccctgtgtcgtcagcttgttcactttctcctaagattatgacaatagtagtaataataataaccaggaca

SEQ ID NO: 360168 - DNA, 122 bp, Homo sapiens
ggatcagcatatgaaattgacatcatggttagtcatggtactgcagcttagggggctacacggttgctgtgtgagtggagagatgcagtgaggcagttgtcattattctaaaaattgtacta

SEQ ID NO: 360169 - DNA, 122 bp, Homo sapiens
tcacccctgcccgaccccaggccccgcgtgtgtcccggacggagcagtccctcctgggctcgcctcctgcccgctcgctctgtgtcagcgcccgaacccaaaggggtggacgcggcctccag

SEQ ID NO: 360170 - DNA, 122 bp, Homo sapiens
ttacgacggtcgtaatttaacaaacaaaccgggacttccggacccgaggaaggaggagcacggctccaccaacagggcatgcgcacatctgaggtcgcttagggctcggattaccgcagccc

SEQ ID NO: 360171 - DNA, 122 bp, Homo sapiens
gtgcagtaggagagtcagtgagagggtgagagagacggggagacggaaacctcttaaccacggctcacacggcgtctttggtgaggtggtttaggtttacatctcttttttctctctttctt

SEQ ID NO: 360172 - DNA, 122 bp, Homo sapiens
gggaggagggggaggggcgaggaggaggcgggaggagctggacaggacatcgtgccagcccgagggcggaatgaacttcagagaagtttgagagcaaaaggtgctttgctgctgttagaccc

SEQ ID NO: 360173 - DNA, 122 bp, Homo sapiens
agcctgtctgcctgtggacacgtgagcttcccgggctcagctgggctttatcacacatcccgtgaacactcattgaagtcagcctgtttgcgccatgtgggcatcagccactgctgtcttgg

SEQ ID NO: 360174 - DNA, 122 bp, Homo sapiens
ctgttctgaagaaaggattctcgagcagggctggagtcctggctgcctggagggacctgtcgcatctgatactaatgaagtgttactgtactttgacaagtttgcaggcgtctgtcttccaa

SEQ ID NO: 360175 - DNA, 122 bp, Homo sapiens
ctgagcataactctgagccccatcccacctgcctccccagcctgacctgtgaggtgtccacgtcaaagaagctctgatagtagctgaaggtccagaatcccggctgctgctgctgctgctgc

SEQ ID NO: 360176 - DNA, 122 bp, Homo sapiens
tgatttctctggacagctgggacctaggcaaggatcttaacttacccgtgcgttctccagcgtcacacaagcatgaggttgtcacattttgtgtgtgtctgaaatacattaaggtctgtaaa

SEQ ID NO: 360177 - DNA, 122 bp, Homo sapiens
acttgaggatgtggttctcagagttggacaccacgatgcatggctcgtaggcgcggaccgcgtcgtagacctcgggcggcagatgccgccgcaggaacacatccaggcggctgttcctgcgc

SEQ ID NO: 360178 - DNA, 122 bp, Homo sapiens
gtaaatggttttgtttccattttatgatgaaactaaagccaagaggataattaatgtgtccgtgaacatagcaagtatctgaaataccacgcagtaaatcttgtgtgtggcacttaggtctg

SEQ ID NO: 360179 - DNA, 122 bp, Homo sapiens
tgggccagcaactggggcagtgtaactgtggatagccccatgtctatcacagagaggccacgaagcagataatacatgggtgagtgcagtctggagtcccaggagatgagcagcaccagtgt

SEQ ID NO: 360180 - DNA, 122 bp, Homo sapiens
aggtacatgaggatgtagcttatcgcccttttaagggactctcccacgttcgactctaagcggaagtacccgctcagggctccggaagtggcctcagagcccctcagcaacatgcccgcaga

SEQ ID NO: 360181 - DNA, 122 bp, Homo sapiens
tatagaatgctgtaccattttgtttcaattaaggaacacaaataaatcacaataaaaaatcgttcaataggtttggaatcactctatatagtcataacaaagctaccacactgtttaaattg

SEQ ID NO: 360182 - DNA, 122 bp, Homo sapiens
atgccttttttcctgcttccactgctgacttagtcatttattcattcggtcaatattaaccgagagtcaaaaagtcccagccgcgctcaggatgcagcagagagaaaagcgaagacccctgc

SEQ ID NO: 360183 - DNA, 122 bp, Homo sapiens
ctcggtttgattttttgtgccataagggtctggaagctttaagggtgcttagctcaaagtcggctttggtactggaaactggctcacttggatgaggtcaggggaagcaatcttgatggtca

SEQ ID NO: 360184 - DNA, 122 bp, Homo sapiens
aagcccggttgccgtggaagccgcgtggggcgccttcctcagctcttcagttgagggtaccgggggatcaagggctcgggggctcacttccaccttgaaggtaccctgggctggaaacgggt

SEQ ID NO: 360185 - DNA, 122 bp, Homo sapiens
tgacgagcggcagggaaacacttcctggaattctcatctacagacaagaacaaactggggcggggcccatcaccttcacctacgcgccgggagggtggcggctggcgggcggggccgggctc

SEQ ID NO: 360186 - DNA, 122 bp, Homo sapiens
gcacctgggccagcggctgcggagggtgtactgggtcccccagcagtgccagcccaccggcgctgcactctatttctcaccgagccttagctgccttcccgcggggcagggctcgggacctg

SEQ ID NO: 360187 - DNA, 122 bp, Homo sapiens
ggcgcagggcagcgggtgcggtgacacctgtgggcacaggtgagcggcgggagggctacgcggcccgggggcggggcggccgggacccggggcctggaagccggggcgaaggggaaggaagg

SEQ ID NO: 360188 - DNA, 122 bp, Homo sapiens
tgtatataacattattacaaaatgacactggtaacatgaaatcagaacaacattctttcccgagtacctagtacttacccacaaggcattgtagatttcttttcatttaaagagtggataac

SEQ ID NO: 360189 - DNA, 122 bp, Homo sapiens
tgccgggcaaaacgcggggaccagacctgaggagccgtgggagcccagggagatctggggcgggagcttcgttccggccagggcctctatccgccccgatacgtggctcctgggccgcgggc

SEQ ID NO: 360190 - DNA, 122 bp, Homo sapiens
ttcatattaagggtgcattctaccaacatgacttgtcaatgatgattttgaccttgatcacgtgttcaaggtagtgtttgtcaggtttctccacaaagttactcctttcttctcctgttttc

SEQ ID NO: 360191 - DNA, 122 bp, Homo sapiens
ggagctgtgagaagggagccggggggagccgggcagacctacagcttctacactcggagccgttgtaggctgggagggttccgttcccacagcggacgcagctggcgctcccgtccgcgttc

SEQ ID NO: 360192 - DNA, 122 bp, Homo sapiens
ggggcaagagtcctggaggcccggcggggagcggggcgatttcgaaaggaaggactgcagcgcccctcggggcttctcggggagcccaggtaacctcacctgaccgccagacccaagcaggc

SEQ ID NO: 360193 - DNA, 122 bp, Homo sapiens
cttgcagcctccttaatttatttatagatgcgctcgctctttatgtggcctagttaaggacgcctttccataaatacatagaaacggatgttattctagagcccaccaataatagacacagc

SEQ ID NO: 360194 - DNA, 122 bp, Homo sapiens
tcagagcccatccagaagaaatggcctgtctggttggcccttcgtgctgcctccagcacacgcctgtaggaacatacaccagcccagcccagccgcgtctgtccacgaaactgcccccactc

SEQ ID NO: 360195 - DNA, 122 bp, Homo sapiens
tcagcggacaccacctgcctgcacatctggctggcctcaacttcccgctgttcgagcccacgtgagtggctccgccccatctggcttctgaccaatggacgagcttcctaaggcgtaccgtc

SEQ ID NO: 360196 - DNA, 122 bp, Homo sapiens
ccaatggcgttgtctccacaaacatttaagcctcttactagaaggaacattaacaagggtcgatttcaggaggacacagttacaatgggaagcccaaagagtgggtgcgagcgtgcaggcgt

SEQ ID NO: 360197 - DNA, 122 bp, Homo sapiens
ttccatattgcagtcttgagtttggtctccctgggaaggtggggcaccagccccatgccacgttgcacgtatcagctggagcagaatcctggcttccttccggatgggcctggggtccatgc

SEQ ID NO: 360198 - DNA, 122 bp, Homo sapiens
cctacagggtggcttcgtgcgcggccgcgtgcccgccggtcagtcctattttgtggacttcgggagcactgagtgctcctgcccaccaggcggcggcaagatcagctgccagttcatgctgt

SEQ ID NO: 360199 - DNA, 122 bp, Homo sapiens
cggcccgctggcccgggaaggccacgcgaggctggaggcgcgggcggcggcgccgcgcggcgtctgatgcaacctgccggcaacacccggcggggacgctgagctcattcctggccgcggcc

SEQ ID NO: 360200 - DNA, 122 bp, Homo sapiens
taggctgggagggaaacttggatcacagcctggagatggtgcggtgtccagccactctgccgggagctgggcactgtgtctgacacaccgttgctgctggccacttctagtattattatttc

SEQ ID NO: 360201 - DNA, 122 bp, Homo sapiens
ttgtcctcagacctgaaggaaatagcatcctggatggggcaatgggctccggtcgtctcacggttctcccaggcttcagtttagcagtgtcgagcatgggggttgtccagaggtcaatgcct

SEQ ID NO: 360202 - DNA, 122 bp, Homo sapiens
ctctgcagacactgacctgaacgcagtcatccggaagggcggcctgctgcaggacgtccacgtgcgctccatcttctaccagctcctgcgggccacccggttcctccactcggggcacgttg

SEQ ID NO: 360203 - DNA, 122 bp, Homo sapiens
caaaaggtatgtggacccaagtaaaggtttcctaaacaccacaaatatgtgggtcttctacggaacactatatgacaagagaaagaagagagaattgcggatatacagaaaaagcaatggaa

SEQ ID NO: 360204 - DNA, 122 bp, Homo sapiens
ctttttttaaggggaaaagaaatgggcagggcagtgctgggtgtaaggcgaccacgcgaccgagaaaaggaagagggaggaatgaataaacgctgacaccagccccccttggagctcagagc

SEQ ID NO: 360205 - DNA, 122 bp, Homo sapiens
gtaagagtcagcttacacaagttaactgcttgaggaagggggtgggtaaggagtctttgacgtcttgtaaatgaaggagccaaaaggagtacttccggctttctcagctaaggaagagccta

SEQ ID NO: 360206 - DNA, 122 bp, Homo sapiens
gtcgtcgtctccccactttccctcttcctttaagaaaacttactaaaaaatgtttcattgcgaagcagaggaaaagaaacgttttcagacctaaaggaaatgtttggtcatgttaagaaaac

SEQ ID NO: 360207 - DNA, 122 bp, Homo sapiens
tataaataacaagcagacaaattaatgaagaacatctgtctttctgcctatcccgaaacacgttgatcagtggggggtcgagggaagggtaggagtatggagaagagacccgcggagaagag

SEQ ID NO: 360208 - DNA, 122 bp, Homo sapiens
aagggtctttttaactattgagaagtagcttttcatatccccaccaggggaaggaaagagcgggaaccaggagactcgtgaggactgcaaagatggtcctccctgggtacttctgctgctct

SEQ ID NO: 360209 - DNA, 122 bp, Homo sapiens
tatcctctttccttcttaggtatccataatccacaaagcatatttaaaaggctcttggcacgggcagcattggttgagcaggtaggtttggctagggggaaatgtttaacttgttctgaaag

SEQ ID NO: 360210 - DNA, 122 bp, Homo sapiens
tcagcgcttcacaccctggttgcgagagggcagcatgctcgacttcctgcctccctaccgcgagcgcttcacctgcgcttcacaccctggttgcgagagggccgcatgctcgacttcctgcc

SEQ ID NO: 360211 - DNA, 122 bp, Homo sapiens
ttgcaactttttgccatttgagcgtgtttcagccagataattacgttgccattgtgttaccggcccaaagctcagacagggtacacacaccaccacccagccgtctcccaggccctccccac

SEQ ID NO: 360212 - DNA, 122 bp, Homo sapiens
aaaatgtgtagcataccccttggccctgggcccataactgagaaagactgccccgaaacacgcagtctttagtgcttttatatatttaatggcctagggaatgaaggagggggtgggatggg

SEQ ID NO: 360213 - DNA, 122 bp, Homo sapiens
tgtgagaacaaccgggaggaggaggggatgtggacccaaaactacaagaaagagtgtcctcgaagcctatgtcctaccgccccacgctgctgccaggcccgcaggaagatgacaggcccggc

SEQ ID NO: 360214 - DNA, 122 bp, Homo sapiens
ggctgcaggtcccgaaccctgccccgcgggaaggcagctaaggcctggcgagaaatcgagcgcagcgccagtgggccagcactgatggggggacccagcacaccctccgcagccgctggcct

SEQ ID NO: 360215 - DNA, 122 bp, Homo sapiens
ttccagcccaacattacctgcttagccacgatggccgccaggcggcccaggagatggcctcgaccatggaggactgggacctgcacctccgccatcttcggcagccgcctgggaaagcacat

SEQ ID NO: 360216 - DNA, 122 bp, Homo sapiens
gcatgcaccctgggtgcgcctggcctgctcccgctgcttccgggcctctctgcgcccctccgagtctctgccatccgcctgggtgcgaggtccctggccttgctcctggtcaaactccattc

SEQ ID NO: 360217 - DNA, 122 bp, Homo sapiens
ttgacttgcaaacagggcccaggaatccagcagagctatctggagaaccacctgaatcatcgatccataaaaccatcatgaaagtcaatgtctcttccagcacagatcagagtcaggcttag

SEQ ID NO: 360218 - DNA, 122 bp, Homo sapiens
tttggcccacagttattacgactgtggttaactgctctccagaaaagcatctctcccgcccgtgcaccacctgctcccctccccgcccacccccccatccccccccaaccgccgtcctcccg

SEQ ID NO: 360219 - DNA, 122 bp, Homo sapiens
ctcccactgatttcgccgcaactgcaggatggaaacggaggtgaacatctggcgggagctcggaaaaacgccagtttctgacactatcttcgacaagccagggagttgggaaagcttgggag

SEQ ID NO: 360220 - DNA, 122 bp, Homo sapiens
tccatggtggcagcagctgggaagccacagcaaaggggtgggcctgttggtcgggctgcacggggtgagagtttgtctctcagcccttggaagacagtctagactggttatcttgtagtgcc

SEQ ID NO: 360221 - DNA, 122 bp, Homo sapiens
tcccacggtgactggggcatggggctgctgctgtggatgctgagccccgggcccaggcaccgtgagagtctgtgacacagaagtcagagccaagaggctggtggggcgcagggaacctgagt

SEQ ID NO: 360222 - DNA, 122 bp, Homo sapiens
accaccacccatgccaggtgtaccagacaatcccattgtctgttttagccgtgtaggggccgctgtagtatacaccattcaggtttgcagagtgacacctagtggaagggagaaaaaaaaag

SEQ ID NO: 360223 - DNA, 122 bp, Homo sapiens
tgggctgcgccggagctcgcctgcacagatcagctccggagaggggaaaaccacgctcctcggaccaagcctcgggagctaaggtaaatgaaacgttttccatgttgctcgtttttaattga

SEQ ID NO: 360224 - DNA, 122 bp, Homo sapiens
ttttaacccctaagccacgggcgtctgttccgcggtagcggatgacagagctgcatcaagcgccgcaggacccgctgggcatactggtgtatgccgggcataggacatggcctggtggtgcg

SEQ ID NO: 360225 - DNA, 122 bp, Homo sapiens
cacgcgcttttcacgtcctcccccccgccgccagcacgcaccgtgcacgccctgcccccacgctcagagctccgtggcacgcccccccagccccacgaccctgagtgcacgctcctctcacc

SEQ ID NO: 360226 - DNA, 122 bp, Homo sapiens
tgatcgcggggtccgccgagcccacgcccacccggaactcaccctggcccgcaagcaccgcgcgcagccccggttcatgtccgcgcatctcactccacatctcccggcaagctgagggagcc

SEQ ID NO: 360227 - DNA, 122 bp, Homo sapiens
ccttactctacaaggccagacgggaagttctgtctttggcttggtttccttttctacaaacggggttggattctctctggagagctttccgggggccactcagcagtctctgattcagtggg

SEQ ID NO: 360228 - DNA, 122 bp, Homo sapiens
agggcttctaaggtttagtagattccctcaaccacttagtggaatttatttaggatgtgtcggctggaggtggagagaacccgaagggatacatatttatttaacatttttacatgccgact

SEQ ID NO: 360229 - DNA, 122 bp, Homo sapiens
gcacagggaacacggtttccagtggctttggcccctactcgggaaacgtctgcctgttctcgatggtgatggggtggctgccattcccttggttttcctaagccctttctaacgagagtctc

SEQ ID NO: 360230 - DNA, 122 bp, Homo sapiens
gaggaggcccggctgaccggtgcagagacggtggaggccgggctgaagtcggagccccaccgcttctgcggcccccggccagcgcgccccccggtccccgagcggacggagccgcactcctc

SEQ ID NO: 360231 - DNA, 122 bp, Homo sapiens
ctcagcataactcaccgttccgccccgccctgccgatccgtctgttcccggtggtcccttcggaaacggttcccgcactggccggctccgaaagcaggaaaacaaaggttcccacagtaggg

SEQ ID NO: 360232 - DNA, 122 bp, Homo sapiens
ctttgaggcaaagaccaacactggtgggcatgggtgtgggctctgtggcaggtgagcagacggaaacactgatgtggtatgaacagctggagcaggcctctctaaggaggactatacagcct

SEQ ID NO: 360233 - DNA, 122 bp, Homo sapiens
cagcggcaggagccagtttgttgctcagggccttgtctttttacaaagagccccaggccccgggggcttctctgggtgcctctttgctgccatgtctgcacgcgggcggagagcagaccagg

SEQ ID NO: 360234 - DNA, 122 bp, Homo sapiens
ggaaaaccccagtgacggggacccggcgacgcctaaggtgacccagaagggacaatatggcggcgcggccgcatggagggcctctcatcccgccccaagcaggttgacgccacggtacctgc

SEQ ID NO: 360235 - DNA, 122 bp, Homo sapiens
caggtcagaccactctccatcaatgcatgttatcaacaaaaactgattaaactttaacttcgcattaggagaccattgtagacttttctggctgagaatgatgaaggcatttgtaatacagg

SEQ ID NO: 360236 - DNA, 122 bp, Homo sapiens
aggccagtccctgaaggataaactagttgcctgaaaggcagagtgccccggggtggtgtgcgctggtgactggctttgctgagagctggagaggaaggtgaggaaaccggacacggttgaag

SEQ ID NO: 360237 - DNA, 122 bp, Homo sapiens
attcctagctctccagtccttcatcaaaagagctccaacagctgcacctagcagaggattcgttccttccctgtttctcctgttaaccttgtagactgtgccctacattctatattagtcta

SEQ ID NO: 360238 - DNA, 122 bp, Homo sapiens
cttctgcgcctgcaggatgtccatgtgtctgctgggtgggtctgtgcctttgggctttgccgttcgtgtccgtgccttcgccactgggggctggtctacatttgcgtttccgtacatggttc

SEQ ID NO: 360239 - DNA, 122 bp, Homo sapiens
gtgcggtagcgcgcgcgacgctgcgcagctacaccgctacccctggcggcggcgaaggaacggcccgactgcagagctgcagccgcaacggatccgtgcgccaaccctacgtcactgccgct

SEQ ID NO: 360240 - DNA, 122 bp, Homo sapiens
tcaagttcttccagaagaaccgcaagatggcgctgatccaaatgcgctccgtggaggaggcggtccagacccccattgccctacacaaccacgacatctgggagaaccaccacctgcgggtc

SEQ ID NO: 360241 - DNA, 122 bp, Homo sapiens
agagctgcagtgggcagacctcctccgcaagcagctactgctgcaagaaaaaaacggtgccgcagtatgattacgcagctatcacttgcctaaaatttctaggtgcaaatagattgctgcgt

SEQ ID NO: 360242 - DNA, 122 bp, Homo sapiens
ctacttaaaaatcaaaaggggctgtccatattcctctggcaggggtctcccatcatcccccgcgaggcattcccattatcccctgcggagctttcccatcatccacagaggcccttcccata

SEQ ID NO: 360243 - DNA, 122 bp, Homo sapiens
aacactctgattcatttagttgaaaagtccatgtcttccccagaaccattagataaagtgcggacttgtttctctttaatttctggtcatttagaaagtttgcccattaataataaaaacaa

SEQ ID NO: 360244 - DNA, 122 bp, Homo sapiens
ttgaaatgcaataacttacatgcaaaaaaaagctttacacatgaatctttttcagttttccgaacttccccatatgaattcctttctttatgattttctagaacagcaaaacacagtagtcc

SEQ ID NO: 360245 - DNA, 122 bp, Homo sapiens
tatgtgaaaattcttagaaaatgcactgtgctgttactgttcctatctcccagtcgaatacgggaataattctgcctgaaaatcacatgcagcttttccattttatacatgtattctcagca

SEQ ID NO: 360246 - DNA, 122 bp, Homo sapiens
tctttgcccaagacctttggggttcctcggtgtccaggtttctagttccagtcccccatgcggggttaaacagagcagcaacctgttctgtttgaaatagcgtaatgctgttcaggtaacac

SEQ ID NO: 360247 - DNA, 122 bp, Homo sapiens
gcttttgtgtttaatgaccttcagctaccgggaggcaaagccgggctcttaaaggagccgcgctccaattgtcattcccgagcgcagctccggaggggcagcggcgcgcaggggatggaggg

SEQ ID NO: 360248 - DNA, 122 bp, Homo sapiens
gtaaacatttagtataaatatttttgtgatgattgtttttcatagaaatacaaattttggcggagcacagcaccatggttaaaaacagacttcttaataaagaaatttctagagaagaaata

SEQ ID NO: 360249 - DNA, 122 bp, Homo sapiens
caagtcacttttcccctgtaggcctcggtttattctccgtaaaatcagaaagttggcctccgatctccaagcacgcttttcacgacgaagtgggactgttaagtttacagagctgctttcct

SEQ ID NO: 360250 - DNA, 122 bp, Homo sapiens
ggagaggggcagtgcacccgggctctgggtgatggggggatcagggcccccaagaagaggcgccactcccacttcgccaggcttgccccagggccagggtccgtgccaggtgtgggtggtgg

SEQ ID NO: 360251 - DNA, 122 bp, Homo sapiens
ggccccgcctccgggcgtgcccgccctctgtgacttcaggggcttggggccgacaccccgcgggcctcggtgccagcctcccgcttacccggtcagcccctgggccgagtacccctgggaga

SEQ ID NO: 360252 - DNA, 122 bp, Homo sapiens
ctgtaagctctacatctcccatctgtcttatttaccaatgccaaccggggctcagcgcagcgcctgacacacagcaggcagctgacagacaggtgttgagcaaggagcaaaggcgcatcttc

SEQ ID NO: 360253 - DNA, 122 bp, Homo sapiens
ccgggggcgggacgcagaggaggtgcgccggttcatgggtcccggagggcccaagtgagccgctcccaggtgagtcttccccaggtgtgcctcccgccgcccccggtttggccccccaatcc

SEQ ID NO: 360254 - DNA, 122 bp, Homo sapiens
gcactttgcctctgctagtgcatttaatctgcatagcaacattatacaataggtgtcctccgaaacattttcgccgataacagatgaggaaacagaggcccagacaggttcatcaactggct

SEQ ID NO: 360255 - DNA, 122 bp, Homo sapiens
tcttggtcttacaaatttttcgtgttgtaaatggcccgtaagcccgtgggaggagtgtggcgtttttatgtatccatcccggtcatcatattaaatttaatacttagggcctccgtatccct

SEQ ID NO: 360256 - DNA, 122 bp, Homo sapiens
aaggacaatatcactgggggggctgtacacaccctgcgctattaagaagaatattatcctcgcccgccctgcatattaggaaaaatatcacagagtgggtgtccacctcctgcgatatggga

SEQ ID NO: 360257 - DNA, 122 bp, Homo sapiens
caagttttgtttgtttcctatcaatggtgttaacagctctgccaacgttccgcaattgtgcggggaggacaatgcgccgagaaaaatcagtacagtattgttttatttttatgctatatcca

SEQ ID NO: 360258 - DNA, 122 bp, Homo sapiens
cccccgaaccacacaggacagtgctgcggaggggatgtttcatgcggggctcagaaaggccgggctggaatcctgagtctgtgtaggctgtgtggcactggggtggggtggaggtcattcaa

SEQ ID NO: 360259 - DNA, 122 bp, Homo sapiens
gtctgtctcaaatttacaaacgtcctcagcaacatcaaatgccgcagcttcaaacacaggcgccagcttcaagcccgacagcttcaaatgccgcagcttcaaacacgcgcggcagcttcaaa

SEQ ID NO: 360260 - DNA, 122 bp, Homo sapiens
tgctctaagtttccaaaaatctcaattttgtgttttactctgaccaacctgtatttattacgtttagtaatctatccccaaaaaaactcacctttaagtgattcttactccaaaacagggct

SEQ ID NO: 360261 - DNA, 122 bp, Homo sapiens
tcaactagtttgctgttatcaaaaagactataggcaccatcccgtattgccacaacacctcgactccggcagtatatatcaatgcaatacatgttcctgaaggccagtctgatgtgggtgga

SEQ ID NO: 360262 - DNA, 122 bp, Homo sapiens
gccttaggagagagattaaactataacaaggtccatgtcatataccaataaaaatggtaacgctccttagattcatctcttcctggattcctctctgtgcagaggttctggttgatgtctca

SEQ ID NO: 360263 - DNA, 122 bp, Homo sapiens
gaaaatacatttgtcttctaaacctttaccgaagggagtgaaaagaacacctcacccaaacgcccgcccttatgtgcgcagccccgcctcctgtaggccccaccccaccaaagggtgcgcct

SEQ ID NO: 360264 - DNA, 122 bp, Homo sapiens
atttccgccgaaatgctttccggggtcgaagggcgccggggctccagagtgccgaggttccggggtcgcgcgattccgcagctcccaggcgccgacccggacccccggccgcggcacctacg

SEQ ID NO: 360265 - DNA, 122 bp, Homo sapiens
tgggtatgtcctccaggcggagctctccccctcaactgagaactcaagtcagctggacttcgaagatgtatggaattcttcctatggtgtgaatgattccttcccagatggagactatggtg

SEQ ID NO: 360266 - DNA, 122 bp, Homo sapiens
aatgcagtctcctatcccagatccctctgatttattctcggatgtcaacattcccctccgcgctgagctcagcacggaggctgttgtgcggtacctacagcaggtgaatgggcggctgccga

SEQ ID NO: 360267 - DNA, 122 bp, Homo sapiens
gggagcttgctggggctgagtctcaccccacccccagagtcagggtcccacaatgcctcccgcacctcagtcacacctcaaaagagcagagacgtctcctaaattgctttttgaaggaatgt

SEQ ID NO: 360268 - DNA, 122 bp, Homo sapiens
gccagagatcgtggagtagatattacagtaacattactaaccacaagtagaggcggtgaccgtacttacgctcagagcacctccccccacccctgagaccagagcaatgacctcacactcat

SEQ ID NO: 360269 - DNA, 122 bp, Homo sapiens
agactctgagagcagcaaattctggtggacctcttgtcctgggagaaccttagatgaaggcgagtgggacaaacagcttctcaacacctgagctgaacttgtagccacaactgtcactcatc

SEQ ID NO: 360270 - DNA, 122 bp, Homo sapiens
caacatccacccccgccctcagctatctaccctgagcaggcgccgctcacactcgcgggccgtctccaaccccgcgccagccacccgagggggcgttctcagcctccaccctagcggacccc

SEQ ID NO: 360271 - DNA, 122 bp, Homo sapiens
ccacgcccccgaacactttcgcccctccaccgcgggctccccgcctccagtctcgaggcccggcccaggcatgtggggcaggcacctcctccaccgccccccaagcatggcccggcccgggg

SEQ ID NO: 360272 - DNA, 122 bp, Homo sapiens
ctgcaaaaggcatcttaacctgctccaagaaggctaccaacactgacacaaaataagcttcgtctaacactattcatagcaaaagaaggcaaaactgagtttgaattgtttgacctttcata

SEQ ID NO: 360273 - DNA, 122 bp, Homo sapiens
cccttccgctccaccagcctggtctgaggcgtgctctgtccttagagaaggcgcggtggccgggttcccttcccctagggcacattactaagggggtcaggcactgcatgctcgttccagca

SEQ ID NO: 360274 - DNA, 122 bp, Homo sapiens
acggtggagagggacgcggcggagccggccggcagccatggaaccggccccctccgccggcgccgagctgcagcccccgctcttcgccaacgcctcggacgcctaccctagcgcctgcccca

SEQ ID NO: 360275 - DNA, 122 bp, Homo sapiens
tcaccaaggccgaggccgagctgggcaccttccccagggcgttcaagaagctcctgcacacgatgaacgtgccctcgctctttagcaagtctgctccctcgaggccacagcaagccggctac

SEQ ID NO: 360276 - DNA, 122 bp, Homo sapiens
gctctctgggtactctttctgtagtcggctaacagaggatgaccaagcccctcgcgggggcgggggcgggtcactcccggacagggcccccatgaagtttccctggggactgtgtgactccc

SEQ ID NO: 360277 - DNA, 122 bp, Homo sapiens
ggaggtcccaggcttctcaccctgtgcccgcatttctcgcttctgctctcgcctccccctcgcccaccctcgctgttgtcccccttgtaccccgcaggagcagaccccgcgcacgtgcactg

SEQ ID NO: 360278 - DNA, 122 bp, Homo sapiens
agttctaagttgctagccaatcaggacaagtacagaggtccccttccagccaatggaaaccggacacggtagtagggtgcacgtgtcaggttataaatgaccctgtctcctttatgcgtgtg

SEQ ID NO: 360279 - DNA, 122 bp, Homo sapiens
ctcaattaagctctgtacacttgagcgtctgtccactcgtaggtgtgcatacttccactgcggatttaaactttcaaagaagtctagggtgttaggtctggaggtttccccaaggttttcca

SEQ ID NO: 360280 - DNA, 122 bp, Homo sapiens
cagagttgtctggttcaaaatatgtttattcagcaaaaggtcattggtagcatttgccatcgcaaggcctgggcaacttcacactctttgagaactcattctgcctggggtgcttctggccc

SEQ ID NO: 360281 - DNA, 122 bp, Homo sapiens
ggtgggacgcggcgtgtccccctgctccaccttcagcccttcttctccgcgggctagtgtcgccggattccctcagccagaagttgacttaaagaggccacgatcccggtgccagcttgcgc

SEQ ID NO: 360282 - DNA, 122 bp, Homo sapiens
agatattcagggacatgagggtctcctggtgccccttggagcagcctaatagcctctactcgttgggcacacagcctgcattcaaatgagcaccacagggagaaacaattgtagacagaatt

SEQ ID NO: 360283 - DNA, 122 bp, Homo sapiens
tcttatatacagtaacacattccaaatagagttctcaacactacattttaaagcgcaaatcgctgtattcaataccagcatatgaatatcatcttcttaatagagtaccagatgtgactaag

SEQ ID NO: 360284 - DNA, 122 bp, Homo sapiens
gggcctgagtttggaggtggcgggtgccttacaagaatgctcgcgtgatcagtgtgttggcgtttgtgtacacagaggacattattaaaattactctttgtgtgaatggttctatcccagag

SEQ ID NO: 360285 - DNA, 122 bp, Homo sapiens
ttcaaggaagcggggcggggattattattaccatttaacggataggaaactcagcatcagcgaaagttcagatgggcttttaaggaagagtaggccaggcgcgtggagtggaacagcctccg

SEQ ID NO: 360286 - DNA, 122 bp, Homo sapiens
cctttccaggaggcctgatcagcctctccatcatctcctgggtgactgaacatgatcagtcggtgcagggggcaggtggcaagggaggtgggtccaggccagctaagctgccctaagactat

SEQ ID NO: 360287 - DNA, 122 bp, Homo sapiens
acacagaaaacagcagctctgtccctgccctctggcctcacttcctccggtgggagtggacgtggtgagaggatggggaaggacagctgttatcagtgctgtgagaagacggcctgagggca

SEQ ID NO: 360288 - DNA, 122 bp, Homo sapiens
agcttatccaggacctgctctccttcatcaatccacagctgctcaggtctctccacactccggctcactatagccctgccctgggcagcagggctggctggctagcccagaggaaggaacaa

SEQ ID NO: 360289 - DNA, 122 bp, Homo sapiens
cttcctctgccgccaccacagccagccctcaggtggcctcttcccaggtccctgccatcccgggagcccacatcatgtagcaggtgacagcagtgatgccaatctagtgatccacctgctgt

SEQ ID NO: 360290 - DNA, 122 bp, Homo sapiens
cagaggtcaggcggcccgtccccgccccacctggcccggaggcgcggtgcccaggcgttgcgtgagaaggaccggaggcccgcgcagccacccagccgacccattccccggcccggcgcggg

SEQ ID NO: 360291 - DNA, 122 bp, Homo sapiens
gctccagctcagagccagggacagcaggcattccagccactgatgaacgaggggccccgtcgggagtcacagccctgagaggctcacagccagccccacagccccaggccccagctggcagc

SEQ ID NO: 360292 - DNA, 122 bp, Homo sapiens
ctcctgacctcaggtgatccgcccgcctcggcctcctgggattacaggcgtgagccaccgcgcccggctagaaagtgaatcatttctatatttgattgtacgtgaagccctcggtagtcctt

SEQ ID NO: 360293 - DNA, 122 bp, Homo sapiens
caggccctggacacttactgcttctcttgagatttgtggcttgatcttctagatagtactcgattttgtgtgtgtgttccagcttccctgcatgatattgataattatcttctaaagggatt

SEQ ID NO: 360294 - DNA, 122 bp, Homo sapiens
ttttttggtcattgttccctgaataattcagcataacagctatttacatagcatttacatcgtattaggtattataagtaatctagagatgatttaatgtatactggaggatgtgtgtaggt

SEQ ID NO: 360295 - DNA, 122 bp, Homo sapiens
atccatgtaaaaaagtactgagatgggtacattctttttttgtactatgtctttgaaacccggtgcgaacggagtgcttccatcccactcagtttggacgagtctcgctgcaagttgctcaa

SEQ ID NO: 360296 - DNA, 122 bp, Homo sapiens
ccctctaaagttttcccactggttacttggtgtgcacacaatgtaaatgaaataggagcccgagatcagtctgaatggttgcagaaagcgatcaatgggaggctgaagtgaagttacaaagt

SEQ ID NO: 360297 - DNA, 122 bp, Homo sapiens
cgcccggctcgccgccggcagctcttacccatttgtccaaggggacctgggcgagggacccggtgccttggtacaggtccaggctgagctgctccaggctcagcttctcctgcagaaagtgg

SEQ ID NO: 360298 - DNA, 122 bp, Homo sapiens
cggctccgggcagtcacagtcatgcacgcagctcctatttttcgcgttgctaatcgcgtccgttgcagtccaacccatcctgggccgcggcccccacagggtctgtgaggagcgcttccccc

SEQ ID NO: 360299 - DNA, 122 bp, Homo sapiens
cccaattccacaccatgcccgccgctccccacaccctccccaactccacactgtgcccgccgctccccacacccaccctgactcccaccagcacctgctggcatcgtggagtcagggaaata

SEQ ID NO: 360300 - DNA, 122 bp, Homo sapiens
gtataataccccccgccgcgatgtggggagtgatatcaccctctctcaccctggatattacgaacaacctcgcggggggtggtggtccataatatccgggtggggggagaggctgatatcac

SEQ ID NO: 360301 - DNA, 122 bp, Homo sapiens
cggggtacgaagctgatggaaaagtacccagctgcctcctcttcagttcttcagcctcaccgtgtgcgggagacgtgtcacagcagcattctatcatcattatcctggaagggagcgttggc

SEQ ID NO: 360302 - DNA, 122 bp, Homo sapiens
cggctcacaatgagaaggcgggtgctggggatctgcccccgtcgtgcatgtgtcaccacacggtgtcgaagcggacacctgcctccgggatgagcgcattgggcaacactgcatgctttgca

SEQ ID NO: 360303 - DNA, 122 bp, Homo sapiens
tatgagtgagatgaaaagaatgtccacaggccagcttctttcagaagcgcctaagagatgcgcatgtaaggggtgccatggagcacccgggaaggacccaggcctgggcagggaggcgttgg

SEQ ID NO: 360304 - DNA, 122 bp, Homo sapiens
ttactgacagcctgaggttcaagaatgttgtgagctttgcacacattgaagttaataaatcgactggttattgtttgaagacactcagatgctttatttacatgttgtagaaacatgggact

SEQ ID NO: 360305 - DNA, 122 bp, Homo sapiens
tccccttcgtttgagatttaaccccagaccttaggcgatggctgcccagcctgtcccttccgcctgtgtggctgcccacgcgggcgttgctcatggggctagtcctgggtggatgggtgggg

SEQ ID NO: 360306 - DNA, 122 bp, Homo sapiens
tgatgggcgccgccatcttcttcgccagggcaagtatggcggccccaaaagatggcgggccgtgcggcggcgggggcgcggcggcggcggcgggcggcgggccgcgaagatggcggcaggcc

SEQ ID NO: 360307 - DNA, 122 bp, Homo sapiens
atataaattataattttcttcagctttttcttttgcttcctgaatttatctgtgtttccccgatctcttcttccctgcacccctgttttgttttctgcttttcatgtcagaggattccttgg

SEQ ID NO: 360308 - DNA, 122 bp, Homo sapiens
cgtcacttagcaaccgatcgacagcgggctgctgggtccggcgatgcaggcccagaaagtcgcctaaggcagcttccgcggctttttcgcatcggcccgaccctctgcccctccagaacagg

SEQ ID NO: 360309 - DNA, 122 bp, Homo sapiens
acagctcagatgcttcatgcaaatgaggaagctcaattggcttctattgaaaatacctcacgcatcattttctcttgtctctacttgccaaaatatttataaaatatctttgccctgccata

SEQ ID NO: 360310 - DNA, 122 bp, Homo sapiens
gggagtgccagacagtgggcgcaggtcagtgagtgcgcgcagcatgcacgagccaaagcacggcgaggcattgcctcacttgggaagcacaaggggtcagggagttccctttctgagtcaaa

SEQ ID NO: 360311 - DNA, 122 bp, Homo sapiens
ttaaggggttcaagagcccctaaaagcataaaatattttgtgtgtgtgtgtgtgtgcacgcgcattttgggggaaagggggtctaaggtgttttcatatccaaagggcttgtggactggagc

SEQ ID NO: 360312 - DNA, 122 bp, Homo sapiens
gagctgatttgcttctgagcatgtacggaagctgagcccggctgcgtagagacagtggcacggagtttctcctgccccctgcgaggccttgggccccggcatgacccccacagacagggccg

SEQ ID NO: 360313 - DNA, 122 bp, Homo sapiens
aggaagggaggcacccggcaagggtcacaagtgtcaatctggcgggacagaaggctgggccgccctttctgccctcccatccctcctcaaggccatccagagaatgtggatggaggatgaga

SEQ ID NO: 360314 - DNA, 122 bp, Homo sapiens
acgctcacacccgcgtaccacgccgagaactacagccctgaggacaacaggtttgatctgcgaccatttctgtacaacacaagctggccttggcagtttcggtgcatagaaaatcaggtaaa

SEQ ID NO: 360315 - DNA, 122 bp, Homo sapiens
cagaactcgtccccatccgctgccagcttgggtagagacaaatccgattgtccacgtccacgttgggaaatcgcaggtagccccctgccagccctgccgagggctgaggagaaactaaaaag

SEQ ID NO: 360316 - DNA, 122 bp, Homo sapiens
ctaccgccacctgtggagggaccgcgtatgccagctgtgccacccgtcgccggtccacgccgccgcccacctgagcctggagactctgaccgctttcgtgcttcctttcgggctgatgctcg

SEQ ID NO: 360317 - DNA, 122 bp, Homo sapiens
gtctgcggccctgtccgctgctccgggggcggggcggtggttccccactgtgtctccgggcgccagggaccgcgcgactcctgctccgacccagcctccgccgcctgccttcccctccctgc

SEQ ID NO: 360318 - DNA, 122 bp, Homo sapiens
agactgaggcaacagaagacctcagacctgctccatcctgaactagagcacagtgggacccgcgacctgccgtggtctcaggcactggaggacacctgcaacgccgtgcgctagactatgct

SEQ ID NO: 360319 - DNA, 122 bp, Homo sapiens
cagggaagagacagggtggggccactaccgggttaaagacttgtagtgggtggggctacacgtagggccgagacgaccggatttccggaaatcagagccggcacacgtgacttttgtttgca

SEQ ID NO: 360320 - DNA, 122 bp, Homo sapiens
agcgcggggagcgcgggagggaggtgccccggtccccgcccctgagacaggccccgcccccgccccccaccaaaggagctgtacctcctcggcgatccccggcctgaacgggtaggaggggt

SEQ ID NO: 360321 - DNA, 122 bp, Homo sapiens
agcgcgcctgcggggactggacctcggcgcgggggtgggagagccggggcggggcctcggcgctgagaaggcgggggtggaccctgctgcagcccccactgctcctccgacgaggctctctg

SEQ ID NO: 360322 - DNA, 122 bp, Homo sapiens
cagccaggatgggtctgggtgaggaatcgaattacaacccacttcaatcctcgacctggtcgtttgctgttattaggagaaatggggcagagagggagggcaccgctcacggagcctcattt

SEQ ID NO: 360323 - DNA, 122 bp, Homo sapiens
ggtcttattatcgtctccatcatacaggtgaggaaagactttaagtaacttgcccagtcacgaggctagtaagcatggagcagaaattgattcccagcagtctggctcaattctgtgcccca

SEQ ID NO: 360324 - DNA, 122 bp, Homo sapiens
cctgcgtgggaggcgcccggctccggcggcccgccgcccccggctgctgcgtgtcacccccgtcacgactctgctacgcacttcgcccccagctttcagctccggcgcttccgcagacccct

SEQ ID NO: 360325 - DNA, 122 bp, Homo sapiens
acaaaccctgcctgatttggcccctgtccactggtctccctcactcccttgctccagacccgcttcagagggctatgtccctcaagcttcctgactgcctggcctggtctgaatcactcact

SEQ ID NO: 360326 - DNA, 122 bp, Homo sapiens
tgtacttttgagcatttgcagaggccaaggttccccacagctctgtgggaccccaagacccggttccctttgctcagcagtcacctttgtgtttgccctgtgctgcagcgaaatgctctgcc

SEQ ID NO: 360327 - DNA, 122 bp, Homo sapiens
aacagagaatgtgcacacacaaaggcgtttacacaacaggcacagaaagacaccgtgaagcgtgctcacctatgtgggtctgagccatgacgtccgccagcctgtgggcagccccgctgccc

SEQ ID NO: 360328 - DNA, 122 bp, Homo sapiens
cctcgtcatcaggcagagctcgtccaaggcctctttgaccttcttgtcctgtgggtcatgcgcgtctcggatgtgcttgatgaggttcttgacgtcagagtacttcttcttgcagaagcggc

SEQ ID NO: 360329 - DNA, 122 bp, Homo sapiens
tctttaaaaagttgggaccacatgggtttcttgccttgcagaaacactaagagttcatttcgtatttcaaacattcttgacagaacttttccccgtgataaccaccgtatctcagcatgcag

SEQ ID NO: 360330 - DNA, 122 bp, Homo sapiens
tcacagagggagccttctggctgtgtcttcacaaggtggaagtggcaaggggtctctctccggcctcttttattagggcaccaatctcattcataaggaccctgcccctatgacctaatcac

SEQ ID NO: 360331 - DNA, 122 bp, Homo sapiens
accgtatcccagcagacaccatggtggcagcagatgacctaaccaaggtcccaggaaaggcgggctggggtcaactgcttgaaaatttagtaaccctgctcctaatcccgtgcactgctata

SEQ ID NO: 360332 - DNA, 122 bp, Homo sapiens
gctgcaccagaagtcctggctcctcccgggctgaactcgaacctggctcggatgcggcggcggcggccctgtcaagccccgcgcaccctccccagcagcctccctatcaagcgtgcccgagg

SEQ ID NO: 360333 - DNA, 122 bp, Homo sapiens
aggagactttccaagtaaaggtcctggaaatgtatatgcaacacataaaatcccaacccacggatggaggacagctttagccaagtcaggaaaatatgcctccatagaggaataaggctggg

SEQ ID NO: 360334 - DNA, 122 bp, Homo sapiens
cgctggaaaatgctgaaggacagcgagaagatcccgttcatccgggaggcggagcggctgcggctcaagcacatggccgactaccccgactacaagtaccggccccggaaaaagcccaaaat

SEQ ID NO: 360335 - DNA, 122 bp, Homo sapiens
agataggggtgaagaggtggaaaaagagaaggttaaaccctcacaggattggcccacccccgtcccgccgcgtgctgcgcaggcgcgttttacctaaccaccattttccgtcaagttttagc

SEQ ID NO: 360336 - DNA, 122 bp, Homo sapiens
tttgggaggctgaggtgggaggatcatgaggtcaggagatcgagaccatcctggctgacacggtgaaaccccgtctcccataaccctcactgtggtgcccaggcagctggattatcccatta

SEQ ID NO: 360337 - DNA, 122 bp, Homo sapiens
gtgtgctcagcggagctgttgcagaaggctgcagcaagcatcttccattaacgttacgaccgtgaaatatgacaataaaatgatagccgtatggtcgcaaatttgcagcccgccgagctgcg

SEQ ID NO: 360338 - DNA, 122 bp, Homo sapiens
tgggaaacaggcctaagcagtgctggccccttcctcgtccagactggcattgtctgtgttcgccagcccctccacgaagttggatcatttgcggagcaggccaagtccctctagacctcacg

SEQ ID NO: 360339 - DNA, 122 bp, Homo sapiens
gggagggagggagggaggcgtcgcggagtttctctcggccttttgtgccatccgccgaggcgccttgagtataaatccagatagtgcagtttttgttgtgcttgtgctgatcaactttatgg

SEQ ID NO: 360340 - DNA, 122 bp, Homo sapiens
gtccaatagaacactggttttctattggaggcttttgggttttttcccccatttccctttcgttacaaacgacccgctgcggccgcctcctgcttgtccccacaggcccattcaacagccca

SEQ ID NO: 360341 - DNA, 122 bp, Homo sapiens
aagcaggaggcttcagagataatagatgataaatgataaatgactctttttggactttaacgggtgtcagactcttagtgaaatcctgcctagatcaggaaaagacctagaaagcgaaggag

SEQ ID NO: 360342 - DNA, 122 bp, Homo sapiens
tgggaaagcagcagtcacagaaggttgtggtctagttctgggaagctctactctgagcctcgctggagttttcttatccatgaacctggcccagccccctcacctcggagcagaccccgctc

SEQ ID NO: 360343 - DNA, 122 bp, Homo sapiens
actgttcctacagttacctagagagatggccgggaaatcccactgaacaaaggagacatccgaggcttggcaaagttccacggtttgtccctgtcccccctcctccacttccgagacgacca

SEQ ID NO: 360344 - DNA, 122 bp, Homo sapiens
aagttccatttccttctccacctcattgaatgatagtttctcagtcattgagtcataatacgtttccagcttaagatgaaaatgtaaaatttctccccactcagaattttcattttatgttt

SEQ ID NO: 360345 - DNA, 122 bp, Homo sapiens
tttctacaggcaatttggcaggcaggggctagggaatgcctgctgctgatcggctgcagacggaccatggggtgtcaacgatttttgtcccctgagtccgcctctgcgtggagccacgggat

SEQ ID NO: 360346 - DNA, 122 bp, Homo sapiens
ccccattaaacccggggtgcatggttcccacgtgtcttcccccaggtaccacatctacaacgtgaatgaggagaaccctggcttcccggagccgcgcgccctcttctacacggcgcagatca

SEQ ID NO: 360347 - DNA, 122 bp, Homo sapiens
acggaaaatgaggacaggacgggggtgagggaatgagagtgggaggtccctgcacctcctcgcccggctcctcaggaagaaaaccgctggcccttcccgagtgtgccggccgagggccgagg

SEQ ID NO: 360348 - DNA, 122 bp, Homo sapiens
atcgacctccgcctccatgttgaatagttgacattccgcagaccgcggcggcgcttaagccgcaagccgtactagcacggagggcctccattggacagctgtcactcaacatctcgcactca

SEQ ID NO: 360349 - DNA, 122 bp, Homo sapiens
ctgcgccgctctcacccgtcctggcccaggaggtcgctgtcccttgcccgtggccaggcccgctctggccaggccctgcacctcctcgccaccccagccaggttgcaccccgatggtctccc

SEQ ID NO: 360350 - DNA, 122 bp, Homo sapiens
accttcggtgattaggccctccaggcgcgggggatgtgggactacccggactgaggactgcgcaccggaagtagtggcggcgctgcgtaacgtcgagaggaagtgcctgatgccgcggcctg

SEQ ID NO: 360351 - DNA, 122 bp, Homo sapiens
tcattgtccaaccgcaggagggtgcccgcagaccttcaagaagatggttctcacgcctgtcgccctctccctcatggagaaatggagccacagctcgacgcagggacggaaaaagaagccgg

SEQ ID NO: 360352 - DNA, 122 bp, Homo sapiens
acgcgaaaaaggaagcacaggcgattctcgtcaaagcagactttattggggcgacagggccgccccgcacgcgccagccgctccccgcgcggcccccgggccgcccacccgcctcaaccccg

SEQ ID NO: 360353 - DNA, 122 bp, Homo sapiens
cggagggtggcgctcagcgtgatgccacccagagtctgacagagctgcatggcaggaccccggggagatgaaagccagccccacgaggggaagagcccctacaagagcacagccagcgggca

SEQ ID NO: 360354 - DNA, 122 bp, Homo sapiens
ggactgtgagctgtctaacttcctgtcatctctaaagcctagtacttttcacttatttaacgcacagaaaatgagctaaattgattttaaggacgtatccctggaagaatagcatttattta

SEQ ID NO: 360355 - DNA, 122 bp, Homo sapiens
ccgcgccacggatgccagatcccaggctggagagagcgggtaggggcagagaagaaaacgcgggcaccactcagggtttggtccacgttcttcctgcccatggccttcctcttcccccgcac

SEQ ID NO: 360356 - DNA, 122 bp, Homo sapiens
cccctcttaggcccagccataaccattcttctttttctagcattcagcccttgtctcctacgccttctcactcagtttttacaggaccgtatcggagccttcaatacaatacaagatatgat

SEQ ID NO: 360357 - DNA, 122 bp, Homo sapiens
agtgccagacattgggcgcaggtcagtcggtgcgtgcaccatgcacgagccaaagcagggcgaggcattgccacacttgggaagcgcaaggggtcagggagttccctttctgagtcaaagaa

SEQ ID NO: 360358 - DNA, 122 bp, Homo sapiens
gccgcatgagacgtgggggcgtggcctggtacgctagtcctttggccagagggcggattccgcctgctaaggtatccccagagttatttcaactggggaaagagaccaatagcagaagtaca

SEQ ID NO: 360359 - DNA, 122 bp, Homo sapiens
ccccttcctgcaccccaagcccgcccctctctccgtaactcagccatcagcaggggcagacggcaggtggcctggttgctgcagctcccaggatcagctctgccctccccgcaaacgccagc

SEQ ID NO: 360360 - DNA, 122 bp, Homo sapiens
tttgcttcccagggccactgtaacaaccaaccacgaatgggaggctcaacacaactgaaacgcacgtcctcacagtcctggaggcccgaactccaaaaccaaggcgccagcagggccacgct

SEQ ID NO: 360361 - DNA, 122 bp, Homo sapiens
gtcacgctctgtttatgttgctgttcaggagcgaactgcggcaccgcccaaacactgtgacgccagcgcgggaggagggccgcgggaggggcagcggaacgcgcagagggcacggtgcaagc

SEQ ID NO: 360362 - DNA, 122 bp, Homo sapiens
gtatcgttccccaggctccgcctctgagctgtgaccattagctggttggtgggatctaatcgccctcttcctagctccttacagtcccactgaagccccgccccctttctccgggcctggat

SEQ ID NO: 360363 - DNA, 122 bp, Homo sapiens
ccaaagtcccgcagcccttggcagcgcccgcggtcgcctcctgtcctcgccggatgcgcgcggtgcgctcagctccctggactgcaagaatcaaggcggtcttgctgcaattaccgctctta

SEQ ID NO: 360364 - DNA, 122 bp, Homo sapiens
ccagtgctcagcagcccgggactccccgcagccttcgcttctttccctgcctgccctcagcgcagctacagcacggaggagaagccccagcagcaccagaaaaccaagatgatcgtcctggg

SEQ ID NO: 360365 - DNA, 122 bp, Homo sapiens
cgacgggctgctgtgctcatccaaaagtactaccgaagttataagaaatgtggcaaaagacggcaggctcgccggacggctgtgattgtacaacagaaactcaggtgggtggagaagagctc

SEQ ID NO: 360366 - DNA, 122 bp, Homo sapiens
gaccagaaagagccgacagggggcgttcctggatgatctggggctgtcaattgcgagacgcggaggattgtgggacttgtggtttttctcgcatcatttaagctttctggactacatgtccc

SEQ ID NO: 360367 - DNA, 122 bp, Homo sapiens
ggcggcgataggctttggggcggggcttccaaaccgggcgtcccggctagagtgaaggggcgtgggcactcataggctattgggggagaggttaagaaacgtagaatttcgcagccagaatg

SEQ ID NO: 360368 - DNA, 122 bp, Homo sapiens
cgctgctctcgggcgctgggcggggagagccgcgcgcaccggttaattctgccaatcatgcgtctgggcctcccatcgtgtgggccaagccccgccccaaccacccgctggcggaggcgcgc

SEQ ID NO: 360369 - DNA, 122 bp, Homo sapiens
cacattccctccacccggcatcgtcatcatcgtgttgatctccttctggagcgtccacagcgctcccgacaatgcgagtcttccccaaatggcatctctttcataaagcgagacacaggtcc

SEQ ID NO: 360370 - DNA, 122 bp, Homo sapiens
gcaagcgtcaaaagactgcacagcaggaaggcgaaaccgaacagaactgctgctgcgcggcgacagctgaagtgggtggagaacgggagggcgggggaggcggggccgagagcgattggaag

SEQ ID NO: 360371 - DNA, 122 bp, Homo sapiens
gtctggtgggggccagcttgagtagagctgtcctgcagccaccagtgaccttattgacttcgctgtttcacatcagcctcccatgtccagcaactctctcaaaacagctctaataaactaag

SEQ ID NO: 360372 - DNA, 122 bp, Homo sapiens
aactgtaaatccaattaaacctatttttgttcccagtttcgagtatgtctttatcagcagcgtgaaaatgaacttggtaccataaattagtaccagtagagtggggtgctgctgaagagata

SEQ ID NO: 360373 - DNA, 122 bp, Homo sapiens
gtctcacgggatcagactgccggctttggtgccagcgcggggcaaacagtgcccctccgccggaccccttgttgcccacaggcagggtcctcctcgggaaaggcaacggtggtgaaggcttt

SEQ ID NO: 360374 - DNA, 122 bp, Homo sapiens
aggaactcagattgcagctcaggattcaggctttgattctggggataacatagggagaaccgttttcctttttgatagcgttgctttttacccacattctctcggaagattgtcaaggaaga

SEQ ID NO: 360375 - DNA, 122 bp, Homo sapiens
aactgcagaaagaccctgttaactgcagaaatcacatgtagtgatgactaacgcctaaaacggaagcgctgccgaaacccgggattgaaccagggacctttagatcttcagtctaacgctct

SEQ ID NO: 360376 - DNA, 122 bp, Homo sapiens
agcaggggagagactggggctccaggagcgtggaggcgggaaggggctgcgggggacaggcgcaccccagagaaaggcaccgcaggcgcccactcacctgcacaggtgaagtggagagcacg

SEQ ID NO: 360377 - DNA, 122 bp, Homo sapiens
aacccaatcttacgtcaaaagagcatatttttttcattgctgtgtgtcacatgctagacccggagcatttccttgttgcccctgggcttaggagaagtccttgctaaatgcaagatgtagaa

SEQ ID NO: 360378 - DNA, 122 bp, Homo sapiens
ggcaccagagcaggcgcagcagcagcagcagcagcaggctggcgagcagggcgagcagtgcgccccccggccgcatcctgagccacaggcgccgccgccaccgctgctgccggggcgaagca

SEQ ID NO: 360379 - DNA, 122 bp, Homo sapiens
agcttgacccgggaggcctccattaaactgtcacccttgcatggcaaacagatttccatccgctacctggacatgacggactgcttcgtgctggaggacgaaggcctgcacaccatcgcggc

SEQ ID NO: 360380 - DNA, 122 bp, Homo sapiens
gaatgtagaaatggtaaaagtaaaacacagtcatttttttccaccgcagctggattgactcgagtctgtctgctcttctctgttctggcctgggttttcatccttatgactttcttgcctgt

SEQ ID NO: 360381 - DNA, 122 bp, Homo sapiens
caacggactcgccagtcaccatctagcccagggacgacgcgggacggacgtgccgctgcgcgctgacatcacgctccaggccccgccccaccggccgcccatatagcgaaagcctggcgcgc

SEQ ID NO: 360382 - DNA, 122 bp, Homo sapiens
atccccaacctgatggccgccctgggcttgggaggggctgattagcccagaccctggctccgggccctgggcccctacccagggctgctgcgctttttctaatttgcctcttccgggagaac

SEQ ID NO: 360383 - DNA, 122 bp, Homo sapiens
tgaccagcgggaccagggcttgcaccccagaagtagtaactccacgcacggagctgggaccgcgggcgcggcacgctcacatagagcagcctgtgggtgaaggagaccgtagtgtgcacttg

SEQ ID NO: 360384 - DNA, 122 bp, Homo sapiens
ggcattggtgatctcagccacggacagctgctcgtggtaggccttctcggctgagatgaccggggcgtaggtggccagggggaagtggatgcgggggtacggcactaggttggtctggaatt

SEQ ID NO: 360385 - DNA, 122 bp, Homo sapiens
cggcacctcgggaagccgaggctggcggatcattcgcggctaggagctggagaccagccccgccaacacagcgaaaccccgtctccaccaaaaaaatacgaaaaccagtcaggcgtggcggc

SEQ ID NO: 360386 - DNA, 122 bp, Homo sapiens
gcaggcggctggggcaagtgggtgcggctcaacgtggggggcacggtgttcctgaccacccggcagacgctgtgccgcgagcagaagtccttcctcagccgcctgtgccagggggaagagct

SEQ ID NO: 360387 - DNA, 122 bp, Homo sapiens
gcttgtgcgggtcgggctcggacctgcgctgcctcgggatgtaaagtataacaagagggtcgggatgggcagcgtaggcctgtgaggcctgcgggtgcccctgtcccccagctccccccgca

SEQ ID NO: 360388 - DNA, 122 bp, Homo sapiens
ggcccgcgggttgctctcggactgagagcgcgaggcttcgggactgagccctagctgctgcgctggccgaagttttctcgtcggtaaaataggataacagtgcaccatagggtcgttttgat

SEQ ID NO: 360389 - DNA, 122 bp, Homo sapiens
ttttttggtttttgggtttttgttttgttttgttttgttttttctagcttagtttcttggcgtattgcaaggtagtcactggtatccttaagggatgctcctgctgagtgtcaagatcactt

SEQ ID NO: 360390 - DNA, 122 bp, Homo sapiens
atctccagcgcccgcgataggcacttcccatccggtgaggtgtatggcctgactcctgcccggggcactcatggccttgagaaggtacatacagaaataacgtcctaaaataagttccatga

SEQ ID NO: 360391 - DNA, 122 bp, Homo sapiens
cggaagccgacctcgcccgccccggaagtgcaaactgtgtggtctggcaggtgtggattccgccggtgaaggctgaaggcagctaccttaaagatgccgggatccgcagcgaagggctcgga

SEQ ID NO: 360392 - DNA, 122 bp, Homo sapiens
aagacgtactagtggcccctgaagccctgttacctcgggcctctaggactttcgataggccgcctcccttctcttaagagcccacaggttggacctccaggttcttccctgggtgctcccgg

SEQ ID NO: 360393 - DNA, 122 bp, Homo sapiens
gggtcggtgacgtaatgcgggttgattggcatgcaggccttggacgtccaggattagccacgcatttcgccaatccagaggcaggggagggacggtgcaggcgcagagtattgggtttggct

SEQ ID NO: 360394 - DNA, 122 bp, Homo sapiens
aggttcaagttcggcccccggctgttaggcctcgcgctcccggatctgaagccgcccgtgcgtccctaggtcccccgctggaagacgaggcgggaatcccaggggtcatccgggcgcggggt

SEQ ID NO: 360395 - DNA, 122 bp, Homo sapiens
ctttggcaccacctccaaactgttcctctgtccaccccaccggctttgagagatgagctacgctgggaggaagaaaggggaaaaaaaagggaaagggagcactcaactggaaaatgggagcc

SEQ ID NO: 360396 - DNA, 122 bp, Homo sapiens
ggcgggcggacaatgcggccggcggaggcccgcgctgcgcgagtggggccgggcggcgcgcgtgtggccgactctgtatgtgtgcgcctgtcagtcaacgctgacaggccgcagcccattgg

SEQ ID NO: 360397 - DNA, 122 bp, Homo sapiens
tcagactatggggattttctaggcttggtttgccaaggccaaagggctacagagtaaccccgtccccacatgtattcagccgactccatgccaggcgttttacagatcccgagaccacccct

SEQ ID NO: 360398 - DNA, 122 bp, Homo sapiens
ggagcgagcgtagagttctcgcgccacccgaactagaacgtgggatgaggtgggaggaagcgcctctggtgcgacgtaacattctttgcgtcgttagccggcctgctgttgctaagatgcgc

SEQ ID NO: 360399 - DNA, 122 bp, Homo sapiens
ggtgatcagacatcacctagaggatggtggagggatgaggaatttcatcagtattgagggcgatcagatatcaaaagcagggtggttcttgctaaactggaattctcagacgggcctagaag

SEQ ID NO: 360400 - DNA, 122 bp, Homo sapiens
gagcttggctagaacaatgctacattatacattatatttcttaggttgattttttaaagacggagagaaggttacactaacaactcacttgtccctggctgtcatttcacatttttaactgc

SEQ ID NO: 360401 - DNA, 122 bp, Homo sapiens
ttagggatggccctcttgaccttggcttccgcctggcctttctggaagctaccaaaatggcggaagacagagcggacagggccttcggatccgcggggcttccctgccagcatgtagatcgt

SEQ ID NO: 360402 - DNA, 122 bp, Homo sapiens
gctggcttcaggagtgaagctgcacatcttcgcagtgagtgttacagctcataaaagcagcgtggacccaaagagtgagcagtagcaagagttattgcaaagagcgaaagaacaaagctccc

SEQ ID NO: 360403 - DNA, 122 bp, Homo sapiens
aggggaagagggaagggcagaaagtaggtggggcccccctttggtggcctcttctctccacggccccaggctccagcccacttgggtccttggcgttggtggcagcagcacttgggccatgg

SEQ ID NO: 360404 - DNA, 122 bp, Homo sapiens
ccctcctcacccctcggccttcccctaggcaggggtggcgcaggctgggggcgtccacatcgcctccagcagggcaatggcacacaggctctgcccagcggtcagcagcaggcacgggcagg

SEQ ID NO: 360405 - DNA, 122 bp, Homo sapiens
tcatcaacaaggcaatccttcacctactcctactcctcaaagcagcatcagatgagaagccgggtgaggcatgttaaccgagaagccctcctccaattaatgtgctattgctcctttaaaac

SEQ ID NO: 360406 - DNA, 122 bp, Homo sapiens
gaggtcacaggttgttttctgtttcgttggctaatgaatctcaagcatctatgcctggcacggatttgctttctacaaatatgtgttaaatgaatgaagaaacacaactggatccttccaaa

SEQ ID NO: 360407 - DNA, 122 bp, Homo sapiens
gatgctatcagcagctcctggccacaccctacacccctggaagcagattgcctggggcctcggcccccaggctccaatgcctaacccggggaggtccttgggcgctggcttgtccccctctt

SEQ ID NO: 360408 - DNA, 122 bp, Homo sapiens
gggcgggaccggaggcgggggccgacggagcagcgttgggggcgcggcaggaggcggggccgagaaggaccctggagggcaagggggagctagaggcggggaccgggccgagggaggactcg

SEQ ID NO: 360409 - DNA, 122 bp, Homo sapiens
gaatgagagcactccacgggagccgggaagagagaggccccgtgaccaaacttttggtggcgtctgaaactttttctgtaaggcatctgcagacagtaatcactaaggccgccttctgccct

SEQ ID NO: 360410 - DNA, 122 bp, Homo sapiens
tgggaccccggcggctggcccgctccccgagaagggccgtggtcggggggctctcactcacgagccgctggctctgggtcagccctgcccccagggcagcgctccatcatgaggctggcggg

SEQ ID NO: 360411 - DNA, 122 bp, Homo sapiens
cagcgggagcccggaggggcggggcctgggggcggggcctaggcggggaggggcggggtccggccgagccccaggctggcagttccgctacacgtgctgtttgtcccttgatctgcttttat

SEQ ID NO: 360412 - DNA, 122 bp, Homo sapiens
caaatgtccttcaccagtaaagcaagcaaatttttaaaatctctgtttttgaaatctactcgtcaaagagttttcagaggcaatgaaaggggaacagatttttcattgtaatagtggaagtt

SEQ ID NO: 360413 - DNA, 122 bp, Homo sapiens
agagaggccatgggggctctggaggcatgcagaggtaaagcagtgcagcatgctggggagcggggggaatggagggagactgggctgtaccgacgaaggaggaagagggggaggggaaacaa

SEQ ID NO: 360414 - DNA, 122 bp, Homo sapiens
agggacatgttagattattctggggaagggctcatgccaggagggttcacttttaccaggcgccaagtgtccccagcaaccagtgtctcctgtaccagcagaagctccagaactctcacccg

SEQ ID NO: 360415 - DNA, 122 bp, Homo sapiens
ggttctgacgccaaggcccggctgcaacgtgcccgacgggctactccgggctggcagccccgcccttcttcggaaagctgacttacttgcgccccctggtgtttcacatgctgtgaatctct

SEQ ID NO: 360416 - DNA, 122 bp, Homo sapiens
tctagaagctgggaagcaacaattcattctagactccacccctactgccaaggaggcaaccgcaaagtgtgctgcagtcctgaagacccctgctcgacttgaggtaggcttgataccttgtg

SEQ ID NO: 360417 - DNA, 122 bp, Homo sapiens
ttattcgggccagtatgcaatgaatcagaaaactacaactcccaaagtgccccggggcggcgaggggccgcaacggtgacgactgtggcagagaaggcccggaggggctctgcgttctgtag

SEQ ID NO: 360418 - DNA, 122 bp, Homo sapiens
tgaggaggtctcagaataccaagaagtaactgcctaggtggatgatagccctgtattacccgtacattgtctatccatagttgtctgtctctctcaaagcttgtctttctttctctcttaaa

SEQ ID NO: 360419 - DNA, 122 bp, Homo sapiens
tgatggaagacaaaattaaggagacctgcagttctccttgttggtgtaagcttttgcctccggtttctatggtaacccgtgatctgtattccaatcacacctttgaaaggtttgttttctcc

SEQ ID NO: 360420 - DNA, 122 bp, Homo sapiens
tgactatgaagtggaaactagttattggagtcaggatttattctggaggtgtagcccatacgacttgctaatgaattgaggaattgagaggaatcaagggtaactttcagaatttcagtttg

SEQ ID NO: 360421 - DNA, 122 bp, Homo sapiens
accctgtgcatatcccagaatcccggacccactgccactccactctgggaaggaagaaggcgctcccccttgggtgactgtaagataaagcagcttcttcgatctctttgtccaataagaaa

SEQ ID NO: 360422 - DNA, 122 bp, Homo sapiens
aaaaaattaaacatggaattactgtatgatccagcagtcccacttctggaaattatctcccgaaattgaaagcaggatctcaggcagatccttttacactcatgttcatagtagcagtattc

SEQ ID NO: 360423 - DNA, 122 bp, Homo sapiens
agagggctgatgggaccaataaacgcgtggccgacgggcagaaagcaggagccttacacacggaagggagccctcgtgcagccaccgtggagatggaaaatggcatgttaagaatatctttt

SEQ ID NO: 360424 - DNA, 122 bp, Homo sapiens
tcacctggggcggggggcctccagacagagcgtgagaaaagtgagatgtggctctcagggcgcagaactagctcgccccaaggggaccacatcagctctgggggaccaagatgcagcagggg

SEQ ID NO: 360425 - DNA, 122 bp, Homo sapiens
gtcttcataatgtggatgattcacaatgggccgaagtgcagagagcttaacacttgccatcgtgggcatggcacccgcaaacactgcatctggaaggcaagaggaatgtctcaggaagacac

SEQ ID NO: 360426 - DNA, 122 bp, Homo sapiens
gggcgggcagcccggcggccgcctagctgcccccagccagggccccgggagggaggggctcggacgggccttagaaactcaccaagaactaacacgcgcagcccggcagtcccgctgcccac

SEQ ID NO: 360427 - DNA, 122 bp, Homo sapiens
tgtcctcacattcctgttaaacaggaggaagtgaatcgcgctccttttcatctaccttctcggagggtttatgcctccaatattaacctcagcacagccaaagaaaatcattccattccatt

SEQ ID NO: 360428 - DNA, 122 bp, Homo sapiens
cactatgcttgcctccccccaggaggagggagaggggccgagcagcaccacggagagcagcgagcgctccgagccgggcctgctgatccctgagatgaaggacacctccatggagcgcttgg

SEQ ID NO: 360429 - DNA, 122 bp, Homo sapiens
ggtgatgtgacgaacatccaggagccatagacagcagattacacggctccaagaagtcagcggctggcggatctgaggcactgaccatcccaggctgcaggctatcttgacataaatgtttc

SEQ ID NO: 360430 - DNA, 122 bp, Homo sapiens
gacacgcccccgtgggcctccagggagccaatcgacgcgcagaaggcggggccctgggagcgacaacggtgttatccaatgggccgacagctggagccgcccctggccaatgggcgcgctcc

SEQ ID NO: 360431 - DNA, 122 bp, Homo sapiens
acccgggaggcagccctggcccggggacgcgcctgcaccttgattttgccctccaggaagcggtggcagaactctgtgatcctctctgccgtcagctcctccgattcgggcttgtacttggt

SEQ ID NO: 360432 - DNA, 122 bp, Homo sapiens
tctggaaataggcggaagtcgctccggatcatgcatggaaggctaattgaaaagatcagtcggggcgcttgtggcagccttgtcactttgtgacagtgctccgctccgggaaattgcatcgt

SEQ ID NO: 360433 - DNA, 122 bp, Homo sapiens
tccctccccgcacgcggagccctgagcccctgtcctgccctccccagaagtgggaaatggcgacagagagtcgttcagaagccattagggcctgtcgtccctgccccagcgcccacccgccc

SEQ ID NO: 360434 - DNA, 122 bp, Homo sapiens
gacctcggcgcgcgatcctcagattctgcgaaacaagacaagcgactgggtccgagaccgcggtccccatcaaaacgagcatcaaccaatcgctgggagaaatccgcagcctcgttttaagc

SEQ ID NO: 360435 - DNA, 122 bp, Homo sapiens
tgagatgagatcatgccactgcattccagcctgggcaacagagcaagactccatctcaaccggtacagtggctcacgcctgatcgagaccatcccggccaacatggtgaaaccccgtctcta

SEQ ID NO: 360436 - DNA, 122 bp, Homo sapiens
tctctagcaaagagtgttttcagatatttttccttatgtgattatttttgcagaaatgaccgctccttcatctgtcctgcagaaggttgtgggaaaagcttctatgtgctgcagaggctgaa

SEQ ID NO: 360437 - DNA, 122 bp, Homo sapiens
ccacactcgcgagcgaacgccaaggccgaggagcccagaagtctgtcctgccgtccgaggcgtggccagtcctggtgggaagcaggggctcacagggcctcatgcctcatgtatcccaaagg

SEQ ID NO: 360438 - DNA, 122 bp, Homo sapiens
cctgtgattaggtttttataaatgggcaggtattaatcagggaaaatggagtaaaggacacgatagacatacattgctaagtctagtattggaaaaagtaaggcctgggacccctaaaaact

SEQ ID NO: 360439 - DNA, 122 bp, Homo sapiens
ccccggcccccgcccgcccgcgcgcgcgcgcgcctcgcgaccctcccggccctccccgcccgtgctcccggcactcactgaacatcccaggcggctccggctccccccgccgccgccgcctc

SEQ ID NO: 360440 - DNA, 122 bp, Homo sapiens
cctgcggctcttttcgagacgcatggagcggaggagatccgcgggctggagcgccaggttcgggccgagatcgagcacaagaaggaggagctgcggcagatggtgggcgaacggtaccgcga

SEQ ID NO: 360441 - DNA, 122 bp, Homo sapiens
attttgagactctaaaatgctttgtcccgctgttcacaaaggagctggttgggccggaggcggccccgcctctgcatcctttctggggtgggggccccgggcaggcgcggccacccccgccc

SEQ ID NO: 360442 - DNA, 122 bp, Homo sapiens
cttaccttcccctgtgagagttaccagaagctcggcgtccctgatggtctagggggcttccgaggctatcgggcagtgtcagtcttcagccgctaagcggagaagatctgggaaggagtcag

SEQ ID NO: 360443 - DNA, 122 bp, Homo sapiens
cagtagagtgctggctgcagacacagcccaagagcccctgggcctggagaaggccgggttcgggggcaaccttcttggaagggttcactgctgacatgttcatgtgtgtgcatatgtgtgtg

SEQ ID NO: 360444 - DNA, 122 bp, Homo sapiens
gtttcagctcgccaggctctcccatcctcatctgaggggaaccaccttcagccagagcgacgtcagcccaaacctctcctctctgctgccttaacccttgcggggccccgggaggtgtggcc

SEQ ID NO: 360445 - DNA, 122 bp, Homo sapiens
cctaagtacccctctacagacatctgctacctaagaacacacgaacacaatgtggacctacggccctgttattccagcttggaaaaaaaaaaatcacaccaggttgactcggttgggctctg

SEQ ID NO: 360446 - DNA, 122 bp, Homo sapiens
gctgcgcaccaccagggctgaaccgtgggtaacagagctagcttccaaatctctctctgccgagagtcaaacaccttggttttgttttcatttaaccatgatgcacacctctcactatctga

SEQ ID NO: 360447 - DNA, 122 bp, Homo sapiens
agctctcactgtcattctgctcttaattaatatttaacctcagagagattgtgtagcagacggaagtggctgatgggagaacaaagccctggctggctctccttttcaacactgcctcccct

SEQ ID NO: 360448 - DNA, 122 bp, Homo sapiens
cgccactggcccatgagtccccatggcgacggcaggggccaggcccaggggcgggcagtccgagtggggctgcggcgctccgggggcatccgcggcggcgtggcggtgttcgccgccgtggc

SEQ ID NO: 360449 - DNA, 122 bp, Homo sapiens
cagctcctccccggcgggcctcccctcatctcggctgggtagaggtgccgggtgtgagctcggcgtggcgcgcacgcgcagacgctggctgggctgagccgatactcgcgaggcgccctgtc

SEQ ID NO: 360450 - DNA, 122 bp, Homo sapiens
caagattgcgccattgcactcaaggtctcccacctttgctaccactagaatttgtaacatcgacgagtgcaaacctgattttctctgggtcccagggtcctttttcttccccctgaagatca

SEQ ID NO: 360451 - DNA, 122 bp, Homo sapiens
gggaccctgggtgagctgaggcaacccagtttcctggtctgtgactccaggctctgtcctcgccccatcgccccccatcgtggcacaggttcgagggtgttggcttgcctggcctcctgagg

SEQ ID NO: 360452 - DNA, 122 bp, Homo sapiens
tttttttttctatatctggttccactcatggaaatgaccacctctgcacccattattcaccggccatatctagtttaatacaagaggtgatttgcctcttggtgccttgaggtatgatttga

SEQ ID NO: 360453 - DNA, 122 bp, Homo sapiens
ctcgggtggccgagttacacctggctataagtcatcccgtgcacctgactaaatgcatcccgtgcacctgactaaatgcgtcccgtgcacctgactaaatgcgtcccgtgcacctgactaaa

SEQ ID NO: 360454 - DNA, 122 bp, Homo sapiens
ataagaggctgagcagcagagctcccaggaacccacggaaaagccacagggacagagaagcgggaggatgggcagagaggggctgtctgaacctggggtcccatccttgcccccggagagca

SEQ ID NO: 360455 - DNA, 122 bp, Homo sapiens
atgtagcctacctacactgagaggcctgaagacggaaatacttctttcccctttttgtaacgggtttcaaaacagtaggaacagggtgagggataagagctataacagggggaggggagtag

SEQ ID NO: 360456 - DNA, 122 bp, Homo sapiens
gatggtgacgcagaggacgtctctatgccggtgactggacatatcacctctacttaaatccgtcctgtttagcgacttcagtcaactacagctgagtccataggccagaaagacaataaatt

SEQ ID NO: 360457 - DNA, 122 bp, Homo sapiens
gccttggcagaatagtttatttagtctcctttagccaatcagattgctgtttgattgccacgcgcttacttccttcactaccatcagtcctaaccgcaggccaactttcttcccagagcttt

SEQ ID NO: 360458 - DNA, 122 bp, Homo sapiens
atatttgacattggagtgccccatttacttgtttaaaatttctttctttggattccataacgtttcattatcttctatatcattggacttctatgattgctcattcttaggtaaaatagaac

SEQ ID NO: 360459 - DNA, 122 bp, Homo sapiens
ccctcagcagccaggatgagcctttaaaatgaaatctggctgaggccaggcaccatggctcgctcgcgcctgtaatcccaacactttgggaggccaagttgggtagatcacttgaggtcagg

SEQ ID NO: 360460 - DNA, 122 bp, Homo sapiens
tcctggcgtccgcaataccgtagctccaagttccggaatgtctacgggaaggtggccaaccgggagcactgcttcgatgggatccccatcaccaagaatgtgcacgacaaccacttctgtgc

SEQ ID NO: 360461 - DNA, 122 bp, Homo sapiens
gacggattcgtactacaactcccaagagtctaagcgcgcgtgaggactgcaggctccgagcggcgcctagccctctgggaattgtgttctgggtcaggcttgactgactctgagggaggccg

SEQ ID NO: 360462 - DNA, 122 bp, Homo sapiens
agaaaacctttttataataatgctaagacattatttgcctttcactcatattctttaacacgtgttcagtggagttttccagaaggtatatgatatgtgatggcatcattgctctgatggca

SEQ ID NO: 360463 - DNA, 122 bp, Homo sapiens
gggcagccgagttggactcccagaagcgctgtactttgctgaaggtgacgtttgtgcagtcggaaaggccactcaggaaggtacccgaggacttctcggtgagaaccagctccgcctcttct

SEQ ID NO: 360464 - DNA, 122 bp, Homo sapiens
tgtagacgcacacgcaccctcttacctctgctcttcaagaggaagcactcaagggctgcccgcctcagacagggatagggaagcgctctgtctggtgcttagaggtgtctcttgtctccgca

SEQ ID NO: 360465 - DNA, 122 bp, Homo sapiens
gactagtagaaaaaaaaaaagacctagattctgctcttgagttaagaaaaagttatgatacgccaggaagactgacacactgtttagcaagtgcccaggagttcaaaggaggacacagtatg

SEQ ID NO: 360466 - DNA, 122 bp, Homo sapiens
ctcatccaggaatgtgctgtctgcaccacaatcagcacttccctcaccaccagcaatacacgtcaattatcaagtttcgactatgcatctacactaggagaggtccctgcagataaagagtt

SEQ ID NO: 360467 - DNA, 122 bp, Homo sapiens
aggtacactgagtatcacagcaccaaaggctggagagagataagttccccacccttgatgcgcttcctgtccaggtggcccgaggcccactccttaagaggcaaggcccagagacactgctg

SEQ ID NO: 360468 - DNA, 122 bp, Homo sapiens
acattccaaattatctttgtttagataacttgttagttcagatatttttttctaagccagcgggaactcttgaaggcttttcagcaaggaaatcacatgacaataacattgtttagaaaggt

SEQ ID NO: 360469 - DNA, 122 bp, Homo sapiens
atacaaactgctacaacctgattaagagcctctcatccagagtttttattcctggtccttcgctgactggcactgtttttgttttttttttttaactgggggagatgacctcacacaggata

SEQ ID NO: 360470 - DNA, 122 bp, Homo sapiens
cccggccgcatacacgggcatcctctgcgagaagctgcggtgcgaggaggctggcagctgcggctccgactctggccagggcgcgcccccgcacggctccccagcgctgctgctgctgacca

SEQ ID NO: 360471 - DNA, 122 bp, Homo sapiens
gcaggtccatatgcacagggcactgccaccgatcaaaggcacgggcggagaggatgagcacgctctccaggtcacaggacactgcactgccaccgaccaaaggcacgggaggagaggatgag

SEQ ID NO: 360472 - DNA, 122 bp, Homo sapiens
tgtggctttcccgagggcgccgccaccttgtcagtagagtccgtacggcggctgcttgtacggcctcgacgtacaggcaacatggctgcacctactgcgtgacttcctcatagatgccgtca

SEQ ID NO: 360473 - DNA, 122 bp, Homo sapiens
aggagccgcgcgctgctggtgctgttgccgccgctgctctagctgccgtcagtcaggctgcgcccgcgtcttcagggcccagtccctcggacccatcgccgcttctagaccctactgcggtc

SEQ ID NO: 360474 - DNA, 122 bp, Homo sapiens
agacacctggagtccccttgtttaaagtttggaatgctgattccctggcccagatggggccggggaatctgcatttttggtaaatttccatctcacgacccaaatactaatgtttgagaatc

SEQ ID NO: 360475 - DNA, 122 bp, Homo sapiens
agtgttagaagtggtactagtaaggaaattgagtgacccaaagaagggatgtgattcccccgtgggctcacagagaatgccaacaaatgaaccagagcccagctcctctgctggactctccc

SEQ ID NO: 360476 - DNA, 122 bp, Homo sapiens
ttaactgggtggagcttcagaaatgcaatcagataccactttttgactggaagctagcagcggatacgtggaggggcgtgggtgggagttgtgattagaaaggtcaataaaagcttctaaag

SEQ ID NO: 360477 - DNA, 122 bp, Homo sapiens
ccccggttcccgcccgcgcctctcccaccatacttccccacaagctgagggagccagctccggccttggcccgcccaggaaagagctcccatagtacagcggcaggctgaagggtttcgcaa

SEQ ID NO: 360478 - DNA, 122 bp, Homo sapiens
ccaggaccctacacgtcggtgtgttgtgacagcctcgtgcccagtgccaaggtaggggcgcggtggctaaggccacccccgcagagcccgggggatgcagccaggtccagcggcggcttgct

SEQ ID NO: 360479 - DNA, 122 bp, Homo sapiens
cgttggcgtagctgatgttgaggcagctgctgctctgggggtcttcttgtaccttctgcacgatggcgctcacggccttgtgcacctgctcgggctcgccgctgaccgtcaccacgcgctcc

SEQ ID NO: 360480 - DNA, 122 bp, Homo sapiens
taagtaattaaatagctggaaccagagaggcagatgacaacccattggaggtcaccccagcgttggggggcggggccggctctgccacccccacccctccaccgccttcagttctccagggc

SEQ ID NO: 360481 - DNA, 122 bp, Homo sapiens
tctgctgttagggccgctcaagttcattcataagaacaagagctctgctcttaaaggagccgcgtccctcaggcatttgtctgaatgtggatgttcgcgcgggaacggtgctttgcgcatcg

SEQ ID NO: 360482 - DNA, 122 bp, Homo sapiens
gagcggggaacgaggccgtcggccattttgtgtctgcttcctgtgggacgtggtggtagccgttgggttgggaaagtgagggatttttggcctcgtttctcctgcttcttttctcctccctt

SEQ ID NO: 360483 - DNA, 122 bp, Homo sapiens
agggtaatctagaaacacagaccatccccaggggcatagggccagaggacagctgcttatcgacattcattattctggaggaacgtcaggtcaccttggccccttcccattaagaggatgtt

SEQ ID NO: 360484 - DNA, 122 bp, Homo sapiens
ataatggaaaaaaaagacaggcaagcaggcagtcaggcaggcagacagacacacgacacacgtgtggaaaccgcttatcaaaacctctgccaatagtggtgccgggaagagaagaaagctac

SEQ ID NO: 360485 - DNA, 122 bp, Homo sapiens
tctcactgttgcctgcatttgtacgtgagaaacgctcatgacagcaaagtctccaatgttcgcgcaggcactggagtcagagaaaatggagttgaatcctttctctgccactctttgaggag

SEQ ID NO: 360486 - DNA, 122 bp, Homo sapiens
cggacaaaccactaaaaacgatgcggctgtcgtggtggtgggtcatttggttttgggtcgcgtgacctcagtgagtgtgtccccatggggaagccgagagtgctgacgtccccctggatgcg

SEQ ID NO: 360487 - DNA, 122 bp, Homo sapiens
gccaagcgtccggaggaagctgtccctgccgcggagctgctaccggggtggagtacaaagcggaaactccctctgccgccgccgccgccgccgccgccgcctgcccgaagcgccgcagccgg

SEQ ID NO: 360488 - DNA, 122 bp, Homo sapiens
ggtttggaggcaggggttggggcggcggctgggctgacctggagcctggagccccggggccgagggagctggcctgccagcggggcggaggaaagctagtgccagccctaccaggttccgcc

SEQ ID NO: 360489 - DNA, 122 bp, Homo sapiens
acctcgctcaggcagagctgcaggcagccctgaggatcttgggccaccatgcccaggtggcggttgagatagtcgttcctcaggacattagggaagcaatagtccttgtcaggaaggtccag

SEQ ID NO: 360490 - DNA, 122 bp, Homo sapiens
ttccgtgggtgggaggccgcactggactgcgttggagcccgaggccaagaggatcatcagcgacacgggttccatcttcatggagcatttcgatgttctgctcatcgtggacttttacaatt

SEQ ID NO: 360491 - DNA, 122 bp, Homo sapiens
gtgtctcttagagacgggggcaatgatacatgcttcttgctttcattgggagttgctgagcgagcattcagctcaatatggtagtggccttgaattcagcttagccatctggaaacaagtac

SEQ ID NO: 360492 - DNA, 122 bp, Homo sapiens
gagcggggaccccgagaagctcgcgaagaaccccaagaacccggcgcgggaggcgctccccgaaaagttcctaacagacaaggagcgcaagaagctcgagaagaagctgctggagcagaggc

SEQ ID NO: 360493 - DNA, 122 bp, Homo sapiens
ccactttatgcaagaataactaagggtcagagagttcaaataatttgcacaaggattactcgattgtaagagtttgagctgggactcacatgcaagttcatttgtcttcaaaatcctgggct

SEQ ID NO: 360494 - DNA, 122 bp, Homo sapiens
tcaccaggggacaccagctactaccaagatcaggtagatgactttcatgaggcacgatcccgggccgccttagctaagggctggaatgaagtacagagtggagacgaggaggatggcgagga

SEQ ID NO: 360495 - DNA, 122 bp, Homo sapiens
tcgtgtgcttgcgtttctatcctctgcttttttcgtggttccctcctggccgtacacaaacgtgctgtgctctggtctctcccatgtgggaataaatccatccgatcacctgcaaagcgttg

SEQ ID NO: 360496 - DNA, 122 bp, Homo sapiens
gagccagccggccggcgcactccgactccgagcagtctctgtccttcgacccgagccccgcgccctttccgggacccctgccccgcgggcagcgctgccaacctgccggccatggagacccc

SEQ ID NO: 360497 - DNA, 122 bp, Homo sapiens
aggaatcactggtgcccagtgcagacagcggagcttgctgagaggtcccgttctgtgaaacgatccagttacctgtctgcccactacttggctgcatctgggagcttgctcaatgcaaacaa

SEQ ID NO: 360498 - DNA, 122 bp, Homo sapiens
ccgggcgctgtggacttgaccgcgccgccgccgccgccgctgctccgcattctcaacagccgggcggcccctgccactcgcacttttgcagacctctgtcggagtctcctgcagccggaatc

SEQ ID NO: 360499 - DNA, 122 bp, Homo sapiens
gcaggagtactttggcagtttggcagcttgacttctgcagctggaggaggcccctcaggccggggatctggggagggctagcccaaaacctcccgcatcgggcaggcaccccctgaagtact

SEQ ID NO: 360500 - DNA, 122 bp, Homo sapiens
gtacaagactgcaatacactagaaaaatagtaatcacctccatagacaataaatagtattcgataacatttaaaatatttttaaaataaccttataaacttgaatttgaaagatactttctc

SEQ ID NO: 360501 - DNA, 122 bp, Homo sapiens
agtgggtcttagggaggcgcccctcaccctcaagggtgggcagagcccaccctgccttcccggtgctgtggaaaccaccctgccagctagcagcacctgagccaaccgccttcctcccaggg

SEQ ID NO: 360502 - DNA, 122 bp, Homo sapiens
cccgcgagagctgccacgcccttggggatgtggccggggggaggcctgccagggagacagcggagagcggggctgtggctgtggtggcgcagccccgcccagaacccagaccttgcagttcg

SEQ ID NO: 360503 - DNA, 122 bp, Homo sapiens
ccccctcctcggactctgcgcctggctgccggacgccgtgggtcccaaaggaagcaaccgcggcaagagtgaactccgcacctggaaaatcgatccgctgtgcgcaaaggccagccaatggc

SEQ ID NO: 360504 - DNA, 122 bp, Homo sapiens
tccctttcagaatctcacgggctgtgcgtgcctcaccaccgtccctgctgagaacgcaaccgtggttcctggaaaatgccccagtcctgggtgccaagaggccttcctcactttcctctgtg

SEQ ID NO: 360505 - DNA, 122 bp, Homo sapiens
cagggtcggccaggtggcgacagcaggtgacagtggcttgtgtgggctgcccagcatggccgccccccccgccccgccgccacccaccaggaggatggagcatggcgtccacagttagaggt

SEQ ID NO: 360506 - DNA, 122 bp, Homo sapiens
acagggctgggccaggcggcttttgccgtcacatggctgatttgcatacacgggctcggccgcgcggactccgccgggctcgcgacttccagctcgcaggcggcggggatcgctggggtccc

SEQ ID NO: 360507 - DNA, 122 bp, Homo sapiens
ggcgggcagctgtgccagctaaccgtctgggatctcgcactgggggctgcagcttttccccgcctcgagccagtgtgcgggggcgggagaagagccagggggagcgggctgggcccggggct

SEQ ID NO: 360508 - DNA, 122 bp, Homo sapiens
cctggggctctgctgctaagacagaaggagacgagggagaaagagaaagaggtgtcgctgcggggcctgctaggagcagcccgtctctggccaaacagagatctcatcccaattgcccggaa

SEQ ID NO: 360509 - DNA, 122 bp, Homo sapiens
gttttcagtagactatcactctagagtaattttagctcaaagtttactcaccacaaatctcgcatagttggcttggaataaaagaaaacagtaagagccccactaggggcagctggtgtgac

SEQ ID NO: 360510 - DNA, 122 bp, Homo sapiens
ggaaatcacacaaaagggcccattttggtgagtaaggggatttgcaagctcgctgctctccgtgcccaggtcactggggttggctgaatggtttactctcattctttctggtaggttcgggt

SEQ ID NO: 360511 - DNA, 122 bp, Homo sapiens
acccagccggccacaggggcaggttcgcggcgctgtgaggcggggctgggcgtgcgccgccgccgccgccagattcgtctactccagtgaatcggcacgggagaaagccccgcccccggcgc

SEQ ID NO: 360512 - DNA, 122 bp, Homo sapiens
ctgtcttcacagacgtgaactgatccatgttatgctgggcaaatgcatgtgctgccccttcgctgaggagagtgtcattattaagtattaaacatcattgaatactcattaaattcccatgg

SEQ ID NO: 360513 - DNA, 122 bp, Homo sapiens
tttttttttttgccttagtgccttgactgagcatccaggcagggctcggcggcgcctgcgcgctggagcctccttgagctccagccgcgtcctcccctgtcgcagcggcaccgtctccccca

SEQ ID NO: 360514 - DNA, 122 bp, Homo sapiens
atgaaaacagagaaatggccaatgaactgaaaagacgcgcagccttagcagccgcagggacgtcatgctgaagcaatgaagcccttcctcctctccggctgtgctcactgctgggaactggc

SEQ ID NO: 360515 - DNA, 122 bp, Homo sapiens
aacgtgcatttcttttctccttaggctggaaagatcaagaacagcactttataattcaaacgatgcatttattaacgggaccttaaacaaattatttaacctctctgtgactcaatgtcctc

SEQ ID NO: 360516 - DNA, 122 bp, Homo sapiens
aatcctgttccctgttgcggtgcaggagcagctgaatgattgctgggttttcagacaagccgcagaaatacaggccggagcttgcagacctgaaagagccagatgagagacctgcgaggggc

SEQ ID NO: 360517 - DNA, 122 bp, Homo sapiens
ttccttttctccacatggtggtgctaatgtagcaccaccatggagccgtattgccaaagacgaaaaaattcagcactgctcatcgttattaccagtctgtaagtggccacttaaaggccatt

SEQ ID NO: 360518 - DNA, 122 bp, Homo sapiens
tcttacacatcccaaagccaagagcctaaataaggtgaagagcacattagcccagtggaacgtgcacattggctcccccacagccctcatcttacctgtcaacacaacctgcgctgcgattg

SEQ ID NO: 360519 - DNA, 122 bp, Homo sapiens
gcgactccccagcaggaagagcgacggccgttcggccaatagctacgaaggttggctggccgcctcaccaatcacagagcggcattggaagatggggccggggcgtggcggagagaacccaa

SEQ ID NO: 360520 - DNA, 122 bp, Homo sapiens
catgtgacaaatgtgttttactgctgtttcctgtgaatgacaccacttctctcggggaatcgctgagctcgggatgctgaggcgacaccaccagctgggttctctaccttcctccttactgg

SEQ ID NO: 360521 - DNA, 122 bp, Homo sapiens
tttctaattacagtcactataacagatctgctaaaggtagtttcatgattaatggctgcccgaagttaccatcctcaaactattaagccattggaaaatgctagaggcttaatactcgtgta

SEQ ID NO: 360522 - DNA, 122 bp, Homo sapiens
aatatggtatgtccaggcctgcactactaaaatccttcataaaagtcctctagaagataacgattgttcacattgcaaacctgtttgaaaagcctggaaaaaatgcggtatactgtagggaa

SEQ ID NO: 360523 - DNA, 122 bp, Homo sapiens
cgcaggccaggctttcgggccagctgtggttgtacatcttcatgaggggctcgcagtcgtcgcgcgcgcgttggcacaccgacttgcacggcttgatagggtcgtgcaggaactccagggtg

SEQ ID NO: 360524 - DNA, 122 bp, Homo sapiens
tgcgcttttccgacgggcttaaaaaacggcgcaccaggagattatatcccgcacctggctcggaggggcctacgcccatggagtctcgctggattgctagcacagcagtctgagatcaaact

SEQ ID NO: 360525 - DNA, 122 bp, Homo sapiens
agcggtgagaagggtgggcactgggcaccgaggcaggtgggtgtctacctcctccccgggcgagtaggatgtgtctcgagtagggtgtctccctccttcccgggcgatgggctggactctgg

SEQ ID NO: 360526 - DNA, 122 bp, Homo sapiens
gcgacagcgcctgcgcagtcatgtcttaagaatcctttgcgctctcggtgcccccctccacgcccaggagcgtgggaaccctgcttaagggctttactagggaaaacggtgctggttcactg

SEQ ID NO: 360527 - DNA, 122 bp, Homo sapiens
actgggggaaaatctaatttgaatgcctgcctctccttcaagttctccctgcatcctaaccgcccccccaacccctgccaccctcgccaccacccctcccctcaccccccaacacccccccc

SEQ ID NO: 360528 - DNA, 122 bp, Homo sapiens
cgaactcctgacctcaagcaatcctcttgccttggcctcccaaagtgttgggactacaagcgtaagccacggtgcccagccaggggaagggttttagctgactctcctctgacagctctgac

SEQ ID NO: 360529 - DNA, 122 bp, Homo sapiens
tagggctggaaacccgccgccacagcgggctagaggtcgtccccgcccgcaacatatgcgcgaaggaaagtgctacgaacgtcaaatggccgccccccgccgacgccatctgctctgcgaag

SEQ ID NO: 360530 - DNA, 122 bp, Homo sapiens
gagaacaaaagagaaggtgccacatacttttaaacaagcagatctcatgtgaactcagagcgagaacacacttatcatcgaggacgtggtgctaacccattcatgagggactcgcccccatg

SEQ ID NO: 360531 - DNA, 122 bp, Homo sapiens
atgctgcaggaggagaacaagtctctgcgggaggagaacaaggccctgcgcgaggagaaccggatgctcagcaaggagaacaagatcctacaggtcttctgggaggagcacaaggcctcgct

SEQ ID NO: 360532 - DNA, 122 bp, Homo sapiens
agccgggccgggccgccgaggcagcgtgaaagttggcggaggcgggcgtgggggttggggcgccgggatcggggcgctgggatccaggcgcgagggtccggacgcggcggcggctgggccgg

SEQ ID NO: 360533 - DNA, 122 bp, Homo sapiens
ggtgatcttcccacctcagcctcccaaattgttgggattacaggtgtcagccaccacacccggcccaaaacaagatgtaaaaagtgatccgcaggaggagcactcggtgaacagatgattgt

SEQ ID NO: 360534 - DNA, 122 bp, Homo sapiens
tcggaggcggttctcacctcccattggctgccgccgctggcggggcggggctccgctgcccggaaaaaagtgtaactgcgtaaaaaagtcctcgcctgggtgacggatgctcaaaagttcag

SEQ ID NO: 360535 - DNA, 122 bp, Homo sapiens
ccccgccgccgcggctttttgcggctttttgcccctgcggcattttgctcccgccgccgccggtttttgccgccgtggctttttgcccccgccaccgaggctttttgtccccgccgccccag

SEQ ID NO: 360536 - DNA, 122 bp, Homo sapiens
taaacacgacagcacctgggcgaggctttgtgcaggcaggaaggccctcacaccagaggccgtcccagggctgtggcatgggggccattacccaggagagggcacagggccagctcctgggt

SEQ ID NO: 360537 - DNA, 122 bp, Homo sapiens
tcgatttcatacttgaatttaggctgatttaatctcgcctctacagcccctactcccccccgccattggtttacctgtcctgcatgcccgtttgggacacactcaaactgtaactcaaaaat

SEQ ID NO: 360538 - DNA, 122 bp, Homo sapiens
tgtaaaagattctgagaaaaggcagcatctgatccagtgctgccatagggcttatttactcggaacaggtagaatatatgaacagcttttatgaaacagataaaagttggcaaggtgatggg

SEQ ID NO: 360539 - DNA, 122 bp, Homo sapiens
ggatccccgaatggttgcgtgtttccgtgtgtgggtccgggggaggcccacgaacgccagcgaaaccgctgacaccaccgcccaactatgaactcatcaggcgcctgaagaccgacacgccg

SEQ ID NO: 360540 - DNA, 122 bp, Homo sapiens
tagtgatctgctccactatcttggagtttggcttctgttatcacctgaggagctgaaaagcgttcagattcaaggaagcctctcctctgcccaaatcagcagaatttaaggctcatgaggat

SEQ ID NO: 360541 - DNA, 122 bp, Homo sapiens
gtcggagctcccacctttaaaagaacgcgtccagagggcggagccagcttaaaagcgggtcgagacattcacctgtggttaggcaaagacacgagagaaatagttaattcctcaggtgcccc

SEQ ID NO: 360542 - DNA, 122 bp, Homo sapiens
tctgaggaccgggagacagcccacaggccagagttgggctctagctcctggtgctgttcccgcattcacccactggcctttcccacctctgctcaccttactgttcacctcatcaaatcagt

SEQ ID NO: 360543 - DNA, 122 bp, Homo sapiens
gggccggtataaaaagatatctaattaaatttttttgaattagtggactcctcccaggctcgtcctccttcgccacccattcccagcgcattgccccccgccagccaggtccccaggcctcc

SEQ ID NO: 360544 - DNA, 122 bp, Homo sapiens
tcagaaaagaggaaggcagacagagtttggagagaaggctgcaccactgaccagcgtcgccgacttctgactgggaggacaccaggcaaagccactagcgaaatgaacctcttttgagcccc

SEQ ID NO: 360545 - DNA, 122 bp, Homo sapiens
gagctggcatgccgttaacgtgagaaccacatcggcatcccagcagttgagctggcgtgccgttaacatgagaactacattggcgtcccagcagccgaggtggcaagccattaacgtgagaa

SEQ ID NO: 360546 - DNA, 122 bp, Homo sapiens
cccctcagaagacttgacaccccaccctggtgccctttctctgtactttcatatgctcagcggctgtctttgcacttgcttcaggattgtacctaacattctgtactgtaatgcattttctt

SEQ ID NO: 360547 - DNA, 122 bp, Homo sapiens
atgaggacccaggagaattcaggccccggctctgggacggctgtgcacccccaccctggccgtggctggcacctcagaaggcacagctgtccttcactcgcacggagcaacctcgggacaga

SEQ ID NO: 360548 - DNA, 122 bp, Homo sapiens
ttaggggactcatgtgcacaaatggagctgaggacatgccctgggaaagcatgtgcccaccgtgacttccatgtgaggttttccagctgtacaagacttctctcagtctcacttcacctgta

SEQ ID NO: 360549 - DNA, 122 bp, Homo sapiens
gtgcccttgccaggaggggaccgctgtcctccggccgcgctccgagctgagccccgggggcgggctttcggtcattaacctggtgatggcagctgaatctgctgctggcgtaggcggcacag

SEQ ID NO: 360550 - DNA, 122 bp, Homo sapiens
aggtccagtctccattctggatcaggcctgtggacaccatcccagccttctcttcctggccgttcaggaaccacctgacttcaatgctgcctggatagaaaccactcacagagcagaccagg

SEQ ID NO: 360551 - DNA, 122 bp, Homo sapiens
aggtgaaggtataaagaattgcttaggaatgatgaacactaagttccagacagcagaccacggcaggagatggtgtgggatgtgatgtgagagagatatacagcagcttcaagtgcacacat

SEQ ID NO: 360552 - DNA, 122 bp, Homo sapiens
gaatgaggctttggcttcctgctccatccttgtcccctcttccttctagttgtctgggtacgaggcagctgtgccaatcacggagaagtcaaacccactgacccaggatctagacaaagcag

SEQ ID NO: 360553 - DNA, 122 bp, Homo sapiens
atggacagggggcaactcctcggagggatggaagctcacaagagaacccgaggcggtggccgcagctggaaatgtggctgtggggtggggagggagcaggccgagcctgagaaaacccggga

SEQ ID NO: 360554 - DNA, 122 bp, Homo sapiens
ggccttaaagagaagtgggtctcttcggcttcccaggctgggactttgaagaccagaaaacgtgaaattaggacccgccacaaggagagggagttggaaaagcccaggtccctttgcagatc

SEQ ID NO: 360555 - DNA, 122 bp, Homo sapiens
gttaatgattgcatttggcttgctgtgggggcatctcttgcggatcaaacccacgcagagcgtcttcatttccacgtgtctgtccttgtcaagcacacccctcgtgtccaggttcctcatgg

SEQ ID NO: 360556 - DNA, 122 bp, Homo sapiens
tccggagtccccgccacttttgcttttccctgtctttcggtcattcggttttgtttcttccgctcactctggggcatgcctcgggaaagggaaaccgaaactgaagccaaatttggccacca

SEQ ID NO: 360557 - DNA, 122 bp, Homo sapiens
gtcaaggtgatgggtgtgtgggggtgggggagcgtgcagagcaggggcgtgaatgtggggcggtggtccatctgggatgccccgcagggcagagacaccactaccatgtcacttttgtccca

SEQ ID NO: 360558 - DNA, 122 bp, Homo sapiens
aaacgtgcacgggctctgcaaattgtaaccgcccggggtgggagagtccgtgcctgggggcgtggtgagccagggccggtgctggggcgcagagcagggcggctcagattccgggaggggcg

SEQ ID NO: 360559 - DNA, 122 bp, Homo sapiens
ccgcctctcttggacaagtccaggcgatgtgagcacgcccagcctcctacatttcactcccgtctctcccaaacagacctagcgcaaaacgagcactgacacagcgggggcccacatcccgg

SEQ ID NO: 360560 - DNA, 122 bp, Homo sapiens
tagggcagcctcaggaccacataggctgacagaatggtcctggccacacgggcgaagccccggcaggctgcgggctgctgttggcggtggcaggtgcgacaggctgtggcctgggtgagcac

SEQ ID NO: 360561 - DNA, 122 bp, Homo sapiens
aactgatgggtggccagggtgcggggtccctggggatcaaaagcagctgctaagggacctcgggggacctgcttggggccagcctgaggcctgaccgggcggaactgcgtcgggtgggcttg

SEQ ID NO: 360562 - DNA, 122 bp, Homo sapiens
aatgattttgaataagcgttttgggaatgttctagagatgaatctcctccccatgtcctacgctgggtgaggaagtgtcgggtacccgggcgacctgtcctcaggtgttctaggaacgcggc

SEQ ID NO: 360563 - DNA, 122 bp, Homo sapiens
ctttctttcagactcaatgcgaggaaggaatcttgcctctcgtctccttttacagtacagcgctgaggtgggggcggggaaggagacccggcaggaaacatgtctttgtgggtttgccgctt

SEQ ID NO: 360564 - DNA, 122 bp, Homo sapiens
tgccagagaggactcttgcgatcacgcaggaacgtggtgatgccaggcagcgtccggaaccgctgcaacatctccatagagacagacggggtggcagagagtgacacggacgggcgccggct

SEQ ID NO: 360565 - DNA, 122 bp, Homo sapiens
aattagacattgaaaaccaacatctggttaagtgtaggcaggcatgtaagggaaagacaacgtccataggcagttactatggtaaaggactgcatttgactcttttacacatattatttcat

SEQ ID NO: 360566 - DNA, 122 bp, Homo sapiens
gagaggccagcgtggtgggggtgtccagcctcccggaggagtactatgccttgacaccttcgtttcaccgccccaaagctggcctggggctccgtagggagtggcctgcatggggagggccc

SEQ ID NO: 360567 - DNA, 122 bp, Homo sapiens
atcccctggttcttaccctgagtttcccttttcccaagtcctggccccaggtctgcagtccgccctcccattctcgacctgttcccaaggcaccggagttcagctgccccaggtctcgtttt

SEQ ID NO: 360568 - DNA, 122 bp, Homo sapiens
cctgccgctcacctttttctgccgggcagagctggatagtgagcccgagcgggtggcgtccgtcctagaaaagctgaaggaggactgtaacaacactgagaacaaagaacggaagtccttcc

SEQ ID NO: 360569 - DNA, 122 bp, Homo sapiens
ggacccaagcctaataaaggtgacataaataaaggtgtcataaagacagggcatggcacacgcttataaggggcatgagcatctcagggctgccagaatggcttttgctgagtgcatagcac

SEQ ID NO: 360570 - DNA, 122 bp, Homo sapiens
gcgctctcccagcatcctttgccttccggtatgtggccccgtctggctagtcccgcctagcgcgcccatttcgagcccaagtttccagctcgggtttccaggctcagaattttccaggagta

SEQ ID NO: 360571 - DNA, 122 bp, Homo sapiens
ggccagcccccgctatgacagaaacgggcactgaatttgacttgactgcagggctacagccgataggggttagcacatctccaggagagttctagccagaagccaggcctgggcagtagctg

SEQ ID NO: 360572 - DNA, 122 bp, Homo sapiens
cccacctctgcccccgaccacatggacacccagaacctgtggggggctgcagtgacacatcgccgccaaccaggtggcttctaacatcagaaatgtaccccgccgccaagacctgcaaccca

SEQ ID NO: 360573 - DNA, 122 bp, Homo sapiens
tctttcaaaaccctgccacctctctctctttcctgcaggtaagaggctctgtttttctttcgtctctttcctctctcacacacaatttgaaatggctcttatctctttctttacaatgttaa

SEQ ID NO: 360574 - DNA, 122 bp, Homo sapiens
tcccttaagacttatttctaatatttctaaagtgcactgttttgggcctctccccatccccgccccccaagtgggctttccttccgccttcctcggctcggattcctgacttggtcgccacc

SEQ ID NO: 360575 - DNA, 122 bp, Homo sapiens
ttgacaatgcctacagttcttcagaatcatttccaagaacagccaggtctcctaactactcggatcaagtgaccctggaaaaattcaagacttgactcttgaatgaaccaagagacaatatg

SEQ ID NO: 360576 - DNA, 122 bp, Homo sapiens
agcggtagctcacagccagggcctgggcccgctgccgcagccgctccttctccggttcatcgtcactttgcagccaggagctcagcagctcctttgtggtgaggtagctccagagacgctcg

SEQ ID NO: 360577 - DNA, 122 bp, Homo sapiens
ggggacttcgtgagattgcccacatgagcatttcttttggaactgagatacagtgcacatcgcctctgggggacatggggtggtgggtacacggaaccgaggtgagcctcccttgcgttgcg

SEQ ID NO: 360578 - DNA, 122 bp, Homo sapiens
acagtggattaatctcaggagcagcccttgatgacagtctctagagtgaccatgtgcttccggactctcccaggcagtccccaggttcaaatatccttccctttgtcagaccatatgtccca

SEQ ID NO: 360579 - DNA, 122 bp, Homo sapiens
agaggtccctaaaacatcagtgctggacaacctcacacgttctacacagaacagacaagacgaggtgcaggctctgtgaccttataatggcacacacacaactggcctcatgcttccataac

SEQ ID NO: 360580 - DNA, 122 bp, Homo sapiens
ccatagggagagaagggcctgactgcagctttccaaaaactcagaaacatgagtctgccacgtttttgaatcttcagcctaaagacaccatagtacatacaaggtatcaccaaggatgggga

SEQ ID NO: 360581 - DNA, 122 bp, Homo sapiens
gctttggaaacccacggccggtgctggatcgtgccccgcgacaggcacgtaggcaggatacggggtgggcagcacagggacacaagcactcattactgacagtgaatgcatgaacttcctcc

SEQ ID NO: 360582 - DNA, 122 bp, Homo sapiens
acaaatcctctctctatgtccatctgcgatgcagggaatcctactttcccaagaagtttccgtggacaaattttgagttagaaagtaaaataaactttaccaataatctttaaaaggaaaac

SEQ ID NO: 360583 - DNA, 122 bp, Homo sapiens
accccggagccccctctgccgccgccgcgccgccgccgcccgagccacagcagcagctgccgcagctgcccgcccgccgagagccatcccgagccataagaggctccatgtgaccggctgac

SEQ ID NO: 360584 - DNA, 122 bp, Homo sapiens
agcggggccctgcggtcctcgggtcggcggcagacgctcccggcccgcgaggaaagcccgcgggaggcggctcctgccgctcgctagtcgctcagagcgcttccatttcctcctcccgacgc

SEQ ID NO: 360585 - DNA, 122 bp, Homo sapiens
gcaaaacgaaaacttatgaaatcagttaattagttaccttgcaatatccattgaaatcttcgatcatacacaaacttacttcagatgagacctcaagacatatgcacagcaacactaacaaa

SEQ ID NO: 360586 - DNA, 122 bp, Homo sapiens
acgttggccaggctggtctcaaactcctgagctaaaaaattagccgggcgtggtggcagacgcctgtagtcccaactactcgggaggctgaggcaggagaatgatgtgaacccgggaggagg

SEQ ID NO: 360587 - DNA, 122 bp, Homo sapiens
ttggtgaccacgtcactgcacatccctctttcccagccacaagctgacattagtccgcaccgagaagcaagagtgaacagggcctgggcccaaatccacctgctcaagtcaggaactctggc

SEQ ID NO: 360588 - DNA, 122 bp, Homo sapiens
cgagaaggggccggcgcccttttcagggtgtcaggggactgtgtgcccggtaggagggggcgcctcccggagcccgaagggagggcgcggtaggcagccgagggtggcggggaggccacccc

SEQ ID NO: 360589 - DNA, 122 bp, Homo sapiens
atgagagagtgtagaaataaagacacaagacaaagagacaagagaaaaggcagctgggcccgggggaccactaccaccaatgcgcagacaccggtagtggccccgaatgtctggctgcgctg

SEQ ID NO: 360590 - DNA, 122 bp, Homo sapiens
caaccagcctctcactcccaaggagaccagagaccaggcacagctggagcctccttcctgcgctcagtccccagcgtgactgctgaccctgaccagggtttaaccccagtgtcttcactggg

SEQ ID NO: 360591 - DNA, 122 bp, Homo sapiens
gcatgttcagtggagaagtcagaaaacatccaaacatcatctcccacgtgggacagcggtcgaccctacgaaggaaagccaggccggctgcgaggggagagaggagcacggtgctgagctgg

SEQ ID NO: 360592 - DNA, 122 bp, Homo sapiens
aggacccatgatcctgtggtgaacataccctgcctggtatgacttctatgggcctgggcacgaggcttcccaaccctggcagccctgctccgcaagccctgctctgtgctgccacctccagg

SEQ ID NO: 360593 - DNA, 122 bp, Homo sapiens
aacccaggtagggccgggcccctgccgctgccatcctcacgctggagagccgggcagggccgctactccagccagcagctgcccagctctgacccgcgcgccgccgctgggcactcaggcac

SEQ ID NO: 360594 - DNA, 122 bp, Homo sapiens
gccaccctggacaagatcgagcggtgcgagtatgacggctcccaccgctatgtgagtctgcggggtgggtgagctggcgggcggctgaggggaggccagggccagggtcagccgtcaaccaa

SEQ ID NO: 360595 - DNA, 122 bp, Homo sapiens
gcagccgcacctggctgactcccgcgcgtgcctttccggcgagcgagcgcgcctccggggcggccagaccagagggctctagggccggccgggtgctctccccaaactccgatgtggggctc

SEQ ID NO: 360596 - DNA, 122 bp, Homo sapiens
aagtggattttgtaagtcaggggttcattgagctttattttaagatgcatttggaatgttcgctattcctgttaattatgttgaagctcgtttgtgtcattagtgtaataatacattagaag

SEQ ID NO: 360597 - DNA, 122 bp, Homo sapiens
acgccctctgctctacccccggctccctgcgccggcggggaccgtgcgctctccccacagcgttagtggcatccccttcgtcgaggtccaagagcggctgtatttggggactgctgttcgtg

SEQ ID NO: 360598 - DNA, 122 bp, Homo sapiens
gtcggagtgctggccggtccaagccccacccccatggcctgatgcacgccaccagcctcccgctgaaaggtgacactctgccagctgggttcccttagtcaccctgtgggcgcctgtcagcc

SEQ ID NO: 360599 - DNA, 122 bp, Homo sapiens
ctcacccaccggctggtttgtagggacaggtctgcttggggaaccacagcgaggggcacccgaagcaaatgtcaagtcaaaatgggtccccggcggggccaggagaacacccagactcatgg

SEQ ID NO: 360600 - DNA, 122 bp, Homo sapiens
ccctgccgcgcgggaaggcaggtaaggtcccgctagaaatcaagcgcagcgccagcgggccggcactgctgggggacccagtacaccctctgcagccgctggcccgggtgctaaccctctca

SEQ ID NO: 360601 - DNA, 122 bp, Homo sapiens
ggggagggatgacggaggaagaggtttagacatttggagggaagggtagggggacatgatcgagtgaagttttgaaggaaaagaaacctccctagtgatgaattattaaaaggtaaccagaa

SEQ ID NO: 360602 - DNA, 122 bp, Homo sapiens
gtgcatgtactggacagcatattccatgtgggtcatggagtgatgactgtgggcctctttcgggcattgtagcaggcccccatttcatttcatgatgacctcggggtgctgggacaggaatg

SEQ ID NO: 360603 - DNA, 122 bp, Homo sapiens
agcagcagcagcagcagcagcagcagcagcagccctggtagctgtggcagcagcaaaagccgcggtgtacccgcggcggccacactgcgcatgctgctgccgcccgcttcagcccctacccg

SEQ ID NO: 360604 - DNA, 122 bp, Homo sapiens
acctcggaggcaggccacacctgccagaagtagcagcaatgtcccagcatagtgagaaaacggcaccactttggacaaactcaagtaacctgggaagggagagggacaatgtgagaccctct

SEQ ID NO: 360605 - DNA, 122 bp, Homo sapiens
cgcctgcgctccgggaaccgcacctgtcccaaaggcctccccaaccatgtccactctgagcgccctgggcgctcgggaaggtgcctgactgctgacttccaatatttcaactcctcttcggg

SEQ ID NO: 360606 - DNA, 122 bp, Homo sapiens
caagcagccctaccccacagaaagtcctagcaaacagaggtggcttcctacctgaagcaccggccaggtgtgtccaacagtaggagctgcagtcagagatcagagtgacttaacagctagag

SEQ ID NO: 360607 - DNA, 122 bp, Homo sapiens
agttctgctgatacttactaattgctggtctcaactgcatatactttttaccctgttacacgcttgtaattgactcttctaggtgagcccattggcaggggtaccaaagtgatcctccatct

SEQ ID NO: 360608 - DNA, 122 bp, Homo sapiens
aggtcagcgaggccctattacccaaatatccctttcaagacctgctcagtggtggactggcgggggtggaggggggcactgaggagcctgggcctcccccgcctcccctcaccccccgcact

SEQ ID NO: 360609 - DNA, 122 bp, Homo sapiens
gctctgcgggacgagaccggcaggatcgagagcaagttaggggggcagtgccagcctggccgctcctcccgcagccgggtgcccacctcccctggtcccagctggtctaactttccactttg

SEQ ID NO: 360610 - DNA, 122 bp, Homo sapiens
gaaagacatgagggaccaggttgagggcatccacaaagcaggaattttgtagtacaccatcgttgatattatatgaagaaatgttgttaccacaaaatgaaaggctcatttcttcttatatg

SEQ ID NO: 360611 - DNA, 122 bp, Homo sapiens
gcagccacagcacgattcctgcctgcgattcctgcctgccctgagcgccttcccctgccacgaccttcaggcgcctgggaaggtctgcagtcctggctgtcaacacccccaggcccccccca

SEQ ID NO: 360612 - DNA, 122 bp, Homo sapiens
tcccacctaccaaatgccaggcaagaggtttgggtggtccaggctgctcagtgagatgggcgttggtcatttgcaagcctaggcatctgtgacttgcgagcctgattccaaaaggcaggcag

SEQ ID NO: 360613 - DNA, 122 bp, Homo sapiens
gccttcctgttgtgagtcaggtgccgttttctctgtccgtgttcaggccggaagaactcccgcacaatgctgctcccactcctgcggaggttcccagagcaggtccgagtctccctctttca

SEQ ID NO: 360614 - DNA, 122 bp, Homo sapiens
caaactcatgacctcaagcaatccacctgccacggcctcccaaagtgctgagattacaggcgtgagccaccatgcccggcctaaattccagttctttaacgtttgggagactctgtgttctg

SEQ ID NO: 360615 - DNA, 122 bp, Homo sapiens
agctctgaacagtttaaaagccttccaaggactgcagcagcactggacacacaagagagtcgagaacagtattggatttattgttagggttacaattttcacgatctttgcatgcaaaactt

SEQ ID NO: 360616 - DNA, 122 bp, Homo sapiens
gattgctataagacccactggttgggaattcatccaaaatagagatagcttgccctggagcgctgcagagaaatctgtgtagagactggtagtggaaaatggatggataacaacttcagacc

SEQ ID NO: 360617 - DNA, 122 bp, Homo sapiens
tgcagagtccaaatctctctttctactccggctcatagcacagaattccagcgggccgtccgttcgcgtgtcaaacttcagccaggcacttacattgcacccagctatggttgattaaccaa

SEQ ID NO: 360618 - DNA, 122 bp, Homo sapiens
agtcatgctctttgcctcctcaatggttttagccttgtgctctccccactcacacctctgcgtgtctatgcaagagtgagctactgaatgcactacagcagtactgctgattttaagatatt

SEQ ID NO: 360619 - DNA, 122 bp, Homo sapiens
ggcggatgggtggagcaggtgctggtgagggcaccagccttcgaggggactcataggcggcgcgggaagtggcggggggggggggggactcaggggcgctgcctcctgtggatcacctggta

SEQ ID NO: 360620 - DNA, 122 bp, Homo sapiens
cacaggacccgggggaacgaaacacgcgtgctgtctgcagagtcgctttgaaattcctgccgcgtttttgcaacaggcaaagcccaagtcacgctactacagacccttgcaaaattaagcaa

SEQ ID NO: 360621 - DNA, 122 bp, Homo sapiens
tctaagggcatggaaggggaggaggattaaggttcagatgaggaaactggtcatgcaatccgtggagatagagcaagcacagcacccaggaaaatttggcccaggacctgctaccccacaga

SEQ ID NO: 360622 - DNA, 122 bp, Homo sapiens
ttgggagtgtggagctccaaaccatgtcgcgagaggcggattttgggaggccgggatcctcgcgccagggggatgtgcgagggtgtgggataaatcttaattcctccggcccacccaaagcc

SEQ ID NO: 360623 - DNA, 122 bp, Homo sapiens
tttccccatgtctatctcatagatggagtattgttaatcttgtggctgtttgccaatctacgtgtgaaaagtagtttctcagtagttgtaatgtttccagggagaaaacaatgcaaaacaat

SEQ ID NO: 360624 - DNA, 122 bp, Homo sapiens
ttcctttttttggaagctattttttcctttcagtgcacattgcatgccctccttgagcaccgcagtgcacatgctgcagaattgttgtttttcaagctatcctcttgataaaaagtagaatg

SEQ ID NO: 360625 - DNA, 122 bp, Homo sapiens
gatgttcatccacagtaaatcagattctccaaaggtaagcgccataaaaagcagagccttcgatttgttctccagcatggcctctgaaatagtctggtccacagaagactttcattcaatga

SEQ ID NO: 360626 - DNA, 122 bp, Homo sapiens
gcccgggcggcgcattggcccctcctcccctcgcgcgccgcgcgcattgttgtcctttagcgattggttgttggaccagaaacagctgtgcagagccgtgccatctaaagagctgtggacct

SEQ ID NO: 360627 - DNA, 122 bp, Homo sapiens
agtccacacgcgcgcagaccgccgccggccctcgccttgcgcgtgagcgagtcaggtttgcgacccagtgacgttgttctagtccaacaagactagaacccccgctctgccagacacactgg

SEQ ID NO: 360628 - DNA, 122 bp, Homo sapiens
aaggacccgggaaaaggaagtttgagggccactgggaaagagaaggggtatcaccgcttccggaccccggcctgtacttgaaggcaaagagaactacaaatcccagcgtcacccgcggcctt

SEQ ID NO: 360629 - DNA, 122 bp, Homo sapiens
gttgggtgctgggaggaggggccataggaccctgggcgggagcagaggtacccagggctgcggggcgctcaggtgaggccgggagatcttcctacgggaggctgagacgggagctggctttg

SEQ ID NO: 360630 - DNA, 122 bp, Homo sapiens
tttgaactaatggcgagagtgtaagaaaatgggctctacttcagtgatcctgtggcaggacgtggatcaagacttggaaccgcagaaaacgaaatcccatagtagcacaaagcttggctgtt

SEQ ID NO: 360631 - DNA, 122 bp, Homo sapiens
tccctcaaaatgacggacgcgcaggtcaagacctggttccaaaaccggaggaccaagtggcggtgagagaggcctgacccggcccaccttacacctgcccttcacctgtcccgccccgagcc

SEQ ID NO: 360632 - DNA, 122 bp, Homo sapiens
gagccaaattgagaggtgacaaagtgctagcagccctcgctcgctctcggcgcctgccggcgcctcctcggcctcagcgttccctgtggccgcgctcgtggagcccttcagccggcctctgt

SEQ ID NO: 360633 - DNA, 122 bp, Homo sapiens
aaaaagagggtaggttagggtatctgtcttgagccttctatcaaaagttgtggttctggccgggcacggtggctcacgcctgtaatcccagcagtttgggaggtcaaggcgggtggatcact

SEQ ID NO: 360634 - DNA, 122 bp, Homo sapiens
atcgatggatgggtttccaagaaatcaagacaaccttcaaggttggaacaacggaccggacgcagtggctcacgcctgtaatcccagcactttgggaggccaaggggggtggatcacctcag

SEQ ID NO: 360635 - DNA, 122 bp, Homo sapiens
tagcccagcacaggccagatggaggaccaaggtggtgggaagggcggacacgaacggacacgggtgctgctcgcagacagctgcagcctggcgtcatggctcctgcactcgggtgcacggtc

SEQ ID NO: 360636 - DNA, 122 bp, Homo sapiens
tgtcccgtgtccgcatttccggcgtctcgcatgtgacactacttcacgcctgttcagccccggcatggatgggattggcgggcatcccctgcagagctcttcctgagtcctgtctgttgcag

SEQ ID NO: 360637 - DNA, 122 bp, Homo sapiens
tgtcactcttgaatgcataggctttgctagctaaacttagagttactaaagaattgagcccggcgtggtggcacgctcctgtagtcacagctactggggaggctgaggcaggaggattgctt

SEQ ID NO: 360638 - DNA, 122 bp, Homo sapiens
gagcactgtcgttggagccaggagtccccactgtgggtgggtatcggggaaaggagtgagcgtgttaaagagccacccgccctccagagctcaccagcccacacgtggaatcgaccccagtg

SEQ ID NO: 360639 - DNA, 122 bp, Homo sapiens
aggatgaccacagatgagcatgccacatgcctgcgggacgaccacgggatggccacaccacgtgcctgtgggatgaccacaggatgaacatgccacatgcctgcaggatgaccacaggacgg

SEQ ID NO: 360640 - DNA, 122 bp, Homo sapiens
gaggaagactcagagaatccttcctaaagtgagtggtggctttgctgagttctaaaggagcgcaagaagttaaccaggggcaggaggcaggagaggctgagagtgttcctggcagaacaagt

SEQ ID NO: 360641 - DNA, 122 bp, Homo sapiens
ccctgctccacctcccaggatgctttgagccagctgggccaggagggctggcaccgagctcgctcagatgactacttgagccgggccacccgttctgccgaggcactggggccaggggcact

SEQ ID NO: 360642 - DNA, 122 bp, Homo sapiens
ccccatgctcagttctctgtctcactggcagaggagccggccgtgtttccccctaaagcccgcttggccctcccagttccgcagctgcgcggcccgcccgccgatcccatggctcccttctc

SEQ ID NO: 360643 - DNA, 122 bp, Homo sapiens
ataaatcctcccagagaacgcaaagatgcacacgtaaatcctaggaagaatgatggtgagcggtaatctggtgcaaagaacaacactggatatagggcaaggggttgggttctgttgggtgg

SEQ ID NO: 360644 - DNA, 122 bp, Homo sapiens
ctctcgctcccggagtggggggcccggggattccccccttcctgaagggtggctgcggggcgccacgcagagatgtgcagcgggtcgtccctgctcgctcctccgggcgacaccgggccccg

SEQ ID NO: 360645 - DNA, 122 bp, Homo sapiens
ggagtgctctgctccggacgcactacgtaggtgggcctgcgggagttctgagtgcgacggcgcaggtctgcaccatggcggcccggcttgtcagccgatgcggggctgtgcgtgcagctccc

SEQ ID NO: 360646 - DNA, 122 bp, Homo sapiens
cgccggccctggacacacaggggcagcgcagggtgaggtgcgcctgggacagctgcaggccgccgctcccctccccgcgctcgcccggcgacccctccggccgccgcccaatgcccgcagcc

SEQ ID NO: 360647 - DNA, 122 bp, Homo sapiens
ttgatatgtctactacccaccttctttatcaaattttaacaattaaaattaagggccgggcgtggtagctcacgcctgtaatcgcagcactttgggaggccaaggcggacggatcatgaggt

SEQ ID NO: 360648 - DNA, 122 bp, Homo sapiens
cgatggaaagctgcttccacccatccctgtctcagctagtcctcaatttggttcggtgtccgagccctgccttcagagtccagtcccgcctcctacctcagatggaagagaatacagaggcc

SEQ ID NO: 360649 - DNA, 122 bp, Homo sapiens
ccgcaccccgccgccgtcacgcccgacctctcaccccgctactgtgacgccccccgaccccgcaccccgccgccgtcactcccccgaccccgcaccccgctgccgtgacaccccccggcccc

SEQ ID NO: 360650 - DNA, 122 bp, Homo sapiens
cagaatgtaagcactgaaagaatttcaggaatccaatgatataaattgtatttttagagccgtgaatgacttgagcgagtgaaacagtgcagtggcttaagatagttctctttagttttccc

SEQ ID NO: 360651 - DNA, 122 bp, Homo sapiens
ccgaaccgagattttcaatttcagctttgcgattcaggattccacttgaattccccaggacgaaagcctagcggccaggctgcatttcgccccgggtataaatccctgccggataaattcaa

SEQ ID NO: 360652 - DNA, 122 bp, Homo sapiens
tcagcagactggggccctcggtgttttcaacaggtaccatggtcacgtagaagttacagccgcttccccgccaccaaaccgccccgaccacccccgctcccaggagtggtcactttccccat

SEQ ID NO: 360653 - DNA, 122 bp, Homo sapiens
ctctccccaccccgcatcccgggctcccagaccctgcagccccgtgggcccgctcccgtccggggctgccagctctgcccgagcctcaccagtgcccgattcgggctcagcggcccatccgg

SEQ ID NO: 360654 - DNA, 122 bp, Homo sapiens
agggacactgaggtgggggaggctgcggtgatcccataccgcactccaggtgccaggctccgccccgcccctgacggcgcttccggatccggcgggtgccggaagtgggcgggcggcggcgg

SEQ ID NO: 360655 - DNA, 122 bp, Homo sapiens
acttaaaagcaggctcaggccttagtacttttattccaagacttgctgggaactagaatacggaggcatggtgaaaggacaaagagcaagggcattcaaggtgtggactggaaagtgactga

SEQ ID NO: 360656 - DNA, 122 bp, Homo sapiens
ggggcggggcaccaggaggaacggagtgggcgcttggcggctctcgcgcccagactgggccgcgggcgccccctggtggccgcggagagctcaggtgcccgcggctgagggagctggagagg

SEQ ID NO: 360657 - DNA, 122 bp, Homo sapiens
tttaagggagactgggacatcggaagaaaaaaggggtgatgcagagctcaaatctgtacacgcttgtttgaggtgatagcagacatccagatgaagaaaaccagcagacaggtgaaaatctt

SEQ ID NO: 360658 - DNA, 122 bp, Homo sapiens
gaggctgagagaccaggtgggagtcaggaagggcataacccacatgaggaaagtctggggcgcaggaggaagccctcaggcacacactctggcacctgggccaggccaggagagagtaaaca

SEQ ID NO: 360659 - DNA, 122 bp, Homo sapiens
tgtgcaaacccttaaactaaagtaacagctgtcaaaatacagacaataaatttggcttggcgcggtggctcacacctgtaatcccagcactttgggaggccaaggcaggcagatcacattag

SEQ ID NO: 360660 - DNA, 122 bp, Homo sapiens
agactgaggccggccacaagagagccgaagaaagttgagcctggtagtcacaaagaaacacgcacagggccatagatacagcaacagacttacacaaacacagaggcctcacccaaccgccc

SEQ ID NO: 360661 - DNA, 122 bp, Homo sapiens
gaatgaaaaagcaaaatttatgctccctcctgagctcatcccctatgtccccgctgggctcgttttaggtctttgctggcattcaagttggggaagtgtctctccaccagtttctattatca

SEQ ID NO: 360662 - DNA, 122 bp, Homo sapiens
ccctttccgagtcaaagaaaggggtgaccgacgcacctggaaaatcgggtcactcccacccgaatactgcgcttttcagaccggcttaaaaaacggcgcaccacgcgactatatcccacacc

SEQ ID NO: 360663 - DNA, 122 bp, Homo sapiens
agctggccccagccagcggaaggcgcctatgagccctgagcctgtggtcctcagcttgggcggccagcggcctctagcaggcccccccctcgaccccacccccgtcaggaagtgccgaaaga

SEQ ID NO: 360664 - DNA, 122 bp, Homo sapiens
gcgcgcacgcccacctctccgctacaggtgctgattggagagtgcgttccgaactcgcagcgtcggttggctagtcccattgcctatcacgaagggggcggagagtcgggcagaaaccgtct

SEQ ID NO: 360665 - DNA, 122 bp, Homo sapiens
gtgacgggcgactggtgagggccctttcaatgacgacgccatcttcaaacagacacagagcgagccgtaagcacagcaggcagcatcacgggatgccgagcttttaatgacgccttgtgttg

SEQ ID NO: 360666 - DNA, 122 bp, Homo sapiens
aatttacacaatgctttcagctctaccctactgaaacgggaaaagttcccttatccccctcgcagggcgtgcaacaggggtgtgactcacttcttcggtgccctgctgctcacacccctcag

SEQ ID NO: 360667 - DNA, 122 bp, Homo sapiens
cagctacgtctttgttgtgcgcgttcctgaacttttggtccattaaccaacaattagacacgccggtattcagtgcctggcgcggtgctagatgctgggtgtaatctcagaaaaatacattc

SEQ ID NO: 360668 - DNA, 122 bp, Homo sapiens
ccgggttcaagtggttctcctgcctcagcctcccatgtacctgggactacaggcacaccacgacacccggctaatttttttgtatttttcgtagagatggagatttgccatgttggccaggc

SEQ ID NO: 360669 - DNA, 122 bp, Homo sapiens
ccacccactttctatgacgtcccgcgtcccggcttctgattgcccgcctgagacgtcaatcgcagggcgtgtgtcttgctgggacacagtggaggtctaacctttggtttgcggagcggtcg

SEQ ID NO: 360670 - DNA, 122 bp, Homo sapiens
cccacactttcgcgcccccggcacatcccgcccccagctgggtggctggcgggggtggaccgcttgggtgagcttctgaataccctttaggggagataccgagaaacccacttctcaggggc

SEQ ID NO: 360671 - DNA, 122 bp, Homo sapiens
aagggagaccggccaagggtaaatatctgagagcagggatgatctctctgccttccttcccggaattgggagggaatccaggccacatcctgaggctgggggggctgattgtggagctgcac

SEQ ID NO: 360672 - DNA, 122 bp, Homo sapiens
tggcccgtgtcctgctcagagtagatggctacggtgcggatgcccagctccgtgcaggcccggaacacacggatggcaatctcacctagagggcaaagaaacaagaagttagattcctaggt

SEQ ID NO: 360673 - DNA, 122 bp, Homo sapiens
ggtaccccctgaatttccctagacaaaaactacttctcctccatgccttcccgtagttgacgccatggtattgatgacttttatccttcatagtcctacatttacatctgtcctagctctac

SEQ ID NO: 360674 - DNA, 122 bp, Homo sapiens
gaactcggtgggtcagacccatccagtgtgcactgaacttggtgggtcggacccatccagcgtgcactgaactcggtgggtcggacccattcactgtgcactgaactcggtgggttggaccc

SEQ ID NO: 360675 - DNA, 122 bp, Homo sapiens
ctcaactgatcctcccgcctcagcctcccaaagtgctgggattacaggcgtgagccaccacgcccagccctgacacatctcttagtattattatttggaccaccaaggtggaagtccaagtg

SEQ ID NO: 360676 - DNA, 122 bp, Homo sapiens
tcgacgtctccacatcccaggagggtcgagacggccgcgggaagcagcctgcgagccgtgcggccccattccaaggaccccgccagtgtgagtcactgacagcttcgcgaatcaacggtgcc

SEQ ID NO: 360677 - DNA, 122 bp, Homo sapiens
caaagaagcggcaaataaatgaccgcggaagttgtggcccctgaataggttgccaccagccggcatgaacacggctggtgtctttgccagcccaaaagaaaatcatctcccccgccccgcct

SEQ ID NO: 360678 - DNA, 122 bp, Homo sapiens
aaggaaagcactgttccaaatgcatagcctggagcatagcaaaatatgtaattaaagacccgcgcctgatgtcggggagcctcgatgtgcgcatgcgtcccaggctgaggccgccggaagag

SEQ ID NO: 360679 - DNA, 122 bp, Homo sapiens
tcttatcttagtcttctttgcaggatactcctcatctttcgcatctgtatatatgagatgcgttcagggcttagtccttgatcctcttctattaatatctatacttacactttaggtgatct

SEQ ID NO: 360680 - DNA, 122 bp, Homo sapiens
cttgaggtttacatgatcttccctgacttccacttgaaaggcaccctgtgagtctctctccgcctgttatcccacaggctcctccccactcctccaggtaccccttccccggcggctgcagg

SEQ ID NO: 360681 - DNA, 122 bp, Homo sapiens
tgatggatgaggtgtctggcttcacaaaccctgtgtgggggggttgtggtgagaggaaaccgcacacatcattattcagttaccatcgtggggagactgtctggacgcagagagcaggctct

SEQ ID NO: 360682 - DNA, 122 bp, Homo sapiens
ctcactgtgcagtcccagcagcaggcggtgggcgtggaatacccggacctcatcggtgcccgcagcctgcacccgcagaaccacatcgctggcgttgccctgccgcagcagctcctgcaagc

SEQ ID NO: 360683 - DNA, 122 bp, Homo sapiens
tctgggagggtggggccacccgtgagtcacgtcctgcaccctggagcccagaggacccttcgctcaaacccaccaccagctggcaacaccggaccagaccagccggagccgctttcttcgct

SEQ ID NO: 360684 - DNA, 122 bp, Homo sapiens
ctgagcacatgttggctttctgctatctccagtcttgctcaaatccccccactgttgctgcgataaccttagtgctagcctaggctactgcaatagctgacttattttttgtgggggtgggg

SEQ ID NO: 360685 - DNA, 122 bp, Homo sapiens
gcccctgcacagagccactgtaattacatgtggctgcggttcacctcttccccagtgctccggccggctccttgtcctcctcctgactgtagcccctccctgctcctcacccccaggttcct

SEQ ID NO: 360686 - DNA, 122 bp, Homo sapiens
catgtgggctattagcaccttttggcccttgtgaattggactgttagaaatatgtgagtccgtgtattttagtaactgtttttaatcctctcagatctataacttagaggggaattgctggg

SEQ ID NO: 360687 - DNA, 122 bp, Homo sapiens
atgtcacctgcttctgccacagatgcaggcagtgtggccaggccagcaggagcacctcgtcggttcacagtgcaccagtctgttctgatgccccttgctgtggccttttccttagaatgttc

SEQ ID NO: 360688 - DNA, 122 bp, Homo sapiens
ccgcgacgacaaggagccatgggaggggacaatgcagagccgtcctgtgggggacgcagacgttgtggaggctggcacatgctcggagcacacgctggttgaaatagcagccgagagacata

SEQ ID NO: 360689 - DNA, 122 bp, Homo sapiens
ttgtccattggatctttctgggtttgccagccttcctcgtctacaccacagccacggtctcgtatcgacaggatctggattgagatttgcgtttggatcattccaatctatcccacatctcc

SEQ ID NO: 360690 - DNA, 122 bp, Homo sapiens
ttggggggtggggtggaggtgggtgactcacctgggccggctggccagccccggagggggcggagtcgccatggaggtgggagcagagggagctgaggaggcatacggggtccacggtccag

SEQ ID NO: 360691 - DNA, 122 bp, Homo sapiens
ctacctggggcctgtctacctagctggctacctggggctcagcataacctggttgctgctcggcgccctgctgtggatgtggtggcgcaggaaccgccgcgggaagcttgggcgcctggccg

SEQ ID NO: 360692 - DNA, 122 bp, Homo sapiens
ccagcggatgccctcttgagggagcgcgcacgcgccgcctctccccgcctccccggtgcgcgtcccgcccccttgagctgcgatacgccgagcgctcaacatccgaggactttggcccagag

SEQ ID NO: 360693 - DNA, 122 bp, Homo sapiens
gtagagatcaaggttccacttctgaaacgggaagagccagcaatggccgctccggccaggcgtccagaagagagatgcacgttgtgaggcaaggtttcatgtgccagtggggttttgggaaa

SEQ ID NO: 360694 - DNA, 122 bp, Homo sapiens
agtaagccgctcctttacagtggggagacggcgggaacccgtgccccaagatgccgtgcacgtggtcggctccgcgcggaggctccttccggcgtcccgggggggcgctcggctgatgaaac

SEQ ID NO: 360695 - DNA, 122 bp, Homo sapiens
ggtgctacccattggccgatcttcattcacactcactgagtagtgggcactttgaaagaccggccgatgagtgttggcatctgtgatgttgatgtgcacatagcagtgatcatgaagggcac

SEQ ID NO: 360696 - DNA, 122 bp, Homo sapiens
taattgctgtgaccagtgtcaagccagaaatcaccatggcatgctaatgggtaagttcaacgctctctttatggaaaatattcttattttcaaaacaactcaaattaacccattcattcact

SEQ ID NO: 360697 - DNA, 122 bp, Homo sapiens
cgctcgtgcccgggctccgggggcgcgcccgcgctcgggcacccacccaactggcacgcgcgggagctggacgtcatcccctcgttaacattcatagccttcctccgagcacgtgggcttgc

SEQ ID NO: 360698 - DNA, 122 bp, Homo sapiens
ttaattccaaacaaagcaagccaatcaagaaatgcattattattttcaagcagagagagacgagtgccatgtattttttaattgatttatttatttggaggacattaattctcggtctgagg

SEQ ID NO: 360699 - DNA, 122 bp, Homo sapiens
ccaaaatgaccttagggtttagtaatagtagaaagagggttagaagatgtataagcattacggttttttcttgagtaaaagatgttttaacagtgttaatatgatatgtgaatacacctcat

SEQ ID NO: 360700 - DNA, 122 bp, Homo sapiens
ccttgcagctgcaggaagccacccacccatatttcagaaaccacaggctcctgtgggttccgagagcctctgtcctgggtgtgctttgaaacatgcacacagtttaatgtcttgttagtcac

SEQ ID NO: 360701 - DNA, 122 bp, Homo sapiens
ctcccaccaccgcggcctcggaggcctgggccgtggccagataggagtttgcatcatccacgtggctccgttgcctctgcattgcgccctgtcctgtcatgtgtcctcaccggggtatcggc

SEQ ID NO: 360702 - DNA, 122 bp, Homo sapiens
aagattctctttagggaagatagtactgaccatctcagcacagagccgaaatgcacttagcgctgatgtgttgaccttagtggttgacccataaactgaacatttatacagttggaactctt

SEQ ID NO: 360703 - DNA, 122 bp, Homo sapiens
ctctcggagcagcccggggacagctggggcggggtgggggcggggcggcccaggtcagcccgcagcccgcccaacgcccacctgcccaggtgcctggaggccggaactcgccgggcggtgcc

SEQ ID NO: 360704 - DNA, 122 bp, Homo sapiens
ccccgcccggggcaccgcctggatcaggcctgaggccggctgcagagaacttgggcaccgcggaccagattgctggtcaccaggatgaaaaataaaaaagacccaaacagctcccccgaccc

SEQ ID NO: 360705 - DNA, 122 bp, Homo sapiens
aggtaaaataaaatctcccagagaaaacaaagccgggaagggagccccctttctgtgaaacgcatgccatcttctccatttgtcagtttgatgctgtaacgtacatggggttttgcaagagc

SEQ ID NO: 360706 - DNA, 122 bp, Homo sapiens
gtttttgtggatagtctgcggtattaatgaaagacgttaagtcaaacctcgtgagtgtgccgtagttaaccctttggggccacagaaaccgcacttgccgagtctcaggcatccgtccggct

SEQ ID NO: 360707 - DNA, 122 bp, Homo sapiens
ggacgcagctcctcaactaggcaagaggaagcgcgaattggacgtggaggaggcccacgccgccagcacagaggaaaaggaggcaggagttggaaatggtacctgtgctcctgtccgcttac

SEQ ID NO: 360708 - DNA, 122 bp, Homo sapiens
gtggcctctcggtgtgctgcggcggctttcggagtcactcacatgtcctttccccgcggacgtcttacgatgtgcgagggccgcagggccatcctcatgcccgttctgcaggccctggcctg

SEQ ID NO: 360709 - DNA, 122 bp, Homo sapiens
tgggcaccctgctttccctctcccagagagggtttgcaacttttctcccaggctggggctcgccctgcttggctaacccccaagagccactgccgtcccgcagcgcccctgcccccgagttg

SEQ ID NO: 360710 - DNA, 122 bp, Homo sapiens
aagcctgggaggcacagagaagcaagacttccgcatcgggggaggatagggcttgagggccgccagcccagactcgcttcacaaatgtgagaactatgacagtccagcgagtaaaggccaag

SEQ ID NO: 360711 - DNA, 122 bp, Homo sapiens
acccaaagtcctcagtaatattccagccatagagtacagtgtcagccaaacccttgaaggcgttctccaaccaggcctaaatgtccagtacagccacagtcaagagagaattcactctccga

SEQ ID NO: 360712 - DNA, 122 bp, Homo sapiens
ggagtgaaaaagaaaaatctttttttttttttgctatttcccgagggttctcctcctccccggccctcttaagccgaagcctcctggaacagaattgctgtactggcatctatctccaagtg

SEQ ID NO: 360713 - DNA, 122 bp, Homo sapiens
tgactaggcacactcagctctagagaagctggtcagatttagtcacaccaccttggaaagcgagttggctaggaacatggtgtttcagctgatcatcccatccccatatgcactcaggaatc

SEQ ID NO: 360714 - DNA, 122 bp, Homo sapiens
tgattgttggccgggcgtggtggctcacgcctgcaatccggagactttgggagaccaaggcgggtgtatcgcttgacctcaagttcgagaccaggctggacaacatagaggaaccccgtctc

SEQ ID NO: 360715 - DNA, 122 bp, Homo sapiens
cccaattcatttggtaaagaccgctcagcatcatggtcgggccctgattgctttcacaaccgcttcgaggagtgtcattcccatcacggccacaaggtggagcccacctccctgctctggga

SEQ ID NO: 360716 - DNA, 122 bp, Homo sapiens
ctccctggatgctggaggctggaggcagtgacgcagcaacagcgcgaggcgactttggagcggcctcatatagcgacctcgccttccgctgcgcgtcctcccagagcccaagaagcccggaa

SEQ ID NO: 360717 - DNA, 122 bp, Homo sapiens
tttaagcacgtagatcattccagacgcccaggtctggccaagccccaggattagaataaccgatgcttgacattgatttcaaataaatttcatgtctctgtctgtatgaagtggtttttaac

SEQ ID NO: 360718 - DNA, 122 bp, Homo sapiens
gagccgcataatctcagggtggtggctgggactgtgcatcgcagcgacggccatcaaaaacgggtgaaagtgggatgaggaggagtgaaagagacacgtggaagcagaacggggagaaatgg

SEQ ID NO: 360719 - DNA, 122 bp, Homo sapiens
cactgatgcgcgtggcaatttggaaaccttccacagaacagcacacggattgcatggatgcgaagctcccctcaactaatctatggggaaaatcatcagaaaaaatgggtgcctctgggaga

SEQ ID NO: 360720 - DNA, 122 bp, Homo sapiens
tgtttgggaagggtggggtccgccccaggggcgtctgctcaactgctgggcagggggacgcgaagtgctcgggccttctggatcccgcagcaggatccgggccggggctccactcgtttccc

SEQ ID NO: 360721 - DNA, 122 bp, Homo sapiens
tgcggccactggagcggggggcgtagggggccggggatccacccctgtcggcggtgctgtcgggggctgagtggaccccacccggggcggcggggtgcccgcgatcggcttccgagaaagac

SEQ ID NO: 360722 - DNA, 122 bp, Homo sapiens
ttggctttgggagaggcccgtgagcctgtgggtttggagcctggctgcacgggaggagcacgtgtgggaatgccaggggccggctttgagccccattcccccaacatgatgccgtgtgtggc

SEQ ID NO: 360723 - DNA, 122 bp, Homo sapiens
agagcttctcctgctccagtttccgctcctgctcccggggcggcggagtgttcggggacccggccctctgcgcacgagcagtatttcggccgccggcccctggctccatatcgcagccgccg

SEQ ID NO: 360724 - DNA, 122 bp, Homo sapiens
gagggaaaagacaggaataggcccatggaacacattcaccttctacatgatcaacagcttcgggaaagcaatacagccaagtgccaagtgagaaaaagggaaaagcatgtaaaatgaatgaa

SEQ ID NO: 360725 - DNA, 122 bp, Homo sapiens
gaaacaccaagttgttatgcaaagccacaggagttaagaatttagacaaggccaacacttcgctaacaagattcacttagagtccaccagttaattgtcaactaagatctgctgagaatccc

SEQ ID NO: 360726 - DNA, 122 bp, Homo sapiens
attcctgccggagttgcagaaataattaagagaagtaggtaaggatatcctagtagaacacgtgctcggctgcctccaaggaattattaaacctgggtctaggaatctgttcagacatctgg

SEQ ID NO: 360727 - DNA, 122 bp, Homo sapiens
acttgatttaactcagtaagaatgtgaattatttgttctacttgggtggtttaatttaatcgttctgaatatgaacaaaaggttttggattttctaaagatgcagtgttgtttctgttcatc

SEQ ID NO: 360728 - DNA, 122 bp, Homo sapiens
ttttttttttttttttgagatgcagtcttgctctgtcgtccaggttggagtgcaatggtgcgatctcaactcactgcaacctccacctcccaggttcaagcgattcttctgcctcagcctct

SEQ ID NO: 360729 - DNA, 122 bp, Homo sapiens
cgcgcacacacacacacacacacacacacacacacactcacacacacccagcctcccgggcgtcactgaagaccatggcgccccagagtcagggactctgaccctgagccagtctggcctgg

SEQ ID NO: 360730 - DNA, 122 bp, Homo sapiens
cgtatattcttattcttattgacgaagacactcttcttaacataggtaaatgctattcaacgttcagcattcatcattccttcaagataaactctcctgagtattctttcagtcatctttta

SEQ ID NO: 360731 - DNA, 122 bp, Homo sapiens
gcccgcgcgcctccccccgcggagcgagtgcgggtcaccgggtcactgggtcattgtctccgcgcccgaaccccgagcaccccgtggaatcccccacgtcatcatcagaaccatcaatgaga

SEQ ID NO: 360732 - DNA, 122 bp, Homo sapiens
gacaatcagattctggtaattatttggttttcatggtaactaagatgtgggatagaactccgactgtgtactttatttagtatacagaggaggacacaaacatgagaagattaaggtagaga

SEQ ID NO: 360733 - DNA, 122 bp, Homo sapiens
ccgaggcttagcatgccagcctgcctggggccttctgagtctgtgcctgtggtggtctggcgggaggctctgtggctgcgcctgggatactgggaggcaacaccacgtgtggtttcccaggt

SEQ ID NO: 360734 - DNA, 122 bp, Homo sapiens
gggccggcagcgctggcgaggaggttcgggtgttgtgtttccactgtaactataattaggcggattcagtgtttatttaggctgagagctgtaagataaatgacagcttcgaagatgctttt

SEQ ID NO: 360735 - DNA, 122 bp, Homo sapiens
ggtgccccagggtcttggaggggaccgggtgttcaggtttcgcacaagtacaggagggaccggcgaccgccctccccccgccccgggaggctccgccagggacaggcgtccccgggattgga

SEQ ID NO: 360736 - DNA, 122 bp, Homo sapiens
gtaacatgagaaaaggattaaccccttagggggcgggcccgactctagcgcaagttggctcgggctggtgaggcccgagcgcccgggccctccacccactcccgcgactcgggcacccgagc

SEQ ID NO: 360737 - DNA, 122 bp, Homo sapiens
cccggcggcccatacgggaatcgcggagcttagctgtcgccacctcgcgccgggtccgcgcggcccacgggaccccccactgacgcccccggccagcggtccacatggacgtgcggggccct

SEQ ID NO: 360738 - DNA, 122 bp, Homo sapiens
tgagtgctgtttcacagactctatctcaaaaacaaaaccaaaaacaacaacaacaaaaaacggtgttggaagttctagctagtgcaaaaaggcacgttaaagaaataaatggcatgcagatt

SEQ ID NO: 360739 - DNA, 122 bp, Homo sapiens
tagatactccagtataattaaaagaaactctcagctgtcatttactccgaaaaactatttcggagcctttccccatgccatccacccaaccatggagaaatgattattccttcctttgcagc

SEQ ID NO: 360740 - DNA, 122 bp, Homo sapiens
acgtctgaccctcccacacacacaatgtagtcatagaaacacctagagaacctcgagccccgccgcggaagaggcaggagagggaagaaaagcctcgggcggccgaggtgggggtgggggcg

SEQ ID NO: 360741 - DNA, 122 bp, Homo sapiens
tgcccctccaggccgaagctggcccaggaggcccctggcccaccccctcgccctgggaggcgcatttcctgcttggagtctcaggccccagcgtctggcacaggcaggggcctgcggagctg

SEQ ID NO: 360742 - DNA, 122 bp, Homo sapiens
gtgcaatctacaaacatcaaaattacagtaacagagtagaagggtggtttccagggctgacggtctatcctgtgcctgtcccaccattgtattttggaagcaaatagcttctttggcttcac

SEQ ID NO: 360743 - DNA, 122 bp, Homo sapiens
cctgcccgagggaaattggatcaaggctgggcgtgccgagtgttcccacgcggagtaagacgtgtagccagaaggaggggttcatcccacgtggacgttttcttggccctttaatggttagc

SEQ ID NO: 360744 - DNA, 122 bp, Homo sapiens
gtcccacctgacagccgtctgcctgttctacggctcggccatctacacctacctgcagcccgcgcagcgctacaaccaggcacggggcaagttcgtatcgctcttctacaccgtggtcacac

SEQ ID NO: 360745 - DNA, 122 bp, Homo sapiens
catctagaatgtcactaggtggaaaaaatcttggcaaattaacatcatttgtaagacgttcgggtaatatattggcaagtttcattctagtttacatgtgagatttcattttggtgaaaaca

SEQ ID NO: 360746 - DNA, 122 bp, Homo sapiens
tcccgtagtcgtaagattcagtcggctccaatcaaacatggtgggtcataatttacagttcgggcctttctagtaaccgctagacgctgcttctctatggttattcgtctcggcttggtgag

SEQ ID NO: 360747 - DNA, 122 bp, Homo sapiens
agcatgagaaagccaggcagtgagggaggggcgggcagtacgtcctccgcagtgtgctgccgtgcatttggggcagtcttgggctcatctcgccccaaaccctgccgctctcctggggcacc

SEQ ID NO: 360748 - DNA, 122 bp, Homo sapiens
atgctctcagtccgagccaaacttcctgggcgactccgggctttctggctggagagaacccgccccctccagaggctcctgcgcaccccatgggcagcgcagaacccagaaacccccgggac

SEQ ID NO: 360749 - DNA, 122 bp, Homo sapiens
gatacaaaattgactaaaactcaattccccatcgttgacacttctacagtttattaagaacgtatacattaactccccaggggattaatctacaaagtacgtgaattcgtttcaaagcagaa

SEQ ID NO: 360750 - DNA, 122 bp, Homo sapiens
tgcccagcaggagggggtgtgcagagccagcctacccatcttccattcctcagccttgtgcgggcagaaagtcaccaggctgccttggccacagaacacttactgaaatgcccttggacagg

SEQ ID NO: 360751 - DNA, 122 bp, Homo sapiens
cgcgctaccggcactggaactgggtctgtgaggcccgggaaaagcttagccccgccccctcgccacgagaggcgcctgcgcactgggatccagtaagatttttctcacgctgtctgtccagc

SEQ ID NO: 360752 - DNA, 122 bp, Homo sapiens
aatgcagatgcgttccttcagagctctgggacgggacagtgttgttccctcggccatcgtcgtggactctgtcgattgctttcgccccttcgtcaaggtgacaggcgttgtggccactgtct

SEQ ID NO: 360753 - DNA, 122 bp, Homo sapiens
tgattcctgctggtgagagtagagtcacagtctcccacgtgaacttgaggacatacaaatcgtaatgtagcaaaaatatcataacactaggcctattttgcactttggaattggtgaagttt

SEQ ID NO: 360754 - DNA, 122 bp, Homo sapiens
acggattacaaggaatggaaccttgggccacgcagtgagtgttatagctctattagaagccgtgggtcacggaagagaaccgtggaacccagtgactagtgttcagctcgattaggatgaac

SEQ ID NO: 360755 - DNA, 122 bp, Homo sapiens
ctgggctcaagcgatcctcccgcctcagcctcctgagtagctgggactacaggcagcacacgccaccgtgcccagctaatttatgttttgttttgtatagacagggtcttgttatattgccc

SEQ ID NO: 360756 - DNA, 122 bp, Homo sapiens
ttggcttctgttttgccttctcctgaagccgcttcttctgactccctgacggggagcctgcggatggattcccaggacctggttcctcaaggcggctgctgttggctcagacatccccggcc

SEQ ID NO: 360757 - DNA, 122 bp, Homo sapiens
gctcccacttcggtcgacaaagtgaaggactaagctggctctaaccacacacacacactgcgctgcaatgctcacaccttgggggaaaggacttctcattattaaaaaccaaggactcactg

SEQ ID NO: 360758 - DNA, 122 bp, Homo sapiens
tgatttttttctttcctagatacaaaaatgatatggggcatttcttaacagtttagtaatcgtctaagaataattgtagaaataaccccaattccaccatcccagccactggtataaaacaa

SEQ ID NO: 360759 - DNA, 122 bp, Homo sapiens
tgctgtccacagacccatacttgctcacttcggatatgtatttttaatgaagtgcaacaacgttacccagaatcaaaattaagctgtttctacgtaaacattgggcaggtaatacaactgga

SEQ ID NO: 360760 - DNA, 122 bp, Homo sapiens
cagcctcctcttcccaaagtgcctgggaactggaggcctctgtctctggacccctagtctcgaggcatcctaatccagtccggctcagggatcattgtacatgtatcacatatacgatatca

SEQ ID NO: 360761 - DNA, 122 bp, Homo sapiens
agcagtggggaagggggccaaggtattggaggactccctcccagctttggaagcctcatccgcgtgtgtgtgtgtgtgtatgtgtagacaagctctcgctctgtcacccaggctggagtgca

SEQ ID NO: 360762 - DNA, 122 bp, Homo sapiens
gagaaatcaaaagcctcatacactgctgctgggatgggtgcagtcactttcatgggcgtccgtgtgaagagaccaccaaacaggctttgtgtgagcaataaagctgtttatttcacctgggt

SEQ ID NO: 360763 - DNA, 122 bp, Homo sapiens
ggcaagggcaccgctcaagctggctttggtcagggttagggacagggccggctccagaggcgacggggtcgcaccctgagcggaggggctcccggggtccccaggggttatggtgatggcgg

SEQ ID NO: 360764 - DNA, 122 bp, Homo sapiens
tcagtgctggtcagtgctgctggaatgatagcatggaacctgggcttttgtctctccctccgcccctccaggctcctagaacattgccggaaacacaaatacctctccagctctggggaggt

SEQ ID NO: 360765 - DNA, 122 bp, Homo sapiens
ctcagcgtctccaggtcagctccccttccctgctgctgaggggagacaacggtgcccacccgctgacaccagccccaggaggcttcctagttgctcttggttctccctaattctacccacat

SEQ ID NO: 360766 - DNA, 122 bp, Homo sapiens
ttttaacaagcatgcaaagaaaacagcataaagataacaaaacattgtcattaccatctccggtgactctgtgtgcctttaacacttgcacacattttctcctggtggcccccacacagttg

SEQ ID NO: 360767 - DNA, 122 bp, Homo sapiens
cctctacctaccatacaaacatttattaaatacctactcaaggctggacgtggtggctcacgtctgtaatcccagccactttgggaggtcaaggcgggcggatcatctgaggtcaggagttc

SEQ ID NO: 360768 - DNA, 122 bp, Homo sapiens
caaggaggagcggctggcaggatagggggactgcggaggatcggcgtggaatggatgcgacggtgccagtaaacaggcgccgaggaaaggttggtgcagcaatcctcccttcctccacccgg

SEQ ID NO: 360769 - DNA, 122 bp, Homo sapiens
ggaaggcctttcggagctgggggcatttgaaggaggccttaaagacgttgttatgacaggcggagctaagacggaaagggcccgtggtgcagtagtaataataaaaacagctagcatttatt

SEQ ID NO: 360770 - DNA, 122 bp, Homo sapiens
cagcacttgagccgtcacgaatgagggcacacaatacatccaggtattagtcacacaactcgggtctaagggagaaaggctgagacgccacgagaggttaatcaatagcaaccccacctgga

SEQ ID NO: 360771 - DNA, 122 bp, Homo sapiens
accacgccccgaaggcgggagcggcttgggggcgggatctggccgccctcagggctccggcgccaagttcagagccacgcgcagtgctcttggccgggaggaggctgtgctgcaccagcacc

SEQ ID NO: 360772 - DNA, 122 bp, Homo sapiens
ggcccagaaagatcgagggtgaggtagggaggggggaaaggcaagaaatggcaaagggtacgtgtggcaggggtgtgaggacaggaaaagtgacagaccacatcagaaaaacctcagagagt

SEQ ID NO: 360773 - DNA, 122 bp, Homo sapiens
tcccaaatccctgtcaaacacagccttggggtaagctagctcccttgagctgtgcctgggcgcctttcccctattttggtaccctggacattgcagcatttgcaggtccacttacaagccat

SEQ ID NO: 360774 - DNA, 122 bp, Homo sapiens
gccgtggtcctgcgggcagttgtctgcccagaggcagagaagggttcccgaggttcctcccgccccgcccccagccagccctctctgggcccagggacgcacaggcaggcgggcgggcgggc

SEQ ID NO: 360775 - DNA, 122 bp, Homo sapiens
tggataagccaagagtggtctgtgcccaccacagagtgcgactcagccgtgaacacaccacgacacaggcgaagcttgaacacactgtgcgaagtgacaggagccaggcacagaggagcaga

SEQ ID NO: 360776 - DNA, 122 bp, Homo sapiens
ggtggcctcattccgtcttgaagtagaccctggagaggtcttccaggcttgggctcagcacgcgagcacagggagcgggggtgccggcggcggaggcgcgtacggcccgagcagcccccagc

SEQ ID NO: 360777 - DNA, 122 bp, Homo sapiens
agctggcatccccaccaacggacagaggtccacaggtctgtaaagtcaagtccctctcctcgccgccctcacctggccctcgcccaggctcctggcagcgggccccggctctcggtcaccag

SEQ ID NO: 360778 - DNA, 122 bp, Homo sapiens
gctgtctattgatttttacaggagcttctcttatgggaagcatattaaatatgactggcgcggctagagctgagactctcctccctccccttccctctgtccattttatggtcactaacccg

SEQ ID NO: 360779 - DNA, 122 bp, Homo sapiens
attttcttatggcaactttgagatagcggaagtgttctttaccaagagccagggagggcccggagtcctgccggctgctgtcccggcccgggtcggtggctgcgtcccgggggagcgagggc

SEQ ID NO: 360780 - DNA, 122 bp, Homo sapiens
tcgccttccagggttctgcagttgtgctgcagcagcatttccctcctctccagtatcagacgttaaaacaaagcaagccacagtgtgtgtccacagacgaccttggaacgaaaagctgccct

SEQ ID NO: 360781 - DNA, 122 bp, Homo sapiens
gtaacgcggaggtgataacacagaccaataaaaccagggaacgcacagtgaaggttgacacgccatccttaacgcgcctccccggcttgtttctgcaatagaaactcacatccatttaatca

SEQ ID NO: 360782 - DNA, 122 bp, Homo sapiens
tctgaagtttgtctttcttgggcgggacatccttgcccggcttgggggctgtctccatctcgcccacccgaacggcgatccacgtgcaaaactcctctcagctgccacacagtcggcttgaa

SEQ ID NO: 360783 - DNA, 122 bp, Homo sapiens
gtgaggatgggggtcatggcgtctcctcccactgcactgctctgtggatggatgagccctcggtgctggcaggacagaggacacacagggtgtggacacttggaggctcggtccttcttctc

SEQ ID NO: 360784 - DNA, 122 bp, Homo sapiens
cggcaggcccagctttgtttttatgtgtcacccacagaacagccttgctagctgttccttcgtgggtgttttgtgaattacccaaagcacgatatactgtacaacaaaaaccctggtacaaa

SEQ ID NO: 360785 - DNA, 122 bp, Homo sapiens
ttgttctcctccaggccccgcctcaccatggactgtgccggaggacggtgaggcagaggccggcgccctggaccagcctgggtcatttcaaacaggccaaaacaacagccagccatgtggct

SEQ ID NO: 360786 - DNA, 122 bp, Homo sapiens
ctgctgcgtccatatctgggcccggggatcgctctgcagggaccgggatggggatggggtcgcgcgccggcggggccgagccccgatttcctgccgccgcagccgccgccgccgcctcggtt

SEQ ID NO: 360787 - DNA, 122 bp, Homo sapiens
catgcccttttcttcccacattcacttaccctgggtgccccaagctgttcagacagacagcgtgactccaacacaccagaaaagacaaaggagtcacacagagccagaaaatcctcccagag

SEQ ID NO: 360788 - DNA, 122 bp, Homo sapiens
aagttatcccaggaggtgtgtctaagccgcggaagccacccatggtcatgacacctccaacgtgcacagatcactctccatccagaaagctgccagaaatccagcatccaaaatttgctgca

SEQ ID NO: 360789 - DNA, 122 bp, Homo sapiens
caaaacaaaaaacaaacaacaaaaacaacaaaaaacaacaacaaaaaacaaaaaaaagcacgtgatccaattctgtcagcacaaaatcacacagtgcatgttataaagaagaaaaagaaaat

SEQ ID NO: 360790 - DNA, 122 bp, Homo sapiens
ttgagattcaggcagtatacagtggctaagaaaccaggctgtctaaacctggggagacctcgtaaacaaaaatgactattaggggccatttattaaatagaatatttgacttcatatactag

SEQ ID NO: 360791 - DNA, 122 bp, Homo sapiens
ctgcttctttccgtgggaaggcagagctgactgtggtttccagaggggcagcagcaaaaacgaaaacatactgtcctcctccagcggctgggtcctacctggggagggcctgtgttcttcac

SEQ ID NO: 360792 - DNA, 122 bp, Homo sapiens
tggctctgtttactggggtgtcccagggcatgtgactttcctgccctgagtctctgtctccgtctttatgtgtggacccccgaagtgtcctcttcaccatgttcctcagtctgggatttgag

SEQ ID NO: 360793 - DNA, 122 bp, Homo sapiens
ccatatgctgtcagaacagtgccggcctgggagctgcatgtgatctgggcttgggttgagcgggttgggagatgctagccatatttggaagaaaaaggcacctgaggctctgaggcttcggt

SEQ ID NO: 360794 - DNA, 122 bp, Homo sapiens
gatagctgaatttgaaaaagaaaaaggaaataagtcaaaaaattaatacaccaaggatatcggcaccattacacaaaatgccattaagtgaagtttttggttgtattagtcataacagttga

SEQ ID NO: 360795 - DNA, 122 bp, Homo sapiens
agagaaggctgctaacaccaagtagcatggcatggcggttatgtgctgaagccagactgccgggattcaaatcctgactccatttcctgtgtgaccttggaaaagttactcaacttttctgt

SEQ ID NO: 360796 - DNA, 122 bp, Homo sapiens
gagtctactttccgggttgttaccctttttccgagttgactgaacaacttcccttataggcgcctctacagtcccgcccctggggtggggcagggggcagagcgaaagctagtgcctttctc

SEQ ID NO: 360797 - DNA, 122 bp, Homo sapiens
gtctggtggctaaatgaggacccacgactcagctttcctagggggccgtgggatggcagccgactcccacctcattgctcctgagacctctcacagccgctctggtgaggccgggcctccag

SEQ ID NO: 360798 - DNA, 122 bp, Homo sapiens
gcacttgaggaattcaggtaaaagtcatgaagctataattgaaaacaggattgtaggagccgagtaagactggggggagataattaaattttactatttgtcttatttttaatcatatattc

SEQ ID NO: 360799 - DNA, 122 bp, Homo sapiens
gagaattgctgcctcgcatctgccagcgcccaagtccacttctattctgcagtgagtccgcgccccaccagagccctcagacatacctatcctgtgcgcgcgccccttgctagaatacagca

SEQ ID NO: 360800 - DNA, 122 bp, Homo sapiens
atccaaaccacgccaccgtgggaaattggccccaagccacccgtacccgccttccgtcgccggtttaagcataaccccaaacccattaggtgtaactgtttcgggaatgaccataaatacca

SEQ ID NO: 360801 - DNA, 122 bp, Homo sapiens
ctgcatcatccaccgagtgggggctgtggataggtgcggcgctgcttccctggagggaaacgctccatcttgcgggccgaagcgcgagtgctgctctgtgacagcctccggccgcggccttc

SEQ ID NO: 360802 - DNA, 122 bp, Homo sapiens
cttcctaggcatttaaataagaacaaagattacacccacaaaaagaaccttgcctaggagcgcgtggaaacagcaagggcgcccgagcgggagaggttccctcggtgagggggtccgcgcag

SEQ ID NO: 360803 - DNA, 122 bp, Homo sapiens
gggggtgggaagaggcgggagggagggcgggggaggaggcgaggggcggaggcggccctccggacgtgacagctcccacttagcctgaagagacatgaaagaggcaacagatgccacttcag

SEQ ID NO: 360804 - DNA, 122 bp, Homo sapiens
aatcagagattgaaacaaggcttgggctgagcacggtggcttacacctataaccccagcacgttgggatgcctaggtgggcagattgctagagcccagcagttcaagaccagcttgggcaac

SEQ ID NO: 360805 - DNA, 122 bp, Homo sapiens
cttcctgcccatcagtcagggtcactcacagctaccacaggacacttgcgtccttgcctacgctcccttcccccaatcgtcaaagccatcaaagaagatgcttcctcatggactgactcttt

SEQ ID NO: 360806 - DNA, 122 bp, Homo sapiens
ttcagagagcactatctggaggcgcagctccagaaatagactgcattctactggaagagccgaccaggggaccatctgctccacatcatagatcatcccatctcctatatgcacctgaatgg

SEQ ID NO: 360807 - DNA, 122 bp, Homo sapiens
gggatttggattgaatttaaacaacagcttgtgcaaaatgtcatagctcccattctcttacgcggagacagtgggtgttgatgtcatagaaaggatgactttggacattctgaatatagggc

SEQ ID NO: 360808 - DNA, 122 bp, Homo sapiens
tgtgcgggtcctgactgtgtgtggaaaggccgtgtgggtcctgactgtgtgtggaaaggccgtgcgggtcctgagtgtgtgtggataggctgtgcgggtcctgactgtgtgtggaaaggccg

SEQ ID NO: 360809 - DNA, 122 bp, Homo sapiens
ccgagccccagcgccgcgggctccccgcatgctccctccgccctcccgtccccaccctctcgttttggcaagggattaaagtgctcccccctgtggcagcagtgacccagaaatgagtttga

SEQ ID NO: 360810 - DNA, 122 bp, Homo sapiens
ggccctggcagcggctccgagaagaggcggcccccactccaaacctggcagacccacccacgcaggcccgcccccgctgcctcagcgagtgggctcagccctgcccacgcccccatctggcc

SEQ ID NO: 360811 - DNA, 122 bp, Homo sapiens
agccccccagcttctagaaaagacacagaggagactgcgcaatcaacaggcaggagtgtgcgtgagtgcggcatgacatgggcacgccaccccagagaagtgggcgcctgctgcgctaaacg

SEQ ID NO: 360812 - DNA, 122 bp, Homo sapiens
ggccctcagtgcccctcaaggcgaaaggagcgtgacggatgaaccctgagtggaaggggccgcctgtcccaaacacggacggctttttctgcaagttttacaaactgataaacctttgtgaa

SEQ ID NO: 360813 - DNA, 122 bp, Homo sapiens
atgacctgtgaccatcacttgatttggttttaactaggtggatgttcattctgtttgtttcgagttaaggaaaagaaaaagtcctttattatttaacatatttggctagtcctgcaacaaaa

SEQ ID NO: 360814 - DNA, 122 bp, Homo sapiens
cgaggccgctggattccttgcttctcccccctccacccgcggtttaacggtctcgggggccggggctccgttatgttttgaaacaacacgtcggacacctcttgcattttcctagttatgaa

SEQ ID NO: 360815 - DNA, 122 bp, Homo sapiens
cgggggcctctgctccagcggacaacaagcgcaccgggcgggaacggccgcctccccaggcgctgcagcctagctctcatgtgacccacggaacttagcccctctgttctgtttgcatacct

SEQ ID NO: 360816 - DNA, 122 bp, Homo sapiens
aagaggtcggtgcacgggtccccggagctgtcccccttgagaaatttctcggcgaaccagcgattgaagcactggtcgtactcgcgcttcatgtccgtgcatgcctcccccacactgttcat

SEQ ID NO: 360817 - DNA, 122 bp, Homo sapiens
ggggtcgtgtgaaccccagtttgaagctgggtggtcataagttctgaaggcctggacttgcgactggtgtgtatggaggcaatcttggagactgagccatcaactcgtgggatctgacgtct

SEQ ID NO: 360818 - DNA, 122 bp, Homo sapiens
acaatgcccagggctgggatgcccaggggaagctgacagctgggcagagctccagggaggcggccacacgggaggctggagctcttgccctgggaggcaggctggttccctctctcagctgg

SEQ ID NO: 360819 - DNA, 122 bp, Homo sapiens
ccacgatgcagcaggcaccggggccgcttaatgtctgatcctgatttttttgactgcacccggcaagcaggacagtggcacatggattttgactgcctgtaataagatgatgattagaaaac

SEQ ID NO: 360820 - DNA, 122 bp, Homo sapiens
gctcgggatgcctgcgcgaaccctcgggggctggtggggaggtgtcagtggcaggtgtttcgtggtgctaccggacaggcagaatgaccgacctcgccgggcgaccgctcccagccgcgaga

SEQ ID NO: 360821 - DNA, 122 bp, Homo sapiens
aaacacatgctgttcccaggcctcaagatattgaaacattaattagataatttaaagtagcgttttcttctacaatgtctgaagaagtgacctacgcgacactcacatttcaggattctgct

SEQ ID NO: 360822 - DNA, 122 bp, Homo sapiens
caaataaaatatcattacaaaattactctgagaattctcatagggatgtaccaataaaatcgttgcaactgtaagaagccgttaattgctcatgtgagtgacaaacattgaaatggaaaaag

SEQ ID NO: 360823 - DNA, 122 bp, Homo sapiens
tgtgtgtacacttcttgagaaggctgattgttgtgaaaacctttgccacagaaacaaaaacgaggggctgcctctttcagatacattcgccagcagcttttctcttatgacctctggaacac

SEQ ID NO: 360824 - DNA, 122 bp, Homo sapiens
ctccgtccgcgtggccgcttcctcttacatcggtgacgcaagggaagggcgtctaggatccgccggtttccttcctcactgctcccatcagtgcgaaagcaacgtgttgggggttcggggtg

SEQ ID NO: 360825 - DNA, 122 bp, Homo sapiens
catggacatcgcacagctcccccatctgccggagaaaacttccgaatcctcggagacatccgactctgagtcagactctaaagacacctcaggtattacaggtattattccttcttttccat

SEQ ID NO: 360826 - DNA, 122 bp, Homo sapiens
aaattagccgacagtttgtggactctccagcatgcgcctgtttgctcggtgctgttctctcgataaatcacaacaaagcttccagagggagaggaaggatggacggcaccactgcccctgtc

SEQ ID NO: 360827 - DNA, 122 bp, Homo sapiens
ctccatccctgcacttggggccgtcgtggggctggtaggggtccccaggctatctccagccgtggccgatggccgtgccgggggcagagcccgctcccctccgcgcgttgctacgtgcgggg

SEQ ID NO: 360828 - DNA, 122 bp, Homo sapiens
gaaagaatggggcctgactccttagggaccctaccctcgatcaccaccccagcagctgaccgactgtggcaagtctgggcctctggcatgcatttcctaactcaggcctgcctggtggagca

SEQ ID NO: 360829 - DNA, 122 bp, Homo sapiens
tcagcatcacacagaggggtgattagtaaagtttagaaacttgacagaaccacaaaaccacggagcccagcaaaggcagagcgtcactgtgcttgctgccaagagggaataaagatgtcttt

SEQ ID NO: 360830 - DNA, 122 bp, Homo sapiens
gaaaacggcgtagactcgcttcttcctcattggcagaagctgggggggcccagcgcggaccgaacccccgtccccgcccacactcgctggtatataagtcggcgtggcgccgcggtgggtgt

SEQ ID NO: 360831 - DNA, 122 bp, Homo sapiens
gaaactggagtacctggagaaaacccacataaacatggggagaacatgaaaactccacatcgacagtggcaccagctggaaagagaatttttctcattaatgttataactaaacattattga

SEQ ID NO: 360832 - DNA, 122 bp, Homo sapiens
attccatggtctgagtgagatggaatggagtggcttggggagtgaggaggagagtggggccggattcttctgtagatattgccctggtgctgcaaatgggtgagggagacgagatctgctgc

SEQ ID NO: 360833 - DNA, 122 bp, Homo sapiens
gatgtcttctctcttggatttagggtccaccgagagaggtggagaggaaatatcattccccggcctaaccatatgaggactgcagtgacggcccccgccagcacctgcccctcctgcgggct

SEQ ID NO: 360834 - DNA, 122 bp, Homo sapiens
gccaaccgcaaagagaatgagaagagagtagcagccagaaggaagggtgttgaagaaggtcgcaggcgagagagagaggatggcaggcccaaaggcctagattaagcccagtgtgactggac

SEQ ID NO: 360835 - DNA, 122 bp, Homo sapiens
ggaaccgagtccaagatagccgacctaggctgttttcacccagaccctgcgtccccgacccgctggagtgaatctgacactgccaggttctctctcatggcatggagtgaatgaagagggcc

SEQ ID NO: 360836 - DNA, 122 bp, Homo sapiens
cagcccagccttccccgcagccgcctccgcccactcgcccgcgccgcgtcgtttgtcggccggcaccagccttgcggccccagctccgccctcctgcagcccaggcccagcagctccggaac

SEQ ID NO: 360837 - DNA, 122 bp, Homo sapiens
ggaccagagagctgccaaatgccagggaccctgtggcggctcagagtgagacccagctggcgactcagagtcccagctaagagcccgtggtctttgcaagccgaggtagccagccccaagca

SEQ ID NO: 360838 - DNA, 122 bp, Homo sapiens
accggatgaggcggcgaccgtgaggccgagccgggagcgggcgtcttgccgaggcccgggcgggcggggagcaacggctacagacgccgcggggccaggtcgttgagggtcggcggcgggcg

SEQ ID NO: 360839 - DNA, 122 bp, Homo sapiens
aaacaaatccagatcaccggcggagaaagaagccgtttagcaagcaaagcctcctctccgcgtcccaccccagatgctatactgtcaaaagacactgatgctaatcttttagaaagtcgcca

SEQ ID NO: 360840 - DNA, 122 bp, Homo sapiens
ctgatcagcaaggaacttttcaagtttgttctggacagacttgggcagcttgttcagctccgtgcgctccaggacttgctgcaacaccgccgccatgtcggtggggccagggaccccagtgg

SEQ ID NO: 360841 - DNA, 122 bp, Homo sapiens
tactcggccatcacgctgctgccgccccagcgcttctcccgcttgcgccatttggccctgcggttttgaaaccagacctggttggaggcaggagaagcagaaggcacacagaagagacagtg

SEQ ID NO: 360842 - DNA, 122 bp, Homo sapiens
ctggcgcttgagcgcgtaaaccacgtccatggctgtgactgtcttgcgtttggcgtgctccgtgtaggtaactgcatcgcggattacattctccaaaaacactttaagaactccgcgtgtct

SEQ ID NO: 360843 - DNA, 122 bp, Homo sapiens
agaggggcccccagagcgcagtgtcgggctgaagggcttctcgagcatgcccagagcggacgccgaggccgaggaggcgctgagagcgagcaagggctgcgagggctgccagcatgctgtca

SEQ ID NO: 360844 - DNA, 122 bp, Homo sapiens
ccactgatcatctgtgggatcgagttactgcccatgcagatcccacgtgcagggcccagtcgctttggtgagagagtggacgctgtggtgactccacggtctgtggctgtgctcaggaggac

SEQ ID NO: 360845 - DNA, 122 bp, Homo sapiens
ctacaacctctctgggtcactgcctgccagctgaggtactcagagaaagttctgggcggccgcgcgtggtggctcacgtctgtagtcccagcactttgggaggccaaggtggatgggtcacg

SEQ ID NO: 360846 - DNA, 122 bp, Homo sapiens
caggcgcttctcttcctcctgcagtgcagccctagactaaagcgtgaaagccgagtatcgcgtgagagtccggaggcgctgaagggagggtcgcagcgccgtgactttcgctttactaggaa

SEQ ID NO: 360847 - DNA, 122 bp, Homo sapiens
tcctgcttggtgagctctctgcagtcatctggcaaggttggccacacaccagaaaggcaacggcaactattcttggcatcaggacccatcacaaaacacagagccctgagtgttcttcattt

SEQ ID NO: 360848 - DNA, 122 bp, Homo sapiens
gaaagggagatttggaatgaatagccagggaggctcagccggcaaacagagggccaggagcggagccacatccactgatgcaggaccatccttccatgtcaccgcagtacccctgcaagagc

SEQ ID NO: 360849 - DNA, 122 bp, Homo sapiens
cgagggagcgcgcggagtgtctgggtggacgtgtgtgtgcgcccgaaaggggacaagaggcgggtctggccacaggcagcgctagcgagagcttctccagccggcccccacacccacattcc

SEQ ID NO: 360850 - DNA, 122 bp, Homo sapiens
gtacaggagctgcagaccgtttgcgctacaaataaagcagccgtagtgggacatgagctgcggagtacaattcctctgttttcttggagcaggaccccaccctttcaccttttggaatggct

SEQ ID NO: 360851 - DNA, 122 bp, Homo sapiens
gtgaacgatcccagctttgcctgtggacttgcttgctgtctgcccctcaggacccctgcccggcctcccccaagctcctaggaccgaggcgggcagcatggcggcaggggtgtaccgatctg

SEQ ID NO: 360852 - DNA, 122 bp, Homo sapiens
cattgctttcaccctgtctccgagggccaggcctggactcagagatgaactggcttggggcgccctcgggtggccgcataaaaaacccacagtctgaggccagcctggggctttcagacctg

SEQ ID NO: 360853 - DNA, 122 bp, Homo sapiens
acgcggcgccgcagagcccacactccgcgccccaacatccgccccggcgtgggccagaggcgaagaagaaagaagataaatggcccggagaagcaacaggaaaccaaaaccgactctattca

SEQ ID NO: 360854 - DNA, 122 bp, Homo sapiens
ggtctccagaagcggggaggagccagcggaggatctgggcgcagtttcctctctaagttccgccccgagagcgccggccccgcccccgccgttcgcgctctgaccagcccgcagagccagcc

SEQ ID NO: 360855 - DNA, 122 bp, Homo sapiens
agacggcccctttaatttaagttccctagtttcccctgggagatctggccaagaactacccggtcggggcggaacgacatccggtaacgcccctcacagttcacttccgtcctccacctgcg

SEQ ID NO: 360856 - DNA, 122 bp, Homo sapiens
cagccgcagggagcaatcccagatcatcgtggaggtgaacctcaacaaccagacactgcacgtgtccacggggccagaggggaagccaggtgccgggccaagcccagccaccgtggttctgg

SEQ ID NO: 360857 - DNA, 122 bp, Homo sapiens
tgtctgccaaggggcacagggaccgatggctcctgccacgagggggcccaaggcctcctacgtattcccgttctgggaagccgagctcaggagagccgcatctgggcactgggcgggcgggc

SEQ ID NO: 360858 - DNA, 122 bp, Homo sapiens
cacggagccagacctctgcagcgccctccagcgggcaggttctgcgggcagccatctcctcgcaggccagaacacgccacgtcactccaggacggttcgccacctttgagaagagaggactc

SEQ ID NO: 360859 - DNA, 122 bp, Homo sapiens
cctcccagtgtcaaggaaggagaaagactcccaccctgtccccaaagtctcagactaactcgctccaggtcacaggacccactaagagggcctttccagctcatgcccggaacaggggtgca

SEQ ID NO: 360860 - DNA, 122 bp, Homo sapiens
gaggctgagtgcacagcctgttgagtgccgctgccacgcccacagctgcactgcacaagacgcaggccacattcatcacagtgggcgggcggcagccagccccgacgccacccaaaaccaac

SEQ ID NO: 360861 - DNA, 122 bp, Homo sapiens
cccgctcagcggtccctgctcacaggcaccgcccccaggagcctcggcaggggcctaggacgccccggtgttcagaagagaagcagggtcaggttcacgcacacccgcgatcggatcgtaac

SEQ ID NO: 360862 - DNA, 122 bp, Homo sapiens
ccgggaacagtcgtgtgggtagaaacagcacacgtaagatcgggtgtgcacgaggagatgcgaacaccgggaacagtcgagtgggtagaaacagcacacgtaagatcgggtgtgcgtgagga

SEQ ID NO: 360863 - DNA, 122 bp, Homo sapiens
aggcggcgagaccggagaccggagggacggggccgccagggcccagccagagaagctgagcgagtgatgtcatgagtcaggagacccggctctgtgggtcctgccacgaggggctgtgtgac

SEQ ID NO: 360864 - DNA, 122 bp, Homo sapiens
ttttaaaatggcacagacaccggtgtattctatctgctgtgtgtacataaagagagaaaccgatccgcggctcccattcataaacgcagggcctcacgtgtgctgatcaaggtggcggggga

SEQ ID NO: 360865 - DNA, 122 bp, Homo sapiens
taaattcagccttacataaagccctctggtgtggacacaattcagccaagttatttgccacgttagaaaataatggcctttactccagtttccattaccttgttcctcatttctgtccaaga

SEQ ID NO: 360866 - DNA, 122 bp, Homo sapiens
gatgaacgggacttatagctaaggcgtactcacccacccctcccttcgtctttttacgcacgcagcaactcgtcctcacgtgcataggggtagtggacagtgttgacttgaattgctgtccc

SEQ ID NO: 360867 - DNA, 122 bp, Homo sapiens
taggtggatatctatatagaaactggctagggtatacctaaagtattgtcatgccagtagcgtcccccaatttattattcaaggctcaaaatcaatgctttcagaaaacaaccagaggctat

SEQ ID NO: 360868 - DNA, 122 bp, Homo sapiens
caaccacctagcgaacaaaacccagccagaaccaaagcaaatgaaagcagccttccgtgtcgctggtgctctagtgggtggaaattactagcagcttcttgcatatggttgacttttgtgct

SEQ ID NO: 360869 - DNA, 122 bp, Homo sapiens
ccataggaagaggaactggcctaaccctcaacgcccccgctcaaggtggcaggtgtgcaccgcagaagccggccccgcagtcacgggccagaaagcttccaaggcctcgccttcgttttctc

SEQ ID NO: 360870 - DNA, 122 bp, Homo sapiens
gcccagtctctagtatccacctctcgccatcaaccaggcattccgggagatcagctcgcccgaaagcccctgcgccaccccgcgggccctcctaggtggtctccccagccccgtcccttttc

SEQ ID NO: 360871 - DNA, 122 bp, Homo sapiens
tcctgctagaggatcctacaggacattaggagcattgtcccttagagctgtctgcacaaacgtctgcttcccaagcaactagttatcaacttttccctctcgccaacgatactggcacctgg

SEQ ID NO: 360872 - DNA, 122 bp, Homo sapiens
aaaaccagcctggtcaacatggtgaaaccctgtttctactaaaaatacaaaagccgggcgcggtggcatgcgcgcctgtagaccaagatactcaagaggcagaggcaggagaatcacttgaa

SEQ ID NO: 360873 - DNA, 122 bp, Homo sapiens
ctcccttgtggaactcaaaagtcacctacccattccccagggagctgggtgataagaaagcgcaaagtttaggattactctttgataagagtcttgcttaaacaagatcacatacaaaagcc

SEQ ID NO: 360874 - DNA, 122 bp, Homo sapiens
ccccatctgcctcccaaagcatattcccctcttctctttaccttcccacagatgacacttcggacagctcttttcaggtaagtccaagagaaaaagtaaatgctaggcctggtgaagtaatt

SEQ ID NO: 360875 - DNA, 122 bp, Homo sapiens
tgtaactggcaaaagcatctttgaatagaaaaaatacactgcacaaatgaaaatggtggccgagagcaatggggaatatgacttgtgtcctaaacctattaatggtaaccacatttcatgtc

SEQ ID NO: 360876 - DNA, 122 bp, Homo sapiens
ccacgcttttgaagcagaatcatttgatgtaacatcgtctctccatctttacaaagacatcgctgttacagcaatttgttttcaaatattcaagcatcttatagctataccttattttctgg

SEQ ID NO: 360877 - DNA, 122 bp, Homo sapiens
ctttgccactgagaggccagtgggtcgcctgctgtgttgctcaatccctaggtgagtcagcgtcttcatctgcaaaatggggatacaaggtaacaacagtgactccctcaaagggcaatggt

SEQ ID NO: 360878 - DNA, 122 bp, Homo sapiens
ttccttcacctctgacctaatctctcacttcaaaaactgacttcaagctgttgccagatacgtcccttccgccgcctgccgcaggtggctagggtctgagcacacttgaacctcacacccgc

SEQ ID NO: 360879 - DNA, 122 bp, Homo sapiens
agcgtcttgactctgtctggatttgtaactaaacaataccagcaggtgagagtggtcacacggaatgaatcacaaacgatcttcaaaggacaaacgtggtgaatcctcgaactggcaaagga

SEQ ID NO: 360880 - DNA, 122 bp, Homo sapiens
ccggttgtttaaaatctcctcggaaaggcttgctctggcctgcagctgatactggtgccacggtttgggcagccgagttccactctcacctttcagtccaaatgaggaaaacagaaccattt

SEQ ID NO: 360881 - DNA, 122 bp, Homo sapiens
gtgaagtaaatttcagtcactcacagtaagatggcaatgtggtgacatttgaagcctggacgtgagctcttacattcattgtaggtgactgctgtgcagcaggggcctgtttccaactgcca

SEQ ID NO: 360882 - DNA, 122 bp, Homo sapiens
tctccgaagttcactgttctgacaattacacgccatgacttttgaaaaaccagctgaggccgggcgcggtggctcacgcctgtaatcccagcactttgggaggccgaggcgggcggatcgcg

SEQ ID NO: 360883 - DNA, 122 bp, Homo sapiens
gctttttcccgtcgcggcgcccacgtgaccgagagcaggccttcaccagcccgcccctttcggccgctgctgcccacttcccgctcggggtaagtaaaccgccgttttccgcaccgccccaa

SEQ ID NO: 360884 - DNA, 122 bp, Homo sapiens
ctcgcagacgccggtcggaggaaccggcaaggctccctgcgctccacagcgccagctccgcgctgtcagctcagctcgctacctccgcggcgatgttgcaaccactgcctgggaaaatggct

SEQ ID NO: 360885 - DNA, 122 bp, Homo sapiens
gagacctgtgttctagaatcggccctgctcctgacttgccccactcaggcggtcctcccccgaggtgctgtctgcatggggttgaataagatgaaccctgaggccctgctgcttcgcagtgt

SEQ ID NO: 360886 - DNA, 122 bp, Homo sapiens
tcatcacctcaccagaagactggaggttcctttcttttggtggtgcctgggtgatgggggcgtggttgggggggataagtgaatccaaggaattcttcagtggttgcacagtactcattaca

SEQ ID NO: 360887 - DNA, 122 bp, Homo sapiens
aaccagggctatttctctgcaggctccaggctgtgagaagaggaaaagtactgaagagagcgagcaaagcctttcagaaaatactgcaacactgcgtgcccgaggcccccgcacatcgctgc

SEQ ID NO: 360888 - DNA, 122 bp, Homo sapiens
ctcgcccctcccgctgtgttcccgccgcctctgggctgaaagcgccatcaggacccgtggcgcgtgggctttgttaagtcattaactgcttgggacatagcaggagcatggtgcgcggcaca

SEQ ID NO: 360889 - DNA, 122 bp, Homo sapiens
ctctcaatgaccttttgctcctttctggtactcactaacatttgcaattgtatctttgttcgttcacttctctgattccccattagagaactacagaagggcacggactttgatttcaaaat

SEQ ID NO: 360890 - DNA, 122 bp, Homo sapiens
ctcactcacctgtgacgcccacggcagacaccgggcccaggcgccgcccctcgtggaggccgtacaggtgcatcttgtacttgcgcccaggctccaggcccctcacagtgaccttgctctcc

SEQ ID NO: 360891 - DNA, 122 bp, Homo sapiens
tctagcctagcaaagaggctgtttcggatggggaggggatgaaaacccctgcggctccgacgcagatgcccacattgcccaggccttcacagacccccaaaccagaatcgccgggaaaacga

SEQ ID NO: 360892 - DNA, 122 bp, Homo sapiens
cctctcttcatctgggtgcacacaggccccggtgacacaggcaatcccagagcccgcccacggcacccagaccgaacacagccagcgatgcctccacacagcccagattagaattctggttt

SEQ ID NO: 360893 - DNA, 122 bp, Homo sapiens
tgcctctcgggcgcagtgggggatgttcagatgccgatggatgatgcacttaggggaccccgaggtgcaagttgggtcatcgctaggcgaggcgcggcgcagagagggagcccagcctccac

SEQ ID NO: 360894 - DNA, 122 bp, Homo sapiens
atggcaagcactccagtagccagaacaccaaggagggacgtgcgaatgtccacagttggccgggctgtccctgggctgatctctgggggaagcaggagccccagctggagctcggaccggac

SEQ ID NO: 360895 - DNA, 122 bp, Homo sapiens
atatcctgactacctacttatcagaaagaataatacaatctacaaaccctggagaccaaacgtgctcgagtcatccatattacaataaaaataaaaaggttgtggaaagatagtcatcagtc

SEQ ID NO: 360896 - DNA, 122 bp, Homo sapiens
gactcactcaaagggaagggtcagtttaagataagttttcagtgaactccttcttccacccgggaaggtgtctttcagcctcttcacagtctcaagacaattgactgaagccacaggcattg

SEQ ID NO: 360897 - DNA, 122 bp, Homo sapiens
ctctcccgagccggctagagatctggaagagggcgggccaagggtgaggagggcagtatgcgcatgcgcgctcaggacccagtcagtgagccaataaggaatctcgcgagtgttgaaagtcg

SEQ ID NO: 360898 - DNA, 122 bp, Homo sapiens
agcccctgctcagctgacaccagaaaagctctgtaatgttttctgagttaatcattgctacgggtgggaaaaattgtggaatatgcctaataggtcttgtaggtcattatttactgaaatgc

SEQ ID NO: 360899 - DNA, 122 bp, Homo sapiens
cctggatccagctgctgctcacggcaggaggcccgaaaccagaaggcctgagcacttgcccggtccccaagagatgcacagaggccggaaggggcagtgcaggggctgaccaacctgctcag

SEQ ID NO: 360900 - DNA, 122 bp, Homo sapiens
tctgtttcctctctccagcacatttacttgtagaaaacatgtccaggcaacaggcaggcccgttagaaaagtccagttaagagagagcaccggcatgccaacccagcccaggcccattggag

SEQ ID NO: 360901 - DNA, 122 bp, Homo sapiens
cgcggcggggcggtggcaggctccagagtggcacgggcccaggtgagcgaggtctccgcccgccgcccctcccgccgccccggtgccagctgccccgctggcccctccctgtacccggcgct

SEQ ID NO: 360902 - DNA, 122 bp, Homo sapiens
gaagggtgcaagtagatctatctgtccatgatttttgttaatttgtttttaaagtacactcgaagcatagtagtgtggaaggaatcttcggtgtcatcttgctcagacctcctttttttttt

SEQ ID NO: 360903 - DNA, 122 bp, Homo sapiens
gcaggccacaaagagaaacctcgcagtgggttccgttcacaccaggtaccttcggtgctgcgagaccctcacggcaccccagcagggtctctcacggagactccccggtgccacttggtggc

SEQ ID NO: 360904 - DNA, 122 bp, Homo sapiens
tgaaaatgataaaatatatactgttaggtttggatgccgcccacccaaataaaaagttaacgagtcccccacccgccccctgcgccttggcccgactgctggcgtgatgacccaggcggaag

SEQ ID NO: 360905 - DNA, 122 bp, Homo sapiens
gcggctcctcggccccacctgcgcggagagggcgggatgccagagccaggtgtcccggcgcgttaagggccctcgcagtcagacgtccctgcaccggcgctcgcacccttagtcggcccgga

SEQ ID NO: 360906 - DNA, 122 bp, Homo sapiens
tgacggggccgcgcgggcgagttccatgcctgtccagcgctgagagctgccggccaacttcgcggtctccacgtcgcgcttaacgtggcagcagcacgcacttccagcatctttttttagac

SEQ ID NO: 360907 - DNA, 122 bp, Homo sapiens
cataaggctgacttcctagacctaaatcaaaaagcaccttagcaatgacaggaatgtaaacggctttgcaacttcacttcatcctctccattcacgccctttacactttgtaacttcacatt

SEQ ID NO: 360908 - DNA, 122 bp, Homo sapiens
ctcccaaaccccgcgtagacactagatggcgctctccctttgcagtccttggagtcggagcgggtctcctaaaaagctgcgccggccgcctggcctaagagaattgcgttcagtgaagcgca

SEQ ID NO: 360909 - DNA, 122 bp, Homo sapiens
cgctcgccccgaccctaaaccctcacctgaaccctaaccccgctgggctcccggctcccccgtcggtcaccatacatcgtgtgtcccgattcaccataaccaccagaaagtcgcttatgaag

SEQ ID NO: 360910 - DNA, 122 bp, Homo sapiens
taaagggactagccagttgtccattagtgctcatcctgctaacttattccagaagaacagcgaaataaataaatacatagtggcctgtgatccacacatttgaattagttttcatgaacacc

SEQ ID NO: 360911 - DNA, 122 bp, Homo sapiens
actaatttaccaactgcaaccgtaggctggctgtggataccaggactttgactaattatccgtgaaagccttctgtgacaatcaattaactacttagaatttgcaataaagaatgttgtata

SEQ ID NO: 360912 - DNA, 122 bp, Homo sapiens
tgctctttctctagcacggtcccactctgcagactcagtgccttattcagtcttctctctcgctctctccgctgctgtagccggaccctttgccttcgccactgctcagcgtctgcacatcc

SEQ ID NO: 360913 - DNA, 122 bp, Homo sapiens
agggaggggatggggcggtctccggcgagttccaagggcgtccctcgttgcgcactcgcccgcccaggttctttgaagagccaggagcctccggggaagtgggagcccccagcggcccgcag

SEQ ID NO: 360914 - DNA, 122 bp, Homo sapiens
cagccgtctggtgcgggacacttcagagcccttggggtgtgcgagggacgcgctctccagcgttactttcggggttggggtcccagccacggcgggtcaggctgcccgttcagggctcggcg

SEQ ID NO: 360915 - DNA, 122 bp, Homo sapiens
cggagcttggcctgagctgtcaaaaccccgcccccggagacccacaattggtccaaaaagcgtaaaatcagcaatcaaggggggcctggctcgttagcgcaggggatccgagctgggcagga

SEQ ID NO: 360916 - DNA, 122 bp, Homo sapiens
attagaacttcctaaggctgtgccacaagctcatcctcaactttgacaaaataaagtttccgaattgactgagacctgactcagacacttttgggatcataatagcattcagccacttctca

SEQ ID NO: 360917 - DNA, 122 bp, Homo sapiens
gaaatctctgacgtggataggaggtacagagtccttggcctctcctggtgccccctgacccgggcacacctctcccacgaccatgtctgagatgtcccctcctcctccaggcccttcttaca

SEQ ID NO: 360918 - DNA, 122 bp, Homo sapiens
ccacgcaggggcggtggggcggggcgcagtgacgcaaagaggagtgacgcgacgacgcagcgcgacgcggtgacgcacgcccctttgttggctcagtagcgatagcagcggccgtggaggtg

SEQ ID NO: 360919 - DNA, 122 bp, Homo sapiens
aggcccttacgaggtggggcaggcaggcgcggccgcagtgccttccagtcagcgcggaggcggtattgagttcagccgctccccacagccccggagcccctgggcggtggcggtggccgcgg

SEQ ID NO: 360920 - DNA, 122 bp, Homo sapiens
atacaagcctgctagaagccctagtaaaaggatcatgaaccaaagatcccactctggacccgtaagcaaccatgtgatctggctgtaaccccattcaaccatgatactgaaggcaatctcat

SEQ ID NO: 360921 - DNA, 122 bp, Homo sapiens
caacacttgggctgcgccatggggagtgtgaagcccagtgatggggcaggctggaaagtacggtctaggcttcaatgcgggttccaagcccagtgggtggccacacgatcgcatgtgttttg

SEQ ID NO: 360922 - DNA, 122 bp, Homo sapiens
aatttattaataaattctagtctctagcttgcaaggaagactacgtttcccggcgtgcagcgtgctggccgtaagcattacgtcctccatcgcgggcgcgcaatgcacctcggggatggtag

SEQ ID NO: 360923 - DNA, 122 bp, Homo sapiens
gggggcggagcgctctcggttaggggtttggggtttggcggcctagatcccgggcactggcggcccagcgctgacctggttggtggcattgtgttcccaacggcctcttgacgacctcagca

SEQ ID NO: 360924 - DNA, 122 bp, Homo sapiens
cgggagcctggacttcctggtactgacagagcagcgggttcgaagtgaggttggtcctggcggagccacacaggtggttgttgagtgtctcaaggacccagttgaggaagtcgaggatgttt

SEQ ID NO: 360925 - DNA, 122 bp, Homo sapiens
acagtttgtcgcccctgggcattctatgggcctggagggagacacaagggaggctgcgcgcgggtccagtcccccctgtgctgccccgaccacctggtccccaggcagcccctgcccagttc

SEQ ID NO: 360926 - DNA, 122 bp, Homo sapiens
tttaaatattcagttctctcaaatgactaatttattattcttttcccagttgctcctcaccgtgtggtcacagactgtttcttgtttaacggcatggtggtaaccttaataattccttcctg

SEQ ID NO: 360927 - DNA, 122 bp, Homo sapiens
cacccctccacccccaacctgcccacgtgacccggcctagtttctccaggcccgtccctacgtctcactcgggaagccccgccccacgctgagcgctccgcctgcgaccctccgccacttac

SEQ ID NO: 360928 - DNA, 122 bp, Homo sapiens
agctgggaaaacaaaacagcagagagaggtgtaacattaaatagcgtcctgaccacactgcgcaagaaacagcaaatgaaacgtccaaactttggaaagatctgaagaacacttgccgcccg

SEQ ID NO: 360929 - DNA, 122 bp, Homo sapiens
tgatggcgatgccagggtcgcgggccatcccctatgccactcaataagcaaagttaaaaccgagaaactcagcccacaccgcaggctgcaggctgcaaggcctcgcctcagtggctactgat

SEQ ID NO: 360930 - DNA, 122 bp, Homo sapiens
agcaggagccctttcacgtggtcacacctctgttggagagctgggcgctgtcccaggtggcgggcatgcctgtcttcctcaagtgtgagaatgtgcagcccagcggctccttcaagattcgg

SEQ ID NO: 360931 - DNA, 122 bp, Homo sapiens
tccgtagtctcgctcggtttcgcgagatcgaggctgagctccgccgcgccgccgtgggggcgaccccagaacacttccgggtgtaactggttgtgctgtctgtgtacttccggcagcctcca

SEQ ID NO: 360932 - DNA, 122 bp, Homo sapiens
ttccgcccggattcttccggggccgctctgggatgactggaggcctgcgccgtctatggtcggggagggggagagcccacggcagctgagcggagggtctggcgcggtgacgctgcgcatcc

SEQ ID NO: 360933 - DNA, 122 bp, Homo sapiens
gggttttcaccatgttggccagattggtcttgaactcctaaccttgtgatccacccgcctcggactcccaaagttctggaattacaggcgtgagccacctcacccgacctgtatggtttttt

SEQ ID NO: 360934 - DNA, 122 bp, Homo sapiens
ggccttccggtttggaccttgacttccctcagtggattcggggaaatgatttgacttacacgccacttctttgacaagaatcccatatctctgcttctttatcatatttagatgtatttttt

SEQ ID NO: 360935 - DNA, 122 bp, Homo sapiens
ccagctctgaaaacatgaccgtggggccaggatgtttctggcaggcccagaagtgctggccgttcttccccagcctccccactgctccctcctctgttccccatgtggaggtcggaggggct

SEQ ID NO: 360936 - DNA, 122 bp, Homo sapiens
ccggccccgggcccgagcccggctctgagcgaggccacggcggacacgggaaacggtgagcgtgctggacccggagctggactcccgcccccaccccgcacagggctcccctccactagcgg

SEQ ID NO: 360937 - DNA, 122 bp, Homo sapiens
tcctcatcatgtcatatgtagttagcagcttgaaaccaagatgcagaaactccctgacctcgaaagataatgtctttttctcttgtggtgaaaaagcattaatcttacatgtgtcagaaata

SEQ ID NO: 360938 - DNA, 122 bp, Homo sapiens
tgccgcggacctcagaccacggcgcgcggtcctgagctgagcgccgtgccttccgggttccgccctcctgggtccgcccacaacagcaggaatgcccaatccgaatacgggaccccgccacg

SEQ ID NO: 360939 - DNA, 122 bp, Homo sapiens
gatggagttatgagtggcagattccctgcagggttgcccaccctggatatgtggggctcacgcgtggtgactcagcctagcagagatgtggaaaggatcgaattgggtggaaattatataaa

SEQ ID NO: 360940 - DNA, 122 bp, Homo sapiens
ctcaacctggtaccacccagtgagcaggcaggtgctgggtgcagtgcacacacggtcccacgcacacagaacactgcaggttaccagctgcacacccaggccctggcacctgccccagtgcc

SEQ ID NO: 360941 - DNA, 122 bp, Homo sapiens
actttagggaagccggtcccaacaggtccctttatgtcagtttcagggatcagagccctccgggagtgagattcctgggaatctgagcgttctctttttattactctctcccaggggaaaac

SEQ ID NO: 360942 - DNA, 122 bp, Homo sapiens
ggtgcgctgggaaaagggctgctcctgacagaagggacactctaagagcagcccaggaaccggtgcacttgggcggcctcggaagaagccggggctcctggaggcggaggcgaggcctggga

SEQ ID NO: 360943 - DNA, 122 bp, Homo sapiens
gatggtgaaacaaaatgcagaaaaggtaaaaattgaagaagcagagttaaaagtagctagcggtctggcctaagagacaggaagtggcccagactgagactgaagagggctggaccaggggg

SEQ ID NO: 360944 - DNA, 122 bp, Homo sapiens
catagggacattttattcagaaattaaatcattcagagttccagcactgtcgggggtcatcgggctctgtccaccgccataggcctagcattgtcaccaacggagccatagagggacctcgg

SEQ ID NO: 360945 - DNA, 122 bp, Homo sapiens
tgcaatttcaggaaggaaatcagacctgaacctggcactcagagatgctcttccaactggcgttaagcagaaataaatagaagacaggatatgcttcattgcgtctctcaggtctaatgtct

SEQ ID NO: 360946 - DNA, 122 bp, Homo sapiens
gcgccgcggtctcccctccggagtcgcatctgggagggaagggcgctgcatcggctggggcgctccctctggaggcaacgagcgcctcagtccctccacaaacagcgcggggctcacccggg

SEQ ID NO: 360947 - DNA, 122 bp, Homo sapiens
taatggggcatttgcatgtgtataggacagaccgggagctgcccagtttctgcttccaggcgcacctgctaagagtagtcttgccagtgaagcgactgctggggtacagcagcacagcacag

SEQ ID NO: 360948 - DNA, 122 bp, Homo sapiens
aaataaatgtcaggcatatattttgtgatttactaaagcagtgctttcattgttctatatcgtcctttcaactaccaactccttgagatggtattgaaatggaaaatgttcccttatccccc

SEQ ID NO: 360949 - DNA, 122 bp, Homo sapiens
tgacctggacatgcctctgctacataaagccacagtctttcctgctcagggcactgctgacgccactttctgccctggtttatacgttaatattcacaaaagctgctgggagcctggacttt

SEQ ID NO: 360950 - DNA, 122 bp, Homo sapiens
gtgctatgagaaaacgcagtcggaggatggcgaggaaggggaacggaattttagatagggcggtctgggatcagaacctccagatgcccgtccatggactccaacgaagggagcgattccag

SEQ ID NO: 360951 - DNA, 122 bp, Homo sapiens
gatgaactatgtataacatggtactgtaaattcttctacttatggactaattattgtgaccgtctttctgtctttgcagtctcttaagcagattgtgatgcgtgtcacattctggtgtaatt

SEQ ID NO: 360952 - DNA, 122 bp, Homo sapiens
ggtccgggttggcgccgtaccagccggtggccgcgccgccccgcatgccgtccgtgtaggcgggcagctcgcccatgttgcccaggccgccgttgcagtagctgcccatggcgccgtgcggg

SEQ ID NO: 360953 - DNA, 122 bp, Homo sapiens
aggggcatcactagtcatcgatgacttcacatcctaactcgggggccatccgaatggttacggaacttgtttttctttcaaaaaacaatgatccttcggtcacacagacttccctgatggtg

SEQ ID NO: 360954 - DNA, 122 bp, Homo sapiens
gcactgctcacttcaagagacaaggaaccgaaagagtggttgtcagtaattactaagagacgctgtgggctccccacctgatgtactaggcctgtgttggggagcaggcctgcgctgttggt

SEQ ID NO: 360955 - DNA, 122 bp, Homo sapiens
gtcgctaagattccccaaaactgagatttcaagaaaattcaccctttccgctttctttggcgtccttcaaccgtgaaggaaatgaaggttgagaacctggaacccgcttccaatgaccaagc

SEQ ID NO: 360956 - DNA, 122 bp, Homo sapiens
gggggtgtacagcaggagaagcagggtacaagcatgccacctgatcctgcagggcctgcccgggttaccagggcaggatgcagtgtctctctgggcctctcctgtcaccccaatccctttaa

SEQ ID NO: 360957 - DNA, 122 bp, Homo sapiens
aatctcctctgaaatgtgtagcgtaggcttttcccaagggtcgctagaaactcgtcttcgcgttgccccctttctggctctcagcgccgtcgccactcgggagaggctgggtgaggcccgtg

SEQ ID NO: 360958 - DNA, 122 bp, Homo sapiens
attaaacagagactagcactgtcaggctggggcaactgtttgagagactgatgcttgatacggacacagctgtcagggattccattttctcatttaggtttgcatttattgctctcaagtct

SEQ ID NO: 360959 - DNA, 122 bp, Homo sapiens
attcagttcctggcctcagcatttcctcagaccccgcccgcttcctcagtctccccaactcgcagcccatccctgggagctcgggccacgcgcctcctcacgatccctcccctcgccgcgcg

SEQ ID NO: 360960 - DNA, 122 bp, Homo sapiens
gtaccaggcatcgtgctaatctctggttagcagaaaacatgctgactcttgctctcttggcgcctaccgtctggtgatggggtccaaggtgcttcactgactggaccaaaagtttaccgaac

SEQ ID NO: 360961 - DNA, 122 bp, Homo sapiens
ggcagatgttactcatctgaagaaactaaaacaagataagtcagtggcaggagtggtggccggttaaagatctcttcgaagtgctttgttcagtaactgttgttttgtctcacattaagttg

SEQ ID NO: 360962 - DNA, 122 bp, Homo sapiens
ttgaaatggccccaagtgtaagttctacaaactcagcgattgctgcttacttctgccgcacggaacgccaagtttgtcagctctctgcttaagttgagtgagatctgtttattgaagtgtac

SEQ ID NO: 360963 - DNA, 122 bp, Homo sapiens
ctggtgcacacatgcacatgtatgcacacatacacacacggatgcatgtgcatgcacacgcgctggtgcagccacacacaactgaaacaaacgcttcctgagaggatacttaccctgtctac

SEQ ID NO: 360964 - DNA, 122 bp, Homo sapiens
ctgggctcttctcggagaggccagggacgatcctgcctgcccgggaagcacacctttgggcgtgtctagtctcccccacctgtgaaatggggtcggcacccggaactggggttgggattctt

SEQ ID NO: 360965 - DNA, 122 bp, Homo sapiens
gcccccatctccactcccagcctcttctcagcaatgctaagcaaagcacaacgcccgacacggtaactctacagtgctaatgcccccaaaagacacggacagcttcattcattcataatagc

SEQ ID NO: 360966 - DNA, 122 bp, Homo sapiens
agagaagcagctgttccctggaacaaggacctcctgagagccgaggttctgccagaggagcgaacccaaccttgctctgctcagcactgtcagtgtgtcagaagatgttcagagaatggaat

SEQ ID NO: 360967 - DNA, 122 bp, Homo sapiens
ttctgttattttaaggcttccagtttgtagcactttgttacggcagccctaggaaacaaacgcaggtacctgaaataacagaaagcttcagaatagtattatcataaggctccagaagagaa

SEQ ID NO: 360968 - DNA, 122 bp, Homo sapiens
gatgggcgggctaggggcggggcgcgggtgggctctaaaagtcggtgcccactcgctccgcgctgccgcggcaaccagcacaccccggcacctcctctgcggcagctgcgcctcgcaagcgc

SEQ ID NO: 360969 - DNA, 122 bp, Homo sapiens
atggctcgcaagtaccggtgctggccgcgcgggaggcagaaggggcgcaaacagccgctgcgttctcggcccagctcgccccttaaatagcctggctggctggagtcagcctaatttgtatg

SEQ ID NO: 360970 - DNA, 122 bp, Homo sapiens
gcgtccaaggccacacagggataaccggtgggacaggatctgaatccagagccacagaggcgcggcttcctccagggcctcaggggcctccgcacaaggagccgggtctccatgagtctgat

SEQ ID NO: 360971 - DNA, 122 bp, Homo sapiens
gaggagtttcatttcatagcatttatacatgaaatacttttttccctggtaactgccatccgttccattgtgttgaatcccccttttcctgagggtagggagatctgttggtcatgtcgagt

SEQ ID NO: 360972 - DNA, 122 bp, Homo sapiens
caggaggacaaagttctggggcgagccctctttcctgggcccttggagacagtgtgggtgcgttcgcgtccagtccgcagagccatggttcctggacagcgatttccggtgctgtccagagt

SEQ ID NO: 360973 - DNA, 122 bp, Homo sapiens
tgtgatcaagcttgcttgcattgaaacatacaccctggaattatttgtcattgctgacagcgggctgctctctttcacctgtttcatcctcttgcttgtttcttacattgtcatcctggtca

SEQ ID NO: 360974 - DNA, 122 bp, Homo sapiens
tctctgctttcatgtattagggtgatcactgaactgcgggttttaacactggctgctgatcgccactccccaacactgagaaacagacctggccagagaactgcagccaattccttatgtcc

SEQ ID NO: 360975 - DNA, 122 bp, Homo sapiens
ctgggggcggacgcgcgtgtggacccccagcgcggtcacccggaaggggcgccctggagacgcctgtgtccctcgagactccactggcagcgaattcgttactgtggtgaccgctgctcagg

SEQ ID NO: 360976 - DNA, 122 bp, Homo sapiens
ggcccatagcagctcctcaccagtgggtaggccttgatgcagcgggaatccaccagctgacgtctgtgggtgttaggctgagggatccccaagatctcaggctgtgctgtcaggttgtatct

SEQ ID NO: 360977 - DNA, 122 bp, Homo sapiens
ctccaggagttgtcaaggcagcagaaaggagtcacccagccaaaggaggagatggctcagcggggctgcaccaaggggccaagaggccctacccgtgtctaaaccctcctctcactccccta

SEQ ID NO: 360978 - DNA, 122 bp, Homo sapiens
aaacagctgctggtggtcggcgctggcggcgtcagcaagaagttcgtgtgggaggcggcgcgcgactacgggctccaggtgggcggggcgcggggcggggctgggccccaggtcctggcccg

SEQ ID NO: 360979 - DNA, 122 bp, Homo sapiens
cgagtcgtccggggccgccattacaatccacctccatccgcttggaaatggccttcgtcccggcctatgactggtcccagcgggcagtacagaccccctagaagcccctggagctccccttt

SEQ ID NO: 360980 - DNA, 122 bp, Homo sapiens
gcagagttggacactaatgtggccagctcccttctctcactcaggcagggaaactgaggccgggaaggtgtctggatactcctgcattgctgggtattctggggcaccgccggtcatacgtg

SEQ ID NO: 360981 - DNA, 122 bp, Homo sapiens
caggctaaaactggcgatataagggcacaagatcgggtgcctgagctttctggtggcccacgtcctctgcccccgcccttagagccaacagttccctagagattgggggagctggggctgag

SEQ ID NO: 360982 - DNA, 122 bp, Homo sapiens
aatcctgaggagaagctgatcccaagagcaacagtagcagcgcccagagcagtagagacccgggtaggcaggaggcgcaggggagcatcctggggctgcgagatggtggacacgggtcaggg

SEQ ID NO: 360983 - DNA, 122 bp, Homo sapiens
cagtgagtccctaggcctccatctctctcccttgctgtaccaccttcaccaccatccatgcgaccccaagagccttaatgactctagaagagactccaggcaggggaagctgaaaggacctt

SEQ ID NO: 360984 - DNA, 122 bp, Homo sapiens
agcctaccgcggccacgcccaccgcggctcaggaagccgaacttcaccgcgcaactccgacgtctcctcccattggacaacctgccagccactcgcgttaatcccgcagggctattggccag

SEQ ID NO: 360985 - DNA, 122 bp, Homo sapiens
ctcacctccctcaccccagaattgaccaattccttctttatgcccacactattctacacacgagtctaacatggatatataaatatttaacacaattattcagattttttttcttctccttg

SEQ ID NO: 360986 - DNA, 122 bp, Homo sapiens
ttaaatgggttataaattattgcttgtctttggaatattggagagagaccctggatcccacgaggcaggaagagacaagctgttgaagaagcaggcacccagaaagaaagaagtcatcactg

SEQ ID NO: 360987 - DNA, 122 bp, Homo sapiens
ctcaaggccacggaagaccctagagattgttgtctaacctcattttctacgtgtggagaccgaatcagggctgtgtagagaaaccagtgcgcgttttgatgccactcattctgggttttcag

SEQ ID NO: 360988 - DNA, 122 bp, Homo sapiens
aaaggctgggaacagcgccatgaccacaggccgtacctccgttcttctctatagggatggcgccggcgagcgagcgccggtctgaggacccctgccgtcgcggtgcactctgggaaatgtgg

SEQ ID NO: 360989 - DNA, 122 bp, Homo sapiens
gttgaaacagttaaggtactcaagacaggaccgtgctcactgcactgtggtacttacctacgcactgctcccctcgcttctgatatccaggagggcactgacatgcaaaggatccccgtaaa

SEQ ID NO: 360990 - DNA, 122 bp, Homo sapiens
ggaacccctcggcgagctggaggacatcctgtcctgccctgacccctgcagctcggtgaacggaaaggactcagatggggctgagttcgtcctctgtgttgagcgtgcaccagggcagccaa

SEQ ID NO: 360991 - DNA, 122 bp, Homo sapiens
ccgcacggccacccgcctgcgcctcccgcctccaccctgcactcactgccgccctcccgtcggcactgagctggggctccatctgtccggctcctgttggcagggccagctctgagtgccac

SEQ ID NO: 360992 - DNA, 122 bp, Homo sapiens
ggaggcgacgagaaccaagcgaccgtgagctgcgatgcacacagtagtgagtgggtggcacggggcccgcgggcacgaacagccgaagagcggagaagactgggagcataaccgctgggcag

SEQ ID NO: 360993 - DNA, 122 bp, Homo sapiens
acagtcgtgtggtttctagactacacggcgtttcgaaagtgggtaaaggcagacatcacgcgtcttcaagaagttcagaagaaagaggaagagtgttgtcatagtgggtaaggtcaagtatc

SEQ ID NO: 360994 - DNA, 122 bp, Homo sapiens
gtgctcatgggcagccgcgggccccctgaacttactgtcccctccgtagggaccatcccgcggtcatcaagcgacgcttcaccagcgtcctggtggtgtccagtctctcacccctgtgcgtg

SEQ ID NO: 360995 - DNA, 122 bp, Homo sapiens
ttctttgactaggaaagggaattccccgaccccttgcgtttcccgggtgaggcgatgcctcgccctgcttcggctcccacacggtgcgctgcacccactgtcctgtgcctactgtctggcac

SEQ ID NO: 360996 - DNA, 122 bp, Homo sapiens
gtggggcgcagggctcggctacacatgggtatccgcctgagccagtccccgctggacccgcgcagctggacagagccctgggtgatctacgagggccccagcggctactccgacctggcgtc

SEQ ID NO: 360997 - DNA, 122 bp, Homo sapiens
cgcgcttgccgctcggcggctgctgccggtctggctcttcctcgctgttgctcaggctgtcgtcggccggcgagactggcgagctggacacgtcctgcatcatctctcgagcggcgacgcgt

SEQ ID NO: 360998 - DNA, 122 bp, Homo sapiens
ctgctaacgtgtgtgtatcccgtactctagccacgccgtgcgcctgcggtcaggagcactcggaatgggacaagctcttcatcatgctggagaactcgcagatgagagagcgcatgctgctg

SEQ ID NO: 360999 - DNA, 122 bp, Homo sapiens
cttgcgcctcgaatgccacgttgaatactcctcatgtctttggagacatgtccttcccttcgagctgctcccagtcaggtgaggaataaaatgctatgatggcgtgaaaattctcccttggt

SEQ ID NO: 361000 - DNA, 122 bp, Homo sapiens
ctggctaatttttgtatttttagtagagacggggttttaccatgttggccaggctggtctcgaactccaggcctcaggcaaactgcccgcctcggcttcccacagtgctgggattacaggca

SEQ ID NO: 361001 - DNA, 122 bp, Homo sapiens
ctattcatagctatttattttatgattacagcactattaatgaattgattaatcaaaaaacgaatgtagatagacatgaatgaagaaagatagagtcaatcttggacctatgatgatgactg

SEQ ID NO: 361002 - DNA, 122 bp, Homo sapiens
ctcccggggtggaaagtgatgggcgctcctcccctgcttcccaagtctcccctggatgggcgggggaggggaaggggtggcagagggaggcctcactctaccagctcctggcctctctggtc

SEQ ID NO: 361003 - DNA, 122 bp, Homo sapiens
tgagaggatgaagaggggacaggccggctgggagccagaaggaaagctgggaaggtagtccgggtggcgtggtggactcacactgcacgttcagctgcacctgggcctcacgggggcgcacg

SEQ ID NO: 361004 - DNA, 122 bp, Homo sapiens
agcccgccccgagcgcgccgcctgtttattcagccgggagtccggcacgcgccaggcgcacgcactgcaacaacaaacccagctgaatggagagtttgcaaggagcgggagaaaggaacggg

SEQ ID NO: 361005 - DNA, 122 bp, Homo sapiens
tcggggacggcgagggggctcggggatcgagcggcgtcccgtgcaggcaccgtgaggcagcgcggagaaggggacaggaagcggcacctagccgagtccgccggaaactccttcccccgcgg

SEQ ID NO: 361006 - DNA, 122 bp, Homo sapiens
cctctcccataaagttagaaagcgggtaaagggtcagactacaattcccggcagaccctgcgaatgagttctcgcgacttgcgagaagacacgtgcgcggaaggagcttgcagtagcgggcg

SEQ ID NO: 361007 - DNA, 122 bp, Homo sapiens
ggtccggtttcgccagcttttgggccatttggggagtttggcgaagaggtccccacagctcgccccggggacgtacgtggcgcggcactcaccttcatcgtcggcgtctcctcggaagtgag

SEQ ID NO: 361008 - DNA, 122 bp, Homo sapiens
aatatcagccccttaagcgctaaatagcgagagggctgggctggggccagagtgcccaggcgcattccatagacatttcctggagaggaagattccctgtggccggctcctacagtagtcac

SEQ ID NO: 361009 - DNA, 122 bp, Homo sapiens
ttgactggtttccatttgtctctttggattgtgctagtttttcggaaacatcattgtcatcgtcatcactgtcagcataagcaccaagcaagcatagaccgcctagaaacaaaaaggtaaac

SEQ ID NO: 361010 - DNA, 122 bp, Homo sapiens
attcacccacctcagcctcccaaagtgccgggattacaggcatgagccactgcacccagccggattatgtgattttctaaatgataggagtacgatagattttattcatagtaaatgcgtga

SEQ ID NO: 361011 - DNA, 122 bp, Homo sapiens
agtgtccagggcctttgagcaggcgcagaggtggctgtaccgcgtggctccgcctccgcgcgacacttttccggggcttctcattggagagcaagcctgtcaagtgctttctgttgtttcgg

SEQ ID NO: 361012 - DNA, 122 bp, Homo sapiens
agggccccacttccggattgagcagtttcacaggactgctgggagccaggcctgctcaggcgctctggaaagggctgagggtcggtgtgctgtgtgcgcatacccacgcccacaccttggcc

SEQ ID NO: 361013 - DNA, 122 bp, Homo sapiens
gggccccagatatcagacgtcttaacagtgccccaaccgcttttatgcagggtgattccacgatgcaggagatctctgagcagcactgtgggggctgaagcattccctatcaagctagtagg

SEQ ID NO: 361014 - DNA, 122 bp, Homo sapiens
gaggagcctgaaacctcaggccgaggatcacgggatttatggaagacggtggaatccctgcgtatgttgtggacatggccacaaaacgcctttaacaacgaccagatgtgatgcccggcaag

SEQ ID NO: 361015 - DNA, 122 bp, Homo sapiens
atgggtagttggcctgtcatgcactgtcagcgggagcctcggccaatttaatggcagttccgagaacgagagaaacactcagtttttccaagttgaggtcagagaggaacagtctctccata

SEQ ID NO: 361016 - DNA, 122 bp, Homo sapiens
agaaagttagaggtgttctcatcagccacatgagatgggcaggagattccttccagtaggcgagagagcagagtgcagacaacagatgtgagaaaggtccccatagctgtcaagttcctgca

SEQ ID NO: 361017 - DNA, 122 bp, Homo sapiens
cccgaggcggcagaatggtacgctctgaaaactggatggttctaacgtaagcaagaaaaacggtgcgcgctgcagctctttaactggaacagcctctgctcggtctacctcgcccccaacag

SEQ ID NO: 361018 - DNA, 122 bp, Homo sapiens
ggtctccaacctgtcagagtggctgagtcccagccctgggccctgagccgggtccccttccgcaagcgcccaccgatccggaggctgcgggcagccgttatcccgtggtttaataaagctgc

SEQ ID NO: 361019 - DNA, 122 bp, Homo sapiens
attcttcttcaccgtgaatgattttgagtaaacggccttaagtgacatcaagggtctgaacgtgtcagtttgggtaactagatactggaccaggttacatatagaagccgtctaccttttct

SEQ ID NO: 361020 - DNA, 122 bp, Homo sapiens
aggtacaaacagtgggctttatttttgtttggaattgggttgtggttttggcttctccaccgaagaaaccaaaggaagggggagggagatcacagaaatgttagctctatgaaaaggaaagt

SEQ ID NO: 361021 - DNA, 122 bp, Homo sapiens
agttacaaagaacctagcactgcattctataaggttttatcattcagatttggaaggagacgggagccatggtggatgccgtgaggtgtcaccagatccctttgtgggactatatccatccc

SEQ ID NO: 361022 - DNA, 122 bp, Homo sapiens
ctggggccccaggggcacaggaagggggggaaatggggagaccgtaccagcctttttgcccgggatctgaaaggtctcagggccacggagcaacactagcctgacaccagactctgctgggc

SEQ ID NO: 361023 - DNA, 122 bp, Homo sapiens
gctggagagcaccccaggtcgccgtgcttggctgcaggcccgtccctctctccccatcctcgggttcccagcgtgttttgtgcttgaacttggtggactcatcttaccccacaagagtggcc

SEQ ID NO: 361024 - DNA, 122 bp, Homo sapiens
taaaccggacataaccgggacataaccgggacctgctgggcatgggaggtgggaacagctcgggcccaagaaccaacagtgtggcacaagtagcagaaaggtgtccagagagctgcccgggc

SEQ ID NO: 361025 - DNA, 122 bp, Homo sapiens
aggacacagcccaggagagcagcttgtgcagtgaacccaccccaggcagcggggacgctccgccgcccgcaccagcggcccgcacactcacgcctcgctgtgctgtctgcgccctccatcac

SEQ ID NO: 361026 - DNA, 122 bp, Homo sapiens
gcccaacccggaactagcttgggggtgggctcccaaggaccaggcagcgtggagagcacccggtggggcaggggagagctggaaggatggaaggaaccctggcctgaacggcccacagcagc

SEQ ID NO: 361027 - DNA, 122 bp, Homo sapiens
aagttttcaagcctgtctcgccctgcacctggaaacagactcggactgttgtggtaggcacggtgggagtgagactggccctttggtttgtgtgagagctgggtgaggtctgtgactgccgg

SEQ ID NO: 361028 - DNA, 122 bp, Homo sapiens
aggccgggcgagggggagggtaggggatgggggagaatattgagatgattaataatcgcgcggcagggttgctgatgtaaagcgatttgcagatctaaagggcaataagcattcctgggaga

SEQ ID NO: 361029 - DNA, 122 bp, Homo sapiens
cccacaattttcaaaaaccgtgtctgttaagagattattggaaaaatccaaatgcaggaacgggctaattttggatgggcaaagcatgtggaccatgcgtgtaccagacactgtgaaatttt

SEQ ID NO: 361030 - DNA, 122 bp, Homo sapiens
gcgccgacgcctctcagccccgcaagagctgcagacccacgggcagtgcggtgccactttcgcccaacagggtgccaagagagaaaactgcggtggtcataggaaaacagatccaattcagg

SEQ ID NO: 361031 - DNA, 122 bp, Homo sapiens
agttaacaggacctgccccgctaaggcctggttggagtgatgtttccatcactccaggaccgtctaaaagaaagcaacactataaaggccttgcatatttgggaaagtaaaagaactttact

SEQ ID NO: 361032 - DNA, 122 bp, Homo sapiens
ggtctggggcgggttggggctgggccgggtcgtgaagatgccgtgggccgcggagctgcgcggattctgggctgtggggcgggcacggcctttccggaggcgccgctcctgggcgtcctttc

SEQ ID NO: 361033 - DNA, 122 bp, Homo sapiens
gcaaatttatcccttcccttcaacattggaaggggcctaaagtgggtgaccccagatttgcgtttcagttctgaagaaaacatgcaagaaaaagaaaatggcgggaggtgctcgcaagctgg

SEQ ID NO: 361034 - DNA, 122 bp, Homo sapiens
gtgatccaagaatacaccatcaacattcacaagcgcatccatggagtgcgcttcaagaagcgtgcccctcgggcactcagagagattccgaaatttgccatcaaagaggtggaaactctaag

SEQ ID NO: 361035 - DNA, 122 bp, Homo sapiens
cagcagcaccacctcctccccatccctgagcggctgcccctgcaggcggcccaggaggtgcggaggcagcacactcaggaactgctccagcaccagcagctccaggatctgtttcttggtgt

SEQ ID NO: 361036 - DNA, 122 bp, Homo sapiens
taaaggatgaacgtcagggttccatcccttccacccaggaaatggaggcacgacttgcagcgttgcagggcagagttctaccttctcaaaccccccagccggtgagtgttatggcttaggag

SEQ ID NO: 361037 - DNA, 122 bp, Homo sapiens
aacaagcagcaggattgttttgctcagtgttgtcagagttgtttttaaacagccgcccatcgtgctgcagggagggagggcgagacacatgtggatcaacaatgagatgggtcttggcctcg

SEQ ID NO: 361038 - DNA, 122 bp, Homo sapiens
ggacgcagcccgcctggcacaaagggccacgggcgcgagggactcgatgagctgggagatcgcggccccggcaggtgcggcgcgctggggcgggtgcttggcgccttccccggcacaggtga

SEQ ID NO: 361039 - DNA, 122 bp, Homo sapiens
ccgggagttgtgtgcagagctgacttttggagggccgagttgcaggcggcgggcgcatcccggagatggcggggcagggagggagggaaggaggagggggcggggagggaggtgcagatttg

SEQ ID NO: 361040 - DNA, 122 bp, Homo sapiens
ttttgtattctaagtgaatttcactgcaaagagcgtctcctgagtgaaacatcttgtttccgaaagtcttaaccatctttctaatctttaggtttccttcctatatcttctaaaattaagaa

SEQ ID NO: 361041 - DNA, 122 bp, Homo sapiens
gcagggaaccacaggcctagctggccctgccagggggatacccacaacagcctgacatggcgctcaattcccacacgccagctcaaggctcctgtccatgcagctcaatgttacttgtgtgt

SEQ ID NO: 361042 - DNA, 122 bp, Homo sapiens
cgcgccccagggactcggaacgcccccgcgagtgtgacgcgtcctgcctcccctgcagctcgcggacactcgcacttgcaaggcctggccagcactcttgggcccgccccccgacagtgcgg

SEQ ID NO: 361043 - DNA, 122 bp, Homo sapiens
aggcccatctgagacaagttaaatgagctgctactgtcagcccagacccagtggacagaacgtcacaccaaaatgcccacacatgtaatttgtcacgcctggcagcccagagcatggggtga

SEQ ID NO: 361044 - DNA, 122 bp, Homo sapiens
tttttagcgctaaataatattccattgtctggatgtagcacagtttatccattcacataccggaggacatcttgctggcttccatgttttggcaattatgaataaacctgctgtaaacattt

SEQ ID NO: 361045 - DNA, 122 bp, Homo sapiens
ttccagaaatgccatagaagctgagagatgcatagtcttaatgagctagaaacattctttcgcctggccatttagatccctgaccactcagaagtgccctgaattcaaatcatttaggtctg

SEQ ID NO: 361046 - DNA, 122 bp, Homo sapiens
gtgtcatcaggtcatgggagctccatgttctatagggtagattatacaatccccattttccgatgaggaagctccagctcagagtttaggtaactcgtccaaggtcctagagccaatggggg

SEQ ID NO: 361047 - DNA, 122 bp, Homo sapiens
tggactcgcctgcatctggctcggaacagagttaatctcaggagtgagaatatagccctccggtggacgcaactcgcgcctgcggctaacagaatgtctccaggggaggggctctgcgtccg

SEQ ID NO: 361048 - DNA, 122 bp, Homo sapiens
gcagaggggaaggttaccctcctaggtggaggcgtgctgtgtccaggcgcccgacttccccgtgtgtttgaaaaggttcatttatcataagacccaaggtaaataaacaaaggccgcttcct

SEQ ID NO: 361049 - DNA, 122 bp, Homo sapiens
actttgggtgacaagactggaggagacaagggaacctaagcagaaggtcatccagaccaccgtcagagtggccacaccaagtctttgggttcttgctctaagtctgccagccagatgaaggg

SEQ ID NO: 361050 - DNA, 122 bp, Homo sapiens
aactctcctcccctgctccccttccaccaacccccatctctatttaaacaaacaaacgggcggcaaaactggacctggccggaggagcctttcaagtgggcgtgtctttcggctggggaaaa

SEQ ID NO: 361051 - DNA, 122 bp, Homo sapiens
tctgagccaggtgcaggatataatctcctggtgtgccgttttttaagcccgtcggaaaagcgcagtgttgggttgggagtgatgcgattttccaggtgctgtctgtcacccctttctttgac

SEQ ID NO: 361052 - DNA, 122 bp, Homo sapiens
gaagtactgacgcagacagggtggacgccggcgcgcgggtctccgcttggcccctagggacgcccttttcccggcgtccccgagagacgcctccagatttgaaaatcaattcagcttcggga

SEQ ID NO: 361053 - DNA, 122 bp, Homo sapiens
cccgggttctgaggtttggaggagcacgtggggacacggcggcagccgtctctggaaacacgactgtctgtggtttgaggaacgcgttgccacttcccgatcccggacagagccttctgctg

SEQ ID NO: 361054 - DNA, 122 bp, Homo sapiens
catgaatatgggcatggaggggcagtggcactacatgtaaccttcatctagttaaccaatcgcaaagcaagggggaagtaagtacaaatggggtctttgttttcactttgtcctaggaatat

SEQ ID NO: 361055 - DNA, 122 bp, Homo sapiens
ctccataaatgtgtgccaagagggtctcctttcctgtcttcctctacagagaatgctgctcggtcctcctacccctcttcccgaggccctgctgccatgttgtatgccccagaaggtacctt

SEQ ID NO: 361056 - DNA, 122 bp, Homo sapiens
gctagaccgtggctatcgctacgacatgagcacccaggaagcctacgccctggctcgctgcgccgtggcccacgccacccaccgtgatgcctattcagggggctctgtagaccttttccacg

SEQ ID NO: 361057 - DNA, 122 bp, Homo sapiens
agtttgaattccacgggtctgattcagatttgcgagagtttagtaatttgcttttgttaacgagatctttctcagcttctgcagtgtttacaatatgagatctaatttgggcttaaaatgct

SEQ ID NO: 361058 - DNA, 122 bp, Homo sapiens
aagctgcgtgtggaaagaaagaaagacaatctcatatatcctttcattattagacggccccgtggccttgtccctgccctataattgaccttcgtgactacctggcttcacccccaactgcg

SEQ ID NO: 361059 - DNA, 122 bp, Homo sapiens
cgtgtgctggctcgagagctctgcatttgtctttctgtccttcatatgccagtgtacctccgccttctgtctgtctaggtgggagctcctggagaggagggtgcttcccagcagttgctgtt

SEQ ID NO: 361060 - DNA, 122 bp, Homo sapiens
ggaagttaactttttacccattttattctcaaagctattgaaagaattatgaaatctactcgagagcaaacgtggaggttattcacaaaggcgttcataatgaactaatttgcggatctttt

SEQ ID NO: 361061 - DNA, 122 bp, Homo sapiens
gatagcatccacagtcgataaagttctaccagaacaaccaaacaaaaaataattttttttcgttttgatttggggaaaattagacctgtaacaagtagagataaatatggattagagataca

SEQ ID NO: 361062 - DNA, 122 bp, Homo sapiens
cctcttacacatatgggtcgatgcctcacgtctccctaacgtgtaaaactgagctgtgcccggccaccttgggcacacgtcctcaggacctcccgaggctgtcacgggcctgtccttaactt

SEQ ID NO: 361063 - DNA, 122 bp, Homo sapiens
ttgcctcgtgggttaccactgttacccattgggtaatatgtattgcctcgtaggaaaccacggttacctggtggataataagtgttgccttgcgggaaacccctgttacccggtggataata

SEQ ID NO: 361064 - DNA, 122 bp, Homo sapiens
ctgggacggcaaagcccagggccgtctgttctgaggcgtggtctttgactccaaccccagcggggcctgcagcagagcctccgtcttcggaacaggctcgcttttcatgcacttttgcaaaa

SEQ ID NO: 361065 - DNA, 122 bp, Homo sapiens
gtaccagttaccgaagaagttactgcgcctgcgtgcgcgggtaatgacgcatgcccggaacggcccctaaagtaggacctagttctccaggttttacctgtttccactagtggcgcggggcg

SEQ ID NO: 361066 - DNA, 122 bp, Homo sapiens
tccaagctaactctttgcaaatgtaaacacatgtccatcttgtaataaatgcaaaatgcccgtgcagcagaagcatgcgactttcatatccttgcctagaataggctgcatggtgtatgtca

SEQ ID NO: 361067 - DNA, 122 bp, Homo sapiens
cccaggggcccggccccacagcagctgcactcacacccagtcccctctggtcccccctcccggcttttgtcttgcaggtccatgagtcctccccgcagggctctgaatcctccccggccgcc

SEQ ID NO: 361068 - DNA, 122 bp, Homo sapiens
agagaatagaagtaacttggagtaggaggggagggtgactcatcacgaaccataaagaaacgtttgaaaggtttttatcaacttggttcaggaaaggatgctacaagtgtagatgaaactcc

SEQ ID NO: 361069 - DNA, 122 bp, Homo sapiens
cctgtgctgacggaaatgaggaaagcataattgtagtttagcgtgaaatggcgcggtgtacgatgggaattgtagttcatacagatgcgcgccagcgagttaacatccacgctgctcactgg

SEQ ID NO: 361070 - DNA, 122 bp, Homo sapiens
ccctccccctccccttagctcgtctctttgaaatttcaaagaaaatccctcctcggagcccggagcccggggctggtagcacctccccagcctcaggaagatgcgggcaggtttacaagcaa

SEQ ID NO: 361071 - DNA, 122 bp, Homo sapiens
gagtttgcagaaccctgtttccgactgcaggtttgaatcctggtacccctttcctacacacgtgattgtcccaagttaaggtctttatgactcagtttcttcttctgggggaaaacaaaagt

SEQ ID NO: 361072 - DNA, 122 bp, Homo sapiens
ctgcgcagcagacactccttcctccatgactgttcaagggcgggggtggggagggaggaacgagcaggccatgaatatttaatcggggaaaagtaggagcacattatttggataaactactt

SEQ ID NO: 361073 - DNA, 122 bp, Homo sapiens
actcgccgtgtgacccggaagggagctctgaggaggcggggccaggacggcgggaccggccgctgggtcccagcgagggctgagccgggcggtgggaggtgagaggagagttctgcgccgac

SEQ ID NO: 361074 - DNA, 122 bp, Homo sapiens
gcagcgggctgaagggctcctcaagcgcggccagagtgggcgccaagggcgaggaggcaccgagagcgagcgagagctgccagcaggctgtcacctctcaatcccagcactttgggaggccg

SEQ ID NO: 361075 - DNA, 122 bp, Homo sapiens
cgcttgcctgcgcggccgcggggaggaggcttcttggctgtaaatcagggccgcccccagcgcctgccggcccttcatcacagtgctttacggtgctgacaccggccaggatttagtgggtc

SEQ ID NO: 361076 - DNA, 122 bp, Homo sapiens
tcgccatatatcctctgatctatttgcagttttaatctcaggatggaagcatgtgggaggcgaatggggatcactaatccttctcatgctgttagggggaaacacaggtgtgaacacattgc

SEQ ID NO: 361077 - DNA, 122 bp, Homo sapiens
gagagtggagaaaaaaaaattgggatgaaatgcaaaaccaatcaggcagcgagacccgtccgccacccgcccccctgaagtgtcaactacaacttctttcctttccctctacgcgtggaccc

SEQ ID NO: 361078 - DNA, 122 bp, Homo sapiens
gtgaatccggccttggctattcattggctggaagacctgagccaagcctgtgcctctgtccgggcatctgggtagatgtcctaggagtccactaagaagaaaactgaggccagtgagaggca

SEQ ID NO: 361079 - DNA, 122 bp, Homo sapiens
tacccctcatccaggccgtgtgccaggcctttcccttcctctcctctcttgctgtcagtccggttcattcctatgagaggcccatctcctctggctggctctggtgtcccttctcctgctag

SEQ ID NO: 361080 - DNA, 122 bp, Homo sapiens
tgggataatatcagagatttggtaccccccgaatttgaggtatgtgaggaaggagaacttcgttgttttaaaatgaaatataggcctggcgtggtggctcatgcctataatcccagcgcttt

SEQ ID NO: 361081 - DNA, 122 bp, Homo sapiens
gccaactatactttccaggtggacctggagaactgaaggaaatccaaagcgctgcacaatcgatggtgggatttggaatgtcagcagaggaaactactcagagaagcaaatggaggtcatcc

SEQ ID NO: 361082 - DNA, 122 bp, Homo sapiens
caatataatcaacctgccaccaggtagctggctgatctcctgaggaatggtgtcatattgcgggctcagtgttggtctctgctgctggcaaattgggcactcattggtggccatagccaggt

SEQ ID NO: 361083 - DNA, 122 bp, Homo sapiens
tgtgtgtggacggggctggggcgggacggggcggtgcagggagctgggcggatcaggccccggcccactgtgcacgccccccaggcacggcgggcgtgatgatctctctgagccgcatcctc

SEQ ID NO: 361084 - DNA, 122 bp, Homo sapiens
acacccattaggatggctactgtgaaaaataaaaaaaagaataacaaatgttggcaaggacgtggagaaactgaaacactagtgcacaggtgtagggaacataaaatgatatgggccctgga

SEQ ID NO: 361085 - DNA, 122 bp, Homo sapiens
ttctccctcttgtgtgcacaaccttttccacccggcatgagaacacacaggatgcactctcgaacacagcactttccaaaaccgcccccgcagccacgcaggggcacacgccctcccggcct

SEQ ID NO: 361086 - DNA, 122 bp, Homo sapiens
tgggcgagctggaatagtctagaagctgagcagaacaaaggcggtgtgactggtgagcctcggagggatcctcctccctgctagaatatgcatgatcctccgcgagtcttcgcccgccagga

SEQ ID NO: 361087 - DNA, 122 bp, Homo sapiens
cttggggtcgtcctcaggtgcacctccaggtaagcacttggcggcagggggcttaacatccgctccgcgcagagcaggtgtttcaaaggctgtgtgaaagagcttcaggtggccacgtaaaa

SEQ ID NO: 361088 - DNA, 122 bp, Homo sapiens
aaccggggctgtgcaaggcgctcaccggccagcgcgagttccaggtaggcatgggcttagcgggtcccgcactcggagcggctggcctgggacagtgagaggcttagcacccgggccagcag

SEQ ID NO: 361089 - DNA, 122 bp, Homo sapiens
tgtaagctacctatttggtgcagtatcacacaatttaccctgtaggtctgtttgactttccgtgtgtgcccatgagggcagggactgtgttgcagttgtagaaataggtaaattaattgaaa

SEQ ID NO: 361090 - DNA, 122 bp, Homo sapiens
aggagttgggcttcctcagagagtgttcctccctcgtcccctgtcctgtccaggcacctgcgagcaggatggtgtgtccccggctaaatccacaggcgctccactctgtcccagagagccca

SEQ ID NO: 361091 - DNA, 122 bp, Homo sapiens
agttgcaagttattagactgtttctgtttgggtggttttataaaaaaaaaaactgtaaaacgtggttgcgtaagcacatctaaaggttaaactccaagcagctaatctgcatgtgagaacaa

SEQ ID NO: 361092 - DNA, 122 bp, Homo sapiens
ccccatgaggtagatactactgttatcccattttacagaggaggccgctgcagcccagagcggttcactgaggtaccaaggccataggcaaagttctaaaggaggccccaggggtagaagcc

SEQ ID NO: 361093 - DNA, 122 bp, Homo sapiens
taaaattgtatcagaaatgcatctcttaatgtgataaacagtactctactgcccatcccccgcaatggatttatattttcatgagtgaatattgtttggttgagaaaaggttcagcattaat

SEQ ID NO: 361094 - DNA, 122 bp, Homo sapiens
taacttcagagatgtactgtgagcggctttgtgcagcgaaatgacctgtttaccgaacagcgccctctgtagcccagtgctcagaacgggccttttcatgatgttcctgcgttgtgtttaca

SEQ ID NO: 361095 - DNA, 122 bp, Homo sapiens
ggcggcggcgcgagcgggcggcggctgtgcggtgcggtgcagagcggaggcggaggcgggcgcgcgggcagctcgcgggcacccggccgggccggcgcgggagcgggaaagggtgcgctatg

SEQ ID NO: 361096 - DNA, 122 bp, Homo sapiens
tgataactacgtctgggatgaaattaatttatttctgaggcgtctgggttccgcagatgacgtaattactattggacattcaaactactcctaagactcatttagggtagttctgagacaca

SEQ ID NO: 361097 - DNA, 122 bp, Homo sapiens
ctgtccagcccgactggacagtgccgaggggcaccgagagccagcttggcaccgagagttcgtttgttctctggcggggaggtcttgctggcacatatagtggagaaaggccgggctctgcg

SEQ ID NO: 361098 - DNA, 122 bp, Homo sapiens
gcagtcggagcgggaggaggacaagacgatgccgctgtccccgccagcccagggcgaccccggggagcccagcccgtgcaggccccctaagaagcacaccaccttccacctctggcgctcca

SEQ ID NO: 361099 - DNA, 122 bp, Homo sapiens
ttggagatgggtgggggaaaacaatcaggtttcttcaggctgaggaggacttgctcaggccgattccaaacattgtgctcgttcaatgcgtagaaatgatttgcatgatggcatgccgtgat

SEQ ID NO: 361100 - DNA, 122 bp, Homo sapiens
cttctgagactgctcccagggactgtgggggagcgggccgctcaaagtccgagccacagccgcactgccacagctaatctaggaggcgaggcctcacctggcacgctccatggcagggccct

SEQ ID NO: 361101 - DNA, 122 bp, Homo sapiens
ccagatccttactcctcattcaaagcagctgtctcacatgtataagcccttagtcagaggcgggtggggctggacaagacagtggaattcgaaagagtaaatctgtcctttaaggtcatgtg

SEQ ID NO: 361102 - DNA, 122 bp, Homo sapiens
aaccaccgggcaaggacccagacaatgggccttggcaaggagttaatgggctgggcctctcgcgttagccgagtgtgaccggagctggcagggggcctggcctggcgccagcatcgattacg

SEQ ID NO: 361103 - DNA, 122 bp, Homo sapiens
ggtgaccaggggccccttccctcatgatcaggctcctacctgcctgtacccccaacaagccgtaggtggcccccgtgaccagtcctgcctgtaacctgtttgtgtctccagattacattgac

SEQ ID NO: 361104 - DNA, 122 bp, Homo sapiens
gaaactacatttttgttttgattaatttaaatagccatacagttgctaccatactggtcacggcagctgtagactgactgggtccatagttcatcacctcaaaattctttcaaaatttatta

SEQ ID NO: 361105 - DNA, 122 bp, Homo sapiens
tcctgttgggacttgattcgttcctcaaattttcaatttaccgtaaacaaaggggacgcgcgctgacccggaagtgaaagctggaacccggccggagtagctctgagcgccggctgtgagga

SEQ ID NO: 361106 - DNA, 122 bp, Homo sapiens
ctttccttcttaatttagtttctttcaggacattctcatgagactggtgaaatataactgcgaagtagcatgataactgtgaaatagcatgatcattgtgaaagctatatgacccaaaactt

SEQ ID NO: 361107 - DNA, 122 bp, Homo sapiens
gtgaaaaggtgccattcagagttgttattctcatgacggaagttttggagccaaataatacgttttttattttcattttatttttaaaggatgagctttggtccttttcaggccgccggttg

SEQ ID NO: 361108 - DNA, 122 bp, Homo sapiens
gtttttgtgctgtgcagaggtagcagaggtagcagaggtagaggagcagaggtagcaagtcggtagaaatagcaaacaatgtatcagctacagagaaagaggcaaagatgagagacagacat

SEQ ID NO: 361109 - DNA, 122 bp, Homo sapiens
ctctttcgcgcccgctgccaggtgccagggccgcgcaggcgggcggaggtgggcaggaagcgccacgccgaggagccggggactctgggagctagcgggagacgccggcgtccgcccagccg

SEQ ID NO: 361110 - DNA, 122 bp, Homo sapiens
gcatccgtcagcggataggtggacgagcggatcgtagtgctgctgcgccacggaatattccgcagccaccaaaggggcgaagtgcccgctcagggtacagcgtgggtgcaccttggaaacac

SEQ ID NO: 361111 - DNA, 122 bp, Homo sapiens
aatactgcagttcatggtgaactttgactattatccactcgagtcgtacttgagacgttccgcgccgcagccgctctccctccttccatcaacatcttccgcctgcatctatttcatgtctc

SEQ ID NO: 361112 - DNA, 122 bp, Homo sapiens
cataatgttgttatcatgagttaataaagtccttaaaaccaacctggcacttactgagtgcgcaagaggtatttgctgttgttgtcataattattgttagaaatagtagtaatagtaggaaa

SEQ ID NO: 361113 - DNA, 122 bp, Homo sapiens
tgccctggcaacagctctgtgcaggcaggatgaagcacaggcttaggtcaagcaatcagccgtcaaaatccacactctcacctgtgagtggctgttcaaccttgaacatgttactttttatg

SEQ ID NO: 361114 - DNA, 122 bp, Homo sapiens
gctccaagctcagcccgctgaaaggacctggagtttcccctttactgtaggaaaagttatcgacctgggttgttaatgcagtgtacctaatacagtatcattaacagacgtttggcatactg

SEQ ID NO: 361115 - DNA, 122 bp, Homo sapiens
ggggcggtggggagaggccgaggcttgaggtaggcagcaagcgccggctgggggtcgggccgagcggggcaggaggaaaacccgccgccgcgcgcgagcccgctccgctgccctcgggggca

SEQ ID NO: 361116 - DNA, 122 bp, Homo sapiens
tggaagctctctgctgggtagggtttcattttcattttgtgtttccttcctcttggagcccgtgcgggctggtggggcggctcactgtcagctccgtgatcccgcgcttggccgcgcgcctg

SEQ ID NO: 361117 - DNA, 122 bp, Homo sapiens
cctgtccttagggagcctggaatctcggagcagggcaggcgtgcaaacatcatcactgcacggagcagacaggcgagcagggcactaacaggagccaccccatgtgccttcctccgcaacca

SEQ ID NO: 361118 - DNA, 122 bp, Homo sapiens
cttcgcctatgctcccggctctttctctttcacttttcttttcgccaggggttgggactccgggtggcaggcgcccgggggaatcccagctgactcgctcactgccttcgaagtccggcgcc

SEQ ID NO: 361119 - DNA, 122 bp, Homo sapiens
actcccaacaatgtaattttgtaactgctgtcatctagataagaggctatttctctacgtcgagtctgggctggccttgtcacttactttggccaacagcatgtgctgcacacaacatgcta

SEQ ID NO: 361120 - DNA, 122 bp, Homo sapiens
gggttcccaacgccaggcccagggcagggcagccccactgcagatgctgtgtcctggcagcgccaacttcgcgaaggtcaaattgtcaccccctctcggcagcctgccggtgttgactttgc

SEQ ID NO: 361121 - DNA, 122 bp, Homo sapiens
caaaagaattaatattaccacaagaacattggaattaggaaaccactttggtaaagtcatcgaactttagaaatgaaaaaggaaaaacaaacttgaaatcaactgtttaacaaaagggacaa

SEQ ID NO: 361122 - DNA, 122 bp, Homo sapiens
acgccactgggctgtgcctggcagggagtctggagtttctggtttccaagctcaggaaggcgtgaaccaggggaggggcctccatgcagggggagggctagaagctggggcaggatctgtca

SEQ ID NO: 361123 - DNA, 122 bp, Homo sapiens
gcagaaagcgcccgggcgtgtccagataaaccgcgccttaatcgaggcgccattccggcccggaacaggccaggcccaggtgaggctcagagccagatgcgcccagcctaacccacctgggg

SEQ ID NO: 361124 - DNA, 122 bp, Homo sapiens
gcttcactcatgcaaactgctttattttccctacttgcagcgccaagtggccactggcatcgcagcttcctgtctgtttatatattgaaagttgcttttattgcaccattttcaatttggag

SEQ ID NO: 361125 - DNA, 122 bp, Homo sapiens
ggcgatggtgacaggaacggtaccccgcacggtaagggtcaggcaggaagggcctcccaccgcggcgtggctgccgccgttctaagaagagaccatgaaaaataaggaagaaggctagagaa

SEQ ID NO: 361126 - DNA, 122 bp, Homo sapiens
ccgtctgccgtcacccaaaacaatggggtcgctttgtctgctcgggcctctcaagatggccgagttgggtggagacagcgtctccctgggctgagagcgggcgaggccgcatccctgcctcc

SEQ ID NO: 361127 - DNA, 122 bp, Homo sapiens
gggaagcccggggcccaggctcatgcaacacgacgctcaccgcggctcgggccgtggggccgtcagagaaacctttttaaaaaatggagatgaatgttacagaattggacaacccgaactgc

SEQ ID NO: 361128 - DNA, 122 bp, Homo sapiens
cctgcactctcccaggaagccctaccatcctagttatccctggctggcaccacccacccgcgcttctctccaatacagccacagccctgcccaggtgggacagggcatcctgccgccacaga

SEQ ID NO: 361129 - DNA, 122 bp, Homo sapiens
ggccgagctttacccccattagcacagggcaggctgggggctgggtcctgaggccaccgccggtcccggccagctgcagcttttctggggagctatgagaaaggcaggcctggtggctccgg

SEQ ID NO: 361130 - DNA, 122 bp, Homo sapiens
agagcgcagggctaaaagaacgctcttaggccatttggagtccacggcggtgtacccaagcgccgcagctgcggctgccttggtgtgggttgcctaccgtgcgcacgtctcgggcggcgcgg

SEQ ID NO: 361131 - DNA, 122 bp, Homo sapiens
gacggcgatgggaggaggctgtcactttctgcctgttgctgaggacgcagctttctgtcccggaaggagggaggcagctttctgtcccggatggatactggaccctggcatgagctggatgt

SEQ ID NO: 361132 - DNA, 122 bp, Homo sapiens
caggctgcccagctctgagtcaccgccagggctgggctgggccgggccgtcagccgcacgcgccgcttgtctcggcccctgcctcccatactcaccttcaggggggacccctgggtatgggc

SEQ ID NO: 361133 - DNA, 122 bp, Homo sapiens
agtcccagcgggaacccgacttaaagggacagccgccctccagccagccaaggctgcaagcgggaaccgcagggagacagcacccgccccacccctgccccacgtctgcgcagcttcgtgct

SEQ ID NO: 361134 - DNA, 122 bp, Homo sapiens
aaggagccacgtttgagaaatgggatgcaggcctaagttaagaatgctacagaaaaatatcgatccctaagcgtatttactgttatgtgaatgtgtgtgtcaaaggacttaggtgctttggg

SEQ ID NO: 361135 - DNA, 122 bp, Homo sapiens
ggcggggcggccctggcgcggctagggtggggtggggcgtcccaggctctggctaaggagcgcgcggcgggcgggccggccgcagggcctgggcacgaccatggtgggacgtcgcccgcggc

SEQ ID NO: 361136 - DNA, 122 bp, Homo sapiens
cctatgctgaaaaaggaaatatattccgacaaaaactagacagaggcattcgcagaatcacgtttgtgatgtgtgaactcaactgtcagaattgaaccttggtttggacagagcacttttga

SEQ ID NO: 361137 - DNA, 122 bp, Homo sapiens
agcattggatccaagccatatattgaaatacaagcgtgattaatcagtaattcacattgccgatatgcatatgcaacttataatcaaatagaactagaagagactttgaagtcacctgactc

SEQ ID NO: 361138 - DNA, 122 bp, Homo sapiens
aaaacacatctgttgttttgctccttcaactctttttcctgattcttcctggggggaaaccgaaaacggtgagtaactggtggacacatcagaccccagactcttttcttcactgcatgcat

SEQ ID NO: 361139 - DNA, 122 bp, Homo sapiens
aaggaggagcgctaggtcggtgtacgaccgagattagggtgcgtgccagctccgggaggccgcggtgaggggccgggcccaagctgccgacccgagccgatcgtcagggtcgccagcgcctc

SEQ ID NO: 361140 - DNA, 122 bp, Homo sapiens
gctccacggggcccatccacgtggtgggattgggggctgccgccaggccctggccattgccgacctctgacctccacggctgccccatgtccgcagcggttctggccccagtgctgtcccat

SEQ ID NO: 361141 - DNA, 122 bp, Homo sapiens
gggatgtgaggagcccctctgcctggctgcccagtctggaaagtgaggagcgtctccacccggccgccatcccacctaggaagtgagtagcacctcttcctggccgccatcacatctaggaa

SEQ ID NO: 361142 - DNA, 122 bp, Homo sapiens
cccatcccccccccatcaagtttggtgggcagagctacagatgggacccaagggagtggccgagcctcactgcctaaaccaatgcccttctcatccctgtttccccaggctcctggctgttt

SEQ ID NO: 361143 - DNA, 122 bp, Homo sapiens
gccccctcttcttaggctcttttcaagcacatacccggcaacgtgtgctctacccaagagcgcttcacagatcttcctgtgggcctaaaaccagaacgctttgttccctgaccccggctctc

SEQ ID NO: 361144 - DNA, 122 bp, Homo sapiens
cagttgacgaggctgttggtacacagcccagcccggcaccactcaaaaagtctcagcagtcgttgcttttcaatttgctcccctaacgagaccgcataggtaaacagacctccctctaaccc

SEQ ID NO: 361145 - DNA, 122 bp, Homo sapiens
aaatgttaaataaaaatgtgttttgctatataaatgtcagatactgttattattctattacgaagggcccccaatgctacaagctattgtacaaaatttccaggccctaggcctctccatca

SEQ ID NO: 361146 - DNA, 122 bp, Homo sapiens
ccccgccgcgagttccgattggctccgcgtgagtggcggtctcctgcgaagtcacaagagcgcgccttccgtgacgtcacaagggcgcgtcttcgccgacaccatagaggtgggccttccgc

SEQ ID NO: 361147 - DNA, 122 bp, Homo sapiens
gctccacggcctccagtgtcctccccccgctgtacccctgcacataaagcccggccccggcggccactcagccacctgtctgtgctcagcagggcttctggggcttgagctgtcagtcactc

SEQ ID NO: 361148 - DNA, 122 bp, Homo sapiens
tttggttcagctgatatatactgattcttggatatgtgctagacactgtagagaagggaacgatgaatcagacatcaggctaccagcaaagagcttgtagtctagaaaggaagataaagcat

SEQ ID NO: 361149 - DNA, 122 bp, Homo sapiens
caggtgcggtgcattcagcagcacagccagagacagaccccaatgaccccgcctccctgtcggcagccagtgctctgcacagagccctgagcagcctctggacattagtcccagccccagca

SEQ ID NO: 361150 - DNA, 122 bp, Homo sapiens
cctcggcggctgcggggcccgccgcaaagagttaagagccggttcccgagacggcttcggcggctccgggtccccagaccccgctcgccgctcctgattggctgagcgcctgtcagtagtaa

SEQ ID NO: 361151 - DNA, 122 bp, Homo sapiens
ccctccagcaagggctctgcgggaagccccccgcctgcctctgagaggaatctagggggtcgtgattggaccctgggtctccccagctggagagaaagggacctctcatgtgttttccccgt

SEQ ID NO: 361152 - DNA, 122 bp, Homo sapiens
tctgcagcacccacagccagcgttcctgatgtgcagggtcagtcattacccagggtgttccggaccccacacagattcctacaggccctcatgatattttaaaacacagcatcctcaacctt

SEQ ID NO: 361153 - DNA, 122 bp, Homo sapiens
gccaacccggttggtgcagacttggggatcccagaagggacagtgcccgcccagtcgcggcgattgagggtccctgtccgggcgcagctcgggccagccgcgtgctccggggccgcggcttc

SEQ ID NO: 361154 - DNA, 122 bp, Homo sapiens
ttattagcccagacctgctgcaacctatccttctacagtttgcttcttggctgaatgcctcgttttcctcattactgaaatgaaaaagggtttacaaagctagctaatttgagctaattagg

SEQ ID NO: 361155 - DNA, 122 bp, Homo sapiens
ccgcagtctctgaacctgtgtgacgcctgcagggctgggacctgacggtgaagatgctggcgggcaacgaattccaggtgtccctgagcagctccatgtcggtgtcagagctgaaggcgcag

SEQ ID NO: 361156 - DNA, 122 bp, Homo sapiens
atacgcccggagaagagcgccggagccccctgctggccggacgcggcaggcgcggcggcccgctcggtcccctccgccccgcgggctctgcccagcccggacccgcctccaccctccagtgc

SEQ ID NO: 361157 - DNA, 122 bp, Homo sapiens
gaggagcgtctctgcacggctgccccgtctgagaagtgaggagcccctccgcccggcagccgccctgtctgaaaagtgaggcgcccctccgcctggcagccaccccgtctgggaagtgagga

SEQ ID NO: 361158 - DNA, 122 bp, Homo sapiens
cggctgcagacgggatattgcacacagcaattccgagctcgctggcagccttgatgtccacgttatcgtagccactgcctatctgcacgatcactctcggggccttaaacttttctaggtcc

SEQ ID NO: 361159 - DNA, 122 bp, Homo sapiens
agaattctaatctatacagaattcctcagatataattacaatttcaacgcgttccatgaacgcttatcagcgcacataatggtgtagacaaagaggttctatacaaagccattcaccgtgca

SEQ ID NO: 361160 - DNA, 122 bp, Homo sapiens
ccagaatgaggaagccgggatagtatagttgtgtgaattccaaactgtcctgaggtgccccggagtgccacagcaaagtcacaaggctggcatgggatattttaaaactttgaggaaacaca

SEQ ID NO: 361161 - DNA, 122 bp, Homo sapiens
tgaagacctgtgtgaccgcggtaagtcatgtaaatatgaaccgttccccaatttgtaaaacgtattcttttcatgtccccaaactggtaggagcgaagagtgtcggggcgttattggagccg

SEQ ID NO: 361162 - DNA, 122 bp, Homo sapiens
tgggctcaccgggtaattaaatgatgttattgtgttaactttgcatgcattactgctgcccgcgccgcccgtgggccgccggccggccgcagctcgctggcgacgagggcactacagttgct

SEQ ID NO: 361163 - DNA, 122 bp, Homo sapiens
gcttggcaatttcctcttctctcttaagatctttctccttttcctcaatagtctcaatgtcgtgcttttttatttggtccttttccttatgttttttagacttctttttggactttttgtga

SEQ ID NO: 361164 - DNA, 122 bp, Homo sapiens
ttggcagcttcttacagtttattttcacttccaatgtagcaataaaataataaatataatcgttgttgtctgactctgtggttcattctggtggtattctaaggaatgaaaagtacacaaag

SEQ ID NO: 361165 - DNA, 122 bp, Homo sapiens
attagtggcttcttggtgccgttcccagttctctgatttgagcaagatgagtcaggagcccgagggtgctcggtgagtacgtggtgactgattgttactttacacttaagcctgaggaaacc

SEQ ID NO: 361166 - DNA, 122 bp, Homo sapiens
cggccccgcctccacgctcggcctggccccaagctcttccttcctggggcaccctgcctccgcactccgccctggtcccgagccccgccccgcctccacagtcccgagcccgcctccaaccc

SEQ ID NO: 361167 - DNA, 122 bp, Homo sapiens
tggggcggggccgctttcacacggagtccagcgaagccacgctatgggcgggaatgaactcgaatttcacacgggcaaagagggtgggaaactggcccctattctgcccccatcccgaccac

SEQ ID NO: 361168 - DNA, 122 bp, Homo sapiens
gttctttcccctgaggggttgttcatgaggacctccgcctgctcttggagacccacctgccgtccaaaaagaagaaagtactcttgggagttggggatcccaagattggtgccgcaatacag

SEQ ID NO: 361169 - DNA, 122 bp, Homo sapiens
tcggatcgcactttcgcctcctaggctggggaagatggtgcacatgcgttgtaatgcgcacgtgttactggcacatgactcccggtcccttgtgagccgaaacttggatcctaatgacgttg

SEQ ID NO: 361170 - DNA, 122 bp, Homo sapiens
gtgactatccacaaaccaaccggagaaacctcagcttcctccgcacccccgaggagcctgcggatttaaaatgaagcccgcaaacctcacagaaggtgtcaggcaaagacgaagctcgcccg

SEQ ID NO: 361171 - DNA, 122 bp, Homo sapiens
gccttgagcgggactgtggttgcgagggagggacgagaaaacacgcctacgccctgcgtgcgctgtgctgactacctctccagcatggaggcttccagatgagcagacacccgaatcccagc

SEQ ID NO: 361172 - DNA, 122 bp, Homo sapiens
gtgtgctagtaagcgtctccttggactgtggttctttttgtaccagttggtagtagctttcgtaccagttcgttgatacttttgtcacctggattgctgactttcgctggtttccagtgctg

SEQ ID NO: 361173 - DNA, 122 bp, Homo sapiens
ggccctgagccagagtccgtcatcggttactccggagaagattgtgagtagtctcctccccgtccccccatcaggacccttgtggctaggtcgcacgaggccacgctcacaggccaggaacc

SEQ ID NO: 361174 - DNA, 122 bp, Homo sapiens
aggtgggtgggtaggggaggtggaccggggtcttcttccgcagggctgccctgctagcaccgctgtctggagagtgtgtaccctggcaccctcccaggcgcctgctccatccacccgtgcac

SEQ ID NO: 361175 - DNA, 122 bp, Homo sapiens
aggccagacccctgcaacagccatcccgagcaaggctcaagcctccctgagagtccagggcgccaagtcagccctgcacctggcccgggcctcggaccccgacggggctcacccacctgaga

SEQ ID NO: 361176 - DNA, 122 bp, Homo sapiens
tttccctgtgagaagatggaggtggacacctggacactcagactgaatcagcacataccccgaaagatgatccatcaagacagggctgaagctacttgagaaccccaatactaagaaagcca

SEQ ID NO: 361177 - DNA, 122 bp, Homo sapiens
caaccgccgccacggccgccgccgccgccgccagccccccctaccaccctccacccctcgcgcgtgcgcctcccacaatcccccccgcgggactgttccattcctgtcggctgcaggggcag

SEQ ID NO: 361178 - DNA, 122 bp, Homo sapiens
agggaccaggccgggcctgtgctgcaggagggcacaggcgaggtgggaagggaagtgacacgggtgggcggaaggcatcccggtccctgaaagtagggacccacctctctttcgagagagtg

SEQ ID NO: 361179 - DNA, 122 bp, Homo sapiens
gctctcgccggcggtgttggaacgtggacacgtgcgctttggtaatagggcagcctcccccgcgggcgcagtccccgctgcgagcgcccccggctgctgaggcgggaccgaggacccggaga

SEQ ID NO: 361180 - DNA, 122 bp, Homo sapiens
acctttgacagccgttccacggaggctgtgccaaccaggggaggaccctgtaccagcccccggcgccatgctcaggccccactgccatcggccccgccctcccacggagttgtcagcacatt

SEQ ID NO: 361181 - DNA, 122 bp, Homo sapiens
ggtgatgttcaagaagatcaagtcttttgaggtggtctttaacgaccctgaaaaggtgtacggcagtggcgagaaggtggctggccgggtgatagtggaggtgtgtgaagttactcgtgtca

SEQ ID NO: 361182 - DNA, 122 bp, Homo sapiens
cggggctgtgctatgacatctttacagtccttcttgcagagacatgtgtgccagggatgccgaattgccgggagagcaggcaagaccggcttcggggcgcgcggcggccgctttgtgtgcgg

SEQ ID NO: 361183 - DNA, 122 bp, Homo sapiens
agtaccacacacaggtacagcctgccgtgctgcacacacacaggcattgcccacagggaccgcacacagtaccaaacacaggtactgcacacaggtaccaaactcagtatcgaacacagtac

SEQ ID NO: 361184 - DNA, 122 bp, Homo sapiens
aaactccttgggcagctagtggttagcaccagctagcacagcactcccccaccaccgccccgccacgccccgaccggccccaacagcacatcaacttcatcccaggtccatgttctgctgta

SEQ ID NO: 361185 - DNA, 122 bp, Homo sapiens
gtcaaggctgcaatgagctgtgattgcaacattgcactccggccaaggcaaaaaacagaccgtctaaaaaataaataaataaatatcataatagttttgctgtcatacttcatattgcaaaa

SEQ ID NO: 361186 - DNA, 122 bp, Homo sapiens
ccccaccagggggtcaccacccacccatgttaggaaaacaggccaggcaggacctggctccggacagcctgcagctgctgaggccttggagaccgggctaggggctatgggaggccatctag

SEQ ID NO: 361187 - DNA, 122 bp, Homo sapiens
tctaaatgtaaaggcagaacaccctgagtcaatcttttcttcccagaaagcctgtaacatcgacttgacttttatttacacttcttggccttagagatattttggtcatttagtagcattgt

SEQ ID NO: 361188 - DNA, 122 bp, Homo sapiens
agggtctatgtggccaatgcggtccccattccgatctccaaaatcccccgcgcccgtgcgcgtggacttaccaccatgaagagttgacctcgggggtgagccaggtcaagagcagagggagc

SEQ ID NO: 361189 - DNA, 122 bp, Homo sapiens
agtgctgaaaagaagtctcctgaggttgagagcacctttagcctattacctgtaggaggtcggtcagctctctcagggaggaaaggcaataatggggttaaaggattattctttgcagggat

SEQ ID NO: 361190 - DNA, 122 bp, Homo sapiens
tggaaaacgcctggattttcatggcagcttctgcattcagtcggctgtgatatcacatcacgtggccccagccccaaccccaagcccaaccccagccctaaccctaactccactgtccgctc

SEQ ID NO: 361191 - DNA, 122 bp, Homo sapiens
tcccaccttgcctagggctggggactgcctcgcaggaccttaaccctagcaacccacctccgtccccatggcaaccggggcggggcccgacccggatccgccggtcgccccatccggcagcg

SEQ ID NO: 361192 - DNA, 122 bp, Homo sapiens
tgatctgctcccgaaggtactccatgtcctcctccagcttcaactgtgggacacacaaaccgcaggatttgggatcagcgatccccctacctcctgcctagagtccagttgtgctcgctgaa

SEQ ID NO: 361193 - DNA, 122 bp, Homo sapiens
gttaggttctacagatgcgttttggagtagtagactgatttattagctagttcaacaagtcgcttaacccttgtgtgctgaaaaatgtgctgattataggctaactagggacagttgaggaa

SEQ ID NO: 361194 - DNA, 122 bp, Homo sapiens
ggaaaccagagggagtcagcaaactccagtgccaggactcgggtctcggacctcagaccacgcccctgcggctacgcaccccgaccgctgtgccccattgggcggcacggacgcctgggaca

SEQ ID NO: 361195 - DNA, 122 bp, Homo sapiens
gtgcccattccttctagtttccacattatctaaatccataaactctctaccttccttacccgtttataacatttatagactcaacttggacttttcttatttagatatgaaaatgtgcttgt

SEQ ID NO: 361196 - DNA, 122 bp, Homo sapiens
atgagcttatgcacagtgatgcaggtgggagggagctagaatgtggttcaatggggcacacggaggaggtaggggataccagcgggcagatcattaatcccctcacacaaacatatgcaccc

SEQ ID NO: 361197 - DNA, 122 bp, Homo sapiens
ttgtaatacacggagggaattcaggggagggtagagacgatgaactcaagctggaaaggccgcctgaaccagcaggagccatttgggaaataaaactcacaaatgaataggaaaagctttct

SEQ ID NO: 361198 - DNA, 122 bp, Homo sapiens
gacagagtgagaccctgtctccacaacaaaagggtcccctatcacacctgagcctgaaagcgcctcaggacctggggtttgttctttcaggggcaccctcctgtgaggccagagatcaccat

SEQ ID NO: 361199 - DNA, 122 bp, Homo sapiens
gggcaacacagcgagacctcgactcaaaaaacaaaaatagaaacaaacaactagcttaggcgcagaactgagactcaaacctaggtttcctgctcaacccccacacctcccaggcccccgct

SEQ ID NO: 361200 - DNA, 122 bp, Homo sapiens
tgatcccattcaccttgtggttgtggctctcctttacctcccataaaggaccagccctgtcgagaaccaccttcctccccactgtgcttcttcatgatttcctgcctccgctctttccttct

SEQ ID NO: 361201 - DNA, 122 bp, Homo sapiens
gcccaccctcccctcaaatcacctccacactcgcgcatgcgtgtcagtgcaggatggattcgtcgctaccggagtgccgccatattggtaaaggcattagggcgaaggtggaacggaacttc

SEQ ID NO: 361202 - DNA, 122 bp, Homo sapiens
gggcccttcctctcatctggaccctttgttccttaagtctctgctcaaacaccacttcatcgggaccaccctacagaaaacagtatccactcccctatgactctctgtaccctttacctggc

SEQ ID NO: 361203 - DNA, 122 bp, Homo sapiens
catcagacctggggcagacaggctgcttgtctgattattgctcactcggttaaggtgacccggggggtttctccgtcctggcgacacctccctgtgcactggaaggtgacctgtgggtgaca

SEQ ID NO: 361204 - DNA, 122 bp, Homo sapiens
ggtggggccagctggctgctccgagcgcagggtccgctgagcccacgcccacctggaactcgcactggcctgcaagcaccgtgcgcagccccggttcccgcccatgcctctccctccacacc

SEQ ID NO: 361205 - DNA, 122 bp, Homo sapiens
tagcacagtattgagacctgaatgctagttagcatcttttcccgccagctcctgccacatcggggaaccaacaccctttcctcccatatcagtagctcccagtggctcccagtttccccctt

SEQ ID NO: 361206 - DNA, 122 bp, Homo sapiens
agcagaaattataaggctgtgcagcttgaatactgagaacagaaatttcattaggtagcacgggggaatagacaagagaagattaaaatttacctaacaagaaataagaaggcaaaagaaaa

SEQ ID NO: 361207 - DNA, 122 bp, Homo sapiens
actttgctgctagttttggtttgcagcatgccgcaggtgtagtctcggtggtgacggagacggtagcactatgtcggaggaggagttcagctgggacagggcggcggcagcagcaaccgcgg

SEQ ID NO: 361208 - DNA, 122 bp, Homo sapiens
tctttgcgaaatgccactagacatgtgaggtttcccttgactacgctgctcaaagttgaacgtgctcttgcaattcgaacacctttctttgacttgcttttctctgaagcgtttatcctctt

SEQ ID NO: 361209 - DNA, 122 bp, Homo sapiens
cctgtctcccctcgccgcatccactctccggccggccgcctgcccgccgcctcctccgtgcgcccgccagcctcgcccgcgccgtcaccatgagccaggcctactcgtccagccagcgcgtg

SEQ ID NO: 361210 - DNA, 122 bp, Homo sapiens
gcggtactgggtggaagtggcagagcatgaggccaggtaggaccagcactggggcaccttcgtcctcaagtggggctctcagcagccgcagaacagcaggtagggccagaatagcgtctcct

SEQ ID NO: 361211 - DNA, 122 bp, Homo sapiens
gcgtcggggccgcaggtggataacacgggtggggagccggcctgggactccccgctgcggcgcgtcttggccgagctgaaccgcatccccagcagccggcggcgagcggcccgcctctttga

SEQ ID NO: 361212 - DNA, 122 bp, Homo sapiens
aaggaagcacagggccgagctgtgtgcaggccccaagcctctcaggtagggccggtgcaacgcgggtccgcagccatcacagctcagctccaccgtcgctcagctgcttggtgtgaggggaa

SEQ ID NO: 361213 - DNA, 122 bp, Homo sapiens
cccatgcgcgctccagcgtcctgaccaggggaacgttttccttagggacccggaggcgagcgctggagggagggatggttgctaacgcaactctctgcagggcagacccaccagcacccgca

SEQ ID NO: 361214 - DNA, 122 bp, Homo sapiens
cttgcagggagttcccagcaatgggcatcccctcgggcatcactgggtgaccagtctgagcgacgggggcccatggtcctccacactggccaccagccccctggaccagcaggacgtgaagc

SEQ ID NO: 361215 - DNA, 122 bp, Homo sapiens
ggggacaggacaaggcccagcaggcaggctggcgggggttccggcgacagagggggacagcgggcgagcacgacaagagcacaggcccacgtgcgcaccggcggggaggaagtagcccggcg

SEQ ID NO: 361216 - DNA, 122 bp, Homo sapiens
atctgttccgtgaattgtgtcggccctcagcatggggctggggcagcgtcactgcggtgacgcccattgaaaggtatgaaatgactgcacactagctggattatcactcagccgtttaagaa

SEQ ID NO: 361217 - DNA, 122 bp, Homo sapiens
ctgtcctgggctctgcaggccaaactcctcccctggtatggggggaggcgagcagctgcccggaaccttccagtccttgttgctggagccagtagagcctgggcagtgggtgggaagaaggg

SEQ ID NO: 361218 - DNA, 122 bp, Homo sapiens
agaacggcagctcccaggcttccactggggagtccctccggctttctccgggattccgcccgccccagggtctcagaccaacagaaggacccgggatccctcagcagctccggacctcatct

SEQ ID NO: 361219 - DNA, 122 bp, Homo sapiens
agcgtctggcaccgccttgcgcagccgcagcctgagccggccgcgcccgggtcgcgcacgcgccctgacggagtcccagcaagcgcgggcccgtcttcctcgcgtctcctcggggagcgtcg

SEQ ID NO: 361220 - DNA, 122 bp, Homo sapiens
aggtgggaaatgcagctgcaagaagcaaacatttgtgggctcagcctgtgtgtccagttgcgttctaggggctggacacacagcagtagcaaagcagacgctgtttcccccttcataggctt

SEQ ID NO: 361221 - DNA, 122 bp, Homo sapiens
ctttgacctacttctcacttggtgttctctgtccagtttcactctcgtgtttagagtcagcgcctccatctccactcacagcacctgcttgctgcacagcctgcgtggtcctcgggaacact

SEQ ID NO: 361222 - DNA, 122 bp, Homo sapiens
ctgggggaggagggggttggtcctttttacaaatgctgcaccgtggtgagtgcatacatacgtactgtgcttacagtcttacagttctagcagtctttcgggggataccgccaatggccctg

SEQ ID NO: 361223 - DNA, 122 bp, Homo sapiens
attattgtcaaacatatagaagaccttcgtaattccctgagttaatctgtgtgattcattcgtcacaaattcctgcacctattgtaaccaaagctttcagtcacatcctctgcctcttttaa

SEQ ID NO: 361224 - DNA, 122 bp, Homo sapiens
gggcgccggctgctttcccagttgagccgcttcccgcctggggacctgggtggcgccgggcggagacccctctgcaccccagcgccccgcactccgcggagttgaatgcgcgtaacaatccg

SEQ ID NO: 361225 - DNA, 122 bp, Homo sapiens
tagaaaaatgccacactttgagacgaattaatagtcctttattagccggcgaccgagagacggctaacgctcaaaattctctcggccccgaggaaggaaggggcttgattaacttttatacc

SEQ ID NO: 361226 - DNA, 122 bp, Homo sapiens
caccagcccattcctggggagccacccctgtccctcagaggccacgggggctcgtgtttgcgagtgtggactttccagttagacagacttggttcagcaccgcctccgccacaccctcgcct

SEQ ID NO: 361227 - DNA, 122 bp, Homo sapiens
agattaagcacctctcccatctttgcccaccagtgtacagtagagaaaacacatgaaaaacgctaaacagctttcctaaggctataaactaatcagtggcaaaaccaaaactcaggtctctc

SEQ ID NO: 361228 - DNA, 122 bp, Homo sapiens
gccggggattgggcggtgagtaggtgtgcccgccctggctctgctggcactgacagccgacgccgtcgcccacgcccccctgcgcccacttccccgcctccgctctcccgcgggggcggctt

SEQ ID NO: 361229 - DNA, 122 bp, Homo sapiens
tccatggcctctccaaaactagaccatgatggtcagcctgacctgagagcagcacctgcacgcagagacccatgttgaaggtggtgagctgccagctaccagatggccctctgaaaccccag

SEQ ID NO: 361230 - DNA, 122 bp, Homo sapiens
cggacaatgagcgaaatgtagacaaatgtcccgctcccgttggaagcctttgtcccggctcggtttttgcatttatttcagtggcgaaataatacatgattgacgctctctttcaatgtgtc

SEQ ID NO: 361231 - DNA, 122 bp, Homo sapiens
aagaagccctcaccgagagctgtgggaacaagagctgccgggaacaagagctgcgggaagcggctcctacgaattggtggcaggaggcacaaaaacgaaatacctatttttggaatacggaa

SEQ ID NO: 361232 - DNA, 122 bp, Homo sapiens
catcccgctggagaagctggcccaggcaccagagcagccgggccaggagaagcgtgagcacgcctctcgggacggcccggggcgggtgaacgagctcgggcgcccggcgagggacgagggcg

SEQ ID NO: 361233 - DNA, 122 bp, Homo sapiens
tgacctcaatacatgcattccttggaaagctgaacaaaatgagtgaaaactctataccgtcgtcctcgtcaaactgaggtccagcacgtggctccaactggagctggagagagagagacaac

SEQ ID NO: 361234 - DNA, 122 bp, Homo sapiens
ccttattcatccatccagtcagtcacgccacccaatagctgttgctcaatacttattacacgaatgaaatctaaggcccaccacatgatcctctgggtgtctctcctggaatcctcactata

SEQ ID NO: 361235 - DNA, 122 bp, Homo sapiens
ccgagtgaatcatggccgggcgggtggaggccggagaggctccaacccggtcaaacgctacgcaccaggcctcccgtgtgacgtgtacacatatctccatgagaaatacttagattgtcaag

SEQ ID NO: 361236 - DNA, 122 bp, Homo sapiens
aaagtgctgggattacaggcatgagccaccgcgcccggcaatggggctatataactgttacgtcaacagcatacagtggaagtgatgctacctgactactgagcccaggcaggaagtggcat

SEQ ID NO: 361237 - DNA, 122 bp, Homo sapiens
tcccagaacgggtggcatttaggtcaattaatatgcaaaacaggagtaaatcatctcattcgcgggccccacgcggggcggggagccgaggcatttgctaggcagcgaggtcgcggcccccg

SEQ ID NO: 361238 - DNA, 122 bp, Homo sapiens
tgggcggaaccagctgccgcagcgactccgcaagcccctcacacctcaacccaggtttcccgccaccaagaaaaggcacgaggacgccctgagcactagctccacccgagggcggtgcgctc

SEQ ID NO: 361239 - DNA, 122 bp, Homo sapiens
gcctcaaacaaactagtagtaagatttccctcctgctgtggtgcagaagcaggaatgaagcgcgaaagcaggaatgaggcacggaagcaggaatgaggcgcggaagcaggaatgaggcgcgg

SEQ ID NO: 361240 - DNA, 122 bp, Homo sapiens
attagccgggcgcggtggctcatgcctgtaaatcctagcattttgggaggctgaggcgggcggattacaaagtcaggagtttgagaaattactacctattaccccatttggctatttttaca

SEQ ID NO: 361241 - DNA, 122 bp, Homo sapiens
agaataaattaaaaggagaaatcaaaacagaacaagaaaagccagagaacataaggataccgatagaaaaaatgcgatcagggaaataagagagaatttaaaaacaaaaggaaaaagtgggg

SEQ ID NO: 361242 - DNA, 122 bp, Homo sapiens
gtggtgcgcagcctcagagggaggagctgggccgtgtggacctctctgcttccaaacctacgctggcccctcagtctgtgccaccctggctaaggggattgagtccggagagggacttgagg

SEQ ID NO: 361243 - DNA, 122 bp, Homo sapiens
gaaatgaaaggctcactgctggtggcccggtgcagcctcaaagctcctctgaaaatgcagcggggtgatgctttgcaattcagacggggtagcctttgcagcaccaacatgtctaaatgcca

SEQ ID NO: 361244 - DNA, 122 bp, Homo sapiens
ggctcaacttaggcctcagctcagccatgaaagctgttcaccttgtatcccaggaagggccgggtcatcccagcttaggcctggccagcctggctcagcccccagtgcccagatccttcctg

SEQ ID NO: 361245 - DNA, 122 bp, Homo sapiens
ctcccctcccccagtacattctggggctaaaccctaagaggtacccatgcatcgctgggccgatgatgaaaatgaagaagtcttctgatgaagcgagaccccggaagtgcagcttcaggcaa

SEQ ID NO: 361246 - DNA, 122 bp, Homo sapiens
cctctctcacggcggtctgttccgggtcccgctcctgcacgagcaaccagcgcgacagctcgtccccgccccgtaatctcccggctattcggggcccttcgccgagatttctcccggaccag

SEQ ID NO: 361247 - DNA, 122 bp, Homo sapiens
gagaaaggcaaaagtatggtataaatgacaaacaaggctcaggtctaatgaaaagaaatacggttacagcccatatgttagagaagaggcaagttatgaaaaaataggacagctcagctaat

SEQ ID NO: 361248 - DNA, 122 bp, Homo sapiens
ggagcttgtcccggatcaagcccagcaggcgccggccggctgagcctagtgagggagccccgtgagcccgtgccagcccggaacccgcaccagcctgcaagcgccacgctcagccccggctg

SEQ ID NO: 361249 - DNA, 122 bp, Homo sapiens
gccgaggaatggaataacaggcgtcctgtccgcagccccgcggagggggcgctggcctgccggttagtattgaggtgccctaggctttggatagacgttggagaatggctgtccctcggact

SEQ ID NO: 361250 - DNA, 122 bp, Homo sapiens
tgcgcctggcacacagcaggcacttaatcagtatttatggagtgatgaaatccatatcatcgtccacttcttctcagtgggactttcggcctcgaagggcttcctggaggagttgccagttt

SEQ ID NO: 361251 - DNA, 122 bp, Homo sapiens
ttggggacgctgactgcagacgcggacgagcagggcgggcgcgggaggcagggttcaggccgccgcggggctcccccagcctctgggcccgtcctggggggcgtggaaggcgcagacagccc

SEQ ID NO: 361252 - DNA, 122 bp, Homo sapiens
actgtacctctgcctccttccccagcactccccctgagcaccctccaagttcctttctctcgttctccatggcttcacaaatgtgatttcctcagggaagccttcatcctttgccccttcca

SEQ ID NO: 361253 - DNA, 122 bp, Homo sapiens
tatttcttcaagtggatcttctgagtcttcgcagaacatcttagggctagagtaacctgacgcacagagggtggccaactgaacaatgcatccttttgttaactttttctgctaacctatct

SEQ ID NO: 361254 - DNA, 122 bp, Homo sapiens
tatttacaaaagctttcatggttcttaaaagtgtttagtattcaccaattttactgttagcgtttctaatgaggattttctaaaactgaggcatggatttgaaaaagtgttctgatcaatca

SEQ ID NO: 361255 - DNA, 122 bp, Homo sapiens
acttaagacctagacctggaaggggcaacattatggcatcatggctgccctgactccattcgtccaaaggcagtcatgtggtcccagcaagggaggctgggaaatgtagtctagctcatgct

SEQ ID NO: 361256 - DNA, 122 bp, Homo sapiens
cctcccgagactccggtgtcccgtctccgtcctcagcttcccaagactccggtgtccagtcgccgcccagagcctcccaagactcgggtgtccagtctccgcccagagcctcccaagactcg

SEQ ID NO: 361257 - DNA, 122 bp, Homo sapiens
ccagccaaggctctgaacctgctcagtctgttgaaaaaggagattacgcacatagaaaggcgttgaagtgcacggacaccacgctgagacgttcttgttggcctaatcaggaggaacgacta

SEQ ID NO: 361258 - DNA, 122 bp, Homo sapiens
ggagcggaggaggtctgaggtctccaaaatgggctttccagggatggggccaagtggatgcggtggaaggagtgagaggaccagaaggtcccgcacacgccagggcagccctggacttcacc

SEQ ID NO: 361259 - DNA, 122 bp, Homo sapiens
gagggcggagccttgatcattggcccctccctgtaggaaggcaactggggccagaaaggccggagcgctcactccgggatcagtggagctgggtggactcgggactcagctgaaagcagcta

SEQ ID NO: 361260 - DNA, 122 bp, Homo sapiens
caattcccttctcagtggaccctctccattgcctccagagcacagcttccagtccccaggcggctgcacacatttgcaacaaaacaagccaatgtatgaagcaatcccactcagtgcaggag

SEQ ID NO: 361261 - DNA, 122 bp, Homo sapiens
cagctaatttgctcttactcctattttatctatacactttttgatttcctgccactagatcgttgttcatattaatcacctttcttggaatgcatccaaacctcccctaaagaagtgctatt

SEQ ID NO: 361262 - DNA, 122 bp, Homo sapiens
ggcgagacagtgctgggaaaagagcctgagggtctcatgagaatacaaagttgctcagttcgtagcttgctgcagctcccgtggtacatcggtgagtgccccagataacaagcccaacactg

SEQ ID NO: 361263 - DNA, 122 bp, Homo sapiens
gccagcgcgtcctcattctgcgattactgtcaggggaccatccatcagcgccgcccgggacgctgggccagactgcccgccgcccgcccgggtctctccagatcgcattagcgtggggcgag

SEQ ID NO: 361264 - DNA, 122 bp, Homo sapiens
cttgcccatcctgtctgtcactggtagggaatcaaatcacagaagctgaacaaccagaaccgagtcttctaagaggcccagcttggcttcttgttctgtgcagatgagtagaaggtggtaaa

SEQ ID NO: 361265 - DNA, 122 bp, Homo sapiens
gcggcgggccgggcacggggagtgcgggacctggctacgcctcggggcgctattggcaatcggtgccgggggcggggcaggagaggcggagcctgggaaatgtggagcggggcggggctcgg

SEQ ID NO: 361266 - DNA, 122 bp, Homo sapiens
aactttcacacctatttcacctctgccccatgaaatgttattgatggaggcaggaaaaaccgttgaacccccggactaattggcaatttcccaaaagtatttgtaggaagagtactttttgt

SEQ ID NO: 361267 - DNA, 122 bp, Homo sapiens
ttgcactgggaaaaccaatgtgttccctggttacccaaaaagtactctggtggagctatgcgtccagactgggctgtgaggctgctctatgcacccgctcctacagggtggctgggcatggg

SEQ ID NO: 361268 - DNA, 122 bp, Homo sapiens
ttgttccggaggataggagagcgtgggcctgcgtggcccacctcatccgtggcctgactgcgttaacctctcggttccctgctcttgccacgtgaggtgcccaaatatggtcggactcagga

SEQ ID NO: 361269 - DNA, 122 bp, Homo sapiens
ctcttttgttagttttattccggtcatgccaatgagcacagattcacagcccaggcggcccgctcggaatcccaggccggctggggaccggtgcacttgggctccgcgccccctcgaccctc

SEQ ID NO: 361270 - DNA, 122 bp, Homo sapiens
cgttcctcccccgccccgagatatgcgcaatagagcatgacggagcgcaaggcgggaagccgcgacagacgtgtgtgcgtgcgtgcgtgcgtgcgtgatgcgcgaggcgtggcttgctggtg

SEQ ID NO: 361271 - DNA, 122 bp, Homo sapiens
caggcccagaaagaagaaaacccgaagaaacacagaagccatccttacaagcacagcttccgcgctcgaggttccgccagttactccccgccacgaaagcggagcagccaggacaagtacga

SEQ ID NO: 361272 - DNA, 122 bp, Homo sapiens
cgccgggacacggccgtgttggtggagcgcgaacgggaccgcgactcccgccgccggttccgtttactttcccgagatttggaacgcttccgcacgcgctccttgtcccgggatcgcgaccg

SEQ ID NO: 361273 - DNA, 122 bp, Homo sapiens
ccataaccaagacacaccagaatagttccaccagctatgcaggatgtgcctggctgattccgtgttttggggggcatatttttgtgagaggagtgactcaaattttttctgttcctctttct

SEQ ID NO: 361274 - DNA, 122 bp, Homo sapiens
gattgccccaaacagcccaggacacaggacaaaccctggtctgtccacacacgggaacaccgctcagcatcacaagggagaaggcgcggacgccacacccacagttcaggaaagcaaaagca

SEQ ID NO: 361275 - DNA, 122 bp, Homo sapiens
cgacccccagcctagggcaggtccagagtccttcctctgaccctctccctcgaggcagcgcgcttcttcgagcgcagcactggcttgccagacgcagctcgagtgtcgcatggagctcgcct

SEQ ID NO: 361276 - DNA, 122 bp, Homo sapiens
ctcctcacatcccagacagggtggccgggcagagtcgctccccacatcccagatgatgggcggccaggcagagacgcttctcacttcctagacgggatgacggccgggaagaggcgctcctc

SEQ ID NO: 361277 - DNA, 122 bp, Homo sapiens
gggagaggagagtgaggaagagggaggagtccaggacaactcagactttccagatgactgcgtggctggtggtattaggagcacatttagttgttggactacagataatgtgtttaatttta

SEQ ID NO: 361278 - DNA, 122 bp, Homo sapiens
tgacttcgtgatccacccgtctcggcctcccaaagtgctgggattacaggcgtgagccaccgcgcccggtcggctagcctggtactcttaacctcaggtgatccaccagcctcagcctccca

SEQ ID NO: 361279 - DNA, 122 bp, Homo sapiens
agagcactcttccggcgtcgcccaggagatcaggggtgtggcgggcctgcgcgatcaatccgcaagctccctgtgatgcagaatgggaaggcagttcccggcccaagtgcccaacgtgttct

SEQ ID NO: 361280 - DNA, 122 bp, Homo sapiens
tacattcccacctttacagtatttcacagggtcccctgggcccgggggtcatggccagaacgcagagactttatgatgaggacggtgcccacgatgatgccgactaggcccagcaccaggcc

SEQ ID NO: 361281 - DNA, 122 bp, Homo sapiens
aattctgtcctcagaatacaccctgcatctgttcccatcttctgagctaaaaccctcttccgagccaccaccacctcctgcttgcaggactgcagccatcgtcagggcctccctgctgccct

SEQ ID NO: 361282 - DNA, 122 bp, Homo sapiens
ttatggtctcactcagggctaaagaaagcaacagttgccaccacaatcaggagggagtgacggttggggtgttgtattataatccagcagtgggccagtgggtagaactgctaggaacctag

SEQ ID NO: 361283 - DNA, 122 bp, Homo sapiens
ggtcattgttaaagcctggagagagatttattggggagaatccacattgaccatcagcctcgcaccttactgggccttcaggaagttcaggcttttgtggcaggaggactacacgtccagtg

SEQ ID NO: 361284 - DNA, 122 bp, Homo sapiens
gccatttccaaagcaccaagccaatgtgcagttgagaactgtggaagctgggttggctggcgttctctcaggctgtattaactaccacttctgcatgtctaaaaattaaggagaactgacat

SEQ ID NO: 361285 - DNA, 122 bp, Homo sapiens
cggcctccgctgcctcgccccggagcccggaggaggggagccggccacccggggaagaagcggaggacgccgatctggcctcctgcgttgcgcgctccaaccctctgcttggccgcccgcga

SEQ ID NO: 361286 - DNA, 122 bp, Homo sapiens
tggtggtgggcgcgccgtgctgagctctggctgtcagtgtgttcgcccgcgtcccctccgcgctctccgcttgtggataactagctgctggttgatcgcactatgactctggaagaagtccg

SEQ ID NO: 361287 - DNA, 122 bp, Homo sapiens
tctcctctctcaggaaggctgctccacttccctgaccctccccaagagaagcccaaagtgcggggccaacccagacagtcccacttaccaggtcttctgaaagacagctgacaagagacatg

SEQ ID NO: 361288 - DNA, 122 bp, Homo sapiens
gatttagatgtgttgagtttgaggtgtctatgaggaattcagctgtagatattcattaggcgatacttgatagaagtatggatcttgctggagagttctgaggtagatagagatacagattt

SEQ ID NO: 361289 - DNA, 122 bp, Homo sapiens
accaggctgtggcgttcaagcccaccagcgggggccgggcggacacgggccccccagatccggtgctctcagatgagtctcgaggtttgacccgcttggacttcaattttctgttctttcct

SEQ ID NO: 361290 - DNA, 122 bp, Homo sapiens
aaaaaaagaattaaaaatacttaattatcacttaacattgttatccgtacaaaattaaaacgtaataaccatgccttcttaaaaacacacaatacaaacttctctacactaccaactttgct

SEQ ID NO: 361291 - DNA, 122 bp, Homo sapiens
cttcatctgtaaaaacaacgcagcgaatgccacagtacagctccttccagctctgcctagcgtcgttatcatcaaccttacaatctacctgagcgtcaacaagccagtgtcatcccttcttt

SEQ ID NO: 361292 - DNA, 122 bp, Homo sapiens
tttaccttcaacacaaagcattagaaatgcctttcttctaatgggaaatttcaactagttcgacctgcctgcctagctccccaccaaagcctggcacagtggcttaataatcacatttatct

SEQ ID NO: 361293 - DNA, 122 bp, Homo sapiens
tggtgcgtgtgagaacatatttcttctcctggcgccctccaggctcactgtggctggagccggtgacctgaagctgcagggctctggtaggaacagaggcactgaaagctgcattcctctcc

SEQ ID NO: 361294 - DNA, 122 bp, Homo sapiens
tgaagctttttaatgaactttcactcctgctccaaaacttgcctcggtttctgtgtcttacgcgcctcagtcgtattctttcttctgaggaggctagggctgaggttgccgcagacctgccc

SEQ ID NO: 361295 - DNA, 122 bp, Homo sapiens
tgagtccaggagtttgaggctgcagtgagctatgatcgtgccactgcactgcagtcggagcgagagagcaagatctcatcagggtttacaggaagccaatcttctccaggatcaaggacatg

SEQ ID NO: 361296 - DNA, 122 bp, Homo sapiens
cgtgtcgggggcggctcccccaggtcgcctttcccatcccgggagctcacctgtgcgaagcggtcaaggacccgagcagctaaagggtgagtccccgccccactccgggtgccccccgcgcc

SEQ ID NO: 361297 - DNA, 122 bp, Homo sapiens
cctcttggcttgtgcgcgtctcggcttgcgggtaaaggccaggcgccccgctgcgtgcctcgggccgtgcctcatgatctcctcagaaggctctcaaggtcaccttttaacaagtgcatctg

SEQ ID NO: 361298 - DNA, 122 bp, Homo sapiens
gcagctgctgggtgcgaaggccacagtcagcgggaggcccctgtgtgtaactggagattccggggcgattatgcccaatttatcacgcacctcatgaaaatacaatccaccaccaaaatgac

SEQ ID NO: 361299 - DNA, 122 bp, Homo sapiens
tgccttgtgatagccacgtttgcattagctgctttaccaatgacttagcttctgagtgtgcggtgggtgctatcacttcttcacatccgaggaaactgaggcccagagaaatataacaggac

SEQ ID NO: 361300 - DNA, 122 bp, Homo sapiens
gaaatgtctcagaatcttcctgctcattggacagaaactcagcttcaccacattgccagccgggagaccatggaagggaactggcgccactgcccccagctgcccttcccaggggcaacttc

SEQ ID NO: 361301 - DNA, 122 bp, Homo sapiens
ggcctcgggctagggttggcgggcgcgtggtgggaaccgcgtggaaccgaagggctcccacgggaacaagggcatcactgacggtacggcctctcgggtctattgacccttctctgcctccc

SEQ ID NO: 361302 - DNA, 122 bp, Homo sapiens
ttgggtgcaagttccatccctgctaccagcttgctgtatgccagggcaagtcccttgacccgtctcacctcagtccctttacttagcaaactgtggagaggtggtggggagaggggagcatg

SEQ ID NO: 361303 - DNA, 122 bp, Homo sapiens
ggcttgtggagaaaggtgctccaggagactgtaggtgctggcagccccgggcagtgtagacgaatacagcttccatggagaaacacagcaacacttatcaaaattataaatgcacacatgtt

SEQ ID NO: 361304 - DNA, 122 bp, Homo sapiens
gtcaacaggtttgatttttctggagcggatcagttgttaccagacagttctttgcaagagcgtaagttctttttgactaacttcagagtaaacataaaggaggcaatggagctgtgacgccc

SEQ ID NO: 361305 - DNA, 122 bp, Homo sapiens
ttcaccggtcccgttccctctaccaccaaccttgtcatttgacttgagtatcctggtcttcgtcatttggcttgactattctggtcttcattccctgtcccttgaggtgtgggtgtggcagg

SEQ ID NO: 361306 - DNA, 122 bp, Homo sapiens
ggggtgacgcagccgggctctccccataactagggctggggtgctcccgaggctttggggcgacggaacccgcacctgtgaacctcggcagtgcgtccccgggactctgttctgtgaggtgc

SEQ ID NO: 361307 - DNA, 122 bp, Homo sapiens
aagagcataggcttggaatcagacttcctgggttctattcctgatcttgccatgaccgtgcgtaggttatttgacctctctgtgcctcagcttcctcatttgtaaaatgggtgcgatggctc

SEQ ID NO: 361308 - DNA, 122 bp, Homo sapiens
gcagacgccagcgtggtgaagacgcgggggcgcgcgcgcggcgacgagactgccaggggacgcttcgcaacaccgagagtctcagcgtttctcgagataggtgaggctgcgcgttccggaac

SEQ ID NO: 361309 - DNA, 122 bp, Homo sapiens
ccgaggctgctcccctggagcggcgcccctgcgccctcagcccgagcagcgacatccactcgccatttgctgacatgagattgggaggaagaatccagaggtgaagagggagacggctctta

SEQ ID NO: 361310 - DNA, 122 bp, Homo sapiens
tccctgcttcaggccaggcgtgggatccgggccggtcttctctccagtccggttagcgggcggtcactgggtcacatctctacggacgttttcctgttatgacagcctcagaaaaccctttc

SEQ ID NO: 361311 - DNA, 122 bp, Homo sapiens
aggcctgtgatttgcccgggctgcgtgccgtagacgggagggtgttgagaactaactgtgcgttctgtgagatatgcatcctgtagcagagggctgactggcttattgaggaatgtcagagg

SEQ ID NO: 361312 - DNA, 122 bp, Homo sapiens
gaatgtctggctttaaaggagatggcctctaaatgtccccgtgtacctgtgaccgcgtggcgaggctccctggcccccaggagactgaaggctccttgttctcttcctcatttggactgtgc

SEQ ID NO: 361313 - DNA, 122 bp, Homo sapiens
ttactgctctctttaaaaacaaaaacaaaataaaacagagccctgtgagtcttcaatttccgagttgagtgacctttcacagggtcgcagaatcagccccagctctcccccagtcctttcac

SEQ ID NO: 361314 - DNA, 122 bp, Homo sapiens
tcctcagactccagggcggatggtcacccgcccgggctgtgcctccttccacatcacacacgcgcacgcacaaaacacatgctcctcggcggaggcccctttcagaaacacgcatgcagaag

SEQ ID NO: 361315 - DNA, 122 bp, Homo sapiens
gagtcccagaagctgggttgaggactctcccgctgctgagctttcccactcacacgcacacgcacacctgcgcgagctctcccaggagggcaccgcccccaaccagcggggtgcacagggga

SEQ ID NO: 361316 - DNA, 122 bp, Homo sapiens
gcgattgccagcaactttcctttctgccaggaaatcaacctacctttctctgcctgcaggcgctcgccgccttagtacccggagtgacccaggtagataacaagtccggtttcctgcagaag

SEQ ID NO: 361317 - DNA, 122 bp, Homo sapiens
tcttgattaatcgtttcctttatcaactagcatatttaggttgataagagatttttagaacgctgtcagtccaaattcagcagggatgaggggctcaacttaattttcaagtaatattaact

SEQ ID NO: 361318 - DNA, 122 bp, Homo sapiens
aaaggttaatacagattacatgtgatgattctaatttcatatcatcactcacctgctattcgatcttaggcaaaatacttaacctaaacgttgatttctcatcggtaaaatggggttaacaa

SEQ ID NO: 361319 - DNA, 122 bp, Homo sapiens
gcctgggatctggctcaggcgaactctcttcacaccgccatttgagggaacacaaatgcccgctctgggccaccgtagttcacagaaagtacaagctggcacctcctcccgcatgcgcagag

SEQ ID NO: 361320 - DNA, 122 bp, Homo sapiens
gaggaaaccaggagtgtgcactcagcagccagcattaaagagaagcatgcaaatcaccctcggcttcctttgcttttaaatatgagttattattgtgaaagcagtaattaaatcttagaact

SEQ ID NO: 361321 - DNA, 122 bp, Homo sapiens
acctactagaggtactttcagtaaggtaattgttccgagaatgccaatgagatgcttgctcgtatcctggagaccttgttcttattttcaggcatttttatctatctcagggctatggatgc

SEQ ID NO: 361322 - DNA, 122 bp, Homo sapiens
aaagcctttgccgcaaaattcgcagacgaagggcttgtagcccgcgtggatgcggatatgcgtgttgagcgtggagctgcggttgaacgctttgccgcactggttgcatttatgtggctttt

SEQ ID NO: 361323 - DNA, 122 bp, Homo sapiens
caggaaattttcaagttttatgaaaccagctagagcggagttttattaaccagctgagggcggactaaagacttaacagacctgggcgaagaagcagcactcctacttactagggcaagact

SEQ ID NO: 361324 - DNA, 122 bp, Homo sapiens
tccgctctttagcgcttcctgagcaaagtttgaacgcctctcgagtccagttggcttatgcgcatgcgtttctctggtgcaggttctcaccaaatccagaagcggcgggcatttgaaatgat

SEQ ID NO: 361325 - DNA, 122 bp, Homo sapiens
ctccgcgcggcactcacagtggcgccgcggctgctcttgcgaggtgggggctgtcagggccgccggcgcccaggccggccgcgagcctgaggctctgcagagcgagcgcacgacccgcaggt

SEQ ID NO: 361326 - DNA, 122 bp, Homo sapiens
tttgatcctcgcgctgctccccctactcggggcaagcaacaaagccggcatcagaccctgcgtgctgaccaccccctgccctgggagggctgaggggaacacaagagaagaaaaagacacac

SEQ ID NO: 361327 - DNA, 122 bp, Homo sapiens
cgcgctgcggggacctcggtgggtgcatcaccccggcagatgcgctaagggctcggtgggcgttttcccagtggcaggttgatggtggggtttgtttggaaaggctccctggcgctgctcct

SEQ ID NO: 361328 - DNA, 122 bp, Homo sapiens
gcaaggcacaggtacctctctccgactacctccatcgcatttgaggctgtccgcaggcagcgcctgcgcagcgtgagtcacgcacagcgctcctgcaagcacctgagtgcgcccatcctgcg

SEQ ID NO: 361329 - DNA, 122 bp, Homo sapiens
gctgaccacaatggccaccttgttcctccgcaggcagagcgagtgcagggagatgaggcgcgggaagtgggcgaagttcaccttgaccaagtcgttgtgctcgaggtgcagctcggtgagct

SEQ ID NO: 361330 - DNA, 122 bp, Homo sapiens
accaccctcaccccaatccctgccaatgcagacagcactcttcctctgcttccaagctcccgtcggtcctgggctggcctgggcaacacagcctcattccccagctctcaggccagcagcac

SEQ ID NO: 361331 - DNA, 122 bp, Homo sapiens
gtcccttgggggaagccaagggacttccctcatcctctgatatgctgcttgggtgatgggcggtgctggggactgggcccagcagtaccccgggatcccaaacgcggggatgacgggagcca

SEQ ID NO: 361332 - DNA, 122 bp, Homo sapiens
agtctgatgccaacgttggctactctcttcattactgggttctattgactcgcctttaaccgctgagcttccactgggagttatgtgcctgtttctgacttcttcactatatggtgtctcta

SEQ ID NO: 361333 - DNA, 122 bp, Homo sapiens
gcacaaggcagccccgggcctcctggctgcctccccacactcccttcagtcccccatccccgtccctggccactccagggtctctgaggctggatcttcccacgtggcccacaccttctatg

SEQ ID NO: 361334 - DNA, 122 bp, Homo sapiens
agcgcacatgcacgcaaagacatcactataagacaaaatgatcaggccaccacgtgaaaacgggacgttgacaccgacttacagagcaaaaaaccctaagtagcttactcaaatgccatctt

SEQ ID NO: 361335 - DNA, 122 bp, Homo sapiens
agcatgaagtctttgccccactcaaaagtatacaattttttttcatgaatcattgtggttcgttcagaaaaacttggccaaggcatgaggtttatgtccagtttagaacacttgtgccagat

SEQ ID NO: 361336 - DNA, 122 bp, Homo sapiens
gaagcttatacaggaagaccggctaaaatatgtcaaaggagagtttctctttctgaactccgaggagctgttcaaataagactggtctggagagagttttgggtggctggaggtattttcac

SEQ ID NO: 361337 - DNA, 122 bp, Homo sapiens
cgccgcgccccacgtgggctgctgcaggttgttgcacgtgccgtcgtgggcgcggtacttcgcatggaaacaccggttggagcagtttggcagaggcctgcgagctgtgcatccagataaat

SEQ ID NO: 361338 - DNA, 122 bp, Homo sapiens
tacaggttttcccagcttcctgagatggtcatgggctcaccgcctccacccgtacctccccggactggtcctgtggctgtcgcttctctcaggcggtaacacgttcctttctttgttttgtt

SEQ ID NO: 361339 - DNA, 122 bp, Homo sapiens
ctcccagacggggtggcggttgggcagagacgctcctcagttcccagacggggcactgtccgggcagaggcgctcctcacatcccagatggggcagcggggcagaggcgctccccacatctc

SEQ ID NO: 361340 - DNA, 122 bp, Homo sapiens
gtgttcagaggaacaaatgctttaagaagttttcaaccataatgcaaaatcaggttctaccgtagaccccacacatctcagcacgggaacaatgttcacatgcagtagcctatcctgaaaag

SEQ ID NO: 361341 - DNA, 122 bp, Homo sapiens
agattaagtatgcctcaaagtgctgctgtcagtaccacccccccacataaccggaggcaccgggctgttactgtgaataaggccaccatgaagacaagcacagtaagagtttacatcaccat

SEQ ID NO: 361342 - DNA, 122 bp, Homo sapiens
aaatacagaacacacttcccatctgcaaggtgtcagagcgcggggcgcggggcctgagtgcgggagaatggctggaagcagtgagaagcagcctggggtccaaggaaggcaggacgtgggtg

SEQ ID NO: 361343 - DNA, 122 bp, Homo sapiens
gccgggtgatagtttactggattgtaacccacagaataaaaagccgcgagcccacagtgacgcacacgaacaattcgctgagtgaagagtcggtgtacacggagctgccctttctccttcct

SEQ ID NO: 361344 - DNA, 122 bp, Homo sapiens
atataaaatctgtcctccttgatataatcagagtgatctatccagaaatacatatcagaccgcatacctctctgctcttcctctaaggattccccttttgtcctcgggatggtttccaagct

SEQ ID NO: 361345 - DNA, 122 bp, Homo sapiens
ttggggatttggggacagacacggcagaaagcactggcgacgaactcaaaaactcccgaacgcaaggggcagcggttctcccaacccagtctaatgcacattggcccaggatgtctcaggcc

SEQ ID NO: 361346 - DNA, 122 bp, Homo sapiens
gtgcaaataggtaaggtgtgctccgatggggtgtgcatgtggctggttgtagcagatatccgaaagtgagttaaatgagttgctgataagcaattcagggaaaccttcagcagttcccttcc

SEQ ID NO: 361347 - DNA, 122 bp, Homo sapiens
gcgggaccggaggctgcgaaggctgccgggagcgggactcgcagctcctggatatgccagcgttcctggaagactcctgggtcctgacgaaagacaagttgatgagtgagttggtcgccatt

SEQ ID NO: 361348 - DNA, 122 bp, Homo sapiens
tatcccagaaccccccctcctgtccccttccagtacctgcttccaacatcccaagaataacgattacctagacttccgacagactttatataaatggaatcatagtgcatgcattatttttg

SEQ ID NO: 361349 - DNA, 122 bp, Homo sapiens
tacctaacacctggcaatcagagggctgaaacacttggccagataatgaattctcttatccggtgggaaaaggctgtaaagatcaaaccacctttcctatgggtaagcaagagtctgtagtt

SEQ ID NO: 361350 - DNA, 122 bp, Homo sapiens
actgacggttgggatgcctgacaaggaatttcctttcgccacactgagaaatacccgcagcggcccacccaggcctgacttccgggtggtgcgtgtgctgcgtgtcgcgtcacggcgtcacg

SEQ ID NO: 361351 - DNA, 122 bp, Homo sapiens
cgctcagaacccacgtggataccctgtagccttcacttcctcttcttctggcgtcacttccggattcgtgtgcattactatggtaaaacagtcaacatccggttttacacctcctcctggct

SEQ ID NO: 361352 - DNA, 122 bp, Homo sapiens
tcagacactgctccccggggagcctcatctccgccctcttgtggccacatcccagaactgcggcaatgtacagcatgatggccctgagacttgaatatttggagaatttttttcttaactca

SEQ ID NO: 361353 - DNA, 122 bp, Homo sapiens
gtgcactggcccctccccacccctagggggcactcagtagctgctgagaaggcctgtccacgaggctgttggaacccctccaataaatacttagaggtagtgtatctgatgcttgttttcgt

SEQ ID NO: 361354 - DNA, 122 bp, Homo sapiens
tcgctccggagcgcccgtttggatagctctgagcctcggcggggtgagcgagggggcacacgagggagacttgagctgtgttgtttttagaaaactgccgccaatctctcttcccctttccc

SEQ ID NO: 361355 - DNA, 122 bp, Homo sapiens
agactaccccatcccgtcctaacgctagactcgtgaggcccaggggagaaaagtaaatcacggcctaactcttgtttatagtcgctactgccttggtggagactatctccgatatcccagca

SEQ ID NO: 361356 - DNA, 122 bp, Homo sapiens
tattccatataaaagcttcatggtgcagaattactatccccattttatagatagaagaaacggaggctcaggttcaaagtcacccagtgaataaactcagacaaatagcctcacgatctcat

SEQ ID NO: 361357 - DNA, 122 bp, Homo sapiens
cgagaagcaaggggcctgagagtccggctgggggcggagtgaggcggcggctgcagagggcgggggcggcggagtggacagcgccgcggccgcgggcctgggactactttctacatctggcc

SEQ ID NO: 361358 - DNA, 122 bp, Homo sapiens
catagaagggagtgtctgggttaagacaaggggttgtggaaaccaaggttcttattatgccgatgaagcttacaggtaacaggcttgagaaagaaaagattgtaaatgtttcttatcagact

SEQ ID NO: 361359 - DNA, 122 bp, Homo sapiens
agagctttataataaattttttaatcaaaattttgaactcaccttgtgcagctttgctcacggggcatgttcagctcatgactaatggtcactcttacttgactttgcctattttcttccct

SEQ ID NO: 361360 - DNA, 122 bp, Homo sapiens
tgcactgctttcccagctgagcggctgcttcccgtgaacggagggactctgagatcatctcgtcctcacgtctccatctggggagagcaacttcccagctcagtggcagacccagagcccca

SEQ ID NO: 361361 - DNA, 122 bp, Homo sapiens
tcgcaccaggcggcggcggcggaggaggagagctagacccgccgccggggcacaacatggcggagccctcggccccggagagcaagcacaagtcgtccctcaactcgtccccgtggagtggc

SEQ ID NO: 361362 - DNA, 122 bp, Homo sapiens
gcccagagaggtgaagggacttgcacagggtcacacagccgaccaagacgctttccaccacgcccaatcgatcgcccagctcaaaataccggctggtgtgtaggtgggagaggccgccgctc

SEQ ID NO: 361363 - DNA, 122 bp, Homo sapiens
tggaatttctagtgtcctctgcccttctggggcaggctagggcggggtggagcagggagacggcttcaggcctttctaatttaaaaggacaaggaccaggggctggatgcctttccgtttca

SEQ ID NO: 361364 - DNA, 122 bp, Homo sapiens
gggcccctgactcggctctacaggcacccgcgcaacaccccagcccccgcgtgactcacgcgcgctcacggccgcccgcagctgccactggtcccctgcgcccctccgcccgtccccgccgc

SEQ ID NO: 361365 - DNA, 122 bp, Homo sapiens
atggggcctcattatacagggcaggacacaaggaccctacagcaagtgtcctcaaagagtcgcctctcactccgtgagcaagactcctcggcctcccaccctccgttcacaggccccctccg

SEQ ID NO: 361366 - DNA, 122 bp, Homo sapiens
caccaaaagtgggaggcgacttcggggacttagggagaccgggcggacgatttcccacaccggggctgtctgatcgccgccccgattattatcagcctcagcacttgggctgggaatttagc

SEQ ID NO: 361367 - DNA, 122 bp, Homo sapiens
cgccccgccccgcctcttccccctcccgcgcgcccgcccgccgcctgccgccgccgccgccgccgccggagctctgtagtatggcatcgaggagaatggagaccaaacctgtgataacctgt

SEQ ID NO: 361368 - DNA, 122 bp, Homo sapiens
cagaaagtttcctagaagtttgctgggcgcgggcgcacgactgactggctggaccatgaacgtgttccgaatcctcggcgacctgagccacctcctggccatgatcttgctgctggggaaga

SEQ ID NO: 361369 - DNA, 122 bp, Homo sapiens
ctgtcgccgtcctgtccccagcctgcttgtgtcccgtgaggttgtcaataaacctgccctcgggctgccgcctcccagtgtggtgtgtgggtgaaaggagccggggacgtggggggatcaca

SEQ ID NO: 361370 - DNA, 122 bp, Homo sapiens
tcagaacaaattggaaggcctcacaccggcaactgggcccaaccagctgggctcctgacccgggacctcgttctggcctgtctccccaaagcttatccacctaggatgagtgccttgaaagt

SEQ ID NO: 361371 - DNA, 122 bp, Homo sapiens
actgctgcccggcccgctcgggtgccgcccagagtccggcccgctaggtgcctggtgctccgctctgcgctcagctgctccgcacagccccgcctggcacgcagctccagcggctggtcggg

SEQ ID NO: 361372 - DNA, 122 bp, Homo sapiens
tacaggtcgacagggcccaacgacccggcgagcaacttcacggaaggcactggccgacaacgctccgctgccgccgcgccccgcccctttgtgacaccacctaccaatcgctggacggcgct

SEQ ID NO: 361373 - DNA, 122 bp, Homo sapiens
cccccctcccccggcagcccaatggttgagcccggcttccccgggggaaaccccttggggcggatcacgcggtatcagccagtggcctccctggtggatagaaggatcgctctgcgccgggg

SEQ ID NO: 361374 - DNA, 122 bp, Homo sapiens
gagaagctttgaagaaaatccctctatgaagcagtgaaacccttcccccagttcctctttcgagtagcactgtcaggtgactgtctctctgtgctggcaatttactgagaggctgaaccctg

SEQ ID NO: 361375 - DNA, 122 bp, Homo sapiens
tcgctctccggggcagtggctgctgtcagaatcccttctttgaggaggcacctgctcttccgcttttctccagctttccatgagctgtggggagtagcttgggtgtcctctcactcttacta

SEQ ID NO: 361376 - DNA, 122 bp, Homo sapiens
tcgaacccttgacctcaggtgatcctcccacctcgcctcccaaagtgccaggattataggcgtgagccactgtgcctggccaaaacttgatggttatagtcagaaggagctgacaatcttca

SEQ ID NO: 361377 - DNA, 122 bp, Homo sapiens
caaccagtaggtaggagctagatctaagtcatactgacagctacggacacggccagctgccgtgcacaaggggccagcagggcagcagcataggctgttcagaaaagactgcatgaaatgag

SEQ ID NO: 361378 - DNA, 122 bp, Homo sapiens
gtgggcgcgaggggtgggggtgatgggtgagccgctgcgccggggggcgcttactcccagcgggcatgcagaggaagggacttctcactgccccaccccccgcaccttaagcaggaggctcc

SEQ ID NO: 361379 - DNA, 122 bp, Homo sapiens
ctctggtcacaagcgttgtttgcccttcccacaccagtccaacccaggccaatcacggagcgggtcttcgtcagacctggttaagacctgaggctcacgctggagcacatgtctcggccgga

SEQ ID NO: 361380 - DNA, 122 bp, Homo sapiens
gggcctccccgtcttggtccaggcccccatgctgactctcgtgctgggagtcggctggtccggttgccccaagaacagccgcctctacctttaggcagaagtcactctcaggccctggtttg

SEQ ID NO: 361381 - DNA, 122 bp, Homo sapiens
cccaggctggagtgcagtggcgcgatattcgctcactgcaagctccgcctcctgggttgacgccattctcctgcctcagcctcccgagtagctgggactgcaggcgcccgccaccataaagt

SEQ ID NO: 361382 - DNA, 122 bp, Homo sapiens
gtctcaaacccctgtcctcaagtgatccgtggcctcccaaagattccaggcatgagccaccgtgcccggcccaatctcgtttctcttttccatgtgcttgcgcagtgcttcagggctgcctc

SEQ ID NO: 361383 - DNA, 122 bp, Homo sapiens
ggatttccttcatgagttggggacgagcacactaaggcacgagtcaccagcgaacacgctcggcacgatgaagtcgtcagttttcatctccagtgggactcgctcccttggtgtgatgtttc

SEQ ID NO: 361384 - DNA, 122 bp, Homo sapiens
agactcctgctccagtgggagtcagggtggggtgaggttctgtggtcagttctccagctccgctctgagcttggggttggcggtttcttctttctgatcctccatggccaagcctggcatgg

SEQ ID NO: 361385 - DNA, 122 bp, Homo sapiens
cccgccatgcctgagcctccccctcctccgtgggctgctgtgcggccccagcctccccgacgagcgccgccccctgctccaaggcgcccagtcccatcgaccacgcaagggctgaggagtgc

SEQ ID NO: 361386 - DNA, 122 bp, Homo sapiens
cagtgagtgttatagctctattagaagccgtgggtcatggaagagaaccgtggaacccagcgactagtgttcggctcgattaggatgaacccaggtacttagccgtgcaggaacaatggcaa

SEQ ID NO: 361387 - DNA, 122 bp, Homo sapiens
gtcctcggcactgccctccgtggggacgtctgcactcacagtgtcctcggcactgccctccgggacgtctgcacacagtgtctttggcccagctcgggttaggagcactcgctctggaggcc

SEQ ID NO: 361388 - DNA, 122 bp, Homo sapiens
taaacaaaagtccttttgtcaataattttaaagagcatcaaagagtcctgggaggccaggcgtggcagctcatacctataatctcagcagtttgctaggcctaggcaggcagatcacttgac

SEQ ID NO: 361389 - DNA, 122 bp, Homo sapiens
ccaaggccacccaacaagtcaggctctgagaacgccccacttgcaaccccacgcgggctccggggcacttggccagtgtgcatggaaaacagctgcagagaaatagctgtcatggtgccaaa

SEQ ID NO: 361390 - DNA, 122 bp, Homo sapiens
tcgtgcaatctgtgagtggcctttctgtccgcagaaaggcacagtgtccacaccacggggcggtgagcctgcgggtcctccagggccggtctctccctcctcacgtggctccctgagaagct

SEQ ID NO: 361391 - DNA, 122 bp, Homo sapiens
tctggccccatttcctgggagcctgaccccgccctaggattcctggagtgggtgtgcccacgcttccggcccagacgtgggtggagggatcccaccctgccaggcctcccgcctgtgcggct

SEQ ID NO: 361392 - DNA, 122 bp, Homo sapiens
ataacaaatgagcacagaaggagcagagagcagcatgacaaccaagatactccaaacactcgcactgtttcctgtaattaccatccagagagcagctcccactccgtgtcaggcatgtcacc

SEQ ID NO: 361393 - DNA, 122 bp, Homo sapiens
tgattgttatttagtactaccttctagtatagaaaatgttttctactataactttgtaaccgccaaaaccaaaggttgaagatcacctctccagggctatttgcatttttaaagcgaattct

SEQ ID NO: 361394 - DNA, 122 bp, Homo sapiens
gggaagtggccgctcaagtggtacgcacccgaatgcatcaacttccgcaagttctccagccgcagcgatgtctggagctatggggtcaccatgtgggaggccttgtcctacggccagaagcc

SEQ ID NO: 361395 - DNA, 122 bp, Homo sapiens
gagccatgcgtgccacgggcagctgagtagctgccgggcgccgctgccaagtctccactccgcttttgtcttgccctccagtgaatgggaagatggagatggatgttgagggagtttctccg

SEQ ID NO: 361396 - DNA, 122 bp, Homo sapiens
ggtttaggagtgcagggacgaagctgagcccaggctgaccgtgccctggaaggagcacggcgttgtggagacatggactatcagcagcgcagccgggatgaggactggggttaacccgcact

SEQ ID NO: 361397 - DNA, 122 bp, Homo sapiens
gctgccaacacccagcgacggagacggggactccgacatggcacttgttggagggtctcacgaaactcaggaactggggtaagagggcttgcaacacccaggaagggggttctcagcccccc

SEQ ID NO: 361398 - DNA, 122 bp, Homo sapiens
ctcaggaaagaggtgttctgccatggaccagtccaggtccaaaaagtctcgagaagcgcccgggagccaggagaaaagccgagagatgaaaggagatgcctgaggtgccgcagcccaggtct

SEQ ID NO: 361399 - DNA, 122 bp, Homo sapiens
tcccagcacctcattcttaaggggcgatcctcctacagccgcctcctcctcctgcagccccggctcaggcagggcctggtatctcttcgtcacatctcttttgttcaggtcgatggtcttcc

SEQ ID NO: 361400 - DNA, 122 bp, Homo sapiens
gtttcggtgggaagatgaacacgccttcccagcagagtaaaacgtgattacaccaaggaccggtaccctctcccttccctcggccaggtccacgtccccaggcgtcggagaaggggttggac

SEQ ID NO: 361401 - DNA, 122 bp, Homo sapiens
gaaagaaggggaaaagtttgctccaagtctaaactttgggcctaggaggcgcccggcgcgcgccccctcccgccgcggccaggacccgggaccccgcaccggccccgcgcccgggcggccac

SEQ ID NO: 361402 - DNA, 122 bp, Homo sapiens
aggggatctcgtcaccaccgtacttgatgaggatggtgtagcgacctgtcacgtctggcacgtaggccactgtatacgtgccgtcatggttgtcttggatgtgtgtcttcttcggcttgcct

SEQ ID NO: 361403 - DNA, 122 bp, Homo sapiens
tctgagatggcgcctgtctttctggcgcgcccgcaggaagaggtttcagctgaaacagcccgcgagcttcattcgagctccacgtgggggcgagactccgaggagatgtctggtcggatgct

SEQ ID NO: 361404 - DNA, 122 bp, Homo sapiens
gggagggagagcgccagggctgggcaccagcacacctgcccactgttcccgcgggagtgccggaccccactccagctgagcgtcctcccccgctggctgctgtgccagctcacaggagggcg

SEQ ID NO: 361405 - DNA, 122 bp, Homo sapiens
ttcgggtcagggaaaagggagacgagctgaggtgcaggaggctctgacgtcgggggacaacggagatattttctgcagaaagtgacgaaagagcattctggttcctgcagaggtaggtgaag

SEQ ID NO: 361406 - DNA, 122 bp, Homo sapiens
acttccggatcccacagctatgacaccggaagccggaagcgtggtagggaagggcgaccgcgaaactgggactttctcggagcgccggggccctaccagcgttcacagtccgccgctcccac

SEQ ID NO: 361407 - DNA, 122 bp, Homo sapiens
tcttcaccttcaagaaggctttccggatccctgaggacaatgcttatacttttctgagcacgtacattatgttgcattgtctaatttctgtttttctctcttaataatcatcctgtctagca

SEQ ID NO: 361408 - DNA, 122 bp, Homo sapiens
acagttgtgagccaccgcgcccagccactagttattcactttcttgtttgaacttttgatcgtttattcctttactcggctgcccattcatttgttaatacacttatgaaatattcaatgac

SEQ ID NO: 361409 - DNA, 122 bp, Homo sapiens
ccgttggaagctgagaattgtggaagctggagatgggagttctgagatggaggaggcaggcgcgtgaaggaggtcagggaaaggcaagtaaatctactaaccattgaagtttataaaataaa

SEQ ID NO: 361410 - DNA, 122 bp, Homo sapiens
gcagcatccccattacggtgcggcacatcgagtccatgatccgcatggcggaggcccacgcgcgcatccatctgcgggactatgtgatcgaagacgacgtcaacatggccatccgcgtgatg

SEQ ID NO: 361411 - DNA, 122 bp, Homo sapiens
gcgctccagccgatggccgctgccgccgcccacttcccagaaccggcctcggccctgcggcgctggggccatctcccgactccctcctggggaggtcctcgccaccgccggagaggacatgg

SEQ ID NO: 361412 - DNA, 122 bp, Homo sapiens
gaatgcgcacagaggttccggccgcggtgttcactgtggaataagtggagaggtcctggccgttcttgtcactgcggaatgagcagagagaatcctcgcagggcatctcctgtcctcacctt

SEQ ID NO: 361413 - DNA, 122 bp, Homo sapiens
tccgagagagcgggagcgtctgtacctctgcggcgtcactgggagcccgacggaaaactgcgctaaaggcttgtctttcccctgcccgaccgaaggagccgaccttgcctgcgctacagctt

SEQ ID NO: 361414 - DNA, 122 bp, Homo sapiens
atgcccgctggctcgtgagctggccctggaaactagcggctggcgcaagtgggcgttcggcggcactgctggctgccagctgccagccccacaccccacaggcccctgcctggccagccccg

SEQ ID NO: 361415 - DNA, 122 bp, Homo sapiens
tttttcagaattcagaaaggcaagagaccaccttactgagcttcaaactggggctgggaacgctgccatgaattgggcttggtctgtctgaagggagccaccttttcgacaatccttagact

SEQ ID NO: 361416 - DNA, 122 bp, Homo sapiens
agggcgcctgcgagggacgagggggcagggccggtgcctagggggtggaaatggccgagccgacttgttggaccccggtcctgctagattccttgtctgaatgggaaatgtcgccctcgcgg

SEQ ID NO: 361417 - DNA, 122 bp, Homo sapiens
ggcgaccctggtggagcagacccggccgcgacagtgcacacatgatgcggccggtaaacacgctgatgaccagcaggggcagcaggaactccaggacagtcagcgcaaagacacggcagcag

SEQ ID NO: 361418 - DNA, 122 bp, Homo sapiens
aaagaaagctgggaagagctccgcggccaagttagcaggacactctaacaagtgactgcgcggcccgcgcccggggcggtgactgcggcaagccccctgggtccccgcgcggcgcatcccag

SEQ ID NO: 361419 - DNA, 122 bp, Homo sapiens
gccgctgctgaccttgaccagcctggccataccgctgcagtcccatgctggcgacccagccggctactgtgtggctcacaggcgggtcgcacatacagcttggacacgctggacaaggggat

SEQ ID NO: 361420 - DNA, 122 bp, Homo sapiens
tccgcctccagctccgcagcattcgaagatctcaatagctgcatttccagctccgagaggcgaagagatgcaagcgccgtgcagcaccctttatagtgccacgaaaaggaagtggcgtagct

SEQ ID NO: 361421 - DNA, 122 bp, Homo sapiens
tgtttgttctgccttctaatgcatgcagctattcttgtctccttaacgatccctcagtgacgcaggtgccagattgtattttacattagatattcctggacctaattattaccagttcactt

SEQ ID NO: 361422 - DNA, 122 bp, Homo sapiens
ttgccaaatccacaatatcttccatcaactcaagatgttgtaatctcttcaaatttatctcggaagcacgtgaattgttggcgtccacacagggatgcaatcgtgatattacagaactgttt

SEQ ID NO: 361423 - DNA, 122 bp, Homo sapiens
ctttggtagggaagatctgggtttccattccagcgctgccgctggtgatgggacaatgggcgggggctctgagccacaggttcctcggggcacatgcagacaaaccgagaccacgggcacac

SEQ ID NO: 361424 - DNA, 122 bp, Homo sapiens
gccattcactgagtatttaaaggaaaaaaaaatcactatattttcaccagtgcatcttctcggtggggtgaacactttgggtgaatacatataattttttatttgagacagggtctcactct

SEQ ID NO: 361425 - DNA, 122 bp, Homo sapiens
gcacagaatgtgaaatgattccagagggatccttccaaccacagatacaaaaatcaacatcgtcatcgtcaccatcagcaaacatttgtgcagtgctttcccctgtcctgagcagctgtcac

SEQ ID NO: 361426 - DNA, 122 bp, Homo sapiens
ggggaaggtttcagatgcaatggcttcttattccttcttttgactgacccgcgccttctccgcctccctttctcctcgcgtcacccgcaccagcggctgggatgcggcgcgcgttccgtctt

SEQ ID NO: 361427 - DNA, 122 bp, Homo sapiens
atcagaaggtctgttcccctcctaggtgctagagtggcatctacttcaaattcctgacagcggcttctttaattgtgcaatctgtgtcagtggggaagcacaaataggattacttttccatc

SEQ ID NO: 361428 - DNA, 122 bp, Homo sapiens
ccatctcctctgccattggccgactggccgcattgaaatcaagagtctgagggggtcattcggaggtgaggggtcggccaccagccctcagaagcgcccgcgattctcctttgaataatagc

SEQ ID NO: 361429 - DNA, 122 bp, Homo sapiens
caggaccggggtgagtgggcttgcagcctcgaacccagaaccctctaccaggaacgtaagcgcctacccaggacccctcacgtgtgcccggttccctgcccgaaatcccaggaccccctccc

SEQ ID NO: 361430 - DNA, 122 bp, Homo sapiens
gcggttgcctctgacttactcatctacccagtaataaaactgggccgggcctgcgtcccacgcggtaggaccaaggcaggagtcccgggtctcgaactctagcatccatcatccgccctgcc

SEQ ID NO: 361431 - DNA, 122 bp, Homo sapiens
cagtagcttccagacccaattgcccgcgcaagggggcgtggcagcatcgttgggcggggccgcctgtaagagaacgcggctaaaggtggggccaagcgtgcggtttgctgcgcctgcgtgag

SEQ ID NO: 361432 - DNA, 122 bp, Homo sapiens
agcgctgcctctgctgccgggcctggaccaccctgcaggggaagacttctcaggctgagtcgccaccacctcaccccgccaccccccgccgctttaaccgcagggaactctggcgtaagagc

SEQ ID NO: 361433 - DNA, 122 bp, Homo sapiens
cccccggccgctgccacctctgcgggtcctcctcgacctctgtccgttggggcaccggcccggagccctggagagggcttcagctccaagtgtgcgcccctccggctccttcccctccccct

SEQ ID NO: 361434 - DNA, 122 bp, Homo sapiens
ggctgcctctccctgtttgcagatgtacgacaacatagcatcactgaggtttaatgacggcgatagtggagaaaaactggtgtccgcgatgatttcagcagaaggagaagtcatggagtttc

SEQ ID NO: 361435 - DNA, 122 bp, Homo sapiens
aggggtgtttaagacagtggcggtgctcccgggagaccacggggtgtctctgaggacaggcggtcccctgggccccctggttaggacagaaacgcaagagccacgcaaacctctctgtgaca

SEQ ID NO: 361436 - DNA, 122 bp, Homo sapiens
agttgctctgtctgcgttggggagtgcggggtgcgtggatgtgaaggcctggggcgtgaccgcgcaccactgtagatccatcaacactgggtcttaggcggccctaaacttacgttttcaat

SEQ ID NO: 361437 - DNA, 122 bp, Homo sapiens
ggccaggcgggatccccttcccctgcgggacaggggcatgggcacaagctctggctggggcgctctcggatcgagggtccgaaggagggctgcgagctggtgggagtgcccgcgacctggcg

SEQ ID NO: 361438 - DNA, 122 bp, Homo sapiens
ttgatttgggagaaactaaactggccttctcgttcccagtcccagaacctccacccctttcgaattcttcccaacgggctgaccctgcccggcgcccaggagcgccctgggtatctcctggc

SEQ ID NO: 361439 - DNA, 122 bp, Homo sapiens
gcgtgatgggtactttactgggtaagaggagacgggtgccccccacccactcctcccggccgcgcggacctctcccgctcagacctgcatctgcattcctttgagtttaccacggacttggg

SEQ ID NO: 361440 - DNA, 122 bp, Homo sapiens
aggcccaagtcatgaggcctgtgactgtagaatggctgaaggcactggtgcactcgcagccggtccttccggggtccagcttcccgaaggactgggcagccccggggcgaacccctctggag

SEQ ID NO: 361441 - DNA, 122 bp, Homo sapiens
ccatggatacgctttgtgtagcggctatgggcgctgtcttacaacaaagccaaggaatctcgctgctgaggggtgagccggggtcttaagactgggattcccgttgagggaggtgaacagct

SEQ ID NO: 361442 - DNA, 122 bp, Homo sapiens
taagaagggctcaatcagtagagaagggaaggatgacccaggaccacagcacggaggaggcgagactgggagcaaggcccggagtatgggtaaaggccacacctgggcctctaaaacaaaac

SEQ ID NO: 361443 - DNA, 122 bp, Homo sapiens
ctggtgtgtgccacactgaggttgaggcacaattcacagctatttccacaagagggcagtcgagttaaatgcaaaagttcagaataagcattctttgtttaaaagaaacacaaaaatttact

SEQ ID NO: 361444 - DNA, 122 bp, Homo sapiens
tgtgatgcagttaggtaacttggaatcagtttgatccttttgaagcttacctttaagtttcgttagagtgtgtccagaatatcactcggggtagggctactttggctccactatagactcaa

SEQ ID NO: 361445 - DNA, 122 bp, Homo sapiens
tcctcttgggaggcgtgtccctgagcccatcatcgcagccatggggtggcgggttggaggcgcctgtgcagccttcctggctccgtgctggtgtcctgtgcacaccctgaattcaaacaatg

SEQ ID NO: 361446 - DNA, 122 bp, Homo sapiens
tgtcctgtccactccaggccggactgacgtagcctatgggcccagcaggtccagggcccacgttttaatttctttttaaaaagctttaggtcttgccgggcgcggtggttcacgcctggaat

SEQ ID NO: 361447 - DNA, 122 bp, Homo sapiens
gggtgctggagggaagggcgcctgggtcgccagggcagcatagagtcccttgtggagtgccgcagattttggaggcaggatcccattcctgtcgcagaacccagacctcctgcctcccagcc

SEQ ID NO: 361448 - DNA, 122 bp, Homo sapiens
tcatttctattaatctaagaaaatcctaaaacagaatgaggttactctaaattcaaaatccgcatataatagttggagtgcatagaccatagcagggaataccccctctaaataatcagttc

SEQ ID NO: 361449 - DNA, 122 bp, Homo sapiens
accttccctcccacaaatctttgattctgcatttataaacaagtgtccccaccccccagccgctgcacccaagcaattccaacataagtgacctcccggaatacatttagacagggtggctg

SEQ ID NO: 361450 - DNA, 122 bp, Homo sapiens
cgatgcccatggtgctgatggtgaccatggcgacgtagacgttgggaaacatggccatcacggctgtgccgacagagaagcccagcgtccccagcacgtagatcaccctgacgctcaggtcg

SEQ ID NO: 361451 - DNA, 122 bp, Homo sapiens
acccttcagtttctccgctccaggcgacgttctcagccttttcttagcctgagaccaccgcgagaacaccaggccttgctcacccccgaggaggctctacattgttaagaaaaccagatagc

SEQ ID NO: 361452 - DNA, 122 bp, Homo sapiens
gtggcctgggactggtagtgtgacctctcccctggacggggacaccagggaggctctctacggcatccaggccgggaccccaggcagcagagggtcaccacgcctgggccggggggtgagat

SEQ ID NO: 361453 - DNA, 122 bp, Homo sapiens
ttggatccaagaaatggaaagtatggtgaagccgattgcggaatacagaaaacaggcagccgttgcaggggctggtgctgtggcctctgcacttgcctgtcccactgcagggaacactcttc

SEQ ID NO: 361454 - DNA, 122 bp, Homo sapiens
caggaggcctggcgggggtgggacagctgcaaggcttgctaacaggcggtctgggggctgcggcagtgcggggtcacccaggaagccaagaagccagaccaggacacagacacatcccggga

SEQ ID NO: 361455 - DNA, 122 bp, Homo sapiens
aggcagctgggcggagaggtcataggtatgggcaggggtgagccacagctgatagctgggcgcgatctgcctggattgttactgaaatactaacatgctctttatgggttagtaactccctt

SEQ ID NO: 361456 - DNA, 122 bp, Homo sapiens
cttgggatgcctggcacccagttggccctcttcagtagttgtcagatggaactgtatactcgaatgtttccatactgataaccatctcatttaaattatgggtgccatttagtaattggttt

SEQ ID NO: 361457 - DNA, 122 bp, Homo sapiens
agcttctgcagctgccacctcccgtagacttcgcatttcttccgcactctcctctcacgacgggtcttctttgttgtacttaatttcctacgcaataagatttcagcatgaccatcagtccc

SEQ ID NO: 361458 - DNA, 122 bp, Homo sapiens
gagcggcatgggtggggagcttgagggggcgttgggctcccaccaagcgccagatccttgcgcgcctccagcgctcgcccgcgcggctggttcctttgggatgcggaggtgcgacggctcct

SEQ ID NO: 361459 - DNA, 122 bp, Homo sapiens
ggctggccgtggggcttgtggatttttaaaaatttggctccgaggaggaccatttcctctcgacatgcatccctccggatagactgaacatccctccgttcacccccccgccccgcgcggtc

SEQ ID NO: 361460 - DNA, 122 bp, Homo sapiens
ggacacccccggcctcgcggtggctccgccgtggtgcggcggcggcggcggcggcggcgccggcagctcctgctcccccggccccgcacaccccgccgcgcccagcgccagccccgcgggcc

SEQ ID NO: 361461 - DNA, 122 bp, Homo sapiens
ccccagatggtggccctggaggaggacttgtattggggccactggccccacgtcagtgttcgtcagcctggcatccagcccctggtgtgctgaagctcaggcccttcctgttgccctagtct

SEQ ID NO: 361462 - DNA, 122 bp, Homo sapiens
aagaagcagcccagtaagttcttagaaccggaaactcccctccccccaaacacccaaccgcgcagcccacgctgcggggccacgacttggccggatttatgttcatggctgaggatgccatg

SEQ ID NO: 361463 - DNA, 122 bp, Homo sapiens
tgcctgttccctggtgggtgcttatggctccccagcagactctgggccctgggggctgcccggtcccctccttgggtcccacgagagcgactgctggccctgctgggagcgtgtcctgctct

SEQ ID NO: 361464 - DNA, 122 bp, Homo sapiens
gccattcacaacctgttacccacaggcaggggtgcaatctgtgagtgtgttgctgaccaacgcttgctaatccacacccctccactttcgcttcattggaaccccgctgtaacaagagtctg

SEQ ID NO: 361465 - DNA, 122 bp, Homo sapiens
gggcgggaggagtctgaaaatgattttgagaaaaaaaaaaaaaaaacaacaacaactacgcgataggaagtgtatacattgccctagagcagaaagacaggggatgggaccaacctcagggc

SEQ ID NO: 361466 - DNA, 122 bp, Homo sapiens
cggcgcggtgggtggtggagcggctgtcactacgcggcagccgcagcatcagcaccagagcggcatctgcatcccaatcgctgcccatccggtcccgggcaggcgccggtccggacccgcgg

SEQ ID NO: 361467 - DNA, 122 bp, Homo sapiens
gctggtgatcagcagctttcggataagagctcaggatttgggtgcgtgggctgaagcatgcgcattaagaggcaaaaggacggcgcttgactggtataggaccttctaggaacattcaacta

SEQ ID NO: 361468 - DNA, 122 bp, Homo sapiens
ctcccccttggccggcgctcttcgcacctaggagcgtcacttcttcaagagccacccacccgccctgtccaaggttcccctgttggcctcacatcccccgcccagggcagcaccgggaccta

SEQ ID NO: 361469 - DNA, 122 bp, Homo sapiens
ctttgctggcttcctctcctgcctctgcgggctctgtctggagaggcactgaggtagccacgttctcagagaggtcagaattcagtgggaggccttggagaggctttgtctcagggccacat

SEQ ID NO: 361470 - DNA, 122 bp, Homo sapiens
gccctgcagatgtccaaatggctccctgcagcagcccctgccacactgttctgacaatcacgctgcccaaataagcgaccatccaatgtgtcaggccactcagatccgccacctgcctgcac

SEQ ID NO: 361471 - DNA, 122 bp, Homo sapiens
tctcacacagttggcacaatggtaatttctggatgttgtgtttcattagcagcctctgagcggaggtggtttaaatttgagcgtgcaggatttagatgttttatttttatatctgtctccga

SEQ ID NO: 361472 - DNA, 122 bp, Homo sapiens
gcggttgctgtggcggagtttggaggtgagtgggggctgtaggtttagcgcaacagggagcggccctcgatggacgtaggaaatccttctaagagcccccttgattgtcagaggaattagcg

SEQ ID NO: 361473 - DNA, 122 bp, Homo sapiens
caaggttttccttgttaaaattggtctggctggctgctgtgacgcgccacactgtcctgacggtgcacacactgctgtgtggaggaacagaggagtccagctggccttcacatggcaggtaa

SEQ ID NO: 361474 - DNA, 122 bp, Homo sapiens
aggaaagatctaaaatcaacattctagcatcacaattaaaataactagagaggctgggcacggtggctcacgcctgtaatcccagcactttgggaggccgaggcgggcggatcacgaggtca

SEQ ID NO: 361475 - DNA, 122 bp, Homo sapiens
cacacccttacaagatgcacagccaccaaaaagcctaataaagcaaggtgcccaagaccacggttcaggatccgtaaaaatggccggagataattgactgcaacctattcactgcaaatggg

SEQ ID NO: 361476 - DNA, 122 bp, Homo sapiens
ctgctgatccctgggcgtgagacagaggtatccacacaccacctctcccactgccctgcccgcctgtggagagggtcactcaggcccctccagcctggcttcccaccaccgagtgcatcctc

SEQ ID NO: 361477 - DNA, 122 bp, Homo sapiens
agcagcgtggaggcgacacctccacaagcagcgttatctgacggaaccctcacaacaacccgttttacagatgagaaaactgagcctcagagagccgcagaggaggagcccgagagacctgg

SEQ ID NO: 361478 - DNA, 122 bp, Homo sapiens
ccttgtcctgtatgtcctgataatcgtccttttccacttcctctctcccctccccctggccgacttattgataccgacgtggacaaatgaggtcagaaaacttcagtgaccgcacacagtgt

SEQ ID NO: 361479 - DNA, 122 bp, Homo sapiens
gggcagcggccaggcccctccgcccctaacacccgcgcctcctgcagacccgagggtcgccgctggtagggtcgctcagccctggcgtcctccaccaccacaccttcacctgcgcccggctc

SEQ ID NO: 361480 - DNA, 122 bp, Homo sapiens
gcgggctcgttgggtccgcgcggcgcggagctgggcatccgggcggcgcgggctcttccgcgggccgctcctggctctctggcgccctctgctggcctctcccgcacaccgccgccacgccg

SEQ ID NO: 361481 - DNA, 122 bp, Homo sapiens
aataatatgatttcctttggcttaaaaggaaagccattaagaagattgaggagtgtgctacgttgagatactatagagaagaggaggcagggttctctttaaagattcccaaacctttaaca

SEQ ID NO: 361482 - DNA, 122 bp, Homo sapiens
gcaccgggagggtccctacgcacgccgacccgtgccacgcacagtgagggtctctacacacgccactgatccgtgccacgcaccaggaaggtctctacgcacaccacccacccgtgccacgt

SEQ ID NO: 361483 - DNA, 122 bp, Homo sapiens
ctgatttcttattgttctctgagtttgcatgcattgctgtagcccccaggacctattcaacgttcccaagtgcatcaagctgtttcatccctccctgtgggtttttccactggaatgcctat

SEQ ID NO: 361484 - DNA, 122 bp, Homo sapiens
accattttctgaggggcctgaacatccccagattttggtatctgggggttgagggtggggcgtatcctggcaccaataccctgcacattccaagaggggaccgcaggactgggtcttgctct

SEQ ID NO: 361485 - DNA, 122 bp, Homo sapiens
tagtattaatcctcctattaagaatcggcccaaacaaaccctcgctgtcagggcgacaggcgcccgcccaagcccagacctcggacctggttccaagcctgttcccgctgggtctctgggcg

SEQ ID NO: 361486 - DNA, 122 bp, Homo sapiens
ataaatagagcagccagttgcagggctccattctgctttccaactgcctgactgcttgttcgtctcactggtgtgagctccagcatcccctttgctcgaaatggaccccaactgctcttgcg

SEQ ID NO: 361487 - DNA, 122 bp, Homo sapiens
tctaagaagggaacccccaaatttaattaaagccttaagcacaattaattaaaagtgaaacgtaattgtacaagcagttaatcacccaccatagggcatgattaacaaagcaacctttccct

SEQ ID NO: 361488 - DNA, 122 bp, Homo sapiens
ggagactgaggctgaggctggggaacatcgggcagcatgagcggctgcgggctcttcctgcgcaccacggctgcggctcgtgcctgccggggtctggtggtctctaccgcgaaccggcggct

SEQ ID NO: 361489 - DNA, 122 bp, Homo sapiens
cagcgcccggaagctcggaggacatgagaggtggcaccaaggctgtggcagctgctcagccggtctcacaggctcaggactcgagctctgtgttaagccgcactaccactgtgattggcacc

SEQ ID NO: 361490 - DNA, 122 bp, Homo sapiens
ctgcttacagcccgagaacccttttccgagagaataaaatctttgaccgttgccctttctcgccggagtttgctcgtgtcttctgatgaactgtgatgtctcacctatctccttcctgggct

SEQ ID NO: 361491 - DNA, 122 bp, Homo sapiens
gaaacataccatccactaggtggcagcaaagcccacagaataacatcaagttccccttcccgaggtaattttctagattactatactttaactgaattcgaaaagccaacataatttcatgt

SEQ ID NO: 361492 - DNA, 122 bp, Homo sapiens
gaaatcgagcacagcagctgctggcccaggtgctaagccactcactgcttggggcttgcacgccggccagctgcgccaagtgcgggcccaccgagcccactcccacccggaacttgcggtgg

SEQ ID NO: 361493 - DNA, 122 bp, Homo sapiens
cagccagtccctgggttcccccatgtacttttttctggcttctttatcattcatagataccgtctattctactgcatttgctcccaaaatgattgttgacttgctctctgagaaaaagacca

SEQ ID NO: 361494 - DNA, 122 bp, Homo sapiens
tgacagtggcagagaacagctagctcggctgcaaagctcacgtgctcacatttttgcacacgcttgttttttgtatgtgagtgcaccatcatgagaatgcttcagcgagcccttttgagcac

SEQ ID NO: 361495 - DNA, 122 bp, Homo sapiens
gtgaagatttagggaggtgtgtggggtcttccgggaagctcctatacctgatcagttttccgcaaaaggggcggaaccacgtgactctggaagtagctgcgggcgtggtagtcctgctgcgc

SEQ ID NO: 361496 - DNA, 122 bp, Homo sapiens
gtatctatgcccatcgtatgttcttcatgtcttatattcttatatggagaaatgttattgcgtgttttataaaagtaaggtggtttatgaagacacacatcaacaaaacttttcatatcgga

SEQ ID NO: 361497 - DNA, 122 bp, Homo sapiens
tctctcagagggccctcctctctttgttttaaggcaaattcccttagccgagtccctggtcgcggaacattccgggcaaggaatccgagaatccgaagtgatcctgccccagggagtccccg

SEQ ID NO: 361498 - DNA, 122 bp, Homo sapiens
gtctgctctgtaagtgagcatgacaaacaatgcattgtagactttcgtatactgcatgctcgatggtaatctcaccttatcagtgagtggaggccacacgtttaccatgaatagaaaaagtg

SEQ ID NO: 361499 - DNA, 122 bp, Homo sapiens
acagtcccgcctcttccgctgcgtgccggaccatggcgcaggggcagcgcaagtttcaggcgcacaaacccgcaaagagtaagacggcagcggcagcctctgaaaagaatcggggcccaaga

SEQ ID NO: 361500 - DNA, 122 bp, Homo sapiens
ttctctgtcttctgggtggaaatctgggtcagggaggaaggaaaggaatgaaaaaccaaacggtggttctccaggggactggcccaggagtaactggagggcacactcaggtacccagtgac

SEQ ID NO: 361501 - DNA, 122 bp, Homo sapiens
aaaggaagactctgaatgactacaactcccagtactgaagaggctgctcttgcgaggaggcggtggggacaggctacggaggatttcgggacttggagtttttgcattgagtgtggtgtccg

SEQ ID NO: 361502 - DNA, 122 bp, Homo sapiens
tcaataatgtttatcaccgggcgcggtggctcacgctgtaatcccagcactttgggaggccgaggaaggcggatcacctgaggttgtgaattcgagaccaggctgaccaacatgaagaaacc

SEQ ID NO: 361503 - DNA, 122 bp, Homo sapiens
gtgatggaaggtgaatcccagaacctaagctcttgttagcaaggtctgtcctgggacatgcgtcctccgcagggcccatgtcactgccgctagcccgggaggcccctgccgactgcacctat

SEQ ID NO: 361504 - DNA, 122 bp, Homo sapiens
ggaggagggcgagctcggcggtgacgcgcggtcctcacgtgacccggagctgcagagctacgcagccttcgttgcagtcgtcactcgcatctggctaccagctccccgctgccctgcgctcg

SEQ ID NO: 361505 - DNA, 122 bp, Homo sapiens
ctaattacctgaactctaagccctgaacttgctggggagcgagtaggcactgattcagggcgtcctcatcctggagatggtgaaaggcaggccggctcctctgcagcagagccagggctgcc

SEQ ID NO: 361506 - DNA, 122 bp, Homo sapiens
acatgattatctatgcagaaaatctggtgaaatctactaaagaaaagctaccataacaaacgcattcaggatggttgttggatataagggcaacatacaaaaaccaactgtgcttccacatg

SEQ ID NO: 361507 - DNA, 122 bp, Homo sapiens
agcaattatctgctggctccgacgccccgccctctgctcttgcgattggctctccagtcccgggcaggactgcattggtttcagccgacctcactcattgctttggctcctactattatcta

SEQ ID NO: 361508 - DNA, 122 bp, Homo sapiens
gactcggagatattttggctcctgcttctttatataggaggagccggctgcgtcacatggcgtcaggggccatgcaaatgagtcctgtaccgggctttgtggcccagttaaaccacatcccc

SEQ ID NO: 361509 - DNA, 122 bp, Homo sapiens
aatgtattaataaaaggggaaagtggagccggtggcatggggggtggtgtgaatgcccaccgaggtctgaagtggggtgcagatttgttcatcagcagaaagttactcgggtcatgtctgca

SEQ ID NO: 361510 - DNA, 122 bp, Homo sapiens
ggtggaagccctcggcgccgcctgcgggctgctcagcgctgacgcccaggcccatggcagcggctccgctcggcacccaggtccagtcccgctgcgcctacccggaccgacccgacgccagt

SEQ ID NO: 361511 - DNA, 122 bp, Homo sapiens
cggggaggcggattaatgtgtttgatttctcaaaagtctatttactgtccaatttatcttcgtccttggacatgctagcaagtaattattcttatggctggtaaaatgactgctaaacattt

SEQ ID NO: 361512 - DNA, 122 bp, Homo sapiens
gcggctttgtcttggcattatgcacctccacgccatccacgtaccagttgaactggacctcggggtcttcctggctcacgtccaccaccacgcacgtgacctcaggggtccgggagatcatg

SEQ ID NO: 361513 - DNA, 122 bp, Homo sapiens
gcgcagggtgcggggcgcgctgcgcggggcctcgggaggggctcccggagcccgtctgtgcgcctcccacctcggacccgctccactcccgcctcaaagccggggggctgggacgccgctcc

SEQ ID NO: 361514 - DNA, 122 bp, Homo sapiens
ccctggatactaaatttactgaccctgcctaggaccgagaagattgatgagtcctcaacccgtgcatgtcttcaaaaaggtaagacagaccagcaaagcagtaaaatgacagacccattgtt

SEQ ID NO: 361515 - DNA, 122 bp, Homo sapiens
caggtgggcttcctcccctttttcatgcaacagaccttgcagcctaccctggcacgtctgcgtgatactttctggaaactacgcagcccgaagtttactacccaaccagatccctcctgtga

SEQ ID NO: 361516 - DNA, 122 bp, Homo sapiens
gggatctggggcaagggtgttggcactgaaactggtctagtaacctgtttcccttctctgcgggctcccatttcctgtcctcctctctccctttctctttcagagacaagcagagggcagca

SEQ ID NO: 361517 - DNA, 122 bp, Homo sapiens
aaccaggtgtttgtaaacagggatgcagtaagccgtaaggaaaaccgcagagagaatgaacgtcaggcccggcgaaatgccgagctgttagctgcagcaattagagggatctcccacaaaaa

SEQ ID NO: 361518 - DNA, 122 bp, Homo sapiens
cgctgcggtacagggacatgccgggagcgccccacgcctagccccaccgcgctcccggcgcggcctccgccctggtcccgccccccgggagtcgcccgccctgacatcatcccggttatgta

SEQ ID NO: 361519 - DNA, 122 bp, Homo sapiens
ctcacattttcacatcacaggatttctcgtggttgcagaaggggcaggtgaactgggtctcgagggtgcctgtcatcttcttcttgggaggcggctttcgttttgactttctgcgccccatg

SEQ ID NO: 361520 - DNA, 122 bp, Homo sapiens
ctgcactccagcctgggccacacagcaagactctgtgtaaaaaaaattattttaggccatcgaactgtatacctgaaattagcaaattttattatatgtaaattgtatctcaataaagctat

SEQ ID NO: 361521 - DNA, 122 bp, Homo sapiens
gggtgcgctgggagaaatggacaaaaacacactttctgaggccggcttgcagcggctgcacgcaggcctcagctcctcggctccacctgcagctcccacagcccgcccgcactagcgtcgtc

SEQ ID NO: 361522 - DNA, 122 bp, Homo sapiens
tctccaccttcctccgtctggcttggcaaacttctaattagccttcaagcttcagtcaagcgtctgctcccctctaaaacctcccaggaacagcagacacctgcacttgacaaatttttggc

SEQ ID NO: 361523 - DNA, 122 bp, Homo sapiens
cagcccctcatcctctccgatctcccgagccgcccaaggccccagatctctctccccggccgtccccgccccgcagggcctcaagcccctgcgttcctcacgcaccccacggactctttgag

SEQ ID NO: 361524 - DNA, 122 bp, Homo sapiens
gagggactgccctcacctcgcactggtgcatgagctggaccaaggagtccccgatgaagacgacttcgggttccttatctttgctgtcagccacgaaccgatggtgctgcgggagcgcgcga

SEQ ID NO: 361525 - DNA, 122 bp, Homo sapiens
ctcattggtttctccctggctgccttgtttctggttttcagaagcctggttgagtttcttcgggttcatcctgcatggggctcactcatcttcagtctgtaggtttatcattctgaccaaat

SEQ ID NO: 361526 - DNA, 122 bp, Homo sapiens
tcagtctgacgcctgcagtcattaacaaagtaatccattaatcttcaaagttttgacacccgagggccctgcgtcccagccacataagttctgttaaagcaggagaaaggagcagaggaaga

SEQ ID NO: 361527 - DNA, 122 bp, Homo sapiens
ttttagggtccttgggcctgggggatgagagagatccagttctgagggtttcaagaggtacggtccccgaaaagcccagttctgagaggcctggtttggaaatctcgccctgaagattcctg

SEQ ID NO: 361528 - DNA, 122 bp, Homo sapiens
gccaccatccgtttcccaagggaacgccttttggaaactaccacgtgagtctgtgagcctcgggcaaacgcttcccgttgtgcgtttgcgcgctcccaacgccagaaggcgcctcccccgag

SEQ ID NO: 361529 - DNA, 122 bp, Homo sapiens
gacccaaggcccaggggcgtccccggaagtgacgtaggacgcgccctccattttgtggagcgccagagctgctaagtgcgtcagttgtggagtggcgtagacgagttaagtcctggtctgcg

SEQ ID NO: 361530 - DNA, 122 bp, Homo sapiens
ctaagaaaggcgatgacgggaccaggacgatgtcttctttccaaccatctatccgctaaacggtcaggcactggcggattggaccccacaacaattagaacatgttttagatgcttgtcttt

SEQ ID NO: 361531 - DNA, 122 bp, Homo sapiens
catctgttctcctagagtctccctttccccatttggaaaatatgaaataatattctcagccgtccagtgtttttcacggggtttaatggaaaaaggtgtgtatgtttacttagttaattgat

SEQ ID NO: 361532 - DNA, 122 bp, Homo sapiens
cctgcgtggcactagtgcgcatgcgtaaaggcgcgagggctacaaacgcggcgggaagcccgccagggccacgtgcggccgtccaggcttgcgattggcccgctgccgggtgcccccgcgca

SEQ ID NO: 361533 - DNA, 122 bp, Homo sapiens
gcagtaactcccgtgcagcagtaactgcagccgtgcagagtaaactcccagcacagaacccggcctccccggttcagaaacaaaagtgagctccctcctccctgcttgcgggcgaaactctc

SEQ ID NO: 361534 - DNA, 122 bp, Homo sapiens
atctatttttatgacttttaaaaatgattacttggtctgtatacaccccgttcttagtttcgaaattcagcaaatgcaagtgcttgttataagccaggtggtggtagactcctagggttaaa

SEQ ID NO: 361535 - DNA, 122 bp, Homo sapiens
accgcagggcatgctggaagtcgtagtttcttctgcctctgctgtcaggcgctgtcccgacgaaccacaaggcttcttgactacagcccccagaaaccccaagcaccgtgctaggtcatttc

SEQ ID NO: 361536 - DNA, 122 bp, Homo sapiens
gcacacgctgacgccgctgtcgctttacagaaattgagcgcagccgaggcgggacccgggcgcagagagcgataaaggaaaagcatggtcgtgctctaatcattacagtctaagggacgaca

SEQ ID NO: 361537 - DNA, 122 bp, Homo sapiens
ggtctcatttgctttggccgttggagcgtttgcatttgctgccgtttgcttgagtgactgcgcagcaagactctgtgctggagaaagccacgcccctcggggggaggcgccgccgccacgcg

SEQ ID NO: 361538 - DNA, 122 bp, Homo sapiens
gggaatccatcgggtttcaaaatatgtgagagtctcaaagaatgtaaagcaaatgaaaatcgcatccaataatggtgacacctacatttatgtagtgtttcattgcttaccaggcattttga

SEQ ID NO: 361539 - DNA, 122 bp, Homo sapiens
ccgaagtctagaaccctgggccggccgcaaaggaaggtctgccgcgcatgcgcgccccggcgcagcctatccggagcgatccatctcgttacgtcaccaccagcctagctcggacggcaagc

SEQ ID NO: 361540 - DNA, 122 bp, Homo sapiens
tcatgtctgaggtagagtaagacggtgtcagggggcggacccgggggcggagatgagcaccggccgcactggggcatcatcccggcccacccgggacgatgggccgtgggagggctcagggc

SEQ ID NO: 361541 - DNA, 122 bp, Homo sapiens
cctggaggaggggaccccggggactccgttaatgtgggaaccgtgattaatgactaaactcgagactccagaaaaatagattacaggtttgggggatgagagaagttgctccatgcaattgg

SEQ ID NO: 361542 - DNA, 122 bp, Homo sapiens
atttaaaggtaaaagctattggatctttgtgtgtatgtaggtatatgtgtctagatgttacgtgttgtttttagagggtagcaaattggcttataaattaaaaagcgttcataaattaagta

SEQ ID NO: 361543 - DNA, 122 bp, Homo sapiens
agggaacttcggttgcctctagtctttcctggagaaaaaagttcaatgaagaagctggggcgctctgtgtgtgcacattgtttgcatgtgtctgcgaatgtgcatgtctatctgcgtgcctg

SEQ ID NO: 361544 - DNA, 122 bp, Homo sapiens
cgctgcctgcagtccgcggggagggcggatgggtctgtgagtccgactgctgtgaatcctcgcttccatccctgcactgggcgctatgaacccgggcccatccacactcctctaaccactct

SEQ ID NO: 361545 - DNA, 122 bp, Homo sapiens
tgtgactgtttgcttacctggctgggatatacttatgtgactgtgattttatgtgtgccgcgtgtataattggggtttgcctgtgactatgaagtgtgtgacagttgtgacaagagtgtttg

SEQ ID NO: 361546 - DNA, 122 bp, Homo sapiens
gggctcggaaatagggagcggtgctaggttgcgcgtgcgcagattgagaatggagctttccggtcgggcgggaggaggtgacgtcaggagtggtggcgggcgggggcctctggtagccctgg

SEQ ID NO: 361547 - DNA, 122 bp, Homo sapiens
tctcctgatccctttggcccacacgatcacaagagggtttggagtaagacgcctgcatctcggagaagcgcattttccaagtgctggagctgggcgggcaagaacaccccgcgtcacaggac

SEQ ID NO: 361548 - DNA, 122 bp, Homo sapiens
cgcacttccggggtcaaactgcgattccgcaggagcagacaggaagtctcggcctggccccgcccccagagccgagcaaactaccgccgggaagccggacccgggttgcgcctctcttctta

SEQ ID NO: 361549 - DNA, 122 bp, Homo sapiens
gggccgctcggccggcagcatccttggggagagcagcaccgaggccagcaagacgctgcccgccatcgaggtgggcccggcgagcggccccgggcgggtgggactggggcttcccctgcacc

SEQ ID NO: 361550 - DNA, 122 bp, Homo sapiens
agagtatcagacacttgcccaacttctgacaataagaaatcaataaagcctggtgttgaacgcaggtttatcaagctcttaatattctacatgaaatatcgttgtagctgtacccaagctcc

SEQ ID NO: 361551 - DNA, 122 bp, Homo sapiens
cagtgtaggtgttcggaccctttagagggaacttagaagtcccataaattgtgtgggagacggggaggtagcagcggtttgatgaaacttaaatggaaggataggtgcagatcttgcacctt

SEQ ID NO: 361552 - DNA, 122 bp, Homo sapiens
cgaggcccatgcactgcccgtgcggagcgttttgggggtgtaggtggccggtggcgcccacgggccctcttgagtaaggcggctccgcccaggccgtcccggggcctcggctcggctcggct

SEQ ID NO: 361553 - DNA, 122 bp, Homo sapiens
gccacccaccatgactggtggagagaagaggaataggagattctgggcaatagactctggcgccaatttggctcaggctgtttctggttgtatagccccggacaaatcacctctctgagcat

SEQ ID NO: 361554 - DNA, 122 bp, Homo sapiens
ctttatgaccagtattttgtgccgaccttctatctcatcctgttgagaggtgacagcgtgcgccctccctcgctctcggcgcctcctcggccttggcgcccactctggccgcgcttgaggag

SEQ ID NO: 361555 - DNA, 122 bp, Homo sapiens
gtgatggcccagttgggcgatgctgtgggtctcagtgtgcccattctttgggagccctgacgtggttccatgtggggctgcgccaggggacaggaggcacaggcccactctccacagtgtga

SEQ ID NO: 361556 - DNA, 122 bp, Homo sapiens
caagttcgaggctgcagggagctatgatcgcaccactgcactccagcctgggtgacagagcgagaccccatttcaaaaaaagaatgtaatggtgggccgggtgtgatctctcatacttgtaa

SEQ ID NO: 361557 - DNA, 122 bp, Homo sapiens
cgccctgtgcgagtgctgcgatggaacggccgggaccgcacacctgcccgagggaaccgccgagacctacctgcacgatagtggggttgtctcctgagcctatcagataccgggggttgctc

SEQ ID NO: 361558 - DNA, 122 bp, Homo sapiens
aagcaagtccaggagcctccaagaggcaggcatggtggctcaagcaggagaggaggaggacgctgagtgtcccgctgggtcagtgtcagaagagagtttacatccctcaggaaatgatggcc

SEQ ID NO: 361559 - DNA, 122 bp, Homo sapiens
cgggcccgcctgggccggcgcctgcgcagcccgcaccgcccgtggcccccacgcccccagcgctcccgcctgcgccagcgccagcgcccaggccacggctctccgtgctcttggggaagggc

SEQ ID NO: 361560 - DNA, 122 bp, Homo sapiens
actctccccctgcagaggtccaggggacccaacagccccagcaagatgagatgcctagcccgaccttcctcacccaggtgaaggaatctctctccagttactgggagtcagcaaagacagcc

SEQ ID NO: 361561 - DNA, 122 bp, Homo sapiens
cgcacggctcccaggcaggcaggcgcgctcgggcgaggtaggagcgatgtggcctgggaacgcctggcgcgccgcactcttctgggtgccccgcggccgccgcgcacagtcagcgctggccc

SEQ ID NO: 361562 - DNA, 122 bp, Homo sapiens
aatttccccttcccctctccacagtgggcaaggccacctcttcccaccccctggaacctccgtcggtcagggtaggccctcttgggagtttctgctggcccagtactggtcccgggggactt

SEQ ID NO: 361563 - DNA, 122 bp, Homo sapiens
tggggtccagcagctttggaggactgagctgctgtgaccggagaacacgagctgggcaggcgtgggggcagcactggcagtgggggagggaagttggttattaatagagatgatgagcgcaa

SEQ ID NO: 361564 - DNA, 122 bp, Homo sapiens
ccaggtgcggcgctggtgacaggttgttgaggcgccgcgtgggcgaggactcccgcgatgcgtacaccatctctctctgcgcagaagacagcccggaaccccacggggctggtcaccaaggt

SEQ ID NO: 361565 - DNA, 122 bp, Homo sapiens
gaggctagaaacagaatgtatacatagtgtgcaatcatgtatctagcattacaaaagtctcgtctgagaagtcagccagttccccctgggaacatatgaccctctgctaactgtctggtggg

SEQ ID NO: 361566 - DNA, 122 bp, Homo sapiens
gaaacaaggtaatggtatcaaatgttatatgtcatcatctttctaggatgttaattcacacgtgcactggtgactgctggcatctatgtgctacctagttgtgtgacaaacttctgtgacaa

SEQ ID NO: 361567 - DNA, 122 bp, Homo sapiens
tactcatcctgctccagccttggatgtaatcatttattcaggagccctgattccttatagcggagaatggtatttagcactaggtatgctcactgctattgagatatccatagcccaggctg

SEQ ID NO: 361568 - DNA, 122 bp, Homo sapiens
ttcacactgggccagcacctctttggccatagggggagagtagggacgacaccaccaggacggctccccaaccctgacaggcacccattaatagcaaagcgacgcgtgcgacaggcaggaac

SEQ ID NO: 361569 - DNA, 122 bp, Homo sapiens
taaaccagagacttgaattattggcaaatgtccagacaacattcacaatgcttactagcacgctattgccatatgtacctggaaagagcagcataaagaagccatctaatgatattacacac

SEQ ID NO: 361570 - DNA, 122 bp, Homo sapiens
gtgcctcccggagcccggaccaatgcaccagagctgagggcccaagggtgtgagggtggccgggcagtggccccgaggacggcgccccacaagtttgcggccagggcccagcaaacccctag

SEQ ID NO: 361571 - DNA, 122 bp, Homo sapiens
cccaccccgggggatactcggggaggcaggcaccggatggggagcgacgggtttttccttcgggagaggccacccgggcacggtctcctttcgccccatcctcaggcacacctcgccgcgcc

SEQ ID NO: 361572 - DNA, 122 bp, Homo sapiens
tggctaacggggggcaagacaggggtcacggggctgagtgtggaagccctgcgtggaaatcgagagagccctcaggaggtcttgggggatcaaacccaaaggtttccaagagccgggctggt

SEQ ID NO: 361573 - DNA, 122 bp, Homo sapiens
cgttcgtggattggaagactcagttacgctgacgtgttagaacttgagaaatataccgtccgtgttcgtggattggaagactcagttacggtgacgtgttagaacttgagaaatataccgtc

SEQ ID NO: 361574 - DNA, 122 bp, Homo sapiens
atttaacctacctctttttttctactagttgtctgacttggtttgatgcaccttttgtttcgattttattctgctctacccatggacagctgcccaacatagccacacctcaccctgctgcc

SEQ ID NO: 361575 - DNA, 122 bp, Homo sapiens
gtcctaagagtataagccctaaggacacagaggcagagtagtgcctcagatagctattcccgccaaagaagcataggagtccacatacccacaaacaaaccctccctctacacagcacaccc

SEQ ID NO: 361576 - DNA, 122 bp, Homo sapiens
cctgtatgcggcgtgtcttagggaggcccaggcggacgcctgcaagtcgggtgcgcggttcgggggcggctcggaaaccccagcggaaggcagcaaggggcgcgtggggccgtggagtcacg

SEQ ID NO: 361577 - DNA, 122 bp, Homo sapiens
ttctgtatacccaagaatccacctggtggggatggcgggggttgggggggaagggggggacggaaatgacttagcctgaaggcaggctgtttgacagctagggcaaaacagtggcgagaaga

SEQ ID NO: 361578 - DNA, 122 bp, Homo sapiens
tcccaattcgctttacatctctaatcgttgattcgtgcgtcctgcacgtgaggtggctttcgcaccccttctctccttttcatcgccccctcctcatcacagccattcccctcctctctccc

SEQ ID NO: 361579 - DNA, 122 bp, Homo sapiens
agggcaacctcctgaagaacctcaagcaccgcttcctgcaacaaaagatctacacgtacgcggggagcatcctggtggccatcaacccctttaagttcctgcccatctacaaccccaagtac

SEQ ID NO: 361580 - DNA, 122 bp, Homo sapiens
cgtgccaccaccgccgccgctgccatggtcatgcctgctgcctgctgccgccaccgccgccgcgccgctctgcgactgctgctgcccggcccaagatctacccgcgctctgccctgcaggag

SEQ ID NO: 361581 - DNA, 122 bp, Homo sapiens
atgagaatacagaaagtggctttgctaagttgcagagaacagggaggtaggatttttttccggtagtttttgatgtgttcaaatgtgatcaagatttatgtagtaactaggcgtttgactta

SEQ ID NO: 361582 - DNA, 122 bp, Homo sapiens
tgtattcattagtttatttgtttataggctaccttgtcccaaaagttatttagaggactccgagaggtttatgacctgatccaggccacacagagctggtaagaggcagaacaggacacatg

SEQ ID NO: 361583 - DNA, 122 bp, Homo sapiens
gccggcgctccggggccgctagggtgcggggtgcgcctgggggtgtgcccacagcccccccgctgcttcatccaaggatgctgctggggcgctgaagtgtccctacagtctcaggacggatg

SEQ ID NO: 361584 - DNA, 122 bp, Homo sapiens
gaacttggcatttgcctcgctgacacctagcaaccgtgtgaagacgcttagctggggatccgctgcctctgttcatcaagcctgtcttccaccgcccacctcccaacccctagcaacccccg

SEQ ID NO: 361585 - DNA, 122 bp, Homo sapiens
agattcctgagtgctactttaaacctactgaagcagaaactgtgaacagagcccagaatccgcatttttcacaagccttcaagagatgattggtgtagcccctggacccaggaagtgaacta

SEQ ID NO: 361586 - DNA, 122 bp, Homo sapiens
atattgatgaacgtttggagaatcgatttatgacaagggagtttactcttcctgcatccgcggcttcttcgtgattttgtcctagtcaccgggcctatcccacctgctggggatgccgcccc

SEQ ID NO: 361587 - DNA, 122 bp, Homo sapiens
ttgttcattcaagccatccctctctgggggtggacaagccacttcctctctgctcaacatcgaaggcaactgaggcaagcatttgcccagaaattcaggctcaaatttctgatcttttgctt

SEQ ID NO: 361588 - DNA, 122 bp, Homo sapiens
agttggattattttaagcgccactaggttcttcctgtgctttgcgttttctacatcacgacgccccactctttccactctagttgtttggttcatgtcttgtctctcgctggcattagcagc

SEQ ID NO: 361589 - DNA, 122 bp, Homo sapiens
gtttggccgaaactcaacacctcttagaagtacagattagtggagaggaagaaaggagaacgcattgtggaagttttcaagaaggagacaaagatgcctgtgttttgtatagctcagctgcc

SEQ ID NO: 361590 - DNA, 122 bp, Homo sapiens
cagcggaccccagccttctcaattcccagttaaaacccaggcagctgcctgctcaagccacgatcaagtgtacaggggagaccgcctgatcggcttagaaagagtgcatgaacgacagaatg

SEQ ID NO: 361591 - DNA, 122 bp, Homo sapiens
gcaacggctgcggagggagatgtaagtcgttttggacgcaggctcagtgtttggtcccagcgttcggtggagtccggagagactcaggatcagatgagtcggggtctggatgtggctccaag

SEQ ID NO: 361592 - DNA, 122 bp, Homo sapiens
ccttcacatgcctacacatgcatggccggattgaggtagggccactagactcacctgtgtcgtgtctatttgtatatctgtttacagccagttcggccaccctcggcctgcccagcagtgcc

SEQ ID NO: 361593 - DNA, 122 bp, Homo sapiens
gcacaaaatggagcggactagtcaacgtcagctacaggataactgacttttcttcagcagcgtcactgggactgattttcccttaagactgcactttccagggacgtgacaaacaagcaagc

SEQ ID NO: 361594 - DNA, 122 bp, Homo sapiens
gggttttgtcttgcgtgggggctggaggagcccagtcttaccttgactaccttcagcacccgcacatcctggtccagcccacgcttcccctggaaatgctcctgcctcagaaactcctccac

SEQ ID NO: 361595 - DNA, 122 bp, Homo sapiens
cgaccctacctgaaacggcaagcagaattcggtgttttcttccttttgccctgatcttgacgagataggaaacttgggagagagagagagagagagagagagagagagagagagagagagag

SEQ ID NO: 361596 - DNA, 122 bp, Homo sapiens
cagacactgtccatgtggccaagagagccagggcttcctacaggaaatcaggcccattatcggcacccaactgctgggcatgaccgctgaaaggggactgcatgtttttcttgtggcttctt

SEQ ID NO: 361597 - DNA, 122 bp, Homo sapiens
gggatctctgccgtcaccctcaggcagccagagattcatgggggaagcaaaacttcccctcggagggtggagcataagtcgaggacactgattattctgtatcctgtgtttgtaaaatggca

SEQ ID NO: 361598 - DNA, 122 bp, Homo sapiens
ctaaccctaactccactgtccgctcatgagggaatgggatgaccaaggcaaatgccgtctcggcatcattacaggaagagtttaacctcttgagccacactcagagaaaagctggccgacgg

SEQ ID NO: 361599 - DNA, 122 bp, Homo sapiens
gcaggcagcacccgtgggcagacactcagggttgaggccccagggcagaaaggtggccagcgtgccagaggagagtgcagccgggcctgtgcgccgagggcctccaggctgttgggctggag

SEQ ID NO: 361600 - DNA, 122 bp, Homo sapiens
tctcaaagagattaaacgactctactcatctgagctaacccaacaaccgagtccggctgtcgtgacactaccaagaactctgcctaagtgagtcgcaaaagcaacccttagatttcacacgt

SEQ ID NO: 361601 - DNA, 122 bp, Homo sapiens
cagaagcagcccccagccccccacttccagcgcttctgggagtgcatgtgcgttgctgagcgtggcctgagcccggtcagcggccgggcgccggtggcagcccccggtcccgcggcgacccc

SEQ ID NO: 361602 - DNA, 122 bp, Homo sapiens
tgtattctacaagatctagtatgagttttctctactctgtgaagcttttctgcctctccacgtcaactcctgtagaacgtagcctccctagtactcattttgtactcagccatcatcttgcc

SEQ ID NO: 361603 - DNA, 122 bp, Homo sapiens
ggctggtagacatgatgctcattaccgccttccacagagggaaactgaggcacggtgactcgctgagggcacatggctgacggaggcagaagcgggtctcatcttcaaaacagagctcctcc

SEQ ID NO: 361604 - DNA, 122 bp, Homo sapiens
gtgccccgggctgcccctgggagcgctatgcaaatgagatgcaaagtaggccgaggcagccgcaaagattggctgccgcagaggctcagtccgcccaatccccggccgcccgccatcctggg

SEQ ID NO: 361605 - DNA, 122 bp, Homo sapiens
tggacttgtcatacgtgatgccgtgagcagagtctgggcaggcgggggcggtgagagccccgtgggcagtgtctgggcaggcgggggcggtgagagccccgtgggcagtgtctgggcaggcg

SEQ ID NO: 361606 - DNA, 122 bp, Homo sapiens
acaggtccgtccccaaaggccccgcttctcaacgccaccacatcgagggttaagcttccgcgtgaattttggaggtggctcattcaaaccacagcagccaccatcaccacaagccaggtgcc

SEQ ID NO: 361607 - DNA, 122 bp, Homo sapiens
tcgggggctcattcaactcctgtttctcctgaagcatcttgtaaacttcagattctttgtcgatgacaaggctgcttggaggctgagcatggtctaagctgtaaagaatgtttgaaaaattg

SEQ ID NO: 361608 - DNA, 122 bp, Homo sapiens
aggttttggtactccctgcactcaccttcagacacctgcattactgtttgacaggtgtaccgcaccagtccgactctgcacttggcactattccaggaccagttaacatccagccagcatgt

SEQ ID NO: 361609 - DNA, 122 bp, Homo sapiens
atagtgcatctgataatgaagacagccactaagtgactcacgggagagcattgtagacagcgtggacacgctggacaaaggcatgattcacatcccgggagggagagggacagcacaagatt

SEQ ID NO: 361610 - DNA, 122 bp, Homo sapiens
cagtggcagacactgggtgaggatccccgatgattcgagtcacactgtgctggccatgagcgtcaactgttgggcgcgctgtacggccaaccctgagccagctttcctgtacctccaggccc

SEQ ID NO: 361611 - DNA, 122 bp, Homo sapiens
gacattaaccacatgcatcagttggatggcattcctctcctaggtcaagcctgtggctcccgcctctgtaaatatctggtcctcctctataaccttgaaagctacctatgaacactccttga

SEQ ID NO: 361612 - DNA, 122 bp, Homo sapiens
aaggtgcgtctgcggcgaatcccgtcgcccagcgcacggcagcgggtgtgcctgagtgcgcgtcgcctcccaaccagagaggacgtggcatacggcgccaccggaagttccggcaagtgggc

SEQ ID NO: 361613 - DNA, 122 bp, Homo sapiens
aaggagccagcagaccacgaggccccgccacggggcacagacaccagcagccccacgatgcgctttgccaaccattcccccaacacaagacggccaagctggagccaggccccagcgagaag

SEQ ID NO: 361614 - DNA, 122 bp, Homo sapiens
gtgaagcgggtgaagaggagtgacctgacttgctggggactgagatggcagcaggggaggcgagctgacctgcccccattccagtggtgggccccttcgcggttccctctggctcaggggcc

SEQ ID NO: 361615 - DNA, 122 bp, Homo sapiens
actcccgttcccgctccagcgccggcttttccagccctcctgcccacgtccgccgggccgcgcctccaagactatgcgcaggcgcagtcctgacgtcctacccccggttccaagaccccaag

SEQ ID NO: 361616 - DNA, 122 bp, Homo sapiens
gagagagagagagagagagaccccttctctggggaccaggaatcttctggtctttggggtcggacccagaggagaggttgctgggcgtgccccaggaaggagatgaagtttccctggagagg

SEQ ID NO: 361617 - DNA, 122 bp, Homo sapiens
aggcataagccaccacacccagccatctttgctatttaaaaaattaaacgtggctgggcgcgatggctcacgcctgtaatcccagcactttcagaggccgacgtggccgggtcatgaggtca

SEQ ID NO: 361618 - DNA, 122 bp, Homo sapiens
tgagggaggacactagaatggccaggctcccgtggctggattccagcaagcctttcatagcgtcctctgccatgcaggcctggagggtgaagcagttcaggttgcaggctttgtgactcctc

SEQ ID NO: 361619 - DNA, 122 bp, Homo sapiens
cgcgcgaggttgccttggcagtggctggagggcaggtgggggcgcgtgcgcgcagaagggcgggggagggaccaccgcgcgccagcaggtgggcgcgttctcccgcgcgcgtgcgcgcgtcg

SEQ ID NO: 361620 - DNA, 122 bp, Homo sapiens
gcctgtgtttttcaagcaacagcaacagatcagaatttggagaaagggagtgctgaaaagcgtccttgagataagatttaaagccaatgtcttgaaggctttcaacaacgacaaaggaacaa

SEQ ID NO: 361621 - DNA, 122 bp, Homo sapiens
cttcctgccaggctcctgcaccctccggcttctgttgggttcagttctgggaggcagccccggagtctggagggtggaaggagtgaggggcatcccctgtcccctccccacagtcttggcag

SEQ ID NO: 361622 - DNA, 122 bp, Homo sapiens
gctggctgttccgggctgagtggcacgagcttattagtatgcagggcccgtggctcgccgcgccaggctgcaggtttgagagccgctctggatgggctcgctagagtcgttgttgtggaagc

SEQ ID NO: 361623 - DNA, 122 bp, Homo sapiens
tattagtttctttttgctgtaaggccatagaacagaggatgtcaaaacccaagtctcttccgcttttcatttctaagatgttgtgaccatcccgagtgtgataattgtctcctgtcccgttc

SEQ ID NO: 361624 - DNA, 122 bp, Homo sapiens
gaggaaatgcccctgcaaggaggccccctcagtgactgaggcttcatctccagatggcagcgtcctctgcctcggaagtcatgttcccatcaccccggcccctttatcttcagcacaaatgg

SEQ ID NO: 361625 - DNA, 122 bp, Homo sapiens
ggagccgcgaggccccgcccccaagccgaggcctcataaatgctgcgacgcacgcccagccgcaaacagccggggctccagcgggagaacgataatgcaaagtgctatgttcttggctgttc

SEQ ID NO: 361626 - DNA, 122 bp, Homo sapiens
tccaaaccctcgaggcggatctttggacagaagcagctcttccccgaacactgtggcgtccgggacggccccacccgtccccccacactccctcccacggggctccgggagacaggccggcc

SEQ ID NO: 361627 - DNA, 122 bp, Homo sapiens
aaaaaaaaaaaaaaaaaaaatcagctgggtgtggtggtgaccccctgtcgtcccagctaccgggaggctgagaggctgaggtgggaagattgcttgagctgtcaaggctgcagcgagctgag

SEQ ID NO: 361628 - DNA, 122 bp, Homo sapiens
gcagcgcctacaacggcaacgacgtggacttccaggacgccagtgagggcagggcctggccgggcggccaaggggccagggttggtgggggtgccacaggggtgtgactgccctccgggttc

SEQ ID NO: 361629 - DNA, 122 bp, Homo sapiens
gggcggaggcggtgtcccgcactgtcccaccgcagggccgacctcggcccttatctgctccggcagcttccgccccccaactccagcccccgccgcaggcccggcccccggccccgcccccc

SEQ ID NO: 361630 - DNA, 122 bp, Homo sapiens
agtcagatttctggaagatattgtataattttcaaagcactgccacatacatggctcaggcgattcccccaatattctgagatattactgagactaataaacaaggaaataagaagttaagg

SEQ ID NO: 361631 - DNA, 122 bp, Homo sapiens
cggagcgccgcccccgccccgccccgccccgcctgctcagagtcccgacccggcccgcggcgagcgtccggggaaggaatcctccggcacctgggccctgcaccgacacccgcgggtgcggc

SEQ ID NO: 361632 - DNA, 122 bp, Homo sapiens
aatccagcttgcctgaccttgcaagcaagcatcggcctaaaggtttcagcctcccagtggcgctctgtttgcacgccttaggctaggagaggaaggacgggagcacagcactgggtgcccct

SEQ ID NO: 361633 - DNA, 122 bp, Homo sapiens
tcttaggtcctgcatagattcatggttccttatgggctctagatgggtctatgtccatcccgagtcagtcactgggggatgcagtatttcttgccaggcctaagtcatatactcatcccctg

SEQ ID NO: 361634 - DNA, 122 bp, Homo sapiens
tatgtacttttctcacagacaaggctggcagtgagaatcacccatgtttttagataatttcgaaagtcctctgaattgtacgtgcctgtgaaaaaaggaaacattaataattggcatcatac

SEQ ID NO: 361635 - DNA, 122 bp, Homo sapiens
tctggcacgtacggcgtctaggaagttccggggaggatgaaccagtcaggattccgctcacgagccgtagctccgcccaccgaacggagccccgtccataggcggaagtcccgcccatagag

SEQ ID NO: 361636 - DNA, 122 bp, Homo sapiens
ccgagaaagtgggttggttcccttcctccttcggactgaagcggcagctgcggaaggctccggcgcggtactgaggaagaagcggtgctcgtgtcgctaaaccaggcggcaacccgggtctc

SEQ ID NO: 361637 - DNA, 122 bp, Homo sapiens
tgtgtcgtgtgaaggcgaaacccggtgtacataacccctccccctccgccccgccccgcccggccccgtagagtccctgtcgcccgccggccctgcctgtagatacgccccgctgtctgtgc

SEQ ID NO: 361638 - DNA, 122 bp, Homo sapiens
cggcccgaaaacctgtgtcccattgtgggctcacgaggacatgggtcagcacgagcacaccgtgaggtgcacacgggtgcacacggcacccccgccccgcgatgtgtgcctgtctacacacg

SEQ ID NO: 361639 - DNA, 122 bp, Homo sapiens
aatctgcgtgcgcccagctgtcaaatctgcaaacctatcacgccagacaatgggccgccgcggaggacagacaagaatggctcattttgatcgaggggggtaaattgaaaagggcacgggct

SEQ ID NO: 361640 - DNA, 122 bp, Homo sapiens
ctctcctctgcacacgggcgggtgtgcacgctggaatcacggctggggtcactcccctctcggggcccgccagagcctccttcaacgctggccagaataatcacttgggctgcctgtggttt

SEQ ID NO: 361641 - DNA, 122 bp, Homo sapiens
tcccatgcccgcccgcccgcccgcccgcccgggcccagcttagcaacagcgatgggcacgcgtgtgtcctgtgactacaaaacagcactggggttgctggaagccgaagtgacccggtgatg

SEQ ID NO: 361642 - DNA, 122 bp, Homo sapiens
gttaccggcgactagtatggggagccaggcggccggagctgcgcaggcagtgactcagggcggcagcggcagcagcagcgggaggagcaggaggcggcgccgcgagcagatggcgctaaaaa

SEQ ID NO: 361643 - DNA, 122 bp, Homo sapiens
ttggatgaactagaagaagaattaaatacacttgatttagaagaatgacaccaaacacatcgctgaaaaaattaagtcagctcagcacgagttgaaattgactacattaatttctttccacc

SEQ ID NO: 361644 - DNA, 122 bp, Homo sapiens
tgccatgggggaggcagaaccctggacacagcccagctccagggcgttgtctggggctcacgccacctctgagacacccgcgtagggggcgcatggctggcttgtggctggcagatgccggt

SEQ ID NO: 361645 - DNA, 122 bp, Homo sapiens
agttcctgcgcctgctcttgggacattgacagacaagaccaacccgagcatctcagaggccgcacatgacctgcccggggccctcggtgaggaccatgtcgctggatggacacagagagact

SEQ ID NO: 361646 - DNA, 122 bp, Homo sapiens
gcactcaggcatgcgaggactgccaccgccttcataattcaccccagggcccaccacccgcgccccaaccacatgctcaaagtgagggagagaaggcatcacagggcacggaggggatccta

SEQ ID NO: 361647 - DNA, 122 bp, Homo sapiens
ctgtggcttctctcaggaaatgctaggccacaacacaggaaaaatggtgttttcatatcacggttcgtttactgcagtcagagcaaaaaacgacagcaaaacattctaaaaatgccaagcac

SEQ ID NO: 361648 - DNA, 122 bp, Homo sapiens
caaacaaaaaccccattcactgcagggcccttgttcccttgtgacttgcctttgtatttacgttgatcaattgctgtttgtgtgtgttataggctagtaaaattcaacctttcgttgtgata

SEQ ID NO: 361649 - DNA, 122 bp, Homo sapiens
gcgtgggcgtttagtgctgtcgcagttctaaggttatcctgtaggatgggtttggcagagcgcagcggctcactcctgtaatcccagcgctttgggaggccgaggcgggcggatcgcttgaa

SEQ ID NO: 361650 - DNA, 122 bp, Homo sapiens
ggactccggctccaatccctggatggctttaagtccagcaaacctttctgtttttcctatcgctcttctctttgcttaacctctcctctttcctccagacccacttaaaagcagttcatcag

SEQ ID NO: 361651 - DNA, 122 bp, Homo sapiens
aagcggaggttgtagtgagccgatatcgcgccactaaaaaaaaaaaaaaaaaaagtaaggcgggcccaggctgctactgcgcgagcccagccaggcccggcccacttgctcagagcgtggcc

SEQ ID NO: 361652 - DNA, 122 bp, Homo sapiens
ctcaaaccctgcccgaaacttctaaaaatggtgcctggataaatgaaggcattagagctgcgattggacggacggctgttggacggcgccactgctggcacttatcgggagatgctcattgg

SEQ ID NO: 361653 - DNA, 122 bp, Homo sapiens
gcggattttactgaaggcaacgtgtaaactgataccgaactccccgcgtctacgcagtgccgcaggcacagacttatgaattcgggaaatgtggaagtgaaaaggacaaaccctaaactaaa

SEQ ID NO: 361654 - DNA, 122 bp, Homo sapiens
tctttctagttctgaagcttttgctccagtcaccctgaattttgccagccctatgcatgtcgtaccttggattgccaccccaccctcactggagccaatttctccggttagaatagttgccc

SEQ ID NO: 361655 - DNA, 122 bp, Homo sapiens
gggctcaggtgcacctggatgtgaaagccgggaaggcctccctcactcccacacagagcccgtggattcgtctgctctctgggtgctgggttatctccttggctctgtgaaaaggtctctgc

SEQ ID NO: 361656 - DNA, 122 bp, Homo sapiens
accgtggactgaaaccggtggagctgctctaccacttacacaacctcttcaactggcttccgcaggagcgggacaagctgttaagattccggaagcaaagaaagaaaatggcaaaacttccc

SEQ ID NO: 361657 - DNA, 122 bp, Homo sapiens
aagaagaaagtgtccggtttaaggtcaacagtcctcgagggacgccccaggtggattccccgggtgggctccccgggtgggtggaggcctgcaagccccaccgcgattagggagtgggccca

SEQ ID NO: 361658 - DNA, 122 bp, Homo sapiens
attacccagattgtaactgaagaattgcaacgcagcgcttctgtctgggaaaggcagctgcggcagcaacagctggagtagtgcaagcgggaatctgaggctcagtaaaagtttgtaagagt

SEQ ID NO: 361659 - DNA, 122 bp, Homo sapiens
cgcagtaggcgagctgcctgtacgctgcgatctcctcggcgggcccaagagctccagacgcgcctgacaggcactcggttccgcccctagcccgctgctccagggcctccaccgcccgcgct

SEQ ID NO: 361660 - DNA, 122 bp, Homo sapiens
agtaggcacccgcaccatacctgctgtggacagacggcttctctctgccaagcagttacacgcgctgtgcattaaggcccagagaagcggagtttcacggccctcccacggccaaacccttc

SEQ ID NO: 361661 - DNA, 122 bp, Homo sapiens
cccaaattgttctacagatttaatgcaaatccagtaaaaaattcaacaagaggctgggcgcggtggctcaagcctgtaatcccagcactttgggaggctgaggcaggcagatcacaaggtca

SEQ ID NO: 361662 - DNA, 122 bp, Homo sapiens
cccgacaaccttgggctggtggggcagagccccgtgaccttgtccacacggggcgggggccgcagcgacattgtgcacgccgggtgggggccctgcgacattgtccacgaccttgtgcacgc

SEQ ID NO: 361663 - DNA, 122 bp, Homo sapiens
gctgccgccgcgcctgctgcgagatggcgatcttgggcgcggaagggtgagggcgcccgccgcaggaggaggtgccgctgccgtggccgcccggctgccgggagccgacagcttcgcgccgg

SEQ ID NO: 361664 - DNA, 122 bp, Homo sapiens
acctgaaaaaaacccgtagatagcctcggagaccgccgtggccggtgatctgctgcagcccgcgtttcaggacctgcactaactccatcttgcctcgctggccccgcctcccgggtgcgccg

SEQ ID NO: 361665 - DNA, 122 bp, Homo sapiens
ccggagccgaaggttgtgggctccaggcctctcagtgaggtttgttgcttgtgtgtttcccgaggagcgggcagtcaggcagtggtggttctctctcccctctctctgtcgcacgtggggtc

SEQ ID NO: 361666 - DNA, 122 bp, Homo sapiens
ctctgtgaagtccacctggagaccttcaaagggggctgctccataagcttctatggcgggcggaacggctggaccttgcctcgcatcatgctgtcgcaggtaacacaccgctgcctcaccgt

SEQ ID NO: 361667 - DNA, 122 bp, Homo sapiens
tccctctaatcaccccctcgccagttagccatggaatagaagaaaacagcttggggggtgcggggagggtcttctccagctgtaatgccagctaaggtgctttggtagcaaagctgggggtg

SEQ ID NO: 361668 - DNA, 122 bp, Homo sapiens
tgagctgcatctcggtgcagtatttccactgctggaacacgtcagacagcttgtccaggccgccgtggtggaagtggaaaaccttgtactggctctctcggctggcaacgaccagctggccg

SEQ ID NO: 361669 - DNA, 122 bp, Homo sapiens
ttcagttcgtggcctggcattttgtgtcagtgttttttaacctttggaccctagttcaaccgactccgagacctaggggacagatcttaagttttacaataacccaggggtcagacagggtc

SEQ ID NO: 361670 - DNA, 122 bp, Homo sapiens
tggatgccaccccccagcgggtaccagaggaaagctggcagcaggcgcctcctcccccaacgcatcccagccagtgccatgtcctctgcaggtggagttactggcctactccttccccatga

SEQ ID NO: 361671 - DNA, 122 bp, Homo sapiens
tgagttggttgacatgtggttatttcacccatcgtatttcttatagggaataggtaaattcgttccttgggtttctttcaacacttaggtaaaatccgacgtggaagatgagatctgatttt

SEQ ID NO: 361672 - DNA, 122 bp, Homo sapiens
gattcctaattttaatcactgcaatgtggcatgtaggtgatggccctcaggaaatgcacgcgaaagtatttaatagtaaaacggcatggtgtctgcaacttatcctcaaatgcttccataaa

SEQ ID NO: 361673 - DNA, 122 bp, Homo sapiens
ggcacgcggcgagggtggccagcgccgacaccagatccaagccctcaaagagcatgttggcggccgctcgggggattggctgtgccggccgcggcgggggaggggagggcccgacgggaggg

SEQ ID NO: 361674 - DNA, 122 bp, Homo sapiens
cacagaccgcagtggagcctcacagagacaccctcacccaggggctgcgagagggccctacgggccccggggtggaatcggctctctagggggaaagtggcagaaatggctttacttctcct

SEQ ID NO: 361675 - DNA, 122 bp, Homo sapiens
atgaagaatttgttaaaccaggtttcccacctgtgccacagttcccatcaattctggcaacgcctgccgccttacctcccaggcaggccacatcgttaagatcagtcttcgtacttctggcc

SEQ ID NO: 361676 - DNA, 122 bp, Homo sapiens
gcgcgggcacgggcggcgcggcggttacaaactgggcgctgcctcggtcccgccgccgcccgcgttcactccgtacccatcaagaaggcacctaatgcgtgtggggcccgaaggggcctggc

SEQ ID NO: 361677 - DNA, 122 bp, Homo sapiens
cactgtgaatgtttgtgagagattaatgtttgtggatgatgttatcactcctaaatagatcgtaaactttcatgcagaaaggtatgtgtatatgtattgggtctgacatttcattacaaata

SEQ ID NO: 361678 - DNA, 122 bp, Homo sapiens
ggaggcttgaaaaatttctcctagatttcagaaagcctttgtgcccagtcagaaaccagccgcaggggcaaagcccttgctgagaaattctactaaggcagtgtgaagtgaaatgtgaggtt

SEQ ID NO: 361679 - DNA, 122 bp, Homo sapiens
atgaatgaatgaatgggatgaaggaatgaattcttgctactgactggtgcatagttgctacgcacatccacctccaattcagctccctgctggagtctgaaattgaaggctggtggagagag

SEQ ID NO: 361680 - DNA, 122 bp, Homo sapiens
cgctgggcctctgtgtggattctgtggcacgggtgggatagtagcctgggccacccagaacgctggcctcacccttacccaagtttcagtatacccattctggaataggacaaatctgcaga

SEQ ID NO: 361681 - DNA, 122 bp, Homo sapiens
agggcgtgcgagcaggggccgtctggcaataaaccggccaatgggggactgcaaaagcggcgcctggagcctatggagaccgtgtgtggctggtgggggtgggatttaatgggatttggcgg

SEQ ID NO: 361682 - DNA, 122 bp, Homo sapiens
actgctacagggtccaggaggtaaactgaacaagtgaagcagcagctggtgtaaggcagtcgacgctggtggggactgcagcaaatgacagaatgtatgcccagtttaaagctccaacttcc

SEQ ID NO: 361683 - DNA, 122 bp, Homo sapiens
gcaggggtcatcccggaggtctcggcctcgggcggtgggcctctcgccggcagcagggggcgctgcagaacctcggtccccatcctggagaaccacctccccggctcagccggtctgcgccg

SEQ ID NO: 361684 - DNA, 122 bp, Homo sapiens
aatttgtgttcacacaaggccgatcctgggccaagtctggggcttggttagggaatgtgacgtgtgcagagagctcagcgggcacattgtgggtgccagggctcacggaccaatggagccca

SEQ ID NO: 361685 - DNA, 122 bp, Homo sapiens
gtcagcaggcacacgcatccttctgatgatttaaacatcatcagaccagacccgggtctccgtgcccactgcgcccccagtggagaccgtgtggtgcacagcggttctgtgctgggcagtcg

SEQ ID NO: 361686 - DNA, 122 bp, Homo sapiens
attatttaggtggaataatcttaccatgaacttgaaaacaggcagtgacctatgtgctcccgggtaaaaaaaaaaaattagggaaattggaaagggagcctagaagcaatagaactttcttt

SEQ ID NO: 361687 - DNA, 122 bp, Homo sapiens
gcggtcctggcaacgacgaagactcggatacgggactgagctctatgcatagccaagactcggactccttgcccatgtgcgaatcccttgtgtaggggtggggggcggggggcggggggcgg

SEQ ID NO: 361688 - DNA, 122 bp, Homo sapiens
cgaggctcgactgtccgatggtgccgatggcaggcgctggccttggctcgaggcgcagggcgtccagctggtacttgcccgacacccagcatttggggattcccgtctgtctccctgataac

SEQ ID NO: 361689 - DNA, 122 bp, Homo sapiens
ggcgccgcctgggcgcttggggcacgacgctgtgggtggggtcaggacgtgagggcagcgcgctggcgtcagaggcgcggctatataactaaacacaggcaccgcccctctgccccagtcac

SEQ ID NO: 361690 - DNA, 122 bp, Homo sapiens
gtgaagttgaaatgcttttctgctagactggcaacatgttttgattcttctcaaataactcgcaagctcttgtgaagcacaacggcctaccttgtcctgaagaaaacatactctaaggccca

SEQ ID NO: 361691 - DNA, 122 bp, Homo sapiens
cgttgctaacatccaggtttggggacgaagacccagacctccacccacccagagtaggtgcgcccaagaactagtacatgcttgttacctccacactttggcatctctgtgaagtccacctg

SEQ ID NO: 361692 - DNA, 122 bp, Homo sapiens
ccgagaccctcctggcatcttgctggagacactaagctgcgttgctggggaaactgcctccggggcagcccgcccctcatgaatgattcatcagcagcgctggtcgctcccccaccgaaccc

SEQ ID NO: 361693 - DNA, 122 bp, Homo sapiens
acagctttctgtctctaggcggcccttggcttccccaagaaaactgaaagtggaagccggcgcgaggcagaccaacgtccccaatagaagggttgggggttgttagaaatcccttccccaga

SEQ ID NO: 361694 - DNA, 122 bp, Homo sapiens
tagatagagttccgggtgggcgtgggcttggcggggccccgcacttggagtggcgggccccgcacttggagtggcgggccccgcacttggagtggcgggccccgcacttggagtggcgggcc

SEQ ID NO: 361695 - DNA, 122 bp, Homo sapiens
gaaggaagaaagaggaagtaagacgtgagctcggccagccccgggtgcaggaggagtgggcgaagcgggcgacagggtcccatgccttccccttccttcctcaggcccggcctccatctctc

SEQ ID NO: 361696 - DNA, 122 bp, Homo sapiens
ccccaggcacctggtggatgtgtgggcagcatggaaggctgcggaaggccatggaaggcccgtgaccttgcctggcctggctggccgggaggggcagggagccgctttctgtgctgccagga

SEQ ID NO: 361697 - DNA, 122 bp, Homo sapiens
attcccctaaccccagtttcaaggggcggggaacaaccagaatctttgtcaggtcctctacgccacgccccctcctcgccagagccccgcccagcctgacgtccccttcccccactagctcc

SEQ ID NO: 361698 - DNA, 122 bp, Homo sapiens
ccagaggcttccaggctgggcccggaccccacgccgaccccggccccggggggggctcagcgacctcggcgcctcctcaggcccccagtgaacctccggggcccataaaggctccaggccgg

SEQ ID NO: 361699 - DNA, 122 bp, Homo sapiens
tgcctccctgtggctgccggctctgtggtcctgggcaaggctgacctgagacttgggggacgccagaactgtgtgccctcacgatgctcagccacccatgctgttcatcccctgctccccac

SEQ ID NO: 361700 - DNA, 122 bp, Homo sapiens
tcatatgggcaacaggatttatgtattgccagtcaaaaggataaaccacagccaggcagccgcagaggcagaaaagcacatgcaatttgggtggcaccatcttgggagctgagcagcagttt

SEQ ID NO: 361701 - DNA, 122 bp, Homo sapiens
aaattataccgtggcccgaccataaaagccactttccaaaaaaagaagctttaaggcccccgagagacgcagctgagcctctcacctggcagtgcctgactcaggaggtgatgtctgggcca

SEQ ID NO: 361702 - DNA, 122 bp, Homo sapiens
tactaccctgctacccggttacctcttcgcctcttggtcgtcgagcagctccggctcggtcgccgccattaccacatcgcactccgcggcagccgccatcttaccgccgggaccagagagct

SEQ ID NO: 361703 - DNA, 122 bp, Homo sapiens
taggtgttggtgccttggagggtcatgggacccgggttacagcccaacacacgcacgactcgattggacagccgctcgacgcgctgcagtacagcagccattcccgcctcagccgcccgccg

SEQ ID NO: 361704 - DNA, 122 bp, Homo sapiens
agtttccaactcgttgcttattttgcaaagtaaacaagcaaatgttatgtgcataaccttcgctgtctcgctaaaggtcagcgcgcccctgctcatttcccgggctgccttttgggggcact

SEQ ID NO: 361705 - DNA, 122 bp, Homo sapiens
ctggcaccgacatcggcccttaagttctgcccgggtggagagggaggacaaaaaaaaatgcgatccgtagtcaaggagacgtagcctgcactcctgattggcgcagaactctagcctggtct

SEQ ID NO: 361706 - DNA, 122 bp, Homo sapiens
cactcctcccttcttctccactcttttctggtattcatgaaaccttggaactgggagagccgtgcagatcattcgccctgatttccagaggagacctgggactgcccaggccacagccagat

SEQ ID NO: 361707 - DNA, 122 bp, Homo sapiens
gctcgcgcctgcgccgcccgccggcctcaggaacgcgccctcttcgccggcgcgcgccctcgcagtcaccgccacccaccagctccggcaccaacagcagcgccgctgccaccgcccacctt

SEQ ID NO: 361708 - DNA, 122 bp, Homo sapiens
agtagttgcaatgctgttcatttttctggtgagtggattctggtaaaagtccttcataatcgtgcccattgtaaacaagtgaaaactttttagaaaatgttagtgggcattatttctaacct

SEQ ID NO: 361709 - DNA, 122 bp, Homo sapiens
agagtgggctatgcttgagcagggatgagaagggccgcggcagcacgcagccttgacccacgcctgcgtcttgtggtgcaaggccagagggctctctctagaacctgaccgtgcactccatc

SEQ ID NO: 361710 - DNA, 122 bp, Homo sapiens
gagcttgaagtacccaaccttgacaagagtaaagaaaacagcaaaagcatggagacctttcgtcagaagtgggaagttgcaatgtgtgtccccaaaatcaaggtccctacgaagatgaggtg

SEQ ID NO: 361711 - DNA, 122 bp, Homo sapiens
caaatattccctcactcagggcatgaaggctggggcctgaaaccttatccaatcaggagccgtggtctagaaactgtccaatcaggcatgcagctggaaagaacaggctacttccgtaattt

SEQ ID NO: 361712 - DNA, 122 bp, Homo sapiens
actcttaaaacttttttttcatatagaagcaactaaaagttaacaccggaacagtcaactcgattaacagcctgccaaaagatccgatcatttcaaattgaatttccaattagaatattcac

SEQ ID NO: 361713 - DNA, 122 bp, Homo sapiens
caaaagacccgcgtcagacccggagaaggtgaggcccgcatctcccctgcgcaggctctccgtgataagcaagctgcccgtcaaatttgtctggacttctggaagagccaataaagataagg

SEQ ID NO: 361714 - DNA, 122 bp, Homo sapiens
tggcatgctgtaggtgctcaatacacctccacaagaggagcttgcagtgagccgagatggcgccactgcactccagcctgggcaacagagagagactccatctaaaaaaaaaaaaaaaaaag

SEQ ID NO: 361715 - DNA, 122 bp, Homo sapiens
tctgtgtcatgtgtattgccggaatactgaggggcacttggcaggtttgtgagcaacacccgggacacggcattgagtgccagcgctgagcaggggctgcccggtgtctcccgggtgcgcgc

SEQ ID NO: 361716 - DNA, 122 bp, Homo sapiens
gatgaaataactgtcctgtcacatgtgcagcaggccatggagtgtagcgggcatcgctgccgccattcctgcagcatcaccataagcagtgcagggtgtctccatcgagctgtttggttcca

SEQ ID NO: 361717 - DNA, 122 bp, Homo sapiens
gacactttggtggtggtgaatgacacgcatcagtggggccccatgggaggagggtcccggcgtggaggactctgtgggaggagggtcccggcgtcgagggccgcgtgggaggagggtcctgg

SEQ ID NO: 361718 - DNA, 122 bp, Homo sapiens
cccggcaagagtacagttccgagacagctgagttgctccagtctccttgacaggtctccccggcaaaacccggaaaacagaggcactggaagcgaggcggagggaagcgcaagccccactcc

SEQ ID NO: 361719 - DNA, 122 bp, Homo sapiens
tgtgaaggtttcaccaggaagcaacattctcacggggcctttctgaaggacaagagtgtacggggtggagaaaaggggtggaggaatgccgggcagggcacggccgacagggaccaggtatg

SEQ ID NO: 361720 - DNA, 122 bp, Homo sapiens
cggtacccgctcagcagctaggagccttggggaaccctagctcttagcttccccgtctggcgaggccagagggccaagttgctcactgggctgtgctgagggataaggggagaaaagaacgg

SEQ ID NO: 361721 - DNA, 122 bp, Homo sapiens
caggcctgggccctgatggttctgtggtttccatgggagggccttcaaggttgtgacatccgctccccatacagtatgatgtgtgttatgtattattttgaggataggggaagatgattccc

SEQ ID NO: 361722 - DNA, 122 bp, Homo sapiens
gactagcattttatttccattggacagcgctggctgagaacaaaacctaaccctctgtgccgccctcgcggccgggatgcggtgcgccccgggcctccccattcggaaaacgaggagcctgg

SEQ ID NO: 361723 - DNA, 122 bp, Homo sapiens
aggtaattcacaactgagatttagacataagttgaatagtgtaatggacattgagttaaccgaggtaatgaagtagtgagacacaggtgcccctgaaataaactcacattgagggaagaggc

SEQ ID NO: 361724 - DNA, 122 bp, Homo sapiens
aagacctggcagcagggggtggccgaggcgggaggagcagacgcagagccccggcccccacggagagggtagcagcgcagccacctgccccccggggctccccacctcccagccggggctgc

SEQ ID NO: 361725 - DNA, 122 bp, Homo sapiens
accagaaattcagacttagtcaatgttggctgaattcctaaatccaggaagaagcctggacgtagggtcattagctttgggaatagaaggctacacagaagcacactgtttttgaacttgac

SEQ ID NO: 361726 - DNA, 122 bp, Homo sapiens
aacctcacggcttcacagcccaactgccaatggaactctagccctcagctctcccactcccgcagggccccccaactgcctgcttctggatggatctgaggggccccactcccgagagggcg

SEQ ID NO: 361727 - DNA, 122 bp, Homo sapiens
ccctgctctttgatctgaatcctcccgggttatatttgcacttaagcggaatttcctgcccgtactcaataggacctcctgcttcttcctcctggacacggactgacaaactaattatatct

SEQ ID NO: 361728 - DNA, 122 bp, Homo sapiens
ggtcttccctggggccggggctcaaggccagggtgccccaagcccaggctccagggtgtgcggggaaaggctcggtcctgctcggcgcggctcgccctgggcactaggggtcgcccctgccc

SEQ ID NO: 361729 - DNA, 122 bp, Homo sapiens
gccttccacccgctgccttgatttccacagcgcagatcaatgccaaagatctccccagagcgacagccattaaacagcaaaggagtcatgattgcaaactgctgggccaagacatcactgct

SEQ ID NO: 361730 - DNA, 122 bp, Homo sapiens
gccctgtgggcgggatttcctgtccgggccagactacgaccacgtgacgggcagtgacagcgaggacgaggacgaggaggtcggcgagccgagggtcaccggtgacttcgaagacgacttcg

SEQ ID NO: 361731 - DNA, 122 bp, Homo sapiens
ctcccttacaccttccttcatccccgacactgtgccaccccagcctggggctggctctgccgccacacacaccacacagaaccggtctgcgtctccagccgtgtgtcttccccaccagaagg

SEQ ID NO: 361732 - DNA, 122 bp, Homo sapiens
actccaagttggatgccttcaccaaagtggtttcaaagactggaacaaaaaagcctccatcgaggccctggctagcacagtccctgttactttaagagtagcattccacctccccctcacac

SEQ ID NO: 361733 - DNA, 122 bp, Homo sapiens
gctgggtaacacgtccttcattgaagacgcctctgagtggttatcacaatgcctacctcacgcactgttcttatttttgggatcagcttctcagagtttaaaaccattatgtgtcttttatt

SEQ ID NO: 361734 - DNA, 122 bp, Homo sapiens
ctgggtcaagaagagattcggcttccgggagcaggggcgtccgggagggactgcccagggcgccccgctgcccgaagcccagccccgccccagccgccgccggcgccgtctgtcggcagccg

SEQ ID NO: 361735 - DNA, 122 bp, Homo sapiens
tgatcgtcgcgacggtgctcctgattggctgcgctgtgtgacgtaacgggagggccccggcggccgccgggagccggggcccagcgcgtgcgcagacggagcgcgctgagcggagggggagg

SEQ ID NO: 361736 - DNA, 122 bp, Homo sapiens
taatcagagataatggaagtcatacactaagttcatcctgttccttttcataaactcaaacgctctcaaagcagcagcgcgttgagaagccccaagagtctgcgcggaaccagtgcgcaggc

SEQ ID NO: 361737 - DNA, 122 bp, Homo sapiens
tgtgcctccatctctcccactttcacttctctgtctctgtgggtcttgttctctcgctgccgtccgttcctgggtcactttgtctctgacctgccacccgctaccccccgccccccaccccc

SEQ ID NO: 361738 - DNA, 122 bp, Homo sapiens
gattcctgaagtagatgaacagcccggccccaaggaagagcaggcccagcacaaagcccccgactccactcagcatcttgctctgtgcagattcagaccgtgctcctgagagaggaagccag

SEQ ID NO: 361739 - DNA, 122 bp, Homo sapiens
ttggtgattttccacgagggttgagtggcgtgttggtgattttccacgtgggttgagtggcgtgttggtgattttccacgtgggttgaatggcgtgttggtgattctcgcatgttttggggg

SEQ ID NO: 361740 - DNA, 122 bp, Homo sapiens
cctggcccacaaacatcttgatagcatcaagatctggttggtctgggtggtccagggtgccgttcattttctttgagctgtgtgagataaaatgaaacttctattatgtaataatgttgctt

SEQ ID NO: 361741 - DNA, 122 bp, Homo sapiens
ggctccactgccttctgagtcccaccgggtgtcggacgcgaccggaccgagcgccaaacgcggcagcccaatcgccatcgcttttatttggcccccccagcccaatcaagcgccgccccgat

SEQ ID NO: 361742 - DNA, 122 bp, Homo sapiens
gcgcgactgggttcctccaatttgctgcgacaagtttggctttccaaatactagcgcgtccgtctctttaaatcacagagcaatcggggttctggtgggcaagactgaccctgccgaccaga

SEQ ID NO: 361743 - DNA, 122 bp, Homo sapiens
acctcgtgatccacctgcctcagcctcccaaagtgctgagattacaagcgtgagccacagcgccccgccgccaacactgtattttgagctgggaactcatgatgcaatctctgcttctagga

SEQ ID NO: 361744 - DNA, 122 bp, Homo sapiens
gcctttaagcgctcctctaggctcacatgacccagacccacagggcaaaaagtgcgtcgtcgtgtcccaacctcctggtcccagaaacctggccgcatcaagtcagcgcttcccatgctgga

SEQ ID NO: 361745 - DNA, 122 bp, Homo sapiens
gccacgcctgctgtttgaatagcatggccctccatcaaccttcaggactgctgcagcctgcgatagaaggactcatcagcagccatctcttagaggctctgttggttgtcacagagctaagc

SEQ ID NO: 361746 - DNA, 122 bp, Homo sapiens
tatatggcagaggagctccacagcatattcctccccgttctccgggcgagcttctcgggccgtttcagcacacggacagctcctctgcttatagggagccgctgcgcctgactccgcactgc

SEQ ID NO: 361747 - DNA, 122 bp, Homo sapiens
cacggagttagcgctgggcaatcatcttgctcagctctctaaagtgaaaattagaaccctcggggcgaggcaagattccagatatggtgagcagggcgctatgatttgtaaaatgcgggtga

SEQ ID NO: 361748 - DNA, 122 bp, Homo sapiens
gggcaggagacctccatgttgtgctcaatgtcactgatttacattctccaggcctccctccgtatccagagcacctcaccagcccacttagccctgcccaggaggagctgaaagaagggcag

SEQ ID NO: 361749 - DNA, 122 bp, Homo sapiens
agcggcggaacctctctaagaatccttccagcttgtgctcttctgtccagggcagccaatcgcgaggaggagagtagtcagagggcggcaccctccccggtctgggccgagttattggctgg

SEQ ID NO: 361750 - DNA, 122 bp, Homo sapiens
aaaaagccattgacagattccaggtgagcaataaaccagaattttgaccaactagaccagcgctgtcctacagaaatgtaatgggagccacatgttaaagtttaaatgttttactagccaca

SEQ ID NO: 361751 - DNA, 122 bp, Homo sapiens
gtgggcacttcctgctactcagtctcccagccagaagccaggatgtcaatgtcccaagaccgtgggatccctttctgcttcagcctcctctagagaattctaaaacaggcaggcttggctct

SEQ ID NO: 361752 - DNA, 122 bp, Homo sapiens
agggaggtagggcagagttggttccagttttcttccaggaagggtttagggaggtcccagcgagccccaggaatgagtccctcggtaccatggcaaccacaatttaagaggggcttctgccc

SEQ ID NO: 361753 - DNA, 122 bp, Homo sapiens
aggttatgtggcttctcaaagaaggtggctgtcattattgctgagtatcttcaagaagcacgctctgctgtgtgagccccaccaggggtgtgcgtgtctcatggctggcattattagctttc

SEQ ID NO: 361754 - DNA, 122 bp, Homo sapiens
tggccctgcagcagcgccaccgcctcctgccgactcaacctcccccagtaccagctactccgctcctccgagtcgaagttgcccgccatggctgcctccgcgcctaaacgctggggtgccgc

SEQ ID NO: 361755 - DNA, 122 bp, Homo sapiens
tccactgggtggggctaatcaatggtaagaataatgattaagaacggaaggaagaggaaacgccctcagagtttccccaccatctgccgtggatggcatctcaacttgagtgagtgtaagaa

SEQ ID NO: 361756 - DNA, 122 bp, Homo sapiens
cacgccagcctcaggctcatgaatattcagcaggctgcttgcgccttgcaaccccgcctccgttcccctctgcggagactgcgtatgcgtcgccggcgcgcggctgtgtcgtcatacttgcg

SEQ ID NO: 361757 - DNA, 122 bp, Homo sapiens
tacatgttggccaagcatgatttcaaaccggaaagaaaattacacagcaataaaatatagcggcatgagaacttacatttgtcttcagggtccacacatgagatacatttgttattctgtga

SEQ ID NO: 361758 - DNA, 122 bp, Homo sapiens
attcatttctttaacaaatacttccaatgtgccagccccgtgctaactcccccgaacatacgagccaggtaggtactcttaagcccgcttgacagatagagaaaatgaggcacagagaggta

SEQ ID NO: 361759 - DNA, 122 bp, Homo sapiens
ccggactttgggggctggggcacccctggggtcgaccctcttccccggggccgcactggccgccagggggcgctgccgagcccgcaccccattgtttgtaaacaaacccgccagaccgccga

SEQ ID NO: 361760 - DNA, 122 bp, Homo sapiens
gtgggggcgcagggggggttggccgcggctgcccgaggccagcccccccggagtgagttacgccactatggcggacggggcaccccggccccagctttaccgcagcgtctcgttcaagctgc

SEQ ID NO: 361761 - DNA, 122 bp, Homo sapiens
tttccagagtctgagaacagaggttaagacctctccctaggtctgaaggcggagacaggccggcttccaagagactagtccgagggcggagggcggaggcagggacccagtctgggtctgag

SEQ ID NO: 361762 - DNA, 122 bp, Homo sapiens
ttgatgggaatttttagggatgagatacattgctatgttactactctatatgtgaataaccggtgtgcctgatttctagcacattaatggattttataactcaataaattataggcactcaa

SEQ ID NO: 361763 - DNA, 122 bp, Homo sapiens
atggattagcagcctttcttattagcaagaagccctgtggcctcaagaggcaaaatgaatcgtggttagaaatctccatctcctccctcccttggtataatgccatcatttaactatctgaa

SEQ ID NO: 361764 - DNA, 122 bp, Homo sapiens
caggcgaggcaacagggccagaagtccctgggtgtgggtcctgggatgctctctgttagccgggtctcgaacccgaacctagtcagtctgacccatcccacccctgcgtctggcgctgtcgc

SEQ ID NO: 361765 - DNA, 122 bp, Homo sapiens
caccccttggctccgggtttctgacaccggggccctggagagctgtgagggcaggagcatcgaaagcctgggccccccaagcccgtggtctctgagcagctgccattgtataggcatgggga

SEQ ID NO: 361766 - DNA, 122 bp, Homo sapiens
agggcccacagccacagacacagtcacagctgacccacagaccatgaaggaataataaatcgctgttgttttaaatccagaaattctggggtggtctgttacaacctaatgaataactaaaa

SEQ ID NO: 361767 - DNA, 122 bp, Homo sapiens
tcacgccggagtacaccgtagccaatgtcatctctgtcggctcggggctgctggtgagcgcggcaggcgacccgggcgggggccgggctcccggagagcccagcaggccaaaggctttgtgt

SEQ ID NO: 361768 - DNA, 122 bp, Homo sapiens
ctagattttccaaatatatattgaacagagggagaagcctgtgtttattccaggacagcccggaagattgtcatatgcccgttctttcatgggacaaactgtagttgctgaaaataaattgc

SEQ ID NO: 361769 - DNA, 122 bp, Homo sapiens
gaaggctccaagggacagaggaggctgagagataaagagctgaaggtggagcaggagccacgctactgaaggtgttagccattttctctgggcatctatcttccatgaagaggcccgatccc

SEQ ID NO: 361770 - DNA, 122 bp, Homo sapiens
aacatctggcacatggtaagtgccatttcaggttaccgctgttatttgctatgtggaggacgtgcgcctgaggagaggctctcaggagaccacagctggcccttctcagggctgagggcgag

SEQ ID NO: 361771 - DNA, 122 bp, Homo sapiens
tccaggggctcccaacaagacacctgcaccccctccaccttctacccctaccccatcacccgcaggcagaggaagcagcaaaccacatagtgacatttcaggactaacaaaaagccctccag

SEQ ID NO: 361772 - DNA, 122 bp, Homo sapiens
ctaaattccagctctgtcacttactagctagctgaccttgggcaagccacctctctgagtcgagtttcttgttcttaagaagggtcaatgccacctgcctggcagggttatctgtaagtggc

SEQ ID NO: 361773 - DNA, 122 bp, Homo sapiens
ctctcctctgcaggttaaatcggggtgaagttcttgcccggcagccggacgcatatcccccgatccccgcctggctccgcgctcttcctttcccactttcccctgcccggacgtgattgggt

SEQ ID NO: 361774 - DNA, 122 bp, Homo sapiens
aggagaacccgggcacggattgtggagctgactgaaggaaggcctgaggctcgccacagccgcatcccaccggtttcaacgagccccgttccctctctcgggacgtcgcacctggcagtctc

SEQ ID NO: 361775 - DNA, 122 bp, Homo sapiens
gttagttaaaaaaaaaaaaaaaaaaaaaaaaaggaagaagaaggcactgtgtaattgtgccggggatcttcagaaattgtaatgatgaaagagtgcaagctctcacttccccttcctgtaca

SEQ ID NO: 361776 - DNA, 122 bp, Homo sapiens
agctcatgattctggctccaggccagcgccatgctcacttgaattgcagccaaacaccctcggactcattgcctgaacatgtgactcaaatgctcgcgttcccgctgctcagtgtactctcc

SEQ ID NO: 361777 - DNA, 122 bp, Homo sapiens
cagcgtgatgctcttgtccagactgtccccgctgctcccgctgccgctcgctccacactccgccattttgaaagtgcccggccagctcatcagccatggagatatatgcgcatatatttgac

SEQ ID NO: 361778 - DNA, 122 bp, Homo sapiens
atgctagactggggagaagaaatgtatgtgctagcaagatcactggccagccctggcctgcggttgtgagaagttgttttttctaagcttgcctgctttcatcataaaatgttaatgttata

SEQ ID NO: 361779 - DNA, 122 bp, Homo sapiens
aacaattcactgggtttgaataattgaaagggagccagtgtgcaggagtgaggtggaaagcggtatgtaaaaaataaagaacagtggtgagggaagcaggggccagatcatgaagaccttgc

SEQ ID NO: 361780 - DNA, 122 bp, Homo sapiens
ctctcccaggaaccaggtatcccagtctccttctcattttgacccaggaaggctgggggccgacccctctgctcccctaaatcctagaaaacttggcaggacagcctcattttccccagagt

SEQ ID NO: 361781 - DNA, 122 bp, Homo sapiens
aacgtgcgctgccgtgagccccaccaaggcgagagagagcaggcgccagagtcagatcctcggccaggtttcaagggcttttcttgggtagaagaaagcgcctcattcttttccaggcatat

SEQ ID NO: 361782 - DNA, 122 bp, Homo sapiens
aattcataagctattgcattccatactacactcttgttggatcccaccttattcagtaagcgtctttcttctttagtctctgttataactaaatatcacttttagaagtttccttcaagggt

SEQ ID NO: 361783 - DNA, 122 bp, Homo sapiens
attcgcggttgggcggagacacgttcgctgaattgccttgcgtatatttggtaggggaaacgtgtgactacagagcaaagaaagatggacaatagcgagtaacttcacagggatttcctaag

SEQ ID NO: 361784 - DNA, 122 bp, Homo sapiens
ctccattgggtcgatgccagctgcctttttgttcctccccacctctggcttatctgctaacgcccgttggagaatcactctgagagattccttcagccttttctttctgaggctccccacaa

SEQ ID NO: 361785 - DNA, 122 bp, Homo sapiens
gtttccctccagactggcttctctccagcacggctcttccaggaattcctgttggcaacacgtcaaaatcgccagggagcttcccccgtgaggcaggcgggctcagcgccatctggtattcg

SEQ ID NO: 361786 - DNA, 122 bp, Homo sapiens
ctagttattaattggttcaatggatgacctttgtgcgacactgttataccttatcagcctcgccagggcccccgcgccgcccaatcccagcaactctggttctcctgtgaccccaagccttc

SEQ ID NO: 361787 - DNA, 122 bp, Homo sapiens
aactaacattttatttcccacagccgtggtctttgctaagtgccgtttagcaccctgcggcgtgtgctttgggttttagccctggtctcatcgtggccccagggggccccccagtcagtgga

SEQ ID NO: 361788 - DNA, 122 bp, Homo sapiens
cattcaaagggtttctctcccatatgagttcttaaatgttgaatacgtcctgaggatgtacggaaggccttcccacattccttacatttatagggcttctctccagtgtgaattcgcacatg

SEQ ID NO: 361789 - DNA, 122 bp, Homo sapiens
tacctcgttgtgggacgagctcaaggacaccgtcaggaatgccaaacaccatgccccgggcgttcatggcctcacaggtgtaggcaccctggtctgactccttcacatcacggatgatcagt

SEQ ID NO: 361790 - DNA, 122 bp, Homo sapiens
cccagtgactgtgaggtggacactgtacccccagcacagactgctacaggggagtcaccccgccttctgtgcaccccctctcctgctgcaccgatgcacgggagaaaagttcccctgtcctt

SEQ ID NO: 361791 - DNA, 122 bp, Homo sapiens
gaggacacaggacgggctaccccatctcaggtttggggtgggatcgctcacagtcacccccggaacagccccaactgagggtggggggcctggccctggacacctcatgtctctgggccggg

SEQ ID NO: 361792 - DNA, 122 bp, Homo sapiens
tgaagagaagtggacaaatttgaaatacactcttgaggctgaactgactggacttgctgacggactggatgtgtggacataagaaaaaggtgggctttgctttataacaagtattgagactg

SEQ ID NO: 361793 - DNA, 122 bp, Homo sapiens
cagcaaggacctagccggggagggaaaacaagggctgtgagcacaagtggcatccacacccggctcttccgcagtgacagtttacagtacattaaggagagtgatgcccaaactgaacatca

SEQ ID NO: 361794 - DNA, 122 bp, Homo sapiens
aggattcagcctgagcttaagccacatctgctctcatcccagcttcaccctgtactcacccgggttgcacttgctccctacctgggttgcccagtaggacagctgcagaaggggccactacc

SEQ ID NO: 361795 - DNA, 122 bp, Homo sapiens
cttgtgtggggcagccgggacacgatgtccagagagctgcgtggggtggccgggacactgcggggaggtgggtaggtggggtgcagactcgagccccggtgctggtccagtgaggcaggtgg

SEQ ID NO: 361796 - DNA, 122 bp, Homo sapiens
cgagacggtgagcgggcctgggccctcccctcttctcccgtgggcacagcccccacgctccgcaccctcactgtgctaggggtgcagagtgaatgcccacctgagggcagaccgggcagggg

SEQ ID NO: 361797 - DNA, 122 bp, Homo sapiens
aggaatacgcggctagcaagttcatcaccaaagagaagcgccggcgcatctccgccaccacgaacctctctgagcgccaggtaaccatctggttccagaaccggcgggtcaaagagaagaag

SEQ ID NO: 361798 - DNA, 122 bp, Homo sapiens
ttctgaggggttgaccagaggtcctgtaaggtcccttccaactctaacattccacgatttcgtgaatttaaagactgtggttgcccctgtattaactgggttcaggagtaagatagataaat

SEQ ID NO: 361799 - DNA, 122 bp, Homo sapiens
agccctgaccctggaatctgccccccgcctccaattccatccttggtgggggtgcagtggcgaggtgggaggaacagtgtgcaacctcctggggctccggcgtgcagcccctcaccccagga

SEQ ID NO: 361800 - DNA, 122 bp, Homo sapiens
ggagggggacgcgcctcccacggggaaaacaagcgcgacccatgggatcccgacgcgccgcgtggttgccacagctaggtcgccgccaggaaagccccaggtttcctaaggcctcttagtgg

SEQ ID NO: 361801 - DNA, 122 bp, Homo sapiens
cccagttttagtctcttttcctaaagccggatgggaggaagagaatactctctacttgatcggcaacctcagtgggctctagtggtaactcccaactagttagcctttcttaatagtgtatc

SEQ ID NO: 361802 - DNA, 122 bp, Homo sapiens
gcccccgggtcttgctgggggagccaggcagcacagtgggcaggttaatgcagctcattgcgcctccgggaagttcacgaacccgagtactctccaaggccgtcccgcagtaagcccctggt

SEQ ID NO: 361803 - DNA, 122 bp, Homo sapiens
ttctcctcttcccaattcttgtcaccttcgaggaggccatggaaaccccaacacctttgccgcctgtacccgcctccccgacctgcaacccagccccacggacaatccagatcgagttccca

SEQ ID NO: 361804 - DNA, 122 bp, Homo sapiens
gcagctgttccatgagctggctgttctcgatgctcagggcgcggtgccgcatcaggagcgcgtgcagcagcagcaccaactcatccaccattgcgaacggcctggaaggacaggactcggct

SEQ ID NO: 361805 - DNA, 122 bp, Homo sapiens
ggaacccgcagaggaacggttgcagaaactttgggggaggcctgggcaccaaaggcgaggcgtggtggcggaaagccgacactagagggcgacagagagtaagggaaaaaatgcagccagga

SEQ ID NO: 361806 - DNA, 122 bp, Homo sapiens
atttaattaattaattaatttttttgagacacagtcgtgctctgtcaccaggctgcagtgcggtggtgtgatcttggctcactgcaacctctgcctcctgggttcaagtgattctcctgcct

SEQ ID NO: 361807 - DNA, 122 bp, Homo sapiens
ttgcgtcggctgtccagcacccagtgcaaacgaggcgtgggtcccggaagctctgttctgcgggtggccgctcgcgcctgcgcagtggaggcggcccaggcccgccttccgcagggtgtcgc

SEQ ID NO: 361808 - DNA, 122 bp, Homo sapiens
gaaaaggagggagctactctaaggctgagtgtaagtgcggggcgggagcgtggaggagctcgcccaccctataattcctcctgcaccacatctcctgtgggctctgaccaggtcttgttttt

SEQ ID NO: 361809 - DNA, 122 bp, Homo sapiens
acgtggagcgaggagttgccattcgaatttcctacgcggcctccgtgcgattggctggttcgcggatggcgggacgacacgattggctagtcgctcacaagccccgtgccctggttggccca

SEQ ID NO: 361810 - DNA, 122 bp, Homo sapiens
ctctcgacctcaggtgatctgcccacttcggcctcccaaagtgctgggattacaggcatgcgccatgacacctggctaattttgtatttttagtagagtcgaggtttcttcatgttggtcag

SEQ ID NO: 361811 - DNA, 122 bp, Homo sapiens
ccccctgctccacggcgcccagtcccatcgaccacccaagggctgaggagtgcgggcgcacggcactgagactggcaggcagctccacctgcaaccccggtgtgggattcactgggtgaagc

SEQ ID NO: 361812 - DNA, 122 bp, Homo sapiens
ctggttttagctcaggctctctcagtgactgccagggtgtggccacctaaagcaactgggcggatgtatttctgagtttactcgcatggcttttggaaagcctcagatggtcaccctccagg

SEQ ID NO: 361813 - DNA, 122 bp, Homo sapiens
ctcagctgtccacatgccttcctcactaaacttacatacttacagcttttggataaaagacggggaactctgatttccacttgaacacttagaggccactgtaaggttactaattagcctaa

SEQ ID NO: 361814 - DNA, 122 bp, Homo sapiens
ctcccgccgccgcaggtcgctgccgccgcctggtcccggggcgcccgcccggccgaagggcgcaaacagcaccccgcccgccccctgtgcgccctcggggctgaagcaccagggcccgtcgg

SEQ ID NO: 361815 - DNA, 122 bp, Homo sapiens
agacaacttacaaaacacaaaaatccaccaaggacaacacagccaaggcccctgatctcacgacgtagagagaacgcggctcaaaggcgtgacctgtgatgttggtgcaatgaggcgcgtgc

SEQ ID NO: 361816 - DNA, 122 bp, Homo sapiens
gaatcccatgagtgatggccaattcaggaggcgaagcacccagcaagttccccaccacagcggacatggaacacgcacgagaggcagagacatgaaggacagaaggatggaaggaagtacgg

SEQ ID NO: 361817 - DNA, 122 bp, Homo sapiens
ggggaggctggcggtcttggcgcggctccaggtgccctttgagtgcagtccgttaggtggcgcctggaagccaggtgcatgcgccctgaggcccgcccacccacaggctacagaaagggcag

SEQ ID NO: 361818 - DNA, 122 bp, Homo sapiens
tccaggcctgagcgcacccacgacagcgcagcctcaaggccgccggtctcaaaggcctcacgcacagcctctagctctgctgcacccaacacctcgaagccatcctgcgccggtggcaggag

SEQ ID NO: 361819 - DNA, 122 bp, Homo sapiens
agagcctcgcccgccaggccggggccccagggttcgaagttaacggtcagtctggaatctcggcctcagcagtgggaccacccggaggggtgggggtacatgttcgaaagaaaaggactcac

SEQ ID NO: 361820 - DNA, 122 bp, Homo sapiens
gttggcggccactggatctgctgtgggatggtcccggggtgccgctcgcttctgagtccgcggggtgcggtcccacccgggtcaggagaaacgcaccccgcggccggattggctaggacgcc

SEQ ID NO: 361821 - DNA, 122 bp, Homo sapiens
agtgagttaagtggtgagagagctagcaaatcatacattgcattccccaaagcatctgaacgtacttctagaaaacaaaccaaccaaaagggaaaataatgcaagagaagccgtattttctt

SEQ ID NO: 361822 - DNA, 122 bp, Homo sapiens
cccaaatgtaaagcgggtgtatgagcgagccctgttgcttcccttggcggtaccgtattgcgtccttggtagtgccagacaaatggcttaacaaacccacataggaaaacaataggcttctg

SEQ ID NO: 361823 - DNA, 122 bp, Homo sapiens
ccagcgctggcccagcccactcccaccgcaggggcctctcccttcctggcccagcacccacgctgagcttcctcaggtccctgatgctcagtttcacgtgtcggcctggctgggctccagtg

SEQ ID NO: 361824 - DNA, 122 bp, Homo sapiens
ggagagcatcgaccccgcctcccaggccttgagcccctttgcggcgcagccccagccttgcgcggcctgggctttgcggccaccacaatggaaatctacggggaaaatgccagggctggttc

SEQ ID NO: 361825 - DNA, 122 bp, Homo sapiens
tctggctcctctggactcaaaactactcaatgcaagattgcgctgatgcttaggtgggagcgtgactggagataggagatcaggtcaaaggctgttgaaatgatgctggcgaagatacagtg

SEQ ID NO: 361826 - DNA, 122 bp, Homo sapiens
agtctacaccccaccctctctcctgaagcagcggcagcagctgggcgttaagggggatgccgggcaacccccggagttaacgtcctggtccttggggcgcagattgctcttcgtcatctgcc

SEQ ID NO: 361827 - DNA, 122 bp, Homo sapiens
ggaatcacacgggctcctcggtcccaggctgcagctcttgttgccatgatgatgatgtcacggacgcaaccactggggggaggggagaggggggtgtgtgtggcgaagggaggctgcgagta

SEQ ID NO: 361828 - DNA, 122 bp, Homo sapiens
gcagtaatgaagccactgagacattcttgttttattcccagacccctaaatcagaaaacccgatcgaatactgagcataatttcttcattgacatttgtctctaaatgtcaagttgttctgg

SEQ ID NO: 361829 - DNA, 122 bp, Homo sapiens
tatttctctgagcgttagtttcttcatctgtaaactagttgtcataagactaaatggggccgggcgcagtggctcacacctgtaatcccagcactttgggaggccgaggcaggtggatcacc

SEQ ID NO: 361830 - DNA, 122 bp, Homo sapiens
catgaatggaatgaaatgtgaggttaagggacttttgtctcttaagaaagaggaaatatccggcctggcaggagaggttaaagagattcaagtgaggagaagtatgcaaagggtaagacttc

SEQ ID NO: 361831 - DNA, 122 bp, Homo sapiens
gaaagtggctgcaagccggccgcccactgtcagggttggggggacagagaaagtgatgtgcgccttctaaagcctcgcccagcgccgccgaagcagcttcacctctccaactttctcccacc

SEQ ID NO: 361832 - DNA, 122 bp, Homo sapiens
agggattcgtaacaccagataaaccaacttgatagaattgtgaaagagtttcgttaagtgcgaagaatatgtagagtgatgtaataatatttttggcaccgaggccatagtccttcctgaat

SEQ ID NO: 361833 - DNA, 122 bp, Homo sapiens
gaggccgcagaccccaggaggggaggacccccgtggaagggagcgccggctttctcacttcgtgtcactactccctggggaaatatttcaataaagaggtactgggtgaccattttggagag

SEQ ID NO: 361834 - DNA, 122 bp, Homo sapiens
gagggacctcactatgcaaatctgagctgctgatcgatgacgcgccatcaccccacgcaccgcttcgctcgcccattggctgagatgagcctggtcccattgacaacaaacaggggggcgcg

SEQ ID NO: 361835 - DNA, 122 bp, Homo sapiens
caggcggtcgcatctgagttctcaggctgtgttatgcagaagggagaggcatccttaactcgttttccttgaaatgaagaggaaataatgatatatcattaaaagtaagttgccaagtgttt

SEQ ID NO: 361836 - DNA, 122 bp, Homo sapiens
acgccaccagtaacccgccgtcgttcaaggtctagaacgccaacaacacgccgccgctcccgttctagaactccaccagtgactcgcagaaggtccagatccaggactccaccagtaaccag

SEQ ID NO: 361837 - DNA, 122 bp, Homo sapiens
ggccgagaggacgaggggtggggttctgggtgtcctgaggggcggggctgggggaagggtcgctcccccaactcagggccacgcgtccgctaggggccgctgccgcttccactgccactccc

SEQ ID NO: 361838 - DNA, 122 bp, Homo sapiens
gaggcagcaaaacctcttggcatacttactttcttccactaaccgcactataggagcccccgtatttcttgcggtttcctattaactctatgatttcagggacgtagctggcaaacatggcc

SEQ ID NO: 361839 - DNA, 122 bp, Homo sapiens
ctcctggccaacaccacccacctcgcctcccaaagtgctggggttacaggcgcgagccaccgtgccaggccagaaatttaaggagttttaaaggttagcattgaaaagattactttccagaa

SEQ ID NO: 361840 - DNA, 122 bp, Homo sapiens
tttggggaggtcgtactctggagccttcatccaaagggtaaagtacagcactcagtaatgcgcgtcctgggaacgaggcctaagcagtgctggccactgcctcctccaggctggcattgtct

SEQ ID NO: 361841 - DNA, 122 bp, Homo sapiens
acccataaacccgttgtgctgttgccggagggcgggatggggtacatgtgtaactctacacgggcttttcgggtcgtgtttgggagaagaccacagcgtgtaggggcattccttgcagttcc

SEQ ID NO: 361842 - DNA, 122 bp, Homo sapiens
cgccaacggaggaggctactaccactattcctactcggtggtgaggggctgcgaccgcatcgtgcccgtggacatctacatcccaggtagggccgggaccgcaccgcccacgagggagctgg

SEQ ID NO: 361843 - DNA, 122 bp, Homo sapiens
ggcggctggggtgagctggtgccatgctgggtcgtcgccgtggcacccatctggggctgccgcgccccactctgctgcaggcctctgccggctcaggctctcggctctcggctctcggctct

SEQ ID NO: 361844 - DNA, 122 bp, Homo sapiens
attccaggaaaaagggaatagcttacattttcatggcgccccttttaaacaggaaacccacggactttgagccaggattttagaaatttgcatttctttttttacaggattttccctcctgg

SEQ ID NO: 361845 - DNA, 122 bp, Homo sapiens
aatgctgcccctgtccttcagttggctagaggaggtagatcctgggacacatgggatccacgtgcgagtggcccttaaatgtatcagttcagtccaggttgtcatcccttttgtcccctggt

SEQ ID NO: 361846 - DNA, 122 bp, Homo sapiens
agcccatgctccaggctgccacgagcagcagctgcacagcccagcgagaggccattgctccgtgctcagaagtgatgagaggtagccagcctcacatcaaggatttatacccaggcccttgg

SEQ ID NO: 361847 - DNA, 122 bp, Homo sapiens
gtgtgtctgcatgtgcacacgtgcagtgtgtcagggagggcccttcctggtccaagaactcgcgtgacccggcacagagggggcgcgagatgcgagcagggagcagggtggcacttggctgt

SEQ ID NO: 361848 - DNA, 122 bp, Homo sapiens
atgtcttgatggagggcaagggttaggatttcagtttatcttcccggtgaggtctgagcacgtctgtgccctgaggtgggtggtttggtgaaggtggggctttaacctagctctgccactta

SEQ ID NO: 361849 - DNA, 122 bp, Homo sapiens
ttgcgtaatgtgcctatttaacaccctcctaaaagcgcttttcagcacatgagcaagtaacgaagcccactaaatcctgcctcttctgggcacactgggctgtttaaggttgttcctgcgct

SEQ ID NO: 361850 - DNA, 122 bp, Homo sapiens
aagcccgactcggacagcttgtcgaaggcctgctccaggaagttgaacttgaggtaatagcgcgaggtgtagcgctccgggggacggtcggggtcccggctttcgttcagggtgtccccaaa

SEQ ID NO: 361851 - DNA, 122 bp, Homo sapiens
cagcaggacagcgagcaagcggacaggttccagagagtctcagcaggacagcgagcaagccgacaggtcccagagagtctcagcaggacagcgagcaagcagacaggtcccagagtctcagc

SEQ ID NO: 361852 - DNA, 122 bp, Homo sapiens
aattaaaaaagcctaatatacaaaataaagctaggaatcttccctgagtcctcttgcctacggaatgaagtccacagacttgggggagcgttcgaacccttctaaggccacttcctttctcc

SEQ ID NO: 361853 - DNA, 122 bp, Homo sapiens
tgggtcaagccccttgcaaacagaggatgcatcctgcacagaggcacatgctcacacacacggtatcagccctctgcatctttctctagccaaatataatgaaaaatctcctcatccatctg

SEQ ID NO: 361854 - DNA, 122 bp, Homo sapiens
gtttttgctattttgtttttgagacagggcgcaatgccaggatctccctgcaacatccaccgtcagggctcaagtggtctttccacctcagcttcctgggactgcaggcacgtgctaccacc

SEQ ID NO: 361855 - DNA, 122 bp, Homo sapiens
agccagcagaaattaaggatgtcaaggacataataactgtgctgggatgtactaatgcagcgaggatacataagcataaacatgctgcgataggcaaaagctggtgtcctcactgcttttaa

SEQ ID NO: 361856 - DNA, 122 bp, Homo sapiens
aggtgagtgagggcccagaaagttgaagcaggaacgatccgagccttcagttaatcctaacgtcacctctaacgtttggggtaagaacgtttcaggaaaccaagggggaaccaacgctcagc

SEQ ID NO: 361857 - DNA, 122 bp, Homo sapiens
aagccgagctcaggatgactggtgagttttaagatgcagggaagggttgaaatgaatctgcgagttggaccatttgtttgaggccaaataaaccaacaaagaactcgattcaattacaaaag

SEQ ID NO: 361858 - DNA, 122 bp, Homo sapiens
tctggactagcagtggctccccagggccctgctactgttcagggatggggagtggggtgacggctggaccccaagaggcctcgaagctgacggcccactccacctggagctgtcccctcaca

SEQ ID NO: 361859 - DNA, 122 bp, Homo sapiens
ctccgcatcaagctgttctcgaatgccggtgcgtttcctgttaaggtagcggggcgacagcgcgatgtgcctttggtgcggcccggccaccaggcatgagtagcgactgttcaccagcgcac

SEQ ID NO: 361860 - DNA, 122 bp, Homo sapiens
tgtggctgatgcatttcatggctatcatctacacgtgagtgagggaccgcaggaggggctcggggcaggggtccgggcctcggagacaggcgagaatgggaaacgtttgcgctttgaagggg

SEQ ID NO: 361861 - DNA, 122 bp, Homo sapiens
gtattatctgctattcctctctaaaaccaaagttgtggtcatagcctgtgggttggttgccgccaggtgcagttacattctgcattgcacagtcactgtccttcccttgtccttgacttagg

SEQ ID NO: 361862 - DNA, 122 bp, Homo sapiens
gggtcctcggcggcctcgggctccgcgcggggcgcggggtcgggagggactggcaatcagcgggggcccatgcgcgggcaccttcatcttcagcccctccggatgttccctgccgcgcttat

SEQ ID NO: 361863 - DNA, 122 bp, Homo sapiens
ccaaggccatggcacacactctgcccgcgttcctctgcactcccaggaaggcgatgcccccggccccagcctcggagaagtggacacgaagccccacttgctttgtggccggttccatttta

SEQ ID NO: 361864 - DNA, 122 bp, Homo sapiens
cacctcttatattgccagcaaaattagctgttattactgtcactgtttagtgatggttagcgtggtacaaaaaaaaaaaaaaaaaaaaaaaaaactgctgtaatcaagacctggcgcatctt

SEQ ID NO: 361865 - DNA, 122 bp, Homo sapiens
gtcgaccgcgccagcaggaggcctcggaggatcctgtccgggcccatagatgtttgctagcgggacaagcttgggtgagttgagcatctgactccgtccttcctcctgagacacgtgcagcg

SEQ ID NO: 361866 - DNA, 122 bp, Homo sapiens
gcccatggctcagcccgagcctcccacaacacagggcctttgggtatgggctcccagtaccgcatcaccagctgtggaaggataaggggctgggtatcccagtggcctagtctgcccgacct

SEQ ID NO: 361867 - DNA, 122 bp, Homo sapiens
aagacggtcacctttcggggacctaaaaattttttttcaggtggcaccccccctacaagccggccggccttctgggggagcccagagcgagcccggctcttgcctggtggcgtttcttgctg

SEQ ID NO: 361868 - DNA, 122 bp, Homo sapiens
cgccgccgcggggcccgggaccccggccacccggccccccgccgccgcccgcgtcgcctccgctcctcggacccgcagctgcggcctcctccgctgctgccgccacccgcccggcctgccgc

SEQ ID NO: 361869 - DNA, 122 bp, Homo sapiens
agtgatcttcggtatccccagtagtacatggatgggtgtggcaaagcgggtatgcgcactcgtaaaaaggcagcaattgctcaaagaggggaccattgcgacattttacggctgctgcatga

SEQ ID NO: 361870 - DNA, 122 bp, Homo sapiens
gattcctatgagacatcgaagaagagatgtcctgtgagaaagctggacgtacataccttacgcccagagggttttagattggacatgaatgtttgggagctctcagcctatgtctggtcagt

SEQ ID NO: 361871 - DNA, 122 bp, Homo sapiens
gtagattcccccaactccactccagggttcattctggatccctggcctcttgggaggaggcggactctgtcctgccctggcacagagatggtaccacaggggactgcaggatgcttaactgg

SEQ ID NO: 361872 - DNA, 122 bp, Homo sapiens
tccgtgatgccgcagctgagtgggtgtctgggctagtcccgcccccacgttgccaatagacgtaatgagtgcgactcaggctgggtccggaacccttcctagtgagcggaggtcccgagctc

SEQ ID NO: 361873 - DNA, 122 bp, Homo sapiens
ctcgggggttgggatcctagcgcgccaagagcaggcgcccagcggaggccacgccttccccgaggctgccaggcctctcatcgtccctcccggagcccagccccgctctcccgcgcaccttg

SEQ ID NO: 361874 - DNA, 122 bp, Homo sapiens
ttggcctggtgtctctttccacttctcttggatcaggttactgtgctggggccacagcctcgcacctcccaatctctccatcttttcttatcttctccccacacctctctccttatctctcc

SEQ ID NO: 361875 - DNA, 122 bp, Homo sapiens
atcagcaagcaattattgaggatttacagttgcagtgctatcaggggctgcagatgcccacgggaaaagagaccagagctgagtcacacagaagagtccacggtataacaatgtggaatgag

SEQ ID NO: 361876 - DNA, 122 bp, Homo sapiens
ctcccttagggacgaatttccacatacgacgaaaggcatctgcgaaaggatgggctgtcccgtggggggagtcggcagatatttaagtaacactaacatttaacgaattaagcagctatttc

SEQ ID NO: 361877 - DNA, 122 bp, Homo sapiens
ctggcctaaagaaaggggcggggtttaccctggagagcagaggacaacgacgcatgcgcgcgggttgtcccaccctttgcgttagggcgcgagtgacggaaacagatccctctatttgtagg

SEQ ID NO: 361878 - DNA, 122 bp, Homo sapiens
cccagcgctgtggtatcttttcctttgtctcttacggttgttttctgagtctccatctcccgcgccttccctgcagtctcccgcgtgctctcttctctctccccctcgtttctctcatggtc

SEQ ID NO: 361879 - DNA, 122 bp, Homo sapiens
gtgatggagacacggcaggtagcgtgtgcaccctgtgtggcggggagtcagtgagaaagacggagaagaagcagacaaatcatgccgtaatatcataccaaatcatgacgcctatgaagaaa

SEQ ID NO: 361880 - DNA, 122 bp, Homo sapiens
gggcaagtgaaataacattaggataattaaagattttccaaatgccacatgacagtgctacgtccattcaggctgtgcattttgttttcgttgcttctttcttttttgagccagtctctgga

SEQ ID NO: 361881 - DNA, 122 bp, Homo sapiens
gcccattgttcagtggtgcagctctggcttccccagcgtgcggagggtttttaaggtcatcggcttgcccactgcccagcctgtggtgtcaaatatcctgccccttcaaatgtgcttggatc

SEQ ID NO: 361882 - DNA, 122 bp, Homo sapiens
gagctcattaaggacgggaagaacctcatcgctgcgacgaaaagtaagcggggacgcgggcgcggacgggctgcggcgtggcgaggcggctgggggagcctctctcggcaggagacggaggg

SEQ ID NO: 361883 - DNA, 122 bp, Homo sapiens
acagttctcgtactcttaacccttttaggctctgtatgcaactaactagatattgaccaacggtaaccctttgttttataaaatctagatattgcaggtattaaaagtattatgctgatgtt

SEQ ID NO: 361884 - DNA, 122 bp, Homo sapiens
tgagctgggagccgtccctcccccggccacacgcctgcaggtgacccccctgccccgccccgccaccaggcctgggcaccccaacctccacccctgccagaggcgcctgcaccgggttcctc

SEQ ID NO: 361885 - DNA, 122 bp, Homo sapiens
ggacccccgcttacctgcggggcggcgccccccgcttgatctggcgttgggcctgggacacgtcttgccccgacttttgcaggtacatggacggaaagtagcctgtgacgtcgtctttcctg

SEQ ID NO: 361886 - DNA, 122 bp, Homo sapiens
gcctgaggtggagggttctagaaggcgtgacgtggggtcgagagcgggatccgaggctggcgggttttggcagtagctgtggctgcggctgccgggcctggggacgcgggcggccgaggccg

SEQ ID NO: 361887 - DNA, 122 bp, Homo sapiens
gggactcagggttgtggactgtgctctggggccactgagcaaaggaatgatgaggggaggcgcctctgaaacttaacccagagagttctctgagcatttggggctggtttccaacaataatg

SEQ ID NO: 361888 - DNA, 122 bp, Homo sapiens
tgcaatgtgtcccgtcttgcttctccaggggacccaggtctttaggacgccttatctgcccggcagcacctgccttggtgccgcggggctcaatactcagggactgcaagtgaagtcacctg

SEQ ID NO: 361889 - DNA, 122 bp, Homo sapiens
ttagagggcctaggagataaagccttgtttcttttataatttgctattcgctgatttcgccgcctcctcgcagcttggcctaccgcgctagtgttccggactaacgaacaaacggctcacta

SEQ ID NO: 361890 - DNA, 122 bp, Homo sapiens
aggctggagattctgggctgcctgctcctcctgcacggggcgaaaagcccacctgggatccgagcgggcggccgcgccactctcgcaggctccatacacccgccactacccgcctgtaccac

SEQ ID NO: 361891 - DNA, 122 bp, Homo sapiens
cccctgacaggtcccggggcccgcggcgcgggcggatgcaggcgcgaggaaggcgagctgcgccgcggccaactccccagagcagtcccctccggccccgcgcccaccccaccccaccccac

SEQ ID NO: 361892 - DNA, 122 bp, Homo sapiens
cgcggcggcgcggcctttgaagtcgcggcggctgccgctttcatcctttcttttttccctcgcaggcccctttgtgtgactaaatttggcaagaatatggatctgagccagtctttccacgt

SEQ ID NO: 361893 - DNA, 122 bp, Homo sapiens
atggacgcagggatttgtgaatgagctcttgctcccggtctccaggaagcacgcgtctcccgggagagcctgaggttaccagcagacagcgtgggtcctggcttggctgccttttgcctttt

SEQ ID NO: 361894 - DNA, 122 bp, Homo sapiens
ctgtgttcacctgataaggagtcgtggctgcttggacaggctcaaaccaagagagcctttcgttttgtctcccctgtttttctgcctgcgttttctccacattagccactcaatttccagta

SEQ ID NO: 361895 - DNA, 122 bp, Homo sapiens
gcacccgaaagtcttctcggggagtggcggagaccaaggcctggctctctgtgccagccgcgagctccttgtcccatggagggtcaaggaccaccaactcaggagaccccgccatttttcgt

SEQ ID NO: 361896 - DNA, 122 bp, Homo sapiens
tcccgggctccaacctctttgctcagcccgggaggctcggctggctggggcgggcgtaaccgtggggcgaggcccgccggtctttctgatttccgcgggcggcgtgggcgctgaggcagccg

SEQ ID NO: 361897 - DNA, 122 bp, Homo sapiens
ccctggcttccaaaaagtcctggaagaaagaataggtgtgaccagaaagtccttcacctccggaatctaagtggatatggtaactattataaacttgtgtcctccgtctcttttgtgatatg

SEQ ID NO: 361898 - DNA, 122 bp, Homo sapiens
tcctccatcctcacccgccaaactgtgcgttgttccgctggttgatggcctgctggcctgcggcgtctgtcagtgtgtgctgttaggccgctgcattcctctcgatgtccagccgttgtgtc

SEQ ID NO: 361899 - DNA, 122 bp, Homo sapiens
agtcggcacaaaccccctcccggggtctaagcccgcctagtacagtacctgaaggggcagcgccacctccgcccgattgtgctggctgccccagtggcggcggtcacagctcgggcgccaat

SEQ ID NO: 361900 - DNA, 122 bp, Homo sapiens
cgtttgtctgtgccttggcagtgccggtgccctttaactgcctacaggaaattaatataccgggcatgcaggaggaccagacaaggtcccagccatcacagaacggtctagtcaggaacacc

SEQ ID NO: 361901 - DNA, 122 bp, Homo sapiens
gactttactgtggccacctgtgggaaggaaggccgaggccctccctgagcactgaaacaccgggtggaggatggttttcaactaggctccacatcagaaagcagtgcactcacgctgacagg

SEQ ID NO: 361902 - DNA, 122 bp, Homo sapiens
tccgtgggttgtgcgtcagctttgggtgaattttgtttctaccctgtcacggggaaagttcgggttgagtccaggagtgcacactgctgctgccacccaatgcgctacatatcacttttttt

SEQ ID NO: 361903 - DNA, 122 bp, Homo sapiens
cctagaagacagagaccagatctttcctatcacctatagtaggagaagcagctattatggcgctgcgtgctctgtgggaacttctccccgtttgtgtaggggatagtaaagaatggggggtg

SEQ ID NO: 361904 - DNA, 122 bp, Homo sapiens
tctgcggcagccccgtggacccacggggtggccagggccaagtcacatccctctcttccccggtcctccctgtctcgaccccactaaacagcaggaggcagagaaccagagactggcgtggg

SEQ ID NO: 361905 - DNA, 122 bp, Homo sapiens
ggcggggcagggtttgtgaatgaatcggccgagggggaggggagggaggaggaggggcggcgggggcggttcccggctccccggcctgcccaccctgtgtccaggcagcaggagttcagcac

SEQ ID NO: 361906 - DNA, 122 bp, Homo sapiens
ggcttaaaaggggtcgacctggttaactagaaagggcgaccagtgaccctgacctggacgcgctcggattggtcgattccagtgcagtctcagatgagactcttctatgattggccagaaaa

SEQ ID NO: 361907 - DNA, 122 bp, Homo sapiens
acgcagcttgttaaagcagcaggaccctgtgtccctttatgtgcaaattaaatctcaggtcgatgcctcctacatacaattcccggcgcctgcgtggaggatcgttgcgtcttcagaaactg

SEQ ID NO: 361908 - DNA, 122 bp, Homo sapiens
gagggctggcgccaccagcttcgtgggtgccatcccagactctcgctgtaaacgagggagcggggaggagccggccagccccgaggccaggcttggactgggcgtcagaaatgtttctacag

SEQ ID NO: 361909 - DNA, 122 bp, Homo sapiens
aacaattcctgggatagcattaggatcattggataactgtgtcttgctctttgcttctgacgggcgtcctcattttgtacgtgtgcacacccattttactaatgagtttcgagttgatcttc

SEQ ID NO: 361910 - DNA, 122 bp, Homo sapiens
gggcctcagttttcactggataagcggtcgctgagcggggcgcaggtgactaaatttcgacggggtcttctcacgggtttcattcagttggccactgctgagcagctgagaaggtggcgacg

SEQ ID NO: 361911 - DNA, 122 bp, Homo sapiens
ggcatttcctaggcaatagattctcttaactcacctatgtcaagaattctgtctccaggtcggttccacctccagccctctagctgctgatgctcagtgtactgaagccttctgtcatggaa

SEQ ID NO: 361912 - DNA, 122 bp, Homo sapiens
ccgggcccgccccggctcgccccgccccggtctcggccacgccctcaggacacgccccctcggggctcgccccgcccctgcccttaaaggtacagctcccggggagcttcgtagggtcttcc

SEQ ID NO: 361913 - DNA, 122 bp, Homo sapiens
gctctccccgggactctcacgctcaagcgccccggcttgaggccgggaccccctatttcccggttatgggacggccccttgagggacagcctctacgagccctggatttataccccgagcct

SEQ ID NO: 361914 - DNA, 122 bp, Homo sapiens
cctccaagccaactgccaccccagtgaggacgctgtcctcatggcccggtccacacgctccggtttcccagcgccgctcaccggtgccactcgctgcacacgcagcctacacttctaccttc

SEQ ID NO: 361915 - DNA, 122 bp, Homo sapiens
gccgcactagcccgctcgtcacgctcttttgtctcagctggcagaggataaaagccgccgcggctgccttaggaacggcgctgcctcgtctctgctacccctggttgggcggccctgcgaag

SEQ ID NO: 361916 - DNA, 122 bp, Homo sapiens
gcagacaccgggcccaggcgccgcccctcgtggaggccgtacaggtgcatcttgtacttgcgcccaggctccaggcccctcacagtgaccttgctctcctggcccccaacacgcaccgcctg

SEQ ID NO: 361917 - DNA, 122 bp, Homo sapiens
tgcgagcgcagcacccggcgctgccgagccacctcccccgccgcccgctagcaagtttggcggctccaagccaggcgcgcctcaggatccaggctcatttgcttccacctagcttcggtgcc

SEQ ID NO: 361918 - DNA, 122 bp, Homo sapiens
caatcctggccactttgatgctcctggtgctgacccagggtcctggagtatgggctgaggcggcggggtagagatgttcagggcagtggcccctttccatccacactggaactatttcagta

SEQ ID NO: 361919 - DNA, 122 bp, Homo sapiens
cacgcactcgcggcagagcccagggcggcctgcgcagcttgcatagggcccacgggacgccgcccacggggaaagccgtctgtaaccatccgagcctagatactccctgtttacctgcagac

SEQ ID NO: 361920 - DNA, 122 bp, Homo sapiens
agaagcggcccggagttgcaggaagggcgccggcgtcactggccccaagagctcggaacgcgcgcgccgcaggagtgccggctgcggggtcgggttgagactggcgggaccctcggcctctg

SEQ ID NO: 361921 - DNA, 122 bp, Homo sapiens
caagggcaccgtgccggtccctgagggctgctccccttgcagcgtggccgccctgcagagcgcggtggccttctccgctagcgcacggctctatctcatcaaccccaacggcgaagtgcagt

SEQ ID NO: 361922 - DNA, 122 bp, Homo sapiens
tgcttgcttctccgcgccagacacccgcccagtctcggggtggcccggtaacagctgctgcggccagacagctgctcctgccggctctcctgtccacacctggtccctgggaggtgcgctcc

SEQ ID NO: 361923 - DNA, 122 bp, Homo sapiens
ttctgagcttgcgtgctctatcagtacagggtcacttattttgggctgtcgttttagaaacgcttcttctttttttcccggccaaaatctattatgcaagtgatatatgctcttggagcaag

SEQ ID NO: 361924 - DNA, 122 bp, Homo sapiens
ggaactgcattcgaggtcagagtttctagtacgagtaaagcggatcctcgggaagagacccgaccagaaggaaatcgccgtcttggaagatctaagtccgggatggaacaaaacccactccg

SEQ ID NO: 361925 - DNA, 122 bp, Homo sapiens
gacacatgatgcatgaagtaggagcccctggcaaggagcccaggctgccatggcctcgctcgctcctgcttcccggcatggccccgaggctagctgcctctgtactgcctgagcatcgtccc

SEQ ID NO: 361926 - DNA, 122 bp, Homo sapiens
tcacagcagctctaaacatgtatgcaagtggtcattatcacaaaagtgtgtaataacactcgcagaatttactgtgttagctctggggtttttctgggagatctgcaaacttagaacaaaca

SEQ ID NO: 361927 - DNA, 122 bp, Homo sapiens
gggcacagcttcccctgtccagccaaggctgccttacccaagccctggtcctgcctgttccgtgccttctcccgcaaggcttcttcaacagcacaccgcgaaaacgtgcaggcatcgccccc

SEQ ID NO: 361928 - DNA, 122 bp, Homo sapiens
agaaacatgacaaagagaatgtacatgtaggagttgtcatcacggccaggtaggctggcccgcctctcttcagtctggttgtctggccccagccctggccctggccggcagagcaaattgct

SEQ ID NO: 361929 - DNA, 122 bp, Homo sapiens
gccggcgtggggaaggctgctgtgggttctacagtgcattgtcccgggtgaggtggcggccgccctgctctgctgggaagatcctgagtccagcgtttgccggcagcctcatcccctccttc

SEQ ID NO: 361930 - DNA, 122 bp, Homo sapiens
caggaagtaggtcaggaagaacaataataaggttacacccaagcgtgggtttctaaggcgcggaattttccgtacagaccgatttaaggctgcaaggaaggagtcctgggagcatggctttc

SEQ ID NO: 361931 - DNA, 122 bp, Homo sapiens
ataaaactgaagttactcatcaggtgcccactggttctttcaccctcattacatctagaacgaagctgagttctatcacatcagaagccacaggaaacgagagccatccatacctcaataaa

SEQ ID NO: 361932 - DNA, 122 bp, Homo sapiens
gtgcatggaaggagtgaagcagcagcccatttaggcagactgcaagagttgtggtctgcccggtagcctgtttaaccagagtgccccacacctactccccagagcttgttctaagcaaccaa

SEQ ID NO: 361933 - DNA, 122 bp, Homo sapiens
ggcaggaagccttcctctcagtgcgggttagcgcgtctccccgctcctccagaatctccacggagcagcacaccacaccgcagcacaccgggaaagcgatccgcctctgtccttctcacctc

SEQ ID NO: 361934 - DNA, 122 bp, Homo sapiens
tcctttcccatttcacgttccgctgactttctgtggggccccaacagccccactacgacacgcttggtacgagatgaccacagtaaagatggccgcatagacttcaccgtagtaactgggag

SEQ ID NO: 361935 - DNA, 122 bp, Homo sapiens
gagctgccgcaagtccagacccaggatgcagtagtctgcgctctcaaagcacagcgcggacgcgggctcccccctctcgaaaggcccggttaacgcgcacagctctggcgtctctccaatcc

SEQ ID NO: 361936 - DNA, 122 bp, Homo sapiens
ggaccgcggcggacatggcagctcagatcaccaagcgcaagtgggaggcggcccgtcgggcggagcagctgagagcctacctggagggcgagttcgtggagtggctccgcagatacctggag

SEQ ID NO: 361937 - DNA, 122 bp, Homo sapiens
ggttcctcatggatgaagaaggaccagcccacatttaccctctgacaaatcggaataatacgtgagtgtgtcttagactatgaagacaagattcaggaggagtatgagcaaatcctcaatac

SEQ ID NO: 361938 - DNA, 122 bp, Homo sapiens
agctcctccccgcgtctcgggtttcaatggctcgacctgccggaaagccccgggcccgcgcgctgcaacaggatcccgtaaacagcgcgcggcggccagggaaactttccccggagccggcg

SEQ ID NO: 361939 - DNA, 122 bp, Homo sapiens
tggtaaataagggtgaagattacactctatgacactgaaacattcctcattctcaacacccgagatttatgtagccaattagtgactaacagagaaaattggctggcagaaaaataatattc

SEQ ID NO: 361940 - DNA, 122 bp, Homo sapiens
gctgcgggatcagctgccgagcaggcacagggacaggtgcctggagaagtactgggagagcgcccaggagcgctaccggctgagggtggggaagcgcagggccaagcgcgcgaagcaggttg

SEQ ID NO: 361941 - DNA, 122 bp, Homo sapiens
gtgagaccctcccccaactctgtcctgggcccgtgcgcccccagataactctgggcaggacgggacataggctgggaccacagaacaggaagccctggcaggtttctgtctctgtctctctt

SEQ ID NO: 361942 - DNA, 122 bp, Homo sapiens
tgcgcctggcgatcacgggccagtgcaagttctgggtgggcgctggctcggcaggcccaccggcccacctggcaggcagtgcactcggagctgcaggctggcgccaccgccccgggcagtga

SEQ ID NO: 361943 - DNA, 122 bp, Homo sapiens
gaccccgccctgcagggccctgattgacagaagctgtgttcctgcctgggacaggcggcccgaaggacgtgtgtttggctggctcagccctttgcttcagggcttccttgcggtgctggcac

SEQ ID NO: 361944 - DNA, 122 bp, Homo sapiens
acagcggaactcagacgctgactccgagcgcaccccgggccttcccatttcatacaccctcgaggatgagacccaagcacctccaaggaatagcacccgaggtcttcaggacaccgaccggt

SEQ ID NO: 361945 - DNA, 122 bp, Homo sapiens
caggatctcctgcagatgccaaaatccacagatgctcaaaagtcccttatatatataaaacggtgtcgaatttgcatataatctataccccctatatactttcaatcttctctacattactt

SEQ ID NO: 361946 - DNA, 122 bp, Homo sapiens
caacagatccgcaaggccctggacgagcacaaggagttcaaggctgagctgatcctgtaccggaagagcggtgaggggccacctggccagcctgcctcacctttgcagtctcacccagcctg

SEQ ID NO: 361947 - DNA, 122 bp, Homo sapiens
gtcgctgccaacaaccgcagcgaggcgagccgcgctcccgcggctccagcctccagcatacggccactgactcctgattcctagtcctccatgccgtggagcgagcaactcaacgggaagac

SEQ ID NO: 361948 - DNA, 122 bp, Homo sapiens
tattgaataatcatccctgacctctaggtatttaaaatctattcaggagatggccggctgcggtggctcacacctgtaatcctagcacttcgggaggctgaggcgggtggattgcctgagct

SEQ ID NO: 361949 - DNA, 122 bp, Homo sapiens
accacagctctcccagccctgcgccaggctaccagccccttctaccttcaggggcacccccgcagtgggctgccccattccacacttgacaagaaccaataatggccccaaaactccatcac

SEQ ID NO: 361950 - DNA, 122 bp, Homo sapiens
gcgcacgggcggtaggatttctgcaccaggggaacgatgcacgggcgggctgcccagggccgagcctgagcctgagcgggcgccaggggaggctagcctcggcgtggcgccccaccgcaacc

SEQ ID NO: 361951 - DNA, 122 bp, Homo sapiens
aaggtggccaaaagacttccttcgctctggagttcttgggtggggaaggagtgtcatgtccggctgggagttggaggggacagtgttgactatttaaaaagtgtgtaaccatccccattaag

SEQ ID NO: 361952 - DNA, 122 bp, Homo sapiens
cgggctcatcaccgtgaagtcccctgcggccgaagggcggtggatttttagggtctctcccgcccacccctaatgccagtccccaccactgcgtactctgttgcggatcacaccatccaata

SEQ ID NO: 361953 - DNA, 122 bp, Homo sapiens
agtctcgggaggcgtgacacaccctccccgcgcgctctcgcgttaccaagtctgcgcagccgcacacccccagtcccggcgggccccgcgcgccaggccccttcccgacaggccccaggagc

SEQ ID NO: 361954 - DNA, 122 bp, Homo sapiens
ctgcccggggctgccaaacccactcccacccggaactctagctggcccacaagcgcggcgcgcagccgcagttgctgcctgtgcctctcccgccacacctccgtgcaggctgagggagccgg

SEQ ID NO: 361955 - DNA, 122 bp, Homo sapiens
gcacgcacatttggacacggtaatataacccaacgcagggtgacaaaaccttcgtgatgccgtccatgaccagctcatggtgcacctacctggcttttttttagtaaacaaatatctcagtg

SEQ ID NO: 361956 - DNA, 122 bp, Homo sapiens
gaggtggacgagcagtaccacgcgctgctggagaagtacgaggagctgctgagcaagtgccggcagcacggggccggagtgcggcacgccggcgtgcagacctcgcgccccatctcccggga

SEQ ID NO: 361957 - DNA, 122 bp, Homo sapiens
tttattttaattcagatgtgaatgcaaagtgtgcaactcctaatctacatatctttacctcgcctgcaatttttgctttcaaaatgaaagtcatcgttcgtgttatgaccattactgaaatc

SEQ ID NO: 361958 - DNA, 122 bp, Homo sapiens
tctttgagctgtgtaatgaatggaaagtatcatagctgtcaagggatgctgaagcatccacgtgggactggcaattgatttttccagtgaaacagcactgagacatatttgagtttatcaaa

SEQ ID NO: 361959 - DNA, 122 bp, Homo sapiens
tcttaaaagcctgaagggaatgtagacattccgacatctggtaagggagacgctctccatcgcttcccccgggggcgtcaccgccccctgatgccccgccctcctcacgactcaagttcctc

SEQ ID NO: 361960 - DNA, 122 bp, Homo sapiens
acagggggtgcgggatgtgcggctcaaccagagaagccttgaggactcctagtgaccgaccgttcgtgcacagacaggcggctgcgatgcgacgccgccgacctgcgtccaccacagagaac

SEQ ID NO: 361961 - DNA, 122 bp, Homo sapiens
gctggaggacagagcccggctgcctaggcctcccctctgctccagggccctctactccctcgccttgcgctgctgggccccccaccctgccgaccggcctagcttttcccacctggaggggc

SEQ ID NO: 361962 - DNA, 122 bp, Homo sapiens
ttgagtcgtccacagcactaggccgccgccagcccgggcgagctgcctagggaccgcggacgccgcagcaagcagctccctgctcccgccacacccgccgagccagccgcgcggaacccact

SEQ ID NO: 361963 - DNA, 122 bp, Homo sapiens
ctattgtgtgcctgtttcaggactcattcaatgacttgcattcacaacaaccttgtcatccgggaacggaggaaatactgctaagattgtttctcttcttggttgctgcctcaccgcttgtc

SEQ ID NO: 361964 - DNA, 122 bp, Homo sapiens
caggctgtggctgggagcgaccaggcgctccaggtcgccctcgggctggaagcggttgagcgcgctgaggccgaaggtgattgtcaggactgcgggcacggtgaggaaaaagaccgggtgcc

SEQ ID NO: 361965 - DNA, 122 bp, Homo sapiens
tgcttttaagacatttccttcattttggagcatttggtgagggggccagtgaaaccggctcgtaaaatagggcttttatgggaagaaatagggtcgggttgctagcatcctgggacaatctc

SEQ ID NO: 361966 - DNA, 122 bp, Homo sapiens
ccctcgacgacagtcgagggctcgggctctgtgggactgtgggagctagggtctgcggggcgcctgcccgggcgaggtcggaagctgcaggccagctgggcccgggccggagcgtgcccggc

SEQ ID NO: 361967 - DNA, 122 bp, Homo sapiens
ttttgtgctaactgactgaccctattaccttcagttgtaacaacccatttaaggtagaaacgaaggacactcatctccatgtgttttcagaatttaaatgaaaaaataaaaagaggctgatg

SEQ ID NO: 361968 - DNA, 122 bp, Homo sapiens
ctgaaccaggaaaggaggaggatgctcatcattggctaaagatccatgcctggaaattaacggcgttaaagtgagacttgcttcaggttccaacccggtaaggcaaatggagaggctgtcag

SEQ ID NO: 361969 - DNA, 122 bp, Homo sapiens
atggggctgagaaggggtcacatgggggctgaggtggctgctactcaccagtggtgccatcggccgtgagggggccataccgcttcttgttcgcaattccaaacagagtgaatctgtacttg

SEQ ID NO: 361970 - DNA, 122 bp, Homo sapiens
tcctctaaggctagaggcagctactcctggagtaggaaaaggccacatccaggaagcccacgagcccaggcagggatctgtccttccacttgccctcctgaagggccctgcggctcccactg

SEQ ID NO: 361971 - DNA, 122 bp, Homo sapiens
agtgggaagtacgcataaggtatttctactacattccaaattaggatgtttgaggccaggcgcagtggctcccacctgcaattaattctagcactgtgggaggcctaggcaggtggatcatt

SEQ ID NO: 361972 - DNA, 122 bp, Homo sapiens
ctgccctccccttgtgacccagcggttgcagctgggagctgaccacgctccttcactccacgcgtgcctgctgggcgctgctgctccctggcactgttccaccgtgcaccttcccggaagaa

SEQ ID NO: 361973 - DNA, 122 bp, Homo sapiens
ccaggggtaggggcgtgtcacacacaccgtgtcttacaaagaggaaaaataagaggttcccgcaagatgcttgcgactctggtacttttcaaagtaacgcagccaggcagcgggctttcccc

SEQ ID NO: 361974 - DNA, 122 bp, Homo sapiens
tcccacttcgcttctcgccagaacgtctcttaacatttaggaaaatgcgtttcgcccgtccgcgtgcaagcttgccatcacttggggttgcgcctgtgatctttatttaaactccaccagcc

SEQ ID NO: 361975 - DNA, 122 bp, Homo sapiens
atagcattcaaaatagggtgtaggggatgaggaaatggcagcctaggaggaaaacagctgcggttataaaacggcaacaggaaggatccttggaaatgttccatatcttgactgtagtgatg

SEQ ID NO: 361976 - DNA, 122 bp, Homo sapiens
aggcgctgtgtctcctacgcaacttctgagggctggagggtgccaagggcagctgctgaccgcctggtgcttcaggagctgggtgctggggaagccacatgcactgcggcgtccagaggcag

SEQ ID NO: 361977 - DNA, 122 bp, Homo sapiens
ttcagacttctacctcctgaactttgagataaatgtctgttgtttcagccacctactttgcggtgcttcattagagcagtactaggaaactaatgcagacatcaaaaaggacctgatcactt

SEQ ID NO: 361978 - DNA, 122 bp, Homo sapiens
gaaccagggaagcctgactgtatcacgccctggatggggaacttggggatgagcaagacccggaaggagcgagatccgggagggagactcagcccagacaggaggcgttagcaggcgctctg

SEQ ID NO: 361979 - DNA, 122 bp, Homo sapiens
ccctgggaccgtcaaccttggaccagctgcagccgacgcctggcagggctggtcgctttgcgttgaggaggctgctgtccccgaagctggccttttaatcgcacagggcaggaagctggtgg

SEQ ID NO: 361980 - DNA, 122 bp, Homo sapiens
acaccattggcaggtacatcagcaccaaggcggtgggcagcaatgctcgcatggacgtcacggacaagtacaagtacccagaaggtaggagggacgctggcggggcagtgccgcgagaggtt

SEQ ID NO: 361981 - DNA, 122 bp, Homo sapiens
agggggacacaaggcatcaatcaatacacataagctgtacattggttacgcctagaaaggcggaaccaccggaagcggggatgcttccaggtcataggtggattcgaagattttctgattgg

SEQ ID NO: 361982 - DNA, 122 bp, Homo sapiens
ctgtatccactacatcacataactcctgtgaaaactggtttgggcttcatagtatcactgcgatgtttcttccaagggtgatgtttttctgctagttaagccttctagggatccgtctccac

SEQ ID NO: 361983 - DNA, 122 bp, Homo sapiens
ggttctcaggtgagcgctacacggtcggggcgggcctagtaggcgcttcaggcttaggggcggaacagcgcgggccgcgcgggcgtaggcggggtatctggaggaggcgcagggaacctgga

SEQ ID NO: 361984 - DNA, 122 bp, Homo sapiens
ctatttcagattggaagatcgggtccatgctcataaaacatattagcattgttggccgggcgcggtggctcatgcctgtaatcccagcactttgggaggccaaggcgggcggattatctgag

SEQ ID NO: 361985 - DNA, 122 bp, Homo sapiens
ccaattgacttggacgccgtcccaactccacaagttaacggtcgcagctcttgggcaagacgttacaaaactagaagctgacatttccttgtattacaaatgggagccatagaaatccttcc

SEQ ID NO: 361986 - DNA, 122 bp, Homo sapiens
caagactcacaggcagcagcgtctatctccccatgatatgcagagactgccccagtgaagcgttcgtctcagcagccggtccgactgcgcggccctccccgactacttccggcaccgctccc

SEQ ID NO: 361987 - DNA, 122 bp, Homo sapiens
catcagttattcatgaaatacattttggggtgatgctgaatgagacacctaggaaggagccgttcagcagattttgaatggatgaatgaacaaactaggatgggcacactgacttgccatct

SEQ ID NO: 361988 - DNA, 122 bp, Homo sapiens
gcggtgaggagcgcgggatggagctgacgccgggagcggccatgccaccatgtgtgggaccgtgtgtgacagtgtgtgagaatgtgtgagacattaaggaaccgtgtgtgacaatgtgtttg

SEQ ID NO: 361989 - DNA, 122 bp, Homo sapiens
cgccatcttcacagccgtggagtgcctaccgaaagcatttcaccctcttccggttcgtcccgccttcttccggctctgctctaagggcgggattatccgggtcctggaaacgtcgcggagct

SEQ ID NO: 361990 - DNA, 122 bp, Homo sapiens
tcccttctcacaatttctctccggggtaaagttatttctcctgatgtttggatatgctttcgctactgaaaagtgagaactatgtaaatctgcattttctctctctacccagctgctaggga

SEQ ID NO: 361991 - DNA, 122 bp, Homo sapiens
gaaatggcaagccaggatggggaggagggcgccagcgacagcgccgagttccactacacccggcccatgtacagcaagcccagcatcatggctcacaaacgctggatccacgtgaagcccga

SEQ ID NO: 361992 - DNA, 122 bp, Homo sapiens
gcgatgcgccagggtgggctgcgctgggcgctacctttcacaaaagaccagggaccccaacgcgcccgcgaccccagagggccggtcctgtatttgttcctgggtggaaggagaataagaac

SEQ ID NO: 361993 - DNA, 122 bp, Homo sapiens
taaatcttgccaccgcacactctttgggtctgtgtatttgtctaatcaagctgtaaccctcgccgctgtggtccacggtttcattccctgaagcccgtgagaccacgaacccttcgatcgag

SEQ ID NO: 361994 - DNA, 122 bp, Homo sapiens
cgtttggattggagactgtgttctcttcgctgtttagttagcgagcagctagggtggagtcggcctcaaaggttccgctctcatgtcggcaagtgtgatttgaattttaaaacactgagctt

SEQ ID NO: 361995 - DNA, 122 bp, Homo sapiens
agattctccagtcttaagtcatctgcgctttctgactttctcaaattctctcagcccaaccgctgcatagtaacctacggtagatcttccagcatctctctttctgtagaatattaccaaga

SEQ ID NO: 361996 - DNA, 122 bp, Homo sapiens
gagcaccttcatgttgcgttcggagaggcgcagcatccacaggcggaggcgaaagcagcccggacagctgaggccggaagagggtggggccgcggtggctagggagccggcgccgccacgcg

SEQ ID NO: 361997 - DNA, 122 bp, Homo sapiens
cacagctcatttttttttgcatctatatttttgaaaaccgggacaatgaagaaatgagtacggtgttggagaaaagataaagtcggtgtagttctgcattaaaccagctttcaagggtagaa

SEQ ID NO: 361998 - DNA, 122 bp, Homo sapiens
aggagggaggtgggacagcctgcaccgattccagtgggattggctccagggctggcctgacgctgctactccaaattctagagccatcctcatcctggaagcaagggggtgagggtgtataa

SEQ ID NO: 361999 - DNA, 122 bp, Homo sapiens
cccagcacaattttaatttttcttaaacacttttcctgccttagcaaagtcttggaggggcggccgcccaggcgccgcgagcgcaagaccacgagggggcgctgcttcaccacgctagagga

SEQ ID NO: 362000 - DNA, 122 bp, Homo sapiens
cagagccccacaccagggacaggtggccgtgactgacagggcctctgtgcctgtacaaagcgggcagccggcgacctttgtaaggggagaggcccattccctgtggcatgtcttccccaccc

SEQ ID NO: 362001 - DNA, 122 bp, Homo sapiens
aggaagccccgagcctgggctgggaggccaaagccgggagccaggatcccacctcagtcccgcccagggtggcgcccctgtccctagcacggctgtgctccgcttctctccgcgcctggggc

SEQ ID NO: 362002 - DNA, 122 bp, Homo sapiens
tgtgttcagctggcctccctagggttgctcttaagaatcaatatctcttattaacaaatacgatgctcccagccactcctttcctgggagcatctccacgttcaaagccaggttgcacagtg

SEQ ID NO: 362003 - DNA, 122 bp, Homo sapiens
ccccatttcccccccagcaaggcttcctgagccgacggctaaaaagctccatcaaacgaacgaagtcacaacccaaacttgaccggaccagcagctttcgccagatcctgcctcgcttccga

SEQ ID NO: 362004 - DNA, 122 bp, Homo sapiens
ttttcctttctgtgctgtgattgtttttccctctcaattttcttttgaccttgcataacacgcctatactcatatctgaaggaggtgcgttgcaccgggaatttccatttttacagctttca

SEQ ID NO: 362005 - DNA, 122 bp, Homo sapiens
tgcacctgggtgtggggaagggagagggtgctggggcagccctggccggggagcctacctcgcacctgctgctccagccccaggatgacctgcacggcctgctgcaggatgagcagcttggt

SEQ ID NO: 362006 - DNA, 122 bp, Homo sapiens
ggatccctttgggtttgataccatctaattggttgtggctaatcccatattaacttctcccgcagaagctagagggcctctccccaccctccatcacgtcccagcccctacagaagctgctg

SEQ ID NO: 362007 - DNA, 122 bp, Homo sapiens
cacccgaacggatcccctcccctccccagccctcgcggagagccttccgctgcccccggacgttggccagcactcttcaacctgcttccatcacaacttctgactgcggtcacaacccacag

SEQ ID NO: 362008 - DNA, 122 bp, Homo sapiens
tgcggcgttcgggtgggggaggggaggctcacaccctgcggcggcttaagcctggatttacgcactggaggagggaattagccctgagatgtcagccctgtgcccctggcgctgtccacccg

SEQ ID NO: 362009 - DNA, 122 bp, Homo sapiens
gggtcaaatcccagaagtggagttcttggatcacttaccggcttctggtttcctttcagacgcccacacgcgggagcgaaatccaaggggcggacaccagagccgagcactttgcgctgagg

SEQ ID NO: 362010 - DNA, 122 bp, Homo sapiens
ataatacttcactgaatattaataatctttactagtttacctcctctgctctttgccacccgataactggatatcttttccttcaaaggaccctaaactgattgaaatttaagatatgtatc

SEQ ID NO: 362011 - DNA, 122 bp, Homo sapiens
ctctgccttttgctcatgggagtggatggggaggtgagctcctatgtccaatgcctggtacgtagcacatgcctagaacactgcttgaacacagtagatctttgataggtgagaggtggtgc

SEQ ID NO: 362012 - DNA, 122 bp, Homo sapiens
cgggagttggtggctggagagagcggggtttgggtactgcgcctgctgggatctggaattcgccttacgttccctgggtgcgcggatgtctgtttttaacagcatgctgctatggttcctaa

SEQ ID NO: 362013 - DNA, 122 bp, Homo sapiens
gtgctgaagcggtagaaggtggaactggggctcaaggtggggccgacaccgaggagctgtcgatgcccagatggtgctgaagggtagaacaggggagaagaacgtggtgagggggtgttgaa

SEQ ID NO: 362014 - DNA, 122 bp, Homo sapiens
tgacctcatgatccgcccgcctctgcctcccaaagtgctgggattacacgcgtgagccaccgcgcctggccaacaaagtgatcattttacaagagttatggcatagtcacaggtaagaacct

SEQ ID NO: 362015 - DNA, 122 bp, Homo sapiens
atctcaggtgatccacccgcctcggccttccaaagtgctgggactacaggcttgagccaccgcacccggcccttcactgggaacgtatatggaatacatctgcccatttacttgaaggaaaa

SEQ ID NO: 362016 - DNA, 122 bp, Homo sapiens
cttctgctatacttagagatctcaataatagtttgaaaatcgccccagctgcgctggcatcgcggcagcccccgggggaaggtgggagcggtggagaggccgccggtggtccgtcctcctcc

SEQ ID NO: 362017 - DNA, 122 bp, Homo sapiens
gagggctgggggctaggcccgctcgcagcagaaagctggaggagccgaggcatcgccgggcgctgggccctgggctctggccgcagcctggcccctcgcccctcgccccccgcccctcctgc

SEQ ID NO: 362018 - DNA, 122 bp, Homo sapiens
ccgcgatgcccaggaagtagaccacctgtgcgatgccgaaaaggggcgcgatgaccagcgcgcggcagtaggcgcccttcaggaaggccgaggggccctcgtgccgcaggatcttcctgtgg

SEQ ID NO: 362019 - DNA, 122 bp, Homo sapiens
cctcccagcctggagcaccagccccctctgctgtccacatccaagctttctacaagactccgtcctccaggagacctctggctgcctcaccttctcaggcgtcctcaccagggcccatgacc

SEQ ID NO: 362020 - DNA, 122 bp, Homo sapiens
attggacagatccaatggccccgcctctttatcactgagtgacagcggagcaggaaggggcgtggttgagctggcctggcttcagtccggcttgtccccgccaggacgtttgcgtttaaacc

SEQ ID NO: 362021 - DNA, 122 bp, Homo sapiens
actgggaatggcgccagtgtggatcagatggggtgacctagtggcagttagtctagactccgcactagtggttgagtgcccactgctgtgattacttgcacgtatttgttcattcaccatca

SEQ ID NO: 362022 - DNA, 122 bp, Homo sapiens
gcccttgcgttgcactgattccccggccgcgcccactgcatagtggctctcctcgtcgtccgcatcctccccagaagagtctctgcaggaggcggcgtccgcagtctccacctcccagcagt

SEQ ID NO: 362023 - DNA, 122 bp, Homo sapiens
cagctcgggcaaggaaagccggctgtcagggttctggaaacgtcctgccctgagggcctgcgactttctgtatggagccttggatcgcgtccctggaaagggacaccaaagatttccaattc

SEQ ID NO: 362024 - DNA, 122 bp, Homo sapiens
ctgtgaaatttgctaacgcacgattctgctctagtgcatcgtgaggcagtttatgacatccgtgcagctctggtaaagagcatgcttacaacgagggggaaaagcaccgccgcaggagcaga

SEQ ID NO: 362025 - DNA, 122 bp, Homo sapiens
aagtaaattgccatgggaaaggacagtcaagctttggtgagcactcactttgtgccatcccggtccttgcgtctcagagagattcagtagcttgatcatggtgacagccaaaaaggtgcgga

SEQ ID NO: 362026 - DNA, 122 bp, Homo sapiens
tgttcctaagggtgcagcccctcagcagcaggttttctttatacagcccggcctttttcccgttgtcatgtatgctgtagagggacagttggcacatgtcacgtggttgcaggcctgtgcct

SEQ ID NO: 362027 - DNA, 122 bp, Homo sapiens
ggaaagaacaattttaagcaatgtcatttctagatgggtttctaattctgcagagacacccgtttcagccacatctaaaagagcacagtttatgtggtgcggaattaaacttccccatcctg

SEQ ID NO: 362028 - DNA, 122 bp, Homo sapiens
cccagcctccgatcaagcccagcaggcgccgggtgcgcctgtgctgggaggcagagcccacgcccacccggaaccgcgccggccagcgaggtccgtgcgcagccccggctgccgcctgcgct

SEQ ID NO: 362029 - DNA, 122 bp, Homo sapiens
tgtgattttccaattactggcgtcccatccacacagattaattcatctccagacctcaggcggccgtcagtatcagcagcacccagtggtacgatgtgaccaatataaatctgttgagtaat

SEQ ID NO: 362030 - DNA, 122 bp, Homo sapiens
tgtgacacaaaggagggggtcacggtggctgaggtcaaggagcccttcctctgtgaagggcggccccaggtctgcgcggcggtgaagacagactggcagtgggagggagggaacccgacaaa

SEQ ID NO: 362031 - DNA, 122 bp, Homo sapiens
gaatgaagtgttgaaaccagccaccttgatgggattatttggtagaggagggtcggggagcggggcaggcgtcacttaggattcctgctggaaaaacccagaagaaaggccttgcttggcta

SEQ ID NO: 362032 - DNA, 122 bp, Homo sapiens
cccacatttgtgccgacactgttctcccttcggtggaagagctcaagggacaaggacacgcgcccccctcccagaggcgtcccgcacctgtctgaactgttaagaaatctgtttttgtttat

SEQ ID NO: 362033 - DNA, 122 bp, Homo sapiens
cattggatgaacctgtaaatcactttccttccttgtgctagtgatgcctattatatataccgctttgtaacctgccacacatcattgacattattctagtgtgcatttttttccctccctgc

SEQ ID NO: 362034 - DNA, 122 bp, Homo sapiens
gcttatctagaaaacctccagctctgatgtgatagttttaggcaccacccgtcacccattcggcctctactcctgcccccttgaaggattcttttccctagccccagcctttcccggacact

SEQ ID NO: 362035 - DNA, 122 bp, Homo sapiens
cagctgtaagcaacccaagctcacctggcccacctccagcccacctctcccagttgccctcgggaactctctctggccagcactctgtctctgcagagtgggctgagccgggggccttgagt

SEQ ID NO: 362036 - DNA, 122 bp, Homo sapiens
cccccggggcggaggcaggtacccccggggcggagactggggcgggcggggtccgggctgcgcccccggccaggccgggcgggctggcgggcggcgcggggggagcggggctgggcggcgct

SEQ ID NO: 362037 - DNA, 122 bp, Homo sapiens
gagcgggatcctccctcccagaatcccctgcccttccccaagacctccctgccccctccccgcttacctggcgcccccgcatccctggcccccaggttccacctttgcccaggtaatttctt

SEQ ID NO: 362038 - DNA, 122 bp, Homo sapiens
aatggaggcttgcctgcgtagggacaaaaataacagcacccacttcttaaaaataaatgtcgaaaagtacccctttttaaataaaaataaaaaataaacacctctggagtggatgtgttctt

SEQ ID NO: 362039 - DNA, 122 bp, Homo sapiens
aaaatgaggttggaaatccctcaagatcactaaaattcctccccaaaggtcggagcggaacgctcaaagtcactagcccagggaccccaaaaaaggagcgagaaagggaagcgcgccttctc

SEQ ID NO: 362040 - DNA, 122 bp, Homo sapiens
tgaagggggagcccaagcaaatccccaaactcacactgtagtcatgaccttgagagaacccgaacggaaacgcagtatctttttcttgagcgcgtgggaagctttgattttcacgaagactt

SEQ ID NO: 362041 - DNA, 122 bp, Homo sapiens
aaagtgaaatgtcataaccaccacgacccacacctaggcacatgcataagcccaggcgatcgtgttccagactttctaggctcagaggatgacacgtcatcttcgcctggctatatttttat

SEQ ID NO: 362042 - DNA, 122 bp, Homo sapiens
aggaggatgtcggatgcacactctcccctgcctggttgctgctggctttttcctggccaacgtctacaacttgacatatctcgctgcttaaattttccatcttagaaacctttactcaagaa

SEQ ID NO: 362043 - DNA, 122 bp, Homo sapiens
tagaggaggaacaggcagtggccagagatcctgtctggagggacgttgctcacacctgagcgggcgggtggggggtgagttgtgttctgggagcaaagagcaataacatcccccttctcccc

SEQ ID NO: 362044 - DNA, 122 bp, Homo sapiens
gagaacaccaacggggaaatccacccccatgatccagtcacctcccaccaggcccctccccgacacatggggatcacaattgaacataagatttgggtggggacacagagccaaaccatatc

SEQ ID NO: 362045 - DNA, 122 bp, Homo sapiens
cttgcaatgtgtgttacacttgcaatgacaggcaaggtagctctatccttttaggcagggcgtgtacacagatcaatgaacaatacttacacctacacatgtgtatttataattattgccca

SEQ ID NO: 362046 - DNA, 122 bp, Homo sapiens
ccaagttttatttgcgtttgtaatacagatgcatacaagtggactcatcatccatcatctcgtctgagctaaccaccatgacatcattaccaatccccagataccaaggccagatcttctag

SEQ ID NO: 362047 - DNA, 122 bp, Homo sapiens
gagaggccaggatatccgcatccccacacctgtcatccacaccaagcattaactccccatcgccagctgatgactcaagattcccaggagttctgctcattctaatgatggcccattctact

SEQ ID NO: 362048 - DNA, 122 bp, Homo sapiens
cccggcctgctctctcgcccttctgggccctcctttcccctctacaacgacccagtctgacgctccccaacatccaaaggactacgcctcggaaggtgctcgaaagaggcagaagttcactc

SEQ ID NO: 362049 - DNA, 122 bp, Homo sapiens
gattacaggcgtgagggggctagaaaggggattttctgagtcaaagaactagagctacagcgaaggcctcccaggtgcttgtgaagtggatctcccagccccaccctccaccatggcctcct

SEQ ID NO: 362050 - DNA, 122 bp, Homo sapiens
atcctgagtttgcaaatgacaaagcaagtccccacacacgggccatgagatgtaatcacacgaccgaagacgagctggtcatcccgtgaaccattgtgcttgttggagtcccactgatggcg

SEQ ID NO: 362051 - DNA, 122 bp, Homo sapiens
cagtacccgcaccagtaccggcaccggcaccgagcgcaaggcggagggcccgcccgaagccgggggcacaactgcccaggtcccgaacccggactccagcttggacgacacctcctacagcc

SEQ ID NO: 362052 - DNA, 122 bp, Homo sapiens
cgcagagggactgcggcttcctgcgcagcgccccctaccggacaggcggcgggaaaacgccgcgcaactcagaccactggagcggagtagtatctggagtttctgtaacatcctttcccttt

SEQ ID NO: 362053 - DNA, 122 bp, Homo sapiens
gctgggcacctcaaggcccaagtctcccccaaaaaactttttccaaagttggctttgcaacggcagctcgagcacccgggcagggagaggtgcaaactcccgcccgggccgggtaggggggc

SEQ ID NO: 362054 - DNA, 122 bp, Homo sapiens
cttggaaggtaagaggtgaccagctaaggcatggggtttggtgtgggcttcccaccgccccgaggctcctaagtccaaaggcatgggaaggtgctgccccctggtgacgacatgaggtaatc

SEQ ID NO: 362055 - DNA, 122 bp, Homo sapiens
tcgccacgccatcttcccaacctctgccccaccatggcccgaccttaccaaccccagctgcgcaactacttccggggcgaaggcaacaccatagagcacgaggagcagtctagagcgccccc

SEQ ID NO: 362056 - DNA, 122 bp, Homo sapiens
cagagggaatgagcaactgacaggctctcgggcttttcaaccattgcttcgtgtggcccacggcccgtgagctactccaggggttgccaacaggagggtactaggttgctgttcagaaaacg

SEQ ID NO: 362057 - DNA, 122 bp, Homo sapiens
ctccaacttcaggaggaggcacagggccctgcctgtgcagaggatgaagatttcacatgacgcagccctaagcatccctggactggagaagcatggaagaagtaaacgtccctccctgctgt

SEQ ID NO: 362058 - DNA, 122 bp, Homo sapiens
ttcccagaattaattagaaagggtcctgggagcctaatggatagtatggcctcgtgtgtacggagtgaagaaaaagcaaataaacacgctgccctcatgcatggagcactggacgatgaata

SEQ ID NO: 362059 - DNA, 122 bp, Homo sapiens
gggggggggcgcgtccccggcgggtccctatcggtccctgtcggtccgtccgccccgcgccgcccccgctgggcactgggcatgccccaggcgtttctatataaagcggcgccgcttgggcc

SEQ ID NO: 362060 - DNA, 122 bp, Homo sapiens
gctccccaagcaaggacaacggcctcccaggcgctcattgtccaatcgcaggagggtgcccgcagaccttcaagaagatggttctcacgcctctccccctctccctcagggagaaatggagc

SEQ ID NO: 362061 - DNA, 122 bp, Homo sapiens
ccacccctcacccgatgcctaaggcggccactcctccccatccccatcccaactccatcgcggagcctctgacccatccacccggctctccgtgtgaactgttcggccctccacctttcccc

SEQ ID NO: 362062 - DNA, 122 bp, Homo sapiens
gaactacaagacccccggggtctttctgagtgcaaggctgaaatggacaagggctcctcacgggggtggagggagccggagcctgccttgtgttccttttttgacttgtgacatttttcaaa

SEQ ID NO: 362063 - DNA, 122 bp, Homo sapiens
cgccacctcctgggagatgtagttccgggaacagctggcccctgcgactcgcgggtgtgacgttgaagatgtcggccttctgagccgactgcggtggtcaagaggtgggtttgtttggaaag

SEQ ID NO: 362064 - DNA, 122 bp, Homo sapiens
agttaagggcacactctagagcaatattgccccagtttaaatcctaggttcaccacttaccgtagtagttgtgagacctcaggtgagttatttaatatctctgtggcacaatcatctgtaaa

SEQ ID NO: 362065 - DNA, 122 bp, Homo sapiens
caagaagcatgggtgccctctaggagcactgggagggacagtggaggaagaggccccgcccgggtgccactgctgaggcagctcttagggccctgccacttactttgctcagagcaaaaggt

SEQ ID NO: 362066 - DNA, 122 bp, Homo sapiens
agccgcctcccagacacctgtaacgaagaccatctcgggaaagctctgggttaggcaactcgatttcacgaaagcggacaccaacgctctacccagaggcccgagcgtcgtctaacgtttcc

SEQ ID NO: 362067 - DNA, 122 bp, Homo sapiens
agaaagatgatgttgacaatgacactcactgagttctagccatgtaccaggccctgtgcccgagtaatacaacaatattaacatcaccttttggtagataaggaaagtctaagaccggacaa

SEQ ID NO: 362068 - DNA, 122 bp, Homo sapiens
acctgggaggcaaaggttgcagtgaagctgagatcacgccattgcactccagtccggactcgacaacagtgagactccatctcaaaaaaaaaaaaaatacaaaaatttagccgggtttggtg

SEQ ID NO: 362069 - DNA, 122 bp, Homo sapiens
cttccgagttgtctaggtctgggcaggatggctctctgcatctcagctactaacgcacctcgaggttcccgcccgtcgtggccccaggccacccatcctgactgggtttggcctgcctccag

SEQ ID NO: 362070 - DNA, 122 bp, Homo sapiens
gccacgtggtgtcctttgctgggtgtggcgctgacgccccagggccatcgctgtagcaagcgcacacttgtacgctgttcccaccctccttccctccctcccttttcccttctttcttttct

SEQ ID NO: 362071 - DNA, 122 bp, Homo sapiens
atctataatacttgcccgcatcaagtaaaatgtagcttagactcatttacagaatattagcgttctcactacgcaaaacaaacaaaaaaggtaagaatttcagcgcaaacttccccaccaaa

SEQ ID NO: 362072 - DNA, 122 bp, Homo sapiens
ctcaccactccccctgctgggtctcacctgactgactgttcatttccctaccccctagggcgtaaacaaggtagggagggagatgtaaagaatccgcgtggaggggtgtcgggggttccggt

SEQ ID NO: 362073 - DNA, 122 bp, Homo sapiens
ctgcagcgagcccaacccctgcacccaggtagtcatgaacagccacagctacaatggcagcgtggggcggccgctgggcagcgggccgggcgccctgggacgagaccctccggaccctgagg

SEQ ID NO: 362074 - DNA, 122 bp, Homo sapiens
gcgatctgcactgccggtcccacaggagttaaaccccgaggcagacaaaagggaggccgccgcggctcctttgctcggctgtcagttgaaaagagaaccgccgccctctggacttcaactcc

SEQ ID NO: 362075 - DNA, 122 bp, Homo sapiens
tagttctcgcgtcgccttcggaggagtaaaccgacacaggcaggtgtctggcgcgtaagacgccgggcgcttaggatcccaagcccgccgtcctggagacggaaggggaggagctggggagg

SEQ ID NO: 362076 - DNA, 122 bp, Homo sapiens
aaattgcctttatgagtgatacccatttgagggcctctaaacccttcaatttggtactcacgtgaagagggaaagcggaagatggtaatttttttttatggatgatatggcaggatgattgg

SEQ ID NO: 362077 - DNA, 122 bp, Homo sapiens
ggcaggcaagagccgaggtctgtgccctgactcatccttcccccccggggcggggacaaacggctctgacatttcccggggccgcagcccccagagacaaacgaacggatgggccgtggcgg

SEQ ID NO: 362078 - DNA, 122 bp, Homo sapiens
acagctcactgccggcccctccaccgcccgggtcccgcgggctgcaaggaggggaggagccgctgcggacggcacagtccccaggggcctccctggggtctccaccttctccggactccgtg

SEQ ID NO: 362079 - DNA, 122 bp, Homo sapiens
tcttctatttgaaagggttataacattattgccagaaagcagtcatgatgtggttgtcctcgggcacacacacacgaacttggtctaaacctccccaaagacatcgttgggtaattatatca

SEQ ID NO: 362080 - DNA, 122 bp, Homo sapiens
aacataaaccccagttgaaatgtcaagaactcaaaaggatggggctgtgttctctccattcgtaaaacaaggaatcctccctccgcaaaaatcccaaataagacctgagggcctaacaacag

SEQ ID NO: 362081 - DNA, 122 bp, Homo sapiens
ccctgcctccagggcatccaccctgcttggagtcagcagagtcacccagcaagtgtaaaccggttgaagagcttaagaggatgaggtggcagggcgggccccgggaaggaggggattaggga

SEQ ID NO: 362082 - DNA, 122 bp, Homo sapiens
ctctcctcctctcccctccgactcccgccccacttgccattgcgtgggggaagagaaacgcgctggcgtcaagttgtgctctgcaacccaagagccaggatttccactccccacttgggtga

SEQ ID NO: 362083 - DNA, 122 bp, Homo sapiens
agtgttgcttgtgtgaagaaagcctcctaccttgattgcatcagggccattgcggtaagtcgctgctgcctaaaagagagtggaagaaagccatactttctctgtttccagtcactttggaa

SEQ ID NO: 362084 - DNA, 122 bp, Homo sapiens
tctctagtgcccctttctccacctggggggcgggggacggtctaaagaggaagatctttccgggccctccagggtgcagaagcccacctctagctgcacccctagcaggcgcaaggttctag

SEQ ID NO: 362085 - DNA, 122 bp, Homo sapiens
aactgactcgctgctgcttcgtgttcctggtgcagggtagcctctatctggtgagtggtccgaggggagctgcgcagaggggcgggggcccggaggatcgggggagagcgcgggaagcttgc

SEQ ID NO: 362086 - DNA, 122 bp, Homo sapiens
aaggggcgggacctgcaacgtccgacagaacgaggggacgtaacggaggcaggttggagccgctgccgtcgccatgacccgtgagcaccgagcccccttctccttgcccttttctttccgtt

SEQ ID NO: 362087 - DNA, 122 bp, Homo sapiens
ctttgcagcccatatagggggtaacgtatattctgtcaaatggaagtccccatcagggaacgatccttgcagcttgctaaaagaagcatgcctgattgtctgactagtgatggaaagacaga

SEQ ID NO: 362088 - DNA, 122 bp, Homo sapiens
tgaaccccaccctccacccacccaatcagtatctcggggactgagggcgggtatgtggggcgtgtgtgttttacaagctcccttagagagtcttacagcaaggtttgagaagcaaagccacc

SEQ ID NO: 362089 - DNA, 122 bp, Homo sapiens
tgagccagagagaggaaggaggttgggatgaaaagacagctgttttggaaacttgaagggcgggacatcagaaatgctgctgacccgaggcccctcttccaggaagcatcctccttcctgca

SEQ ID NO: 362090 - DNA, 122 bp, Homo sapiens
gcgtcagagtctccaccccgaggagcggccagagccccatgcgggcctgacctgtccgaccgacccctcgtccaccaagggagggctcagagtggagaaggcaaggtttttggtgcggggct

SEQ ID NO: 362091 - DNA, 122 bp, Homo sapiens
gaactgacaacaacccgctctcagggccagcagacgcgcctgcgcctcccgtggagtcctcgccaccccccacccagaccctgcctggagcccagtgtcccctcggagaggccgcatcccag

SEQ ID NO: 362092 - DNA, 122 bp, Homo sapiens
aacttcctggtacctggcagttggaaatgttccttctctggggatctttaagcacagggccgaatactgccttgagatgattttagtgtagccttcttgaagttgtgaggataaccaaatgt

SEQ ID NO: 362093 - DNA, 122 bp, Homo sapiens
gggggtggcaggggcaggggccaggttcaagagtcctgggcagccgcagtcccagccgggcgtctgtgagcagttaattaagccgcaccctgtctctgtcataactcatggcatcgctgtct

SEQ ID NO: 362094 - DNA, 122 bp, Homo sapiens
gggaccactcagtgacaacactggcctggtcattcagggactgcctgggctctgaagtttcgtcccaactgtctgcgcctatgctggggaaacaccttgcctggtagagctgccctgctccc

SEQ ID NO: 362095 - DNA, 122 bp, Homo sapiens
cccaggtcacagtcccctctcttctgcaccgtttactctgaacaagcatttaatgggcaccgaccccccggcctgaccgagggcgagacacacagaagggacgacagagtgcctgccctgga

SEQ ID NO: 362096 - DNA, 122 bp, Homo sapiens
gctccccgcctgcgggacgcacggagaccgcggtcagcgcgccgcctggccggcccagcgcgcccagcccgcgcccagccccgtccactcccgtccagccccgccgcccggccgcagtcccc

SEQ ID NO: 362097 - DNA, 122 bp, Homo sapiens
tgaccttgtgatccgcctgccttggcctcccaaagtgctgggattacaggcatgagccaccgtgcccagcctgcaataaaattttatatgcaatgcttgcaaagcaaaaatggtaaaactga

SEQ ID NO: 362098 - DNA, 122 bp, Homo sapiens
tcttgccaaagatggagttagaccctcagagaggtttgctccccacccagcagtaattaacgtgtcccttttcccagcatggagaggaaatgagcaaagcccttctgttaaaaaaagaagac

SEQ ID NO: 362099 - DNA, 122 bp, Homo sapiens
gccagcactcgcacccttggggtcagaaccggaaagagccaagtcactccactctgaacgcgctgggcagaaaaatatgtaaatcagggctccctgcgccctggagagtggcgaaattactc

SEQ ID NO: 362100 - DNA, 122 bp, Homo sapiens
accccacccccactgtcagcatcctgtctccaccctgagagtgacagctggttccagtagcgggagttggttccagcttgccattttcctagcactcctataaccagcctgctgatgcccat

SEQ ID NO: 362101 - DNA, 122 bp, Homo sapiens
tgaaaatcgctggaaaacttaggactctgtcctccttctctaccaatgcaaagggctattcgccttactagcaatctctggggaaactttaaacaatgtatttgcaaatgatacttatttaa

SEQ ID NO: 362102 - DNA, 122 bp, Homo sapiens
aatggtcctttgaagtatgaaaattcaaatccaggaaactcaccaagcatggccaaggtgcgcatgatcatatacagttggtccacagctatacctggaaacaaagttaaaatccatcgtgt

SEQ ID NO: 362103 - DNA, 122 bp, Homo sapiens
tccagtccgccaaccaatcagcaattgcctctccgcaagcccgcctgcttgcgtcaccgacggacagcaccggttccgaatgggagagccgataacgcttaacccccagctcactctcacca

SEQ ID NO: 362104 - DNA, 122 bp, Homo sapiens
agggtgaaagccatttgcccagagccacttacataattaatggtgggctgggatcagaaccgaggcctcctggttacttgtccagtgtattcttcacaatttgtcttcattattttgcttca

SEQ ID NO: 362105 - DNA, 122 bp, Homo sapiens
cttctcttttctgctttcgtaactgcagtccttcttcctccctcctcctgcgcatctcatcgggattcagagatttgttcttgtaacttttcaggcgaaagttctcttttcctggggtggtc

SEQ ID NO: 362106 - DNA, 122 bp, Homo sapiens
agtgtcccctcctgtccccttcgccggggtggggatacgcaacttggatgtgagaactctcgaatcccctgagtgtggcgcctgccctggctgccaaggcgtttggggagaatttaagactt

SEQ ID NO: 362107 - DNA, 122 bp, Homo sapiens
gttacccaagtcttcttttagaaggtggctaaggaataaaaagctacatactgggtgcagcgtgcactacttggctgacaggagcactagaatctcagactttatgatttgcccacggaaac

SEQ ID NO: 362108 - DNA, 122 bp, Homo sapiens
cgggacctcgcacgcgggctctgccaccgcctgaggtcatacccaggcactgggtgttggcgggagcagtaaagcgccataaaagcaccacttggatgactattgcaaagtaagccttcttc

SEQ ID NO: 362109 - DNA, 122 bp, Homo sapiens
agcggttggggaagataaaaagaaatctggagtggcctaagagttagaatgggaggggaacggtgctagggcaagaagagattatactgggatcagtatagtaaagatcagtaaagagaaga

SEQ ID NO: 362110 - DNA, 122 bp, Homo sapiens
gctgcctgcaacctccccactcccacctcccccactgctgcctggggtctaagcacaccccgatccagccactctcaggaggagactctagggtgttcatgtcccttttagaccaaggccag

SEQ ID NO: 362111 - DNA, 122 bp, Homo sapiens
tgtcccacccggtttgcggtcccacccggttcgcggtcccaccccggcatttgtgccggccggccagggactcacccaaacctttatgttttaaaagatttattcaggccgggcgccgtggc

SEQ ID NO: 362112 - DNA, 122 bp, Homo sapiens
atcctaggttgcttgcagtttggggcaattatgaataaagccactataaacattcacatacggattcttatgagaacatgtccagtgtcatttctgattttcctactaggtttttcattttc

SEQ ID NO: 362113 - DNA, 122 bp, Homo sapiens
atagaaagggagaggatttctgttctgttctgtgggccgtcagcatgaaattgtacgttccgcccaggcagggctttgcattttacattcttgtttgcatccccgttccagacaattccagg

SEQ ID NO: 362114 - DNA, 122 bp, Homo sapiens
gtggggcccctcaggaccctccttggtggtaagtgggcctggcctgggggtgattgcaggcgggaggaggctcccagcagggacttatcctgggtcctactcacacttctggggcctgcatt

SEQ ID NO: 362115 - DNA, 122 bp, Homo sapiens
gcggggatgttgcaggccccgggcagggtgcagctgtggcagctggggggcacgcagggccgggaggagcagctggtgcggcagctcaggctgggcaggcagaagttgtagggcatagtgct

SEQ ID NO: 362116 - DNA, 122 bp, Homo sapiens
aagggatacgcgtgagagtgtcttgaacgctgcacccattcccacaaacctgaagcgtcacggacatgctgctaggtttattttccaccgggtcacccgccctgactgcccctactgggacg

SEQ ID NO: 362117 - DNA, 122 bp, Homo sapiens
ctgtccacagaaaaaaccatcttccacgaaaccggtccctggtgccaaaaaggtcgggaccgattgccgctctacaacaaatgcgcatcacttcagagcaagaggtgataacaaaggaaaat

SEQ ID NO: 362118 - DNA, 122 bp, Homo sapiens
cccgcgaggcgctcgaggaacagcccattggctgcctggccctcccccagtgactgcagtcgtcccgaaccaaacccgagaatcccagaaaagtcatctggggagatgccgctgggatccag

SEQ ID NO: 362119 - DNA, 122 bp, Homo sapiens
actggcttcagcggataaaggctggccatgctgctgaacatcccacactacacaggacagcgccaccacaaaggacagaaagcgtcagtacctggagcggttaatccatcctctgaaccgac

SEQ ID NO: 362120 - DNA, 122 bp, Homo sapiens
aggcgtcctcctctttactctcagtcacactgtaaaactcaccctttgtatcattgcactcgcactttagcttatttgtaaaaaggtgaggttcatattcttcattagcactactgtcttct

SEQ ID NO: 362121 - DNA, 122 bp, Homo sapiens
gcatgatgcgctgctctgcccctcaagagcccgcgtcgtcctgcagctggcgaggcgccacggatggagacccgcagccttctccaggctggaagagcgcccgcttcaggcccggcggtttc

SEQ ID NO: 362122 - DNA, 122 bp, Homo sapiens
ctgacccgcgtctgcggcagggacctgagttcttcctccaagtcccaaatagccaaccttcgcccccggcaacagggctaggtgcacgagcaaccagtttttcaggcagccgcctcctcttt

SEQ ID NO: 362123 - DNA, 122 bp, Homo sapiens
tggcaaagaaattacagtgaggcagtttgcagaaattagctttctaaggcccagatggagcgtagcatggtggagcatagactaagggaacaatgaaagaccatggatgctttgatattctc

SEQ ID NO: 362124 - DNA, 122 bp, Homo sapiens
ttttctttcccgtttgtaggtgaaaccccattggcttcattggctccttgatttaaaccacgcccggctttctgccctctttgctgctgctgggccaggttgcccagccatatcccagcccc

SEQ ID NO: 362125 - DNA, 122 bp, Homo sapiens
ttttggtgaagtcagcttttgcctttttcatcacaggcaggctttagtagttcctcaaaacgtgcaccacaactgcccggctgccaaacagaaatgctgatgcctgggcccactctagccat

SEQ ID NO: 362126 - DNA, 122 bp, Homo sapiens
ggctgggaaaataagagttgccaaacagaatgctaattggaggaccacgtaagcatggaacggatttaatgttttgaagtgtccaagtgtagtgcattctgcaagcatagttaggattccct

SEQ ID NO: 362127 - DNA, 122 bp, Homo sapiens
attattattgttattattatttttttgagaaggactctcgctctgtcgtccaggctggagcgcagtggcgcgatctcagctcaccacaacctccacctcctgggttcaagcgattctcctgc

SEQ ID NO: 362128 - DNA, 122 bp, Homo sapiens
tttaaccccaggcagagtaaagccaagtaggaagcaagacttacttggatggaactacagcgccatgtgagtattgtgcgaacacagtgacaagagatgacaggactgctttacagaccact

SEQ ID NO: 362129 - DNA, 122 bp, Homo sapiens
tctctaggacgctgttgcccgagagacgacggcagtcgctgactggagaatgagcctacgcgcctggcaagaagctgagctgtgattggtcaattggagataaacgaggagggggcggggcc

SEQ ID NO: 362130 - DNA, 122 bp, Homo sapiens
gttttcgcaatggccgccggaacggtcgccggccgatgctctctgcgacggaaagaaagccgccggacccacttccggtgcgttttacaatgaactccgggcactcgagtcgctccccggaa

SEQ ID NO: 362131 - DNA, 122 bp, Homo sapiens
gtggagaggataagttgccaatcctcccaaatttcttttccaggcagggggttgtcctgccgctctcagaactggctgtcatctgctgctctcttgtcacactgacacggccccctggctgg

SEQ ID NO: 362132 - DNA, 122 bp, Homo sapiens
actttgagcaggctgggaaacgatcccagacccttgagggtctgtgagaaatcaaactttcggcactttggaagtcaggaaaccagcacgttgggggaggcgggatcacagttacttgctga

SEQ ID NO: 362133 - DNA, 122 bp, Homo sapiens
gtgaaatgggctttgaaacctgccttgcctttctccgcccggtcccagcgggggtccgatcggcatcaaggcttcacccactcccagagccttcgggatcagccccaccccatcagcaggac

SEQ ID NO: 362134 - DNA, 122 bp, Homo sapiens
ttaccagttactctcaacttcctgccactcgaggcacctaagagacgcaggcagcccctgcggaccagggcccacatgcacagggaaggggctgcatctctggcaggtgtctgcagaggaac

SEQ ID NO: 362135 - DNA, 122 bp, Homo sapiens
actccgcggaggcagggctggagtcaccgggagttgagggtgccggaggcctggcccacccgcagccccgcaccgcgcctcaccttgatgtgctcgtggagctgcgcctcgtgctgccggga

SEQ ID NO: 362136 - DNA, 122 bp, Homo sapiens
tatttacattttacctggtggcaatggggaccagaaagaaaaataaaacaaagagaaagacgtgaatcttcatgattgaagacagtcagccgaattagcagctctgcagtgtttgaataaga

SEQ ID NO: 362137 - DNA, 122 bp, Homo sapiens
tatttggccacagaacacttttttccatggagcatctcctgggaccagttttctgttaaacgcattaacagcacaacccctaaatgactttaggaactattctgtggtcctctgtaggctga

SEQ ID NO: 362138 - DNA, 122 bp, Homo sapiens
ccttgccccggggcgcctccgggcaccccccaattctctctcttttctcttctccattggcgtgcccaagagccaaaccaaggagcgcctgagggtaaacagactcctgccatccgcgcctt

SEQ ID NO: 362139 - DNA, 122 bp, Homo sapiens
tctaaccctagcttcctacccccacaaccttgttcagccgcctccctataccctcttctccgattggcccgtcttccccggccggccaatgggggccccgtttactctctcatctcagggtc

SEQ ID NO: 362140 - DNA, 122 bp, Homo sapiens
gacatttgaatatgcactcgcgtgagagttccagctatatggtttttatggttgtgccatcgggacacattctggatacaattgtaactaccttgagggtgtgggagagaggctcattttgt

SEQ ID NO: 362141 - DNA, 122 bp, Homo sapiens
ccgcctccgcgcgcccgggggccccggcgccccccgagctagggcggccagctcgcggctcgccgtttgacagatgctcatcgccatggagttgccgcagcagcacctttgggggctcgggc

SEQ ID NO: 362142 - DNA, 122 bp, Homo sapiens
taaatttgtatatgtagataaactctgagccattcacataaagggctttgatttcggatacgccaaacacataaacaaacaaacataagctttcctttcacaatgggctcatgtaaattaaa

SEQ ID NO: 362143 - DNA, 122 bp, Homo sapiens
gcccttccctgggcactcattggtaagtcctcggaagcgtggaccaatcaaaaccctcctcgtgtctccagtccccgcccagctacggctctcgcgaaccgggggcgggccctccccgcgct

SEQ ID NO: 362144 - DNA, 122 bp, Homo sapiens
cctggggctggcagtaaattcctaagtttgcggatcccttcccgcattcccaaagtctaacgccccctctccagttcacagcgtcattgtcaattgtttggcctctggtgcatttcacacgg

SEQ ID NO: 362145 - DNA, 122 bp, Homo sapiens
ccctagtaccacttagtatttaaatattgtcatattagcttcagattatcatgtaaatgacggtagaggaataagagaaaaggctttcattggttatcagttttaaattctgaacaaaagag

SEQ ID NO: 362146 - DNA, 122 bp, Homo sapiens
ccaaaagcagcctcttgcctgctgtgggctgctgagccctggcctatgtgtattggtgtccgctgagtcacctgtgtcattcctattatcttatttacccatgtttgttattttctagctgc

SEQ ID NO: 362147 - DNA, 122 bp, Homo sapiens
ccgggttagccccaccccgaggggtcagggtcagaggccgccggatggcgtaggatcggccgctggtggtggtgataccgggtacccgggctatggcgccggcgcagcgctgccctctgtgc

SEQ ID NO: 362148 - DNA, 122 bp, Homo sapiens
aaaaagaaaagagagtttgccgtatggttaggcttagaaggtatcccattggacagggcacggtggctcatacctgtaatccctgcactttgggaagccgaggtgggcggatcaagaggtca

SEQ ID NO: 362149 - DNA, 122 bp, Homo sapiens
ctataatgactatcctggttttaaaatcccttttcttattccttctgagttttcccatttcgtgctccctgggagcatctctgtaaaataagcctgtggaaaatgggtaatgaggaaatcgt

SEQ ID NO: 362150 - DNA, 122 bp, Homo sapiens
gccaagcctagaacctctcccccaagcagttcctcttgaagctcacgttgcccaaactggcggaaccctgagatcaggaacttgctggtgcagaggcagggccagcccagcacagccacgtg

SEQ ID NO: 362151 - DNA, 122 bp, Homo sapiens
ttcagcaaaggattgaatgacttctcaggaaaaaatgccaacccagaatgacaaggcttccgtggttctgagcctggctctgaacctttcctttggaaaactaatgactccacctatcattc

SEQ ID NO: 362152 - DNA, 122 bp, Homo sapiens
taataaacatcaccttggaggttctctcagggaaactctcaggcagatgggctgcctgttcgggtaactctctggaaagcgtcaatcatcagcatactcccagtagtcacgacttggactca

SEQ ID NO: 362153 - DNA, 122 bp, Homo sapiens
ccacaggcgccatcttcagctctgagtcaccagggctggaaaaatactagatgcgctactcgtggactcgtgaatacactcgtgaatacaggccatttcctgtacctacagccacccgctgt

SEQ ID NO: 362154 - DNA, 122 bp, Homo sapiens
acgcctggtggctcacagctgcagggacacggtgcttctgtggccgcaggcgtgaggacccgggtcctggcctccctggggcctgttcctcggctgtgcccggttactcagggctgctctgg

SEQ ID NO: 362155 - DNA, 122 bp, Homo sapiens
tgggacagcatctggaatgtcactgagccatccgcgacttcgggagcttgtgggatgtggcgtcaggcatggggcggctcctcagggcttctggaaggttgtaggcgcaacttccttttgtc

SEQ ID NO: 362156 - DNA, 122 bp, Homo sapiens
cttccccgggtctgccgcctaagcagccctgtccctgatctctgtctcagaggctgctcccggcccagcttcccacaaccatcagcaggacctaaactgccacatatgcgcgccatggaata

SEQ ID NO: 362157 - DNA, 122 bp, Homo sapiens
gcacaatgtaataaggcaaatggaatgttgagcgattattcaggaaatctgactggccaacgtacagggtagtaattccttagacattccattctcagagagatcttgtacttcccacagag

SEQ ID NO: 362158 - DNA, 122 bp, Homo sapiens
gtccgtatcatgtcacagagaagcgtacaagcttaggaatcttgttttctgaattcgaatcgcaggttgccagttacacctgtatgcgactcaacaagtactttaacctgtctcttagctgt

SEQ ID NO: 362159 - DNA, 122 bp, Homo sapiens
gatccagaacaacattgctttgcgtctctatttaacgttagagcggatgactttttgacacgtttatagctgacgagttctatagccagtcatgcaggacgattacgtttgaactaatttga

SEQ ID NO: 362160 - DNA, 122 bp, Homo sapiens
gacttgccggggcaaacttcttaacatcgcacgctggtgtgacacatgaaccatggttaccgctctgctgcgagcagatggcacgccagttagccctggagacaagactggaagccaaacca

SEQ ID NO: 362161 - DNA, 122 bp, Homo sapiens
cgacacgcaggccccaacccccaccgagagtcttccttctccgcttcgcctctcggccagcgccaaccatatccagctcagagatgtccagcagctgccaagacaagcacagccctgcctta

SEQ ID NO: 362162 - DNA, 122 bp, Homo sapiens
gcagggcgccggccgcggcttcgcgaggctccagcagctcccccagcctctggcttcggccgcgctccctgctcgctcctcgcctaccagccccgcgcgcgccccagagaagttgtcaccag

SEQ ID NO: 362163 - DNA, 122 bp, Homo sapiens
ctccttctatccccagagctcaacataattcaaacacccagtgggtgttgagtgggggttcgctgactaattgactgagtgagtgaagccctgtgtcagcttccactgggatttcacaccta

SEQ ID NO: 362164 - DNA, 122 bp, Homo sapiens
gaaataagtcccagggccaatgtggcctccccacccagtgcttccgggggcgccaaaaaacgacctgcccagaccctcagcgtcgacgctgcgcacaagcgcagtcaactgctggacccggc

SEQ ID NO: 362165 - DNA, 122 bp, Homo sapiens
ccgtgttggtagcctgcgaaatatatacagcagcagcaccaacactgaaggtaacgcctccgcacctccacccgcccacacctccacctgcctcttcccctctcatcccctgcccgcccctt

SEQ ID NO: 362166 - DNA, 122 bp, Homo sapiens
ccctggggagggacgtggtgggcaagagttcccatttgctgacagccaacgcctttgccacgtttaaacaggagaactaaaggcttggagagttcaagtgatttgctcaaaatcacataggg

SEQ ID NO: 362167 - DNA, 122 bp, Homo sapiens
caggatgatccagatgacgatgagatttcccaaaactgccactgccaccaccacaccatacgccagggaccagagcgcgatgcgccaggacggctgcacgaactggttggtgaggttggccc

SEQ ID NO: 362168 - DNA, 122 bp, Homo sapiens
tgccctctgaaaagaatgcccacaccacttcctgccggaccctccgccgggacagggcagcgcagccagctcccactcacatgggcagtggccgagtctcagccgccgtgcatgaaggagcc

SEQ ID NO: 362169 - DNA, 122 bp, Homo sapiens
cagatggtcctctgaacatgcatatggaaatgaggcctctcccccaggaatcggggatgccgattgagagtgcttcctctgtctggatggcctttgggagatgagctcgcacctcacttggt

SEQ ID NO: 362170 - DNA, 122 bp, Homo sapiens
gtactagtgcaccagctgaggccggcagctggagactcctagcgccttggctggctgttgcggtgggggtgggggtggaggtggctgcctcagaatggcggccgaagctaagcccctccttc

SEQ ID NO: 362171 - DNA, 122 bp, Homo sapiens
aagggcacaaggacgctttgggggtgtcaggtatgatggccctcaggtcatggtttcacacgcgtgtgctttaaatgcgtgctggctgtcacgtgtcagtcgtgcctccacagagcttcagg

SEQ ID NO: 362172 - DNA, 122 bp, Homo sapiens
agagtcaggcagtgtctgtgagcacaagttaggaagtttctcggcatccgggagcgttcccgtctgatgtcccagtgttagtcctcccggccgccctcccctcctctcctccagggacggct

SEQ ID NO: 362173 - DNA, 122 bp, Homo sapiens
aggggccggcgccagaccccgctgcacgtcggagctcgcctggatccgggcgttggcagccgaagggccctggccccgggactctccgccgctagcccccgtcatatcttctccgctttcgc

SEQ ID NO: 362174 - DNA, 122 bp, Homo sapiens
ggaagactggagatggcctgagcctgcagctgccggcgcgcggacgcgtctggggcggttcgccttagccaagtggaaagagactccgcgccgcgggctacttaatagagggctgttcccag

SEQ ID NO: 362175 - DNA, 122 bp, Homo sapiens
aaccctcaccccacattctcccaccccgcaacgctgcagcgcacacaggacagagccgggcgtccaagtcccttcccgcgcccccgccgacagtctcgccgcgtccccgcccgggcgcccca

SEQ ID NO: 362176 - DNA, 122 bp, Homo sapiens
actgagctctgccccgaggactgcacaggctcatggagaagacagctcacatacaactgccgtgatggacctgtgacggctatgctagcctcacacaccaaggtaccataggggtctctcag

SEQ ID NO: 362177 - DNA, 122 bp, Homo sapiens
tgtaaataagtaatgccttagattgataaaagtcaatgctgggttgggtagaacatgtcacgcaccccacaggaagatgggttctgggtccaccaattctgttgttccaggaattgattcca

SEQ ID NO: 362178 - DNA, 122 bp, Homo sapiens
gaggccaaggtgggaggctcactttaggccaggagttcaagaccagcctaggaaatatagcgtcagagccattcagtgaccctatgtcgaatgggactgcgtaaaataaggctgagacctag

SEQ ID NO: 362179 - DNA, 122 bp, Homo sapiens
gccaaggagaccggaggcatggctcaaatgtggctcccacatgtgggcttaggtcaaagtcgacgggttagggaggacaggttggcacacagaagtgctggcgggcaggtttcaataggagg

SEQ ID NO: 362180 - DNA, 122 bp, Homo sapiens
ggatcatgttcaagaagtttgatgaaaaggaaagtgtgtccaactgcatccagttgaaaacgtcagttattaagggcattaagagccaactggtagagcaatttccaggtattgaaccatgg

SEQ ID NO: 362181 - DNA, 122 bp, Homo sapiens
tggggatctggagcgggccgggtcgcaagaagaccctgaccgtgctccggcgctggggcgcgtgctaagggcccgcggggtttcagctgtattttcgaacccctgtgcttggccgaggggtt

SEQ ID NO: 362182 - DNA, 122 bp, Homo sapiens
ctgggttgaggactctcccgctgctgagctttcccactcacacgcacacgcacacctgcgcgagctctcccaggagggcaccgcccccaaccagcggggtgcacaggggaatgatgttgcaa

SEQ ID NO: 362183 - DNA, 122 bp, Homo sapiens
aattcttcaagtactgaaaggaaaaccaccctgagtccctgctccctcattgattaattccgtcactcagtgggtgttctgacgtggtaggggtgagtgggtgcgcggagataccgtgagga

SEQ ID NO: 362184 - DNA, 122 bp, Homo sapiens
gccggaggcggccgggcggggacccaggctgcccggccgcagcgctcgccgtgaggacctcggaaaaccacggccctagatcagagggcgcgccacgctccccgaccctcgcgccatctcca

SEQ ID NO: 362185 - DNA, 122 bp, Homo sapiens
tctgtccgtggcagcgatgtcgggggtgaactcataggcagcagaggtgtacgcagcatccggtaggaccagcgaggagaggctgctatgagggagtcggggtgctgaggacaaagtgcctg

SEQ ID NO: 362186 - DNA, 122 bp, Homo sapiens
ttgctagccatgactgttggtgacattaatccacaaatactggctgggcgtggtgattcacgcctgtactgtaatcccaacactttgggaggctgaggagggtggatcacttgaggtcagga

SEQ ID NO: 362187 - DNA, 122 bp, Homo sapiens
agctctgtgccctgacgggctgtgcctcacctgtgtacctcccacctcaggatgtcattccgagacttcatgcgggagttcacccgcctggagatctgcaacctcacacccgacgccctcaa

SEQ ID NO: 362188 - DNA, 122 bp, Homo sapiens
cgagacaaagttcgctcccggtgaggctgcgcgcgtccaaagcgtgcgggatgcccagcacggaggtccccaagcgggggacccctggctcccccacaaaacccacccaaagccaccgctcg

SEQ ID NO: 362189 - DNA, 122 bp, Homo sapiens
tgagagccaatcatcttggcgaacactcggagaaacaggggactagttactgtctttatccgccatgttagattcaccccacagggatagcggcagagccggtagcggacggtccttgcatt

SEQ ID NO: 362190 - DNA, 122 bp, Homo sapiens
agtcactgttaatagttggaagtatcctttcctccttcctctttaacagtgcagtcaacccgcacttcttacgcttgaggcagatctggggaagtgttgcggtttgacctctgtgtgacccc

SEQ ID NO: 362191 - DNA, 122 bp, Homo sapiens
tctatgggctggtgaactaagtccgtggggttgaaatgacctaagccttggcaccatcgacgcgggactttcttggttcttgaagctgtttcaaggttctttcttgggccccttccctcggt

SEQ ID NO: 362192 - DNA, 122 bp, Homo sapiens
cattgcaatctagtatattgctgtaactgcacagtgacgttttgcaatgttcattttcaacggtttgaaccaacactggtcaagtctctgtaaagacgcaaggtcagtaagtttggagactt

SEQ ID NO: 362193 - DNA, 122 bp, Homo sapiens
cggcgtgcctcgcggaggccgctgaactcagaagcgggaggccggttccggttgcatcagcgagggattcacggcgaaatgagactgttcgtgagtgatggcgtcccgggttgcttgccggt

SEQ ID NO: 362194 - DNA, 122 bp, Homo sapiens
gtcttatggaccatcctgattatccattttcagatgaatattagcatagagggtgttgcacgacatctagcagaaggccctgtgtgtggatggtgatgcagaggatgtctctatgctggtga

SEQ ID NO: 362195 - DNA, 122 bp, Homo sapiens
tttaagttgtgactcttaaacaagttacacgttttgaaggaggtgaaaaaacaaagatggcgggtttgaggagcctttctgggatcctgttgaatatcgagtcctgagatttgcaaatagct

SEQ ID NO: 362196 - DNA, 122 bp, Homo sapiens
tctggaaccacaccccaggttcccaccccacatgactcttccatctcctgacagcatcctcgggaccttctccaggggacagctcaggaagcagaggacccaacactcgctgcttgaacaag

SEQ ID NO: 362197 - DNA, 122 bp, Homo sapiens
agattggcatctaagccatacaaaaaagctgtctcagacaggttgggccagtaagcacaacgtcacttatctatattggcttctggttacctaatgggtttggtttggtaaaaattaagaat

SEQ ID NO: 362198 - DNA, 122 bp, Homo sapiens
aaatgcaccgctcgctctcacacaaaatattgctttatgcaaagcagcgccggggcctcgcgccagccgattggatgctccctctccccgcctggtgcaattggtccgtttgtttgaatatg

SEQ ID NO: 362199 - DNA, 122 bp, Homo sapiens
gcttgaataagtaagatggttatttcctgtggctaggtggtagagatgtaggatgttagacgatgtgttataaaacttgatgaactgtgcttcaaataattgaatggcattttacaaacttg

SEQ ID NO: 362200 - DNA, 122 bp, Homo sapiens
gcggcgcagagcaggtgccggggagcccttcgcatgcggctgccgggccggaggtggtagcggcgccgggcgcgctccgcccgcccctcctccgggccgcactgaggctcgggcgcgcgggg

SEQ ID NO: 362201 - DNA, 122 bp, Homo sapiens
tctgttccccacgaccaggccatgtggggcctcggggaccccgaatgcctcgtgctgcggcggaggccttggagtgagtgccggttccatggtctgctctgccgcagccacgacgctgggcg

SEQ ID NO: 362202 - DNA, 122 bp, Homo sapiens
agatctgcagcttcaccttctccccgttgatctccacggtccggatcttgaaatccactccgatcgtggtgatgtagctgcctgcacacacagggcagttaacgaggcccagcgcggtatct

SEQ ID NO: 362203 - DNA, 122 bp, Homo sapiens
gcccagggccaggtgtgatctcatgctaacctacaacacgagggaagccttgaaaggccacgggcatctgataccctccatatcaggcttccaacagttttccaaaaagctttgcattcccc

SEQ ID NO: 362204 - DNA, 122 bp, Homo sapiens
ctgtggtatccagtgctttgtctttgcctctcttcgttttttgttttgtttttttccttgcgccttagccggtcatttgtgtgatgtttacattcagcagagaggtatttagagcatttttg

SEQ ID NO: 362205 - DNA, 122 bp, Homo sapiens
attggaggcgatacaagtgaaggtgccactgtccctcaaggtggtgatggtcacatccagcgtcccgtccccccggacccgggtccggctggagttccccagcagccgcccatcaggtgcca

SEQ ID NO: 362206 - DNA, 122 bp, Homo sapiens
ctcctcacccctccctccggctgcacgaataatgacaacagccgcccctcccacctttggcgtcacgttcaaaacaatcctttgactacaactcccagaaggccgagcggcttagcgagtgc

SEQ ID NO: 362207 - DNA, 122 bp, Homo sapiens
tgttccagtcagagctgtcttggctttcggaacagggctgccccattacatgagtgggcacgtcgctcgctctctgggaggaggaaaaagtctcctccaagcccgggaacgtgcgccaatcc

SEQ ID NO: 362208 - DNA, 122 bp, Homo sapiens
cttatactctggtgagcttgcagagaggtttctctacacctggcatgaccctgccccgtccgagctttgcatggttgttatagccctgagggctcagacatgggctgccaccactggatagg

SEQ ID NO: 362209 - DNA, 122 bp, Homo sapiens
agaagcaactaaaagttaacaccggaacagtcaactcgattaacagcctgccaaaagatccgatcatttcaaattgaatttccaattagaatattcacaccatagaaacacttctgagataa

SEQ ID NO: 362210 - DNA, 122 bp, Homo sapiens
tcgaccaccatcatggtgcccttcggcctgatctttatcgtcttcgccgtccacttctaccgctcactggttagccataagactgaccgacagttccaggagctcaacgagctggcggagtt

SEQ ID NO: 362211 - DNA, 122 bp, Homo sapiens
ccgcggccccggcccgcctcctgggcagccaggccccccggccactcggccggcagcccgcggcccaggtctgcaagtgggagctgggctggggtccccatgctccacacacgcgtctcctc

SEQ ID NO: 362212 - DNA, 122 bp, Homo sapiens
gtggcggctctctgtggcctcttcctgcctctgtccccggaggagcagggttttggggtgcgcgctcggttctctagggagcctcggggctgggcgggaggctcagtctagccggccgccgg

SEQ ID NO: 362213 - DNA, 122 bp, Homo sapiens
ttccaggaagtcgctgctacgctcacttgtaagtcttcgtgctgttgtaaaaattgaggtcgtggttttccacgcgatttggctggcgaagagaccacgaagccaccccccacgttttcaac

SEQ ID NO: 362214 - DNA, 122 bp, Homo sapiens
ccttcctggagcccagatggcgggtcaggggccagaggggaattcctaggctggagttcccgggaagggggtttccactgtgagatgggtctcatgacacctggtcctagggggaagcagga

SEQ ID NO: 362215 - DNA, 122 bp, Homo sapiens
aaacgtcccacaacccacaggacgggccccatcacgaggggtgcactggcctccaatgtccgtagtcccaagagacgcgaagacgcacgtccgcgcaagaacttgtacacaaatgtgcatag

SEQ ID NO: 362216 - DNA, 122 bp, Homo sapiens
ctgcaccacccagggcagcacgcagccggcgcagaagacgtggccgcacggcgtggtcagcgggtcctccaggaccttgtggcacagcgcgcacttcaggtccgggtccacgtcgccgtcga

SEQ ID NO: 362217 - DNA, 122 bp, Homo sapiens
gggcgggggcaagaggaaagctaatacctctaatattgtctgccagtcagaaggccacaccgggattggaaagggaagggttcccgggccttctccacccttgtgcccaggaaaccaaacct

SEQ ID NO: 362218 - DNA, 122 bp, Homo sapiens
cctgtgattggccatgacgcgtgccagagctgcccagtcgcggaagagcagctgttttggcgtctgtttgctgcggtaggaacatggcggatcggctcacgcagcttcaggacgctgtgaat

SEQ ID NO: 362219 - DNA, 122 bp, Homo sapiens
caggagacccgctctctagagcggcgagggcaggggttgctagggcgccggggtcgaacccgcgcttcctgcaagtcttagggccgcatccctgccgaggcgggcgttgggaagggtgggag

SEQ ID NO: 362220 - DNA, 122 bp, Homo sapiens
tgaagtaaggacgggacggaagaaattctgccttagttgccaaaactttctctggatttacggaacgcctttgattgttagtgctttttattggagagaaagatttattgctcccagatctt

SEQ ID NO: 362221 - DNA, 122 bp, Homo sapiens
gtatttggtaaacctgtataccaaggctccttctctctccgaggttttgctattcttgatcgagggcctatttggtgccaggcctcgtgtcctgaacatacagcagtgcacatgtgtcacat

SEQ ID NO: 362222 - DNA, 122 bp, Homo sapiens
gagtgaaagggggactccgggcgcggtcgggtgcacttactgtgctaagacagcaaggcccggcggaggtggcaatggcagacctggtttctcggcggagtcccagtgggaggcccggtgtc

SEQ ID NO: 362223 - DNA, 122 bp, Homo sapiens
ttgttacctccctgttcccctcccagagactgggctcggcatcctcaaacagtcaggtatcgtctgtaactcaaggaggatggtaggacccatcaataatgagatgccaccaaactcactcc

SEQ ID NO: 362224 - DNA, 122 bp, Homo sapiens
taccgcccccatcttcccccatgggaagatgagcactgagggcagattaccctcctgcagcgcgtgtgtgaaaggggagttgagagtgctgacgagcgcggcgctcactagtcgggacggcc

SEQ ID NO: 362225 - DNA, 122 bp, Homo sapiens
aattctggcccccatctgaatgctcaccgtgtgctttcgacacagcttccactttcacgccgcgtaacacggtgagggagaaaccgccgccttcataccattgatatggagaccaaagccag

SEQ ID NO: 362226 - DNA, 122 bp, Homo sapiens
aaattgggcaattatgagcactggggtaaaccagagcccctgctgctgtgacaggccccgcggccagcctgcgtgtgccccggcgtgggatgccgagtgggtctgtggaagagaggcaggca

SEQ ID NO: 362227 - DNA, 122 bp, Homo sapiens
tgggcgtccagggctgcgttttttctcggttctctagccattctgacccaaggcagtactcgggtctcactctagttgcgacctgtatatcttcagaggattctggaagggtggtaaatttt

SEQ ID NO: 362228 - DNA, 122 bp, Homo sapiens
ctgtgtgtttcagctgttacaatatcccgtccagagtttctttcagtgggtttctgatctcgcaagctcagaactgaatctggagaccttcgcggtgttacagatcttaagacagcacgtac

SEQ ID NO: 362229 - DNA, 122 bp, Homo sapiens
accacttcctgctgccggaagagactgctctgcctcccttcccctgcagctgcacctgcccgtcataggcctgaggggggcagccccctcggagtgaggtcttagctaccctgggggcaagt

SEQ ID NO: 362230 - DNA, 122 bp, Homo sapiens
aagtggagggtgacaaaaataagtaagaaagcccctgccctttttacagaccgtgatacccggcagagaagccacatgacttcagccttcagcttcaaaattctgagctaccactacatact

SEQ ID NO: 362231 - DNA, 122 bp, Homo sapiens
tggaacagctctctcctccacattagtgagactcacctgataagcgcagccgcaccatgccgggtaatatcctgtccccttgccggatactggttgtccctgccctggcttcattgtcctct

SEQ ID NO: 362232 - DNA, 122 bp, Homo sapiens
attgggcgcctcctgagctccgacacatcagaagagaggtggagggaattttgacaaccacggaagttaggtggagcaacgtttgcaaaacatcaggagagtgtgggctgaattcacacagg

SEQ ID NO: 362233 - DNA, 122 bp, Homo sapiens
tgggtagaggaggcagcgtgaccgccaggctgggtaagagcccggggcttgggtggtgaccgtcccaggggtggcgatcccgagctccagcgcggaggcatgccaagggcagaggggtaacc

SEQ ID NO: 362234 - DNA, 122 bp, Homo sapiens
gcatatatacaggacggattcgtataggcttgcaccctggttccgaattttgcaaatattcgcagtctgggtcactgtcatccggactgggaatccccaagacccgttaagggaggataggt

SEQ ID NO: 362235 - DNA, 122 bp, Homo sapiens
gggtgggtctcccgtggagcgttgtctcccgagaggtctgcaggtcggccagcccaacctcgtcgtctgtggccactccgaggtgttgccagccgccctggctgtctacatgcaaaccccaa

SEQ ID NO: 362236 - DNA, 122 bp, Homo sapiens
gacacccccaaaggagaacgttcttccaggctcctctctgctcttaacagccacaaggaccggtgagttggagggaagaggaggcaaggatgaggctcggaaagagatggagagtggaagcc

SEQ ID NO: 362237 - DNA, 122 bp, Homo sapiens
gtatcctgggttgggggctgcagatccacggaagctagtggaggaggtgtcctctcccagcgaagctggccacaaagaggggcagggaggcgaggaggctggtgagctgctgtggggaagcg

SEQ ID NO: 362238 - DNA, 122 bp, Homo sapiens
catgttttttatctttagttagtgggagagatcatgagattctagaaatggaagtggctgcggtgtggggcatttggtagtttattacttagtatggctgagtggcagcctccagccctggt

SEQ ID NO: 362239 - DNA, 122 bp, Homo sapiens
ggactccagccggggacgcggcttgcggggcactgggaattctgggcaccgcgacgcgggcgctggctatgtgcagagacttacagttggcaggtccggatttggagaggagagtgccagtc

SEQ ID NO: 362240 - DNA, 122 bp, Homo sapiens
ctgtctggatgcccccagacgccttgcctgagcgccgtcacgctttctgccctttggatacgaagatatccgaatgctgtgcccatgattaagcagacgcttagtaaggaaagaaaacattg
